United States Patent Application Publication US 2005/0228172 A9 - sequence listing, part 58

SEQ ID NO: 245324 - DNA, 573 bp, Homo sapiens
ttttttaagaatactaaaacacagtgttggcaaagatacaggaatacgtgtactctcgtacactgctattaggcaagtagcaaccaggggaaggattaaaaaatgataggaattacagcttacttttaacccatttagccctcacctccactccttaaggtaaaggaaacttcaagtcagggaaattaagttgccagagccacagagctgatgagcggctgagccaggcttttgagctaagcccagttggctccaggacccgagccactgtattgattatctgccgccacgtaacacatacctccagatttagcagattgggatcctatgtttattatctcacagtttctgcgggttgggactccaggggtgacttagccagatcctctggctcraggtctgtcatgagggtgtaatggagctgtcagctggggctgtggtctcatatgatggctcaacttggcggttggacgatctactggcagtcccacttacggggttgtggctggattcagttccttggatgctgtcagccagaagccactctcagttccttgatacgtggacctcttc

SEQ ID NO: 245325 - DNA, 400 bp, Homo sapiens
attcattccttgaaatatactgctatgaaatgaacaaaccatatgggaccaagcatagattcatcatatatatatgtgtgtgtatatatatatacacttcatcatatatatatgtgtatatatatacatcatcatatatgtatatatatgtgtatatatatacacatcatcatatatgtatatatatgtgtgtgtgtatatatacatcatcatatatatatacatcatcatatatatatatatwttttttttttgagatggaatctctctctgtcacctaggctggagtgcagtggcatgatctcggctcactgcaacctccgccttccaggttcaagcgattctcctgcctcagcctcccgatagctgggattacaggcgtgcaccatcacacccagct

SEQ ID NO: 245326 - DNA, 603 bp, Homo sapiens
tgctactctctaacaagagctgtatttgaaaacagatagatcaagccaagcttttgggaaataaaatttattttagcccaaaggttctagaaagactcagagaaaagttcrgagggcaaatcatcccttgggtgggtctggggctacaagaccctgggcttggtgctcctccaactgagcctcagaatgcatagaatgagactatgccaggctcatctgaactccatgttgtctggttccccagtgggaaatttgtcatgtccagacccaggggagtgtggccgtgatctgtactaaaggctgaagttccaccataagttttatccatgtttctagcccattacatttttacagagaacgctaatggacatagcagcaaactgaaggtggacataaatccagccaccatgtgggaagggaaaaaagggagtaactcaaacctgctgggcctcttcccaatagttagaagactctaaaataagccaagccctgtgtggggcattggggaaaggaactgtattatctatttgctgcatgacaaaataccccaaaacttagaagcttaagacaacaaacatttattatcttacagtacctgtgggt

SEQ ID NO: 245327 - DNA, 603 bp, Homo sapiens
tgctactctctaacaagagctgtatttgaaaacagatagatcaagccaagcttttgggaaataaaatttattttagcccaaaggttctagaaagactcagagaaaagttcagagggcaaatcatcccttgggtgggtctggggctacaagaccctgggcttggtgctcctccaactgagcctcagaatgcatagaatgagactatgccaggctcatctgaactccatgttgtctggttccccagtgggaaatttgtcatgtccagacccaggggagtgtggccrtgatctgtactaaaggctgaagttccaccataagttttatccatgtttctagcccattacatttttacagagaacgctaatggacatagcagcaaactgaaggtggacataaatccagccaccatgtgggaagggaaaaaagggagtaactcaaacctgctgggcctcttcccaatagttagaagactctaaaataagccaagccctgtgtggggcattggggaaaggaactgtattatctatttgctgcatgacaaaataccccaaaacttagaagcttaagacaacaaacatttattatcttacagtacctgtgggt

SEQ ID NO: 245328 - DNA, 553 bp, Homo sapiens
ctaaatctaatgactggtgtccttcttttttcttttcttttctttcttttttttttgagacaaggtttctctctgtcacccaggctggagttcagtggtgtgatcatagctcagtgcagcctcaacctcctggactcaagctatcctcccatctcagtctcctgagtagctgggatacaggcgtgtgacgccatgcctggctaattttgtctgtttttagcagagacggggtttcaccatgttgcccaggctggtctcaaactcccgagttcaagcaatcctcccaccttggcctcccaaagtgctgggattataggcatgagccaccgtgctctgcccctgatgtctttataagagaaaggagagggagatttgagaaccacagygaagatggcctatgaaggcagagatcagagtgatgctgccacatgaaggagcacccgggatcaccagaaactggaagaggcaaggaagaaccctccccttgagcctttggaggcgtgagtccctgctgacaccttgattgcggacttctggtttacagaactgaaat

SEQ ID NO: 245329 - DNA, 571 bp, Homo sapiens
caatagccacgttacaccagctcaaaaataaaggattataactggaggaaaaaggaaaaccttattttgtaaatgaccatggacattgtgaaatggatggtcatacagaggaaaatcaaataaactacctctttcagtaggaagtgctctgaagaagaagcatctcaaactcttctctgaccaacctccttgatgagataaagtttgtggttgggtttagttgaaagagtgagtaagctggtttcctttacaggaatttcctgtaaagaatattaactttcaactcaatttctcaactgtgggttttggttttcttcttgtaaaactaatctctaaaagtgtgacctttgagataaacactaaagcctattttgtgattaactttctaattttgwaaaagaaaaattatgtctccaacaccaattttataaagcaataatttattaatacataaaggaaaatacatttaaagtctaaagttacttgagtttttatgttcctattgagagatagtctcagaatataacatataattgaaaactccattgttcctttgatagagcaactgaaa

SEQ ID NO: 245330 - DNA, 620 bp, Homo sapiens
ctcaataactccccccttacccaagagaattaacaaacatatccacaaaacacttgtaaaagaatgttcataaatgccatactcataataccaaaaattaaacataatccaaatgtctatcaacaggagaatggatcctttttttaatgtaaactactcagcaatgaaaaggaaggaaatactgatataaccataggatgactgtcaaaaacatcatgttatgtaactctgagttcrtttccaaacaaaaaaataataaagccttgctcctgaaaaattatgctaagcaaaagaaactaaacacagaagactacatattacatatcatacctataggaagcccaacaataggcaaattataatctatcatgctggaaactagagagtatgtggaaatttgattggaaaggtgtgagggcaactctctgggaagaagaaatgctttctgtgctgttgggatggtgatatggatgatgatacatgggggatatgattgctgaatctcattcaactgaatatgtaagattgatgcttttaattgaatattagttgtttctcaacaagtaaagtaaaagaaaagagtagaaaatcatattctctcattatgtaataagaagaga

SEQ ID NO: 245331 - DNA, 572 bp, Homo sapiens
ctacaacaccaactcttatctgaatttccagtctgccagcctgccttgtagcttttagactgccaggccccacaatctcatgagtcagttccttaaaatagatagagagagtatagatagattaggtagatacatagatacatagatagataatctcctattagctctgtctctctggagaattctaagacagcacatatcaatgacaagactartcagactagagttgtttgacttcggactgttttaaatgtaactatagcgaaccgcacaataatgtttttaccttgaccacttaagaatgatttaattttcctcttaatctccatcatctcaaatttgctatgtattgctgatatctctgtgaaacagtttcacttgtgttttctacaatttcctttgcttggaagatgcaaagaggggtggatttatgattccttggtgattttggtaagtttgagagagagattgggtcatccaccaccactgtgcttcctccagtaaattcatgtttgcagccttaaatgtagatgcatctagtaattactcggaccataaaatatcaggagggt

SEQ ID NO: 245332 - DNA, 540 bp, Homo sapiens
ctcaacacaaatattttataaattaataacagaaaagacaacaatctaaactttaaaatatgcaaaagatataaactaaattcaaaaaggaaggacagagattttcaataaactaattaaratattatacatcaaaagaaataaaaatgctaattaaaaccaataaatgtgccatttttacttatgaagcttggaggtttaaaaaaattataataataatacccagatatttggagagataataagtatataaatcggtgcaacctttttagacgataatttggaaatctgcatcaaaataccccttaactcagcaatttctcttctactaatacagttgagataatcatggatattcaaaaatatttatctgctcattcacaacattgtaacaatagcaggaaaaaacgaaatataaaaaataaagtattaattaatatatggtatttttaaataataaaatactttgtagtcatccaaaatgatgtagactaataatatttaaataaatagaaaatgtttgtgatatactttgtttag

SEQ ID NO: 245333 - DNA, 581 bp, Homo sapiens
acgccaaaatattgcaaatttgatgaaaagtataaaaccctgaagtacccagaaactcaaacactaaaaatagtgataaagaaaaactcttaaaagtgagaaaagaaaaaaccatgttactatagaggaactagggagagggtgacatcagatttctcatcagaaacaatgcaagcagaataaaatctttaaatgactgaaagaaaaagtcaccttagaattttttacttaataaaaatattgttcaaaagtgaagacgaaataaaaactttttcaggcatacaacagctgaagcaatttgtcagtaacagacaagtactacaagacatgtgaaaggaacgtcctccaagtagaaagaactgataccagacagagatctgatccacaggaagggatgcagagcaccagaaatggcatctatggggtaaataaaaagacttttatttcttattgtttaaattatttaaaagataattgattgttcgaagcraaagtaatgacaatataatgtgggttttataataggggtgtagaagcaacatgtatgacagcaacagcacaaagaccagagaagagaaatg

SEQ ID NO: 245334 - DNA, 551 bp, Homo sapiens
atacgtggtgaaacctatttcactggggattcaatccaaattttaggaaaataataaaaactcaaaaacaattaatggtcagggctgcgatctaataacaggtatgctataatcttccttggaaacataattttactctctccagtttcccatttctaccaaagataaatcttactaggatcaatttacttgtaaaataagatatagtattatacttggtctgattatttgcataaagtgcaataagaatcatgattagacctataggctgttttaagtwggctttgctggaactttcacagggcattttggattacacttttaaaagcctcgaggttaggaagccaagccaagaatttgccaccaggatgtacctgtgatacctgtacaaattgggtaaattcctctcttcttgaggttccaacatgtcttgaggaccctagagctgtcagaaaatggtattctttacttactgcaaaattagaaaccttaaaaaggaaccatgtacataagttactatgccatccttttcaagaggcttttgattggtt

SEQ ID NO: 245335 - DNA, 593 bp, Homo sapiens
caatttacttgtaaaataagatatagtattatacttggtctgattatttgcataaagtgcaataagaatcatgattagacctataggctgttttaagttggctttgctggaactttcacagggcattttggattacacttttaaaagcctcgaggttaggaagccaagccaagaatttgccaccaggatgtacctgtgatacctgtacaaattgggtaaattcctctcttcttgaggttccaacatgtcttgaggaccctagagctgtcagaaaatggyattctttacttactgcaaaattagaaaccttaaaaaggaaccatgtacataagttactatgccatccttttcaagaggcttttgattggttctataaagtcaatttcaattcttcaaagcagtctggttatatctgaaaatatgccattccagtcaaagccttggtaaaataatcagtgtctccaattgtgtcctgttacagaaaacagattcttattaaacttatgcaaataactacattgccaataaaataaaaatgctcacatatagtttccaaattttggagaaatcaggtggagagaaaggcaaatgct

SEQ ID NO: 245336 - DNA, 602 bp, Homo sapiens
ggaatcccccaggtggttctgagggcatccctttccctcattgtctagagcaggttttctcagcctcagaactattgacattggggcctggcacttctttgttgtgggcggcagctgttctgcacattgtgggatatgtaacaggacccgacctccatgaaactgatctccagttgccaaatgtcatcatgtcccctggagcatgattagctgaaaagaactaatgatagacagtagaattatgagcaggataagggagaagggtcttagattgccaggcaaggagttgactttttaaatgcaaatgacattcttctcaataaattttggatactttttaataggcaatgggatattagctttgtgtaggaatgtacattttaggaaaagagtgctcagagatggttaaacaggcacakacaatattagagaagaatatacaaatagcaaatcaactagggtgcagttagaagcttaaaggcataaatgtgattattttgttgtggccccaacataagagaaaataaagatgcaggaaatatttctttattcttttgtaatgagtgaccctaccagagggacactacccagaaattgaactt

SEQ ID NO: 245337 - DNA, 612 bp, Homo sapiens
atcttttattgccttatgttgaaatcttttctacttatttcttaattgagttattttcaagattcatgtcttacttatgtttgaaaccttagacttcaaaccagtttattgatctcaactcaaaaatactttttaaacacaatatggatatattactagggatgtttataagcttattcttcagtcagatttcaataatctgtttgaaaattggcataaagaaatttaaagcccagagattttaaaaarcgtttataagtagagcctctattgagatatgcagagcagaaagggtgccctcaagtggcttacactaaattttattgttcaaaatattctagaatgttaccctttgtggcccctgtctgttttacttaaatctattatagcatcagtgatctaaatatttttctgagcttttagaccttcaacggtttctttttgaacttccacaatgggttcttatgattcttctttatctcctatgatattttctcattagttttattttccccccttttaaaaggaagggtttattagtgaactcagcagttacaagccaagggggtgaaaaagtcaactctctattcaagagcaactaggagtaaacaa

SEQ ID NO: 245338 - DNA, 481 bp, Homo sapiens
ctatttgtttttaatggcttataaggaatcctgagcatccctctcactctcttttcctcctcagagccagtcctagacagcccgcttcccctccgcaggcccctgccctaggccctcttagcctaaattgtcggccccagaaaagtgcctgcagcctccaagatgctcatctccaagaggaggccgtacgccatcctgtgccaacctggtcagaccgctcgtgtgcaactgtgaccaagtccctggacttaccatgcctcaagttcctgggtttggaatacgtggggcctaaggcttctcactgctttgagaagatatagctctaatgagtaaatgcttctaggacatgacagacatgtaagargtgtttcttcacgtgccctagaaaggtagttgtgctgattctctaaaatagacttcacagtttaagggcatctgaaccatggaaaagaaagctgttttatacctgaaaagttatttg

SEQ ID NO: 245339 - DNA, 503 bp, Homo sapiens
caggcaagacttccggttcgtctctacctggcttgactgtttttgcaggcattaagtaaagaaggttcttccagaaccttgagttataagaaagagatttatcggccttccacttcagaactctgtgagatttcaaaagctttagtgattggggcaagaatgtgaagtcagtaacaggtgtaaattcaattaagattattttaatttttctttccaccaatgcttcatggagtccactttcaagttcatacctgacctcattagacatataacttttacttaggacaatgattagtcttcggcttttctctatcagtgagtggatttcatcaacaacagctgaaaatgcaagataacccctattaatttaagataactgaaagggggaacatgagataaaagtcattttgcacagtcttattttataytaactcctaacctcactaataagtttttctttaagacaaaccatttgttcttaattttatatgcttattaaaaaa

SEQ ID NO: 245340 - DNA, 452 bp, Homo sapiens
agctcattcattttttaaaaagaaactatcttgaatatttttctatctggcattccctcttacctcctccaggcactacatccctttcaaatatgcataacttatacccaaaatgtttctccaacaccctgggcaaaatctccacagcaaaggtgtgctcctctccattttcaggtcggcattcttttaggtaagacacaaaagcatcatatgtttttccatctaggaggtaagattgrctcttttaattcatgtgtaaataaaattttatttaagtacaaacttaagtgaatgtcgtaagtaatgagtatagaatcattgaaaaaacaaattatatataaagttgtttatatttaaacctcccatgctaaccaagcaaccaattagccaatgtgtttttaagcatctactttaagatcccactgcttgacaccacagaagaatacagagat

SEQ ID NO: 245341 - DNA, 592 bp, Homo sapiens
atataaatatgctaattttattacaatatattttaaattcaggttttaaaaggtttaggggacttgasaattgacagagtaaagtattcaaaaaaaggaatttgaaaactaatggtaatgtttttattctctatattcaaacataaaggaaaattataaaggaaattataattcaagtggatatttgggacttcaaggagtaagttaaacaaatgttcctcaaactatgcttggtgaatgaccatgttttaatttaaatttgcctttttttgttgttgtttattgattagtttcatttccaatccttcagaaaccaatactgaacactttcttagatattgcagcagtattaaattgtgataaaagtttttatcttcatacttatatctccatttctgtccttttcgtggactgcatttgttcatggaccataatttaatggaagtgatttagagcatgtctctaaatgtctctgcactgccatattgacagttaagaagtgtgaattgaaaaaattaccgcaaatcatgtcaaacacaactggagaaggaaaaaagaaatcttagctccagaaagtcagaaagagaggagc

SEQ ID NO: 245342 - DNA, 645 bp, Homo sapiens
tggtgattatctgacctttcagattactgcatatttgagttgctgaacaaaggacaagagggctgtgaaatacattttgaaaagaaagggttactcacttcatttggaaaaagtaagatcctgtgtcattcaactcaactggccaaaactccaaaacacaatcatgcaaagcaattctcgaggaactccttgggttcagctccacatgttcctgtgatccactgcttttgtaccagcttttggtggttgtttcaatctcatgtgcaagtgaacacgagcaatgtttcagatagaaaggttccccttcaaccacagtaatgtggggacgtgaagtacaagattcttcaraagattagtaaagtaaaataaataaaaacaaaaaccaaaatgacaaggtaactttttttggtctcctaatgcattaggtgaagaagcaaggttagcaagaaagtcctgagaaatctcggtgtcaatttcctgtgggttctttatttttgcgtcaatctttccaacactagaaaggataaggcactttcagaacatagatgaaaacacaacttctgacagtttctccccaacaggaaggtatcagaacttaaccaaccatagctagaagactgataattgtgtcacctcttagaagaa

SEQ ID NO: 245343 - DNA, 635 bp, Homo sapiens
gtgtgatacatgtgtatatgtgggtgtcagcttcaattgacatgcaaaaccctggtgagtcattaacagttcatttattttcctgttttagagttaatataataaaatgcataggctatacaatatgtgctcctttatgtctgggttattttgacatgattgttataaatgcattcatgctgtagcagtgatgtgttcttttctcattgtaatgtagtatctaatcgtgttaccatttcgcaatttatccattttataaaaggatgcatgttggggatttggtttattaaacaaatgtctgttggatattggcttatttctaggttttcaggttttcgcttgtcttaaaaagcttctataaacacatatgactgtgtttggatggacatgtgctctctggaagtattaccatttgaagaaacttaatgtgaattacacactctccagaggtgggaggttgataattgaaastccacaccacccccctcctcaggcagctagaagctttggatatctaatcatggtttaccattagaggctttgttgattaccataatgcttgttggaaatggtccttgatgggataaataagtggaattcaaggtttgtggagttccaagtgccaaaataggcac

SEQ ID NO: 245344 - DNA, 596 bp, Homo sapiens
gacttgtaaatcataagatcagatggttgctaagatcctcccagctctaccatcccgcaatttatgtctaaatgtccaagcctatagcaaattagttaccacgatgcccagcagtctccagcactcaggaatktccgccaaccttgagatgacagatactgcctactgatgcacccacccaccaactggcctcagacctccagctgcctggggctgattgcaggctgcagctatcactctgggacagtgtttctcaaatcatcttgattataagaatcacccgaaacccttattacaaatgcagatttttgggcttcctgaggacttattaaatcagattctcaaggagaagaacaatggaacctacattataaacaagtgtcagagccaccacgctcatctgggagacacttttgggaaaccctgctcagggataagcatagagcttggggaggtgggttagtgctgagttacagtagctgttgccagcattgtaggcaactgaccaacatgagcccaagaccattctggaagtctcatttatgtgggacaacacacccacactgtgtggcttgcttgttaatatctaccttttg

SEQ ID NO: 245345 - DNA, 428 bp, Homo sapiens
actgtaagggttgatattaaacagaaagaggcactgataggaatgtggtctggtgatgcttattttacagcggtggagtattgaaaaactccaaaaatttgtctccaatattgctttgccctgaaaaaactgtcatacgtaaaggggctattacatctacgtctgtagatcgacttgtgctaaggagaccccaatcctttgtagattgataagctatgattgtgaaatctttcccttaaataagcttttataaaatttaaaataacttggaaaacacatttttagaatgaagtgacttactcaaggccattgatgatgttgaaagtattgcaaacaaagattaaaaaccactcgacaacatttatgtacaccatagtataccatcacaaagcctctcattaractttgaatccaatgagtattactaa

SEQ ID NO: 245346 - DNA, 604 bp, Homo sapiens
gcctaccacactttgtttatccattcatcccttaatgggcatctgggttgcttctagctattgactattttgaataatgctgctatcrgtgtccaagtatttgtttgagttcctgaccaatcaattttgaattgcaatgtctcctctcccaatccccatctccttaacctgctccaatctttttctaaggcattcatcacttctaacattctacttatgcatcatgtttattattttctgttttatccattggaatatgacctccagaaggcaatattatttttgtgagttttgtctattgatatagctcatgtgcctggaagagcaccaagtaggtgctcagaaatgtttacttattatcattattattattatttctgaggcaaggtctcactctttcacccaggatggagtgcagtggtgtgatcatggctcactgcagtctccacctcccaggctcaggtgatcctcccacctcagcctccagaatagctgggactacatgcacacatcaccatgcccagctaatttttgtatttttcgtagagatggggtttcaccatattgccaaagctggtctcaaacatctgggctcaagagatcc

SEQ ID NO: 245347 - DNA, 604 bp, Homo sapiens
gcctaccacactttgtttatccattcatcccttaatgggcatctgggttgcttctagctattgactattttgaataatgctgctatcggtgtccaagtatttgtttgagttcctgaccaatcaattttgaattgcaatgtctcctctcccaatccccatctccttaacctgctccaatctttttctaaggcattcatcacttctaacattctacttatgcatcatgtttattattttctgttttatccattggaatatgacctccagaaggcaakattatttttgtgagttttgtctattgatatagctcatgtgcctggaagagcaccaagtaggtgctcagaaatgtttacttattatcattattattattatttctgaggcaaggtctcactctttcacccaggatggagtgcagtggtgtgatcatggctcactgcagtctccacctcccaggctcaggtgatcctcccacctcagcctccagaatagctgggactacatgcacacatcaccatgcccagctaatttttgtatttttcgtagagatggggtttcaccatattgccaaagctggtctcaaacatctgggctcaagagatcc

SEQ ID NO: 245348 - DNA, 604 bp, Homo sapiens
gcctaccacactttgtttatccattcatcccttaatgggcatctgggttgcttctagctattgactattttgaataatgctgctatcggtgtccaagtatttgtttgagttcctgaccaatcaattttgaattgcaatgtctcctctcccaatccccatctccttaacctgctccaatctttttctaaggcattcatcacttctaacattctacttatgcatcatgtttattattttctgttttatccattggaatatgacctccagaaggcaatattatttttgtgagttttgtctattgatatagctcatgtgcctggaagagcaccaagtaggtgctcagaaatgtttacttattatcattattattattatttctgaggcaaggtctcactctttcacccaggatggagtgcagtggtgtgatcatggctcaytgcagtctccacctcccaggctcaggtgatcctcccacctcagcctccagaatagctgggactacatgcacacatcaccatgcccagctaatttttgtatttttcgtagagatggggtttcaccatattgccaaagctggtctcaaacatctgggctcaagagatcc

SEQ ID NO: 245349 - DNA, 571 bp, Homo sapiens
caatagccacgttacaccagctcaaaaataaaggattataactggaggaaaaaggaaaaccttattttgtaaatgaccatggacattgtgaaatggatggtcatacagaggaaaatcarataaactacctctttcagtaggaagtgctctgaagaagaagcatctcaaactcttctctgaccaacctccttgatgagataaagtttgtggttgggtttagttgaaagagtgagtaagctggtttcctttacaggaatttcctgtaaagaatattaactttcaactcaatttctcaactgtgggttttggttttcttcttgtaaaactaatctctaaaagtgtgacctttgagataaacactaaagcctattttgtgattaactttctaattttgaaaaagaaaaattatgtctccaacaccaattttataaagcaataatttattaatacataaaggaaaatacatttaaagtctaaagttacttgagtttttatgttcctattgagagatagtctcagaatataacatataattgaaaactccattgttcctttgatagagcaactgaaa

SEQ ID NO: 245350 - DNA, 571 bp, Homo sapiens
caatagccacgttacaccagctcaaaaataaaggattataactggaggaaaaaggaaaaccttattttgtaaatgaccatggacattgtgaaatggatggtcatacagaggaaaatcaaataaactacctctttcagtaggaagtgctctgaagaagaagcatctcaaactcttctctgaccaacctccttgaygagataaagtttgtggttgggtttagttgaaagagtgagtaagctggtttcctttacaggaatttcctgtaaagaatattaactttcaactcaatttctcaactgtgggttttggttttcttcttgtaaaactaatctctaaaagtgtgacctttgagataaacactaaagcctattttgtgattaactttctaattttgaaaaagaaaaattatgtctccaacaccaattttataaagcaataatttattaatacataaaggaaaatacatttaaagtctaaagttacttgagtttttatgttcctattgagagatagtctcagaatataacatataattgaaaactccattgttcctttgatagagcaactgaaa

SEQ ID NO: 245351 - DNA, 524 bp, Homo sapiens
atcaaggagcatgattgttggatcacagggtaaaagtgtgtttagctttctaaggatttgtcaaactgtcttccaaggtggctgtactgttttgcgttcccaccagcagtgagtgaggcttcctgtggcttcacatcctccctcgcatttggtgctgagtgtcctggatttgggccattctcatcggtgtttgctttgatttacaattccctgacagccatttgtttttaagccacattactttaagatcacacaggaccaatctttactgtgaaccaaagtctcaaaattgccatcagggatcccaaatgacatgatgctctggyggcgcagagcacctgggcaggaggtgatataaagggaggataccccaagttgcccagaagacaggctgacaaacattgtccctgtagtcctgcctgatgtgacaacgccctgtctacactggaacacgaacatctccacgcagtgcgcattacagtccagaaggagcgtcgcatccactttgtcacttaatgcctgga

SEQ ID NO: 245352 - DNA, 533 bp, Homo sapiens
ttaatgtataaagttaatgcaacttcaaatagaattctgatggagtacttttttcttttatttatatattatatacttaatatatatattatattatatattttttcttttatgcacatattttatagagatggggctctcactttgttgctcgggttggtctcaaactcctggcctcaagcaatcctcttacctcagcctcccaaagtgctgggattacaagtgtaaaccmtaatacctggccaagtattttttaagaggcagagaattggataaaattatcataaagcttgttggggaaaattaattcctaagaaataaaaccttttgaaatagaatcattgggggaatttgcattttcagatcaagacatgcccgaaagccactctattcaaagtaacagactgttggcattggaatagaaagctagttctagaaccaaacagagaaagcagaaatagatcccagtacatttaagattctaacacatgaagaagatgttctttttcactaatgggaaaagatagattact

SEQ ID NO: 245353 - DNA, 533 bp, Homo sapiens
ttaatgtataaagttaatgcaacttcaaatagaattctgatggagtacttttttcttttatttatatattatatacttaatatatatattatattatatattttttcttttatgcacatattttatagagatggggctctcactttgttgctcgggttggtctcaaactcctggcctcaagcaatcctcttacctcagcctcccaaagtgctgggattacaagtgtaaaccctaatacctggccaagtattttttaagaggcagagaattggataaaattatcataaagcttgttggggaaaatkaattcctaagaaataaaaccttttgaaatagaatcattgggggaatttgcattttcagatcaagacatgcccgaaagccactctattcaaagtaacagactgttggcattggaatagaaagctagttctagaaccaaacagagaaagcagaaatagatcccagtacatttaagattctaacacatgaagaagatgttctttttcactaatgggaaaagatagattact

SEQ ID NO: 245354 - DNA, 552 bp, Homo sapiens
ggacccaatggcttcactgttgaattctaccaaacatttaaagaactaataccaatcttactcaaactattccaaaaaacgaagggggaaggaatacttccaaatacattcaatgaggtcagtattacyctgatagcaaaaccagacacataaaaaaaaaaacaactacaagccaatatctcttatgaatattgatgcaaaaatcctcaacaaaatactagcaaattgaattcaacaatacataaaaatattattcatcaggatcaagtgggatttatccctgggatgcaaggatagttcaacatatgcaaatcaatcgatgcaatacatcatatcaacagaatgaaggacaaaaaccatatgatcatttcaattgattctggtaaagcatttgataaaattcaacatcccttcatgattaaaaaaaaaagaagccctcataaaacttgtgtatagaaagaacatgcctcaacataatataaaccatatatgacagacctacagatagtatcatactgaatggggaaaaactgaaagtctttacgatttgaa

SEQ ID NO: 245355 - DNA, 561 bp, Homo sapiens
ggatggttaatgggcacaaaaaaatagaaagagtaagacctgctatttgacaacacaacaaggtgactatagtcaataacttgattgtatatttaaaaataagtaaaagaatataattggattatttgtaacacataaaataaatgcttgaggggatcaccccattctccatgatgtgattattacatattgcatgcctgtatcaaaacatctcatgtaccccataaatatatatacctactatgtacccacaaaagttaaaaataaaaaaatgtaaatcaactgtaaaaaataaatttaaaaatgagcaagaaaaagcaggtaacagtaaatatagtaagtagatacagcagaattagccatcaactaagtgaaggtatatgagcaataatctaaaatattgtaagataaatacattcgaaatggttaaagagacaaaccaaagaatagaaactgtaacaraagaataaaaacataaaacagaagttgaaaatgagtataattttttcaaaagccagtgaaatgaaataccgaatgaaccaattaaacagaagatggatc

SEQ ID NO: 245356 - DNA, 614 bp, Homo sapiens
taggaaaccaaaagattcacttcctgcatcatgttacccttccatcagatatctaccttctacctgtgcacctgtgacgtaatgtgctgacacatcgacaaaccacaagagagaaaataagacctggcaaatggagcataaccaaatcagtgctttgaaaagggatattaacaacagcaggtagcaggtcaccttctaaaggagctaggctaccccagctttgacctggaaccaggtgatcagctagagaacattgccttggagggtaacacgtgacttctactcacatcaatgattttctaacaaataactaagttgaattatctttgttttctaagagagtatggacacgttgtgaagccttatttgaggatktcatgccctccaagtcgttcatttattccctaagtacaatatttaagaaaatctcagcagccattctctgataggtcattattctgccccatctgtatcctatcacccaactttatctccttcaaaggcattacaatatgccccatctgtatcctatcacccaactttatctccttcaaaggcattacaatataatattcttccaatgtggtaacaacaaaacaaaaatgtatcagata

SEQ ID NO: 245357 - DNA, 422 bp, Homo sapiens
atcccgggacccggaaagcaagggggaaaaataaatcgcgatggggccaagggacagctgctgcggcaacttttacccagcggagcccacctacagcctcagcctccgggtctcaggtctccgccgtttcttctcaaggagtcggtcgggggagcggcactgcacagcttttctccaatcagacacctcaaggctggcgcctgatccaatctcctcccctggagggtgggaacgcgaagttcctacctgcacctgtggcagcggtgaccgcctcctgggttattttcttttctcccccagctgccccagggttctggtttcccgaatcacttggcaaataaccagcaggtgggcagatgtcttttttgcgttcctacggamgcgtaggcaagttcgatgcgccggagtgaacagccagggtc

SEQ ID NO: 245358 - DNA, 616 bp, Homo sapiens
ttgccatcttttccttgcgcaattcgtacaaagcccttccgtgctcacaaagttgatgattgtgaagaagaaaatgtaggttagaggagaggaagcagcatcaggacaccttaccaccactgttagtaaatgacttgggggtacgggttgcttttccgatctgcaaagtaggagggaatgggatgtttgcagacgcagttgctaattgtgcctgagggcgtgggtgccttttgtaccgaaagaacttttggccgttttttcttgtattgttttcaagtcgctgcccgagtgtgtcctcagggcatcctggggaggagccggtgttgcggtttcggggcgcagccgaggccgccccgccgcctccsgtaggcgatcagacttcctctccctggcggttccgggaggagaacctcctacaacaaacaccgccgaagtttccctctccagcgcgatcgccaatcccaggagcgcccggcgcgtgggctgggaaggagccgagcggaaacctggaagtgagccgcggcgcaggcgaatcctgccgttgctggtggcagcgcccaagagaccccgcacagaaagtgggctgggagtctcgcttgctgtacccgcacctaag

SEQ ID NO: 245359 - DNA, 623 bp, Homo sapiens
gactaattaataccgttcacctgtagagaggatgcacttggttcccagcgccctcctcccaggtgcttatccaaagggaggccgccctgggtcggatgggtcaccttttggcgtccatctacagtcaagcagtgtggacagggcggtcattttccctctagagacgggttgatycagaggggtgggaacgtcccttgggtcccccgggcacgctgaccactgcactgcacttcccctgaaggaaaggcaaaggttgaagccaaagagttcaaggctcagcctagagaccaggtgatggtgccctggaagacacttccgccagcaccctatggggcgcagtggcgtctaatgctaatgtgggctacgtagctacgggattgggtcgctccgaccctggccgatccggtgccagacagcataagggaggaaaggggactggggggggcacgtgacttcaaccaacccagtaaccaagttttgttttcttccccagcacaggccgctgcctcagcatccaccccgcagcccacgtgttgcaagccggggaaggggtggagtgaacggccggagaccacgtggagaaaggggccgctttggcccttccatctgggtgccgggagccc

SEQ ID NO: 245360 - DNA, 586 bp, Homo sapiens
ctgatttaatcccaactcagtgaaatcagaaaccaagcaaaattggtgggacagaaagagcataaggaagatgagagaatttgacgacgtgtcttgctgggatttatgtgctttacagatgtttaattacattccaatagtatatacagatttaattttttttaaccttgagataatttatagtaaaaaaaaatgctgaattaaatttgcagtcagaaacttttctttaaattatcttacaaatgaaatttcactcacaaatttggaagccatatcagaaattttaacactatacttccaaagatatgggaaaaaaaggaacaaaactctagcagtgtatttgctacacacttttgtaaccacgataattatatacaaagggtagtttttgccccagtgactctccttgcaaaatcggtggctgggcagtgactcatattacargtcacctgaacgtccctttgtgtctgtacttctattgttcagcacattctgacttgcatttcaaaagcacaaacccgactttacatatgcaattaggatgttctcctttagtataacacctggaaatattttttctgcttcg

SEQ ID NO: 245361 - DNA, 527 bp, Homo sapiens
caatcccttcaaaataaaattcaagatcatttaaagttcttgaagggccctacttggtccagcctctgcctgtttctctccagctctctctctctctcgctgtctttctctctccctgccatctctccaaacactctccattcaagtgaaagtaggctcatttcagtccattgatcaccatctctcttctacctccaggtcttacaacacgttccttccaccacttagaaaccctccgggggtttaggttttccaagagctcaggagcttgatgaacctcttgagatatgctctttcttcacagacttcctgtgattttcaggacacttcagctgcttgagcaaccatatataaacagaacttgagtggagttaactagcctctctgattctgtttcccttgttagtaaatgcatgtgataacaccacttcatggtgtttgcatgacctaagtgcacataaaagcatatctctcaaagacgaatgacacagtctaaaagtcytcaataatacagctgtttaaattct

SEQ ID NO: 245362 - DNA, 588 bp, Homo sapiens
ttttggcctccggaactgtgcgaataaactgtgtttttttaagccaccagttagtgatcatttgttttggcagccacaggaaacaaatacatcatcyttagctcctgtggtccctccctatcacatcaagtgaatacacgttactctgctgactgttgtgagaggaggagaggaaggaaggatgtacagaaagcataagagaagagggaaaagatgggactggagtggggtagagaatgtcaaagagaggagaagaaagaagagaggaagaaaaaaatgaaacaaaaacgagcaatgaggtaaaaatgggttgttgtctgctcagaccctttgagcttctctttgtcctcatcggtccacacacagcctctcttccttctttccctcagcctcccccagccccccatgcacctgccacactaagcaagttcatttttgtgctgttctgacttcctgtcccatcccacgttctgctttccaatctgcaggcgccagtgagaggggaagaagcctgagcagagggtcttgctcacccagaaagttccgctccacatcccatcaatcaccctaaagagaagccaggggacc

SEQ ID NO: 245363 - DNA, 588 bp, Homo sapiens
ttttggcctccggaactgtgcgaataaactgtgtttttttaagccaccagttagtgatcatttgttttggcagccacaggaaacaaatacatcatctttagctcctgtggtccctccctatcacatcaagtgaatacacgttactctgctgactgttgtgagaggaggagaggaaggaaggatgtacagaaagcataagagaagagggaaaagatgggactggagtggggtagagaatgtcaaagagaggagaagaaagaagagaggaagaaaaaaatgaaacaaaaacgagcaatgaggtaaaaatgggttgytgtctgctcagaccctttgagcttctctttgtcctcatcggtccacacacagcctctcttccttctttccctcagcctcccccagccccccatgcacctgccacactaagcaagttcatttttgtgctgttctgacttcctgtcccatcccacgttctgctttccaatctgcaggcgccagtgagaggggaagaagcctgagcagagggtcttgctcacccagaaagttccgctccacatcccatcaatcaccctaaagagaagccaggggacc

SEQ ID NO: 245364 - DNA, 580 bp, Homo sapiens
aatcaaatcatttgttatccatttccatggtgtctcctctagtgtaagattatccttttgtttttgttttctgccaaatgactctaagtttactaacttacttttttgccaccaatcttgccccctcccagcctttatgtgcayggtagcagtgtgtaatctttctaagctctatatctgaccatgacactatgatctctgatcccaagtttcagctcctcacatgtgactttcatgagcagccccaactttcctcccaagcttgtgtctcattattctcatgtttgcactctctgttcctaccacattgaaaagttttcagtcctttaaaaatgccacactatttctaccttctagatgtttcttcatgctcactcctcttctgagaatactcttgccctttgtatggccaactcatccttttagctctattttgatatccattcatccaggaagccttttgtaatacacaccttgtccttctgccccagtaagagctggacatcatcccaacatgcttttacagcaccctatacttctctcatcactgcctcattacattacataactgtcgatttgt

SEQ ID NO: 245365 - DNA, 638 bp, Homo sapiens
ttttttaaaaaatgtcgagcatattaaagactataatttcacaggatatcaaactattcatytactttgagtaccaaattattatcgaactcagcgcacccacatatcttggtgttgcttaaggatagggaccttgtcttttttgtgaagtgcctaaaccataataggggctcaatgatattcactgaatgcatgaattaacagattatcaatacctaagatgtctaaggatgacgtggagaaaaactaacatattcttcagccaaacagtactggatgagactattgccaaatccaataagatgtgtattatattgttttagaaattttgcatggtctacagcatattagaagtcttctgaatgtcaagaggacctgggaaaatccccaagattatcccaagtagtccaggtagaagcatagaatctagaattttttcacctgaaatggactctaaagaataatttggcataaagaaaatgtagcatgtgtgtatatacgtgtgtgtgtgtgtgtgtgtgtgtgtgtgtgtacaccatggaatactactcagccatgagaaagaaaaaataatgtcttttgcaacaacttggatggaactggaggccataatcctaagtgaaataactaaggactgg

SEQ ID NO: 245366 - DNA, 597 bp, Homo sapiens
cttttgcaacaacttggatggaactggaggccataatcctaagtgaartaactaaggactggaaaaccaaatacctcatgttctcacttataagtgggagctaagctatgggtatgcaaaggcagacagagtgatagatacactgaagactcagaagtggggaggatgagagggagttagggatttaaaaaaaatcacctgttgggtatactacatactgtttgggtgatgagtacactaaaagcccaaacttcaccactatacaacttatccatctaataaaaaaccacttgtacccctaaagctattgaaataaaaatatttttttaaaattatactctatccaacctcaacctttacagataagaatatccaggcctacttgagtcatttgcctagtaacagttaattaacatcatagatgaaaatgataccgtttcccagtcaagggttctttagacaacacatgctgctttttataaaataatggaattatgaagatgatcaaataagaaatgacaactttgtattattttttattgcttcttcatagttgatttctatcccagattcaagacatgttgatactgtggagtt

SEQ ID NO: 245367 - DNA, 597 bp, Homo sapiens
cttttgcaacaacttggatggaactggaggccataatcctaagtgaaataamtaaggactggaaaaccaaatacctcatgttctcacttataagtgggagctaagctatgggtatgcaaaggcagacagagtgatagatacactgaagactcagaagtggggaggatgagagggagttagggatttaaaaaaaatcacctgttgggtatactacatactgtttgggtgatgagtacactaaaagcccaaacttcaccactatacaacttatccatctaataaaaaaccacttgtacccctaaagctattgaaataaaaatatttttttaaaattatactctatccaacctcaacctttacagataagaatatccaggcctacttgagtcatttgcctagtaacagttaattaacatcatagatgaaaatgataccgtttcccagtcaagggttctttagacaacacatgctgctttttataaaataatggaattatgaagatgatcaaataagaaatgacaactttgtattattttttattgcttcttcatagttgatttctatcccagattcaagacatgttgatactgtggagtt

SEQ ID NO: 245368 - DNA, 597 bp, Homo sapiens
cttttgcaacaacttggatggaactggaggccataatcctaagtgaaataactaaggactggaaaaccaaatacctcatgttctcacttataagtgggagctaagctatgggtatgcaaaggcagacagagtgatagatacactgaagactcagaagtggggaggatgagagggagttagggattwaaaaaaaatcacctgttgggtatactacatactgtttgggtgatgagtacactaaaagcccaaacttcaccactatacaacttatccatctaataaaaaaccacttgtacccctaaagctattgaaataaaaatatttttttaaaattatactctatccaacctcaacctttacagataagaatatccaggcctacttgagtcatttgcctagtaacagttaattaacatcatagatgaaaatgataccgtttcccagtcaagggttctttagacaacacatgctgctttttataaaataatggaattatgaagatgatcaaataagaaatgacaactttgtattattttttattgcttcttcatagttgatttctatcccagattcaagacatgttgatactgtggagtt

SEQ ID NO: 245369 - DNA, 597 bp, Homo sapiens
cttttgcaacaacttggatggaactggaggccataatcctaagtgaaataactaaggactggaaaaccaaatacctcatgttctcacttataagtgggagctaagctatgggtatgcaaaggcagacagagtgatagatacactgaagactcagaagtggggaggatgagagggagttagggatttaaaaaaaatcacctgttgggtatactacatactgtttgggtgatgagtacactaaaagcccaaacttcaccactatacaacttatccatctaataaaaaaccacttgtrcccctaaagctattgaaataaaaatatttttttaaaattatactctatccaacctcaacctttacagataagaatatccaggcctacttgagtcatttgcctagtaacagttaattaacatcatagatgaaaatgataccgtttcccagtcaagggttctttagacaacacatgctgctttttataaaataatggaattatgaagatgatcaaataagaaatgacaactttgtattattttttattgcttcttcatagttgatttctatcccagattcaagacatgttgatactgtggagtt

SEQ ID NO: 245370 - DNA, 637 bp, Homo sapiens
ttatttccaagttcttagtggtataaatatacccacaagaaacatgggcagataacatgaatgaggagctcatagaatttgaatcataaatgtcctacaagagcaactgtattaatattgaagaactgcaaattaaacaagaaaatcattattttcacttgtaagttacaaaatctttaaaacatttgatgattcctcatgttggtgaggacatggaaaaacagtctcaaaaactagatagaagtgtatattaatatggcaattgcagtattgtttctaatatagaaaattagaaacaacccaaatgtccattaatagggaayctgataaactatggtaaactaatacaaaggaatattatggagtctttagaaacaattagatagaatatccacattctaacatggaaagatgtccagaatatactgatatattataaagttaaaaattaaaaggataatacagatactttgtactgtacacatatactccatttaatatgggggactgattagttcctggaaatgtggctctggctgagtaagctgcttatacaagttgttatagccctgccttgaaggagctgcagtttttacattctacatgagcagttgctttttcctgctccttaaattcc

SEQ ID NO: 245371 - DNA, 562 bp, Homo sapiens
ggtcatttggccatctctgagtcaatcattgtgaccagaggaataggattggtgattggctttgcccagtttcatgggtcctgctccctcaaaggacccatgctaacacaggggaaagaagtggttctgwcaagagaactagaattgctggaaaactacaaaccacacgtcatgttggtgtccatgaaacattttgacagtgaaagaatttctgcgcactaaaaataaaatgggttctgctgtctcgacagcgtggggaatatcttcaataagtttgaaagagcgagaaccaactggaggttggccaccagcaagtattttctggagttgtcttcggttggaccagaagatgaaacatgaactccgtttccaaatcaacttataaagcatcatctaaagccttctaaaatgagattatattttaatgtgggaactagtgcaaaaatggacttaaagtttggtcattttcttcaaagaattacctgactggtaatctgtgtgagatcttttcaattcgtcccaggctactgtgatatggtggtatcagagttcctgctgagta

SEQ ID NO: 245372 - DNA, 530 bp, Homo sapiens
cctgctgagtaacttttcttcgagaggttggctacttagcatagggcaattgtaaagcaaacytgcatgcctcgggctttgctggtgactgtgactatgagctggcagttgtttcttttcttgtgtgtgcttcagcttccaactcactcagcactttttgtaggtcttgagtcagtctttatcacactaaacaatttctcatcttggctttgcaaattgctcttcaaaactaatagtaaattaacctctgcaagaaagcacatgaactaattcacatgtccgtgggccaggctccacctgaattattgcagaaatgcaaaagaagttttttatatcataattgtatcactaatagcatggtgtcaggccctggactaagctctttatgtgatctcacctcttttatacaggtgctctctgaggtacgtacctaacttggctccacctaacagatgaaggaactgaagttaggagagattgtcagttacccaaggccacaaggttaatattcagacccagactgtctagct

SEQ ID NO: 245373 - DNA, 591 bp, Homo sapiens
gtgacttgtccaaatccagatgtactgtgtgtataatacatgctggattttcttttttttttttttttttgagacagagttgtggcccatgcctgtaatcccaacactttggaaggccaaggcaggtgcatcacctgaggtcaggagttcgagaccagcctgaccaacatggagaaaccccgtctctactaaaaatacaaaattagccaggtgtggtggcacatgcctgtaatcccagctactcaggaggctgaggcaggagaatcacttgaacccaggaggcrgaggttgtggtgagccgagatcgtgccattgcactccagcctgggcaacaagaggaatacatgctgagacttggtacagaatatgtcaataatttaatactgattacatgtttaaataatattctggatatttggtgttaaaatatattattaaaatttatttcacctgtttctttttactttttgaaatgtggctactggaaaattttaagttacaaataggtagaaatacaaatacattgtatttctattgcacagctctagaatagaccatcctttctcccaaagggagaggggtctcctaatt

SEQ ID NO: 245374 - DNA, 535 bp, Homo sapiens
ttgctggagttgacttgctaatagtttattgagacagttccatatctaaaaaaattggtctctagtttttctttcttttccttttttttttttttttggcatgtccttgtctggtkttggtattagggtaatgctgactgataaatgaattgagaatcatttcttcttctatttgttgaaagaggtcgtatagaattagtgttaatttttctttaaatgtgcagtagaattcaacagtaaaactgagtctgatttctttttggaagttaattatggatttcatttctctaatagctataggactattcagagtatatctttcatatatggtgagtttcagagtttgtgctttccaaggaattgatccatctcatctaagttacagaatttatgtaggttgaattgtacatagtattccctttttttattatccttttaagagcctcagtatctgtatacagcccttgttttattcctgatgttggtaattcctatcttttttatctttgctagtcctataggtttacaattttat

SEQ ID NO: 245375 - DNA, 483 bp, Homo sapiens
gaggagaggagagtgaggagtggggaagactttgtcttaaatctcggataccagctcagccacagcagaatagggcactggtcagagtcatgaggcctccattccaggctctagcttatggatgacttttctagacacaacctgggccagaagggaacrtgctgccttgaaaggcaggacacagtactggcagcattcatcaccttctaactgaagagctcctaggccctgagtaacaagcagcaatacccaggaactatctcaagggccttgggtgacactctgagacttactggcttcaggtgagactcagcacattcccagatgtggtggttatggggtgagactcctgcttggggtggctatggggtgagactccttctgcttgtctcaaaagcaaaggggaccttgtcttgcaacttaggtcccagcttggtcacaggcatactctccaggctcctggggtccccaattccagaattt

SEQ ID NO: 245376 - DNA, 549 bp, Homo sapiens
atcatggtagtaccaaaggcaaagaaatttargtctccaattacggaattccaagcttgcaagggcccccgagattcttgccttactgtggagctggaagtggctactcgtgcagctctcttgaaaggcgaacatctagctcaatggttctcagccttggaggcacatgagcatcatctgggagcttctaaaaaccctgatgccaaggctataccccagaccaattacatcagaaactctgggtagggaacagaaacaatagtagtttttacagctgtccaggtgatttcagtgtacacccaagtgttgataaaagactacacattagtgtacactgctcgggttacaggtgcaccaaaatctcagaagtcaccactaaagtatttatccatgtaactaaacaccacctgttctccagaaaactattgaaatttaaaaaacaaacaaaagaacagcaaaaaagaatcacctttttagactaactcctgccaagatagagcagtagggacctaagattgccctgccttaggtccctactatatgccttag

SEQ ID NO: 245377 - DNA, 549 bp, Homo sapiens
atcatggtagtaccaaaggcaaagaaatttaggtctccaattacggaattccaagcttgcaagggcccccgagattcttgccttactgtggagcyggaagtggctactcgtgcagctctcttgaaaggcgaacatctagctcaatggttctcagccttggaggcacatgagcatcatctgggagcttctaaaaaccctgatgccaaggctataccccagaccaattacatcagaaactctgggtagggaacagaaacaatagtagtttttacagctgtccaggtgatttcagtgtacacccaagtgttgataaaagactacacattagtgtacactgctcgggttacaggtgcaccaaaatctcagaagtcaccactaaagtatttatccatgtaactaaacaccacctgttctccagaaaactattgaaatttaaaaaacaaacaaaagaacagcaaaaaagaatcacctttttagactaactcctgccaagatagagcagtagggacctaagattgccctgccttaggtccctactatatgccttag

SEQ ID NO: 245378 - DNA, 617 bp, Homo sapiens
ctcaaattttctaaatttgatgaaagctgtaaacccagagatccaagaatcttagcaagtcccaggcactaaaatctatacccagcacatcataatcaggtacctcaaaaccagtggtaggagggaggggtttcaaaggagcacaaggacagtttttggtgagagggatatgttaattttcttgaatgtggtggtagttttccaggtatatagataacatgatatgtgatatgagtgrcaagtgaaaacatttcaagttgtgcacttaaaatatgtgctatttattgtatgtcagtcataaccccaataaaactgatctattaacaaacagtaacaaccctgggtgcatattagaatcactgggagaactttgcaaaaaaatagaaatttccgtcttcaaaggttctggtttagatagtctgggatgaggcccaagcatccgtatttttaagagcttggcaattctatttggcaagtttgtttgaaaatcactggaaaaaggaaactgcagaaacctcccccatttacatgagctggtggttaatgacctttattctgactaagcagctttatatttcagggatatggccctttgaggtacagtgttaatttccaag

SEQ ID NO: 245379 - DNA, 590 bp, Homo sapiens
agtggtccagacaggacagagactatatgggctacaaatcgtaaagtatttactgttggtactttacagttgctgatccttgagctaggaaatgaataagattatttgcattcattcagaatcatttatggagttctgtagtatgttgagcacagtgcctggcttatagttaactcaaataaatgtgggctgtgattgacattatagtggttgggcattgatgaacagacactgggctcaggtaaaggccctgctacagaaggcaggggtacagatgttcaaggcatgtgaagtaatttaggccaaggccaagcccaaagagcaaagacaaactgagctgggtggtaacttggtgtttactctgttctaaagcaaaccactcttggagaatgtttttatcactttcttttctctatttccagagaaaacgatcacaggccaagcttaatttgtggttagtcagtatttcactctgagttccgtgaagtggcttccaggatcttccctaggggatrtggtacaggtttaagaaattcagggtgtgtatttcacatcaattgaagaatctcttgaaggcaaacagaaaggtt

SEQ ID NO: 245380 - DNA, 634 bp, Homo sapiens
aatgctagtcattctgagctgtggaatagacatgcagggagctagcacgggcgatggcctgcagctygggaacgtgaggcccccaacaaagtgaccacaaccagtgccaccatcagagcaggtcctggatgacctcaggcttccttcaggctgtacctcctctgctggcctcagcagtgacagcaccatgtcctttagtcaagccacacacatccttgaagctgccacattctctgcacagagagtcacgtctgtgctcccgctgagtgataatagggtcgtgacctccttggaaagggagaccatgttccttgcattgtcatcagcccccaggccgtctcagagctccccgtgcctctgcaagccccatttgatgaatctgagaacgagattctggaaacggtctgagtgctgagcagtacctgtcacactcactcacataacaaagtatgtttgtttcccagaagacagtcattgtatattcctactcattaagttactataattatacccacatggggtataattgattttaatttcactctgaggttgctccaggtttcaacagcaagtctctggccttggagaactctctccctttatttagcatttaaatgagtatcaggagggaaac

SEQ ID NO: 245381 - DNA, 534 bp, Homo sapiens
gggcagctttgaagtgcttaaacgtcctgacatggcagtgcgcgcttccatttcagtgcgtgggaagtcagctggatcactggggaacaagatgccctgacgttgatgaattgtgcagctgtactggggaccaaatctctcactcagtgctggagtgattttaatgccatgcttacccatgactcagtggcctctgtttatgaattagcacatatttttaagttcttacatgttactgtctctgaaatttacaaataaatcatagtaatactacagtttcmattccccactctttttaaaaacagctttcatgcattatagtcataaatccttgttaactttttaactccatgcccctgttattgtatgtcacaaaagacagtgttatagtttttcattcctgcttaatttaaaactttcccaatggaatgcagatacagtgagctgttttcataggtgtggttagggagatatgttgtataattgaagcctaggtccctattttcagatgggacagattctaaaactagtggg

SEQ ID NO: 245382 - DNA, 591 bp, Homo sapiens
acagcaaagctttagagatgtcagacttcctaggctgccaacacttcttctagtctatgaactaccttaaatgagaacagaggttaggtattatttcactctggatgcccagagcctaatacagaacctgacacataggaattgtccacttaatgttgcttgattgtctgactggtttgttggttaaytggttggttcattggatggatggatggatggatggatggatggatggatggatggatggatggatggaaggaagagagaggatgcaaagtgcctacagcagtgtctcatacatacatataataaattgtaactgtatatttctgtcataaaaaataccttttttgtcatatacactgaaacatttgtgtctataaattcccattcatttaacctattttaatattgtacttggaacagtgtttttctcataatagaaaaaatatagtcattgtttcacacgcattttgtttgtgcaggaagccaaaatacaaatgcattctgcgtaaaacttagtgtcatatataacactgctgagcattaattcttttttaaaaacttgatgagtttgcataaacctgaaca

SEQ ID NO: 245383 - DNA, 498 bp, Homo sapiens
ttttctgctttagatgtttgtaaaattcctctaggaacagagaggaggaatgagtctttgtgtcagtgggctgtgggcagccagcacccccartctgccacacatgtggtgccagggatttccatggaaagaacctcaggagacctgattctgggcctgtttcataaggctagcaggctagtgagggccctaggtcataattttaaaatcatactaatatacatccaggtgtgtgtatacattctcagggtagcaggaagaaagtggtggcaagcgaggctggaaaggtggcaggggccagaccccacaagcccctgcagggcatggtatggatttttgcctttgccttaaatcgtctttggaggttttaagtggcatgatgggaggtgggtgtggggtgagcatgagcagaaacatgatcatattttgtgtttgaaacaacgttaattcctttggaggggatttagtcaatagcactgactacgttcatactttcat

SEQ ID NO: 245384 - DNA, 498 bp, Homo sapiens
ttttctgctttagatgtttgtaaaattcctctaggaacagagaggaggaatgagtctttgtgtcagtgggctgtgggcagccagcacccccagtctgccacacatgtggtgccagggatttccatggaaagaacctcaggagacctgattctgggcctgtttcataaggctagcaggctagtgagggccctaggtcataattttaaaatcatactaatatacatccaggtgtgtgtatacattctcagggtagcaggaagaaagtggtggcaagcgaggctggaaaggtggcaggggccagaccccacaagcccctgcagggcatggtatggatttttgcctttgccttaaatcgtctttggaggttttaagtggcatgatgggaggtgggtgtgggstgagcatgagcagaaacatgatcatattttgtgtttgaaacaacgttaattcctttggaggggatttagtcaatagcactgactacgttcatactttcat

SEQ ID NO: 245385 - DNA, 571 bp, Homo sapiens
acaggactgcccatctacataaaggcccagttatctagatcttgttttctagttcctaaagcattaattttactgtctggcattagctgcattaatcttcaccaatgagtcaggagtactcccaagacatcaggatttccctgcttcttttcatggggagacctaggatcaaagaattagggtcatgggagaccatcaaacagatgatgcttttaagaggaaggaggccattttcataggcttgggcactaacagaatgaacactgaagatgttttatttaaaagaaaagcaattatgatgttttgattttaggtaaggaatattgtcttgtctgtgtgggtttgagcagagtttgttcgtgcargaaggacaggagagaccggggagtgtcctgaggcaagacatcctgcctcttattctgcaactttgcagaactcagagtggaaaagctttgctctcctctgatatcccatttggtgctcagactgttccaatgtaatgcatgcataagaataaaaattaagctttcaagtgctaaggcagatttttaataaagagacataggcttta

SEQ ID NO: 245386 - DNA, 571 bp, Homo sapiens
acaggactgcccatctacataaaggcccagttatctagatcttgttttctagttcctaaagcattaattttactgtctggcattagctgcattaatcttcaccaatgagtcaggagtactcccaagacatcaggatttccctgcttcttttcatggggagacctaggatcaaagaattagggtcatgggagaccatcaaacagatgatgcttttaagaggaaggaggccattttcataggcttgggcactaacagaatgaacactgaagatgttttatttaaaagaaaagcaattatgatgttttgattttaggtaaggaatattgtcttgtctgtgtgggtttgagcagagtttgttcgtgcaggaaggacaggagagaccggggagtgtcctgaggcaagacatcctgcctcttattctgcaactwtgcagaactcagagtggaaaagctttgctctcctctgatatcccatttggtgctcagactgttccaatgtaatgcatgcataagaataaaaattaagctttcaagtgctaaggcagatttttaataaagagacataggcttta

SEQ ID NO: 245387 - DNA, 495 bp, Homo sapiens
tttattctgttgctttccgatcctttctgaggacaaatattcatctattaaatatacattggtgttagtttggtctgtttccctgcatctgtttttagaaagccagcagctcaggcatttgcatgctataattgaactgaggaatggaattatacagccctacatacttagcattagggtgaagaattgcattgcataggtcctcttctatgccaaagcttttcatatttctcccrtcactgaatattgacaggtctaatttggagcattaaatgcctcccgtttttttttttttttttactctgttttccatttttatcctcattaattttttttggccttaagaaagtgtttttttgatttttagcagaaatccttgatttttttgcatcctgtggatacactactagtgatgagaggatggatcttcatggacttgtaaattctttttcttcctcttgaaaattccaattcatttggcgttaagaaattgga

SEQ ID NO: 245388 - DNA, 425 bp, Homo sapiens
tgttcatttagaaagagctgtgttgagagatacttgctaaatgcctgagatctttctggatgactcttcttgctcttgtttttgcaaagtagccattcctgggccatttgtcaaacataccttatctcgtgtaatatcatcttttttgtttggtgtggtttttgaattccaggcagaccgtgcctagtgtaatagtcttggacagacattcttcctgtctggagtattttcttcctgtctagaatattttagttactgccctcaagttttcaaactgttctttctctaaaaagatattcttgcaaatcagtgaacttcagaaaatggaaaaagccgaccagtgaattttaagatacggtatattkcaatgaaagagtagacataataagtagaagccaaataaaatgggctcagagcatgccctc

SEQ ID NO: 245389 - DNA, 595 bp, Homo sapiens
gtacagggccaagttcaaagcaggcaatcagcatgtaaatatcaaacaaacgagtgaataatgagttgctggaaaggtggaaataagatgaaaataggatataattcatctgtctgacatccttcccccattaatttgtaatgccacttctgagatataccaagtatccatatatgtgtgatttggtttcttgtctttccagtgtatactactggtaccaaatgtactgtaccaaacatactgggctttggctctctatttgaaatgttattatattatattcagaatatggtatgtatggtatcagttttttgtatatgttgaagcttaatttgtggtcaattgataygaatattccaagtggttttgaaaagtgtgtgtgttctttgaatggctggatatgagatccctttcgtattcatagatcaactttagctatttgatctactagtttctgtgaaagatgtcaaaatcattatgattgtggatttgtcaatttatctttgtaagtctttcaatttcgctttatatttttgagaccatattgtcatataaaagctcaaaattatatacttctggtaaaaataaatctcta

SEQ ID NO: 245390 - DNA, 596 bp, Homo sapiens
taaactccatcatttctcaacttctgaggatcatcactcctttgcttatcttttctctcttctgcatttccagtctcttacctattgtatcaagttcatcaacaagtcaacttgccttggtgtttcccatcttttaaaaaagtccttccttgactccacatctcccttgagctatcctctgtctctgttgaacatcatagccagccttcctgatagaggaggtacccacatatttctctacttccttaccttcttcagttcagttgagtcttacttctaccctcagccatccaaagagattgctgttgctaaggttgctaaygacttccatgtatctgagtcaatatttagtacttatttcattgaacctcttatcagcattcaacataattgaccattcattccctaaaacattcttcacctcttggcttctggaacactttgttggttttctctaaatgtttgaacactgagtgctcagggatgagctctcttttgttttctgctccctacctttaatataatcatgtgctatataacaatatttaggtcaagaatgaaccacatatatcatggtgaacccataagattataat

SEQ ID NO: 245391 - DNA, 596 bp, Homo sapiens
taaactccatcatttctcaacttctgaggatcatcactcctttgcttatcttttctctcttctgcatttccagtctcttacctattgtatcaagttcatcaacaagtcaacttgccttggtgtttcccatcttttaaaaaagtccttccttgactccacatctcccttgagctatcctctgtctctgttgaacatcatagccagccttcctgatagaggaggtacccacatatttctctacttccttaccttcttcagttcagttgagtcttacttctaccctcagccatccaaagagattgctgttgctaaggttgctaatgacttccatgtatctgagtcaatatttagtacttatttcattgaacctcttatcagcattcaacataattgaccattcattccctaaaacattcttcacctcttggcttctggaacactttgttggttttctctaaatgtttgaacactgagtgctcagggatgagctctcttttgttttctgctccctacctttaatataatcatgtgctatataacaatatttaggtcaasaatgaaccacatatatcatggtgaacccataagattataat

SEQ ID NO: 245392 - DNA, 325 bp, Homo sapiens
aattactaacatgtatgaataaagaactcaaactgaggctctttttttcttaagcagaactcggatgaacacctttccaaattgtgaccacactcatcatcctgcttttttgttaaawaaaagcagtttgtaaaaaaaaaaaaaaaaaaaaaaaaaaaaaaattgtctacatttcttttgttaatagaggtttatgactttgaaaggccttctataatgctttataacattttaactttgtaaaaattcgggacatttttgtgcacatttgtatggccccgatagactgcctatggtcattttagattgaccatggccacatttc

SEQ ID NO: 245393 - DNA, 539 bp, Homo sapiens
ggaagcctcgctgactaccccaagctaacctcagagctccacttcctttttccacatccccccacattctccacacttcttcagcatagcaatcttcctatttccttgtcattgttgagttgcatgtctgtcagtcagtctaactagaactgttggttggcagagagtatctcttttccatggttcatcagggcttaatggtgcttggcacatgacagattcycaataactgtttgctaaatatgtaaataatgaaatcaacatggcatatcttctatgcttttactgttttctatacatcggcagcttttttcatcttcagaaccaaatttgctgaggcatttattcttttaattctttatgcaaaagatattaagaattcctatatgattaaaacatttttatctaaaaaatgtcatagtctgtgacaaattggagtggtatttcctaacggtaaaactaaaagtcaaaaaatgtcttgagaactattgttagaaatggtaagaaatataggccaggcacggtggctaggcctagaa

SEQ ID NO: 245394 - DNA, 617 bp, Homo sapiens
ctgccaatgtctatccagacataaacatcatcactggagcccttaaactgtatttcagagacttacccatccctgtcatcacatatgatacctattccaaatttatagatgcagcaagtaagtacttcaaattaattttttatttctaccaaatttttaagtacagtgcttttgaccttcagataattaaaactcagaactgtttaaattattgcatttgtgcctgtcttgtcaagtgagggcacaacaataaatagctgaccaggcatagttcaacagctgagctgaaccagttctaagaactctgtgggctgatgtatgtgtcaggcagttctgtccacattgttccttgtatgctgggaaccaacacagtcasgcctattatatgttgaaagcatgaatatttctgtagcagaaaaaaaagtcttcaatgaggactgactagatcatgggtatccaatcttttgtcttccctggaccacattggaagaagaatgattgtcttgggccacacataaaatatactaacattaatgatagctttaatgataattttaaataatttttaaaataaattattttaaaatcttataatgttttaaggtttacaaatttgt

SEQ ID NO: 245395 - DNA, 617 bp, Homo sapiens
ctgccaatgtctatccagacataaacatcatcactggagcccttaaactgtatttcagagacttacccatccctgtcatcacatatgatacctattccaaatttatagatgcagcaagtaagtacttcaaattaattttttatttctaccaaatttttaagtacagtgcttttgaccttcagataattaaaactcagaactgtttaaattattgcatttgtgcctgtcttgtcaagtgagggcacaacaataaatagctgaccaggcatagttcaacagctgagctgaaccagttctaagaactctgtgggctgatgtatgtgtcaggcagttctgtccacattgttccttgtatgctgggaaccaacacagtcaggcctattatatgttgaaagcatgaatatttctgtagcagaaaaaaaagtcttcaatgaggactgactagatcatgggtatccaatcttttgtcttccctggaccacattggaagaagaatgattgtcttgggccacacataaaatatactaacrttaatgatagctttaatgataattttaaataatttttaaaataaattattttaaaatcttataatgttttaaggtttacaaatttgt

SEQ ID NO: 245396 - DNA, 617 bp, Homo sapiens
ctgccaatgtctatccagacataaacatcatcactggagcccttaaactgtatttcagagacttacccatccctgtcatcacatatgatacctattccaaatttatagatgcagcaagtaagtacttcaaattaattttttatttctaccaaatttttaagtacagtgcttttgaccttcagataattaaaactcagaactgtttaaattattgcatttgtgcctgtcttgtcaagtgagggcacaacaataaatagctgaccaggcatagttcaacagctgagctgaaccagttctaagaactctgtgggctgatgtatgtgtcaggcagttctgtccacattgttccttgtatgctgggaaccaacacagtcaggcctattatatgttgaaagcatgaatatttctgtagcagaaaaaaaagtcttcaatgaggactgactagatcatgggtatccaatcttttgtcttccctggaccacattggaagaagaatgattgtcttgggccacacataaaatatactaacattaatgatagmtttaatgataattttaaataatttttaaaataaattattttaaaatcttataatgttttaaggtttacaaatttgt

SEQ ID NO: 245397 - DNA, 592 bp, Homo sapiens
acttgggcccactgctgagggagagaggaatagagtgaaaagggggcaggtctgggggmaggggctacactttgcccaggaagagtcaaaagtgaccaaaggtagattcagatgctgagacacatgacacggaagtcaagctcactttgaggaagtttttgcttgttgttgttgttgttgtttttatttaaaaaaaaaaaaaaaacctttaaaggttgaaaagtttaggcatgctgttaaatgtagtaatgagatgcctgatggggagacacaaaggcaggctgggatcagtgtgagatgcacttttcggatgagctgaggccctgaccccggtaagactattccctccttccggggccctagtggtcctggcaaagaaggttctagcatctagatatcctctactccaggaggaatagcaggagggttttctttgagtagctgccagtacctatcagagacccaaaagccagaagcatgtactcttcctcccattgttaatgtgtccagtctccacttcctaacctgggctgtgcaccggggttaagtatgccaacgccacggtgagaagtgccatgagtgcaggctgagt

SEQ ID NO: 245398 - DNA, 592 bp, Homo sapiens
acttgggcccactgctgagggagagaggaatagagtgaaaagggggcaggtctgggggaaggggctacactttgcccaggaagagtcaaaagtgaccaaaggtagattcagatgctgagacacatgacacggaagtcaagctcactttgaggaagtttttgcttgttgttgttgttgttgtttttatttaaaaaaaaaaaaaaaacctttaaaggttgaaaagtttaggcatgctgttaaatgtagtaatgagatgcctgatggggagacacaaaggcaggctgggatcagtgtgagatgcacttttcggatgagctgaggccctgaccccggtaagactattccctccttccggggccctagtggtcctggcaaagaaggttctagcatctagatatcctctactccaggaggaatagcaggagggttttctttgagtagctgccagtacctatcagagacccaaaagccagaagcaygtactcttcctcccattgttaatgtgtccagtctccacttcctaacctgggctgtgcaccggggttaagtatgccaacgccacggtgagaagtgccatgagtgcaggctgagt

SEQ ID NO: 245399 - DNA, 583 bp, Homo sapiens
tgatttttaatttcaactgctgtagacctcatcctgtgggaactagaaataatgtccaactgccgtccagtctggcgacattccagccgttcccccaccccacgataacggcctgactcttcctcaattcatgacagcccattctacacataacctttctcctctggcaccggtcctcccagcagagagggatcctgcccttcccttcccactctccagcatacagaccagcaggaagccacaagagggaaaaaaaaaamgccttctgtataaggcctatgaaaggaccatgggccagcctcagaatctgctgcccctacaaaccagtattcctcaaatgatagttccacatttacttaataaggaggactaattttctaattttaaaaattgtgttcctgccagattcacataagtaattcatttccaccggcgaaggcaatgtcaacaatttaaaacgaaaaatcagtaaattacccttccaaaaatacctttctgctgttctgattcccaatctttttcttgcaatttcctgaaccagagatgttatcgggacttacatacataatcaatacataaaatc

SEQ ID NO: 245400 - DNA, 584 bp, Homo sapiens
tgatatgcggtaccaaaagctgattgtgcagattttaatagaaaacgaagacgttttattctaatccatcagggaaatgagctgaatggccccagcaccatccaagttgacacagctaaaggaataaaaacatttcttaccacttgatttgttttccaagcaagtgctagaatttsctggactgcagaggatcgctgagtggggtactgtgtctcatagacatgcgccacctccacgtgagaacaagggtgaaggtgagggaagcccctcaccttgggtcttttgctgtgcctcctatgtatgtctggtttgctggaagagtgattaatacatctttaatttattaaaaaacaatgtagacctttaaacttcagtcttattggtaataaaagggaacttaattcatacaggtacttgatacagttatacattttccacttacaaaaagaagacaattctgttaaatgaaacgtgtatcgtaaaatgtatttttattttacccacgagaatgttgttatttttagcaaatagaactcaatgcagtgcattggttattaccctgtgtaccttgtccctcattttgc

SEQ ID NO: 245401 - DNA, 584 bp, Homo sapiens
tgatatgcggtaccaaaagctgattgtgcagattttaatagaaaacgaagacgttttattctaatccatcagggaaatgagctgaatggccccagcaccatccaagttgacacagctaaaggaataaaaacatttcttaccacttgatttgttttccaagcaagtgctagaatttcctggactgcagaggatcgctgagtggggtactgtgtctcatagacatgcgccacctccacgtgagaacaagggtgaaggtgagggaagcccctcaccttgggtcttttgctgtgcctcctatgtatgtctggtttgctggaagagtgattaatacatctttaatttattaaaaaacaatgtagacctttaaacttcagtcttattggtaataaaagggaacttaattcatacaggtacttgatacagttatacattttccacttacaaaaagaagacaattctgttaaatgaaacstgtatcgtaaaatgtatttttattttacccacgagaatgttgttatttttagcaaatagaactcaatgcagtgcattggttattaccctgtgtaccttgtccctcattttgc

SEQ ID NO: 245402 - DNA, 623 bp, Homo sapiens
ggtacaaaatccaccggtaatagcaagtacacagaaaaacacagaacattgtaacactaactgcagtgagtaaactactctaagctaagagagactaaatgatgaaccaatcaaaaataataactacaacagcttttcaagacatagacagtacaataaggtataaatagaaacaataaaaaggtaaaagtggggcaccaaagttaaggtataaagtttttattrgttttcttattgcttatttgtttatacaaacaaataatgagtgtgtttgtataaacaaattatttgttaaaataatgagctataagatagtatttgcaagcctcatggtaacttcaaactaaaatacatataacagatacacaaaaaacaaaaaacaataaactaagccatatcaccagagaagatcaccttcactaaaggaagacaagaagatcacaaaacaaccagaaaacaaatcacaaaatggcagaaataagtcctcatttatcaataataacattgaatgtaaaaggattacattctccaatcaaaagacatagagtggctgaatggatttaaaaaagacaagacccatttatctgttgcccacaagaaacacatttcacctatacagacac

SEQ ID NO: 245403 - DNA, 552 bp, Homo sapiens
aataatagccttattcctagttaaaagtaaaacaaagtgctggcttgatggtatkggagataactaaaaaagatttaaactgaaaatataaaaacttttcttaaaagctagaaataaacatttgtactccaaaagaatttatatttacaaatagagaaactaacaatgatttaaccacagtgataagggaagcagacttttgggcctaaggaatagacacaatataatttggtagcatagcgggaacaaaggattaaataattaaggcaaatacttacagtgaatggtctcctttacttctggtctcaataacaaaattatgggaaaaatataaaatcaatatatccatgctctaaactaattacagaaaaccagacaatggttgtaaacccaaatgtaatatagagcaatggctcttaagtccagattccgatttaattaatttcagggagccctgtggcgctggtagtatgcagaagattcccaggtgttgaaaatgacctggagccaggaattaaaaccaccaatctggggttaacacccaaagcaaaa

SEQ ID NO: 245404 - DNA, 509 bp, Homo sapiens
ttatgctatgtgaacttgtaaaaaatattagttaagaattatcatcaaactgctatgaagagtattcatttgaaaataaagcagttaaaaagttaggttatagtggcagatcaccaatttaggatataacaccaaatcagtgaatatggaatacctaaattttggtaatgtttatactcaagctctttctccttattattatttttayttttctgtatagatactgataaaatctaaattaaaaaattagaatattttaactgtaataaatggatttcctacaattttttcatttttcctttcaataggcaaaaatagtttgtctttcagctactagtgtgtcagcacttaaccgtttatagaaattacaaaacacacactttcttcctctttcttagacagagaaaattatatcatccaagcatcgcagtcagggtagctttacttttagtagaatcttcatataggatattcaccaatccttggttaacagccactatcggaagaaa

SEQ ID NO: 245405 - DNA, 509 bp, Homo sapiens
ttatgctatgtgaacttgtaaaaaatattagttaagaattatcatcaaactgctatgaagagtattcatttgaaaataaagcagttaaaaagttaggttatagtggcagatcaccaatttaggatataacaccaaatcagtgaatatggaatacctaaattttggtaatgtttatactcaagctctttctccttattattatttttatttttctgtatagatactgataaaatctaaattaaaaaattagaatattttaactgtaataaatggatttcctacaattttttcatttttcctttcaataggcaaaaatagtttgtctttcagctacyagtgtgtcagcacttaaccgtttatagaaattacaaaacacacactttcttcctctttcttagacagagaaaattatatcatccaagcatcgcagtcagggtagctttacttttagtagaatcttcatataggatattcaccaatccttggttaacagccactatcggaagaaa

SEQ ID NO: 245406 - DNA, 551 bp, Homo sapiens
ttctgtaaatataatagctatgctctgtatattttcttctcaggagattaaatactcctcttagtaactgatcacccttgttcaagttgttacatttctgtgaaaaataagtattcattggtgtaatagaatcaagattacaaaacagcttctatttgaataaagagtcctgttcttataaagagcaaacatctcacacagaaaattattaaatacaaattcctatttgagagagaaaataaagagctttggtaaatttttttgtagattttgtatgctgttctaattaaaataacaacaacacttccacaacttcaacagaataattaaagtcatttaattattcgtattatcactaattttaattttatgttacagtgtttttactaaaatacccttcaatttaatgaaaagttaatttaaaaaaataaaccttkgggatttccttaataactgtgaatattcaatacacaaaataatttaatcttgtttttcagagggccaagaaatcactcttcattaccataaaataacttttaaaactcacaggt

SEQ ID NO: 245407 - DNA, 590 bp, Homo sapiens
gtaattaccttttcctttattaggaatttttacaaatatattattttcctccacataaaagttccatcatgagacaagttcatttatgcctgttgagagacatgcggtggaaacaatatatcaaaacccaaatctgtctttctaacttatgaataaaaataattttgagtcagaattcttaagctagcatttctaaccttacatcaccacctagtgaaatgaratttcttttctacctggagccttggcaattcattgtccaaaacttagatttttcaaattattttcccatttacattccactctcattggttaggccccatgtcctatctgtaaacaggcagactccgctattaaaggagaaagacaatgttacaggacatattttagcttctttgctttccccatgaaggaccattcagccattccatttctacagctttgagccaccttttctatgctgcactaattttggatttaaaatgcttgaaagtcagtctgtctcattctctgagattctgatgtttcactgagaacatagttagaaaaaccaaagttagtaggaagacacttcctctattaaaatggtt

SEQ ID NO: 245408 - DNA, 533 bp, Homo sapiens
attgttctgtgtcaggggagtttggtatccttgttcccacactccatgatcatgatagatcacagggggactgtcaatccaaattacagtccataatactcagggattggaaacatacgtccaatatgtttttgtctctgcacagggaaaacaaactgcacagggtgttacaggyagcatggccataaacgtgaagtcaggggtttttacctgaacttggcactccagcactttcagctggctcatggcttgtaatggaggagccgcatccatagttgggataaatggctctctccagtctccctttccatggtcacaaacaccttgagggcacccacacattttatccatctcctgcaaaaacacaagcattccctcctccttacattagtaaatctactgagcctgtccatcatccttcttctgggtatttcatactacctttcagtatactctcctttttccctctaacatttaccaatgtccttctgctacagtcttactatctgtgacaaaagtcaaaaaatttaaag

SEQ ID NO: 245409 - DNA, 556 bp, Homo sapiens
ctgacttcaaattatactacagaggtaccataactaatacagcaatggtactggcataaaaacagacacaaagaccaatggaacagaagagagaacccagaaacaaatcaaaacatctacagtgaactaatttttgacaaaggtgtcaagaacataaattgaggaaaggacagtttcttcaataaataatgctgagaaacctagatatccgtatgcaaaaaatgaaactagacccctatctctcaccatatacaaaaatcaaataaaaagggattaaagactgaaatcttatatatcaaactatgaaaccactacaagaaaacactggggaaactctycaggatattagactgctcaaagatttcttgagtaataccccacaaacacaggcaacgaaaacagaaatagacaaatgggatcacatcaagttaaaaagcttctgtacagtgaaggaaacaatcaaccaagtgaagagacaacccacagaatgggagaaaatatgttcaaactatccttctgacaagggattaaaaccagaatatataaggagctctaa

SEQ ID NO: 245410 - DNA, 569 bp, Homo sapiens
ctaactctggggcctcatgccactcctactgaatcagaaactctgagaatggggcccagcaatctgtgtttcaataagcctcccaggtgattctggtagacactaaagtttgagaaccactattgtagagttttgtctcttctctctatagcaaacgtgtagtttttatcagccagcatgtattcccaaattctgtgtgattcaaataagactaactaccttaycaacccctaccacctaccaagcagctgaggacttaaccaagatgtgggcccacagagtataccatcctctgacactagtggtgggctccagaattagcatatgacccaagctgggccacttggagcccttggcaaatccttgttggtcagagttattgggggagccccttgttttccactggagttactaagctggaggttgacaatgggtaagggaaaccaagcatgggactgagtactttatagacattatctcagatgctgattctttctccaggtaagttaagttttggatgataacaggagagccatgttgatatggtttggacttgtgttcccccccac

SEQ ID NO: 245411 - DNA, 491 bp, Homo sapiens
atggggagagtgaggccttcatatgctttgtactatttgactttttatttttatcaaattaactacacatggttaaaagttattttgaatgtttctgggctcttgcaaggcttaaaataaatggtttatttttaaatgtataacaatatactgtatcttgctaacatacttctaacatccctctccttctaagatctcgttgcctaaaaacttcatccttatttttctagcagccctgcagcgaattgaaccatatttaaagagtctttttaaattatcccaccttcatttaaaattgccartaaatgtgtgtggtgtataatcatttttaagttttgaagtgagaggaggaggaaaggagactgagtaagtataacattaaaaaaaaaatagattgctgaaaagccaaaaagttgaggactgacttctacacttctagcttgcttcaataactgtgcgataaatacaaagagctcaactattccataata

SEQ ID NO: 245412 - DNA, 615 bp, Homo sapiens
ctactaccctgtcacggtgcagggagagaagttggtttggaaataagagccctcccatgccaacagcaagagtgtacacaagcaagcaccaagccttggtgaatctggaagctctgggactgagtggacacaatgaaggtggcctttgtgctaattagaaaaagacacccctctgccaaggtgggaggaacccagtctcactgagccagtgctagataaaggtgatgcctttgtgaaacacagaaaaagcaccccttcctctgggtagatttactccaagccagaaagcatggctcgatgagcaggatcaagtctgtatttcagacccacatcccccactcttccagctgccctgtgcagaaacgacccacacaaccctgtacagcagccccagatatgggtagagtggagagaggtgtttgcagctttatcctgcctgtagcaggtagagcagtgacttcctgtcaatraggtcaaccattttttccactgagagagacagtcaggtaccacagttccatcacacacaaaaagagctcagtttcagtcagcttatatataaaagacaaaatctgtagaaaaggcagttttagaaatgtttctatagaccatata

SEQ ID NO: 245413 - DNA, 604 bp, Homo sapiens
tatataccaatagaataagaaacaaacataaaggcttaaatttgcctgctgaccttgatggaggatgaaggctttctggattctaaatggtagtaaaatcattgaggtgccaggaagctgaggaggaatcacaaccaaaccagccacatgggtgagggaaacacatacggtattaacctgaagagagttctagcctccaagaaaccagaaagagcagctccaagagtcacctggtttatccctaaagaaatttcaaatttcattctgaactgttaaatcaagtttagcctaaagctgmctccttacatattttaagttcagcctaaaggtttttctgtacataatgaactataacataaatggaagtgtaaacagactgtaaccttcccttgtgccaatcatcgagttttggccaaaggcggtcagctgatcaaaccatgttcaaatggggtgaatgctgagttgtaaacaatccagctgtttctgtacctcattccattttctgtacacctctttcatttttctgtctataaatcttctactatgtggctgcactggagtctctctgagcctactctggctcaagaggctgcccaactcacaa

SEQ ID NO: 245414 - DNA, 604 bp, Homo sapiens
tatataccaatagaataagaaacaaacataaaggcttaaatttgcctgctgaccttgatggaggatgaaggctttctggattctaaatggtagtaaaatcattgaggtgccaggaagctgaggaggaatcacaaccaaaccagccacatgggtgagggaaacacatacggtattaacctgaagagagttctagcctccaagaaaccagaaagagcagctccaagagtcacctggtttatccctaaagaaatttcaaatttcattctgaactgttaaatcaagtttagcctaaagctgcctccttacatattttaagttcagcctaaaggtttttctgtacatartgaactataacataaatggaagtgtaaacagactgtaaccttcccttgtgccaatcatcgagttttggccaaaggcggtcagctgatcaaaccatgttcaaatggggtgaatgctgagttgtaaacaatccagctgtttctgtacctcattccattttctgtacacctctttcatttttctgtctataaatcttctactatgtggctgcactggagtctctctgagcctactctggctcaagaggctgcccaactcacaa

SEQ ID NO: 245415 - DNA, 597 bp, Homo sapiens
aaaagaaaagaacaaaatactgatatatgttacaacataaataaataaaagcatataggttttagaatcagacatatctggctcttaaaaacatgytaagttaaagaagccagtaacaaaaggccacctattatatgattctgtttatataaaatatccaggataggcaaattcataaagacagaaagtagattcttagttgcttaggtctgggggtaggggagaaggaagagagaaggagagttatagctaagggatgcgaggtttctttttgagttgataaaaatattccaaacttggctgtggtaatggttacatgtatctgtgaatatacaaaaaaggaactgaattttatgtgttaaatgggtgaattgtatggtatttgaattgtatttcaacaaagctgtttttttttaaagataacaaatgatgatggatacatgggggttcattttgttattcttcatgcttttggttatgcttcaaattccccataaactttcatttttttttaaagcagaacactcctgtattttggccacatttaccattaggccaggtgtggtggcacacacctgtaatcccagcactttggga

SEQ ID NO: 245416 - DNA, 409 bp, Homo sapiens
cagggttgatatttaaaagtgccaacaaatgttcattctatttsataagactcatgtaactttaataaaaaggtattttatttttctttgtacttttaaataatagtttttaaaaatgcagttctatactttttgcaaaaaccacaaaggttattattttctctaaaagctattttaaaaacaaataaggggccaggcatggtagctcacatctgtaatcccagcattttgggaggccaaggaaagaggatctcttggggctaggagttcaagaccaatctggcaacatagggagatcctatctctacaaatttttttttaatctgccagatgtgatggcatgtacctatagtcccagctacttgtgaggctgaggtgggaggattgcttgcgcccaagagatcaaggc

SEQ ID NO: 245417 - DNA, 380 bp, Homo sapiens
ggcagtctaaatctcttagtaggtctctatgaaattgttttatgaatatgggtgcttttgtgttgggtgcatatatatttaggatagttagatcttcatgttgaattgaaccctttactattatgtaatgcccttatttgtcttttttagtctttgttggtttaaagtctgttttgcctgaaattaggattgcagctcctgcttttttccatttgcttcacagagttttcttcatctctttattttgagcctacaggtgtacagcatgtgagatgggtctcttgaaggcagcatacmattgtgtcttgctttttgatccagtttgccactctgtgtgttttaaatgggtcatttagcctgtttacattcaaggttagtat

SEQ ID NO: 245418 - DNA, 587 bp, Homo sapiens
actctgtgtctggcttccccatccataaaacagagataataatctctaacacaatcattgttaaaaggattaaacaataaattataaagtgcctactatttggtatatagtaggtatacaattattgattgatgggttgacaaagagacagatttatatagagatagagatcaatcacatagtagtttgtagctggtaggtagtgagttctcagtaatcgacattatgatctataagtattttacagcttctatttcaatagtggcatttagctcaaattattcttaaaaacaatttataaatattattcaatctagaaatgattaatttatctaataaagttgaaatttctatatttctcattaattaatggcatatttttagaagaataatcctactgtacataaagcaactacagactcacagatgcctttccctcctattgaatcaaaactcacattttctaagasacagatatctgagagtgtaaaaatcagggacctgaatgaaggcaatgtggcatatctaaacaagcactgaaatgtacaatggtcttcaaatgtcatataccaactctgaaaacatcc

SEQ ID NO: 245419 - DNA, 614 bp, Homo sapiens
gtgctcaacattgctaattatcagggaaatgtaaatcaaaaccacaatgagatatcacctcacatgttagaaaaaaagaaagaaatcctaccatttacaacaacatggatgaacctagagaacatcatgctaaatgaaataagccagacaacaaaagacaaacactacatgatctcactcatacgtgtaatattttttaaaagtcaaattcatagaaacagagagtagcagggtgcttaccaggggtcagggatggggaaagcaaggaaatattggtcaaatgatatacacttgcagttataatatgagtaagttctggagacctaatgcacagcacagtgattacagtgaataataatggacacttgaaatttgctaagagaatagatctttgttctcatcacaaaaaagaagataattatgagaagtgatccatactaatattaattagcttgattctggtaatcattacacaatgtatatgtatatcagaacatcacattgtacacaccttgaagatatataatttttatttatcaatcatatctcwataatgctgaaaaagagttccaaagttagaggaaagatgtcaaagtccctaacatggtatagca

SEQ ID NO: 245420 - DNA, 549 bp, Homo sapiens
cttgttgtttaaaagtgtgtagcacctcccccctccctctcttgctcctgctctcactatgtgacatgtgtgctcctcctttgccttccaccgtgattgtaagtttcctgaggcctccccagaagccaagcagatrccagcatcatgcttcctgtacagcctgcagaactgtgagccaattataaattaccagtcatgggtatttctttatagcaatgcgagaacagcctaatatagcatagtagaacaggtcctatttcctgaaactctagcaacatagaggagaacacttaatatattcaagtccaagtggctgcctctaaagccaaataatctaggtttgagtccagctccaccaattattagctgtgagcttagactcaagtttccttatctgcaagatggagtaactacttcagtaacttgtgagaattaaataaaataatgtatggaaactagacctagcagtggaaaatacccaaacacattattatttctataattattttctaactcttatactacatgttgtattaatgtttaactgct

SEQ ID NO: 245421 - DNA, 582 bp, Homo sapiens
atacccaaacacattattatttctataattattttctaactcttatactacatgttgtattaatgtttaactgcttgctatttcccacacacatcatgatgatgcatgcttccttgcttttgtttacacaattttctttcctccaaagatcctttaacttttctccccctcatctagcaaacatttgctagcttccccctagttatccattcccctctcctcatgctcagccataaggtttgggtgagactgacctcactctaagcttgaggcaaggccctgacttatgtaaaccaattagtaccccagtagtcacagtgattggttcagggataatttacagccaatgagagaaaaatgaactcyctaatttgagctggaactagaggaaaagttactcttccctggtgagtaatgcgtgaggagcatacggtatggaatcacagaggccatttggcttttccaaaagcagttaagagagagccatggtagacactgtttgagccagtgcatcaagcctcacctggagccaaatcttcctctgaactctgcaggcaattcattcctgtagatactgaagtc

SEQ ID NO: 245422 - DNA, 610 bp, Homo sapiens
tccctgtttccaaagcaggatggtatatcataaaacaacaaattgaacaaatatggaaagagtatcaaatgtagatatagtaccaataagtagtggaaagggcagtgatttttgattcagaaacacaagatgataaggttttgaattctggctttcacagacacatcctaaatatgtgacttgggtactttgtttaatttcatccagttggtatcttcaaatgcaaaataagccttattataacctctataccgcaatgggttgctagaaagactaaaggaggggaggagggaacctgtattaactacctggtacagtacatagaacatggtaggaatgtatggcaatcttaaaccaaaatttagcatgctttaaaaaaagtatcaagccaacttcccccagcacccatacttatttataccttggatatcagataatttagttattaagtctcactctttacataccaaaggatagaaaagatcccagaggaaggttaggaaaaaatgtgccaggaagttggaaatggttcaattcagaaatgtcaatttttatttgctaaagtactcagtaaarcagtgattcccaggctcatgaatttcattcacct

SEQ ID NO: 245423 - DNA, 611 bp, Homo sapiens
ccatgtggcaccacttctggctaatttttgtattttttattagagacagggtttcatcatgttggttggccaggttggtcttgaacctcctgacctcaggtgatctgcccgcctcagcttcccaaagtgctgagattacaggygtgagccactccgcctggccccagtcaggaaattttttaaagaaatagattataatcaccaatattctcttaaaagacaatactaatacaaataagtaggaagtaaaaaatgtcatcactaagtgtagtcctctaactgaataaattttagctttaacttacttacattagctctttttcgtccattatcttaagaccatccaaaactttaacataggatagtaattgagaacctctgttacaactcagcattaaccatttttaaggaacttgggaacaactattataaagaactcagaaaacaaacacaaaaagtttttctcttccaggaacaaaagaaaaactggttcctattcaggcctaggtgaggaaacagacattttccataaatattctgacttgttaaaatctcactactctaagagttctggaatcaaaaagtgagacaaaggctccctctgctgacaa

SEQ ID NO: 245424 - DNA, 611 bp, Homo sapiens
ccatgtggcaccacttctggctaatttttgtattttttattagagacagggtttcatcatgttggttggccaggttggtcttgaacctcctgacctcaggtgatctgcccgcctcagcttcccaaagtgctgagattacaggtgtgagccactccgcctggccccagtcaggaaattttttaaagaaatagattataatcaccaatattctcttaaaagacaatactaatacaaataagtaggaagtaaaaaatgtcatcactaagtgtagtcctctaactgaataaattttagctttaacttacttacattagctctttttcgtccattatcttaagaccatccaaaactttaacataggatagtaattgagaacctctgttacaactcagcattaaccatttttaaggaacttgggaacaactattataaagaactcagaaaacaaacacaaaaagtttttctcttccaggaacaaaagaaaaactggttcctattcaggcctaggtgaggaaacagacattttccataaatattctgactkgttaaaatctcactactctaagagttctggaatcaaaaagtgagacaaaggctccctctgctgacaa

SEQ ID NO: 245425 - DNA, 656 bp, Homo sapiens
aatgctaagccagtttcttgtcagacaaagtgaaaagtaaaaagattgtttacataattttaaaaatatataaaatttgggagaaaataaacaagcatttctggtaaaggtgattaagagtctggaatcaactctacttttccccttcacttctggtatatgtatccactacctcagtgactttgaatctttagtgcatacatatttccatcttcagtcatgtggatcactttaaaagtccagttgattttgtcaaggacaaaaaagtggccagtaaaggcacaaacttaatttratgttattccaacagaagctgctacattttaatgcatctttataaaacccataaaacaagcactataatgaaaaagaatgccacaaaactactaacatgatgacttttagcctttttagtgcacaatgggcagtcaacagctttttttaattctgaggcccaaatgtactataaggtttataaaagaaaactctactcccaagttcaaaattctcattgcttaaaagtagtaataaattccctagtaaaacattggattctggttttaattagaagtaaatatgctaagattgccacctcctgctcaagaaaaaggcaagtccttcatgacctatgtcaggtggactttcaaaagacctca

SEQ ID NO: 245426 - DNA, 672 bp, Homo sapiens
agcacgtgctggcacctggcacagtcccagtcatataacctatagtcaaaaaaaggtttgtttttcttagcttttggaaagaaatagaaatttcaaagttaaaagcctttatyaaaagacatctttaacacaacaaaaagatatagcatcagcagttgtttgatttttccttcttaaatcaaatacactcttcatctatgatagctgaacagctgattactgtcttcttattttgggatgccagttatacgataccagtagcttttataagaaaaaaaatgcttgatatgacagaaaacatagtgtatgaaatacaatgtccttcctccttatagaaagttcatatcctttaataagtatcacacaaaataaaatcagctatttgtcaataaacctctaatgattccaaaaataaactcagcaaaaagttaataatgaaaagcttccctcttctaggtaaaatgatactagacagattatttgtagtttataaaaaaactttttgtgaccttgtgacattttattaactccttgaaatcattcaaaattgcaatggtacattctaagagaaaataaaaaccaaacaaaaagagaaaaaacaaaaacaaaacaaaaagagagaataaaaacaaaaataaattaacactttcgcatcaccaatagccacccaaa

SEQ ID NO: 245427 - DNA, 672 bp, Homo sapiens
agcacgtgctggcacctggcacagtcccagtcatataacctatagtcaaaaaaaggtttgtttttcttagcttttggaaagaaatagaaatttcaaagttaaaagcctttatcaaaagacatctttaacacaacaaaaagatatagcatcagcagttgtttgatttttccttcttaaatcaaatacactcttcatctatgatagctgaacagctgattactgtcttcttattttgggatgccagttatacgataccagtagcttttataagaaaaaaaatgcttgatatgacagaaaacatagtgtatgaaatacaatgtccttcctccttatagaaagttcatatcctttaataagtatcacacaaaataaaatcagctatttgtcaataaacctctaatgattccaaaaataaactcagcaaaaagttaataatgaaaagcttccctcttctaggtaaaatgatactagacagattatttgtagtttataaaaaaactttttgtgacctwgtgacattttattaactccttgaaatcattcaaaattgcaatggtacattctaagagaaaataaaaaccaaacaaaaagagaaaaaacaaaaacaaaacaaaaagagagaataaaaacaaaaataaattaacactttcgcatcaccaatagccacccaaa

SEQ ID NO: 245428 - DNA, 528 bp, Homo sapiens
cattgccttgtaagggatcagagttcaaggtcattaaacaaagcctttgatcctcaaatggccaagcataaggaaactagtaacaatgaactacagatggcaataacaacccttcccctgctgaatggaatcagcattcagacttctcttttaggttagtttcctaaacatgatatttgtaagacaaaagaaaattcaagaaaagtggcagagtaaaaatctaagtamaaaaaatcttagacatatttttacatgtttaatctaatcataaaattattctagagcttctcctctttcagcttctctgtcatcatgagatctacttttttagctcccgcatgtaagggagaatatgtaatatttgtccttcagtgcttggcttatttcacttaaaacaaggactcccagttccattcaaatagctgcaaatgccgggatttcatttttatggctgaataatattcctgtgtgtgtgtgtgtctctgtgtgtctgtgtgtgtctatgtgtgtgtgtgcatttctgcccag

SEQ ID NO: 245429 - DNA, 548 bp, Homo sapiens
actttgtcttgcatcctggataccaccttagccactgcaggatagggcaccaggcagtgtcatgaggcccccattccaggacctagctcccaaatgacatttctagacacaccctggaccaaaaggcaacctactgccttgaaaggaaagatccagtcttagcaggattcattacatgctgataaaagagcccctgagccctgaataaccggcagcaatacccaggtagtacacagtgtgccytgggctctgagacatgctaatgacacatgtgacccagcacattcccagctgtggtggctatgctgaaacactctttctgtttgagaaatgcagagggaaaagtaaaagagactttgccttgcaccttaggtaccagcttggccacactgaggtagagcaacaagcaggctcctggggtctccaagtccaggcttaggctcttggacactatttctggacctgccctgggccagatgggagcccactgccctgaagggtgagtcccaggcctggcagcatttaccacagctgtctgaagagacctt

SEQ ID NO: 245430 - DNA, 548 bp, Homo sapiens
actttgtcttgcatcctggataccaccttagccactgcaggatagggcaccaggcagtgtcatgaggcccccattccaggacctagctcccaaatgacatttctagacacaccctggaccaaaaggcaacctactgccttgaaaggaaagatccagtcttagcaggattcattacatgctgataaaagagcccctgagccctgaataaccggcagcaatacccaggtagtacacagtgtgccctgggctctgagacatgctaatgacacatgtgacccagcacattcccagctgtggtggctatgctgaaacactctttctgtttgagaaatgcagagggaaaagtaaaagrgactttgccttgcaccttaggtaccagcttggccacactgaggtagagcaacaagcaggctcctggggtctccaagtccaggcttaggctcttggacactatttctggacctgccctgggccagatgggagcccactgccctgaagggtgagtcccaggcctggcagcatttaccacagctgtctgaagagacctt

SEQ ID NO: 245431 - DNA, 529 bp, Homo sapiens
aggagttccagactagcctggccaacatggcgaaaccccatcccaggaggtggaggttgcagtgagccgagattgcaccactgctctccagcctagttggcagagtgagaccctgtctcaaaaaaaaaaaaaaaaaaaagagcgataacaacaataggcagtccaaaacagatatgagtgctccaaaaccgtcatgaacccaggttccttctgtctctggatagaatgctccatccacggggcttctttcttctttaaggccactttatgacagaaggcagctgctggwgctcaagacatcatatccatgttgtagaccaaatgaaaaagaaaagacagaagaatgaaaaagtatagacctttcagtcaattaaatttcctagaagcagctttcccaatgggaaggaaataaaagaagtccacacacacacacacacacacacacacacacacacacccctagagtgctctgaatcattacctgtggcaccagaagagtaaacaactttttcccaattctggttttcta

SEQ ID NO: 245432 - DNA, 616 bp, Homo sapiens
gcaatggagaatgggttatgagattgctgcttttaccaagagctgtaatctagttggccaaatccctttcttgcttgtgtctgttctaacacttgtacttaaaataattcaaaccattccttggttgttttctccccttaagtctcttgcaaggtcttgttgattttacctatactaactaaatttgatgctgcactccttccatacaamgaaaagcttattatatatttccctcctgatttctccctctggtatacatttcccacctaccatatatctatgtaaaggcatagagaaatatctggaaaaaatgtgcatccgactctcttttttttatttgagacagagtttcactcttgttgcccaggctggagtgcagtggtgcgatctcagcccaccacaacctccacctcccaggttcaagcaattctgcctcagcctcccaagtaactgggattactggcatgcaccaccacgcccagctaattttatatttttagtagagatggggtttctcattgttggtcaggctggtctcgaacttctaacatcaggtgatccgactgcctcggcctcccaaagtgctgggattacaggcatgagccaccgcacctgg

SEQ ID NO: 245433 - DNA, 546 bp, Homo sapiens
ttggatttttcacctacataagaagataaacaatatctggaggcctgtgaaacaggtaattaaaactgagactgccataaaaagtctccttagaaccttgaaggagctacatattcactgagagtgtagactagaaaaaatttcatcaagcaaaccaagaaaataacaagaagcttgtcaatttcaccctgagctaaggttagaggtatcttctctaagaaactatgattttgcctttatgaaaagtttggttttcaaaaatatttgaaaaccctcaagtcaagaacttaacataaaaagtggtactaggctgataaaatcaatgaggtgcataacaaaagcaaatgaaaaatttagctgactaaactccctttaaccaaggtcacaagtatttccacagtcyaaaatgaaaggagggaaagaaaactcacaaaaaaataattattagactgagactacaaaataagtaggcctaaaataatttaaaaatataaaatgaaatataaaaagaccagaattttataaaaataacagatttgaaaagta

SEQ ID NO: 245434 - DNA, 546 bp, Homo sapiens
ttggatttttcacctacataagaagataaacaatatctggaggcctgtgaaacaggtaattaaaactgagactgccataaaaagtctccttagaaccttgaaggagctacatattcactgagagtgtagactagaaaaaatttcatcaagcaaaccaagaaaataacaagaagcttgtcaatttcaccctgagctaaggttagaggtatcttctctaagaaactatgattttgcctttatgaaaagtttggttttcaaaaatatttgaaaaccctcaagtcaagaacttaacataaaaagtggtactaggctgataaaatcaatgaggtgcataacaaaagcaaatgaaaaatttagctgactaaactccctttaaccaaggtcacaagtatttccacagtctaaaatgaaaggagggaaagaaaactcacaaaaaaataattattagactgagactacaaartaagtaggcctaaaataatttaaaaatataaaatgaaatataaaaagaccagaattttataaaaataacagatttgaaaagta

SEQ ID NO: 245435 - DNA, 527 bp, Homo sapiens
tttttggaaatttgcagagatttttgtgttctgtctcttttgatttttttctctggcatgtttaggtaggaaaaaatcattggataagttgatcagggggatttaagagccaaaaccaagatttgacataaaaatgrgattcttaatttctaaaaaactgattactccaccttccaattatacttacaattgcatgtgtaagtattagaccctggaagcagcaaatgcttacaaaaatgttgaaatcttactaaagataatgtaatgggagagttccctgagcccttcacgggactcgtgatgggggtgtgactcgtttgctcagctgctgcacactcaaacccctttcaggaggaggagtacacagacaggcaggtgcaagagccagggaaagcacttttgggctccagccccacggtagcatctaggggtgtgttacaattaatgctctcttagcagttgccacctgcagatggctaagtattaaaccagctcagtggagagccagggtgacagccttttacacc

SEQ ID NO: 245436 - DNA, 527 bp, Homo sapiens
tttttggaaatttgcagagatttttgtgttctgtctcttttgatttttttctctggcatgtttaggtaggaaaaaatcattggataagttgatcagggggatttaagagccaaaaccaagatttgacataaaaatgggattcttaatttctaaaaaactgattactccaccttccaattatacttacaattgcatgtgtaagtattagaccctggaagcagcaaatgcttacaaaaatgttgaaatcttactaaagataatgtaatgggagagttccctgagcccttcrcgggactcgtgatgggggtgtgactcgtttgctcagctgctgcacactcaaacccctttcaggaggaggagtacacagacaggcaggtgcaagagccagggaaagcacttttgggctccagccccacggtagcatctaggggtgtgttacaattaatgctctcttagcagttgccacctgcagatggctaagtattaaaccagctcagtggagagccagggtgacagccttttacacc

SEQ ID NO: 245437 - DNA, 527 bp, Homo sapiens
tttttggaaatttgcagagatttttgtgttctgtctcttttgatttttttctctggcatgtttaggtaggaaaaaatcattggataagttgatcagggggatttaagagccaaaaccaagatttgacataaaaatgggattcttaatttctaaaaaactgattactccaccttccaattatacttacaattgcatgtgtaagtattagaccctggaagcagcaaatgcttacaaaaatgttgaaatcttactaaagataatgtaatgggagagttccctgagcccttcacgggactcgtgatgggggtgtgactcgtttgctcagctgytgcacactcaaacccctttcaggaggaggagtacacagacaggcaggtgcaagagccagggaaagcacttttgggctccagccccacggtagcatctaggggtgtgttacaattaatgctctcttagcagttgccacctgcagatggctaagtattaaaccagctcagtggagagccagggtgacagccttttacacc

SEQ ID NO: 245438 - DNA, 527 bp, Homo sapiens
tttttggaaatttgcagagatttttgtgttctgtctcttttgatttttttctctggcatgtttaggtaggaaaaaatcattggataagttgatcagggggatttaagagccaaaaccaagatttgacataaaaatgggattcttaatttctaaaaaactgattactccaccttccaattatacttacaattgcatgtgtaagtattagaccctggaagcagcaaatgcttacaaaaatgttgaaatcttactaaagataatgtaatgggagagttccctgagcccttcacgggactcgtgatgggggtgtgactcgtttgctcagctgctgcacacycaaacccctttcaggaggaggagtacacagacaggcaggtgcaagagccagggaaagcacttttgggctccagccccacggtagcatctaggggtgtgttacaattaatgctctcttagcagttgccacctgcagatggctaagtattaaaccagctcagtggagagccagggtgacagccttttacacc

SEQ ID NO: 245439 - DNA, 525 bp, Homo sapiens
atatagaaagttgaaaagagaaagagaatagaaagaagttctgtagaaaattataaaaggtttactgaaatcttgtgtggtcaaaagctgattgagattgaatggatttgctaagattgctaaagttagcttcagtattgataacacactaatacaaaagtaagttttggttttatrttttgaacaaggatttcatgtagtattaataagagacagtaaaatatctttgttcaccttttgagtaaaatgcaaaaaaaaaaaaaaagaagaaaggaagaagagagattctgtttcatgctgtcttttttaggtctcttgattggaaaactgagtttcctctctatgaaagaatgaagattttcgctttttaaaaactttaaaaggcgaaacatttatatgatctgaagagaaaccagagtattgctttttaaaaactttaaattgtcacttaggctaaattaatcactattattttacagtgatctttgatcctgttttgttttaaacctttgacgtatttgacaa

SEQ ID NO: 245440 - DNA, 525 bp, Homo sapiens
atatagaaagttgaaaagagaaagagaatagaaagaagttctgtagaaaattataaaaggtttactgaaatcttgtgtggtcaaaagctgattgagattgaatggatttgctaagattgctaaagttagcttcagtattgataacacactaatacaaaagtaagttttggttttatgttttgaacaaggatttcatgtagtattaataagagacagtaaaatatctttgttcaccttttgagtaaaatgcaaaaaaaaaaaaaaagaagaaaggaagaagagagattctgtttcatgctgtcttttttaggtctcttgattggaaaactgagtttcctctctatgaaagaatgaagattttcrctttttaaaaactttaaaaggcgaaacatttatatgatctgaagagaaaccagagtattgctttttaaaaactttaaattgtcacttaggctaaattaatcactattattttacagtgatctttgatcctgttttgttttaaacctttgacgtatttgacaa

SEQ ID NO: 245441 - DNA, 586 bp, Homo sapiens
tctcagcaggatggacggggagctggaaaggggatggagtgggaagatgatcttcccctagagttcrgccattccacggccgatctctccaaccgtccccagccaaactcctctccatgttcagatgctccttctcttctctcctctgccgtgccgctcttctgctcctctgctgttgggctcatggaacttggggtttgtagtttttatgggtataggatgggggcatggtgggctagagtggtcttggaaaaggcaacatttgggcacaaaaacaagaatgcctcttctcatttagggctgtggttttccaggcttgagggtgggggcgtttgctagggaactaccctcttctagccagtatttccttgcctcctgtccatatcactgagactgaatgaagtccagagtttgtgttataacacaggaggcccatagcctgggggtgggagaaccatcaaaacagcaggaccaccctacttgctgtggtactgttaccggggggtccttgctcccagagctcccagaatggccaccagccacttccaagatggtggcaagcctcgtgttctctgacctggggttc

SEQ ID NO: 245442 - DNA, 586 bp, Homo sapiens
tctcagcaggatggacggggagctggaaaggggatggagtgggaagatgatcttcccctagagttcagccattccacggccgatctctccaaccgtccccagccaaactcctctccatgttcagatgctccttctcttctctcctctgccgtgccgctcttctgctcctctgctgttgggctcatggaacttggggtttgtagtttttatgggtataggatgggggcatggtgggctagagtggtcttggaaaaggcaacatttgggcacaaaaacaagaatgcctcttctcatttagggctgtggttttccaggcttgagggtgggggcgtttgctagggaactaccctcttctagccagtatttccttgcctcctgtccatatcactgagactgaatgaagtccagagtttgtgttataacacaggaggcccatagcctgggggtgggagraccatcaaaacagcaggaccaccctacttgctgtggtactgttaccggggggtccttgctcccagagctcccagaatggccaccagccacttccaagatggtggcaagcctcgtgttctctgacctggggttc

SEQ ID NO: 245443 - DNA, 586 bp, Homo sapiens
tctcagcaggatggacggggagctggaaaggggatggagtgggaagatgatcttcccctagagttcagccattccacggccgatctctccaaccgtccccagccaaactcctctccatgttcagatgctccttctcttctctcctctgccgtgccgctcttctgctcctctgctgttgggctcatggaacttggggtttgtagtttttatgggtataggatgggggcatggtgggctagagtggtcttggaaaaggcaacatttgggcacaaaaacaagaatgcctcttctcatttagggctgtggttttccaggcttgagggtgggggcgtttgctagggaactaccctcttctagccagtatttccttgcctcctgtccatatcactgagactgaatgaagtccagagtttgtgttataacacaggaggcccatagcctgggggtgggagaaccatcaaaacagcaggaccaccctacttgctgtggtactgttaccggggggtccttgctcccagagctcccagratggccaccagccacttccaagatggtggcaagcctcgtgttctctgacctggggttc

SEQ ID NO: 245444 - DNA, 596 bp, Homo sapiens
gaggaccatgacttttcatacagaaggttgctgattcatgtggatttagacagtctccctgaatgttttcttattacaatagccatttccatggcctctgctccatttccactccaacgaggtttactataacttaataatgatactaactactgagagttacatcagactccataggtttaagagtaaagtcctctacaagactgccctgatttcagataccagccacaagttctggggttccctaggccatccacatttctgaytgatttgggtacaaattcaggagttccaataaccaacctgccttgggtttgataattcactagaacaactctcagaactcagaaaagcactggacttacaattacagctttgtcagaagaaatacacatagggcaagttctagaagactcccggtatagagctttcatgtcctctcccatgcattcagagcatcaccttccacgtcagtgtattcatcaaccaggaagctcctccaaacctccaatgtccagaatttttattggtgttttattacataggcacaatgagatggagcaggaaccctttctagggccttgccagctccttcc

SEQ ID NO: 245445 - DNA, 596 bp, Homo sapiens
gaggaccatgacttttcatacagaaggttgctgattcatgtggatttagacagtctccctgaatgttttcttattacaatagccatttccatggcctctgctccatttccactccaacgaggtttactataacttaataatgatactaactactgagagttacatcagactccataggtttaagagtaaagtcctctacaagactgccctgatttcagataccagccacaagttctggggttccctaggccatccacatttctgattgayttgggtacaaattcaggagttccaataaccaacctgccttgggtttgataattcactagaacaactctcagaactcagaaaagcactggacttacaattacagctttgtcagaagaaatacacatagggcaagttctagaagactcccggtatagagctttcatgtcctctcccatgcattcagagcatcaccttccacgtcagtgtattcatcaaccaggaagctcctccaaacctccaatgtccagaatttttattggtgttttattacataggcacaatgagatggagcaggaaccctttctagggccttgccagctccttcc

SEQ ID NO: 245446 - DNA, 594 bp, Homo sapiens
ggtcatacaacatggtggttaagagccagaatatttggatttaaattccatttttattacttactagctatgtgaccatctagcttgagcagttacttaatatacctgtggccttatagatagattccttatctgtaaaatgggggcattaatagtttctactccataagggaactatgcctcacacatagcatgtgcttaggaaatgttattcatatcatgttatgtagaaaattgctctttggcattttgtcactaaacctcattaaattttaatttttattatttttggaagtcaaattgatatttctacaaatgtgacaccatgacaaaacagtcatgatacaagccttcaaattgcagttcaaagatgacctgagccaggtccccyattacagaatctcacttcctcccgcaatgtcttggcaacactcatctcacgtaatatattctcgtttggtgcctggtttcccactagaacacaaactccacaagagcaagaacactgtatctcttgttcatggctgcattcccaatagctagcagagttcttagaacctaatagggcctctgtatacatttgttgagtgaata

SEQ ID NO: 245447 - DNA, 594 bp, Homo sapiens
ggtcatacaacatggtggttaagagccagaatatttggatttaaattccatttttattacttactagctatgtgaccatctagcttgagcagttacttaatatacctgtggccttatagatagattccttatctgtaaaatgggggcattaatagtttctactccataagggaactatgcctcacacatagcatgtgcttaggaaatgttattcatatcatgttatgtagaaaattgctctttggcattttgtcactaaacctcattaaattttaatttttattatttttggaagtcaaattgatatttctacaaatgtgacaccatgacaaaacagtcatgatacaagccttcaaattgcagttcaaagatgacctgagccaggtcccctattacagaatctcacttcctcccgcaatgtcttggcaacactcatctcacgtaatatattctcgtttggtgcctggtttcccactagaacacaaactccacaagagcaagaacactgtatctcttgttcatggctgcattcccaatagytagcagagttcttagaacctaatagggcctctgtatacatttgttgagtgaata

SEQ ID NO: 245448 - DNA, 572 bp, Homo sapiens
ccaatctcatgccaatggctgtgtaatttgatcccagaagcaaaatcacttggaatgcaggacatgctcagaaaaagatggctactatcacatgagaacaaaacagtctcgtagtaataatcacactgttttattcaacatccagagaccagtaaccttgaagtggtaacctatttccayggagaacacctgtggcggtcagcgctgtagtaacaatgaggccaaatcccaatgttcaagaaaggaagttaaatcctaggacagtgagttctcaacctggactgcacattatatggtcctgcacaataccccaggaccatttaatcagaatctctggctatggaacctgataatttgtatattttaccaatcacttgggtgatcgttcactcaagactaactctcatcataggtcttgctttcttcctcttccacattgtcataatgccatttgtaaacagctgagtctctctccccatcaacttaggtatggaatatccagtaggctctgtcctacattctaggcaccttctaactatacattctgtgctctagcactcccttccagcaga

SEQ ID NO: 245449 - DNA, 572 bp, Homo sapiens
ccaatctcatgccaatggctgtgtaatttgatcccagaagcaaaatcacttggaatgcaggacatgctcagaaaaagatggctactatcacatgagaacaaaacagtctcgtagtaataatcacactgttttattcaacatccagagaccagtaaccttgaagtggtaacctatttccacggagaacacctgtggcggtcagcgctgtagtaacaatgaggccaaatcccratgttcaagaaaggaagttaaatcctaggacagtgagttctcaacctggactgcacattatatggtcctgcacaataccccaggaccatttaatcagaatctctggctatggaacctgataatttgtatattttaccaatcacttgggtgatcgttcactcaagactaactctcatcataggtcttgctttcttcctcttccacattgtcataatgccatttgtaaacagctgagtctctctccccatcaacttaggtatggaatatccagtaggctctgtcctacattctaggcaccttctaactatacattctgtgctctagcactcccttccagcaga

SEQ ID NO: 245450 - DNA, 553 bp, Homo sapiens
taaaattaattaaaagctttctttgactttacagttaaaaaaggagrgtaggttatctgttaagaaatgtacatggaggacagaaggaaatgaagacatcttataacagccatcatgaggttaaccaggaatgaaaacacccaaagcagcattttgaattcttaatggggccaatcaacaactctagaaccagaaaggagaaagtctacaaaagcattgttcaatctgagacttggctagttctcaatcatttttggtatctgttgcataacttaggggatacaaagaagatcaagccattgcatattacattgtattgacaagaacttaccactgtaaagttcaaaaagaagagtttcttcttatttctactcacaggtctcactacaaaacccactttagtgtcatctgcacagcaatccaaacactgtgaacaggagacaagcaatcaagcattggcttggacccaaagatgaaacataaggtcatggataaactcaagaatatgcctcagccatcaagttaccagcaataagagaagagccaaggttgg

SEQ ID NO: 245451 - DNA, 553 bp, Homo sapiens
taaaattaattaaaagctttctttgactttacagttaaaaaaggagagtaggttatctgttaagaaatgtacatggaggacagaaggaaatgaagacatcttataacagccatcatgaggttaaccaggaatgaaaacacccaaagcagcattttgaattcttaatggggccaatcaacaactctagaaccagaaaggagaaagtctacaaaagcattgttcaatctgagacttggctagttctcaatcatttttkgtatctgttgcataacttaggggatacaaagaagatcaagccattgcatattacattgtattgacaagaacttaccactgtaaagttcaaaaagaagagtttcttcttatttctactcacaggtctcactacaaaacccactttagtgtcatctgcacagcaatccaaacactgtgaacaggagacaagcaatcaagcattggcttggacccaaagatgaaacataaggtcatggataaactcaagaatatgcctcagccatcaagttaccagcaataagagaagagccaaggttgg

SEQ ID NO: 245452 - DNA, 536 bp, Homo sapiens
ttgttcccagctaagtcttagtatgtagctctggaggatgcttcaaatcagggcatcgatgcttcatggttggctctctctcccaggtcctcattccaacccccgcaaaagcccaatgactaatgagacaaatccaagtcttttctgagaaccctctgacttctgtcaaactaataagccctcctacacttctctttctacgtttatcctgacagacaaaaactgtgggcaaaaacatccaaacatggacttcctcttgtcttttagtttaaaggcatgcatttgtcaggtgagaagttccaaggcaaattccaaattcccactgtgatttttattacattcttgcagacttacaggtaaagctatatttcatcgcaaagtttccacttatctgttgtaaataacttttccaaaagttaagctaggtattaacaacagcatttgctgattgccaataatgtgcacaggacaataaaataaaactcaatcagctggaattatgataaaattattayatactagttattatgacatca

SEQ ID NO: 245453 - DNA, 628 bp, Homo sapiens
atatcctagagagatctttgcacatgtgcatcaggaaacatgtatgagaatgttcatactagcattgtttatgataggaacaaacactagaaaacagcccaattgtctatgaaagtagaataggttttaaaaattgtaatataatcatacaattaaagatgatacagtagtgaaggtgaatgaactacagctatatgcaccagcatgattgaatctcaggaaaaataattttgaactcaaaaagcaaactaagaaaaartacagaagtatagttttgttcatctcaagctcaaaaataggaaagtctaaatatgttgtttaagagacacatgtatgtgattaaaatataaagaaaaggaatggagagattatcacaaaattcaggatagtggctgcctctggaaaggagagagagagagatcatcatgaaggagcacacaggagtcttcaaacatattggtagttctatttcttaagctggctggcaagcacaagatgttccttttatgttattttatgcctttatttacattgtaggggaggcaaaacttttcttctaccctcttctggtctccaggtagccctgagaattaaattaacatagattaacaagaaaaaagcttataga

SEQ ID NO: 245454 - DNA, 628 bp, Homo sapiens
atatcctagagagatctttgcacatgtgcatcaggaaacatgtatgagaatgttcatactagcattgtttatgataggaacaaacactagaaaacagcccaattgtctatgaaagtagaataggttttaaaaattgtaatataatcatacaattaaagatgatacagtagtgaaggtgaatgaactacagctatatgcaccagcatgattgaatctcaggaaaaataattttgaactcaaaaagcaaactaagaaaaaatacagaagtatagttttgttcatctcaagctcaaaaataggaaagtctaaatatgttgtttaagagacacatgyatgtgattaaaatataaagaaaaggaatggagagattatcacaaaattcaggatagtggctgcctctggaaaggagagagagagagatcatcatgaaggagcacacaggagtcttcaaacatattggtagttctatttcttaagctggctggcaagcacaagatgttccttttatgttattttatgcctttatttacattgtaggggaggcaaaacttttcttctaccctcttctggtctccaggtagccctgagaattaaattaacatagattaacaagaaaaaagcttataga

SEQ ID NO: 245455 - DNA, 628 bp, Homo sapiens
atatcctagagagatctttgcacatgtgcatcaggaaacatgtatgagaatgttcatactagcattgtttatgataggaacaaacactagaaaacagcccaattgtctatgaaagtagaataggttttaaaaattgtaatataatcatacaattaaagatgatacagtagtgaaggtgaatgaactacagctatatgcaccagcatgattgaatctcaggaaaaataattttgaactcaaaaagcaaactaagaaaaaatacagaagtatagttttgttcatctcaagctcaaaaataggaaagtctaaatatgttgtttaagagacacatgtatgtgattaaaatataaagaaaaggaatggagagattatcacaaaattcaggatagtggctgcctctggaaaggagagagagagagatcatcatgaaggagcacacaggagtcttcaaacatattggtagtyctatttcttaagctggctggcaagcacaagatgttccttttatgttattttatgcctttatttacattgtaggggaggcaaaacttttcttctaccctcttctggtctccaggtagccctgagaattaaattaacatagattaacaagaaaaaagcttataga

SEQ ID NO: 245456 - DNA, 628 bp, Homo sapiens
atatcctagagagatctttgcacatgtgcatcaggaaacatgtatgagaatgttcatactagcattgtttatgataggaacaaacactagaaaacagcccaattgtctatgaaagtagaataggttttaaaaattgtaatataatcatacaattaaagatgatacagtagtgaaggtgaatgaactacagctatatgcaccagcatgattgaatctcaggaaaaataattttgaactcaaaaagcaaactaagaaaaaatacagaagtatagttttgttcatctcaagctcaaaaataggaaagtctaaatatgttgtttaagagacacatgtatgtgattaaaatataaagaaaaggaatggagagattatcacaaaattcaggatagtggctgcctctggaaaggagagagagagagatcatcatgaaggagcacacaggagtcttcaaacatattggtagttctatttcttaagctggctggcaagcacaagatgttccttttatgttattttatgcctttatttacattgtaggggaggcaaaacttttcttctaccctcttctggtctccaggtagccctgagaattaaatkaacatagattaacaagaaaaaagcttataga

SEQ ID NO: 245457 - DNA, 327 bp, Homo sapiens
tcagtggtttatataacagggaagaaatgtaactatttgtgaaaaaatcaggaacttgggaggggtaaggaagcaatcatgatgagtaagaggcctggtatctcattgtctggatgccattacccagtgagttttagttctttgatactttttgagaatcytgagggtcctttcctgaggaaggaactcagataaaacatatgtaagtttcaagctttaagcccagaagagagtcaatttctatgtttatccgaaaaaacactgtctatgggactgttgggttggtttcagcaccactgcactccagcctggcgaacagaatgaggc

SEQ ID NO: 245458 - DNA, 498 bp, Homo sapiens
aaagcagcgactgctttttaaaacacgctcacaccatgattcctctgtggtgtggtactgaagacatttacaatgatgatactaatgagtttttaaaactgcatcctagctgggacgttttcctaagaaatataaggccattaaaaggaattatcacagcaaccttccgggggtcccccaatatgcctgggaggtgcccacggtgtatctgtggactattggaatttacyttaaattgatggtccctgagttatttgaggtaatatggtattctgttgcctttttatttcttcctccatttggtctgcatcaaggtttctcagcctccacactattgatattgtgggtctgataattctttgttgtggggcactgccctgtgcattgtaagagggttggcagcatctcttgcctctatccactagacaccagtagcaccccttcctcagctgtgacaacatggtctccatattgtcaaatggcctttgtggaacaaaa

SEQ ID NO: 245459 - DNA, 589 bp, Homo sapiens
actgccaggtcctactttgtgtaaaatactatacccttgtatgttcttttgaaaatgcttactggacaacacttgcatgggttttatttctggtttaatttctttgaacctcattgttagttttagaggatgtccttgggaggatcgcaaagcagtctggtgagctggagagccacgcagatcgcctgtatgactctatcttggcctctctggacatgctggctggctgcacccttatccctgacaaaaagcccatggcggcaatggagcacccatgtgaaggggtttaacctggtaagtggaggaactcaaaaagaaaatttgcccaccaaccctgctgtaacagttggccactacttagaagcttgttgagccaagaactattatttaaacaaatgagatactggaagaagacagccaatggtactaaaaaaggagytgctggtcttcctatgatgatgaaggctcactgcggtgctttccattactgttcacccctgctgcctgctgaggatgagggtgcctctgtgctgccatttctatggcactttcttcaccaccaaccctgccatcccaagacaagagcagc

SEQ ID NO: 245460 - DNA, 536 bp, Homo sapiens
ttgaccatttacaatctctgacctttgtggagacggtaagaatctgttgtagtgcagctacatacagtacaattcaggcaattttgttttttcacttgggttcagattgcaaattcattgctgtgagaaaaggatggaggcaaattttagcagcaacctccacctgactgcttgactggagtgctctgaattttaacattggacttctcagcaccaccagctgttgctccgggacccattcgctttttaatctcagctgccatcgtcatgaaagactgttctacattcgttgcattcttagcactggtttccaaaaacggaattccaagggaatcagcaaattcctaagagaataatgaggcacaattaacactgaaaaatctttttcactaattcttastgcatttctaccatccataatggagcgtgaggaactaagttcattggatccaaacagatgctacacaaattgtcactgtcacagtattctagtgcacatatttttaaaaggctgtggccttactgttactgcagaa

SEQ ID NO: 245461 - DNA, 536 bp, Homo sapiens
ttgaccatttacaatctctgacctttgtggagacggtaagaatctgttgtagtgcagctacatacagtacaattcaggcaattttgttttttcacttgggttcagattgcaaattcattgctgtgagaaaaggatggaggcaaattttagcagcaacctccacctgactgcttgactggagtgctctgaattttaacattggacttctcagcaccaccagctgttgctccgggacccattcgctttttaatctcagctgccatcgtcatgaaagactgttctacattcgttgcattcttagcactggtttccaaaaacggaattccaagggaatcagcaaattcctaagagaataatgaggcacaattaacactgaaaaatctttttcactaattcttagtgcatttctaccatccataatgragcgtgaggaactaagttcattggatccaaacagatgctacacaaattgtcactgtcacagtattctagtgcacatatttttaaaaggctgtggccttactgttactgcagaa

SEQ ID NO: 245462 - DNA, 512 bp, Homo sapiens
aaatattcttctttggtggcatattttgagctggttattctaagaaactgtagacacaggagtagctctgaaaagctgtccttttgtaaaataagtttatgtctacaaaggaaatctacattagtaacktatctatatcagagagagggctgcctcaagataacttttattacctgagagactttttatctgcatggcaggacaatctttctttaccatgcatttcccctcttgccctcctgtagcttatcattacctctccgaaggccccaagccccagttttgtttttttttttgagatggagtcttgctctgtcacctaggctggagtacagtggtgtgatctcagtttactgcaacctctacctcccgggttgaagatattctcctgcctcagctacctgagtagctaggattacaggtacccgccaccatgcctggctaattttttcaatttttttttttttgagattgagtctcgctctgttgcccaggctggagtgctgtggcac

SEQ ID NO: 245463 - DNA, 544 bp, Homo sapiens
ttagtgtccacttggtggtagaggttgtgctagaacaaaaacaatgataattaacactgacagttgctgtggctgagggccatagctaagttacagatacagaagagatggctcagcgaagctgagaaattttactgctttcrgagggtggaacttggtttataatccaaagtctttgcagttagactccaaagtttgatgataaaaagctcttctgttcaggctgggcgcggtggctcatgcctgtaatcccagcactttgggaggccgaggcgggcggatcatgaggtcaggagatcgagaccatcttggctaacacagtgaaaccctgtctctactaaaaataaaaaaattagccaggcgtggtggcgggcacctgtagtcccagctactcggaaggctgaggcaggagaatggtgtggacctgggaggtggagcttgcagtgagccgagatcatgccactgcaccccagcctgggggacagagcaagactccatctcaggaagaaaaaaaaaaaaaaaaaagctattctgttcagtaatg

SEQ ID NO: 245464 - DNA, 544 bp, Homo sapiens
ttagtgtccacttggtggtagaggttgtgctagaacaaaaacaatgataattaacactgacagttgctgtggctgagggccatagctaagttacagatacagaagagatggctcagcgaagctgagaaattttactgctttcagagggtggaacttggwttataatccaaagtctttgcagttagactccaaagtttgatgataaaaagctcttctgttcaggctgggcgcggtggctcatgcctgtaatcccagcactttgggaggccgaggcgggcggatcatgaggtcaggagatcgagaccatcttggctaacacagtgaaaccctgtctctactaaaaataaaaaaattagccaggcgtggtggcgggcacctgtagtcccagctactcggaaggctgaggcaggagaatggtgtggacctgggaggtggagcttgcagtgagccgagatcatgccactgcaccccagcctgggggacagagcaagactccatctcaggaagaaaaaaaaaaaaaaaaaagctattctgttcagtaatg

SEQ ID NO: 245465 - DNA, 612 bp, Homo sapiens
tgggcttgaatcacaggacataaatattgccatttctgtttatacttctaagacactgttttcacaatcacttttgataagtttttagatgcaattagaaaacactacacaatgctgagaaagtgcacaactctgctacaacgagatacatgctagaggtgtaagagcagattctagtgttyggtgagcattggcacagtctgccccagcctggcacacagatgtacaggatacacactacccagcatggcacgtagttggggagcaggggctaaggcctttcaatgctccaaagtgtctggccctttactgctaaaagcaagattcatggttttgcaagaacctttgggcaccagctagagtatatcctgtttgctgcaacattcttctttgaggcaagtccttctagatatgtgaaagagaaaaatcatgtaacctctcctataaaagatttcccaaaatcattttctagcatgaatgtgaaccaggcttcacagtatatatctaccagtattagcaccattatttaagcctgcactgaggtaaagataaactctcagacagctttgggtagaaattccagcagcaatcttgagtggggtgtttacagca

SEQ ID NO: 245466 - DNA, 544 bp, Homo sapiens
ttagtgtccacttggtggtagaggttgtgctagaacaaaaacaatgataattaacactgacagttgctgtggctgagggccatagctaagttacagatacagaagagatggctcagcgaagctgagaaattttactgctttcagagggtggaacttggtttataatccaaagtctttgcagttagactccaaagtttgatgataaaaagctsttctgttcaggctgggcgcggtggctcatgcctgtaatcccagcactttgggaggccgaggcgggcggatcatgaggtcaggagatcgagaccatcttggctaacacagtgaaaccctgtctctactaaaaataaaaaaattagccaggcgtggtggcgggcacctgtagtcccagctactcggaaggctgaggcaggagaatggtgtggacctgggaggtggagcttgcagtgagccgagatcatgccactgcaccccagcctgggggacagagcaagactccatctcaggaagaaaaaaaaaaaaaaaaaagctattctgttcagtaatg

SEQ ID NO: 245467 - DNA, 544 bp, Homo sapiens
ttagtgtccacttggtggtagaggttgtgctagaacaaaaacaatgataattaacactgacagttgctgtggctgagggccatagctaagttacagatacagaagagatggctcagcgaagctgagaaattttactgctttcagagggtggaacttggtttataatccaaagtctttgcagttagactccaaagtttgatgataaaaagctcttctgttcaggctgggcgcggtggctcatgcctgtaatcccagcactttgggaggccgaggcgggcggatcatgaggtcaggagatcgagaccatcttggctaacacrgtgaaaccctgtctctactaaaaataaaaaaattagccaggcgtggtggcgggcacctgtagtcccagctactcggaaggctgaggcaggagaatggtgtggacctgggaggtggagcttgcagtgagccgagatcatgccactgcaccccagcctgggggacagagcaagactccatctcaggaagaaaaaaaaaaaaaaaaaagctattctgttcagtaatg

SEQ ID NO: 245468 - DNA, 651 bp, Homo sapiens
tggtcttatttgagtgacagtcagagtcaagattcacatgcacctgggaataccagccctgggactgtgtgagggcaggagtaaggtctggagcaaccaatctccatttcttgcctctcctgaagagtggcagtcccttcagtttgaggcatgaatgtctccttacagttctttcgtaactaggcagtagactgttgatccccttttaagaaagcatctttattaaatcagttaatctaacactgtcataaaatatgtgtaaaatataaggawttttttttaattaaaaaaaatttttttgagacagggtctcgctctgtcacccaggctggagtgcagtggtgcgatctcagctcactgcaacctctgcctcctgggttcaagcaattctcctgcctcagcctctcgagtagctgggactacaggcacgtgccaccatacctggctaatttttggatttttagtagagataaggtttcactgtgttggccagggtggtcttgaactcctgacctcaagcgatctgcctgcctgggccttccaaagtgctgggattccaggcgtgagacactgctcctaggctaaaatataaagaattaatgatccaatgaacaacccatatgcctgcctcccaacaccattactttgaag

SEQ ID NO: 245469 - DNA, 555 bp, Homo sapiens
aatgattgtatttgatgatgaagccagaaatgggtagaaagaggcacctcctcttctcactgacatcagtaagatataatgatgtattgtcatgggtcattgtgtgtgtctggcaccttctggctctgtgctggggtcagtctgggtgctgtggtcatgacctttgatgcatgtgtgaaacattctgtcaggaggcagctggctggagccagcggcgctgtgaccaacggagatacacaggctgggtgggtcctgcagggattactgtgtgttggaagcgggcgcrgggtgggggtgtcctgtgatcccaaaggttatgaatcaacaatcaaattccataacaataaaatttaatcagggcctttgcttcatcaagtaaatagatggtgaaaattaattcttcatcctttttctcttgttctgattcctagtcatctgctgaaatgggtggtttgcattaaaaaaaaattgagctctgaactatgtgaatggctaattacagatatttatttttaaatatgctcagaaaatgagtaaatgaatgcttatgaggcc

SEQ ID NO: 245470 - DNA, 607 bp, Homo sapiens
cttgcattgccttgcctcagtttcctcatctataaaataaaaatacataacatgaccaggcagagtggcatgtgcctatagtctcagctacttaggaggctgaggcaggaggatcgcttgagcccaggagtttgaggacagcctgggcaatgtagtgagagcctgtatcttaaaataataataacaacaattacatgattttgatggcatgtggaaaagcgtggaagtttccttttgcatggtgcttggcatgtacaaaacacatagtgaagrctgggtgtggtggctcacacctataatcccaacactttgggaagccaagatgagaggatcacttgagcccaggaatttgagacctgcctgagcaacatagtaagatcctgtctcaacaacaaattttaaagttagctgggcatggtggttcatgcctgtattcccagctacttgggaggctgagacaggagaatcacttgaatgcaggagtcagaggctacagtgagctatgattgcaccactgcactccagcctgggcaacagagcgagaccctgtctcaaacaaacaaatataacacatggtgagatactaactatggattccagtttgggc

SEQ ID NO: 245471 - DNA, 607 bp, Homo sapiens
cttgcattgccttgcctcagtttcctcatctataaaataaaaatacataacatgaccaggcagagtggcatgtgcctatagtctcagctacttaggaggctgaggcaggaggatcgcttgagcccaggagtttgaggacagcctgggcaatgtagtgagagcctgtatcttaaaataataataacaacaattacatgattttgatggcatgtggaaaagcgtggaagtttccttttgcatggtgcttggcatgtacaaaacacatagtgaaggctgggtgtggtggctcacacstataatcccaacactttgggaagccaagatgagaggatcacttgagcccaggaatttgagacctgcctgagcaacatagtaagatcctgtctcaacaacaaattttaaagttagctgggcatggtggttcatgcctgtattcccagctacttgggaggctgagacaggagaatcacttgaatgcaggagtcagaggctacagtgagctatgattgcaccactgcactccagcctgggcaacagagcgagaccctgtctcaaacaaacaaatataacacatggtgagatactaactatggattccagtttgggc

SEQ ID NO: 245472 - DNA, 579 bp, Homo sapiens
ttttaaattttcattatggaaagctcattacctgccccccctttagaattttaacttgcctgattattggcatggcctgagaagtggggaggatgaggacttgctgagagagggcaggtgtgggtggcaggagcatggcattttttgggaatgaggcctcatgtcctgggttagcagtcatgacatctgaaactcccaggacttttttcttgggctccctgggcagcctgggccagctctgcagagccttgaggtcaacagtgggtggggagcacagactgcctgacttcaggaacccttttccctcttctgactgagtgacagcatcctctctgagtctcagctgcttcgaccctaaaatgggggtaagacctcttgctttaccccttgctgagacactgggcagactaccttcaaaagctatggtggttcccaacagtgagggaggtggggagtgcttycctgggggtcgtgcaccgtgagtaccagaacagaaggcctgtgggtgcaggttgggaaaagcacctatggactgtcgtgagctccccctccaacctgttgaatgggattgtcccgaag

SEQ ID NO: 245473 - DNA, 581 bp, Homo sapiens
ctaaattaacacctgcccggtttagtttatcctttcttcctcaggattccagtgcaggagaggctggtgtttttaaaacccagttctctcttagactcagctgaaaggctcaaaggtaattagctgttatggaaagactgcattgtcatttttaaaggctgccttgtgggagtgatcattatctgcagcaggataggaacacggcaataaaaatagaccccagacccttgtctgcaggagctaaaagaaaccaaccaattggtataatgaaaattaggcagtgggccraaagttgccattctctcactttttagttagaaaaagtgtcataaagagaatacagtttatttactgttaaaatttagtggattcagaaaagcaaaaataatgacaaagaatcacccataaatactaccactcagaatagctgctgttagtgcctcagcaaatgtacttccagtctctagctccggtgctcatgaataaatgtttatttgtacagaatggagatcacgctgatgtataattttataaaccacttttttttttttttacccaataacatttcagtcttttcctat

SEQ ID NO: 245474 - DNA, 554 bp, Homo sapiens
attttggctgtacgctaaacctcagattttcaaggtatactctgtgtgaatagatacacaaaagagtggacccagcagaaaagccaaaactcatgttgctggcttaaaacaaaccaaaaaacatatatggtgactctaaattrtaagtgtttaaaattaatttcacttgtacaaaacaactccagcagtaagtcagactttatcaggctttgagatcaaagcccttggaattatctttcatagttcagacatcattgattgaatcttgttttactaaatctttctcgcttctcacatctccatggatttgtatgtgtctgaccacagacatatgtctgtacgtgtctccacccacagagtgtctgagtgtgtgtgaattataaatatacccatctttcaaaatagatctttatctttggtgttaattgtgtctttgcttcttccactttcacagtgagtaagtatagttgggaagtgtacctatatatacagttggccatatactgcctctcactcattaattgtaagctcttctctgtagttagtttcagcca

SEQ ID NO: 245475 - DNA, 554 bp, Homo sapiens
attttggctgtacgctaaacctcagattttcaaggtatactctgtgtgaatagatacacaaaagagtggacccagcagaaaagccaaaactcatgttgctggcttaaaacaaaccaaaaaacatatatggtgactctaaattgtaagtgtttaaaattaatttcacttgtacaaaacaactccagcagtaagtcagactttatcaggctttgagatcaaagcccttggaattatctttcatagttcagacatcattgattgaatcttgttttactaaatctttctygcttctcacatctccatggatttgtatgtgtctgaccacagacatatgtctgtacgtgtctccacccacagagtgtctgagtgtgtgtgaattataaatatacccatctttcaaaatagatctttatctttggtgttaattgtgtctttgcttcttccactttcacagtgagtaagtatagttgggaagtgtacctatatatacagttggccatatactgcctctcactcattaattgtaagctcttctctgtagttagtttcagcca

SEQ ID NO: 245476 - DNA, 399 bp, Homo sapiens
gtggaaacctcctccttggtatcctgctttgcattcttgtccttaaataatctattcttcaaatagcagtcagaggacttttctaatcctattgttctcactcttaaatctctcagagcctccccaccgawctcaaggtagagcccaatttccttctagaatcctataaggcccctatccagcttcatctctcaccacacacccttccttgctcatactctgctgatcttgagctctggcctggagacaagccttcttgtgtagtggttagagatcctggctccccacctgattagctatatgatgttggatgagttacttaaccattagacttgcctcattgccaaggcaggggcaacaatgatccttatctcctaagctcattttagaaatatatgg

SEQ ID NO: 245477 - DNA, 562 bp, Homo sapiens
ccatccatccatccatcacacagtgatgtcctagagtaaatggccatgtctattgtttactgccacaccccaaggacctatcatgttaaattagtgttggatgaatagacatggaagatcctgtgaagtctcaatttcatattatctgtttgctcttataactcacaagaaaattaaaagamcacatctttttgtagagctgattgatatattcaccaatacgattaaggtattcatcacccgtcagtctcttattttaaaccaatattttactgggtttatgtattcagtgcgagaaaaactttactccaaatcccttattattatggctccttgtaccttaaagtcatacaggtgcactcaatataaacgtgagtgggcgagggatggagcagctgtgattgacaacagtgacaatagactgtggagcaagaagtgacagaagtttgctgactggattctatatttaatatttccaagcaaattaattctgtcacctttgtgagacttagctatgcttcagggcatgacattttagccatggtttttttcttcagttttt

SEQ ID NO: 245478 - DNA, 602 bp, Homo sapiens
agccacaaaaaataataaaatcatgttgactgcagcaatgtagatacagctggaggccattaccctaagtgaattaatgcaggaacagaaaaccagataccacatgtccccacttataagtgggagctaagcattaggtacacatggacataaagatgagaacaacatatgctggaaactactagaggggaaggggggaggggagaaagggttaaaaaactactgattgggtactatgctcactacctgggtgaaaagatcattcatacccaaaatatgcccatgtaagaaacctgcacttgtatccccagaatctaaaataaaagttgaaattataaaagaaaaaagaaagaaagcaccacaagctgaggtgggagaaaactttgagargtgatggatcggtctatggctttaaaggtggtaatggatttgatatggtttggctgtgcccccacccaaatctcaccttgaattatagctctcataatccccacatgtcatggaagggaccctgtgggaggtaattgaatcatgggggtgggtttttcctgtgctgttctcatgatagtgaataagtctcatgagatctgatgattttataa

SEQ ID NO: 245479 - DNA, 592 bp, Homo sapiens
atcagtacacctgtgaagtaatgaggaaagggagagaaagcataatgaggagactctagaagtcactctacaaggcagacagtgccttctcacaattcaagtaatgattcactccatgttggatatttttgtgcctatattgaattatgcagcttagttctgagcaccactaaaaaggattcattcattagcaaagagcttcatacacatggatcctgaaccagatacgaggcttattcagctttctccttgtgcttattgaaatctattacttcactatccaaaagaaatgataaaatgaccaatgtaacttcatagttagtatgaggatagttttctaggttcactgtaattagtttttatacwgatatgtgctgtgatatgctcatttctggttctcctgaaacaatataaatacatgtaggatgtaatgcctttttagatgacatatcaccattccttttgcccactcatgtgtcctcaccaccaagaaaggctttctcaagactttctggaaaggaccgtataaacagagaccatggacatctcagcaggaacctgggtaaagaaaagaccccaggagtttccatga

SEQ ID NO: 245480 - DNA, 612 bp, Homo sapiens
cactgtaattagtttttatactgatatgtgctgtgatatgctcatttctggttctcctgaaacaatataaatacatgtaggatgtaatgcctttttagatgacatatcaccattccttttgcccactcatgtgtcctcaccaccaagaaaggctttctcaagactttctggaaaggaccgtataaacagagaccatggacatctcagcaggaacctgggtaaagaaaagaccccaggagtttccatgatgtaaatcatcatggaaaatatcttatgaatgcctcataagaccttttggccttggtagaactcttgggagctgggggacatttcatgatggaccctcactccatattcagtgattgagtttcctgttcactggcaaatcatgttcacttattgaaaaaaaagaaatgtatcctttgagtgtgtgttctgagatctatgcttaataaacatgtcagattcttgtaaatctgtaatgcacacacacacccctatatttgtgttctattttagaagaatatactggaaccacacataccaacctattaacrgaggctacattaaagaactgagagagagtatgaggcaagaagcaaaaaggagatt

SEQ ID NO: 245481 - DNA, 554 bp, Homo sapiens
actatgtttatgaactctgattttgatggcagataagctgggcacaacttttgagctcgacaacatattccttcagttagttttctcaaattactcatctcgaagcctcagttactcatctagaaaattcaggtgcctatttcataatagtgatgacaatgagagaatgcaygttggacacttagcagagggcccacaaactcttaacatgtgagtggctcttgattgttcgctgtctttggccagagactcaaaaacatttctttttttccatcttccttgtgaacatgaggctctcagagaactgtggtcgattttcttatcatttctgcaaaatcattttagtggacagggaggagaaaaatcctctaataaaaaatcctatcactaagttgagcatacataagcagtacaaccctctctcctcactctgaaaggtatatttatagctgcagagggcagctgaggtcaccaggaagtggatggaagaagagtcagttcatcatggagtgaacattaaccaattaggagcaaggaccaggaaggagtcagac

SEQ ID NO: 245482 - DNA, 601 bp, Homo sapiens
gagattgtggagccgcgtgtcctagattccagctttggctctagaccttataaaccaaccctgtggcctttaatctctctcatcagtctaatggaaatcatattacctgccttccttatctggaaatgtcatcatcaggatcaagagagataaggtttgagaaagtaatgtgtaagccattaagtagtacacagatgaycattactgctgtcaaacaggaatttggtgcaatgaactctgttgcccttttctttcaacacaagtgttaaacgtttataaaattatgaatactttatgtactgcattgtattagtttcttagggcttcggttacaaagtacagcacactgggtggcttgaaacaacaggaattttttatctgatggttctgttggctacaagtccaaaatcaatgtagtggcaggatcatactttctctaaagactagagtctcccccttttcagcttttagtaaccccaggtgttccttgggtgtggcagtgtaaccagttctgcctctgttttcacatggtcatctccctgagcatctctgtgtcaccaagtctcaatctaaggacacttctccttggatttagggccac

SEQ ID NO: 245483 - DNA, 601 bp, Homo sapiens
gagattgtggagccgcgtgtcctagattccagctttggctctagaccttataaaccaaccctgtggcctttaatctctctcatcagtctaatggaaatcatattacctgccttccttatctggaaatgtcatcatcaggatcaagagagataaggtttgagaaagtaatgtgtaagccattaagtagtacacagatgatcattactgctgtcaaacaggaatttggtgcaatgaactctgttscccttttctttcaacacaagtgttaaacgtttataaaattatgaatactttatgtactgcattgtattagtttcttagggcttcggttacaaagtacagcacactgggtggcttgaaacaacaggaattttttatctgatggttctgttggctacaagtccaaaatcaatgtagtggcaggatcatactttctctaaagactagagtctcccccttttcagcttttagtaaccccaggtgttccttgggtgtggcagtgtaaccagttctgcctctgttttcacatggtcatctccctgagcatctctgtgtcaccaagtctcaatctaaggacacttctccttggatttagggccac

SEQ ID NO: 245484 - DNA, 638 bp, Homo sapiens
ctttcatttttcacagtgctgattaaggcatactacaaggcagatgttattccgtaccatttttaacaatttacatttagcaccaaagctggctttgtacttgttccagtagatcaattcacttttttaaaacttcaaggtcaatctctgtaacactgtgactcccttaacaatttaatgtttcataaacttctcttggttacagaagccctgccaccatcccatttataagtgtttgctagtcaacacacacacacacatacacacacacacacacacacamgacaattcaatagtttccttcctcaacagagtcaaaccattatttaagaggcagttcattaaacaaagagaagagtctctaaaaaagagtctgaatttaacctgtcagaatatcttaatttttgctaaaacagttctagaaccagaagtgattgacagtcctgaagtattctttgctcctcacagctgagatgcagaacaaagagtaagaaacatttcccttttctttttcatgttttagtgatttagcaaattatatcctatttaattcaacctaagacaaataaaagtagataaaagcatctttagatacaatgcaatgttgacaaatatgctcattaaacacaaattgtgac

SEQ ID NO: 245485 - DNA, 546 bp, Homo sapiens
ttgttttcttgattattaaaattgagacaccagattttttaattgcttttaaaatttatgttttttaggttcaaagatctagtttggtaagtttacagataaaagagtactttctttctctgcatataggtggatcttcctgaggactggttggctccttataaagagagtctgacggtagagtgccctttaacatgggaatcccgcctctaaaggaggaaaaagggcacagaggaggttcatttcatcagagtttataataatttttgggtagaaataacatgatcaaatattcaatgtagacctatgcagtcatgaaaatcatttgttagaatatttaagaatgtcraaaaatacccaagatctaatgttaattgaaaataataataaagtggtattcccaatatgatcttgttttgataagaaaaaagaacacacacacatacacacacagatgagtgaattataaaaccaaaatattaccattagttaaatctaggtgtaggattacagatgcctttaattttctttagtttttaaatgttt

SEQ ID NO: 245486 - DNA, 562 bp, Homo sapiens
gtcattgagattgctcttctgactgggtctctttatatgtaggtgatactgattgacattctacttcatccatgctggttgactattcccagacaaatgaacatgaaacgttcaagtgtgtttacatttgcatccagggaaagtcatccttgaaataaaagaagagctggacgatcggattatttttttcagtttctgtaatagttcattgggtgtatttactcattaatgaattaatttaaaatgtttcttgattaccgtcttttkccaggaattattctgggtctcagattaaaaaaataataataataatgaagaaaagccctgctcctgttgaccttacattctagtagagaagagaactggacaagtaaacaaataagctaattttacatagttgtaagtgctatggaagaaatgagcaggatggtattgtggaggataatcagaagaagaatactttagatagatggtcaaaaaactgctctctaaaaacattgcaaaatttcagtgattcgggccagcagctttgtcatctaataagcatctaattgttgtggcc

SEQ ID NO: 245487 - DNA, 485 bp, Homo sapiens
tttgcctaaaatggaatcacctctagagcacataaagtttgagacaattaacattttactggggagaaatgaaatatatacatgaaatagtgatttacagcaatcaaagacaacatactcaaagtgatgagatgctaagttatccaggtttgagagaagaaaaaaaagaatatggttagagaagtgaaggaggtctttccagagaacatgtcacttgagcaggcctggagaacagttctgccctgggagcccatgctggtgtgccctgtttgggtggtgtggtggtttyaaaattctttgatattcctcccgtcaagaggcatagttgagatttccccttcaatatgagtaggactcagtaactcacttttaacgaatacaatatgggagaagtaacaatgtttgacttttcagactaggtcattgtattactccattctcacactgctataaagaacttcctgagactgggtaatttataaagg

SEQ ID NO: 245488 - DNA, 483 bp, Homo sapiens
ctaataaattgcatactccagaatggccaatatgatgctattgcagccattacacaacttctattgatcttttgtaatactgaaagtagcttttggactccaaggctgctgttcagaccccaacccaatgtgtgctatgattgaaaactgatgccttcctaatactgatgacagttaagattgactccaaagatgggagtcacacccaggaagcatcragacactggcttgctctataaaggcagccccacatatgagtactttctatagaggaaggaccacagcctcatgagctaccaaaaagtctgcctggccagagatcgtgcaagtttacatcctccttggaattagctgaatgaccatgtaacaggacacacaccttcgagcctgggttctgacatgacttctgggtaactgttctcagaggtttatatggcactggaggattccaaagaaacaaggcactaccactcccctcaagga

SEQ ID NO: 245489 - DNA, 611 bp, Homo sapiens
cttgatgctgtcctcaggatagtgacttcttgcaaaatctggttatttgaaagtgtgcagcacttcccaaagcttgctcctgctctggccatgtgagatcccttctcctccttccccttccaccatgattgcaagctttccragccctcctcagaagctgagcagatgccagcatcatgcttcgtataaagcctgcagaatcatgagtcaattgaacctcttttctttgtaaattaccaagtctcaggtatttctttgtagcaatgcaagaccagcctaacacacaggcttatttctgattggttggtgcagttgagttctgatggtcaatacagtggatccctgattgtttgatacagctgagcccccaattcaccacctgaggtgagctctgattggttggcttccaaacctcaaaccagaagtctctgttaaatgtttcttccaaactgcaggtggtggtgcagggggctctgactgtggtttatcttggcactgtcaacaggaactggtttgatttgattatagaaagagacatcctgtaatacttttacaacatctttctgagaatacagtgtataagattgctccctcacccagccatgaccacc

SEQ ID NO: 245490 - DNA, 611 bp, Homo sapiens
cttgatgctgtcctcaggatagtgacttcttgcaaaatctggttatttgaaagtgtgcagcacttcccaaagcttgctcctgctctggccatgtgagatcccttctcctccttccccttccaccatgattgcaagctttccgagccctcctcagaagctgagcagatgccagcatcatgcttcstataaagcctgcagaatcatgagtcaattgaacctcttttctttgtaaattaccaagtctcaggtatttctttgtagcaatgcaagaccagcctaacacacaggcttatttctgattggttggtgcagttgagttctgatggtcaatacagtggatccctgattgtttgatacagctgagcccccaattcaccacctgaggtgagctctgattggttggcttccaaacctcaaaccagaagtctctgttaaatgtttcttccaaactgcaggtggtggtgcagggggctctgactgtggtttatcttggcactgtcaacaggaactggtttgatttgattatagaaagagacatcctgtaatacttttacaacatctttctgagaatacagtgtataagattgctccctcacccagccatgaccacc

SEQ ID NO: 245491 - DNA, 611 bp, Homo sapiens
cttgatgctgtcctcaggatagtgacttcttgcaaaatctggttatttgaaagtgtgcagcacttcccaaagcttgctcctgctctggccatgtgagatcccttctcctccttccccttccaccatgattgcaagctttccgagccctcctcagaagctgagcagatgccagcatcatgcttcgtataaagcctgcagaatcatgagtcaattgaacctcttttctttrtaaattaccaagtctcaggtatttctttgtagcaatgcaagaccagcctaacacacaggcttatttctgattggttggtgcagttgagttctgatggtcaatacagtggatccctgattgtttgatacagctgagcccccaattcaccacctgaggtgagctctgattggttggcttccaaacctcaaaccagaagtctctgttaaatgtttcttccaaactgcaggtggtggtgcagggggctctgactgtggtttatcttggcactgtcaacaggaactggtttgatttgattatagaaagagacatcctgtaatacttttacaacatctttctgagaatacagtgtataagattgctccctcacccagccatgaccacc

SEQ ID NO: 245492 - DNA, 604 bp, Homo sapiens
taatcttttatgtttccttgacaggaatgtgtattcagtatctgttgattataagaattttataaacatctattaggtcatgttggttgatactgttgttcaaatcatctataacctttctgatatttttggtctactattctatcagttactgagaaaggagtgttgaggtccccatctctgactgtgaatcaatctatttctacctttgctgctgtcaatttgtattgcatatagtttaatgcattattattagatgcatatacatttaggattgtcgtgtcttctcaataacttggctctattattataaaatgcccctcttgtgtctggcaatagttgctgttttgaagtctactttgtttgacattaacatacatatacagattttcttatgagtagtatagtagccaaaggtctgagaaccagggatgggaaatacaggggatagaagagaccactgstgtaagtcccagagtctgaaggccagagaaccaggagctccatccaatgtcccaaatcagaagagagaggtcccagttaagaatgcaaagagaattaacccttcctctattttcttgttctatttgggccctcaacaagt

SEQ ID NO: 245493 - DNA, 458 bp, Homo sapiens
caacactttgggaaatcaggcaggcagaatgcttgatctcaggagttcaagaccagcctgggcaacaaggcaaaaccccatcgctactaaaaatacaaaaattagcmaagtgtggtggtgtgaacctgtagtcccagatacacaggaggctgaggtaagagaatcacttgaacctgggtggccaaggttgcagagagccactgcactccagcctgggtgacagagtgagcccctgtctcataaaaacaaaacaaatcagaaaaactacagaggcctagaccctatccaaggcctactaaatcaagatcttcagagaacttttaacacacatagttaagaaccactaaatttttgaatgcccactaaattctggacactagctaccagcattaatcctttaatgccccccacctgcataccacagaacagatttcctaacagcaatgaacagtatgcac

SEQ ID NO: 245494 - DNA, 458 bp, Homo sapiens
caacactttgggaaatcaggcaggcagaatgcttgatctcaggagttcaagaccagcctgggcaacaaggcaaaaccccatcgctactaaaaatacaaaaattagcaaagtgtggtggtgtgaacctgtagtcccagatacacaggaggctgaggtaagagaatcacttgaacctgggtggccaaggttgcagagagccactgcactccagcctgggtgacagagtgagcccctgtctcataaaaacaaaacaaawcagaaaaactacagaggcctagaccctatccaaggcctactaaatcaagatcttcagagaacttttaacacacatagttaagaaccactaaatttttgaatgcccactaaattctggacactagctaccagcattaatcctttaatgccccccacctgcataccacagaacagatttcctaacagcaatgaacagtatgcac

SEQ ID NO: 245495 - DNA, 562 bp, Homo sapiens
ctctccctgtacactctgtccctcccccgtcctattcatccttcacagaagctcaaactccatcttcagtaaagtgtcctggttgcttcagttacagaagacctcttccatttcaaaacttttgtagtgcttataatctagtccttccactttgctactttattatatttagtctttcttgtgttaatgtgtagttgcatccctcataaatctttataattattattataaagaatattgtctttaaaattgttattttgaaggatgaaatgggaatgaggagacagagatctacagattcacagtaacaaaagttgttatattgtcttcactaattttgagattaatagatcctgtgcatagctatgaaatgtaaatatcactgaataaatccagtgttggaatacgtttaacttctgctcaagcaatggcctttgtctttttatcatgcatattcttgatatctttttctctctcattcattcagcamaatttattgagctccaattgtgtgtcaggcactgatctaggtgcaagggatacagctgtaaacaagagacaa

SEQ ID NO: 245496 - DNA, 548 bp, Homo sapiens
gcatctgctttctccaactacttctaataccaactgttgcagatcttattccccagaaagcagaatttgaaatggagactagtgtacaggaagcttttggaatcaacacttatggaagggatgtgaataaagtggtactgaacaggaaaagttggactgtaatatagtctcaacaaagtcctcagtcaactgtatatggaactgtacagctacaaccctcaaattcaagtgacagagctgggattttgcacrtgcacatccatcagttattgaataaggctgctctgaaaagggagtatggcctagagcaaggtgactcccttaactgagacagctgtaaaatgctgggagtgctgcctgcagagagccctcagattttaaccccttttaaagtgtggtgtaatttactataccaacagaacaaagaagattaagttggcacttttatttttacttcaacccaaatacttatttctctcctcttactgcaatgagcctctgatatggtgacaaatacaagtaatgatagtcaacatttttgtttcatt

SEQ ID NO: 245497 - DNA, 515 bp, Homo sapiens
gggactaagtcccccttgtggggtctttaaggatcactccaacatggccatgaaaattacacccaagaggtatagaggcatatgaaattagggggtttattatactcacaggtcttagagagggaggaacaggtctgccactcaggkgtcagcactggaggaatgacaagggagccacttcaaccaagcaggtggggagcaagaaacacagagagagcaagcacgggagaggtgtggcgcacacaagcagaaggcatggggagatgtcactggtgcatttgcagtttttaatttattctttattatcttatttatttgttttttttgagacagagtcccactctgtctcctaggctggagtgcagtggcgcgatctctgctcactgcaaccttcgcttcccaggtttaagcgattctcctgcctcagcctcccaagtagctgggattacaggcgcccaccaccatgccccgctaattttttatatttttggtagagatgggatttcatcatgttt

SEQ ID NO: 245498 - DNA, 559 bp, Homo sapiens
ttggtggcttgaaacaataaaaatctctttctcacttgggtaaagtttaattgagcatccctgatcggcagacattcttcctcatggtcaaccagggatctggctcatcacatcttgagctctgatgtggattctttagggcctcgatcttctgcatttggtgggtggaccgagacagcatggaggatcatgcaatggagggtctcctggcccagcctgcaggtggcacttgtcacttctgttcactcgccattggcagaactcagtcacatggccacatccagctgcaagcgagctggggccatgtagccccactgtgtgccctggaagaacaggacactgtttgtgtgagcagtcggtggtgtctacctgagcctcaccccaggkcttctcgaatgctcacctgagaatcatcactctatcacagtggcttccctcctccaatcaggcctaacatgtactgggctttcactgaaccagccatggggctgtgcacttgccatgcattatttcaactcaccctcaaaataatccttcaaggaaggttctctgttgttat

SEQ ID NO: 245499 - DNA, 633 bp, Homo sapiens
ctttcattttcctagatgctttcaatatcatgctctaacccggtccttctctacaaaatagctgcaggtggttgcacatttctgtggtaacaatgcgtcagactctgaggccctgctgaggtgcctgaggacaaaaccctccaaggagctgctgaccctcagccaggtgaggacagagggggcagttttgggggcaggcttgcccttcgaacggagagatgaacaaatcctacccctctgytatttatttgaatttggaacatagaaaagaggaggattgaggtacttggtaacagctgtaaaaaaataagtagggatatagaacccttgtaggtaatttaagaaaattgttggggcaggggttcaacttagcctggagaagattcagcaaagtacaaggcttgtctctaagtccctgaaagcatctcactggagagaaggaccacacttgttatgcatgcttccagaagctgaagtcaaaatcaggagctggaagttctattaggaagtcattttagttttgtgtaactgaaaaccttccaagacctcagttgtctggaaaaggactgggctcctttagaaggtagtgagatgcccacctctccaggtattcaagcaaaatctagctgactg

SEQ ID NO: 245500 - DNA, 566 bp, Homo sapiens
ctgaccacttcatctaccaccatttttycctttgcatttggccagtggttctcaaacttaaacatgcatcaggatcacctggaggaccagctacaagaaggttcctgggctatacaccccaaccccagagtttcttattgaggagcctgaagtgggcctggaatgtgcatttataacaagttcccagatgatgctgatgctgctggtctaggaaccacactttgagaatctctgggctaggctatattagtctcttctcatgctgctaataaagacatacctgagactgggtaatttataaaggaaagaggtttaataaactcacagttccacatggctggggaggtctcacaatcatggtagagggtgaaggaagagcaaaggcacatcttacatggtggtgggcaaaaaaaaagcttgttcaggggagctcccctttataaaaccatcagatctcatgagatttattcactatcatgcaaatagcatgggaaagacctgcccccatgattcaattacctctcaccaggtccctgccacaacatgtgggaattatgggagctata

SEQ ID NO: 245501 - DNA, 566 bp, Homo sapiens
ctgaccacttcatctaccaccatttttccctttgyatttggccagtggttctcaaacttaaacatgcatcaggatcacctggaggaccagctacaagaaggttcctgggctatacaccccaaccccagagtttcttattgaggagcctgaagtgggcctggaatgtgcatttataacaagttcccagatgatgctgatgctgctggtctaggaaccacactttgagaatctctgggctaggctatattagtctcttctcatgctgctaataaagacatacctgagactgggtaatttataaaggaaagaggtttaataaactcacagttccacatggctggggaggtctcacaatcatggtagagggtgaaggaagagcaaaggcacatcttacatggtggtgggcaaaaaaaaagcttgttcaggggagctcccctttataaaaccatcagatctcatgagatttattcactatcatgcaaatagcatgggaaagacctgcccccatgattcaattacctctcaccaggtccctgccacaacatgtgggaattatgggagctata

SEQ ID NO: 245502 - DNA, 633 bp, Homo sapiens
gctgcattatctacctacagtctgaaaagctctgaatgctgaaacacacatgggactggggatctgtattcactacacaccagccaggcatcaggccaggttctgcaagaccagtcatttactcgttcattcactcatttattgttccatcactaattcattcattcactgcacaaacttagcagtatctgatcttactctagacactaggatatagagatggattgttttccttcctttcttttctcctttttccatcttcctctttttccataaacgtttattcagtatggactcagtgccgatgttcattttgttcacttgtccatggaacacatgtgtagtgagagtccacatgcccctgcacttccctgggcactggggtgcaatgtggggtggacagagatgacaagacacttcaatacagtacacaggaagcacagggatgtccaaggctctgtggtgcccacaggaggggacaggcrgctctcttggggagaaggatttggaggattaatggagcttgtctggtgatggaaggggtgggtggagaaactgggaagaaccaagaggaccaactgggagcagaggggtgtgaagagatcagctgagggttggctgcagcaggagaga

SEQ ID NO: 245503 - DNA, 517 bp, Homo sapiens
gcttaataaaaaatttaccattttaaccattttaagtgtatagttcaatggtatcaagtacattcatattgttgtacaaccatcaccgctatacatcttcagaacgtttttatcatcccaaactgaaaatcagtacctattaaaaataactccccaccmttccttcccccagaccccaataaccaccattctactttctgtctctatgactgactttttagttactttagtgactttagttactcaatgtaagttgaatcattcaatatttgtccttttgtctggcttatttcacgtagcataaggtctcaggattcctatatgctgtactatacatcagaatttcctccttttttaaggctgactaatgttccattgtatgtatatatcacattttgtgtatccatttattcattaatggacatttgcgttgtttccaccattcagctattgtgcaaggaacaattggctattggctacatttgcctattggctataatgctgcaatgaacatagt

SEQ ID NO: 245504 - DNA, 517 bp, Homo sapiens
gcttaataaaaaatttaccattttaaccattttaagtgtatagttcaatggtatcaagtacattcatattgttgtacaaccatcaccgctatacatcttcagaacgtttttatcatcccaaactgaaaatcagtacctattaaaaataactccccacccytccttcccccagaccccaataaccaccattctactttctgtctctatgactgactttttagttactttagtgactttagttactcaatgtaagttgaatcattcaatatttgtccttttgtctggcttatttcacgtagcataaggtctcaggattcctatatgctgtactatacatcagaatttcctccttttttaaggctgactaatgttccattgtatgtatatatcacattttgtgtatccatttattcattaatggacatttgcgttgtttccaccattcagctattgtgcaaggaacaattggctattggctacatttgcctattggctataatgctgcaatgaacatagt

SEQ ID NO: 245505 - DNA, 517 bp, Homo sapiens
gcttaataaaaaatttaccattttaaccattttaagtgtatagttcaatggtatcaagtacattcatattgttgtacaaccatcaccgctatacatcttcagaacgtttttatcatcccaaactgaaaatcagtacctattaaaaataactccccacccttccttcccccagaccccaataaccaccattctactttctgtctctatgactgactttttagttactttagtgactttagttactcaatgtaagttgaatcattcaatatttgtccttttgtctggcttatttcacgtagcataaggtctcaggattcctatatgctgtactatrcatcagaatttcctccttttttaaggctgactaatgttccattgtatgtatatatcacattttgtgtatccatttattcattaatggacatttgcgttgtttccaccattcagctattgtgcaaggaacaattggctattggctacatttgcctattggctataatgctgcaatgaacatagt

SEQ ID NO: 245506 - DNA, 584 bp, Homo sapiens
tactcaccagcaagacaggtacacatcattttcacaatcacttctaattttccaccattgtaaaaaaaataaaatatttaaccactttcttattgtaaaataaacaatttacttttccaggacccactgcctccccctccccactctccccttttttttaaacaatcttgaaccctatccattaaattaaatcaaagcaaaactttagggacaaactacgtcggtcttcacctgtgaatttcctgatgtccagtagagggcagcattatcacaaaggaaaaacgcttccctctattctgaggctcctgagatgctggtggtgtgacatcgcagaacttggactgacaataagaccatgccaaatagttaaattayatacaagccaatacaatatagtgttatccattccatctgtaacatttggaaagaggaaaaggcagaatccactccctgaaaagtctgactgaaaagactaaactcactagcagaacagaggttggagccagcagtttttcccttttccacctcctggactttcccattaagtctccaggagcctacctcagagggacataagggatttc

SEQ ID NO: 245507 - DNA, 584 bp, Homo sapiens
tactcaccagcaagacaggtacacatcattttcacaatcacttctaattttccaccattgtaaaaaaaataaaatatttaaccactttcttattgtaaaataaacaatttacttttccaggacccactgcctccccctccccactctccccttttttttaaacaatcttgaaccctatccattaaattaaatcaaagcaaaactttagggacaaactacgtcggtcttcacctgtgaatttcctgatgtccagtagagggcagcattatcacaaaggaaaaacgcttccctctattctgaggctcctgagatgctggtggtgtgacatcgcagaacttggactgacaataagaccatgccaaatagttaaattatatacaagccaatacaatatagtgttatccattccatctgtaacatttggaaagaggaaaaggyagaatccactccctgaaaagtctgactgaaaagactaaactcactagcagaacagaggttggagccagcagtttttcccttttccacctcctggactttcccattaagtctccaggagcctacctcagagggacataagggatttc

SEQ ID NO: 245508 - DNA, 584 bp, Homo sapiens
taggagtggcagaggcaaagagcctccaggaaactttggccttggggtggagctcaaaggggagaggtgcactccccatgggcataartgggggttacctacaccccaacttctacaggcatccaatacccctaaacccagagagtcttttctgtctctattctgattgcataggtgcatggtggtgtctttctttccaggagttaacgtctcctttttctgttctaaaactagttatcgtcattctgttggcctctcagtgtccaaaatgctgtcatttcttctttcacagtttgtcagtgtgggtttgtagctttaaaaactttatttcactgtttttttttaggataattggaggggggaaataaaaaattttggatccctcttctttcacaggaagtggtaaaccgtttttcctttacacaaacatttaaaaacaattttttctacctttctgacagctacattgcatcccatagtataatactcaataaattatttaactgtctactattgttagccattcgaatgatttcctattttgtaccattgtcaacttcactgaggtgaccacctgatacata

SEQ ID NO: 245509 - DNA, 584 bp, Homo sapiens
taggagtggcagaggcaaagagcctccaggaaactttggccttggggtggagctcaaaggggagaggtgcactccccatgggcataaatgggggttacctacaccccaacttctacaggcatccaatacccctaaacccagagagtcttttctgtctctattctgattgcataggtgcatggtggtgtctttctytccaggagttaacgtctcctttttctgttctaaaactagttatcgtcattctgttggcctctcagtgtccaaaatgctgtcatttcttctttcacagtttgtcagtgtgggtttgtagctttaaaaactttatttcactgtttttttttaggataattggaggggggaaataaaaaattttggatccctcttctttcacaggaagtggtaaaccgtttttcctttacacaaacatttaaaaacaattttttctacctttctgacagctacattgcatcccatagtataatactcaataaattatttaactgtctactattgttagccattcgaatgatttcctattttgtaccattgtcaacttcactgaggtgaccacctgatacata

SEQ ID NO: 245510 - DNA, 604 bp, Homo sapiens
acactgcatatgcccaggctgcagtggagaatgtcgtagaatcctggattcatagagtgtggagccacggtgaagggtgcrtgagagagcccctcccccagagccaccccctgcctttccacaaggaattcccaaatgtcacccagtggattctcagacttctgtctcccagttcagtgttctccaccacaaaatctgcacctgatcaatcccatggttcagagacaaagctgagtgaggggcccagcaggacatgggcttgctgtgcccaatgcctgctctaatacgagctttccatatatctgctgagtaaactgatggaggtggagaggtttgggggagttcatttgaagcccccagatatgctcactctcccaagtcctaccccctgcttagaagttaaggccagttcctcggattttactttccacatcatatagttccacatgggaaaccagagggtgttccccagggaaaacaataatatcccccccgccccccaccaaccaactgccacttaaacaagagacgtattgcttacagctgaagtgttgcaggggagttatatgtattaagcaaaaattagatctattgtaaggcttgg

SEQ ID NO: 245511 - DNA, 538 bp, Homo sapiens
taattcaggagcatgttgtttaatttccacatgtttgtaaagtttccaatgttcttgttgttattcatttctaattttactccatgtcatcaaaaaaggtacttgatatcatttctactttttaaaatgtattgagacttgttttatcacctgatatatagtctattctggagaatattctatatgctggtgaaaagaatgtgtattctgcagcagttaagtgaaatgttttataaatgtcagttaggcttattatgtagtgtgtagtttaactccagtgtttgctgattttctgtctgcatgatctgtctcattaccaagagtgrggtgttaaaatttcctactattattgtattgcagtctacttcttcctttagatctattaatgtttgctttgtatactttgggagctctggtactggatacataagtatttataattgttatatcgttttgctgaattgacccctttatcattacgtagtggccttttatgtccttttcacagcctttgatttgtagtctattttttctcata

SEQ ID NO: 245512 - DNA, 511 bp, Homo sapiens
ggaggaagagcagaagggtgtggtgtcaggagtcaggagaaaattgtgtcaaggagagaagtctatgctgctgtgagttcagttaaggtgaatacctctgagaagatgtcactgactttgaccacagggagttgattggcaacctggaccagcagctggagtggaagagaaggcctgttggagaggactggggaaagcagggagcagggaagtgattgtgttcctgactaggcagcaggaggtgtgtccaaagaaatatggactttccctttcatttccactaaagctgtgtttactttcctgtgtggttcttggtctctggaaatgggaggcaggagaggaagacagaggttagggctgagtagagggtgrtgttagggaacttgactgccatagctgaagcaagtttgatggcagagccagggggctcatgtggtttaaatcctatttgggttaattagttaatgaaatcgcttttgcaaaattatgataataagataaatctgacatg

SEQ ID NO: 245513 - DNA, 605 bp, Homo sapiens
gcgattaaaaaaataaaagcatccttttcctcccacttctcaattaatcattgtattctttgttctccattgcgcgtatagttttgtaatcacgaggactttgcgtcagcaacttgatgctaaggcccaactttatctgtgtgctttgcagagctcagaggaaccaggacagwgttttcctggggaaactggggcttgctctgggcgtgggaggaagagtcacgttaaaaatcagatttagggccaggcacggtggctcatgcctgtaatcctagcactttgggaggctgaggcaggcggatcacgaggtcaggagttcgagcctgaccaacatggtaaaaccccatttctcctaaaaatacaaaagttagccgggcatggtggtacatgcctgtaatcccagctactcaggaggctgaggcaggagaattgtttgaacttggggggcggaggttgcagtgagccgagattgagccactgaactccagcctgggtgacagagcgagactccatctcaaaaaaaaaaaaagtcagatttaaagatattctggggagtgccaggataacgtggataaaaggagaaaagcaactgggaagcagaggac

SEQ ID NO: 245514 - DNA, 605 bp, Homo sapiens
gcgattaaaaaaataaaagcatccttttcctcccacttctcaattaatcattgtattctttgttctccattgcgcgtatagttttgtaatcacgaggactttgcgtcagcaacttgatgctaaggcccaactttatctgtgtgctttgcagagctcagaggaaccaggacagtgttttcctggggaaactggggcttgctctgggcgtgggaggaagagtcacgttaaaaatcagatttagggccaggcacggtggctcatgcctgtaatcctagcactttgggaggctgaggcaggcggatcacgaggtcaggagttcgagcctgaccaacatggtaaaaccccatttctcctaaaaatacaaaagttagccgggcatggtggtacatgcctgtaatcccagctactcaggaggctgaggcaggagaattgtttgaacttggggggcggaggttgcagtragccgagattgagccactgaactccagcctgggtgacagagcgagactccatctcaaaaaaaaaaaaagtcagatttaaagatattctggggagtgccaggataacgtggataaaaggagaaaagcaactgggaagcagaggac

SEQ ID NO: 245515 - DNA, 605 bp, Homo sapiens
gcgattaaaaaaataaaagcatccttttcctcccacttctcaattaatcattgtattctttgttctccattgcgcgtatagttttgtaatcacgaggactttgcgtcagcaacttgatgctaaggcccaactttatctgtgtgctttgcagagctcagaggaaccaggacagtgttttcctggggaaactggggcttgctctgggcgtgggaggaagagtcacgttaaaaatcagatttagggccaggcacggtggctcatgcctgtaatcctagcactttgggaggctgaggcaggcggatcacgaggtcaggagttcgagcctgaccaacatggtaaaaccccatttctcctaaaaatacaaaagttagccgggcatggtggtacatgcctgtaatcccagctactcaggaggctgaggcaggagaattgtttgaacttggggggcggaggttgcagtgagccgagattgagccactgaactccagcctgggtgacagagygagactccatctcaaaaaaaaaaaaagtcagatttaaagatattctggggagtgccaggataacgtggataaaaggagaaaagcaactgggaagcagaggac

SEQ ID NO: 245516 - DNA, 1148 bp, Homo sapiens
ctgctggcacatttagcaacctgtttggaaagaaaatttataaaacttgagactcaagtagccatgtgcctccacttgcatggatagagcttgggtgtggtagattttggatgatttttgtcaatctattcaattcaatttaataaaaatatcctgatactctctttgggtgagacatagcrctaggagttgggcatccaggacagaacaagagaagttgacactctgtgttgcttgcagtcttctagactgatgtagggggaggtatggattagaaacatggggtgctgacccctggcttgtggtaaggggaggcccgacctgagactagaaagatgagtgtctggtgccattatgctgtgccaggtgggtctatttcctccacttacgatttactttgtcacttattagctgtgctactataggtaaatcactgaatttttctgagcttgtttccttttttctataatggaactagtattaaaaacttcccatttgaaataggttttgtgaagattaaggctttgggcagtactgccccccgtggatttgctggacacagcccatgcagctcctctcataggttggagttcataaacacacttttgaaactttgttatttgttattgtggacatttaagtctttggttagcttagtagtcacgtagtaatttgacagagatttctttgaattcctgggggaaaaaaaaacaaccaaattagtccaatctttgcaaatgtactctgtgtgtgtcttaaggcaagccttcaacactgagctggacaatttacatctctgccttagccttaactttctgtttgggcagagtctgaaggtcagccagatgtgagagcttagggctcttacaggttttttctgaatgtgctctctacttttggcaagcacgtggtcttctagattcccaggaatatgtgagaactttcaaagctcttatcccttaaagtaactcacttcccatctttcctcccaagctttttggtaagtttattgtttcccccaaggattcacaacaagggactcttttttccactgggatctattctttgtcccaggaggcagtagctaatgcatttgtcttgcattgtaggctaccaccttcaaaactgccatggaactaaagagtgga

SEQ ID NO: 245517 - DNA, 604 bp, Homo sapiens
ggtggagcaggtaatcggaatgagtcagggtggagcaggtgattgaaaaaggttgctttaggaggaagttaagtttaaaagtagaaggcaaagaattgaacatattgacatattgattctttgaagagaaatttagaactcatgtctaacaaggacctcctgaggctgtgtyacaggtgtccatcctcaaccttggcgaaataaactctctaaattaactaagacttgtctcagatttttggagttcacaagagcatgactccccagaccccttggatatttgggcaagataagaaaaaaacagagcttagtcctcaccaggaataagcctcagtttgttgtaatacatgtttttatatatcactagatttgaattgctagtattttaaaggattttttttcacataggtttataagatatatcactatttaatttttattttttcataaggtcctttgtgggttttggaatcaaggttatgcaggtctcattaaagtagtttggaagtattccctacttttttattctctggaagagttcctgcaagattttcattgattgaacctaaaatgcttgcacagaattctcttctatatttacctc

SEQ ID NO: 245518 - DNA, 604 bp, Homo sapiens
ggtggagcaggtaatcggaatgagtcagggtggagcaggtgattgaaaaaggttgctttaggaggaagttaagtttaaaagtagaaggcaaagaattgaacatattgacatattgattctttgaagagaaatttagaactcatgtctaacaaggacctcctgaggctgtgttacaggtgtccatcctcaaccttggcgaaataaactctctaaattaactaagacttgtctcagatttttggagttcacaagagcatgactccccagaccccttggatatttgggcaagataaraaaaaaacagagcttagtcctcaccaggaataagcctcagtttgttgtaatacatgtttttatatatcactagatttgaattgctagtattttaaaggattttttttcacataggtttataagatatatcactatttaatttttattttttcataaggtcctttgtgggttttggaatcaaggttatgcaggtctcattaaagtagtttggaagtattccctacttttttattctctggaagagttcctgcaagattttcattgattgaacctaaaatgcttgcacagaattctcttctatatttacctc

SEQ ID NO: 245519 - DNA, 612 bp, Homo sapiens
gttcgcttgaataacaggaagctggagcctttatccactggttcttgccccattggttaaaggttgctccttctgtgctaacttgtgcatgggccaggtagactttccaacatcagaaggagcctggggacagtaaacggaaagctgcatggcccgtaattgaggtgaaatttgtcaacatgaagggaatctgtactcccatggtacagtctacaacaactgcagctgaaatcagtggtgggcagagaggacgagatgtggaacaccagagatacctgtggagtcctaattagaaaaaaggagttgggctggcaggactgaaagcaagcaaaaagaaaaagcaggtaagctacaagtttgtctttcttcacggtccaggacacagcccttctgtgcaaataactcacaatattcctatgtccaggtatcaccagacccttggctgatagaaaaattgcaagttagtgccctgtaaccttgccataatcagtactgcatgcagtactcggccgctcaagaaccatcctataaaatttccagcaagmctttgcttccctggagtcagctcctttcttgctgattctgcccattgctcccttgcaacatattttc

SEQ ID NO: 245520 - DNA, 612 bp, Homo sapiens
gttcgcttgaataacaggaagctggagcctttatccactggttcttgccccattggttaaaggttgctccttctgtgctaacttgtgcatgggccaggtagactttccaacatcagaaggagcctggggacagtaaacggaaagctgcatggcccgtaattgaggtgaaatttgtcaacatgaagggaatctgtactcccatggtacagtctacaacaactgcagctgaaatcagtggtgggcagagaggacgagatgtggaacaccagagatacctgtggagtcctaattagaaaaaaggagttgggctggcaggactgaaagcaagcaaaaagaaaaagcaggtaagctacaagtttgtctttcttcacggtccaggacacagcccttctgtgcaaataactcacaatattcctatgtccaggtatcaccagacccttggctgatagaaaaattgcaagttagtgccctgtaaccttgccataatcagtactgcatgcagtactcggccgctcaagaaccatcctataaaatttccagcaagcctttgyttccctggagtcagctcctttcttgctgattctgcccattgctcccttgcaacatattttc

SEQ ID NO: 245521 - DNA, 562 bp, Homo sapiens
actatagtctgaagacttcaccacaaatgtgctggcgaaaggagcacgagtatcactaagaagtttagtggtaaggccgggcacagtggctccctcctgtaatcccagcactttggaaggcctaggtgggcggatcacttaagccaaggagttcaagaccaacctgggcaacataaggaggcactgtctctacacaaaatttaaaaattagccaggcatggtagcacatgcctgtagtcaaagctacttgggaggctgaggaaggagaatcacttgagcacaggaggttgaggctgatgtgaactgtgatcatgctattgcactccagtctgggcaacacagcgagaccctgtctcaaaaaaaaaaggaagaagtttagtggtggtkgtggggtggccctcttctgcaggccaggggacatggcaggagaggtggccgtagaactgggttcattaacattgatgaagaagagggggagtctcagagtcactcatcctgaggctgggtagtggcacttaagtgccagaaggcaggaggctgcaattactttaatgatcaccaa

SEQ ID NO: 245522 - DNA, 609 bp, Homo sapiens
acaacttcatgctcaatggacaggatgagcaagaggtggccagccctctggaggctttgtgctccagagggtgggagataagccctttggaaactcaaggaagggacatttcagtgaaggttttaggaatcccatgggcagaacatgctaggatttctccactaaagtagaagaaaaatctaactgtcttgcaactcttgctaaaaagraggaggcaaagtctccttggtatgtgaaggcagcacattccacacctagacatgtggctctagcccaaattccagatcacatgaaagaccaccaggtttgagtggggtagggtctgaagaagaaatggcactggcaagtccaggctgtggatcaatcagtcctgttgcctaggtgatatgatttggcaggcctgtgacggtggaaacgtcagggataggagaaggtgcaggtggagctcatggcaagctccagtgggaagatcatgatgtggtccctgcaattctggtgtaaggccatgcctactacattagggaattaaacccctttgagaatcgcctctgtgcattagtgggtcctggtatcaaaaaaatgctggaccatggacaccaagtgaccatg

SEQ ID NO: 245523 - DNA, 572 bp, Homo sapiens
gtccttctccaaccttcctttgatcctgcctcccactcccatcatggaatcatctctgggatgtttctgggtgggtttgggggkgtgtgtggttcgagctgcagggtgactgaagatgtggtttcctgtgcccccttgcctcctgccaggttcatttggcggactgtgacgccacgtgacaagcccatggggcccctgctggtggccacattctggcctgagctcccggaaaagattgatgcggtatacgaggccccacaggaggagaaggctgtgttctttgcaggtgtgtgggaagcacccttccttggccctcagctccacagggctctgcaccagggctcctgggtgtcccaggctcactccccctctcaaaccacagttcctatgcacccgtgggtgctccctttcctttatggattcattctttcaacattatttcctgaagtgcgcagctcctctgggagattggttccgacacccaacatcagatagcattaaccctcagtgtacacatttcattttcttaattcttttcaatccgtctcatttcttttctagaagaaaaaaag

SEQ ID NO: 245524 - DNA, 607 bp, Homo sapiens
gtaaaaagatggaaaatgatataccatgcaaacagtagccaggagagagctggaattgctgtattactatcagataaaatagacttcaagacagaaattgttgctaaagaaagacatttataatgataagagrgttgattcattaagatgtaataattataaccatatatgcatctagcagcagagtccagaaatacacaaaggaaaaagtgacagaatcgaagggtgaaagattttcaacaatgctagagacttcaattactcaataatgatagaaggtagaacaatgagacagtatcataaggaaattgaagacttgaagaacactataaacagactagatctaacagatatgtatgtagaacactcaacaacagcagaaaacacattattctagtgcccatggaacatttgccaaggtaggtctgtatgttagacagtaaaacaattctcaataaatataaagtggttaaaataatacaaagtatgttctctgaccacagtggattgaaagtagaaatcaataacagaaaaaatttgagaaattcacaaatatgtcaaaattaaattacttctaaataaccagtgattccaaagtaataataaa

SEQ ID NO: 245525 - DNA, 616 bp, Homo sapiens
ttctataagcactttacttaagagagaagaggaatacagtttcattattaagcaagctgatgtgaagtaggcctttaaaaagaacagaacatgtagaaacttggtttctctcaagatcgtttgtttagttccctctgaataagtctgagcctgtttaaattttggtgagagccgtatgaaatacctgaatttgaagacttcctttagggtcttacccagttttcatattgttaagcacaaagctcagataacattgttgatgggtaggtgacaataacttggaaatatttaaggaaatcatcagttgccttaagcacattgtaggcttttttagataacttcaacgtaatccaaccaacttctgaaatcaaaactgcataatttctccattttgtgtatatatacattgctttgaaataataaatttaaatcagaataggtaactgatgagacagtagaataaatattaacacatatgaaacacttatattcttgttatgcttcagtccttgataattgaagatacrcaaataacgccaaacataaagaacataaattgtaaaggatatctaaacagcatattatctttcacttaccaggaaatcaatttattcat

SEQ ID NO: 245526 - DNA, 594 bp, Homo sapiens
tttgagagtcaaaaatttttcaggacttttaaacaaacacaaaatctttgaaaggcacagctttgttttgttcaatctattgcaaatctcacgtccacttttgtcttctcatctacttaatattattagcactgtgtctgttacttctaaatctgttttctcaattgcccttgctcaaagtgctactccagttacagattctaagaaacagattttataccaaaacgaatatcccaaggaaaaggagacttggaataaacttagagaagttttgtatcagactaagaagtatttggtctgtctgtagggtggacaagacaggttaaatgagattttatgtgtggtttcatatttttcacagtattcagaattttcagaatagaatgcatctattcaagtaattgaattccacagctccatttaaataattaaaaacaacttatgctagatagtgtggattgactttagagtttatagatagtaaaakatttttttctttcaaatggaagatttgtgaactgacacattaacaatttataattaattatgaaagtgatatatctactttctaaattatttcttttaactaaattc

SEQ ID NO: 245527 - DNA, 537 bp, Homo sapiens
tcatacattgatgacatgggtgtttagaattttattctgaaggttttagacttccacaaacctgtatgaagaccaaatagatttttattttcaagtgacattttgtaacaaagattttaattaaaatctggccatttgccattatattagggatacagtttgctgcttatgaatatttaaggacatgcaattagataattgaaytgtcaaaaagtttccctaggaaaactgttcacaacttcaggttttctattttttaatttgtgttttaatatataaaattgatagtatacagaaattagccaggcatagtggtgcacacctgtaatcccagctactcaggaggctgaggtgggaagatcacttgagcccaggaggcgaggttgcaatgagccaagatcatgccactgcattccagcctgagcaacagagcaagaccctattctcaaaaaaaaattgatagtaaaatgcactcttttggttacagttctatgaattctaacaaatgcacagaagcatgtaactaccactgcattc

SEQ ID NO: 245528 - DNA, 591 bp, Homo sapiens
actctttacatttcttgtttcattccatcttcacaatcacctacaagataggtgttattatcatcatcacccccttttgaagatgaggacactgaaggaaagagaagttaaggagcttaaccccagcccaacaaaacttgctaactttacccaagctaacttagccaaagaaaacccagaagggccatgctcctaacccctgtgccctactgcttctctatgggatgagtctcaatgcctggggacttggtcacaggagtyacagcaaagagagtgcatgtgaaaatgagtgaagtaaggagtcctttgtaccttaaagatagcacataggaataattgtcacttccaccaaaaaatgtgttccttctcattcttctccaaacatgagtctaattctaggttcattttgcttccatgtctgttaaagccacagccatacaactgtggtcctctatataagaaaaaagcaacagtgcaagcatggtattacataacaacacatcccctggtattggggaagtcttggggcatggtggggagtgtggctaattgggaagaggagcctgtccaatgtctccagatttcctgact

SEQ ID NO: 245529 - DNA, 552 bp, Homo sapiens
ttatgcattgtaggtttgagggatcgttggaaagatcttttgctcaaaaacattcctttcatccaactgccacaaagcctgaaatttcaccattagcattttagccatctttaaaaattgmactaacacttatcaagatatttctcaaagcccactctctttaagctagaaatgacccagggtcatcctgagaacctcaagcgctgggctggagggtggtaaaaaagagattctgaaagaagttgaaaggagacctgggacgtgccaaagacacatgcgtccaactttaaaactgtgtgactggctggctatgcattagattgtcccactggggcagttgtgcatttgtgctgttgcataatacagaaggacaaaaagcataaatactaactgatcacttcattcaaaagaacttcccaaaaggaagccagacccctttgatgctgccttatgcttaggcaaagctaaaagtcgtttttatactgttggtcaagggtttttcaactggatgcctggaaatgtttttcacagatctacaaagcatggatcata

SEQ ID NO: 245530 - DNA, 552 bp, Homo sapiens
ttatgcattgtaggtttgagggatcgttggaaagatcttttgctcaaaaacattcctttcatccaactgccacaaagcctgaaatttcaccattagcattttagccatctttaaaaattgcactaacacttatcaagatatttctcaaagcccactctctttaagctagaaatgacccagggtcatcctgagaacctcaagcgctgggctggagggtggtaaaaaagagattctgaaagaagttgaaaggagacctgggacgtgccaaagacacatgcgtccaactttaaaactgtgtgacwggctggctatgcattagattgtcccactggggcagttgtgcatttgtgctgttgcataatacagaaggacaaaaagcataaatactaactgatcacttcattcaaaagaacttcccaaaaggaagccagacccctttgatgctgccttatgcttaggcaaagctaaaagtcgtttttatactgttggtcaagggtttttcaactggatgcctggaaatgtttttcacagatctacaaagcatggatcata

SEQ ID NO: 245531 - DNA, 613 bp, Homo sapiens
acatccaattgatgttataaataaaaaacatggtgggaatacttcacattatgcaactctgattgtgtttaggtttcagccaccaagagaaaaaaatatttaaataccaaaacgggrtatgaaagtgcattgctctgtaagcaaaaatttgtcacacgaaagttgaggagggtcttatgtgaaatgcaattcctagtacacgtcaactcatccctagctaggacagcttccagaacgtgctgctaaacttgaggttgtgaccctgcagccatgacactcaaccgcccctcaaccagagctcacctcattgctctacagcaacagttttaactactggagcctgcctggagcttgaggtgatcctcggacctgcctcccaccagggaaggcctaagtgctctttaatcttcttagagcaaaatccactgagcaaaattataatttgatatggctgcacttaaccaatagaaactcataaaccatcttaacatcataatgcattgtgaaaaagaattgctaagtaccatgaaacatatgagaaccccaggcttccattcatctctagctttatgctagggcagcatattaaagtgatttcaacttcagagcagag

SEQ ID NO: 245532 - DNA, 413 bp, Homo sapiens
aagctgaggagccttccaagagctccatgtgtctgtaaatgccttcaaaacctggtctcagtgcatcctttttgcacccacagccagatagctgaccacacaacatcaggatagagtggtcaccacccattttctgtcatgggaaaggaaattgccygggaaaggccttgcccagtgcagacatggcaggcaatgctgagagctacaaaatccttctagaagctgttgtctttcagttattaagactataagggctgggcatggtggctcacacctgtaatcccagcactttgggaggctgaggtgggtggatcacaaggtcaggagtttgagaccagcctggccaacatggcaaaaccctgtctctgctaaaaatacaaaaaaaaaaaaaatgcgcatgcctgtaatcccag

SEQ ID NO: 245533 - DNA, 413 bp, Homo sapiens
aagctgaggagccttccaagagctccatgtgtctgtaaatgccttcaaaacctggtctcagtgcatcctttttgcacccacagccagatagctgaccacacaacatcaggatagagtggtcaccacccattttctgtcatgggaaaggaaattgcccgggaaaggccttgcccagtgcagacatggcaggcaatgctgagagctacaaaatccttctagaagctgttgtytttcagttattaagactataagggctgggcatggtggctcacacctgtaatcccagcactttgggaggctgaggtgggtggatcacaaggtcaggagtttgagaccagcctggccaacatggcaaaaccctgtctctgctaaaaatacaaaaaaaaaaaaaatgcgcatgcctgtaatcccag

SEQ ID NO: 245534 - DNA, 574 bp, Homo sapiens
tatatttaaagtttccgagcttcttctacttctgatgaaagtctggtgagcaaagatactcttcatagacaggaacattttcctggaatagctcaggcccaggaaaaaaaaatttcccagaggccccttgtcaagagttagttttttaattgcctggggctccatttatcctcttatcttctaaaaattcttcccaattttcccagccatatttaagtcccgctaactccatgaaatcttcccacatcttctccaatccacagatttcttcttttgattaattctcacaaatgccatattctaggaaacattgttggagcatttaccctttctctattaatattagttttgctggactgtaagtgcagcaaaaacagtgacggtttatgattttctgtcgacatccattacacgacctagaatcatctcragtgtatacacaggactcagtaaatatttgtgggttctaatctcaagtcaataagaacaacaaaaatccctacttgtaaaaaaaaatgcccattttttctttttctttcttaacccaataatgaaatccttgggaaaatatgtt

SEQ ID NO: 245535 - DNA, 579 bp, Homo sapiens
tgtgtcttagggaaaaaggcctatcctttcttggcctcagtttcctcatctgtaaaagttcaaaatgcctggtatatggagagtgccccgggcagcagcagactcatagaagtgttcatagccattattgctcgagccttgtttcctcatctgtataataggatggtcatctcttgccctgcctacctcagaggcctccagagaaactcttcataggctagctcttcataggatgmaatcatctacagcctcaaatgatgattgatgttcttactgtttctgcagcagattctggattaccacttgaaagatcatgcttcaaattagcactcaccaattacaataatgaaagaacacacatatatgatttcatttaactgtgtcctagttgaggtcattgaccaagttatggaaaccgatcatcttctgccctcatgacaagttcatatctctctattcttccattttgctgcaattttctgaaacaagaggcccagtcctctccagagggaagaatcttcagctagaccttgggaacagtaagcagaaatacaggcatcctgggaaatggtcagcttt

SEQ ID NO: 245536 - DNA, 585 bp, Homo sapiens
atctggctgcctgtatgtgtccacaagatatctgaaaaagctcacacttggcatctgcaggagtgcatgcagggggctggccacagggggaaggcatgtgtgagacacatagagcattgggaatctttgtgggtcagttggtggggttggccgactagacattccaagagactggtgagcaagctccctgatggagtctgggatccactgccgtttgttgacttctgagccctggttgcattgagaacctgcctctcttcmctattgctaacctctctcaatcactcagccatgccaatcccctcagtattctgagtggagcaagaaataaatgggtctttgggcacagtgtcctgcagaactgaggaagctagatgcttactcactgcactctaactttcctccccaggaaaaactgcaggccaagggggtgtctcttaacactgatctgtgcagccttgggagaggtgatacagataaagtaaaactgtttttcttatgctctttaatatatctattcttggagttttttgcttcaatagtgtgctaaacttctccactggactcctatactcccacaaatgt

SEQ ID NO: 245537 - DNA, 563 bp, Homo sapiens
ctccaaaatatgcagatattaagcccctgactcattcaggcagtggaagcgtaatttccaccatcttgactcttcctctcctccctaacctagggaaggtttgaggagttgactgggagtaagtaatttgaagctattgatagcatggaagggagagggaagagaggcatctggttctattattttctgtccatgcagaaattctcttagacacaagccaccttccgctttttggccattgttccacataggtctygattttccctttggctcatgcctccttcaggttgggtggctctcaggctacttgagacatgcttaacattgtgagatttattttacttcttccatgacactggggcatggttatctctgctagcctgtttcaggcccttctttgagttatccaaatcctcccctctgtgtcctccttgaccctcacttccattcctagcccaaggaaactttacctaatctaaggagaagctgactcaatgcacttttttttttttttataacattttgtcttctccgtgtttctcccacatcctaaaggcttagtc

SEQ ID NO: 245538 - DNA, 563 bp, Homo sapiens
ctccaaaatatgcagatattaagcccctgactcattcaggcagtggaagcgtaatttccaccatcttgactcttcctctcctccctaacctagggaaggtttgaggagttgactgggagtaagtaatttgaagctattgatagcatggaagggagagggaagagaggcatctggttctattattttctgtccatgcagaaattctcttagacacaagccaccttccgctttttggccattgttccacataggtctcgattttccctttggctcatgcctccttcaggttgggtggctctcaggctacttgagacatgcttaacattgtgagatttattttrcttcttccatgacactggggcatggttatctctgctagcctgtttcaggcccttctttgagttatccaaatcctcccctctgtgtcctccttgaccctcacttccattcctagcccaaggaaactttacctaatctaaggagaagctgactcaatgcacttttttttttttttataacattttgtcttctccgtgtttctcccacatcctaaaggcttagtc

SEQ ID NO: 245539 - DNA, 563 bp, Homo sapiens
ctccaaaatatgcagatattaagcccctgactcattcaggcagtggaagcgtaatttccaccatcttgactcttcctctcctccctaacctagggaaggtttgaggagttgactgggagtaagtaatttgaagctattgatagcatggaagggagagggaagagaggcatctggttctattattttctgtccatgcagaaattctcttagacacaagccaccttccgctttttggccattgttccacataggtctcgattttccctttggctcatgcctccttcaggttgggtggctctcaggctacttgagacatgcttaacattgtgagatttattttacttcttccatgacactggggcatggttatctctgctagcctgtttcaggcccttctttgagttatccaaatcctcccctctgtgtcctccttgaccctcacttccattcctagcccaaggaaaytttacctaatctaaggagaagctgactcaatgcacttttttttttttttataacattttgtcttctccgtgtttctcccacatcctaaaggcttagtc

SEQ ID NO: 245540 - DNA, 392 bp, Homo sapiens
aatctatttcccaacccctcttggatctgggctaaccctttgttttactttgaccaacaaaatgtagaggaattgatattgtgtgattctcaaggctagacctcaaaagtcctttcagctttcactttcattctcttggcatgcagtggcatgatgtgaaaaaarccaagctagtctccctgaagaagagagaatgagtgaagagagaaactcagctgatggccagcaccaaccgcctgacatggggtgaggtcatcttggacttcagcccagttaagccacaaaatcactgaagatgcatgagctcacctcaggcaagaccagcagaaaaacccattgctgagcccagcctataaggcttacccacaggattatgagaacacaaaattaca

SEQ ID NO: 245541 - DNA, 542 bp, Homo sapiens
gggaacacttaatcttcacctaataggcaagaggcctgaaattttcttctataggtctgtagagttttgtctgacagcagccattctgaactttgccttctgttacacaaacaccagaggcagaaagacaaaaaagcaaacattatttcccaatgggatcctcatctgggaaagcagtaactttttctttttttttttcaaaaagaaggtaatcatacaaatcaataatttctatgataaattatcatagagaattgagactagtagttaaattccaaatttgtaaaaactataaaataattttacaatccctatgyattacataaacctcctactactgtcctgggtgggatccgataaaaaggcatctctgtgtccactccatagctgacaaatctatgattagtagttatttatccaaggtcacatagatggtaccagaacactcaactcaaacctgtgtcatggacccaccaagtctagtccttttattaatctctaaaaagtatagcaataactcaaattcagaaggcagcagaagg

SEQ ID NO: 245542 - DNA, 532 bp, Homo sapiens
caaacctgtgtcatggacccaccaagtctagtccttttattaatctctaaaaagtatagcaataactcaaattcagaaggcagcagaaggaagagaggttaaaaatttgctctgaaactgttgggttagagccatcttaaccctcagtgggttaagtgatagatgagtcaccagggaaatgggtgcaagggagaatctatctcaggagaaataaaggtaaagtcaccacaatccaagactaatagctctaggattctcctcttccaatttggacctaacagcytctccctttcctgaattttcccagctctcgcccaaattgactatgagcagaacactgcaacagactgttctctgtacatgtgtgcagctcccaaaatatctgacatcacagttttcaaatagagaaataacagttttacttgtctacttgttttatttttaaaaatctttttgtcagatgaaatcttttgtcaagttacaaaattgacatgtgtctaccacaatccttaaaaccagtgaaataatataa

SEQ ID NO: 245543 - DNA, 532 bp, Homo sapiens
caaacctgtgtcatggacccaccaagtctagtccttttattaatctctaaaaagtatagcaataactcaaattcagaaggcagcagaaggaagagaggttaaaaatttgctctgaaactgttgggttagagccatcttaaccctcagtgggttaagtgatagatgagtcaccagggaaatgggtgcaagggagaatctatctcaggagaaataaaggtaaagtcaccacaatccaagactaatagctctaggattctcctcttccaatttggacctaacagcctctccctttcctgaattttcccagctctcgcccaaattgactatgagcagaacactgcaacagactgttctctgtacatgtgtgcagctcccaaaatatctgacaycacagttttcaaatagagaaataacagttttacttgtctacttgttttatttttaaaaatctttttgtcagatgaaatcttttgtcaagttacaaaattgacatgtgtctaccacaatccttaaaaccagtgaaataatataa

SEQ ID NO: 245544 - DNA, 561 bp, Homo sapiens
accaaaaaacttagatttattctcattcaaattttgctatattcctataaatcagcagatctagtgtggttatctggtctggtggtcccaaaagctgtgtctgaggaacagtcaatggccttgttcagttatctacaaggactttgttattcagagtaagatttccaaagtgagggagaatctgagtcattctaacttatagagaaaagtctaaaaccctgtatggggaaaacagaaaggagaaaaaagtgaccaagcagatgagaaaccagaaaakaattgaaaaacaacaaaaaacatgctgtttttgctggagagtgatcaacatgacttgctgagttttctacaaaaccttcagaatactctactttatttgctattctttagagtctgacctgtattggaagaagggcaggagatggtgggagaaataggaagaagtacccactctcgtctcagggtgggcaggagcttcccaagggagactatcacatttggccagagtttgaagtgtggctcacaagttggattaaaactgaaaccacattccaatcttaaacc

SEQ ID NO: 245545 - DNA, 579 bp, Homo sapiens
cacctgatctctaactattagccattcccattagacaaagctatctctctcctgacaatatagattaaacatttatgaatgctgctggagttccaataatacaggcttgggttctaatcaaggctggaaagaacaggaagtctctcaagctagctcaaatgaaagatggaatgtatgtaaaagaaccacttggagcasaaaagccataggggcatacaggttttatagacatgaaaattctcagtaatagaagaatctcgcttcatctctcagggtggcctctcccatttctgcttcttggtctcctctatctctcacccgccagctacttcttaaaaatggcctgacctggccaccagccactgacctgaatctagaggctctgctgcccaggctctccttctatgacaattgcctctaattatcctcgttcaattactgggacagataacctggaacttcaccaagtctttcatggtgaagggttgagcgtgaggtttatcctgcatgtccttacagaggctgcaggcaggttcagcaaattgaccttcttcatgggtttattgaaaaaagtaaatg

SEQ ID NO: 245546 - DNA, 550 bp, Homo sapiens
aactaaaacatatcacctgatctctaactattagccattcccattagacaaagctatctctctcctgacaatatagattaaacatttatgaatgctgctggagttccaataatacaggcttgggttctaatcaaggctggaaagaacaggaagtctctcaagctagctcaaatgaaagatggaatgtatgtaaaagaaccacttggagcagaaaagccataggggcatacaggttttatagacatgaaaattctcagtaatagaagaatctcscttcatctctcagggtggcctctcccatttctgcttcttggtctcctctatctctcacccgccagctacttcttaaaaatggcctgacctggccaccagccactgacctgaatctagaggctctgctgcccaggctctccttctatgacaattgcctctaattatcctcgttcaattactgggacagataacctggaacttcaccaagtctttcatggtgaagggttgagcgtgaggtttatcctgcatgtccttacagaggctgcaggcaggttca

SEQ ID NO: 245547 - DNA, 513 bp, Homo sapiens
catgcttgtattttcattctcccctgtattgactgtatgttccagcagtgagctcaggctagagggaggaaatgagttgcaattgcaatagacaagtctamggttccagtacttgaaaaagagagcacaggcatatttgagatagatttggggaataaatgttcctgcaaatgggcagaacaaagaagacttagagtacttacacagttttttcctactcacatagcaagatcatggttgagaaagtttggaatcctggattgctgactactctctggtccaatattctttttactatacaattctcttttgtcctgaatttttataagtttttttcctagaaattttagaagaagctcaaggtagctaggaagctacccttttggagtagcaattatatcaaagtacaatccagttaaaacccattagattgaaaaaaagctggtcaaggaagcagagagcaggacccatcatatctgcagaatggagctatgaactaaaccgtttacagac

SEQ ID NO: 245548 - DNA, 618 bp, Homo sapiens
ctgtttatgtcctttctttggaatcagagctgaaatcaaagaggcctcttaaatcctgacctagtatatttcaaaatgccatagtttctttttatgacattcaaattaaatccctaaattgaaagttttgtaaggtgctaattacagctagacacttattattttgtttgtatgaatttatctaacttgtggcccataaaattatcctgtatatggatatcaaagggcaaatattaatctttgagtacatataacaataatgaatatataatagacatctcctacataataaatatgttgaaatgtataaggtgtgctgctcatatgaatctaacaacttttcaattatttcatggaaatcctaataatgagagagttaaattatttgagttgagatttttttccagttggtctatttatctttttcagaatagggtacacatcttccaacccctctaatgtttataaaaatcatccagtaacwtattggattacattctttcttataacacctttggacaactttcaacttgggctgttttagctaaaatgcagcttaagttattttaatagagaagggtaacttgccattggagcagttaactgttactcaatttg

SEQ ID NO: 245549 - DNA, 551 bp, Homo sapiens
tactaattccaactcactttccctccagtatgtttatttcacaggtaattgtagaagaccaaaaataagcaagggggtttttaaaggaagtattaaagcagacagtctgtgtgttagtttcctgttgctgctgtaacaaataccccaacctcagtggctaaagcaacaccaatctattatcttacacttctgaagtccaacatagatctcaacaggctgaaatcaaggtgtcagcagggatgcatttctttctggagtctttggaagagactctaaagggctctcaagaaatccctttcttgtctttttcatcttccagagtctgctcacattgcttggttcatggtcccttcttccatctgcattgccagcaagggcaggtcaagttattctcacatcattctgacctgtttttatttccatatgcctttctctgattctctcttcggcctcccttttccatttttaaacccytgtgatgacattgagcccttctagttaattcaggataattgccttatctgaagtcagctgattaaaaaccttaattc

SEQ ID NO: 245550 - DNA, 567 bp, Homo sapiens
tagattttcaaagtttgtcctagctgcctttctcagatggaagaatatgtgattgttctgatggccactggcagtttcctgccaagggaacacagactgattgtttactgtataaacgagttgctgggacacactgaattttctggggtagaatttgatctccacacaatataaaccagccaaagccagagaaaaagggaaaaaaaaattattttcttctgtgtttccaaggaatgagatttcaaaggcggcaatgtagccatcccatgaaacagccaataaacactcaacagccaacatctcatctagatttgttctctgtaatatcctcatcaacctactactctgcatcccaccatcatctctggtctgtctcaaggcytaattaattcagaccagggcccatgtaagaacttcctaactgatggttctgctttctgtctctgttccttcctgtcatttaaccccaataacctatattcctaaagcactactctgagaacagctttcccttaaaatctccctacacaatgaagccaaaacttcttagacaccagatttccttga

SEQ ID NO: 245551 - DNA, 535 bp, Homo sapiens
gccatttaacacacaagggcatggacacttagagcagtcaagtctgaatccaatgcatacttggttaagtgttacgctgtactcttccttaattaccctgccaggaccaagagaatccttgcagtctagactaatgactcacataaagtaggcactcattatatagtgaataaatggttgaatgactgrggaaatgtgaaaagacatcttaaaatgctttagaaatggtaaattactatgcaaatattatatgtcatccacaaaatcactattattaagctgcttttatgatgaaagttgataccttttttcatttatttctatgccttgtattaatatttgctaagtgaaaacattgatctaggtttttgtcaattgtttttcctctaaagccaagcagaaacttcatcttccatcatgtgaacaccttgtccaattggcaaatattgacagtaagaaaacatcatgttgaaattagccttctattcttgtatattattgaaaaatcagaagtacaagaccataggctgtagag

SEQ ID NO: 245552 - DNA, 508 bp, Homo sapiens
tctgtctcctcaaccactaattttttcaagcacctctgtcctcattactacaagcgtttggagtgatargacctccctatctcacagggttttgtgacaaataaaggcaagaatgtgcataaaaggctttgttaatgtaaatgctcacaaatgtaagaattatattgatgagaattttatgtatagtttttaagatgctgtagaaaaaaaagacatacctaccaaaaaacaggttctacattgaccttaacaaaataaatggatgtcagttacatatagctcgcttgcaccaacctcccattttcccacttcatcaatctcaactctctcagatcttcgcctaatgcactccacatagtacactctgaactttttgcacaacccagatggtatacatggatccatatgcctgttttcaagattggctaattggcctcatttgcacaataaactattaagaactctctaataaaagtcgacaatgttgccacactttgttaaagagcta

SEQ ID NO: 245553 - DNA, 588 bp, Homo sapiens
attctgagactgtgttgtggttcagcaggaaagagtgttgtgcttgattagctatgtctttcatgaactctggatggtgaatggaagtatgttgaacaagtactggttattcatgacttagactgtacacatcacccgaagacatctcaacaaatattaaaacaaaatacaaatgcttaggaatatacactgtatagaaaagagatgacctttataagattgttttgaggactaagctctgatttttattttatcttgcccaaattcctatctaaggggtctggggagtcatgycctacaaaccatgaattctcatcagatgggttttatttaaccctgtatattgtaatttactttccaatctgactctggcataacaaggaagaaaatcaaaatgttttaccccagaatatatttccttgccataccttgaaattgtcctgcaaagtctctcgtaagaaaaatccacattctctagagaatcccttttcccctttgttttttttccccttcctttccagatccaggagacaatcaactaagagctaggcacccttttaggtccgataagaaacattttacaacctg

SEQ ID NO: 245554 - DNA, 556 bp, Homo sapiens
gacagcccactccacatatgggcaaatggcttgaagagacacattaccaaagaattcccaacagtcaaaatgtgtttaatcttatccacatacatatctcaacatatcttaatatccatatccatatctcaataaatcaaaaatgtgtttaatcttatccatatccagagaaatgcaaattaaaactatagaaggataccactatgcacccaccagtttggctcaaatttaaaagttcagcaacatcaagtattactaaagatgtggggaattcagagctctcatatgctgctggtaggaataaaagttgctgccgacactttggaaaacagttgcrcattatccaataaaattaaagaaatgcaaaaattcttacctaacaattataccctaaggtgtgtgtacaactgtctatttacaccaatgaggatgctcccagcaccatagcttgtaatagccccaaacagaaatttcccaaatgcctatcagtattattgacaattggcccaaaaatccatttatcatcattgaaaatgaacaaactccagttacactt

SEQ ID NO: 245555 - DNA, 582 bp, Homo sapiens
cttatttaatttattaaatctttaatacataatattgagcacatattatgttattgacactgagtacaatagagaatgcagtcaggaaatgaggcaaccttaaagaccagaggctgtcaaccttgacagcatattagaatcacctggagaaattttatgaccttgattcctaaatcacacttaagktcaattagtcagaagctaggggtggtacctagccataagtagttttttttgtatgtgttttttgttgctgttgtttttaattgcaactcagtattgagaaaaaaaaaaacatggagataagagatgactacatagccgttcactgtcatgatggaagattgtctaacaagcctacccaaagactatctaattctttaggggaatgtaccttcatttattttactatttagtaggatatttacttaggatattacacaactctgtaaaagcagatgttgccttgcagaacaaacagaggcccaagcttattcaaatagaatagagcttgtgtttgtgtaattctaacaagttcttgggtgatgctgacacgtgctgaagtttgacaactattggaaa

SEQ ID NO: 245556 - DNA, 590 bp, Homo sapiens
gcctcaaaaaaaaaaaaaaattgaaaagctaaatgctgtgagctgcttaagaagccctgtcacagcggagagttccacacaacatgggctgacactcggtgccatagaaagtagatggggaatgtttcacatgaaatctgctgcttcagtatgtgtacttggttattcttcaaccgcctgagccttttggctataacagctaagccatacttggcgcacactctcacatttttttttccctaaaactagccctgaacaaggctgagggactcaatccccttgaaatagccttcttaatgaagaaagagctttaaaggtgttagctagcttattgtaataataatgatgataataataacaaaaacaataactataaacataatgaaggtctgccattttgcaagctgtatgcagctttatgcattatttattaygcattattgttattcattatttattacgtaatttatctctcataataggcttaaaaggtagattattgccctcaattttatatagggaaactgaagttcggagaattcaagtaattttccccaggtgatagaactagaatggcggcgtggccagga

SEQ ID NO: 245557 - DNA, 559 bp, Homo sapiens
tgggtttggagtgcataagccccaaaggtttgttaggtgctatatcaatacacttttagactgttttaaaaataattctaaatttttatttgttttgcatgtacctcatagcttacaaaccactttcagatattaacgttcctattttaaagacagaaaaaaagtaaagacagctccaatcagtatgcagaaatacacttccaaagaagtaaacagaaggggaaggaagcacttaatttcagctactcttctctccaaaacacaccccacagttacctaggaaggcaggaaagagttagtgtgtaaaggtgccatagcctaggcttttccatgttaatgtccagctaatatggggtgacttcaaccrtgtgctggatgaaagacagacaaggaggaggaaggggatgagacaagcaggaatgggctcttgggccagactctctgcccaggcccagcgcttgacaggtaccctggcagccagagatatgacggtgacagacacaagacagtgtgttatctcattctctgattccatccactcaaagttaatataaaacca

SEQ ID NO: 245558 - DNA, 489 bp, Homo sapiens
atcaaggccctgctatttacaagggtgtaatctttctaggcctcagtttcttcatctgtaaaatggagctaacaaagcagctttcacacagattgtaagtacagacaaaatgttactacgcctgttaaacactgattatggtacttcacayacataaagcattcaaaacgtgctagctatcctgattggtaagacagccatcacgttctcaggaactgctccctctcagccctggccttggctgcttttaggttctctgctaaagccaagtttatttttgctcttctgccagagctggttatgtattatttgttttgtatggtatttgttttccaatatttttactaagtaggacagttctatcaatgaggtctgctgctttattggttgctaattgctggggcataattgttgcaacattacttggtgttcctataattctctacagccaatcaaggtagccagttctctaattatagcacagtgaat

SEQ ID NO: 245559 - DNA, 529 bp, Homo sapiens
ctaagcaaacacttgcagctaaataatgttcacccagatgcgcctacaatttttttatcgttagacatgtttcccgttctcccaagtaaatatttcactgaaaatgttccccaagcagttgttatctcgatattttcacaatagaatattctgtgctctacacatataaatactgtgaataaccaacattttcccgaagagaacgctgatttcccagcatttttgtaaaatgactttctccgtaatgccagctctgtgagcagtgcagggtgtgaactccaaaatccaaggcaccagctcccaggaattgaagcctgagacagggtgactccctacagaatccataagtgtgtttcattcaagggcaccttgggataggggaaggatctcaagtgttgaggtcatatagaccccattcttgaaggctatttctcctacttgcttractttgggtgagttatttagtagcccatctgtaaaaagagtaacaagagtacctgatgcctatgggtatgatatgttcggccct

SEQ ID NO: 245560 - DNA, 583 bp, Homo sapiens
gtttacatgtgttgaaatactattctgtatcccataaatatgtacaattactacatgtcaactaaaaattaaaaaaataaggctgataggatcactatttagtcagacccctggtggctcaagccttccttgaggtttattttttgcctctggagagtagagacctcagtcactgttgcaccctcatgcccatgcccacccagtcctctggcatggtggcatggccacagtaggcacccatccgagaggccaacctgaaggaatggatcataccacactcacgcaagcaagagtctgartaaggcacctctaactcaggatagaactcctgactccaatcaggaatagcctccagaaaagaaaagtgcttttatggggacctccgcccatttgttagtcatttatccacatgaatccttaggccaggagtccaaaatgcacatacttttggaggcttagacaggtgacataaataagagaagtgggatggctgagggatgattcttcactttcccaaagaaatatcttctttgccattttctttgacttgttcttcgctcttgttggttcattattctgtatg

SEQ ID NO: 245561 - DNA, 406 bp, Homo sapiens
acaccaaatcatttacactctagtataaattagttaatcagttcacaagttttcttctctctctctctgtctctctctctatatatatacacacacacatatgtgtttgctatcattttaaatctatttgaatctttagttcttaaaatttctgcctttttacaaacgatgcattcctgagaatgtcytcccaagattgtgcttaagtttggactttggaagccatgtggattgctgtgctgtggggtttgaatctgtctccaccatctactggttggtaaagctggccaagacagtcaaatttcctagctctcattttctcaaaatgagataattggtggctaataaatggtacatcaatccacatgtattaatcactatgaaggaagaaaatgcatttagaatt

SEQ ID NO: 245562 - DNA, 570 bp, Homo sapiens
cctagcttccaggttagaagcaggaaggcagtcaaccttagaatgaatagccattcattcattcattcattcattcaacaaatgtctactgagtctctgctgtgtgccaactattgtcctaggtgctggagtagacaagaaggaccaagtcttcaccctatgagagctcacattccaatgcaggctcaccctgtaagagttcatattaaaagttctcaccctatgagagctcatattccattacagtgttcctcaaccatggctctgttgatagcttgaactggattgttctttgttgtaggggctgctttgtgcattgttgggtgtttagaggcatccctggcctctactcactagatacttgcagcaatygctcagttatcaccaacataaaggtctacaatatgctgaatggctgctaaaggtggtggatggaattaatgaaccccaagtgagaagcactcttccaatgaataaacacaccataaatacacaaataaaatgttacaatacagtgtctagtaaaggtaagtggacaggagatagcaagggatgggggctggtatggtc

SEQ ID NO: 245563 - DNA, 542 bp, Homo sapiens
ggattgttctttacaagaagagtgaccattgtaaaatctaagcaaaaattgcaggttgggcgtgtgaagttggatgtatttttcctacacattgaaggctcagaaacattctttgtgcttattctcaataccttttgcattacctaktccataggcttatagtgtaatattgaatgagccagttttgcattttagtgagatgtgagacttgttggtatgtgtgtgaagcacggaattgagccacttgactttgctggctgggtgttaactggttgatgttgggttttatgttgatcttggaccctccccccttccctgttacgatcatgtctggggagcactccagggtgagcctgttctgtaggagccctctgggcattctgtacctttttcaccagaggcagagtctgaaagtgggcaatagttgcagaatatacctggcactgttttgagggcctcagttctgttgctcttatatatgccattgtttaccagttccagtacaccttcctcatggaagtttctcacatactacttgggaa

SEQ ID NO: 245564 - DNA, 509 bp, Homo sapiens
gtatgggccagggcagcaggacttgcgccacatctagggctgcccagcccagtttctggtggttcatgcatgtttaacccaattacatctttattttaatgggcattacaaaaacatcatactcatgatttcatcaatatcatgatttaggattacacttgggtacctgrcattgttagtcctgaggtcgttgaaaggacaaggttgagtaatagtataggacacagaccctgacggtggcctctcagtgacttgagcatggcaaatcctggcaggtgcagattaggggctgtggaggaggctatgcaggctgaaagacatggcttccaagtctgacaccaccatctgtggcagttgtaccttagtcagtgttgcagggaggacccctgaacacagagcctgaagcaaggacttagtgcacatatgtggcgaggaggcactcccaggaagtaggacggaggagacagggccagggaaaggccgattttggggtgcagtgttgagcctgc

SEQ ID NO: 245565 - DNA, 509 bp, Homo sapiens
gtatgggccagggcagcaggacttgcgccacatctagggctgcccagcccagtttctggtggttcatgcatgtttaacccaattacatctttattttaatgggcattacaaaaacatcatactcatgatttcatcaatatcatgatttaggattacacttgggtacctgacattgttagtcctgaggtcgttgaaaggacaaggttgagtaatagtataggacacagaccctgacrgtggcctctcagtgacttgagcatggcaaatcctggcaggtgcagattaggggctgtggaggaggctatgcaggctgaaagacatggcttccaagtctgacaccaccatctgtggcagttgtaccttagtcagtgttgcagggaggacccctgaacacagagcctgaagcaaggacttagtgcacatatgtggcgaggaggcactcccaggaagtaggacggaggagacagggccagggaaaggccgattttggggtgcagtgttgagcctgc

SEQ ID NO: 245566 - DNA, 471 bp, Homo sapiens
tgacggtggcctctcagtgacttgagcatggcaaatcctggcaggtgcagattaggggctgtggaggaggctatgcaggctgaaagacatggcttccaagtctgacaccaccatctgtggcagttgtaccttagtcagtgttgcagggaggacccctgaacacagagcctgaagcaaggacttagtgcacatatgtggcgaggaggcactcccaggaagtaggacggaggagacagggccagggaaaggcygattttggggtgcagtgttgagcctgctgctgtagaccactgggcttgaaactgccaaaaccttcgtgtctgcagggtgccccaggaatggtcttcagaggagcccactggctccaggcccttttaggtgaaggttgcccctgggggcatcacctcccctccctttggggtcagacttgagacaggcagacacctggaggtggggcctcaggctctttta

SEQ ID NO: 245567 - DNA, 618 bp, Homo sapiens
aggtgggatggggatgcgaggctggtgcagggatcgcaggttctgatgatgatgggggttctgcctgggaggtgaggaagcatgggtacaggctggcggggctggtgagtcgagatcatgcttgctcctccatctgttcctgtccatggcttctagatttccaagagaagccagtcacttgggtctttatgggaaatctcttagagatgagaagaagaggtctgccttggtcaggggacagtgatagtaaggtaggtaggaagcctggcaggtaggaagcctgggtgtggtgggagagggggtgattggagcgtccaggccactcaagtgtggtgggtctggcaggaaaggctgggagggcactgacaggggacctgcatcctccgtgtggggcgtacgcaggcctgtgtactccgagtggctgcagggctgcttcctggcagtgagctccacagggccagaaggtttttgtacatgatacctgaggcttcatgtcacctccactacgtgcctggtattcatgacggtgtggtcccctcctgccccagcatggaagacagagcctctgtgagaccygccttgcactttggatgatgctaaggaaggttgcgaggctgg

SEQ ID NO: 245568 - DNA, 425 bp, Homo sapiens
tccaggcttgttaatggagacaaggttatctttctcatttggacagttgaggamgttgagatgcagaggtgaaaagaggcttgtccaagatttcaggggttgtacatggtatggctgggacatcatcaccaacttggggctcacagcaagttcttagccctatccaatgcacttttacttatctcaactgcccccttcattgtctgcctggcacccttctttcgcttgtcctacaagagttagttccagcctcattgagtccagggagactgccttgagtatttgtttttttgatgggatttcactcttgtcgcccaggctggaatgcaatggcactatctcagctcactgcaacctccacctcctgggccttgagctcttttagagggaaagaccaggtcttgctggttgtattaggattctct

SEQ ID NO: 245569 - DNA, 568 bp, Homo sapiens
acaattttcgggttaagccatttatctatgatctaaattatctttgattatattcattcatcactttgatttttaaaatttaggcagctcaaaataataattaagcatttcaggggactttattgagacattttttagtgaaggtgggcacttgtttataactgcttcaattttgttccaagctcaatgcctgtgctccttaaccaggagaattgttcagaatcaccttggaagctttaatagaaatatgtaagtctgggaatcagactagagtttccaagcatgctatttttttcccaaagattcaaggtaattctgttattcatacttagttcagaacctctggtctacaacacagaactctgggatcttatggtaagtgtgctgacagaracaaaactatttactgaggaaaatcttggcagagtctatagatattctataggtaacaggtgcaccttcctttggttcatcttaaaatcaagtgtgttcttttcagactcctcagttttaccgtcaggaatatattcaacgcattatggcttagtactttttgctcccacagaat

SEQ ID NO: 245570 - DNA, 652 bp, Homo sapiens
caccacaaccacaattgctaacatttacaggacacttactgtatcccaggcactatactaagccctttctatgctcacttgatcatcacgacagccccataaggtgattayagctgcacctccattgtacagaagaagaaactggctcaaagaggtcaagcaacttgcccaaactaggaagcgactaagtgagaattcaaacctaagttagggtaattccacagccatgcttccaaccagcccttagtgagaatctgatttgctggtcactaacatgctggttcttcccctttcaggtccttgctcctgctattggtgaggaactaatacggcccctcttgcttctgctgttggtgcgattcattcaaggagctcatttccaaaggcactgtcattatttaaaggaatgactccaatcatgggaagctctggctttggaagaatggattctccatcaacaagaattcaatgcacactgttcaggcactgtagaaatatatcaaattattaaaaagattgtctctgctcttaagcaattcccctttgaaaccaaatgcacagatgaaagagtcccccattcacaaacgcccctggacttaaagggaaacatagcacaaagatcagagtaaagaggaccttttttctgaatgcc

SEQ ID NO: 245571 - DNA, 539 bp, Homo sapiens
caaacgtcaagtgttttgcttgtgggcagcaaaatgtgaaaacaataacaaccaccacaaccacaattgctaacatttacaggacacttactgtatcccaggcactatactaagccctttctatgctcacttgatcatcacgacagccccataaggtgattatagctgcacctccattgtacagaagaagaaactggctcaaagaggtcaagcaacttgcccaaactaggaagcgactaagtgagaattcaaacctaagttagggtaattccacagccatgcttccaaccagcccttagtgagaatctgatttgctggtcactracatgctggttcttcccctttcaggtccttgctcctgctattggtgaggaactaatacggcccctcttgcttctgctgttggtgcgattcattcaaggagctcatttccaaaggcactgtcattatttaaaggaatgactccaatcatgggaagctctggctttggaagaatggattctccatcaacaagaattcaatgcacactgttcaggcac

SEQ ID NO: 245572 - DNA, 503 bp, Homo sapiens
gtggtggtagtggcaagtaggtggcccaacctcaggctcccaggagaagtgctcaggtgctgacagtggtgggtgggattggtgatccccagacccccaaactacatgctctggcataagggtaggggcaaagccaggctgggaaggcttgtccttaggcaccctggtggtacatacaggaactggttttggaaggcagggatagggagatttccaggccctcagtagaatggtcaggtgagaagtggcagcagctatattgcagccctgtactagggagggcagagtggttttcagtggcagccataggcaagtggatggagaacatgcactttccttgcgcttcagtcccagyggtggtagcacatgcttcacttgcacctcaaccccggcagcagcaacctgcacttcactcatgtcccagcactggtggcagcagcctgtgccccacttacacttaagccccagtagcagctggatcacccacaatgatggcatctggg

SEQ ID NO: 245573 - DNA, 566 bp, Homo sapiens
aatcaacttaatggttattttcagcatctatgggtagaattgaatttaattgactcagaagccaatggaagggtgacacaaaagaagccaaagatctatcttcgtggaatttataagttattagaatgagaagcttacattcaaaggacaatcacaaaatgtaacaagaatttacaaagtacatgttagactacrtgatgtaggctgagttagaagaaaggaagaaggtcacagaatctgaaatgttcaaaaaacacatagggcttttaattgggctctataaaaataatttgcattggctgagaacaaaactagattttccatctttactatctagatcagtggttctcaatcagtggctactaatgaacaatgaaacctgaacagtgttacagtgaaattttgcccaatgtgacctttttttttaaatgaaaacacacagagttgcaacatcatctgtctgatggatcctttaattgagcaggcagaaaaatataaaggatgatccaaccttctttgaaccagagtaaagtgtgagctttggcttgtgggtttgtagcagattg

SEQ ID NO: 245574 - DNA, 631 bp, Homo sapiens
tgtcttccaaacatccggacttccctcattaatctattagttcggtgcaaaagtaattgctgcttttgtcattacttttaatggcaaaaacctcaataacttttgcaccaacctttaatattatgaactgtcatccaagattgtccctatatgctttttgttgcagtgaacagagatgatgagtgacgagcatgccagattgmctcctctcttactatgtgatgaggaccaattttaacctttccaagactgactgcaattgtcaaatggagacgataatgcctacagcataggatggttttaagggtatatgtggccaggcagggtggctcacacctataatcccagcactttgggaggccaaggcgtgtggattgcttgagcccaggagttcgagatcactttgggcaacatagtgaaaccccatatctgcgaaaaggtaccaaaacatttgccaggcatggtggtgaatgcctgtaatcccagctactcaggaggctggggtgggaggatcacttcagcctgagaaggttgaggctgcagtgagccatgatcacaccactgtgctccagcctgggcatcagagtgagaccctatctcaagaagaataaaagggcaaatgaagccatgc

SEQ ID NO: 245575 - DNA, 489 bp, Homo sapiens
tgcccttccgttttgagaaatgttcttctattgtttctccccacgtgttttctttctggaactcccgatgttcagatcttgaacttcgtgagctggtggtcctctaaattttcttactttctatcatattgtctttttaactctactttctagattttcttgttttcatttttcctcagctgaattctctaactcttgagtttttcatctctgccctcrtttttaattaagaactctattttgttttctaaatgttccttttttaaagcatcctcttcttgatttatggatgtaataatgataggaaatttttttttcttttccctgcatgggttctattttttaccagattggtttttggtgatgttcactttgacttctgtcaatggcttaagctttctcttaactctggtaatccaattggctgctggattggaaaatatggagaaaaaaaaaagactcgaagctctaagtgtgctatactgtctg

SEQ ID NO: 245576 - DNA, 597 bp, Homo sapiens
ttttcctcaagagtttgagggagtgagaaaaggcttataatgttttcttttacaagaagggatctattttagcataacattaaaaaggcatatctctcacgcttcctctctctttctctttttctttttttttttttatttaaatatgctcttcatgtctttcaactgattggatgaggctcacccagattattgaggataatctcctatacataaagccaatgttaaccacatctacaaaattaactccacagccacacctagattagggtttgattgaataactgggtgctattgagaggtgaagccagctgaacttctgggtttggtggggacttggagaacttttctgtcttacaagaggattgtaaaatacaccaatcagcactctgtagctaggattgtaaaacgcaccaaccagcgctctgtggctagctagaggtttgtaaaatgctccaatcagcactctgtaaaaacacaccaatcagcactctgtggctagctagaggtttgtaaaatggaccaatcascaccctgtaaattgtgccaatcagcacccagtaaaatggaccaatcagcaggacacaggcggggaca

SEQ ID NO: 245577 - DNA, 580 bp, Homo sapiens
ggaaagggaataatgaacataatgggttttaggaactactctttatggcccacaccaaactacaagtaaaagcacrtttttaaaaatttaatcttttcaacaaaaatacattgagtctctactatgttaaaggggtttggcttggctagggtatgttccctatgatttctggaaagctactgattcaaaggacagaccattcactaaatgcatgggtttctttttattcttttatggatggagtagtaataaagtattgcactgggctaccactagacaccagggggagaaatctgaacgtcaaaaggttttcatcagctttattatcattccttgggagaagaaaaatgagatttacttaatcgcagaagtatgacaaatttctttcttcaaatctcgaaatgtttttcagtgaagattttcaattgagagagattattattgttggagggggaatccctgaaaacgcccgtgtttgaaaatccctcaccaagaggattactgctagctttattgctatgtcacaaagccaggtgctttgttgtttaaaacaacgataatatggtctaccagaccagga

SEQ ID NO: 245578 - DNA, 580 bp, Homo sapiens
ggaaagggaataatgaacataatgggttttaggaactactctttatggcccacaccaaactacaagtaaaagcacgtttttaaaaatttaatcttttcaacaaaaatacattgagtctctactatgttaaaggggtttggcttggctagggtatgttccctatgatttctggaaagctactgattcaaaggacagaccattcactaaatgcatgggtttctttttattcttttatggatggagtagtaataaagtattgcactgggctaccactagacaccagggggagaaatctgaacgtcaaaaggttttcatcagctttattatcattccttgggagaagaaaaatgagatttacttaatcgcagaagtatgacaaatttctttcttcaaatctcgaaatgtttttcagtgaagattttcaattgagagagattattattgttggrgggggaatccctgaaaacgcccgtgtttgaaaatccctcaccaagaggattactgctagctttattgctatgtcacaaagccaggtgctttgttgtttaaaacaacgataatatggtctaccagaccagga

SEQ ID NO: 245579 - DNA, 427 bp, Homo sapiens
tctattattcatagaacacaatgtaaatgaagccataaattttaccccccacactagatggagaaagaagataatggaaattgtgaattatgaatgaatcactgttattgtaattccttaaggattctgatggagatgattaaattcatgcaaagacacagattctaaacttttatgcctgagtgagtccctagtaatgcctcttggaatttcacaaggaatggaatagagacgatcttggtgttgcatttacctgccaaattatctcacrgataatctacctaggcctggacagatcaccttattaaagataaagaattcattcccgggggaggagaggatgttgcaaaatatatgtgtcttgcaactactcagacatattgcttaggatcctaaacacaaaacatttgaaacccctaaccctgag

SEQ ID NO: 245580 - DNA, 566 bp, Homo sapiens
ctctaggtaatgtccagctataaccttcccagttcttgagaagaaagcaaaaagtgatgcaaatgttcttcctttattatcratggggcctgagctatgaggagttttagaggctaggacctcgtctgtggtcttgagggctcacaagtgtcctagagccttaatagggggttttctatatagggtaaaatttgggggcccagcaaggttgctgtagctgctggccaaggggagtctttgccaggtgccagaggtaagggcagttaatgatctaaagatgctggtttctcagcccctccgagctgcaaccgtgctcacttgatcaggtgctgaaatggaggccagacagtatcttagagaaactcctgtcggatccatccatatgggacctccagtctgcttccttcagcacaggtcccatcatccatctctctccttcctcatgaaccctcctgacaactccaaggtatcagtcaccatccaaccaggaaaacagaacttgggccaacttgagagcattgaatgtggagaatgagtaacagaggtgttagaaaagctgaaaacac

SEQ ID NO: 245581 - DNA, 566 bp, Homo sapiens
ctctaggtaatgtccagctataaccttcccagttcttgagaagaaagcaaaaagtgatgcaaatgttcttcctttattatcgatggggcctgagctatgaggagttttagaggctaggacctcgtctgtggtcttgagggctcacaagtgtcctagagccttaatagggggttttctatatagggtaaaatttgggggcccagcaaggttgctgtagctgctggccaaggggagtctttgccaggtgccagaggtaagggcagttaatgatctaaagatgctggtttctcagcccctccgagctgcaaccgtgctcacttgatcaggtgckgaaatggaggccagacagtatcttagagaaactcctgtcggatccatccatatgggacctccagtctgcttccttcagcacaggtcccatcatccatctctctccttcctcatgaaccctcctgacaactccaaggtatcagtcaccatccaaccaggaaaacagaacttgggccaacttgagagcattgaatgtggagaatgagtaacagaggtgttagaaaagctgaaaacac

SEQ ID NO: 245582 - DNA, 610 bp, Homo sapiens
accactgctcttattacatagaaaggattatatgacaaaatgctttccttttctttccacctgggatgttggctacaaatacggttgcagacattttgatacaatctaatccaggtatggaggacacatatatgaaagagggcagagtatttgccaaaaaaaaaattgaatctgcaaagaaagacaatatttgtccagagaaagacaacattaaagatttttcgctggtcacaatttttaacttgtaggatacgtgacatgaagttgcattgatttatgaaagagctggccccatcaaaatggcctgcctctgttggcttacattctagatatgtgtgtgggtgtggggataaagagtgtggaagaggagagaccataaattcaaacagaaaagtaaagwaaaataaaatggagtgtattcgtctgttctcacgctgctgataaaagacatacactagactgggtaatttataaagaaaaagaggtttaatggactcacagttccacgtggctggagaggcctcacaatcacggcagagggcaaggaggaacaagtcacatcttacatggcagaagggaagacagaaaaagaaccaatgaaaggggtttc

SEQ ID NO: 245583 - DNA, 610 bp, Homo sapiens
accactgctcttattacatagaaaggattatatgacaaaatgctttccttttctttccacctgggatgttggctacaaatacggttgcagacattttgatacaatctaatccaggtatggaggacacatatatgaaagagggcagagtatttgccaaaaaaaaaattgaatctgcaaagaaagacaatatttgtccagagaaagacaacattaaagatttttcgctggtcacaatttttaacttgtaggatacgtgacatgaagttgcattgatttatgaaagagctggccccatcaaaatggcctgcctctgttggcttacattctagatatgtgtgtgggtgtggggataaagagtgtggaagaggagagaccataaattcaaacagaaaagtaaagtaaaataaaatggagtgtattmgtctgttctcacgctgctgataaaagacatacactagactgggtaatttataaagaaaaagaggtttaatggactcacagttccacgtggctggagaggcctcacaatcacggcagagggcaaggaggaacaagtcacatcttacatggcagaagggaagacagaaaaagaaccaatgaaaggggtttc

SEQ ID NO: 245584 - DNA, 583 bp, Homo sapiens
tctgaatgtttaaaaactcaagcattataagcctgctgtgcttttcctgcgaagtatggaacggcactaaatgaataatgccaccagagccagcagcagagccaggatccagaatcaaacaccgctttcatctgctcctgataggtgtgaactcccctctgccggggcttggatccctcctgcaggatgggtttcctgggctcccagtctgcatcttagctctccaaccccctttcccaatctgccctctttctctttttgaactctcttctggatggccagagaagttctaaatcagatgagcttccctgcacggcatcttccaccgagataaccctttctcasgacagtcctattccattcaacatgtgtcaagaatattgttgagaaatggcgtgaaagcagtctaagccgccctcctcattttccaggtcagatcgagtctcaaacaacacattttcccccaataactaactcttactaaaaatagatattgacggtaaggatgtggggtaatttaggcatttaagactgccttcctgtcgcggaaaaattgattatactcaagttgaaaaggtaagtt

SEQ ID NO: 245585 - DNA, 583 bp, Homo sapiens
tctgaatgtttaaaaactcaagcattataagcctgctgtgcttttcctgcgaagtatggaacggcactaaatgaataatgccaccagagccagcagcagagccaggatccagaatcaaacaccgctttcatctgctcctgataggtgtgaactcccctctgccggggcttggatccctcctgcaggatgggtttcctgggctcccagtctgcatcttagctctccaaccccctttcccaatctgccctctttctctttttgaactctcttctggatggccagagaagttctaaatcagatgagcttccctgcacggcatcttccaccgagataaccctttctcacgacagtcctattccattcaacatgtgtcaagaatattgttgagaaatggygtgaaagcagtctaagccgccctcctcattttccaggtcagatcgagtctcaaacaacacattttcccccaataactaactcttactaaaaatagatattgacggtaaggatgtggggtaatttaggcatttaagactgccttcctgtcgcggaaaaattgattatactcaagttgaaaaggtaagtt

SEQ ID NO: 245586 - DNA, 623 bp, Homo sapiens
ggcgtgaaagcagtctaagccrccctcctcattttccaggtcagatcgagtctcaaacaacacattttcccccaataactaactcttactaaaaatagatattgacggtaaggatgtggggtaatttaggcatttaagactgccttcctgtcgcggaaaaattgattatactcaagttgaaaaggtaagttgctctgggtgtatgtgaaagagctacccgggaagggggaatgggtggaggggggatgaacagagattggtcgatgcttgcaaacatacagttggataaaaggaataagttctcatgtttgataacagagtagggtgactatggttaagaacaatatgttgtatttttcaaaattgccagaagagaggaaatgttaccaacacatagaaaagataaatactcaggtgatagataccctaaatgccctaacttgatcatcacacattctatgcatgtagcaaaatttcacatgtatcccataaatatatacaaatatatcgtatccaaaaaaattaaataaagaaccagacaatgacgtccttttaagcagaggatcccaaatgatggctgcaagcttaaatattttatattaatttacaagaaagaaccaaca

SEQ ID NO: 245587 - DNA, 578 bp, Homo sapiens
atttgccactttaaatggattatctaaaggaaattgattgacatggtcaaataactcattgtctattcatcattcagtgtatattcattgagcatttatacgtagagcattactggcgggtccagggtgaactaaccagaaaaataaaagacattgcatgcccactttccccattgtctgtaactaaatcacttagagaacaacctagaatagtacgaaattaaatgtggtatctatttacttattcataccctgtttcatgtcaaaaaggggttttgaggtttctttaaaaaaaatacatgaaatataacagaacaaaccagaataaaccaggaggaaaggaagcaaataggtgaagatttagttgaaagagttgggctgtaaatgaagcaaggagctccataacagccaaagcagagaacaaatgcacacgcagacacacacagacaggcatgcacacacagagatacacacacacagagacatgcacacacagagatacatgcagatacacacagasacacaggcagacacacacacacacacagagaggcatgcacacacacagagagagacac

SEQ ID NO: 245588 - DNA, 592 bp, Homo sapiens
tgagcctgatctctttcacttactacaaaatcccaattgtaggaggcccctggaataaagtctttcgtagcatatttaacaagtataacgaataatttttttctttaacacttgtctttagcaaatcctggttatccttgagtgtcgtaagttgggttccctgcaggcagatgctgaaatggaatttggtgtgcaggatatttatcagggatcacaacccccgtgtcagaggtgggaagaggcagaaatggacagaaggagacgctgagcatgccttctgtgtcttcgagagaagcagctctcctgcagccctgcagaaaccaattgctgggggtgatctactgacagcacctcctgcagcaaggcaacaagtctttccttggtgggggatgtaggtggyacttctctgtgttcaccaccccaggcacccccaattatcctgcagccactcaggtggggctttgctttttcttctcacactgtgcatacttcaaggcctgaagtggtggccagtgtgatccttgtgtgtctcttggcctctttcattccaatccttctccttcctccaagggcaccagtgcgatgaagctca

SEQ ID NO: 245589 - DNA, 592 bp, Homo sapiens
tgagcctgatctctttcacttactacaaaatcccaattgtaggaggcccctggaataaagtctttcgtagcatatttaacaagtataacgaataatttttttctttaacacttgtctttagcaaatcctggttatccttgagtgtcgtaagttgggttccctgcaggcagatgctgaaatggaatttggtgtgcaggatatttatcagggatcacaacccccgtgtcagaggtgggaagaggcagaaatggacagaaggagacgctgagcatgccttctgtgtcttcgagagaagcagctctcctgcagccctgcagaaaccaattgctgggggtgatctactgacagcacctcctgcagcaaggcaacaagtctttccttggtgggggatgtaggtggcacttctctgtgttcrccaccccaggcacccccaattatcctgcagccactcaggtggggctttgctttttcttctcacactgtgcatacttcaaggcctgaagtggtggccagtgtgatccttgtgtgtctcttggcctctttcattccaatccttctccttcctccaagggcaccagtgcgatgaagctca

SEQ ID NO: 245590 - DNA, 567 bp, Homo sapiens
atccctaattgcagacacttgaaatgtctgacaaacataaatgttgaattaatatgaaagttcctacttctcagaaaaggaaacctctgtgataaacttcaaagaaaaaaaaattttaattatcatcctatggttggatggggtttaataaaaatcrattcaaaatgaagcatccaatatctacacaattctttccattgcttcctttaggacttagttcaaacagcaccttctcaacaccattcctggaccaagccctttaaaataatacctcctccaactcccggctctctctttttccctttccggatttattgttcttcatagttcttatcaccttctaatctccttatttatatttacttttttattttcccctgtcttcccactctagaatgttccatgaggtcagggattgtgtctgctttgttctctcagagattctttgttctcttctgtatccccggtacccatcacatagtcagcactcagtattatttgtcaaattggtgaataaataaattaatgagttataatctgaaagtaactgtagtaaatgccttttga

SEQ ID NO: 245591 - DNA, 599 bp, Homo sapiens
ttattgttaacaccctacttgctaccttccccccgaccttactgaatacaagctccatgagagcaaggcccttttctgtgcagttcactgcctcaaccccattagaatgtgcttgccacacactaggcattctcaatatatgtgttgaatgaatgaatgaatcacactcagctcttcttcttggggtaatgagaagaactgacatgaaatataaagtgaattgtcttttccccccgagtgaattratgttagttaatgatctggcttcttaaagccctcctgtaggcccacactccacatgctggaaaacactgatctgagtcaaccctttcctccctgcagtacagacactgagaccagagcagggcagggacctgtgtgcggtcaggaaaggaggcctcagctgagccacggtgagcctgcaggtgtcctgactccctgttcagccatctccagagcccactgtctgctgcctcttattgtcaagacaacggccatttcaccaagtgatgttgcaaaaagagctggtcttgtgaagggctggcctcaaattctggctttgctccttatcagttgagtggctctgggcagctgtccac

SEQ ID NO: 245592 - DNA, 571 bp, Homo sapiens
atgctggcacatatccctgtatacttacaataaattccttttcttgctacagctatcttggcgtgggtttctattccttacaactacaacagccttaactgggatagtgacataaaacatttcctagtgcagatgataaatgtgtttgcattcatcaaagtgatatttcaaagggtccgtggtcaaataagtgctctcgccttttctgcactttgttgcttcatttagaatcacttggaggagggttaacactgcagtttgaagacagggctctttatgtggctttttcatatgataatgtagagtatattttcagcctagccttcaatcaaatgggcatcgtcttaaggagatataattatagccgctattttgctggcttttaattgaagacaaagcaaacagtgtgctaagaaattatattcaatgatgacacttccaacagcagggagaagagggccagtcagtattgaggaactgcacattcccagtgtgcttctaatccccagaggactctsccgataaatagcagagacatgaggattgttgggtgtttttcttgggtggatgg

SEQ ID NO: 245593 - DNA, 572 bp, Homo sapiens
tcatggcagatgtcactaatcaattaccactctcttttccacttatccaaactgtagccccagaagcctggcagacactcttttaaccaagagatcaatgttaatgttgctggtgatacattatgttgaaagcagaatagcatgatatgatatgatgagaaatttgtgacattcttccccaaaaccccagcctaatgagaaagacatcaagacaagcycattctgagggatattctataaaatacctgaccagtactccacaaaactgtcaagatcatgaaaaaccaggaaagactgagaaactgtaacagactagaaaaaactaaagagacataatgactaaatgcaatgtggcatcttgactgtccttgatcttgataccgtggattagaaaaagagcattagtgaaagacaaaacatatataaaaatatataattctgattttatatatataatatatatttatatatatttaataatttaatatatattttatatataatctgaataaattctagagttcagttaatagtaatgtactaatgttaatttcttggttttgacaaatcca

SEQ ID NO: 245594 - DNA, 572 bp, Homo sapiens
tcatggcagatgtcactaatcaattaccactctcttttccacttatccaaactgtagccccagaagcctggcagacactcttttaaccaagagatcaatgttaatgttgctggtgatacattatgttgaaagcagaatagcatgatatgatatgatgagaaatttgtgacattcttccccaaaaccccagcctaatgagaaagacatcaagacaagcccattctgagggatattctataaaatacctgaccagtactccacaaaactgtcaagatcatgaaaaaccaggaaagactgagaaactgtaacagactagaaaaaactaaagagacataatgactaaatgcaatgtggcatcttgactgtccttgatcttgataccgtggattagaaaaagagcattagtgaaagacaaaacatatataaaaatatataattcygattttatatatataatatatatttatatatatttaataatttaatatatattttatatataatctgaataaattctagagttcagttaatagtaatgtactaatgttaatttcttggttttgacaaatcca

SEQ ID NO: 245595 - DNA, 567 bp, Homo sapiens
tttttcagagaacaagtttggaagttgaccrattcaggttcaaatcctggctctacaacattctcaccatgtgatacttcaggtgacaaagtagttctctctcagagctttgggtttcccacatctagaataaggatcctgtaggactttgcttgtaaacttgctgtgagaaataaaatgatgcatgaaaatcatctagtgctggtcctggaacagtaaacgccaataaacacttgttcttgttgttgatgattattgtcattggaataccactttctttcatcaagctcaggttggggacagagtcagtcacagacttgtcagcaagtcagttctccgctccagacacttgaaatcctcctcttcttcctctccttcactgctcaccctcttactcaaatcactgatagactctggttttgttttgtttcgttgttttttaagagacagagtctcactctgctccccaggctggaatgcagtagtgcaacaatagctcattgcagtcttgaactcccaggctcaaatgattttcccgcctcagcctcctgtcacctgagtagctgg

SEQ ID NO: 245596 - DNA, 506 bp, Homo sapiens
tatgactttcctcatgatgtctatcagttctcaaaatttttctcttttatactgaactacatccagaccctaagaccaaattctccctgtaatagacatgagggtaagggtgaagagcgaaaatgatgtgttcagcagataagtaagtacaggttggagtacagcttcatgggaaggaagagatgtgctagacgtcagactcaggctgaaacgtttttacattattcttaggcatttagcagatggaggcataagracctgcctaatttaggaaatttgatttgaactacctggtctaaccaaggtttccacttcccactactgcatttggtgtagggtcaatgagctgaagtttgtgaacccatgttgcttctgtcttcccttaaatgttatcacatagaggagggagctaccccacaacaggggaaaaaatatctttcaaccccaacatccatcccagacaaataagaacatggataaaataagagactcttaaagactcattt

SEQ ID NO: 245597 - DNA, 559 bp, Homo sapiens
gaatgaggcagtggggattgtaggcttaaaattcagaatagaataattttttcattttacaggtaagaaaactgagacccagagaagaaaagttatttttcaacatgagtcgagcctcctctttctccccaaaccatgtgtcactctacagagaccccaaaagagatttattttgcccaacaatcataagaaaaaaaccaaacaggggctagtactatggaacatggggaaagaagggaagayagaaattgagtcagtgtttaagaaaaaaactgggaatgcttttctacattcaacatttcccaaggtcatgttttgcaaggctgatgatttaccctccccatttctccctcttcattttctttgtactcacacacaaaaagacacgaactcaacaacaacaaggatgtgaaaccatttcattgggcatttgaatacagctgggtcataaaagaaagtgaccactgactcattattttttaacgtgaaaggaaaaaacagggactcctgcaacatcaagcatgtgcttactatcgacttttcccctgtgaatggtgtt

SEQ ID NO: 245598 - DNA, 559 bp, Homo sapiens
gaatgaggcagtggggattgtaggcttaaaattcagaatagaataattttttcattttacaggtaagaaaactgagacccagagaagaaaagttatttttcaacatgagtcgagcctcctctttctccccaaaccatgtgtcactctacagagaccccaaaagagatttattttgcccaacaatcataagaaaaaaaccaaacaggggctagtactatggaacatggggaaagaagggaagatagaaattgagtcagtgtttaagaaaaaaactgggaatgcttttctacattcaacatttcccaaggtcatgttttgcaaggctgatgatttaccctccccatttctccctcttcattttctttgtactcacacacaaaaagacacraactcaacaacaacaaggatgtgaaaccatttcattgggcatttgaatacagctgggtcataaaagaaagtgaccactgactcattattttttaacgtgaaaggaaaaaacagggactcctgcaacatcaagcatgtgcttactatcgacttttcccctgtgaatggtgtt

SEQ ID NO: 245599 - DNA, 603 bp, Homo sapiens
tagattagggactgcaggataaagtcagtgttaactccaggtcataatttgaaagctagacctgtaacctgccgctctaattacactagtcctctgtcccctgattacacatacatgtgttgtggctttcaatggaaggaacaaggcattttaragaagcaacaaaagtgctcttgtcaattagagcagctattaatactaattgtgctttagaattctcacaacaacgttagagaccctaattaatacaccaccgttcacagagatatgatgaaacctgggtgttactcacaccagtctaataactagtctggttgtgatgtggactggctcagagttagaattttaagtaccacacagaaaagaaattagcattcttcagtctcctgttgcaatgggggtgagaggagctggcctgaactacagagctgtagtggaaggcacgtaaagcccctgaaaggggaatcttgctttccaaatcttttgataaatggaagggctttccaagtgttgtcaatctaaatgaacacagcagggagtgtagcctgggaatgttcaccctcatggtcaaactccaaacagagaaagagaattgcaagttgg

SEQ ID NO: 245600 - DNA, 642 bp, Homo sapiens
cttcacagtttctgtgaaggtaaatgaaagatatactttaaaatactaggaaaattgtagatagaatataaacagrggtcagcaatgcaaataatagaattatactcaggacacttgagagacaaggtttcaccatgttggtcagactggtctcaaactcctgacctcgtgatctgcccacctcggcctcccaaaatgctgggattacaggcgtgagccactgcgcccagcctcatgtgtgtattttgatttttgtttttttggtttttgtttttgagacagggtctctgtctgtgacccaggctggagtgcagtggcacaatcatggcttgctgcagccttgacctcctgggctcaagcgatcctcctgcctcaacctctctagtaactgggaccataggcgcatgctaccatgcttggctgatttttaaattttttgtagagaagagaggtgggggttctccctatgttgccgaggctggtctcaaactcctgggctcaagtgatcctcccactacagccttccaataaagcatgtattttaaataaagttccttgacactcagaatgtaagaagtaatacaatgaaaaaatatatatattaacttgggagtcagaataaaacaacagctaagacaattg

SEQ ID NO: 245601 - DNA, 638 bp, Homo sapiens
actttaagaaatataatagtttgcaaattttcccagacatttttaaacagaaaggcccttttcctccaaatcattacataagacttgtgttttctggagcattttttgagaaagctgcattaagttatagaatactgaaatgcagcagttggaaggagcttcaaaggacccaaacccctcattttcaaggcagaaaaactgaggcactgaaggtaaagtgactttcccaagtttacacagcacattaatgtcagatgtaaagcaagaacagatatcctgactcctgacatattttttatccctagatcagttgaagccttcctggattatatcaaactggttgtttctgacccaactagaattggtgaattaatattctactcatttttgtcttgaaaaattcaaaacttgtttaygacttgtttgttggccatcaatttaaaatggttgacagagacagaaaattcatccagaggtctataaacccacagattcaggaagttcatgaacagacacagaatgaacattaagaaaagtgcaccaagcatagtataaattactgaaagccaatgattagataaaaaaaggcctcaaaagcagccagagaaaatgaacatgataggttaaaagcctaggga

SEQ ID NO: 245602 - DNA, 685 bp, Homo sapiens
ttcacctggatgcacagaaatgcatgcactcctttgtgaagaagcataatttgattctgggctctgccactgtaagagagtgacataaattcttggggrgctgctcagtataggataaggtcaagtggaatggacattacatgtatcttggattgtgatgaaaagtaaaggatttatgtcactaaatacctgctcttcatttctgcccaaagcatttgagaagccaagaggaattttacagggaacttgccattgaaggactgaaataggtgtggcccccttcttaaggacaaccaccccatcgggactcatagggtaaaaatttcatattccccattcctgtgtccttttctctgtggaatgctaaactgtgtgctaggtaatccctggtgtggaagatgcatacaatatggcccccatgaatcctgcctccctgtatctatttctgtgtatagttccctcccacaatgactggcatcttagtcatgtgacttcctctagccaatgagacttcagcaaacatgccacagggaaaagtttgaatggcacatgcaaactggggcttactctctctcctttgctgtttttggactccagccaccatgtaaaaaagcccaggctagcattttggagacaagtcacctaggtgacagccaacaccaaccatcagacatgtgagttaggc

SEQ ID NO: 245603 - DNA, 685 bp, Homo sapiens
ttcacctggatgcacagaaatgcatgcactcctttgtgaagaagcataatttgattctgggctctgccactgtaagagagtgacataaattcttggggggctgctcagtataggataaggtcaagtggaatggacattacatgtatcttggattgtgatgaaaagtaaaggatttatgtcactaaatacctgctcttcatttctgcccaaagcatttgagaagccaagaggaattttacagggaacttgccattgaaggactgaaataggtgtggcccccttcttaaggacaaccaccccatcgggactcatagggtaaaaatttcatattccccattcctgtgtccttttctctgtggaatgctaaactgtgtgctaggtaatccctggtgtggaagatgcatacaatatggcccccatgaatcctgcctccctgtatctatttctgtgtatagttccctcccacaatgactggcatcttagtcatgtgacttcctctagccaatgagacttcagcaaacatgccacagggaaaagtttgaatggcacatgcaaaytggggcttactctctctcctttgctgtttttggactccagccaccatgtaaaaaagcccaggctagcattttggagacaagtcacctaggtgacagccaacaccaaccatcagacatgtgagttaggc

SEQ ID NO: 245604 - DNA, 685 bp, Homo sapiens
ttcacctggatgcacagaaatgcatgcactcctttgtgaagaagcataatttgattctgggctctgccactgtaagagagtgacataaattcttggggggctgctcagtataggataaggtcaagtggaatggacattacatgtatcttggattgtgatgaaaagtaaaggatttatgtcactaaatacctgctcttcatttctgcccaaagcatttgagaagccaagaggaattttacagggaacttgccattgaaggactgaaataggtgtggcccccttcttaaggacaaccaccccatcgggactcatagggtaaaaatttcatattccccattcctgtgtccttttctctgtggaatgctaaactgtgtgctaggtaatccctggtgtggaagatgcatacaatatggcccccatgaatcctgcctccctgtatctatttctgtgtatagttccctcccacaatgactggcatcttagtcatgtgacttcctctagccaatgagacttcagcaaacatgccacagggaaaagtttgaatggcacatgcaaactggggcttactctctctcctttgctgtttttggactccagccaccatgtaaaaaagcccaggctagcattttggagacaagtcaccyaggtgacagccaacaccaaccatcagacatgtgagttaggc

SEQ ID NO: 245605 - DNA, 515 bp, Homo sapiens
gaagaacatggaacctgatctttggggcaggaagcatccagcacaggagaaagatgtaggctggggggctaagcaagtctagtcttcatgttcttctgcctgctttttattctagccactctggcagcagattagattgtgcccacctgcataaagggyggtctgcctttcccagtccactgactcaaaagttaatctcctttggcaataccctcacagacacacccaggaacaatattttgcacacttcaatccaaccaaggtgacactcagtattaaccatcacacatggggtgatagggaatggcctttctggaaaaaatgacttttgaacagaaatatgagtaatgcaacagagctggtcccatcaatcatggggagatctgggaaagagcattgcaggtggagggacatctcctgggtctgagaaacagaaagcaccagtgcagtgaggatacacaaccagtatcaaaatcacctggaaggcttcttaagacacagatggctgtgcctca

SEQ ID NO: 245606 - DNA, 515 bp, Homo sapiens
gaagaacatggaacctgatctttggggcaggaagcatccagcacaggagaaagatgtaggctggggggctaagcaagtctagtcttcatgttcttctgcctgctttttattctagccactctggcagcagattagattgtgcccacctgcataaagggtggtctgyctttcccagtccactgactcaaaagttaatctcctttggcaataccctcacagacacacccaggaacaatattttgcacacttcaatccaaccaaggtgacactcagtattaaccatcacacatggggtgatagggaatggcctttctggaaaaaatgacttttgaacagaaatatgagtaatgcaacagagctggtcccatcaatcatggggagatctgggaaagagcattgcaggtggagggacatctcctgggtctgagaaacagaaagcaccagtgcagtgaggatacacaaccagtatcaaaatcacctggaaggcttcttaagacacagatggctgtgcctca

SEQ ID NO: 245607 - DNA, 515 bp, Homo sapiens
gaagaacatggaacctgatctttggggcaggaagcatccagcacaggagaaagatgtaggctggggggctaagcaagtctagtcttcatgttcttctgcctgctttttattctagccactctggcagcagattagattgtgcccacctgcataaagggtggtctgcctttcccagtccactgactcaaaagttaatctcctttggcaataccctcacagacacacccaggaacaatattttgcacacttcaatccaaccaaggtgacactcagtattaaccatcacacatggggtgatagggaatggcctttctggaaaaaatgacttttgaacagaaatatgagtaatgcaacagagctggtcccatcaatcatggggagatctgggaaagagcattgcaggtggagggacatctcctgggtctgagaaacagaaagcaccagtgcagtgaggatacacaaccagtatcaaaatcacctggaaggcttcttaagacacagrtggctgtgcctca

SEQ ID NO: 245608 - DNA, 577 bp, Homo sapiens
gatcttccagtgttgtgaataatgcagacaatacggtttctgggtgccttctctgaaaactgcccagattttggacttgagcttgatgcaaactgcattataaacatgccaaacttgtgctgacagcactgaaagcactttgggataaacatttgtgtttgctaaaaatgtctctaaagaattggaagtatttcatcaaaagatttatctgtgcatttctgggggtgtttaaaagctttccatgacccaaaagcagtggttaccgagtgactcattcatcagcttctggtacatttctagcctcaagattcaaaaaggaaaattgaaattaaaagattaattcttattaaaattgacatgtgtcctttctgagggatagaggagtttaattgacaggatgcttgctgtagatgggagtttttggcttagatgtgactattttcctacctctttaggtttctcagcaaatctaggtttgaggatcagatgtgttgcttaagaaaagattgcaattatcactaagcaattgctgggttaattagkcctgtcaataattcagagggtgattggagcaaca

SEQ ID NO: 245609 - DNA, 605 bp, Homo sapiens
ttaatggagatgatatagtgctgaatagaacatatacrtcagtagtgattttttgatatgtatgaagaagatgctcttgtccactaatagtaataggaacaataaccatgataatattaatagtgattcttaggtattgtgtacctcctatgtgctaagtattttgcctatgttatctctaatctcagaatgactcataaaggtagggttcttttttaacaatttaattatattctttaagttacttaaaaatatacaatgaagtggttattgactatagttgctctattgtgctattaaatagcaggtcttattcattctttccaattttttgtacccgttaaccatccctactttccctccagacccctcactacctttcccagcctctagtaccatcaatctacttcctatgctcatgagttcaattgatttgatttttagatcccacacatatgtgagaacatgcaatgtttgtctttctgtgcctggcttatttcacttaacataataatctccagttctatccatgttgttgcaaatgactggatctcattctttttttgtggctgaatagtactccattgagtgtacataccacattt

SEQ ID NO: 245610 - DNA, 605 bp, Homo sapiens
ttaatggagatgatatagtgctgaatagaacatatacatcagtagtgattttttgatatgtatgaagaagatgctcttgtccactaatagtaataggaacaataaccatgataatattaatagtgattcttaggtattgtgtacctcctatgtgctaagtattttgcctatgttatctctaatctcagaatgactcataaaggtagggttcttttttaacaatttaattatattctttaagttacttaaaaatatacaatgaagtggttattgactatagttgctctattgtgctattaaatagcaggtcttattcattctttccaattttttgtacccgttaaccatccctacttkccctccagacccctcactacctttcccagcctctagtaccatcaatctacttcctatgctcatgagttcaattgatttgatttttagatcccacacatatgtgagaacatgcaatgtttgtctttctgtgcctggcttatttcacttaacataataatctccagttctatccatgttgttgcaaatgactggatctcattctttttttgtggctgaatagtactccattgagtgtacataccacattt

SEQ ID NO: 245611 - DNA, 587 bp, Homo sapiens
gccaacagacaccttatataggcggctgcccctctgggatgaagcttccagaggaaagatcaggcagcaatatttgctgttctgcagcctccgctggttatacccaggcaaacagggtctggagtggaactccagcaaactccaacacacctgcagctgagggacctgactgttagaaagaaaactaacaaacagaaacaaatagcatcaacatcaacaaaaaggtcatctacaccaaaccccatctgtaggtcaccaacataaaagcacaaagatggggagaaaccagagcagaaaagctgaaaattctaaacacgaaagcacctattctccyccaaaggatcacagctcctcacaagcaatggaacaaagctggacagagaatggctttgagaagctaggcttcagaaggtcggtaataataaacttctccaagctaaaggaggatgttcgaacccactgcaaggaagctaaaaaccttgaaaaaagattagatgaatggctaactggaataaacagagtagagaagaccttaaatgacctgatggagctgaaaaccatggcacgagaactttgtgacacatgca

SEQ ID NO: 245612 - DNA, 501 bp, Homo sapiens
taaatccatcttccaataaaagtatccagggcttcatgaagaaatggctgattacccagttgaggtcagcaaagtataacaaaacttaaagcatcttgtggtaccagaaagttaaaaagtgctaaaacgctgatagaagcatgtttaaaatacacagaaactcatccaggagttcccaatagccatatctggagtaattaaggcaactaaataatgatagtattttatgataattcactgaataaaacaaatatccatgagtctatatagatgtsaacaaatgattgattgattaaataaataagtggagaagaacggacaggttttcctgaaggaatacttcaattgttaaactagtgcctttcaattaataaactaatagataaaaatgaatgatgcaacagaaaatcgccatttgacaaataccacagcaataattattgcagagagaagtaatagatgttaaaattattgggagaaattatgatgataatcagaata

SEQ ID NO: 245613 - DNA, 501 bp, Homo sapiens
taaatccatcttccaataaaagtatccagggcttcatgaagaaatggctgattacccagttgaggtcagcaaagtataacaaaacttaaagcatcttgtggtaccagaaagttaaaaagtgctaaaacgctgatagaagcatgtttaaaatacacagaaactcatccaggagttcccaatagccatatctggagtaattaaggcaactaaataatgatagtattttatgataattcactgaataaaacaaatatccatgagtctatatagatgtcaacaaatgattgattgattaaataaataagtggagaagaacggacaggttttcctgaaggaatacttcaattrttaaactagtgcctttcaattaataaactaatagataaaaatgaatgatgcaacagaaaatcgccatttgacaaataccacagcaataattattgcagagagaagtaatagatgttaaaattattgggagaaattatgatgataatcagaata

SEQ ID NO: 245614 - DNA, 556 bp, Homo sapiens
aatctcttgatccattaagtactgtgagttactatacatcataggtgactatctttggggaagcaatgacatagtacataagactgacaatactttgtgggtggaagccattcggtacactttacttacctcctctcctcctcttctttttttaaccaagaatggtcaggtacaaacatgtataatgcagttaaatatttggccaactgatatgtattaatatatttgctaatgttttcgtaattttcaaagattaaaggacaatgaaatattcatgcttttaaaatattcaaaattttaactactcatttttattagctaaaaatacttaatattgcctgagttctcagtgtgtgctaaacatcatattagctgttttatgtgcattttytttttcattcgttgttctccacttttctctgaggtaggtgacagtatgggctttggtttcttgagttgacagctgaggctcagagaggttaagtaatttagcccaaggtcacacagatattcagtgatggggccagatttgaaccaatgcaagttgcctgtgttt

SEQ ID NO: 245615 - DNA, 609 bp, Homo sapiens
ctaaaagattcagcctcctttgatgctttctttctgccaccttcagtgggtcatcaatgcattgaaggatggcttcgataggctctccctagcatcacgttttcatrcaacagcacccaagcaagaaataaaaggagatgtagcaaagagtcttttctttatactcttctctcattttcaggaagtaaaatcctttttacacttgatcttatccaaaaggactagaagcagtaggtaggaaaaccgtttctagacgtctccagcaaacttcctttctcaactaataagttagaactagatcataccatcatcctcacctttcagagaagttaggaaactgagtacctgaaagaggaaagttgggttgccttgattggcttaacagagtggttcttagactattttgtctaaggagccgttttcacccttaaaaattgttgaggactccagagagctttgtttatttgtgtgatctttattgatattgaaattaaaacataaattttttaaacattcatgaatttattaaaataacataatgcctgttaacattaaaatatttttgctgaaaaataactatttttcaaaaaaatagcaaaaagagtggta

SEQ ID NO: 245616 - DNA, 621 bp, Homo sapiens
acactctacaaattatgtgcccttcttggagtcattattttcatactaaagtctctgagaggtcctgcaatacagaaattttactgtcccagattctttttaacttgatcatagaacaattttatgtcatctgcgcctgtcttttcccttctccctgtctagaaaagtcaacactactgagcactgaaaaagacaggcagctggcagcctcagtggccctgatgcaaaggcagtttacacagggccccaggagggcaaaagtctattttttgtcagcccatgtcttctgttcagcatggataccagtcaaagaatcaaggcawcgtggacataaagctacatgatttatgatcaacaatgacccaaacagagatggcaggaaaggcaatgggtacaagagaaggtctctaccatatgagatttacaaattcataaaacacaagacaacgtttctggcttcgttccattcctctattctaccaactttcttgaccagtatctcttcgaggcccatctacaatgctagctagcctggtgccacattagatttccagcaaggagttacctttctttgattacacatatatgcgcgcacacacacacacacacacacacacacac

SEQ ID NO: 245617 - DNA, 606 bp, Homo sapiens
gtcattattttcatactaaagtctctgagaggtcctgcaatacagaaattttactgtcccagattctttttaacttgatcatagaacaattttatgtcatctgcgcctgtcttttcccttctccctgtctagaaaagtcaacactactgagcactgaaaaagacaggcagctggcagcctcagtggccctgatgcaaaggcagtttacacagggccccaggagggcaaaagtctattttttgtcagcccatgtcttctgttcagcatggataccagtcaaagaatcaaggcaacgtggacataaagctacatgatttatgatcaacaatgacccaaacagagatggcaggaaaggcaatgggtacaagagaaggtctctaccatatgagatttacaaattcataaaacacaagacaacgtttctggcttcgttccattcctctattctaccaactttcttgaccagtatctcttcgaggcccatctacaatgctagctagcctggtgccacattagatttccagcaaggagttacctttctttgattacacatatatgcgcrcacacacacacacacacacacacacacacacaacatatacgcac

SEQ ID NO: 245618 - DNA, 578 bp, Homo sapiens
ggaagtttttagctatcattttattaaataatttttctaggccttttccaatcttttcccttctgaaattctcaacatttcaacatatgttttcttgatagtggcccatatgttatgtaggctttcttcattctttttcattctttctttttctttcctcttttttatctgactaggttatttcaaaagatcatctttaagtttagaaattctttcttcttcttgctctagtctattgtttaagctcttgattttattatttattttattgactgaattctttattgtcagtatttctattttattcttttttatatctatctctttgttgaatttatcattcacattatgaattgttttcttatttctttgtattgtctactgtgttctcttatatctcactgagtttctttaagatcatcattttgwatttcttttcaggcttttaatagatttttcttttctttgaagtcttttactggagagttattgtgtttcattgctttttcatatttcttttggtcttgcattaatatctacatctttggtgtaaaggttatttcttccaattttatgga

SEQ ID NO: 245619 - DNA, 528 bp, Homo sapiens
aaaggttatttcttccaattttatggagtagcttttgttgggaaagacattttactatagatatatcatagtatctgttgggtagggtactttggctttagttctgggtgagcattgtagtgcagtctccatataatttctttggctgtaatcagtgttggcratgtctataaattcctcaatagcttaggctgtggtcatttgtggaggctatggtgagactctgctggggactggggccccaggtgggctggtcctctaacccctaggtggtacacgagggcaccagctgtggtggtagtcttccctgggtgggcagcttctcagacccttgggtggcatgcacaggactcagtggtggtagcagcagccctttaagagccagttctcaggcctccagaaggcacactcagactgtggtagccatagtggctgaagcaagctaggttttgggtgttgggcagcacacctgagtgcatggtggccccacaattggagaggagagggtcactgtcagtggcaacatcc

SEQ ID NO: 245620 - DNA, 528 bp, Homo sapiens
aaaggttatttcttccaattttatggagtagcttttgttgggaaagacattttactatagatatatcatagtatctgttgggtagggtactttggctttagttctgggtgagcattgtagtgcagtctccatataatttctttggctgtaatcagtgttggcgatgtctataaattcctcaatagcttaggctgtggtcatttgtggaggctatggtgagactctgctggsgactggggccccaggtgggctggtcctctaacccctaggtggtacacgagggcaccagctgtggtggtagtcttccctgggtgggcagcttctcagacccttgggtggcatgcacaggactcagtggtggtagcagcagccctttaagagccagttctcaggcctccagaaggcacactcagactgtggtagccatagtggctgaagcaagctaggttttgggtgttgggcagcacacctgagtgcatggtggccccacaattggagaggagagggtcactgtcagtggcaacatcc

SEQ ID NO: 245621 - DNA, 631 bp, Homo sapiens
tatttcttttcaggcttttaatagatttttcttttctttgaagtcttttactggagagttattgtgtttcattgctttttcatatttcttttggtcttgcattaatatctacatctttggtgtaaaggttatttcttccaattttatggagtagcttttgttgggaaagacattttactatagatatatcatagtatctgttgggtagggtactttggctttagttctgggtgagcattgtagtgcagtctccatataatttctttggctgtaatcagtgttggcgatgtctataaattcctcaatagcttaggctgtggtcatttgtggaggctatggtgagactctgctggggactggggccccaggtgggctggtcctctaacccctaggtggtacacgagggcaccagctgtggtggtagtcttccctgggtgggcagcttctcagacccttgggtggcatgcacaggactcagtggtggtagcagcagccctttaagagccagttctcaggcctccagaaggcacactcagactgtggtagccatagtggctgaagcaagctaggttttgggtsttgggcagcacacctgagtgcatggtggccccacaattggagaggagagggt

SEQ ID NO: 245622 - DNA, 576 bp, Homo sapiens
atgtcaaagctgagaactcctggggaatcattttcctgattatgccttttcccctcttccctctctaggagggcctgggagggtacctagacmcacaatgcaaaggactttggcaacaaatctcttaatttaacaggtgtacagaaatgtattctcttttttctaggtggtcacagtctagtgggagagaggacaaaacaaatgataaaggctatgacaaagggaggtactggttattatgagaacaaaaagtgaggtattcagcttgggctggaagttgggaagatcaaaggaaggggtcagacttgaatgataaaaagagctcattgaccttctttacacagcacagggaaattctgtgcaaaggtatagagaaatgagagttgctgcagtaccagaggatccaaacttgagcatgggatgcattgtgggaggtcagcactggaaggcaggcaggagctggatgtcaaagccctttgtatgacatgttaaggggatggatattcatttgtcagggggtcagaagatctaggttccacttttaggctgccaagcgctggttatgtaattcttgtc

SEQ ID NO: 245623 - DNA, 505 bp, Homo sapiens
gcctaagaataaccactgtactcaatcctgggcaacatagcgagactccatttcttcaaaaaaataaaaagaattctgtgaaatcaaaawgtcatgggatttttttctggtggagttggagataaggaacaggagattaagaaagggagacagaaaaaagtacattcatttaaaatgacaaaagctaatatttttcaatatatactccctatcaaatagagataataagaccaggtaaaaattgaggaagagatttaaagttcattgaagagtaagaagtaatatatttttttttttttgatggagtcttgttaccgatgctggaggctggagtgcggtggaacaaacatagctcacttgcatcctcaatcctcctgcctcagccccacaagtagctgggactacaggtgtgtgcaaccatgcccaggtaatttattttaatgttttgtagagacagggtctccctttgctgcccaggctggtctcaaactcttggcttcaagtg

SEQ ID NO: 245624 - DNA, 548 bp, Homo sapiens
caaaaaatacaaagtaggtagaatttgtctttggggttgttctacttttctactcaatgcccccttacctctctaacatcarctttgtccaatttgctttcaatgagtcatggaacctcagagttagagagaaacttagaattcttagagttcaacacttagctgattctccaatgatatatacagcatcctcgaaaagtgagagccattagctacctaaatagacccagggatggagagtctactgcctccatccatttgactttgctctaattggaggactgttcttccgtacgtttggctgaaaccattttccttcctcatgggtttaaacatcctacttctctgttcactggtttcatgagtattctctttgtactttggcaggatttctaccaagatgccaactgatggtttaagctcttatttctacaaggcctattctccatgaacagtaaactttagaaaaaaaatatataaaatatacatccctataagaaactcaaagaataattaatatcaatgaaattccaagcacaggctagaaa

SEQ ID NO: 245625 - DNA, 522 bp, Homo sapiens
ttgaatgaggcaggtatgaggaagcactttacatagttattctgtatgttccctcctccagcatcaatctgcaggtctaaaagcccagccaatcatcggcaagttttggaccttctgaaaagcgaggtagatgtgagttcagtgacaaggttgccaggcaaaatgttggatatccacttaagctggactttcagataaacttgcaataatttcttttagtataagtatgtctcaaaaattgcatttgaatttgaaagtccagtttaactgagtgtttcacattttcacttccctaaatctggtaaactctattaaggagctgggaataccagacccagatgcctgtgtcattttgcaaggactctgagattaactgagagaacattggagaaaaacagtagtcctgttttggttttattcctcccaggactaataaaattatttgttaaatagtttctttcttctggggatccrggaagatgattgttaatgaatatttaactagaataaagaggggacagg

SEQ ID NO: 245626 - DNA, 585 bp, Homo sapiens
cctctagtctggctaaagacaaccagtcccttatcttcagcctaagttggggaatgttctgaaggtgacacagcaggtccctttgtgtctttggtttgtgggtggtatctttccagctcagggagcaggtagaagaggcagcttccaaatccagaagaagtcacagcaagttcactgtatcaaggcttcattttcttttcttctcagaagagtgagcatctgagggatgtgtgttactttgtcagttgtggtgtttgataaagaaaaggtcttggttttatgatccagggaccctgcaagcagtaggacatgcagcccttgtcagggccttttctgtgtgcagtgttaccagtaggtgactggggaaatctttctcttacccggtcagatctgggaccccatggaagatgaaaaggggcaacccagaatcactcagtctcaggaatggcrggatcctcttagggggcaacccaaccatggacttccaaatctgactgcttatccaaagcacttgaaagcatatatatgctctgtattagtcagggttctccagagaaacagaacaaacaggatatctgtaactat

SEQ ID NO: 245627 - DNA, 576 bp, Homo sapiens
acttttgcaaatttcacacccctggtggttgtgtgttgatacacatctgtgcaatctgatcggcctaattttactttgtatagacagaaattaataaagctctcagaatgtggaaaagggctcttctaggagcacaacaatttgactgcctgtagttgtggttttctcttaaacatgggggtttctgtccccattccagaacccggggagaagaaagagttgtttccctcttcttaygaaacaaacaagcaagcaactaaatatttttgcatacaaacatatagcaaaagtactataacaatgattcatgtaactaccttccagcttaagtgatagaatattagtagttcttgaaagctccttgtatgtcctgatccaattatattccctttttttcagaggtgaccattattcagaatttagtgcttatcattttcacatgtttgggttattctttaactgtaaatgtatatactcctaaacaatgtaaagtattatttggtacgtttaaaaattttaaccatatatccttctgcaatttacttttctctcctctctacattatacttgtgaaat

SEQ ID NO: 245628 - DNA, 576 bp, Homo sapiens
acttttgcaaatttcacacccctggtggttgtgtgttgatacacatctgtgcaatctgatcggcctaattttactttgtatagacagaaattaataaagctctcagaatgtggaaaagggctcttctaggagcacaacaatttgactgcctgtagttgtggttttctcttaaacatgggggtttctgtccccattccagaacccggggagaagaaagagttgtttccctcttcttatgaaacaaacaagcaagcaactaaatatttttgcatacaaacatatagcaaaagtactatarcaatgattcatgtaactaccttccagcttaagtgatagaatattagtagttcttgaaagctccttgtatgtcctgatccaattatattccctttttttcagaggtgaccattattcagaatttagtgcttatcattttcacatgtttgggttattctttaactgtaaatgtatatactcctaaacaatgtaaagtattatttggtacgtttaaaaattttaaccatatatccttctgcaatttacttttctctcctctctacattatacttgtgaaat

SEQ ID NO: 245629 - DNA, 576 bp, Homo sapiens
acttttgcaaatttcacacccctggtggttgtgtgttgatacacatctgtgcaatctgatcggcctaattttactttgtatagacagaaattaataaagctctcagaatgtggaaaagggctcttctaggagcacaacaatttgactgcctgtagttgtggttttctcttaaacatgggggtttctgtccccattccagaacccggggagaagaaagagttgtttccctcttcttatgaaacaaacaagcaagcaactaaatatttttgcatacaaacatatagcaaaagtactataacaatgattcatgtaactaccttccagcttaagtgatagaatattagtagttcttgaaagctccttgtatgtcctgatccaattatattccctttttttcagaggtgaccattattcagaatttagtgcttatcattttcacatgtttgggttattctttaactgtaaatgtatatactcctaaacaatgtaaagtattatttggtacgtttaaaaattttaaccrtatatccttctgcaatttacttttctctcctctctacattatacttgtgaaat

SEQ ID NO: 245630 - DNA, 496 bp, Homo sapiens
tgaccattattcagaatttagtgcttatcattttcacatgtttgggttattctttaactgtaaatgtatatactcctaaacaatgtaaagtattatttggtacgtttaaaaattttaaccatatatccttctgcaatttacttttctctcctctctacattatacttgtgaaattcattcatgcagctatctgtggctccattattcattttcactgctatagagtgttttattgtatggatataacccagtttatttctcattctcctgcttgacatattcttaacgtctttggggtggtgaatggctgtttcctcatcttgcattctttctcgatctatcatttatagcattaattttgtagtggggtctttcagccttggttctggatttcaaagacattttgtcttctmgcttatgtagttgaaaagtgatggttttcgatatttgtttttttatctttttgtttctctttctttttgcctctactttacat

SEQ ID NO: 245631 - DNA, 334 bp, Homo sapiens
gtcttaccttttttctttcactcatagagaaatattacaaaacaaggatttcctcttgttcaatatagttctcttgaagaacagcaatttctttagttctctagttactttttctttttaaatttgagtaacattratttttttgttattaaacctatttattactaaacaatgccagttttctttctgtctcttcatccattcatcttttcatctctcttttcgccttactacaatgcccaacacttatctccataaatattcatgaagagagacagccaggtgttcacagttaacactgaaagggaaatgcatgcactttctgctttgtcaa

SEQ ID NO: 245632 - DNA, 548 bp, Homo sapiens
tgcctgctctatcaaaatttccatctctaaactggttgtacctataaccctccctcaccaagtcaatagataaacaaaccctgaaaaatcagcaccccttcctggcccagcagcccactscctaatatttactgtgtacccaagctttcagaaatggaactcacctgctggttcaccctcattagggtggcagctgcacgggagcagctgggctcacccattaagcaagaagccaatggctggacagtgacactcagaccccagtctgggcgagcctggctgaaagcccccttctttccgatctgactgtggagagagggggtggagcatacacaactctactgcccttcgcatccttcagctgtgcttcctcctgagagagggagccgttcattaatttggccaaagagttcttggggtctgtaggtttgacaggctgggtgtgtgggggccaccgtgctagagagagaggctggtgtgtcagaaggcagccacttggccagaggagggtcagcccccttggtgacctccttcccccggctggacac

SEQ ID NO: 245633 - DNA, 635 bp, Homo sapiens
ctgagtctggaaatggtgctgtccagggtggcgtgtgcccatgactgcacctgtgtttgtacttgtkagtgtgtatgggggtggggatgaggggtgggaataaacagcagagatgctgggggctggaatgcactccacctaaccccaaaaaggggcacaggagagcccagccaagcacagcacatgcttcgactttccaatctgctgaatgactgggaggccagctgggctcagaggacaagggacaggtctttcccccacagatcacaggggtggcccaggatgagtggaagcttctgctgcagctttgggggttacatcccagcccatgggctgacagttaagcagaaaagccacctctaggggtcagtcatgatctagtgattctgatgaggagggggccccaccagcctctgtccagagtcttgtctggaaaaactgctccctggcagaaacgggctaataatttgagaggaagccatagctgaaattctcaactgtgtgagtgtgtgtccagtttgaaaaagcatatccaacttaaacatttatattgaaaaaatggaaagctattccccttgttttggaatacaaactacagaaagtaacagttaacagaatcatattggaaaggtcaa

SEQ ID NO: 245634 - DNA, 635 bp, Homo sapiens
ctgagtctggaaatggtgctgtccagggtggcgtgtgcccatgactgcacctgtgtttgtacttgtgagtgtgtatgggggtggggatgaggggtgggaataaacagcagagatgctgggggctggaatgcactccacctaaccccaaaaaggggcacaggagagcccagccaagcacagcacatgcttcgactttccaatctgctgaatgactgggaggccagctgggctcagaggacaagggacaggtctttcccccacagatcacaggggtggcccaggatgagtggaagcttctgctgcagctttgggggttacatcccagcccatgggctgacagttaagcagaaaagccacctctaggggtcagtcatgatctagtgattctgatgaggagggggccccaccagcctctgtccagagtcttgtctggaaaaactgctccctggcagaaacgggctaataatttgagaggargccatagctgaaattctcaactgtgtgagtgtgtgtccagtttgaaaaagcatatccaacttaaacatttatattgaaaaaatggaaagctattccccttgttttggaatacaaactacagaaagtaacagttaacagaatcatattggaaaggtcaa

SEQ ID NO: 245635 - DNA, 519 bp, Homo sapiens
ctccttcctttcctctctgggcaaccttccttcacacagccctagaatttgcctttgacacaacttactttcagttcattgctcagtcctttctcgctgcattgtaagtcatttcccactccttctcaacaagtcgttgccagctaacatttggctcctaaagctctcagtctggggagagcacaattttcttcttaacacacaagagyttgtcatccagttgcgggtagttttgcacaaaatgcatgctcaataaagaacaaatgaagtaattgaatgaatgaggaagtgggtcaaagagagaggaggtgggctcatattaataatgtttatatccatccaagacagacttagtttccaaatgagagggacagacaatccaggcttctgggagggatcaggaatacgaacgacaggcactaggaaagatttggaggaagctgccagtcgaatgtcaagctaaagcttttagatgcttcttataggcaatggacatctgctgaaggtttaggaatgcgc

SEQ ID NO: 245636 - DNA, 519 bp, Homo sapiens
ctccttcctttcctctctgggcaaccttccttcacacagccctagaatttgcctttgacacaacttactttcagttcattgctcagtcctttctcgctgcattgtaagtcatttcccactccttctcaacaagtcgttgccagctaacatttggctcctaaagctctcagtctggggagagcacaattttcttcttaacacacaagagtttgtcatccagttgcgggtagttttgcacaaaatgcatgctcaataaagaacaaatgaagtaattgaatgaatgaggaagtgggtcaaagagagaggaggtgggctcatattaataatgtttatatccatccaagacagacttagtttccaaatgagagggacagacaatccaggcttctgggagggatcaggaatacgaacgacaggcactaggaaagatttggaggaagctgccagtcgaatgtcaagctaaagcttttagatgcttcttataggcaatggacatcygctgaaggtttaggaatgcgc

SEQ ID NO: 245637 - DNA, 542 bp, Homo sapiens
tgaagtttgatggaagcttggcgtatggggtgatagagatagatcatgggtggcttcctaggttccactcttgaaaagtcttctttagtaggtctgaagttggacatgataatccccatttctaaaagagctcacagaggattccagtrcacacttgtgtcctagggtttgggttcatgggtaccacaagggtgatgggagaaagagagacatagaagagagtcactggtttggagggaaaatagcaagcctcctattttaaaaaaaaatttaaagaaatggcagcattttgggaattggtaggatgttcatgtgtaggtccccagcacatccatgaagaaagacaaatagctagaagtcagcaattctggaaaccagatcaggaggctgttcttgtagagctgatggactcatcagaaatagttgccaatagtttaaaataggaaaatatcataaaacattggatttctgaatttaatggaaaagttagcagatctgccctgttggagccaccttcccacgtggtgtccctaggtcaaagc

SEQ ID NO: 245638 - DNA, 542 bp, Homo sapiens
tgaagtttgatggaagcttggcgtatggggtgatagagatagatcatgggtggcttcctaggttccactcttgaaaagtcttctttagtaggtctgaagttggacatgataatccccatttctaaaagagctcacagaggattccagtgcacacttgtgtcctagggtttgggttcatgggtaccacaagggtgatgggagaaagagagacatagaagagagtcactggtttggagggaaaatagcaagcctcctattttaaaaaaaaatttaaagaaatggcagcattttgggaattggtaggatgttcatgtgtaggtccccagcacatccatgaagaaagacaaatagctagaagtcagcaattctggaaaccagatcaggaggctgttcttgtagagctgatggactcatcagaaatagttgccaatagtttaaaayaggaaaatatcataaaacattggatttctgaatttaatggaaaagttagcagatctgccctgttggagccaccttcccacgtggtgtccctaggtcaaagc

SEQ ID NO: 245639 - DNA, 507 bp, Homo sapiens
gagagcctgaggcttcaccaatctcctggcttactggcacactcagcacatcgggcatagtctaggggtacaaggggaagcctggctctcctcctcacctagcaggcctcattaggygatatgtccctggttaggcagtattgacccatggctagatgactgactctggcttcagacagatcaggttcaaattccagctctgctgacacacctatgagcccatggttgtgtaatttactccctctatgctttactttgctctcctgtaaagtgggactcatagatatgcctaccaagtatatggctaggtggagaattaaattagattgtaaatagcaagagctcagaacatataataaatgctggacactatttgttattatttaattcaccatgttgaatttagggatctagttctcaatcttttaggattagaaactcaattgtatgggccaagggagaatgaaatagactcacattaaccagcatggagtctgatgtataaac

SEQ ID NO: 245640 - DNA, 588 bp, Homo sapiens
ggctttcatctgctggcgatgtacatgtacattcccactaccacacggagggaaggaggctcgctggacccaggcatgcgcagccaatttggggcctgagcggagcaggtgactatctcagtgttggaggccttgtgaagagccaaggcgcagattgagcctggaggaagcctgaaattacctctccacaatgtcccctgccgtcaccagccagcagtgtggggactggccggggaatttttcaaccctggccagtccaaccagtctgacctcccttccagcaaggacatccctgtttctgtgtctgctgattaagacgcatttaccttgtaaagaagggaatgaaaagcatgtgagtgagccagtcgtcagggccttccataactgtagtgygtgatgccatatgttctgggttcaaatctagactctgcctgtatgagctatttaaacctaagcaatttatttcatcgttctctggcttagtttcctcgtctgtagaatggatatggtattagtatcagccggtgaggccgtcgtgaagatacagtgagttaatatgcctacaaagctcattgctccactaaaaag

SEQ ID NO: 245641 - DNA, 581 bp, Homo sapiens
cctgacttggactcaaattatgtgcatgaataataaaataccatctaattaaaaactgtagttaaatatgcaaaaattaatggtaatgagattgtgcaataccttcgagtataagtactttatgaattactcacargagttcctttgcttgacctaagcagaagataacagaagcgacttggaacactcttggtcctggtagcccatggtacccataacactcatgaccagggcagtcaatggacaacctggggtggaaggtggcttggccaaagccttcttttttgattactggagatgacaagaactggaaggattgaggtaggcattgttcaaaaggctgggtagcggtccaggctggggcagtggcttttcaccctagagtaagaagggccttcacacaaaatcatgatagctggacagagaccctcaataataagaaacagatgaaaatatctatttttggactcacttacgggtgttttcctatgagctatccagaacgttgttgccttcctagtcaccagtgcaaagttttacccatactctggattgtaccagatcattctaggagagcatcc

SEQ ID NO: 245642 - DNA, 569 bp, Homo sapiens
cttgtgcgcgggatgttttctaggctcctgcttggtttacaaatagtggaacatgatgttgtcctggtgttgtgagccttcagggtgccggcagcaagctgattctgggagtccctgcagcattacctgtcaggaaggggcttttcaaggcagctgtgagctttgggcagcggttgcccatctgccttccccacctaccaccagtggctcgagcaacgcgcctttgtcaacaagcagagggactttgtgttggagcatggctgcctgaagcgcacacccctcttccctgccaagttgagaatcccacagatcttcccatattcgagccttattagtaatggcttgatggtttgggcttcccagtgttggaaagcttgagttttaaagccataagagctatcaattaacataytattaggggtaaaccaataaagaacccattatggctaatagtgaatgtggaatcacgaggaattagcaaaatgagattcaataaaatggaaaccataaagataagcttctgaagattggatctggctttttgagctgaagtctcaaataaacaaatg

SEQ ID NO: 245643 - DNA, 573 bp, Homo sapiens
agacactgcaacaagatggtaggggagatattttgtggcataaataaataattaggtaagtatattaactgctcactcattgtcaagaccttttttttttaacttgtcatctcatctaaacttcataacagcattatgggatgccgtgtaactactgcctaagaggtctaggattgaattctgattccactataatctgtgtgatcacaggcaatgaacataacctctctgtgccttagcttccccatttgtatcacttggataataatttcacctaccttacagagttgcagtgaagaaatacatttatatggagaaatacataaaatacatttatgtggagaaatacataaaagaaatacatttatatgacacttaggacagtgtactatatataccatgtattcaattcatactggatgtttttattctcatatcayagctgagtaagctgaggctcagagagctgaaataacctgaataatattgtaccaataataagaggggaaggctggctttgaacacagatggtctgactttagaattttgttctctaactttataatcattttt

SEQ ID NO: 245644 - DNA, 590 bp, Homo sapiens
gttgccttttgatcccgttgagcacagtttgaatttgtcatttaatgtttactgccaacgtaataaagagtgttaataagagaagggacaccaaacagctgagcataaaagccaacactggccataaagctgcattgaccattaacggtgtttccctacttgggagaaacacttttcctgtacaaaagatataactatatatcttccgattttatgggctgcagattactctaattatcataaaaaattactactgctaataaaaattctattataagttacttatagtaatctctagggtactacacttagccgagaaaaggttgtaattacattatactgcaggaagagtttgtttctcaaaactcccraaacattggctgtgtcttttaacaccttcacagttttccagccccttgttctttctcccacctcctccctagtttttggtcaaaggtctccttgttgttttcattttgcaggatgtggtttgagcctagaataatgacccatcttggacgcaaatgacgcaaatgaacttttagagctacaaatatctgggtggatttctcctcccctggggcccccgg

SEQ ID NO: 245645 - DNA, 521 bp, Homo sapiens
ctatatgtgggtggaaagagagaaagtacacaatctggtgagtcttcctcatgttataagaacaccagtcttgttggtgtcccaataggactcatttatgtgtgaccccatcgttttgacctcatttaattatctccctaacggtcctatatctggtcatattggaggtgagggcttcaacatacatatcttgaggtggacacagttcagtccatgtcagcttgcctgtccctggagtgctgggcattaagcacttagttgctgatatgggsacctctggagatccgaggaagggtagggtgcccaggcagtgggcatgggcactgagaggccaacatatttaccaactggcatggaaatattttagcttctaacaacttggtaaggcttcacttgtacagaccccacaaattccagccctgtgtgggccgcatggaacagcatgtggcaagttgtgccaagccaccaggaacaagatgtcatagagccaaaaatcaactggggtggtggtgatggtgttg

SEQ ID NO: 245646 - DNA, 552 bp, Homo sapiens
tttgggcaaattctcccctatctctggctcattttttgcatatatgaaatggaatgggttggacaagatgttcttttctgtatgatagaatgatcagctttcctacctgctccatcttctctgtcaargttgactaagttaacaagttcagtagaaggccttgggatgctgaccttcagagaggtctcttggtttgtcaatgtgtgaccatgatgcccagaaacttagggctgtttggtgctggtgatggtgtgggatgtcctgtcatgaaagaggcctctggagaggggacatatatgcttgaatatctactgttttaatagaatttataatactcagaaatcgttgaaaacagaagggcatcatggagaggtgttagagtgtgaatactgagcacgttttgctaaaagttccaaaattcagtgttaccctggaagattactgaaaatcaatggtaagagtgagattccttccccacattccagctgccctcccctctttttatgttgataaataaaagaagagaaaactctaaattattatttttcagct

SEQ ID NO: 245647 - DNA, 552 bp, Homo sapiens
tttgggcaaattctcccctatctctggctcattttttgcatatatgaaatggaatgggttggacaagatgttcttttctgtatgatagaatgatcagctttcctacctgctccatcttctctgtcaaggttgactaagttaacaagttcagtaraaggccttgggatgctgaccttcagagaggtctcttggtttgtcaatgtgtgaccatgatgcccagaaacttagggctgtttggtgctggtgatggtgtgggatgtcctgtcatgaaagaggcctctggagaggggacatatatgcttgaatatctactgttttaatagaatttataatactcagaaatcgttgaaaacagaagggcatcatggagaggtgttagagtgtgaatactgagcacgttttgctaaaagttccaaaattcagtgttaccctggaagattactgaaaatcaatggtaagagtgagattccttccccacattccagctgccctcccctctttttatgttgataaataaaagaagagaaaactctaaattattatttttcagct

SEQ ID NO: 245648 - DNA, 580 bp, Homo sapiens
tgtcccccaaggaatgatgactagatattgacttatgggggctcctcaaaacaaaatatggcctctgaccaatgatcaaaatacaaagaacttcccatttgcttctcagcacctctctcttaaatataaacagccaagaatcttcagacattcgagaaattttcaccatgaaaaaaasagacactctgctccacaaaaataatgaaggcaggaaataaagacaacacaggatccaggtgatataaaaaaacctataatatctttagagttatattataatgtattatagttatgaaaaaagactataaaagtcaacaaatatataacaagaaagagttttggggaactgaaaatttaacaaaagtaaaaataaattaatagagaagttggaagataaagttgagaaatatttcaaaagatcaagttttaaaaaagaacaaaattatgactgttaggaggaaaagagcttttaaatatagaggtcaaatccatgtgttctttatcccactatcaggaagcttagaaagaatgcaaacagaaaatacagacaaagaagttatctaagaaaaactataagaaa

SEQ ID NO: 245649 - DNA, 580 bp, Homo sapiens
tgtcccccaaggaatgatgactagatattgacttatgggggctcctcaaaacaaaatatggcctctgaccaatgatcaaaatacaaagaacttcccatttgcttctcagcacctctctcttaaatataaacagccaagaatcttcagacattcgagaaattttcaccatgaaaaaaagagacactctgctccacaaaaataatgaaggcaggaaataaagacaacacaggatccaggtgatayaaaaaaacctataatatctttagagttatattataatgtattatagttatgaaaaaagactataaaagtcaacaaatatataacaagaaagagttttggggaactgaaaatttaacaaaagtaaaaataaattaatagagaagttggaagataaagttgagaaatatttcaaaagatcaagttttaaaaaagaacaaaattatgactgttaggaggaaaagagcttttaaatatagaggtcaaatccatgtgttctttatcccactatcaggaagcttagaaagaatgcaaacagaaaatacagacaaagaagttatctaagaaaaactataagaaa

SEQ ID NO: 245650 - DNA, 540 bp, Homo sapiens
ttacctaacagtacgcacatctgacttgatcctgggagcaatttcagcctttctggaaacattgatgtaatctgcttccctgaccaatcctctaaacaccatcagtgttattggtactaatgaaaaaacagctgaagtggagacagaggtgtayagttgtttcctcagtcaactccaccatgatcattgaacctccttctcctaagaggcggctgcctcccaatgggctatctcttcatttcattgctttattctttccatgcgtatttataggatgcctactgcgtgtctgcattcctctgggctttgggaatgcaagggttaacaaaactgtcccagatcctcactgggtagagcttaccgtctagtgtgtgtgtttgcacggcatctatgaaaagctaaatgctggccaggcatagcggctcatgcctgtaatcccagcactttgggaggccaagatgggaggattgcttgaggccaggagttcaagaccagcccgggcaacatggtgagacacccacctctaaaaaaatattaaaa

SEQ ID NO: 245651 - DNA, 581 bp, Homo sapiens
ttaattgctgtggtcaatttaccctgcacttaataacccacagcttggtgtattgtttaatatggttgacacacactttgcttaaatgtcagcactggccaggtctggggacttggcaggctccctgggagagatggcagaggagcagcgtcatctgcccagcatctggggcgctggtatgttggctgcaacttttcttggcttgagggctcagccactgcccagtgctgagctatgggatgggaactgccatctctgcctggatctggggcccactcagccctgatctgctttcctcttgctgcctcccgygtgggggccagtggagaaggggtgttggaaggcagcatcctcagcttggaaagtgtgttgagtccaggcacagaccgagaaccctgaagccccagagctatgtgtgggctgctcctggttgtgtgtttgtgacagagaccctaggggcagctgttgggtaaatatcacactctgcttgagggactgtaagtgacatcaatgatggcagctgtgccacaatgctctgctcaccaaccaccctgccatggttagcatcaactggcaaactg

SEQ ID NO: 245652 - DNA, 460 bp, Homo sapiens
cagaatctttgggtttgagttattttatgagctgtatggccttagtaagattcttcagctctgagactcagctccctcatctgtagaatgggaaggrtcattgtaaagatgcaaaggagatctttgcatcttcaccgtagatgctgtgccaagctctgtttagatccatagggaagtgggtcagggagacccctggtaaagtgtttcttgctgcaactctcaggcaggcagtgggaaaggcatttttgaatgagaaagaccgtggaagggctaggtttggaactgggagttctctgggctggattctgctcaggacctacaccagactgggcctcccaagtaacatgatacacatctgtttaattggacatgagtcttaatggccaaaattacctgtaacattagcttctttcacagctgtgccctctgctggggttggtgccagttccgaagccaggcc

SEQ ID NO: 245653 - DNA, 460 bp, Homo sapiens
cagaatctttgggtttgagttattttatgagctgtatggccttagtaagattcttcagctctgagactcagctccctcatctgtagaatgggaagggtcattgtaaagatgcaaaggagatctttgcatcttcacygtagatgctgtgccaagctctgtttagatccatagggaagtgggtcagggagacccctggtaaagtgtttcttgctgcaactctcaggcaggcagtgggaaaggcatttttgaatgagaaagaccgtggaagggctaggtttggaactgggagttctctgggctggattctgctcaggacctacaccagactgggcctcccaagtaacatgatacacatctgtttaattggacatgagtcttaatggccaaaattacctgtaacattagcttctttcacagctgtgccctctgctggggttggtgccagttccgaagccaggcc

SEQ ID NO: 245654 - DNA, 460 bp, Homo sapiens
cagaatctttgggtttgagttattttatgagctgtatggccttagtaagattcttcagctctgagactcagctccctcatctgtagaatgggaagggtcattgtaaagatgcaaaggagatctttgcatcttcaccgtagatgctgtgccaagctctgtttagatccatagggaagtgggtcagggagwcccctggtaaagtgtttcttgctgcaactctcaggcaggcagtgggaaaggcatttttgaatgagaaagaccgtggaagggctaggtttggaactgggagttctctgggctggattctgctcaggacctacaccagactgggcctcccaagtaacatgatacacatctgtttaattggacatgagtcttaatggccaaaattacctgtaacattagcttctttcacagctgtgccctctgctggggttggtgccagttccgaagccaggcc

SEQ ID NO: 245655 - DNA, 460 bp, Homo sapiens
cagaatctttgggtttgagttattttatgagctgtatggccttagtaagattcttcagctctgagactcagctccctcatctgtagaatgggaagggtcattgtaaagatgcaaaggagatctttgcatcttcaccgtagatgctgtgccaagctctgtttagatccatagggaagtgggtcagggagacccctggtaaagtgtttcttgctgcaactctcaggcaggcagtgggaaaggcatttttgaatgagaaagaccgtggaagggctaggtttggaactgggagttctctgggctggattctgctcaggacctacmccagactgggcctcccaagtaacatgatacacatctgtttaattggacatgagtcttaatggccaaaattacctgtaacattagcttctttcacagctgtgccctctgctggggttggtgccagttccgaagccaggcc

SEQ ID NO: 245656 - DNA, 578 bp, Homo sapiens
ctgccctcattcctattataacccccaaccacagaggtggtgaggagcaaccagggggaccactcagcatctcctagggtttatggtgactggggggacaggaggcatgagatgaattttgaggacgtcgtgaccaccattgggggtgtgtttttacctcaaatgatcttctcttcattgaatgacataagaaaataaaaatggccaaaagaaagtaagaaagaagagataaatgagacccaccagttatcagggaaatgcaaattaaaataaaaattacaattagggaatggagggtgggaggagggagagaagcaggaaaagtaactagtggatcccaggccgaaaacctggatgatgaataaactgtgcacatgtttacctatgtaacaaacctgcacatcctgcacatgtactcctgaacttaaaagttcaaaaaaaattacatacctatrttcacccataagattacaaatattttaaagtttaatcatttcgatattgtgtaatgtgggaaaatggacatttttttttccagtggaagtatgatgtgagaacatttggcagtatttacaaaa

SEQ ID NO: 245657 - DNA, 634 bp, Homo sapiens
tctgaccccacagctgccttagacatgccagatgggctggggcaagacacacccctctctatgaaatgagcaggcagtacaaatagatacactaaagaagsgctgtgggatggacccagctgtagcctggggttacaaactggcttccagggtactcaagcagctggcctctggggtagcagccctgggtgtgagaagcaggactcagaatctaagccaaccctccacaggaatcccctctggagagcccgggcactctgcaggaggggcagcaggcagcaggtgcaccagaagcatgtttcgcaaggtgcccaataatgcctctgctctgataggcagcgagttggaacatggatgcagtaggcagggtggtggctgctccccacagccaggagtccagcccagcacccacctgagtccacctgagtcctgctcaattgggtcatccgtgctctgggccctctggtcccacccacagagggagggctttggggtgaccaggtgagctggcctttgtggaaggatgtaactgactcctgagcctggtgagctaggtagcccccaatgagcatcctcacccccacctctccagcccccctcattccctgatcctcccatcccctcccctgcccca

SEQ ID NO: 245658 - DNA, 591 bp, Homo sapiens
ccggccctcatttgttttcaaagaactctactaaggtggaagggacagggaaagagattgaattgatagctggctaacaggggcccagagagatcagataatattgccattgttattactgttattactaccactgttggaaccgttaytgagtgcttcaccaggcactatgctaacaatcccatttaatcctcacaacctccataggagatggttaccattattacctctattgtgtagatgaaaaacatgcggtattaaaggttaagtgcttgcctaagatcacttagagctgggatttcaacaccccggtatatctgattctctaagcccattcttttgctgagggtaggggcacagacaagaaggaggaaattaatcttttattgactttttgaaaggatgatatgtttgcatagtccaaaacttagaaagcacaaaagggaaatatctcccccccaacactgttcctctctcctgagtattttatgaatccttacaaacatgttttatgtatattaccataatacatacacacacacacacacacatatacgtgctccctctctccacacaaataataacatactc

SEQ ID NO: 245659 - DNA, 591 bp, Homo sapiens
ccggccctcatttgttttcaaagaactctactaaggtggaagggacagggaaagagattgaattgatagctggctaacaggggcccagagagatcagataatattgccattgttattactgttattactaccactgttggaaccgttactgagtgcttcaccaggcactatgctaacaatcccatttaatcctcacaacctccataggagatggttaccattattacctctattgtgtagatgaaaaacatgcggtattaaaggttaagtgcttgcctaagatcacttagagctgggatttcaacaccccggtatatctgattctctaagcccattcttttgctgagggtaggggcacagacaagaaggaggaaattaatcttttattgactttttgaaaggatgatatgtttgcatagtccaaaacttagaaagyacaaaagggaaatatctcccccccaacactgttcctctctcctgagtattttatgaatccttacaaacatgttttatgtatattaccataatacatacacacacacacacacacatatacgtgctccctctctccacacaaataataacatactc

SEQ ID NO: 245660 - DNA, 518 bp, Homo sapiens
gctgagctcggttctgttgtttctatggggagagtcaaaggaatgcgactgagggtggctcccttgactctattccccaggccaggaagccataggcaggggccaggaatggattttaaaggcaaagttctcagacccaatgggaacatgaactggtaaactctcctcaactyccaaagaaaaaggatttgggtctttgttggtttttgcccacagccacagaactgaaagtctgaaactagattctctcaaaaagacagtaacttaaaccttcagagatagagtgtgagaaaagcccacccttctgccagcttgtgatttagaaagatgcattcactcaacaaacattgactgagcacatactggccagggactgttcttcacaggaaggatataggacggaaaaggcagacaggagcccttggccccagggtttccattctagtcagcctttaactctcagactctcagagctaacagaaacctctgatactctctaactctacctcaggaaacgc

SEQ ID NO: 245661 - DNA, 518 bp, Homo sapiens
gctgagctcggttctgttgtttctatggggagagtcaaaggaatgcgactgagggtggctcccttgactctattccccaggccaggaagccataggcaggggccaggaatggattttaaaggcaaagttctcagacccaatgggaacatgaactggtaaactctcctcaacttccaaagaaaaaggatttgggtctttgttggtttttgcccacagccacagaactgaaagtctgaaactagattctctcaaaaagacagtaacwtaaaccttcagagatagagtgtgagaaaagcccacccttctgccagcttgtgatttagaaagatgcattcactcaacaaacattgactgagcacatactggccagggactgttcttcacaggaaggatataggacggaaaaggcagacaggagcccttggccccagggtttccattctagtcagcctttaactctcagactctcagagctaacagaaacctctgatactctctaactctacctcaggaaacgc

SEQ ID NO: 245662 - DNA, 454 bp, Homo sapiens
gtggcataattttcccactgtgctatgtttgcatcactagtcatgaatgagagagtgtgtgtgttttaacgccacctttgtcaggtttgggttttcatgttctaacagtttgaaaagaaaaaagtttgaaagttctattttattctttatctgtggaaattgcaataaattatttgtgatttactgaaaatttcacttgaaggtctgatataatttcaaagcaaaaccaaacctttctttcttttttgtgggggaagggtrggaggagtgggatgggaggacactaactcattgatactttatggtttttttccccctttagaatttattttcttgggacaatctgacaacgatgaatttaatttagattcgcagattttaaaaataattcttttgatattcttggtatagtttatttgcctgttctccagctctgttgcccaggctggagtgc

SEQ ID NO: 245663 - DNA, 532 bp, Homo sapiens
cccttcaggaaatatagttatgaagctacacaggtaaagccaccgtccagatgaagcatattttctaatgagagacaatagacagtaagcaagtaaataagtggatatgtgatagaatttttggtagtaataagtgcaaaggagaaaaagcagagtgaagagactgggtatggccagaggggcttttttttttttttttgctagagtgttctaggaagtgctttttaaagagatacttcagcatagaccagaattaagtaaatgaaggagccaagggaaaatctaggagaagagtaagcaacgtcagaaggccagaatagaggagagtgagcagcacaagaggaaatgagcatcaaagtgcatagacaccggatccctrcaagcatttgcattttgttccaagtggtatagaaattttgccattacatctgagctctacattaaatgatcacattagctgctgtatgaataggctgcagggaggcaagaacagaagtaaataaaaaccaattaagaaactattctaattatt

SEQ ID NO: 245664 - DNA, 486 bp, Homo sapiens
ttacatttattttctctttaatgttttcttagtgtcagaacccattaatgataatctagtaaaatgtaaataagaggagaaaaaaagcagtcaagaaagyggcattttttaaactgcttctcttatgacttcccttgagctaagaaaaggtcaaaatgctaaaattcactttatggaactgataataatagcataactgcttatttactaagacacacttgtctaataattgtatagaaatcagtgtttttcagtcttaccaattatcaaaataacagctagatgattaaaggaattttatattaagcactcatgcattggatctttgttgatagccttttaaaatgtaaagctttacaattaggagtaacaccactaccatccataagtattattgttgaatgcattttggaaatatatgtaattctgtgtgaaacaggtaaacgtgaaaaggtaattataaaaatattattggcatatggcatg

SEQ ID NO: 245665 - DNA, 230 bp, Homo sapiens
cgtgccacctgtccacactccttggctctgccatcatgctgaagatcgctttaaaggactggcttccctccccccaaaatgaaaagagcacaractgagaaactgaatgtgggagacagcagtggattatgctgttctcagggctcacctcaggtttggaagcattctttcaaattaacccatctcaggccatctgcagagaggaaaggtggtacctaactttttttctt

SEQ ID NO: 245666 - DNA, 489 bp, Homo sapiens
ggcaaacgcccagctgtaaccaattgagctatttctgttctccctttttccgtataaatactgctgtccaccttgctgggtggacttctctgaacttctggttctgaatgaaatccaaytcaagaattactttttactaaaattaattctgctacatttaatttgtctaaattttttcctgtaacacataaaataaaccaaagaaaataccataaaccaaactatagaacaagaaaggggagaaggaggaggagggaaggaaagaagagggagagaaaaaaaggcagtagcagtgacaaccttaaaaacagaaagcacagcataaaataggccgatctaagacacacctattttctcagtagtgtaactaggatagcaatatttcaagtaagctttaaattgaaattacacacatccattgtaaaatttagtccttgatttctttactaaaaatctgtatatttaaattaacagatgtggaatggccat

SEQ ID NO: 245667 - DNA, 552 bp, Homo sapiens
gaggaacatgaaagaaaactcaaatgaatggaaatacaaccctgttcttggaaggagaattgtgcattgtaaagatgtcacttcactctaagtcaacctataaattgtatataatctcaataatgtatcaatagaatatttcttgaatgagtaaagctcattctagagaactataaagctacagtaattaaaataatttggtccaggtgcataaaacagaaaagaatagcgagcctagaaatgaatctaaagacatatgaaaatgtattatgtgacaaaggcagcagttcaaacattggaaaaaagatggattcttttcagtaaaaggtagtatgacaaccaccttgtcatgtgaggaaaaaaatccagatgcctaattcaattcttaccctaaaataaatgttgaatagatgaaacattaaaccaatcamacatttaaacatcaaaaataaagttaaaacactagcaaaaaaaatcaggtaatttatttctttaattttggaataaaaaagaccactctaagcatgatagaaagcccaaaacccacaaaaa

SEQ ID NO: 245668 - DNA, 602 bp, Homo sapiens
atatgcaagaggagccattactacctatcttagagaaataaaaaggagtataatagtattaagagcaattttacaacaccaatctggataacataaatgaaatggacaaattcctggaacacacaacctacaaagactaaatcatgaagaaatagaaaatctggatacrtccataattagtaaggaaattgaatcattagtcaaaaacctcccaataaaggaaagcctagtacccagaaggtgtcttcactggtgaattctaccaaacatttaaaaaagaattaacgctaatcctgctcaaactcttccaaaaatatgagacggaggaacactctaactcaatctatgatgacagcattatcctgatatcaaaccagactctacaagaaaactataaaacactatcccttataaatattgattcagaagtcttcaataaaatactagaaagccaaattcaagagcatattaaaaagattaaacaccatgaccaaatggttaggcaaggatgtttcatcatatgaaaatcaatcagtataatacaccacattgagagaatgaagagaaacaaacatataattatctcaattgatgtagaaata

SEQ ID NO: 245669 - DNA, 533 bp, Homo sapiens
tagacactgtaggggctttatgtgctatctctaattcctacaactctttcaggaaggttttatttgcccatttcacaaatgaggaaactaaagtggrgaattaaaataacttgcccagtcatacagctactaaggggaggagccaggatttgaacccatatctgactccaaatcctgcattctttcccctacaccttcagcactgaagataaattccttctgtattatggttttgctgagaaagaaaatcccagttgggacaccaatcctgatcacctggacttcgtcccaaaaagtatgtctgaaatggacctcaatgaggagaaaatagtaagctcaccaatcctgtatcctttgtatctttaagggtgacactaccctatcctgttgtttattgttttattgttttttggttactatctcagctggcagagctggacaaagggagcagttttcacttggccttccccatacaatagctcctaccccacagtttaaggactcacctactgagcatatcagtcctaattata

SEQ ID NO: 245670 - DNA, 533 bp, Homo sapiens
tagacactgtaggggctttatgtgctatctctaattcctacaactctttcaggaaggttttatttgcccatttcacaaatgaggaaactaaagtggagaattaaaataacttgcccagtcatacagctactaaggggaggagccaggatttgaacccatatctgactccaaatcctgcattctttcccctacaccttcagcactgaagataaattccttctgtattatggttttgctgagaaagaaaatcccagttgggacaccaatcctgatcacctggacttcgtcccaaaaagtatgtctgaaatggrcctcaatgaggagaaaatagtaagctcaccaatcctgtatcctttgtatctttaagggtgacactaccctatcctgttgtttattgttttattgttttttggttactatctcagctggcagagctggacaaagggagcagttttcacttggccttccccatacaatagctcctaccccacagtttaaggactcacctactgagcatatcagtcctaattata

SEQ ID NO: 245671 - DNA, 569 bp, Homo sapiens
ctatttccaccatcttgcacataaatcctggcatttccacctcacytaccatgggtcatcactttttccatgtctctaaaaatcatcctagtagcagttccacaccatctcctgggtaacctcatcatcttctgttgccttctcaacaattccattgtctgtataatcattttttgcattaaattctctcattttaaatacttagaagtgtttctgctttcctggttagacctaagtgattctccactcaatatctccagatggaaactccctgcgggaaggaaccatctgttctccatctttgaggcatttaactaagtacccgacatttagtaagtgcttagaagaagtttgattaatttactggcccgtattaacatggaggataatttctctagctacaaatgtctgccacttgtgtagtgaaaggtaacttctttaacataaagatggtaaagcactaccccttgaaaaaaaaattagaaatatccctgttttcagtagaaaggagcattttagactacttttaaagataataaactggcaaatgctccttccattacagtttt

SEQ ID NO: 245672 - DNA, 591 bp, Homo sapiens
tttctcagaatgtatccccatcattaagcaacatgggactgtataagcatgtgtgtgtttagtattackgttctttgttttccatattttctgcattgattagtattacttttataaacaacttttttaaaactaatttaaaaattgaggctgggtacagtagctcaggcctataatccccaaagaaaaaaagaaaaaggagaaggagaaggaaaaagagctggaatggtgatgcagtttcatggaactgtgtgggctccagctgttttgccctctagaagggggctttgagaggcctaggcaggaggatcacttgaagccaggagttcaaaaacagcctgagcaacacagtgagaccacaactccacacacacacacgcacacacacacacacacacacacacacacacaaattttaattggccagatttagtggcatgcacccatagttcttgctactcaggaggctgaggtgggaggatttcttgagccctcttttgaggtttcaatgagctatcattgtacaactgcactccaacttgagcgacagagggagaccctatctctaaataaaatacaataacaataaaa

SEQ ID NO: 245673 - DNA, 591 bp, Homo sapiens
tttctcagaatgtatccccatcattaagcaacatgggactgtataagcatgtgtgtgtttagtattactgttctttgttttccatattttctgcattgattagtattacttttataaacaacttttttaaaactaatttaaaaattgaggctgggtacagtagctcaggcctataatccccaaagaaaaaaagaaaaaggagaaggagaaggaaaaagagctggaatggtgatgcagtttcatggaactgtgtgggctccagctgttttgccctctagaagggggctttgagaggcctaggcaggaggatcacttgaagccaggagttcaaaaacagcctgagcaacacagtgagaccacaactccacacacacacacgcacacacacacacacacacacacacacacacaaattttaattggccagwtttagtggcatgcacccatagttcttgctactcaggaggctgaggtgggaggatttcttgagccctcttttgaggtttcaatgagctatcattgtacaactgcactccaacttgagcgacagagggagaccctatctctaaataaaatacaataacaataaaa

SEQ ID NO: 245674 - DNA, 591 bp, Homo sapiens
tttctcagaatgtatccccatcattaagcaacatgggactgtataagcatgtgtgtgtttagtattactgttctttgttttccatattttctgcattgattagtattacttttataaacaacttttttaaaactaatttaaaaattgaggctgggtacagtagctcaggcctataatccccaaagaaaaaaagaaaaaggagaaggagaaggaaaaagagctggaatggtgatgcagtttcatggaactgtgtgggctccagctgttttgccctctagaagggggctttgagaggcctaggcaggaggatcacttgaagccaggagttcaaaaacagcctgagcaacacagtgagaccacaactccacacacacacacgcacacacacacacacacacacacacacacacaaattttaattggccagatttagtggcatgcacccatagttcttgctactcaggaggctgaggtgggaggatttcttgagccctcttttgaggtttcaatgagctatcattgtacractgcactccaacttgagcgacagagggagaccctatctctaaataaaatacaataacaataaaa

SEQ ID NO: 245675 - DNA, 550 bp, Homo sapiens
tattgcacttctaaatgaaaaatcttcgaaagagcacttcgtatgctctggaattttaaactttttggaataataacaatatcttgggagtattaagacttccaagtaactactttggaaggtaaaatttatattgatctgtaaatactggtttgagtatagaaaatgggtctcattattttaaacatatttgcaatgttttgagtgcagagtgcagcagcaaaacccatttcttgcacttgaaaccagcccttcctcactccacagaaagtgcctctatcacaaggtgcctgcttgaagccagcacagaagtgttagtgagcatcaccaggaacagcaactgttgccactggggggccccaagccatggacagagtcattcttgttcacagagattctgatagcaggaaagagcgttcttcagtcaatgacttgagtaatagatgaataaatgtataaatgaacaagtgaatttcaagaaaatcaaaagtgattgaaggatgccagacaggtctcctaacccaawgaactcccctaatctcctaaaaaa

SEQ ID NO: 245676 - DNA, 597 bp, Homo sapiens
cttcggctgttgacagacataaaattagggacaaacacaagagattagctcaacatactggcaaaagtttctgtaacaacttgggaatcattctttatttcattcatggtggaaaccccactgttaagtatatagatattgatgaggtaagccagtgagttacagagccacaaggaaatgatgtcgccttggagctgaggcacaagacccatgagaaatcctaggatgccctctccctgatagatggttgctatggagtcacaaagtctgcagtacttgggttccctgccaatgaattgtacctcggtgataatatggaagggatttgtgatgaggacagcagmaaaatgagtgattatctctcaaattgccttattgataacttggtcaaaggaagatgagacttctttctgtacattaccaggtcctaactcctcaatcttgtcacattcctgataatgctgtaaaactttactgtgaatcatattttcaaggactcctgaacacagccttggagttcatgcttaccatgtgctaaggcctcccattgatggtcataatgtgctaagcacaactaaagacaccaggaagctgaca

SEQ ID NO: 245677 - DNA, 588 bp, Homo sapiens
agcacaactaaagacaccaggaagctgacataccacccaaaaacatgttgtctcattgttggaaaaccaggctcatctcccacttggatgagtgctttcacatatataagcractgagactggatggtgagatcagagcccggaagcacctgactggctacatctgccataatgtcaccttaaaatgggtctctttgatttttaacagtttgactatataatgaatcttggtgaagtcttctttggactgaacctgtttggaaatctttcagcttcatgtatctgaatgtctatatctctccccagatatggggagttttcagccattatttattcattgttattgttgttgttttgagacagggtcagggtcttgctctgttgcccaggctggagtgcagcggtgtgatcatggctcactgcagcctgaacctcccaggctcaattggtcctcccaacctcagcctcctgagtagctgggactacagacatgcaccaacatgcctgaccaatttattatttttatttttttagagatgagatcttgctatgttgcccaggctggtctcaaattcctgggctcaagca

SEQ ID NO: 245678 - DNA, 588 bp, Homo sapiens
agcacaactaaagacaccaggaagctgacataccacccaaaaacatgttgtctcattgttggaaaaccaggctcatctcccacttggatgagtgctttcacatatataagcaactgagactggatggtgagatcagagcccggaagcacctgactggctacatctgccataatgtcaccttaaaatgggtctctttgatttttaacagtttgactatataatgaatcttggtgaagtcttctttggactgaacctgtttggaaatctttcagcttcatgtatctgaatgtctatatctctccccagatatggggagttttcagccattatttattcattgttattgttgttgttttgagacagggtcagggtcttgctctgttgcccaggctggagtgcagcggtgtgatcatggctcactgcagcctgaacctcccaggctcaattggtcctcccaacctcagcctcctgagtagctgggactacagacatgcaccaacatgcctgaccaatttattatttttrtttttttagagatgagatcttgctatgttgcccaggctggtctcaaattcctgggctcaagca

SEQ ID NO: 245679 - DNA, 635 bp, Homo sapiens
acaggggccaaacatggaactttttaggcccaggtggtgcagacagccccagctggctgagaactgaaggtcaacgaggccctgggtctggccgagtgtgccaaatcctgaatccctgaagcttaaaaatgtaatcagagttccttctaccagctcaaggacccatggatcttctagcattccttaaaaagaaaagtgcagaaaaagcccaacataaaactggagcgatcagtttaattaaggatgtgtaaaaaaataatcatgatcaaaaaatgctttccgtttcttggggaatgttttggaaatatatatgggtgatattcttgcttgaaagatggaaacgatactatagcctgcagccatcaaggatttgcagaactggggctgctgctctctgcctggccccgagaagggtgtgatgaacacaatctgaaatcaatatcagggaacagttacygcatctcaatattatttgccgagatgggctgctggaagaagagtggggaagagagatatatgtcaatagccttaacgaagcactccacagccatgcacaaagggaggtcaaataactatcagccgaccaatccccattgtaagtagtaaaaatgataaaatcaatattattaaataaa

SEQ ID NO: 245680 - DNA, 618 bp, Homo sapiens
  misc_feature (1)...(618): n = A,T,C or G
gagtattttagtgaggttaatttctaaaaataaattgctattcaatgrctatacagttggcctttgcaccacaggggtttgaactgtgcacgtccacttagcaaaaccaacaattctacatccttatccacaccctgcccatgaaaaggatgaggatgaagacctgtttgatcatctacttccatttaataactagtaaatctattttccttatgattttcttttttcttttgtctggcatgtttgttaagaatacagtatataagacatataacatattaaatatgtgttaattgactgtgttatttgtaaggcttacagtaggttattagtagttaagttttgggggagtcaaagttatagtggattttctactgtgcagggggccagcaccccaacctncgtgttgcttaagggtcaactgtacatgttatttcctttcctgtaagagaaaaatgagaaggtcttttctccaataagtgtcttcaaaatgtagcagatttgaaatgtgttggcgccaccattttgcgtctcattttgaaaacttattatttaaaatcgtactaaagcctaccttacttttccaaccttagaaaaaatgttccaaagaaaaggggt

SEQ ID NO: 245681 - DNA, 618 bp, Homo sapiens
  misc_feature (1)...(618): n = A,T,C or G
gagtattttagtgaggttaatttctaaaaataaattgctattcaatggctatacagttggcctttgcaccacaggggtttgaactgtgcacgtccacttagcaaaaccaacaattctacatccttatccacaccctgcccatgaaaaggatgaggatgaagacctgtttgatcatctacttccatttaataactagtaaatctattttccttatgattttcttttttcttttgtctggcatgtttgttaagaatacagtatataagacatataacatattaaatatgtgttaattgactgtgttatttgtaaggcttacagtaggttattagtagttaagttttgggggagtcaaagttatagtggattttctactgtgcagggggccagcaccccaacctncgtgttgcttaagggtcaactgtacatgttatttcctttcctgtaagagaaaaatgagaaggtcttttctccaataagtgtcttcaaaatgtagcagatttgaaatgtgttggcgccaccattttgcgtctcaytttgaaaacttattatttaaaatcgtactaaagcctaccttacttttccaaccttagaaaaaatgttccaaagaaaaggggt

SEQ ID NO: 245682 - DNA, 618 bp, Homo sapiens
  misc_feature (1)...(618): n = A,T,C or G
gagtattttagtgaggttaatttctaaaaataaattgctattcaatggctatacagttggcctttgcaccacaggggtttgaactgtgcacgtccacttagcaaaaccaacaattctacatccttatccacaccctgcccatgaaaaggatgaggatgaagacctgtttgatcatctacttccatttaataactagtaaatctattttccttatgattttcttttttcttttgtctggcatgtttgttaagaatacagtatataagacatataacatattaaatatgtgttaattgactgtgttatttgtaaggcttacagtaggttattagtagttaagttttgggggagtcaaagttatagtggattttctactgtgcagggggccagcaccccaacctncgtgttgcttaagggtcaactgtacatgttatttcctttcctgtaagagaaaaatgagaaggtcttttctccaataagtgtcttcaaaatgtagcagatttgaaatgtgttggcgccaccattttgcgtctcattttgaaaacttattatttaaaatcgtactaaagcctacctwacttttccaaccttagaaaaaatgttccaaagaaaaggggt

SEQ ID NO: 245683 - DNA, 591 bp, Homo sapiens
attagctcatcccctggttctaacagttagtgcctatgtggtcatgaacaaatttttaacctctctaagcctcagttttctaatctgtaaaatgggggtaaaaccttccacacagagttgtcattataacgatgaaaggaagccatgtctgtatttaggatggtgccttcagcacacggtagagatcaagaactctaactctcaaactgctctttcctatgaagcctaacttcacattcagattagcactttaaatggtctaattttctattccattgctcccatgacatccatttttccctggacaatactrtagcccattggaatctctcgtctattgttctttgacttatttggaagcagagataaacccatccttccttctttataatgtcatgcagtgatacatcattattccagccctccaaatatgccatttgcagaggcagaattattgactaggaagaaattttgtttcatgaggtaagaggagtgaatgtgtgtatgtgtgtatactttgttttagaattcatttctaaaaatctatatgaaaaaaatctattaggtctatccagagagaaaatgtacagc

SEQ ID NO: 245684 - DNA, 575 bp, Homo sapiens
tagttgttttcaaatattgaaaggttgttgtgaagaagtcaaattgaatgtatccatgtggtcttaaggagtgcatagggggctgttagatggaagtcactaaatgtaatgaatgttcttatgttcttgtgtatattcagattattctgtgttcaaagggggcattttggtggctagttgggtttttggctctatagttgtccagcagaggctggcttgaggatggacttcttatacttggacagtgggtcagattaatgactactaagagtctgtaattttacccatcaaattgcatcatccaaataggcaggtatactcattgctgtyggaggcttttgcaagaatctgagacagacagactaggagtgagggtaggggtaccactgcccatgagactacaggaaggcctggtgagagaaggagtgagatgagagaagaaatgggagagctgaggtcagaggtcaagggaagcgaattgagtgtcaaccataggtggtagataaatagaagcatggtgcattggtagaggttggaatgaagcaggaagttagagtgcagtgggcaagaaggca

SEQ ID NO: 245685 - DNA, 555 bp, Homo sapiens
ggaaatgtctttattttgtttccattcttgagtgacagtttaactgggaatacaattctacttaaaattatcttctctcaatgctatgaaaacatatsatcagacctccattccagagcctctccacgggtgctgcggtgcatacctctctcctcattgcagtgcactgtggactggtcactggtatgcagaagaattgatggcctggttgtcagggtgtcagggcagggcttgggctgtggcccttcctggtgagcagccttatctgcctaccctcgtgtgttgtacaggcatcataactttcaacgtatgctgtgacataaaaatactcagacaaacatagagtcaaatgatgagtgaactcccattcacaattgctacaaagagaataaaatacctaggaatacaacttacaagggatatgaaggacctcttcaaggagaactacaaaccactgctcaaggaaatacgagaggacacaaacaaatggaaaaacattccatactcatggataggaagaatcaatatcatgaaaatggccaaactgcccaaagt

SEQ ID NO: 245686 - DNA, 555 bp, Homo sapiens
ggaaatgtctttattttgtttccattcttgagtgacagtttaactgggaatacaattctacttaaaattatcttctctcaatgctatgaaaacatatgatcagacctccattccagagcctctccacgggtrctgcggtgcatacctctctcctcattgcagtgcactgtggactggtcactggtatgcagaagaattgatggcctggttgtcagggtgtcagggcagggcttgggctgtggcccttcctggtgagcagccttatctgcctaccctcgtgtgttgtacaggcatcataactttcaacgtatgctgtgacataaaaatactcagacaaacatagagtcaaatgatgagtgaactcccattcacaattgctacaaagagaataaaatacctaggaatacaacttacaagggatatgaaggacctcttcaaggagaactacaaaccactgctcaaggaaatacgagaggacacaaacaaatggaaaaacattccatactcatggataggaagaatcaatatcatgaaaatggccaaactgcccaaagt

SEQ ID NO: 245687 - DNA, 594 bp, Homo sapiens
gtttgaaaccagtctgagcagcacagggagaccctgtctctacaacaaatttaaaaattagccaggtgtggtggcatgtgcctgtaagtcccagttactcaggaggctgaggtggaaggatggcttgagcctgggaggtcaaggctgcaaggagccgtaatcacaccattgcactccagcgtgggtgacagtgggaccctgtctcaaaataatccaaaaaagaatcttatattttatggtgtcacagacccctttgagaatctgatgaaagctatggatcctctttccagaaaaaaaagcagctaatgcaagcacactaacatttacacatgaatttamaaaaatcacagacccctgaaactaacttgtttattttcatggatcccaggcccaaggacccctggtctggaagctcttacttttctcaacttcttactctgaattccacatatgtgaaatttctgtgaaatgaagttttcctctttaattttagccccttagattgagatattgcgtgaaaaccttggggacacctgtttttttattatcatcatgatacaagctcttccccttgagcaaggtcattggagtgaa

SEQ ID NO: 245688 - DNA, 561 bp, Homo sapiens
ggactccccgatttccccacacccagaggtcatcttgaaaaggaaggggtagggagatctggaagatcaagcattgatgcacaagcagcctggccacccccaaaagcagactccaacccacagaaacagaggtattactaactggtgagtttgaagtgtaactgccctgcacatcatgcacaggaagaacrgaaaattcctaataaggaagcaacctcttatgaaactgagcaagcaagctggcagcgtgtgcagcccagtacacgtggcaacaatgataaggatggagcggtccggagtgggggtgacccagcccttgcctgccagtgggatctcttagtcaggcttgtgagtgacctcaggctgaagggctaagggccatggcagaagcctgacaggagaggcagggagcacagagccaagagaggctagtttagggagtagggacggcttcccaagggggttggtgcagttagtgggaccagggaacacgctcaccttttatagggagtgaggctctcctgggtcatgaaactgagctacagaagcctggcgcctttc

SEQ ID NO: 245689 - DNA, 579 bp, Homo sapiens
aattttctcattcatattagtattgtgcaatataatttaaaatgcaattatgaggtttaaatgcaaatataagggcacttaactcttatatggaatcaccaaagccacacaattcctatttcctatttcatacattcatatatgtttattctctccaaaagagtgaaaacgctgcacaaaaacaaaaccctcattctttttgtttcacttcttcatgtgcacacctkctaccaatacactctgcctttggcttactgatgaggaaggaaggacagaaaggaaagataggaaatggcctgtctttccctttccttctatgccatcattttcagtacatggttggcgactacagggagctaacaaaaataagagaggccatggcaggattccttggtcattcatgtttttcaggataccactgcctcctttctgcatgtgaagaaagctctggctggaacagaaagcacagccttcaggactcctcaggccccccactcactcaattgtacacataacacactgaccttgaactccctttgagtcctgctgaactccaatgcatatgggccaaccaggatt

SEQ ID NO: 245690 - DNA, 579 bp, Homo sapiens
aattttctcattcatattagtattgtgcaatataatttaaaatgcaattatgaggtttaaatgcaaatataagggcacttaactcttatatggaatcaccaaagccacacaattcctatttcctatttcatacattcatatatgtttattctctccaaaagagtgaaaacgctgcacaaaaacaaaaccctcattctttttgtttcacttcttcatgtgcacacctgctaccaatacactctgcctttggcttactgatgaggaaggaaggacagaaaggaaagataggaaatggcctgtctttccctttccttctatgccatcattttcagtacatggttggcgactacagggagctaacaaaaataagagaggccatggcaggattccttggtcattcatgtttttcargataccactgcctcctttctgcatgtgaagaaagctctggctggaacagaaagcacagccttcaggactcctcaggccccccactcactcaattgtacacataacacactgaccttgaactccctttgagtcctgctgaactccaatgcatatgggccaaccaggatt

SEQ ID NO: 245691 - DNA, 597 bp, Homo sapiens
ttgtttacagcatttccctggagagcttgtaggcatctacattctaatttcaccttagcaacttcactgtgtctttttattacatcaatagtctgttcatttcagactttgtcttttggtatcaagttggttaatatatgattttgaaaatgtaaatatgcatacctgcaacaaagtgcatcagagttgaaagaagaaagaagcaggttgtgtttgcctaaaagctgcaaaaccaggcaatataccaagcattgaatctcacttggttcctgcgcaaatcagactcatttcctgcacacccaaatgacgtacagtatgagaatttgctggtgcagtgcttgcttcctcacagatactcaaatgctggttttctttcttccttcacactccctcacagagttcactgtcaagtaagggagacaggcataattaaatatgtaygcaagaaaaggaaggggactttagagataatgggacttcatttgtggaggaagagagacacgagaaagcaaatagccttgaggaagaatggatagaaacaagttcacactacaatatttgccaggatcttagtaataactacatttagattttggt

SEQ ID NO: 245692 - DNA, 597 bp, Homo sapiens
ttgtttacagcatttccctggagagcttgtaggcatctacattctaatttcaccttagcaacttcactgtgtctttttattacatcaatagtctgttcatttcagactttgtcttttggtatcaagttggttaatatatgattttgaaaatgtaaatatgcatacctgcaacaaagtgcatcagagttgaaagaagaaagaagcaggttgtgtttgcctaaaagctgcaaaaccaggcaatataccaagcattgaatctcacttggttcctgcgcaaatcagactcatttcctgcacacccaaatgacgtacagtatgagaatttgctggtgcagtgcttgcttcctcacagatactcaaatgctggttttctttcttccttcacactccctcacagagttcactgtcaagtaagggagacaggcataattaaatatgtatgcaagaaaaggaaggggactttagagataatgggacttcatttgtggaggaagagagacacgagaaagcaaatagccttgaggaagaatggatagaaacaagttcacactasaatatttgccaggatcttagtaataactacatttagattttggt

SEQ ID NO: 245693 - DNA, 576 bp, Homo sapiens
tcattgctgcttctcctttgctctctcctgcttctgaaacttctctttcatgtgaaacacacacatatataattctctggatctacttttcatctttttttttttttttgagacaggtctygctctgtcacctaggctgtagtgcagtggcataatcttggctcactgcaaccaccgcttcccaggctcaagtgatcctcccacctcggcctcccaagtagctgggactacaggcatgtgccaccacacccggctaatttttttttttctgtggaaatgggctttggccatgttgcccagtctggtctcaaactcctggactcaagcaatccaccagcttcggcctcccagagtgctgggattacaggcgtgagtctttgcgcccggccgttacttttcatctttttaaatgtattcacatgtatttctttctttagccttttctgtctgagttttggtagacataatatcatcttcttatcaactcacataagtgtctgctgaatgttgctttcattgcatgtctaaaaagaaaaaaattgacttactttgaaaaatataaataacagattaatt

SEQ ID NO: 245694 - DNA, 534 bp, Homo sapiens
tgctaaaactattgattagctatgagtcataatcttacttaacagcatttgacaggtgatttctctttcttgtccttaacatggtttctttatttggtttctgtttccattgttaagcctctttggcctttctgctggttcctcctcttytttccaacaacttaacactgattaccccatagctaagtctttggttgtgttctcttctccatctagtaggatctcatagtcttcatggctttaaatctatatgctgatgcttccacatttgtatctccaacctcagcctttctctatacaataggtgtatatttccgtctaattatttgttatttctacttggatgtctgatggactgctcaaacctagcatattcacaactaaactcattatcttgccttgctccaacctattcctttcacatttttaataatctcaattgatgacaactctcttctgcttgtgttgcccacaaattttggagccatctttgactactgtcttctctcatacttctcattcagtgtatcagaa

SEQ ID NO: 245695 - DNA, 534 bp, Homo sapiens
tgctaaaactattgattagctatgagtcataatcttacttaacagcatttgacaggtgatttctctttcttgtccttaacatggtttctttatttggtttctgtttccattgttaagcctctttggcctttctgctggttcctcctcttctttccaacaacttaacactgattaccccatagctaagtctttggttgtgttctcttctccatctagtaggatctcatagtcttcatggctttaaatctatatgctgatgcttccacatttgtatctccaacctcagcctttctctayacaataggtgtatatttccgtctaattatttgttatttctacttggatgtctgatggactgctcaaacctagcatattcacaactaaactcattatcttgccttgctccaacctattcctttcacatttttaataatctcaattgatgacaactctcttctgcttgtgttgcccacaaattttggagccatctttgactactgtcttctctcatacttctcattcagtgtatcagaa

SEQ ID NO: 245696 - DNA, 539 bp, Homo sapiens
aaaacacctaaaggacctagttctgtagaagacattaaagcaaaaatgcaagcaagtatacaaaaagcatattgaacagtccaggggactactagtaaattaagcccaaaggtggggagagagaaaaaggagagacaaatatagtccacactgagtgtcatcaacaatccagactaaagttttctattttaatctcaattccctattctgatttgccacccatgcctcttcaggctggaaaccatgtcactcttggttccccaaagcacttttcttctgactgctgtgattcaatgaaccttgccctttgctttctattacttgtgcatttgcctcacctctgaccatgttttaaatcacgtttgtatctccttagctgctcaataaatatttgaatgaaaaaawttaacttgaaattgaataaagacttaatataaaagctaaaactataaaactcttagaaggaaatgtagatgtaattctttgtgatcttggataggtaactttttaaaatataacatcaaaagcacaaaaaaaca

SEQ ID NO: 245697 - DNA, 515 bp, Homo sapiens
ggagttttatgatctgtttaatacatttgaaagaacatttggctgctatgtagggaagaaaagttctgttcccctacacattattataagaaatggttagacaaaaatatttaactggctgctgtgtcaccaagaaggcgtatgaggatgtttgtgctgtagttggaaatatataggtgagaaattacaacttttcctattgagtcttaataacatctttttcaaccatgctgctttttcctctttcctcttactttcttccccagtgtgtggctttcaacmattatctttatatgtgtaattcacttcactcaccttttaaatttcttgttccacataatactccttaccatagcatcgttaactgccccagtattatatagacataatgctagatttttatacacctggaaagagataaaaagtagtttagaatttctcttttttaaaaaaaatgtccaaattgcatcctatgagtgactaagcagcattattaagagcctttataaaacagc

SEQ ID NO: 245698 - DNA, 454 bp, Homo sapiens
tacccaatttttagataattttactcattctttaagaagctcctcaggcattatatcttccaagaattcttctctgacctcccaattcccacagtttctagatcgtcttttttccaraacttaccttactgttgtattgaaacagcctttgatgagtttgccctttcactagactgtgagctccatgaggggagctcatgtcttagtgattttggttcactgtgatgaacacattatagatttgttgaacttacaagcttcattgtggaatcaaactcttttttaacaaactttatcccaactaatgactcctggggatcctttaggcatgtctgacccaagactctatttttgtgctccagacttacgtggtcttataagaatgtataatggacctatgatggaatcaccgatgacaaaatgggacatccccgattctgtcttacttacactg

SEQ ID NO: 245699 - DNA, 554 bp, Homo sapiens
ttccagttaactctttcaatttgcatgagcacagactcattacmtctgccaatcacattgttgtcaggcaggatcactgcttaccagcttcataaaaacatatgaccagccaggcgcagtgccttatgcctgtaatcccatgcctgtaatcgggaggccgaggagggcagatcacttgagggcaggagtttgagaccagcctgaccaacaaggtaaaaccccatttctactaaaaatacaaaaattagctgggcgtggtggtgtgtgcctgaaatcccagctacttgggaggctgaggcacaagaatagcttgaacttgggaggcagaggttgcagtgaaccaagatcatgccactgcactccagcttagacaacagagcaagactctgtcaaaaaaaaaaaaaattaccaatcttgtaagaagcagtctaaatcttgaattatctgactttattttgcaaggatcaaataggtgattattgagatagttgagaaaaatctacattatattatcagtttattcattatgagctggactttccatatctagaaaa

SEQ ID NO: 245700 - DNA, 617 bp, Homo sapiens
acattcaggtagatttattctgatgtcctttagctgtggcttcgagacctcctactttgaaatttctttgtcattatattcaggattcagaacaaacctttgggcacattttttcctcctttgtaaattatgaaagctctcttaatatacagatttctagagtagagaaagcaaggatgaaactacaaaaaagtctagtgttttctaaagccagaaaaacaactaatttatatcttattaaaacacatacactctctccctctctctcggacacacacacacatacacactcactctctctctctctctctctctctctctctctctctctctctcyccctctctctctctctccccatgatgttactgcggagttttcaacctcagtcttactgagagtttggccagatcatcctgtcgtggggctgtcctgtgcattgcaagatctttaacagcatccctggcctctaaccactaaatgccagtagcatcccctgcaaggttgtgacaatcaaaaatatctccagatactgccaaatgtcccctggggagcacagttacccctcattgggtgccacaggcattccaaatagaggaaacagcatgggtgaatgcag

SEQ ID NO: 245701 - DNA, 460 bp, Homo sapiens
gcttgtagaataagaatttgtggtgttgactttagccctgccaaggaggtgttaacctaagtggccactgaagtttctgctccagcatctggagtcgggcttgacactgttcctcargcccaaacagcagacaggggtggcaaataaaacccactgtaccacacatggtggctgggagatcccacaccggtagaagccacgctggaaggagcatgaggaaatcagtctgtcttctgttttatatgctgttctgctctaagggatactgttactttaatttttcttgctgtaaattagtacagagttgaaggagactgaagttattaggaatcaccttttctctaccacctattgtcaattcccacagggtgttagtactcagtaagtccttgataagtgattatttgatgaattaacaatcaccaccatcatcatccacagataacaataatagcaataa

SEQ ID NO: 245702 - DNA, 460 bp, Homo sapiens
gcttgtagaataagaatttgtggtgttgactttagccctgccaaggaggtgttaacctaagtggccactgaagtttctgctccagcatctggagtcgggcttgacactgttcctcaggcccaaacagcagacaggggtggcaaataaaacccactgtaccacacatggtggctgggagatcccacaccggtagaagccacgctggaaggagcatgargaaatcagtctgtcttctgttttatatgctgttctgctctaagggatactgttactttaatttttcttgctgtaaattagtacagagttgaaggagactgaagttattaggaatcaccttttctctaccacctattgtcaattcccacagggtgttagtactcagtaagtccttgataagtgattatttgatgaattaacaatcaccaccatcatcatccacagataacaataatagcaataa

SEQ ID NO: 245703 - DNA, 454 bp, Homo sapiens
tgtccctcaggtagtgtttgggcttgtcgtcttcttatgaaatactcgcatccacagatgtttctgccctgactctctcagtttgcctgaggtcctcaaactagcctcttcttgtatggtgttacaacaactggacctccaatggggtgattagtcctttaccttggcrtcactcagcaatttgcctaatagtcgcatcccttttgccctgtcattggctctgagccttctgtcaggctggactcaaagctttatggtgatttcccttcaatctttcattcgttcttctccacctcacccacaagtaggctttttcctgtttgatccatccaagtcacccaaaacaaggatcttaaaaagctttctagctacctgaattttagcttcaaaatctggtcagtccaattttcttggagcccaagtaaaaagaaagacacgaattcattcagaaagg

SEQ ID NO: 245704 - DNA, 562 bp, Homo sapiens
ggaatttgctagaaggaactcaagtggtaatactcatgggygtgatttatattataggaaaaggatatagatcaaaatcaaaagagatacataaggcagaattgagagatgtctaaacatagagcttctgctgtcctcacctcgtggcatcatgggctggcattaactcctcttgtccacagtatccactgggcattgccaaccagcaatgctcacccaagcctttggtgttcagagtttttattggaacccgatcgcatgccacctgcatggatgatcttatcttctagcccctcttggaggtgtaatgtgctaatgcttttggtcttcaatttctctagatgttggaaatgttattgcatagcccaaagccccatactaaatcctattgttagactgtctagtgaccaaatgcctcaggcaaaaaacacactcctgtcaggcaggacattccaggggcttaacgattgtctctttgtggccaaaggcagagggcaagaccagactctctttgggcaaggttaattctttactgcataaccttcctaggtcaaggttaaat

SEQ ID NO: 245705 - DNA, 562 bp, Homo sapiens
ggaatttgctagaaggaactcaagtggtaatactcatgggtgtgatttatattataggaaaaggatatagatcaaaatcaaaagagatacataaggcagaattgagagatgtctaaacatagagcttctgctgtcctcacctcgtggcatcatgggctggcattaactcctcttgtccacagtatccactgggcattgccaaccagcaatgctcacccaagcctttggtgttcagagtttttattggaacccgatcgcatgccacctgcatggatgatcttatcttctagcccctcttggaggtgtaatgtgctaatgcttttggtcttcaatttctctagatgttggaaatgttattgcatarcccaaagccccatactaaatcctattgttagactgtctagtgaccaaatgcctcaggcaaaaaacacactcctgtcaggcaggacattccaggggcttaacgattgtctctttgtggccaaaggcagagggcaagaccagactctctttgggcaaggttaattctttactgcataaccttcctaggtcaaggttaaat

SEQ ID NO: 245706 - DNA, 508 bp, Homo sapiens
gcccctgattattcccccatgtgtaaaaggggatgcggagaggacctaccccattgctatgagggtttgtgtgagggttgcatcagtcattccagataaggcacgtatccaggcctggtacagagcaaatgctcagtcaaggtcaatttcattattaatataattttattatagaagcctgttctgtgtggtgtttacctaccttcagaacgtcctatgccatctggtgccagtacttgaagaggttttcttctttattttacatggtcattgctagactcrttcggaataacttcttcccattctgtgcagaaattgatactgtttcctaaaatgaaacaaaaataaaaataaacacaaacactttggaatgagttaaaatttccataatgcacttttcataaattctttcaatggataagattgaactgaaggggaaggtgcagaaaagataattaattccataagatgaatatacaactctgaacttgagaaataatcaactcgc

SEQ ID NO: 245707 - DNA, 601 bp, Homo sapiens
tgaaatggaatcacctacagagctgattcagtgggtctaggtggggcttgaaaatttgcatttctaacaagttcccaggttgatgctggggttcaggaaccacatcttgagaatcattgtgccaggtgaggaaattataagaacagtccaggatcatgtgggtgcccagattcctttgggtcaccaagaggacttaattttctgagtccctgttcactcaaagactttttttgagtctttgaatgaacagggcttaggtttcttctgtrcaatcaattgctaaacattagagacaagaatccaaagtaggtccctggttaaaagggttaggagctaatcttatgcacacctagatagaccaaagtggtgatttgagctcggtggcattttcttggcctgtagtagtttaaagtataccctgatttttttttcgaagaaaaagggcactggttttactgcctcctcgttcatgaagtcatgcccagagaaagtgctggacttacttggctgggtcatatgggaagccagaattagaatccagagtcaaagttctcctggtcgctgagatgctttccatagagacgccagtgtggggaaccac

SEQ ID NO: 245708 - DNA, 663 bp, Homo sapiens
tcattatatctggtgcagtggccttaggttccaataactgttctagtttatttgacttgctatgataagctcagagtcagggccatgttcctttgcagaatacatctggggtgaggaggatacacttgctacccacgtatacacacagagacacacatgctcagacatgtccacactccccagcacacattcygtaatgtcaccacactggcatgaggtttagatccttactattcaaatcgccactcttggacctgcagcttcattagcttgttagaaatgcagactcccaggccccaccccaggccccctgatcagaatctgcaaatttgacaaggtccggacatgatctttgtacacactaaagtttgagaagtgctgggttggttttctccatttctagtctggcctagtctgtgttgttgaatagtttagtccaaatgcttccacttaaggcttgggatcacattgacacttttaattatctatattttaatagaagcatcacgacgtttttttcccatgctggagaaaggagtccaggtaactgtttagtggaatagatggaatgtgattctaatgtgcaacagatgtgtgttcctgcagggagcaaaggcacaccagtctcaggtgtacggcacccctcatttctgcaaaaggcat

SEQ ID NO: 245709 - DNA, 663 bp, Homo sapiens
tcattatatctggtgcagtggccttaggttccaataactgttctagtttatttgacttgctatgataagctcagagtcagggccatgttcctttgcagaatacatctggggtgaggaggatacacttgctacccacgtatacacacagagacacacatgctcagacatgtccacactccccagcacacattccgtaatgtcaccacactggcatgaggtttagatccttactattcaaatcgccactcttggacctgcagcttcattagcttgttagaaatgcagactcccaggccccaccccaggccccctgatcagaatctgcaaatttgacaaggtccggacatgatctttgtacacactaaagtttgagmagtgctgggttggttttctccatttctagtctggcctagtctgtgttgttgaatagtttagtccaaatgcttccacttaaggcttgggatcacattgacacttttaattatctatattttaatagaagcatcacgacgtttttttcccatgctggagaaaggagtccaggtaactgtttagtggaatagatggaatgtgattctaatgtgcaacagatgtgtgttcctgcagggagcaaaggcacaccagtctcaggtgtacggcacccctcatttctgcaaaaggcat

SEQ ID NO: 245710 - DNA, 663 bp, Homo sapiens
tcattatatctggtgcagtggccttaggttccaataactgttctagtttatttgacttgctatgataagctcagagtcagggccatgttcctttgcagaatacatctggggtgaggaggatacacttgctacccacgtatacacacagagacacacatgctcagacatgtccacactccccagcacacattccgtaatgtcaccacactggcatgaggtttagatccttactattcaaatcgccactcttggacctgcagcttcattagcttgttagaaatgcagactcccaggccccaccccaggccccctgatcagaatctgcaaatttgacaaggtccggacatgatctttgtacacactaaagtttgagaagtgctgggttggttttctccatttctagtctggcctagtctgtgttgttgaatagtttagtccaaatgcttccacttaaggcttgggatcacattgacacttttaattatctatattttaatagaagcatcacgacgtttttttcccatgcwggagaaaggagtccaggtaactgtttagtggaatagatggaatgtgattctaatgtgcaacagatgtgtgttcctgcagggagcaaaggcacaccagtctcaggtgtacggcacccctcatttctgcaaaaggcat

SEQ ID NO: 245711 - DNA, 398 bp, Homo sapiens
cagtagaatctagatgtttcccgtaaccatatgttttgaaacctggtattctacagggggagcgatacattacccctctgttttccagttggtgcctcttgatgtccagtctgagttcctttctagctaagtccgagagaagattgttttcctctgaatttaagcttcaagtgactcccctagcatcgtatgcacttgaagctcagccacttctcccattcctccttgaggcagagggggaaggggattgctattgaattttgcctgggaaraagtcttggaagcacatagatttttaaaatagcttctctttaaagaagagaaagacgtgaaaaagtaagtctgattaaaatacaagggtagcatcaggggagcatgtttacaggtttgaagagctg

SEQ ID NO: 245712 - DNA, 546 bp, Homo sapiens
acttctcccattcctccttgaggcagagggggaaggggattgctattgaattttgcctgggaagaagtcttggaagcacatagatttttaaaatagcttctctttaaagaagagaaagacgtgaaaaagtaagtctgattaaaatacaagggtagcatcaggggagcatgtttacaggtttgaagrgctgctataaagggaggcctcttgtgacctttgagagaattaatcaaaaaggaaaacagagaaccagtcttcctcagggtcaagctcaccctggaggtgcaagggccacctgtgaagcccagtgtatcctctccatgttcagaagcacttagtgactctctttattggatcaagttcacactactgagcatggccttcaatgccccatgtcatctgacaataacttatgttttgagatttgcccatttttacccacattgtactccatccagtctagcaatccccaaatgcacttggtgctttccactggacatgcctttgtttatgtctttcatcatttgcttggactgctgttccttg

SEQ ID NO: 245713 - DNA, 498 bp, Homo sapiens
tagaaaaaggctaacctctctcaaacaagagggaattctgccagcagatcaccatcatgaaatgcagcgtcacctcttgcctgggtctctagcctgccaggctactctacagattttggatttaccagcccccacaatgttgtcaatgaattccttaaaatctctctctctctctctctcactgtctctctctctctctctcacacacacacacacacacacacgcactcgatacratgacacatatacatgcacgctattggttctgcttcactggagaacactcggaagaattgaataatgcagtaagttcaggagaactttctggatgaatatatccatcactggctaggactactgagagtgaaaaacaacgagggatgtgtgatacaagctgagttaaatgttaagattgcatgtgccagggtacccacgtagtacccacagcagaggagggcagtgctgctcaaaggaaccagatgggctgaacatctttca

SEQ ID NO: 245714 - DNA, 547 bp, Homo sapiens
atcgctgtgcagatctgccatcagctgttggagaagctgggtagtcctgtgttacttaaagaatgggatgtagaataataacatatgtctagtaagaaaaatttctagaatggcaattcttgaagaaaatatgcatgttctagaatttctgagatttttcaaaaatgctgtacaaaataaatgtaggaaaatcttcaccactttttttctgcccaattccttgggggagtttcccaacttctatgaaatgcttatgtgttaaatatcaactctcatcaatcagctacatggacatttattttcactgtgctgtaagccccagactacttaagagtgcattcatagaaacatttatggaaaacatmttgtttcattttcatatgcagcaatacatgtcctttccctttgttaccattcaaaatgttcacattctggtctccgtgtgcatgttcttagagttgacttccagcagctacctttgaataaagaaggcaaaatactccattgttacttctaaatatctgattgcttactaattaatgagtaa

SEQ ID NO: 245715 - DNA, 560 bp, Homo sapiens
ttggtccaaacagatcttctaatctagtacctcttccttaaagttaaagtccaatcattatcaaccgtaactcatactaatactgagttagtgcggcattccaagcagcagtaatgtgctttgagagggtgggccaggaaacaagataaactaagttttgtcttgaaatctggcatataatattgccaaataagcacaaaaatagcaacttttgsgtcatctatttattaaggcttgttctctcatctattttctgtggatatttctcgacaggtggagacaggtacctgctatagtccctgttctcccctgaatgacactaaccagccatttttcatggccattctaagatctgctttgacaaatgctgaaaaggggaccaatgctgagctaacttgctctgcccagcaaggagaggcaggtgacaggcatttctgtagtgtcactgtgggaactaaccagaaatgtttgcttttctggctttgtcatcctgcaagttttaatttctgtaacctgcttggatacggtgggtgagaatgttaattaatcaacacaacaat

SEQ ID NO: 245716 - DNA, 499 bp, Homo sapiens
tgcttttacctgccatcctgctgtgaatgaaatgggctgggctttcaaaatgttagtcagcttaaatcccagttggtggcactgggaaaatgtagccacgcagtcttattgctgtttctgttctttaactgccaactggaatacaatagaggtttcaaatggaaacaaaagagagatggatccagaaagaaccagaaggacgacaacaaagcaagtcaagaaaatgctaaggagccaaagacactgtgctccccaaagttgtcatcccagaccttcttcacattgaagataattatgcttcccttaattgccacttcccctcaracagtcatgatatttacaaatcacgaattatctagtagatgcttatctttgcgacattttaggaaaatcataagctatacttaacccaaagagagaatggctgtatcacgttgctcagacatggataatatatattttatatattatgagggattttagtatagtatacagggta

SEQ ID NO: 245717 - DNA, 499 bp, Homo sapiens
tgcttttacctgccatcctgctgtgaatgaaatgggctgggctttcaaaatgttagtcagcttaaatcccagttggtggcactgggaaaatgtagccacgcagtcttattgctgtttctgttctttaactgccaactggaatacaatagaggtttcaaatggaaacaaaagagagatggatccagaaagaaccagaaggacgacaacaaagcaagtcaagaaaatgctaaggagccaaagacactgtgctccccaaagttgtcatcccagaccttcttcacattgaagataattatgcttcccttaattgccacttcccctcagacagtcatgatatttacaaatcacgaattatctagtagatgcttatctttgcgacattttaggaaaatcataagctatacttaacccaaagagagaatggctrtatcacgttgctcagacatggataatatatattttatatattatgagggattttagtatagtatacagggta

SEQ ID NO: 245718 - DNA, 453 bp, Homo sapiens
aagaacctcattctggggcaagagaaccaagaatatagaactgtaatgtaagtgacaaaagtcagccagctgagaaaaccaaaacactgcatttaaccaagaaaaataatactttgaaagtcactaaccttcttgccagttagtttttacaaaagacaatgttctatataaccaattgtaggttaaaagtattactgtgattgaagccaattcagatggacaaagtgcaagctaaggaaagcagtgrgcttggattctggcagaaattcacctccaattcgagacatgggtagccgcatgctcctcctgccaagcccattctttctgttagtaggaacctgaactattatgaataaattaaatacacagaacatccccaaattcagctctctgatttaactgcttctcttttatttgtcaggcagcaaaatgtaatagaatagttatcaccgg

SEQ ID NO: 245719 - DNA, 604 bp, Homo sapiens
tgtgccaagctttgtgctaggggcggggacagattagacagaggcctgaactcaaatgcctcacatgctagagaagagatgggagagatggggaccatgtttgctgatgtttaagtcacacagatgtcaacattatgttttaactttatcaagaaaaacttttgggggaaaaaaataaaccatgttggtattttcatcagatatattttgacagtgatttttagagagtaatatatggaaaatacatttttaaacataaaatatgctgcatactaaaatctagtgagataattaatggatatccattattagtctgctagctgaaaaaaaaattttcatagataaaatagaaaaatactaacattaataaacactggcaccaagcagggtggtagagataataaatttaaawctcaaatgattggagaatgacagaaaatctgatcagttttgtaatctgtgccttatcatcttcattaagaaaacttccagtaggacatgaaagcttaatctttgttaaatgctttgttttggctcacttcccacaatgtacattttccactgggtaatgcatgcttattggctaagctgatatttggaaagg

SEQ ID NO: 245720 - DNA, 396 bp, Homo sapiens
tatacctgtaaccacagcactttgggaggccgaggtaggtggatcagttgaggccaggagtttcagaccagcctggccaacatggcaaaatcrtctctattaaaaatacaaaaattagctgggtgtcgtggcatgcgcctatagtcccacatacttggatggctgaggtgtgagaatcacttgaaactgggaggcaaggctgcagtgagctgagatcgagccactgcactccagcctgtgcaacagagtgagaccctgtctgaaaaaaaaaaaagaaaaaaaaagtttaccttgctacctcttcaggaaacatctcagcagtgcacacaatattttagttatctttataacccactttattgactcaatatttgttaaataaataaatgcacaaaa

SEQ ID NO: 245721 - DNA, 396 bp, Homo sapiens
tatacctgtaaccacagcactttgggaggccgaggtaggtggatcagttgaggccaggagtttcagaccagcctggccaacatggcaaaatcgtctctattaaaaatacaaaaattagctgggtgtcgtggcatgcgcctrtagtcccacatacttggatggctgaggtgtgagaatcacttgaaactgggaggcaaggctgcagtgagctgagatcgagccactgcactccagcctgtgcaacagagtgagaccctgtctgaaaaaaaaaaaagaaaaaaaaagtttaccttgctacctcttcaggaaacatctcagcagtgcacacaatattttagttatctttataacccactttattgactcaatatttgttaaataaataaatgcacaaaa

SEQ ID NO: 245722 - DNA, 518 bp, Homo sapiens
ggggggacgtttacctgctgctcttatcaggagaaatcttcattaagatgagattgtgaactctgggaattctctcttagctggatatttacagctaatgctggaggcttaactctttcttaaacagaccggtcatttgactccrctttctatcccaagccccatgctgacattcagtctccaaggcaaatgcaagcacacagctaaacagcagcccaaagggccactgcagatgcagaagaataaaaggaggaatgccctgcataggaaggggagggggaaatcacagtgagaagaaattcagttcaagaaccactctctgagagtgatcaacatgccagggacaatactcggcataatgagtcccagaactgaaggagtctacaatttagggagggagggcaaattcacactcagatttaatataacatcacatgttttattacagagactctgcaattaacaaggggtgagaagagaggaattgagacaggtgcaggggaagtttctagagtgaa

SEQ ID NO: 245723 - DNA, 518 bp, Homo sapiens
ggggggacgtttacctgctgctcttatcaggagaaatcttcattaagatgagattgtgaactctgggaattctctcttagctggatatttacagctaatgctggaggcttaactctttcttaaacagaccggtcatttgactccgctttctatcccaagccccatgctgacattcagtctccaaggcaaatgcaagcacacagctaaacagcagcccaaagggccactgcagatgcagaagaataaaaggaggwatgccctgcataggaaggggagggggaaatcacagtgagaagaaattcagttcaagaaccactctctgagagtgatcaacatgccagggacaatactcggcataatgagtcccagaactgaaggagtctacaatttagggagggagggcaaattcacactcagatttaatataacatcacatgttttattacagagactctgcaattaacaaggggtgagaagagaggaattgagacaggtgcaggggaagtttctagagtgaa

SEQ ID NO: 245724 - DNA, 443 bp, Homo sapiens
aattggttgtaagggaaaaaaaattattttaatctgaaagaaggtcagtagtaaataaattcattcccctagacattttggaccaacatgcctccagaaacaaacgtcttagtagctgtgagaagagcaagtttcttggcagaaagatgcagggcagagtgtctcacaatctgatgatacggtggccaggtctagaaaatcaggattacagcatggggtagacacccaagtcttacmtgcaaagtctcctgctaaccccagggctttattttgagaagacccagaactgagaattcgaagttcaacatcattttccctgtagtgatgaagagcaacaccagcaatccaccaatccttactacagagctgttttcctattttgttctgaatcttttatacccagtaaaacattaaggtgtttatgatcaaatgtaattcaaaca

SEQ ID NO: 245725 - DNA, 537 bp, Homo sapiens
aggaggaaaaaaaatttccaaaccctttcaaacctagactagaggtaaatccagaaagaatttcaatttatatgaagcaacagaccattcaaatccctaccccacaatccaaagccttaaccaggcgccatgaaatgtgctttcttttttttggaagccatgcttacaaattcacctcttctcagtctcattccattgaaacaatttctgcccccacctgatagagtcaagagccaaaatcatgtagaagctcagctgaaagtaattttcagagtttcaaagtgcataatgacatcgtcagctccctgtgccatgttctgactccaggaagtgccacattagcacttcaggaaagaaaagatccacactstccttaaatcttgctggtgacataaagaatacttagtgccttataatacagacttctgcttcacagaaaaatttttcatttgttttgtactggaaaactgcaaatggatacccctaatcatgcagttgggggaagtcacttcagaacagggagatggccttattgag

SEQ ID NO: 245726 - DNA, 537 bp, Homo sapiens
aggaggaaaaaaaatttccaaaccctttcaaacctagactagaggtaaatccagaaagaatttcaatttatatgaagcaacagaccattcaaatccctaccccacaatccaaagccttaaccaggcgccatgaaatgtgctttcttttttttggaagccatgcttacaaattcacctcttctcagtctcattccattgaaacaatttctgcccccacctgatagagtcaagagccaaaatcatgtagaagctcagctgaaagtaattttcagagtttcaaagtgcataatgacatcgtcagctccctgtgccatgttctgactccaggaagtgccacattagcacttcaggaaagaaaagatccacactctccttaaatcttgctggtgacataaagaatacttartgccttataatacagacttctgcttcacagaaaaatttttcatttgttttgtactggaaaactgcaaatggatacccctaatcatgcagttgggggaagtcacttcagaacagggagatggccttattgag

SEQ ID NO: 245727 - DNA, 537 bp, Homo sapiens
aggaggaaaaaaaatttccaaaccctttcaaacctagactagaggtaaatccagaaagaatttcaatttatatgaagcaacagaccattcaaatccctaccccacaatccaaagccttaaccaggcgccatgaaatgtgctttcttttttttggaagccatgcttacaaattcacctcttctcagtctcattccattgaaacaatttctgcccccacctgatagagtcaagagccaaaatcatgtagaagctcagctgaaagtaattttcagagtttcaaagtgcataatgacatcgtcagctccctgtgccatgttctgactccaggaagtgccacattagcacttcaggaaagaaaagatccacactctccttaaatcttgctggtgacataaagaatacttagtgccttataatacagacttctgcttcacagaaaaatttttcatttgttttgtactggaaaactgcaaatggatacccctaatcatgcagtkgggggaagtcacttcagaacagggagatggccttattgag

SEQ ID NO: 245728 - DNA, 558 bp, Homo sapiens
aggatgatagtaaacaccttattgtatgcagctagtgctaagaagaaatgggacaacccatatctaagtgtgagggcaccatgtctggcacactgtaggcactcagtaaatgctagctaccatgattaagccgaagggacatcccataggytgccttgtctggtacagaaggcaatctacctgctaattaggatggctttctagaaaacatttaaaattatcttactgacatgacaaatatttatttagcatttctcatatgtccccttttttggggaaaaatgtaatttaaaattcaaatttggaaaaaatatatggttttaaatttaaatacagggttccagaaattcttaaggaaggttacattaaactcacaggatagactgtcagttcttcatctgtatctcagtcctatttgtttcttttgtcttcccatctctcttctttatcctatcagaaggcaaatgtaaaagcagcagatagttacttgttttacccacgagacagagcaggatgctttctccatgacaaatgatttacttgccctccagacaccaa

SEQ ID NO: 245729 - DNA, 585 bp, Homo sapiens
gtcaatgcctggcttcaaagcwtcaaagaaaggctgattctttttttttaggggttaacacaggtggtgatgttaagttaaggcaatgctcatttgccattctgaaaatcctagagcccttaagaactatgctaaatcaactctgtctgtgctctataagtgcaacaacaaagcctggatgtttgcacatatgttaacacaatgcttaactgaatattttaagcccactgttaagacctactgcttggaaaaaaaagatttctttcaaaatattactgctcactgacagtgtacctaagagctctgatgaagatgtacaaagagattaatgattccacgcctgctaacacaacatgcattctgcagcccatggatgaaggggtgattttaaatttcaagtcatattatttaagaaatacattttgtaaggttatagcttcttccatagattgtgattctcgtgatggataggagtgcagcaaattgaaaaccttctggaaaatatttgctcttttagatgccattaagaacattcgtgatttatgggaggtaaaaatatcaacattaacatgaatctggaaaaag

SEQ ID NO: 245730 - DNA, 585 bp, Homo sapiens
gtcaatgcctggcttcaaagcatcaaagaaaggctgattctttttttttaggggttaacacaggtggtgatgttaagttaaggcaatgctcatttgccattctgaaaatcctagagcccttaagaactatgctaaatcaactctgtctgtgctctataagtgcaacaacaaagcctggatgtttgcacatatgttaacacaatgcttaactgaatattttaagcccactgttaagacctactgcttggaaaaaaaagatttctttcaaaatattactgctcactgacagtgtacctaagagctctgatgaagatgtacaaagagattaatgattccacgcctgctaacacaacatgcattctgcagcccatggatgaaggggtgattttaaatttcaagtcatattatttaagaaatacattttgtaaggttatagcttcttccatagattgtgattctcrtgatggataggagtgcagcaaattgaaaaccttctggaaaatatttgctcttttagatgccattaagaacattcgtgatttatgggaggtaaaaatatcaacattaacatgaatctggaaaaag

SEQ ID NO: 245731 - DNA, 516 bp, Homo sapiens
aaaaccttctggaaaatatttgctcttttagatgccattaagaacattcgtgatttatgggaggtaaaaatatcaacattaacatgaatctggaaaaagttggttccaaccatcatggatgatttcagggggttcaagacgtttgtggaggaagtaactgcagatgtgatgtaaatagcaagagaactagaattagaagtggagcctgaagatttgactgaatttctatattctcatggtaaagcttgaatggatgagaagttgcttcttatagrtaagcaaagaaagtagttctcaagatggaatctcctcctggtgaagatgttgtgaacattgttaaatgacaataaaaggtttagaatattaaataaatttagttgataaagcaacagctaggtttaagaggattccctccaagtttgaaggaaactctactgagagtgaaattctattaaacagcatgacaggcaacagagaactctttcatgaaagaaacagtaaatcaatggagaaaac

SEQ ID NO: 245732 - DNA, 594 bp, Homo sapiens
aagtgtccctttcctgcaagtagatgttgtcctagtccaaagtgcatggctgggtacatggcacactgactattgtgcagtgcccacccactcctcagcagagtgcctttgtgaagattacagcctgaacaattcttcatggcaggccggatgtgtctaacctcagtgcaatgattaatgctatgtgtcaacttagctgggccgctatcttagttagcctgggccaccataagaaaataccacacactgagtggcttaaacaacagaaatttatttctcgcagttctacaggttgggaagtccaagatcagagtcctcctatgcttccctctggtgagggctctcatcctggcttgcagacagctgccttctcattgtgtcctcatacagtgaggtgaggaagtacagatttgtcacttcaawcttcttatatagacactaattccatcatggggccttatctcatgaccgtatctaaacctgattatttcccaaaggccctacctccaaataccattagcttgggggttagaattttaacatacgaattttgagggggacacatacattcagtccataacagcctcagtgccc

SEQ ID NO: 245733 - DNA, 403 bp, Homo sapiens
aagcctcctcaatcacataaaccaataaaaacaaaacaacacaaaacaaaaaaaactctctctctcgctctctctctacacacacasacacacacacacacacaccacacacacacacacacacaaaacacccatcctgttgcttctgtttctctggagaaccctgactaatacatctagaatctaggttcttcttataacttcaaagtatttcttgacagccacatgagaagatgaccagagtgcaaataagaaaaatttttagctggttgaaaccttttactgaaagaggaccaattagtaaaacgaagtcaatgcaaaaggaagtcttcatgacatgcttcagggctccatacttggttctgtcctattcaacacatctgtcagtggcttataatgtagg

SEQ ID NO: 245734 - DNA, 434 bp, Homo sapiens
agaaaattgtttagatgttcagaatcggttcttatcagtagctacaacataacttttttgtgaggtcattagaataaatacaacatttctcacaggcacagaatcctaagtgcctgtgctatcttcttactatagttatagaaccagcttatataatttggttttgctttaagtataatgtggcaatgtgttcataaaaattgaaatacacttcatgctactaaaaatgataattttctgagaatggaaaacaagactagcatgtatttaccaatgttattcaagattgtctcaagaaaagcattattcatttggaaaaaataattgatcacgaggtaggcacactgaaatactgttttaaggaayaggaaattttgcactatctacttctcttattttgaaagttcaagcgcttggtaaagtcaccttggaaa

SEQ ID NO: 245735 - DNA, 470 bp, Homo sapiens
tggtcttccgtgccttcaaattgctgtgtggggcttctgagaagacaaactttggaaattgcccctcttttgcagaggattcagcggaactcaggaatatgccagtacccacctaccctgtgatagccagcctctaaaatagtctccagcgatttctggcttccaatactcacactctaatatggtcccctcccacactgtatcagggttggtgtgtaacagtagagtgcaggaggagtggtagataccactctggaagagagattatggatgtcatttggycctgtcttgctttcccttggatcacttgctctggtggaagccagtggccagtctcatggacagttgggcagcccagtggacgacctaacagttcgactgccacttcatggaagaccctgagccagaacaagttagttaagctgctcccagattcctgaccctcagaaacagtgtgaaagacaaatacc

SEQ ID NO: 245736 - DNA, 601 bp, Homo sapiens
ttggatgtgaaaaaggcaaaaaagagtagataaagtaattgagaatgaaggacagctgcccgatgaaggcagctttgatagaggaaaaagcagcttgtcttgtcgcagattcttagttttgccctatgtcagcaaacatggaacataagaagcaagaacatctcaagacatccactgaaggaagaagaggagaaaataaaataagaagacaaaaacgacaataacgtattcagcaataatagatggcagacacaaaagaaggaacattggagggaaaaagtagtagggcctgaaacaagtggcagaggtggacagcacagtcatcacccaaaacaaaagcaagtggaggtgggagttcaaacacagtcttatggaactgattaaaatgacataaatatgggtaaaacacagcataaagtaggaacaggcagtataaaaaataagaagaaaaaagtamaaacccccaaagggctaaacctatggaattctgagaagaaaatatggatatgagttgagacacaagaaagaacattgaatactagcaaatcttattccaaaggactgcggtcgggatcttccttttgatctggaagggagactc

SEQ ID NO: 245737 - DNA, 542 bp, Homo sapiens
caacatttattaagtgcccactgtgtaccaggatattttacaggcactgggatttctgtgttgaagaaggcaaacttcctgctcttttacctgactttctaggtggggaacagaacaggagcagatgaggaacagacagtaaacaaataaaaaaaaaaactaacaggattgtttcaggtagtgggtgtattatgaaaaaaataactaaaatagggactgttgggagtccttcagtagaggggtagggtgcccaggagtagaagtggggtgcttatttagatcaggagaccaggtgctgttgacctgggacctgaaggacaggaaggagctggccatgggtgaaccctggggcttttgctctaagcagagggcctgaaggcatgtatagaagagagcagtgtgactgaccctaacgggctagggagaaggagactgtagtagtgccctagggytttgccataagaaaataccacaaactgggtggcttaaaataatatttattctcacaatgccagaggctagaagtctgacaccaaggtgtc

SEQ ID NO: 245738 - DNA, 601 bp, Homo sapiens
gggcggtgagggagaatgtgttcccagtctctcccctagattctggtggcttgcctgtcatctttggtgttccttggattgtagattgatcactccaatcctctacctcacgtggccttctccctgtggcttatcacataggcctccctctgcgcatatctgtcaatgttcacatttccccttgttataaggacaccagtcatatgggattgggtctaccctaattttaaccttgtttgaattaaktatctctttaaagaccctatttccaaataagaccaacattcagaggtagagaagattgggacttcaacagatctttttggagagacccaattcaactcataccagtaagatatggaaaggagttggattttattctaagcacccatgtgaaatgcctggcacagtgcctggcacatggaaaacaataaattttagtatcattattatgcagagaatttatttaaaaatacaaaatttaacaggagagtctttaaaaacatgaaattggattatgtcactgctctggctaaaatctctcaatggcccccttttgtactccaaaaaaattccaagtcctcacagggccttcaaaccc

SEQ ID NO: 245739 - DNA, 603 bp, Homo sapiens
ctttccagacaaataaagacatctggtcacactattaatataccctaaatcttctttgaagttgaatgtgcagactgggcatcaattgctttgtcaacccagctctttcgaccctttttttctgtagagtgctcctctctactttgcccattccagaagtgtgattcctggtcgctcttcagccaccacaggtggtaccaggcccaatcaagtctgtccctgaggtatttttagaactggctctccctaatggtaagatacaaacttgggtactattggtgaggaagtggtttatgtagagagaatgaagttaacatgaagaaaagaagaggtgaggagaaattgagaaagaggatcctggcaggacttgactcgagtttccattttcctgatgattacctgcatatcatcgtttgtcatttcattgttcaatcttttaactatatgagatatatcatattcttccaatattgttccctttttactttagctagtttgagttgggtttatgatactttcaatccaaattgcactgactaacccaagatgcaaagamatgatttaagtagaaaaggtggctcccaaaaagcttccgtcatttga

SEQ ID NO: 245740 - DNA, 578 bp, Homo sapiens
gcaatgtacaaactcctcagtaaggcctgagaagtaaggcctgagaagtcactctagatctggcccagccacactccctagacccttgttcaaacactctaccagccagcaatggaagggcatccacactggacagttggcctttttcttaatggccatgccatattgtcctatttagcttcttgacgagaatgttttattcatctttgtccagtgaagatttgacacgaagatttttcaatacatgcgcttgatggaacctctgaactttctatttggttactcatcactgtgtcttagtgacccaatgggaccttccacaactctatcattcacagagtggaggaaggtcccaattgctgatagttgccccaggatcccctgtgcttctcaaattaagtccttcagcaagcattgctccagaactttacccagtttcttgcctactgctgttgtcagtctagtttgaamccagcttcttcctagtgaggtctaagtaatggggaaaggcttgacataggtcctaagaagtgtcatgaatccatgtcagatgatataaggaaaagtaggggagggag

SEQ ID NO: 245741 - DNA, 511 bp, Homo sapiens
tacaaaaattagccaggtgtggtggcgagcgcctgtaatcccagctacttgggaggttgaggtgggagaatctcttgaacccgggaggtgaagattgcagtgagccgagattgcaccgctgtactccagcctgggccacagagcgagactccatctcagaaaaaaaaaaaaaaaaaagaagtttaacaaaaattttttgagtggtatatattatactaagtcaaatactatttcaaatatttcttcttcatatgaacaatatgaagtagaatttattartagatatcatcatccacattttacagttgaggaaacagacagagtagataagtaacttcctgaaatcacacaattaacacataatgcagtcaggactcacacacacatggcactgattccagagcctgtacctgtaatcattacaccacactgctttctgatgccaggggttactgtgaaatccacaatgagtgagagcaaacgaacatcactgaaaatgaactgggtaact

SEQ ID NO: 245742 - DNA, 588 bp, Homo sapiens
gtggctgctcttgccttacaatggcaggactgactagatgtgacagaaattctatgtctcacaaaaccaaaaatatttactctctggtcctttgcagaaagtttgccattccctgctgtgtgctccttctgggcamgtcattgaatctatggattcaactattgcctctgtgcacgaactctcatgctggaatgaaacagaagaaagaggagaaatggcaccctcccccacaccaagttataatagtcccaccaataaaatcccaacaacgcagacagggaacacattacacctgtcaaaaaagtggcagaatctgaagcatggtagtcagtggaaccggccacagtcattgtgacacacaatttatcagtgtgtctttttcttttcctgaggtagtaaaaacatcatatatatttttcaagatgcaaaataaaaacctataaaatctatgatgactgagaaaagaaaataaatcttatttcaataaagctggagggattagcagatgccctgagtgcccccacactcaaagcacagtgtgtggtatgaactcatttaaataaatatttgctgaaaaatgaatgtatg

SEQ ID NO: 245743 - DNA, 583 bp, Homo sapiens
cctacttgacacatgtggttcaagagttattgaaaataaaagcagatagaatttggagatcttctctctgatccttttccttacaggctattcctctgtagtgactgtggtctcctcagattaagtcttctgggtccctgggacaaaaagactgcagtttttcccccaccagtgtcccagtgttactcaatccccactgactgcaccttatcccakgctaaaaggacaaacatagaaactcactctatcagctcctttcccaggaggatgaactacttataagaatttgcttgtatcacttcactctctagtgacttcagctagctactttttacattatgtccagagtttatagctattatctgcatacagatcaatatcttacacagcaattaccccatattttctttataaccatcttttaactagtaaattggaattttgtctgtgtgggaggcatcccatgactatctgcagggatctcagtttcacagatattgattactgtaagctaagtgacaatgatgattcacatttaaattcttattaaatttaatgcaaattgatacaaattacataccca

SEQ ID NO: 245744 - DNA, 585 bp, Homo sapiens
ggggatgtaaattagtacatccactatgaagaacagtttggaggttccccaaaaagctaaaaatagagctactatatgatccagcaatcccactgctgggtatatatcccaaagaaaggaaatcagtatatcaaagagatatctacactcccatgtttgttgcagccctgttcacaatagccaagattttgaagcaacytaagtaaccatcatcagatgaatgcataaagaaaatgtggtacatatacacaatggaatactattcagtcatcaaaaagaaagagatactgtcatttgcaacaatggatgaaactggagatcattatgttaagtgaaataagccaggctcaaaaagataaacatcacactgtatctgtgagatgtaaaaattaaaatgattgaactcaaacagagagagtagaaggatggttatcagaggctaggaagggtagtggggggctgtggaggacttcgggggtggttaatgggtatagaaaaatagaaagaatgaataagacctactgtttgaaagcagaacagtgtgactgtagtcaataacaactttattgtacattttaaaataac

SEQ ID NO: 245745 - DNA, 585 bp, Homo sapiens
ggggatgtaaattagtacatccactatgaagaacagtttggaggttccccaaaaagctaaaaatagagctactatatgatccagcaatcccactgctgggtatatatcccaaagaaaggaaatcagtatatcaaagagatatctacactcccatgtttgttgcagccctgttcacaatagccaagattttgaagcaacctaagtaaccatcatcagatgaatgcataaagaaaatgtggtacatatacacaatggaatactattcagtcatcaaaaagaaagagatactgtcatttgcaacaatggatgaaactggagatcattatgttaagtgaaataagccaggctcaaaaagataaacatcacactgtatctgtgagatgtaaaaattaaaatgattgaactcaaacagagagagtagaaggatggttatcagaggctaggaagggtagtggggggctgtggaggacttcgggggtggttaatgggtatagaaaaatagaaagaatgaataagacytactgtttgaaagcagaacagtgtgactgtagtcaataacaactttattgtacattttaaaataac

SEQ ID NO: 245746 - DNA, 547 bp, Homo sapiens
gataactctaaaattaaaagttaaaattaatcaaattttcttatattaactgggtcagaaaccatccaacaactttgttgtttctgcctacctaatggcctgataggtgaaaccatwaaggagaaacagaaacaacagaaagctgaaataaactttctaaagggtaagattctgatctttccatcttctacacagtacagcaaataaaactctagatatatagttttcctaaagttaatagatagcagttaagactagaggcaaaatgttttttcctcagaatacttaaaaaaatagtagctgcttctttccagctaaactgtcaaaatcatgaatgcaggaatagggtctatcttactccatacatacaaggcaacagacagaataggtatttgttggttgacattattttttctcagttaatatttattgagggtctattatatgctagacagagagctcagcagttaataaaacttaaaacttataaatacaggctttctgcatgaagcctatatttcaatggagaagagagataataagcaag

SEQ ID NO: 245747 - DNA, 603 bp, Homo sapiens
catcaaaggtggggtgaggaataaaaataaaatcttaggcatcccaatcaactaatcagttctcatggccaaggggactctggagaaatcttaaaaactgagttcccagccatgatgagatgggagattagatataccttatttgttatacccacttacttgctaactgatattgaactttctttcctaagagttaaamagcaaccagcccagccagcctcccctccctttttgtggtttcaaaacaactgaccagcattcctttttgataagagaccatccaccatggactcattctggactcattacagacgcaggacacaggatgcctctatgtcctctgcttcactttatatctattctaattttaatgcatttaaatgttaagtttacaccacaaagtgaacatgggacatatgtaacatacatgtttgcttactatacatgtaagtgtgcatcttttgtgaatattagtagctcctcctataacctgttggatgtgtttcctttgtcaatccattcagcataaattcctgtctcactcttccctcccttgaaatgcctccttctggtttctgcctgaggctacacttcccagcctgt

SEQ ID NO: 245748 - DNA, 559 bp, Homo sapiens
tgcctgatgctgacccttctttcttgcctgataagagatcaccaatcatggagtggttctggccattctacagagaatgcacagtaagagtctttgtgtcttctgcttcaccttttgatatcaaagggccaaaaactctaccttttgatcatgctaatgctgccaatttttgtacatgggacccgtgaaggggcatgaaactcmattgcacatgcatacatttctcctttcataaatattcaggactcctcctatcacttattgaatatgtatatttcaccacccagttcagcataaattcctgtcttattctaccaaccctcaaagtatctgtttctggcttctgacaggaggctatatttcccagcctgacagaatggccaccctaccagctgcaaccctttatgagtaataaagctctcctttcaaaattcatgaacctcatcattcttcagttgacaaaaggcttatggatttgtagatactgctaatttaattcagaatacattttttctgttcttatttattaatattattatttagcctcacttgagcagtg

SEQ ID NO: 245749 - DNA, 559 bp, Homo sapiens
tgcctgatgctgacccttctttcttgcctgataagagatcaccaatcatggagtggttctggccattctacagagaatgcacagtaagagtctttgtgtcttctgcttcaccttttgatatcaaagggccaaaaactctaccttttgatcatgctaatgctgccaatttttgtacatgggacccgtgaaggggcatgaaactcaattgcacatgcatacatttctcctttcataaatattcaggactcctcctatcacttattgaatatgtatatttcaccacccagttcagcataaattcctgtcttattctaccaaccctcaaaktatctgtttctggcttctgacaggaggctatatttcccagcctgacagaatggccaccctaccagctgcaaccctttatgagtaataaagctctcctttcaaaattcatgaacctcatcattcttcagttgacaaaaggcttatggatttgtagatactgctaatttaattcagaatacattttttctgttcttatttattaatattattatttagcctcacttgagcagtg

SEQ ID NO: 245750 - DNA, 559 bp, Homo sapiens
tgcctgatgctgacccttctttcttgcctgataagagatcaccaatcatggagtggttctggccattctacagagaatgcacagtaagagtctttgtgtcttctgcttcaccttttgatatcaaagggccaaaaactctaccttttgatcatgctaatgctgccaatttttgtacatgggacccgtgaaggggcatgaaactcaattgcacatgcatacatttctcctttcataaatattcaggactcctcctatcacttattgaatatgtatatttcaccacccagttcagcataaattcctgtcttattctaccaaccctcaaagtatctgtttctggcttctgacaggaggctatatttcccagcctgacagaatggccaccctaccagctgcaaccctttatgagtaataaagctctcctttcaaaattcatgaacctcatcattcttcagttgacaaaaggcttatggatttgtagatactgctaatttaattyagaatacattttttctgttcttatttattaatattattatttagcctcacttgagcagtg

SEQ ID NO: 245751 - DNA, 554 bp, Homo sapiens
aaacaaatatctttaaatgctatccatatactgacaactcacaaatttatgtctctaacccacaycatatctctgagacatccatagatgtataaaatctaataagtctagaactaaagttttgctctttctaccctgataaatatttttttcctttgtatttctcatcccactatttcctcttccctccctgcgccccctccacccccagccactgcgtcacaacaacctgggagtccttggctccttattctgactccccacccacagactatccatctctacaggttgacaattctacctccattatctactcaaatccattgtctcctcttgacaacattcccctggtccagtccatcggcatctctttattgagtctctacagtaatttatctccttatttctacattcatcttattccaagctattttacacatgccaaccagaatgatccttaaaaataaaacttgatcatattctttctttgcttgcaacccttcaatgatattcccttatgcttagaacttaattgacctgaaccacagtctatg

SEQ ID NO: 245752 - DNA, 463 bp, Homo sapiens
attttgtcttctgaccaatgacatgattctgtctttcgtaggctactcsaaaacttctataatgatggtagagttcagtgaagtggagcctcaggcctgccatccccatgcttctggcaagcagcagcatctcccctgagcatggtggcatagggcatgccattaaaaacaccttgctgctgttcatctccacatactaagttgctgtacactttgcagtggaattccatcttgctgcgtctggttggccagaagccctacaggtagaatgggatggtcaggagagcacattgagagaataaatgggagcttagaggttgcccaccttgctgcccctgcccatgggtcacagccctcacctggctgtccagcttgtatgtctactgaaggctgctgaacttgttctccatcacagaggtggtgtgacagcagtctgagggcaccacactccatgaccgggctc

SEQ ID NO: 245753 - DNA, 634 bp, Homo sapiens
aaggaaagtgaggtggtttgggcttctaggggcagtaaattgtgggaaggtgactaggaaatgtatagtagacaaggcttgttaagtaaagtttgttatgcaggatgtgagggcggtctggttgtgacatctctcaccccattgattgccagggttgattcagctgatctggatgtctaggcgggtgtccccttcctccctcaccactccaygtgcatccctctcgaagtgcacacttggtggaagaggatgaccatccccaataaagaaggactggtcttggtcaagggtataagagtagctgtgctccccttttagaacctccaaataagctcccaagtttgttatgcagactcaattcagtgtcatctccagtgataagatagtctggtggttaaatttgttctcctctcctggtactagagagaaacatatctttataaatggaaacctgtgttacctgtacaaagggaaacttatgcactggttttaggcagaaaggaagacagcaaaagttcttcctgtgtccactatttcttaattgccttcagctcaaaatattccttataccaaagtggtatatttgggggtggcatattctgatccccttcacaaacttatcaatgtatgtccc

SEQ ID NO: 245754 - DNA, 490 bp, Homo sapiens
ttagtaaaattccttgcctagtgccctaatcagtatcttgatgcctgggaaaaattaactattacccccaggagtgagcagttgacttcctttactcaacagtaaggatggggcataataattagggttaacatcagaaagttcacatttaagagcatgttgaatactgcccagggtacaatttcaagtaggcacagtccttgcctagtaacytgaattgtaaagctgtgaagaattgcagtcactgtattagaagcataaaaggtttctgcccctttttagggtgtttttcattttctttctgaaaattgctattgttacacatgtacttactgaattaaaccacaaacatgaatggaagaatcaattccaaccaaaaaattaagtggaataagatgtggattctcaagacccacatatattttattttgttttgttttgttttttgtgacggagtcttgctctgttgcccaggctggaatgcagtggt

SEQ ID NO: 245755 - DNA, 571 bp, Homo sapiens
ttgtagtgcaatggtgtgatcttgactcactgcaacctccgcctcccaagttcaagcaattctcttgcctcccaagtagctgggattacaggcacctgycatcacgcccggctaatttttgtattttcagtagagaaggggtttcgccatgttggccaggctggtctcaaactcctgacctcagtgatccacccgcgtcgacctcccaacgtgttgggattacagacgtgagtcaccgcgcctggcagacaaccaattttaaagcactctttctttgagctctttttctttagtaccagtacacactgtgtagatatttttgttttacttactaaactgtaggttagtaatcaattttagtacctaccagactgtaagctccttgaggacaaggaatttggacatttcccttttttgaagacctagcacaggacccttatgaaaataaccaccaaacagtcttatcaccaagttctagaactagagtagcatctgtcctattaaaaactactgatggcataaatataaacctaaacttactccattagagcactgacagatttgaaatcaa

SEQ ID NO: 245756 - DNA, 591 bp, Homo sapiens
agacaatgtggggtattgctagatgttaaaatttgaaaaaaaatctgaatgtgtgcaacataaaaaacaaaaccccaatgatttatctttatagctccaaaatgtcattattagcttaagaatatatttttgtgtgacaagcaagttgatttgcttattaaattattaattgrtatgtttagagggctacagaccttgtaaaacattggaggaggttttgttttttttttttttaacccccttcttaactcaaaaaagtctaaggagggagaaagaaaaagctgatttttcagctgtttgttttctttttcctcccaacactctgaggtttctacgtgctgttaaaacagggccaagaatccctggcttggattctgtctttccttgggggcagaagtttccctctcaggcctccggggtctttccagtctgcagtcttcaaatatgggctgaccaacccagaaatgatattttttgttgactaactccaggcacatatgttctttcgtggagggatatttttgaaagaaaggctgcacagtttccatttgcaagagaagagtatattttcagaagcttctatgggaggga

SEQ ID NO: 245757 - DNA, 525 bp, Homo sapiens
tataatgtgaccgttttttctgggttgctaaatagttgcctgtttaacattttattttattttattttgagacagggtctcactttgtcacccaggctggagtgcagtgatgcattcactgctcattaacatcctgggcacaagtgatcctcctacctcagcctcctgagtagctgggactataagtgtgcactaccacgcctgactaattttttttttttgagacccagtctcactctgtcgcccaggctggagtgcagtggcgtgatcttggctcactgtaacctccacctcctaggttcaagtgattctcctgcttcagtctcccaagtagctgagattacaatgcctgactaatttttaaaaattcttttgcagagatgaggtttcactatgttgtccaggctggtctcaagcycttgagctcaagtgatcctcccgccttggcctcccaaaatggtgggattataggcatgagccaccatgctcagcctacttaacattttaaatggttgccgagtattg

SEQ ID NO: 245758 - DNA, 527 bp, Homo sapiens
gcccttccgccttccaccgtgtgaggacgtaacattcctcccctctggaggatgcagcaacaaggcaccatcttggaaacagacagcgtctgtcwtctggcaattgaacctgttggtgccttaatcttggacttctcagcttccggaactgggatgaaagtaagagaaagtaagtttcagttctttgcaaatcacttagtttcaggtattttagttaaagcagcacaaaatggactaagacacttgctgaaccagaaaactgggtatagggcttggctatgtgtttgaaaaagctcatgctaaggtttgagaagcgccacattatatatatgatactctccccaccccctttgagtacaagcatttaagcatttataaatttcgttcataaatctcatcttgttcactggaacatcatgaacctaacgttgtgagtgcttcctgggcctctgagtaagaacggttccttttgatcctatatagggatggtcagtcctctgtagtgcctttgtagctgtgtggctgtg

SEQ ID NO: 245759 - DNA, 527 bp, Homo sapiens
gcccttccgccttccaccgtgtgaggacgtaacattcctcccctctggaggatgcagcaacaaggcaccatcttggaaacagacagcgtctgtcatctggcaattgaacctgttggtgccttaatcttggacttctcagcttccggaactgggatgaaagtaagagaaagtaagtttcagttctttgcaaatcacttagtttcaggtattttagttaaagcagcacaaaatggactaagacacttgctgaaccagaaaactgggtatagggcttggctatgtgtttgaaaaagctcatgctaaggtttgagaagcgccacattatatatatgatactctccccaccccctttgagtacaagcatttaagcatttataaatttcrttcataaatctcatcttgttcactggaacatcatgaacctaacgttgtgagtgcttcctgggcctctgagtaagaacggttccttttgatcctatatagggatggtcagtcctctgtagtgcctttgtagctgtgtggctgtg

SEQ ID NO: 245760 - DNA, 495 bp, Homo sapiens
tgtcatcaacatcaggccctgcttctctggggtgctgcttctcctgcaacctcggcgcactgagcgtgtgtctggaggttctctgggcagcacctgcagcagagctggccatggcagcctcccttgggtttgcatgtgctcttcctgaccagattggtgaggatacaggcctgccagcctccacyaaggccagtattggtgttgacagaccaacctgcagcctcctctttctgggcggcagaacatagggtcctcaggcaaaatgctctcctatacactcccctgaactccccagtagcctgtgccctccagctggggggcactgggactgccatggcctctttatgcccccagggtacagcctctgctcagatgcattagggtaaggccccagcccattgcttatgggaccagaggcatcacacacaagggaagccggctgggagtgcgtattaaggctatagccacagctgcgatgaatagcctgtaaaaggg

SEQ ID NO: 245761 - DNA, 563 bp, Homo sapiens
gagaacaaccacagctcccctgcctctcctgtggcaggtccgagaaggctatggagaggtgctccttttcccatcatctccccaatttggaaaggagttcaggaaaccaaagctaatggaatcaatgttaaatagattcgctctttcattggcttaagtggtccagctgaagaaatgtttgggaacaagataccagagaggcaaggtacttacacaattaaaatataaagaatttaaagactgtgactgagtggtctttttgaggtgactyttaaatgaagggcagccatatgtactgacaaggtaaaaccagagctagacagtaattgaagtggtaaaaacaggtttctgtttatgactatctcactaggggaaaagagatcacagtgtagacctggattcacttctgaatacagtgtgggcaagtgggaatttatagccaggagcagggtgggggttggcgggtgggataagggagactctagcttaacaggatttttgctgaagacagggcagggtgatcacacatcacctggggatggtggaggatgaggaacccaatc

SEQ ID NO: 245762 - DNA, 563 bp, Homo sapiens
gagaacaaccacagctcccctgcctctcctgtggcaggtccgagaaggctatggagaggtgctccttttcccatcatctccccaatttggaaaggagttcaggaaaccaaagctaatggaatcaatgttaaatagattcgctctttcattggcttaagtggtccagctgaagaaatgtttgggaacaagataccagagaggcaaggtacttacacaattaaaatataaagaatttaaagactgtgactgagtggtctttttgaggtgactcttaaatgaagggcagccatatgtactgacaaggtaaaaccagagctagacagtaattgaagtggtaaaaacaggtttctgtttatgactatctcactaggggaaaagagatcacagtgtagamctggattcacttctgaatacagtgtgggcaagtgggaatttatagccaggagcagggtgggggttggcgggtgggataagggagactctagcttaacaggatttttgctgaagacagggcagggtgatcacacatcacctggggatggtggaggatgaggaacccaatc

SEQ ID NO: 245763 - DNA, 546 bp, Homo sapiens
ggaggctgaggcgggtgggtcgcttgagctcaggagtttgagaccagcctggacagcatggtgaaaccctgtctctacaaaaaattacaaaaattagctggatgtgctgatgcgtgcctgtagtcacagctcctcaggaggctgaggtgggaggattgcttgaacccaggaggtcgaggctgcagtgagccctgataatgccactgcattcctgcctgggtgacagagcaagagcctgtctcaaaaaaataataatgattattatgtggattcaaagagactcagatgctccttctacgagcgggggcaaatccttgggcatccgaggtcctgaccgtggattaccccagctggtctccagaggacttctgagtatcaccatgggtgggkacaagagggtagtgggttggggttgaagtcgactttagcaaatagctcattgttctctttcacccttctgtgaaagaggatcagaagttcagggcatggctctaaggaagttcctggcagctctgtttagagtagcaagattttggaaatgaccca

SEQ ID NO: 245764 - DNA, 546 bp, Homo sapiens
ggaggctgaggcgggtgggtcgcttgagctcaggagtttgagaccagcctggacagcatggtgaaaccctgtctctacaaaaaattacaaaaattagctggatgtgctgatgcgtgcctgtagtcacagctcctcaggaggctgaggtgggaggattgcttgaacccaggaggtcgaggctgcagtgagccctgataatgccactgcattcctgcctgggtgacagagcaagagcctgtctcaaaaaaataataatgattattatgtggattcaaagagactcagatgctccttctacgagcgggggcaaatccttgggcatccgaggtcctgaccgtggattaccccagctggtctccagaggacttctgagtatcaccatgggtggggacaagagggtagtgggttggggttgaagtcgactttagcaaatagctcattgttctctttcacccttctgtgaaagaggatcagaagttcagggcatggctctaaggaagttcctggcagctstgtttagagtagcaagattttggaaatgaccca

SEQ ID NO: 245765 - DNA, 530 bp, Homo sapiens
acaaatgacttctaagagaaagaactgtattcctctctcatgtaaatatctaaagtaatggctcaaggctgatatggtgaatctatccacattcccaccagtaagaaagttgaaaggagaaaggtctaagwccttttaaggatacttcctgaacactgcacacacagtctttacagcccactggccagaactgagtaacataactaaccccagttacaaggaggactgggaaatgtaatctttattctgaaaagccacatgcccagccaaaagtctaaggctacatcactgtggaagatacagtgaggaaactaggtgtttcttccataatccacctcttttttttcttgagataaggtctcgctctgtcacccagggtggagtgcagttgcatcatcattgctcacttcagcctcaacctctcagactcaaacaatcctcccacctcagactcccaagtagctggaactacaggttaacatcactatgctcggctactttttagttttttgtagagaggggatctcact

SEQ ID NO: 245766 - DNA, 638 bp, Homo sapiens
ggaggtggaaagatttgcaagattggctctaattttaagacaaaagccatcccattaaatcttaacagatgtttcccaagtttagaagattaaggaagatttcagcatcaaaaatcaaagaaaatactccatgaccttaaaaaaggataaaacacaaagctctaacaaacccaaagtccactttgacagctgtctctgacggaattgacgaggtgctattgatgtttggattaaaccatgcctctgtgatcaagtactcaaacrtgggataaaagacgaatatattctttaatcctacccactaattttgtctgggccctgaaaagcaatgagtactgaacaaatgttgaaagtggtttcgcttctgtttattgacaaagctatttttatttcattaatttgccacgtatcttatcagcatttaaactaacacgaggaaatccatatgaggtactgaactctccacaaacagatagctgcaacttctaaagccactaaaggtaaaatcaatagacaatgattctagaaagtgaggaagttgttacaggaaaatgtaatagaaaaattgtgttctgatttatttttcatttgtcttttaaaaaaacaaccaaactataaaatagcattgggaattctac

SEQ ID NO: 245767 - DNA, 550 bp, Homo sapiens
cattgtgttttgattaattttgctttgtagtatattctagatctgattgggtcgtattgattttctgtactgagtttctgtttcataatatatttccttgcctatgtatttttacaaagtaattatgctatttaaaaaatcttgttgaacatttatattaaacaaaatatcaaaactgtttgttttcagctaggttaaaataaaatgagtaaccttgactccttgcagagcaatagagataatggtacttggaaaagtagtagaacatgaggaataagctttataggaaaccaagaagatagcaagagaatagcacctatataaaaattaagacagatctctgcattcccagtaagcagagcaattcaggcttattacagatttgtcttttccttaattttgagtgaaaaggacaatcagaataaaggacacagtagatagtaatcacttagtgctatagcgayaacacaatcttatcagtttggttttttttttctgagatggagtttcactcttgttgcccaggctggagtgcaatggcacaaagtca

SEQ ID NO: 245768 - DNA, 596 bp, Homo sapiens
taacattttcgctcttctgatgcctgaggagtgttgtatgttggtagtcaacattttaaaaaaatttttaaattaatattaatgttctttagaaaataccgtaaagtataaagaacaagaaaaccatccattatcccaacacgcagagataaccactgcagacatttcatatgcatatctttccagccttctttgaaaatatatttctgaaaagagatcctaagggttccatctctaccaggaactcggctctcataaactgcattaatacgttgaacttcactttgaacccaaatatgaatattttcactaaactatgcaccgattttttttaaataaagtgaataagtacatggaccggaactgccaactggaaactaaatgagtgtcagcagtgacacccgggacatgccctcattagtagatgctaacccgcagaggtaacctgcctagacacggagagacatttccaagttcaggttgattaattcatattcaattcattcaccctgctgagccctgcaggaagacagcgcggcagcgwtctccaccttgagggggcgctaattattttttgcctacttgaaccctgagct

SEQ ID NO: 245769 - DNA, 601 bp, Homo sapiens
ttgcaaaaggtatttgtgcaatcgcccatgaaatgggttaatgcacatttatgttaaacccatttaaatgtaaaacatctatctgttttcaattttagtttccacctcgaccaaaggcaccagactgaaataagacttaaaagaggcttccttgtttaaatagaggtttatagaactctagtcctgagagcacacagtaagctttctgagcttgtaggcacacaaagcttgttaaaaattgtgaaatggttccttgagttagaaataatggaaatgcttccagaccaattaagacagacaattgatgaagctacactctcaagctgttgacagtctttgtaaggtgaatgtttatagtacataatgcataratcgggctgattctaggcaaataatatcaagtaaaaaaccataccatgtgttgtatcatactggatagtttatatggcatattgaaatctactattaaagtgtctgaggaaatcatatctttatcatccccatttcacagatgaaacaactgaggctttcaaagattgacttttccaagatcaatagcagagttcagtcaagtgtttttcaaattctttcctacctcacc

SEQ ID NO: 245770 - DNA, 556 bp, Homo sapiens
taaattacagaaaaggaccagaagccaggtcctttaattccttcatgtctctcagacatgtagatggcatttcttcctgttttttctttttcttagagttaactccatgaaaggttctaatcagcatatctaaaacatagcccttcatgaacttcttcctctttctctactttttgtatccctctattactagaaagggatcccaatccagaccccaagagagggttcctggacctcgtgcaggaaagaatttgtggtaagttcatattgtaaagtgaaagtaagtttattaaggaagaaaataaacaaaagaatggctgttccataggcagagcagcggcatgggctgctcacctgagtatacttacagttacttcttgattatatgctaaacaagaggtggattattcatgagttttctgggaaagaggtaggcaattcctggaactgagagttcctgcccattttagaccatataaagtaacttcctgaygttgctatggcatttgtaaactgtcatggtgctgttggaagtgtcttttagcatgctaataca

SEQ ID NO: 245771 - DNA, 540 bp, Homo sapiens
agaataaagagccccaggtagcttctgtttgtttttacaagagaaccagagctaggtgatttgggagaatgccagatattataaacacagagccagagaaaaagaacaaggatggcaagaagagtccagggactgggggaggtgcacttgcagggggtggaggttggcccagaggaaggttttcattcatttctgtgtgtagaatttttaagattaacttgctaatttttttattgaagtcaagcaagattttaartcatttatcagggctcatagagtacctatttatagaagtcagaataaaagtaaatgaaccatgaatgctaacacacatctagcaaatttagtaagatttaaaagttaaataaaccaatggagcctgcagattttctccagggcccctttacaagttttaactttgtttccattcccccccacttcattttacacactgtcatgtgtgattcttttagccttagcttttagaatacgaaaatgatttacaagcctgtttttagaggctatttcatttttagttaa

SEQ ID NO: 245772 - DNA, 561 bp, Homo sapiens
gggatgaagaatctcagagatgatgaagaggactgaattctccatgtaggattttatacaaaagagagtgggaggctaaaaccacagagaaagcaaaggagtttgttcagggtctaaatttgctaaaaagagagagaagctccatrcaggtagatcaacagatttgttgactttgtcaatgtttcccacatgaagaatggcaaggaaaatggaggggctggataaaggacttaaactgtgaagaaactagcatcaggtcagtacataatatctgcccggacttggggccagagtacaaatggaggaccatatgccttatgagtaaatattcaaaggatctaaatccaattgccaatctgttaaataaatatatctcattctcaaaccttgatatatgttcatttataacaacaaattagaaaaatttaaagctaaatttttataacattgaaatttggcaaaatataaaagaatcattcattcaattatattgcacatatctgagtattctattgatggaccagtgctgttggataagtaataaccttaagacaaataatt

SEQ ID NO: 245773 - DNA, 560 bp, Homo sapiens
cccccttttttttttttgtcatggaaatataaacttaggaattaagactgggttgtttgcctgacagagttagaatcagagaaagcataataacacatgaagagtttygtaatgctttaaaagtctatatggagttgctgttccccagaaccttccaagtgacttaatctcttaacttccaagtcacctagaaacttttacctcagacagtttttaaaattgtgctttctcatctcttcattgaaagatacaagaataataaacataatttctttaatccaacttggcctaggagtaagataatcttcaattaatcatccaaactggaacaccaatttgagtaaaagaggccattattaataattgccacaggtgtaaaatgcatctatccaatgggtgttgttaccaacctaggagcaatttccctagacatgaagtgactggaaatgactacaggaattgaaaaatcttaaaattcaaaatactttgaaaagcaacattgctgtgttctctggaggcctgtgagagtacattaaatagctatggaattttatttcagg

SEQ ID NO: 245774 - DNA, 570 bp, Homo sapiens
ttgtggaaaacaaaactctcaagttctacagcagcggctgttaatcagttactcctaacgatctgctgcccagattgggtgcttactcggccacaaacagcaaacaggacaatgggagaaagtgggatttgcacacgataacggctttcagaggtggctaggacttggccagaaacctttcagtttactgcayagtctctattggagcttgggaaaatattttctgtgaacctagttggcagcttaggtttccttctcccctgttcccatgtggaactgaagtccatttactaaggtgagtatggtggcagtattaggcactgtgggtagggttagtggcagacacagaatttaacatgggggaataacttacctatggaagtggcagacccaccacatgcacctggaattgcagacctgaaaactgggcaagctgaagttcacctcagtctttttggtgtctcctgcccttctggtaggtcttctttccatccagaggccaggcccgccagttgctgttgggcacacagaacagtccaggccagtccttcaggctcctgcctgtttctg

SEQ ID NO: 245775 - DNA, 614 bp, Homo sapiens
tggggcggcaatatttacactgtaattaaaaaatcataaagcaagcaccctttcaggttgtggaaaacaaaactctcaagttctacagcagcggctgttaatcagttactcctaacgatctgctgcccagattgggtgcttactcggccacaaacagcaaacaggacaatgggagaaagtgggatttgcacacgataacggctttcagaggtggctaggacttggccagaaacctttcagtttactgcatagtctctrttggagcttgggaaaatattttctgtgaacctagttggcagcttaggtttccttctcccctgttcccatgtggaactgaagtccatttactaaggtgagtatggtggcagtattaggcactgtgggtagggttagtggcagacacagaatttaacatgggggaataacttacctatggaagtggcagacccaccacatgcacctggaattgcagacctgaaaactgggcaagctgaagttcacctcagtctttttggtgtctcctgcccttctggtaggtcttctttccatccagaggccaggcccgccagttgctgttgggcacacagaacagtccaggccagtccttcaggctc

SEQ ID NO: 245776 - DNA, 621 bp, Homo sapiens
ttctgcccagtattcccctgcagcgttccttctcatttttcagatcactgccttagaatggtctgctctaaattggagaagccatccctgtkttttatcctttctaaatttgtttttcattgatacataatatttgtacaattcatggggtacatgtgatattttgttacacgcatagaatgtgtgatgatcaagtcaggatatttacgatatccattacctcgagtgtttatcgtttctatgtgttgggataatttcaagtcctgtcattgtcttccacagcactttccacaatcagtgatgagatactcatgctttcactttcttctttttcctcaccgtgttgctcaaccatggcatggctctttcacacacccctgaatatacaaggccttgcacagtgtctggcatatagaagcttaatttacacttgttgaatgaatgaatgaatgaataccaatcaattgtgcttcccaatttggctttccaagtttgacaactgggatgaaatatccagaaagaatttgtccttattttctttctctgtcactacctaatgtggtttatacaatatataattttgtttccttccttctctaaccctcaaagtggaaattccca

SEQ ID NO: 245777 - DNA, 621 bp, Homo sapiens
ttctgcccagtattcccctgcagcgttccttctcatttttcagatcactgccttagaatggtctgctctaaattggagaagccatccctgttttttatcctttctaaatttgtttttcattgatacataatatttgtacaattcatggggtacatgtgatattttgttacacgcatagaatgtgtratgatcaagtcaggatatttacgatatccattacctcgagtgtttatcgtttctatgtgttgggataatttcaagtcctgtcattgtcttccacagcactttccacaatcagtgatgagatactcatgctttcactttcttctttttcctcaccgtgttgctcaaccatggcatggctctttcacacacccctgaatatacaaggccttgcacagtgtctggcatatagaagcttaatttacacttgttgaatgaatgaatgaatgaataccaatcaattgtgcttcccaatttggctttccaagtttgacaactgggatgaaatatccagaaagaatttgtccttattttctttctctgtcactacctaatgtggtttatacaatatataattttgtttccttccttctctaaccctcaaagtggaaattccca

SEQ ID NO: 245778 - DNA, 621 bp, Homo sapiens
ttctgcccagtattcccctgcagcgttccttctcatttttcagatcactgccttagaatggtctgctctaaattggagaagccatccctgttttttatcctttctaaatttgtttttcattgatacataatatttgtacaattcatggggtacatgtgatattttgttacacgcatagaatgtgtgatgatcaagtcaggatatttacgatatccattacctcgagtgtttatcgtttctatgtgttgggataatttcaagtcctgtcattgtcttccacagcactttccacaatcagtgatgagatactcatgctttcactttcttctttttcctcaccgtgttgctcamccatggcatggctctttcacacacccctgaatatacaaggccttgcacagtgtctggcatatagaagcttaatttacacttgttgaatgaatgaatgaatgaataccaatcaattgtgcttcccaatttggctttccaagtttgacaactgggatgaaatatccagaaagaatttgtccttattttctttctctgtcactacctaatgtggtttatacaatatataattttgtttccttccttctctaaccctcaaagtggaaattccca

SEQ ID NO: 245779 - DNA, 568 bp, Homo sapiens
aataatacaagcttattaatttaaagtttaaaaatgttttcaaatacactatcttatactgggcaggacttaataaagttccaaatctgataaagtatatattacatggactaaccatataaaaacaatatattttgtgccaatacttaaggcacatatcagtaattttcagttttcacagggcatcaaaatcactgaggaaaacctgctaaaagtatagtaggagcttgattcaggaggtcttaggggagagcagaaatttgcttacctgtttttcaaaaagtgtgcatatgattctgatgcagatgtttcrtagaccgtgtattgagggacacaaccataataatctaaattattagccaggaactggtgagtccagtgttggcttaaagcactggttctcaaagtgtggtctctgaatcagtagtgcaagtatccactgggaacttataagaagtattcaaattctttttttccttcttttctttttctttttccttttttttttttttttttttttgatacagggtctcagtatgttgtccaggctgttcctgaactcctgggc

SEQ ID NO: 245780 - DNA, 571 bp, Homo sapiens
tgactatttgtcagtgacaaataatgtcattgatttctgatagaacccagatcctggagaaataggtacagagctaagttgtccctgctaaatcctctagtgaaataatagccatggaagtgttggagatctcaagggtataagattaggttggaggacgtttgggaccttcaagggttagggtgtcccagccatagctggagattggacttactcctgagaagaytgttagttggtgaagagaaacagtagtcctgatggacttgaaagttccctgcatagatttaatgatagtgagggatttccattccaggtctctggactccttgcctgcatctggagactttatagctaaaagtcctcaatattttcccttcaggacttcaaactcaactctttttttcacccattcaatccaagattctctgaactatagaagacggcaagtccaaaactgtcaaataaattagggtgtcacaaaacaggactgatctttccaattagagatcctcctttattctatttattagccaaaggaaggcatcaggaaatttcgtaacccaaatgacaa

SEQ ID NO: 245781 - DNA, 573 bp, Homo sapiens
tggctgctgggaaccccctagaaattcaggactgctgtttttccccaaagtgatgctgctggtactctgctagcctcaaagcgagtgtgacctgtggaagccacaatttccttccctgtcttatcttaatagcaggaacattccatctattaactccctaagatgtcagtaacacaccctattatagaaaataaattttcaataacaaagggagcttatttcacagcatgaaggataacagcagatattactattcctgaagttaattctctgttttctcattactggccatttctcctaggaatcagctgtctgacacactgcaatgttgctgcggctgctcacctttatttccgactcttctcatttctccaggaccacagaaccccgcctcttttctcttatgctttacagaaaaacattccccagttcctatttatttgctatgcagagtytttcataaccaaaacaaccattaacatgctttcctaaataaaagagcagtctctgctcaaaatctcacctttggtaacacaaagaatcaaaacaagctttggaattacattaagggat

SEQ ID NO: 245782 - DNA, 493 bp, Homo sapiens
atagtgattcctcaaagagctaaaagcagaagtaccatttgacccagcaatctcattactgggtatatacccacctgaatacaaattattctaccataatgacacatgcacatgcagcactattcacaacaggaaagacatagaatcaacctaaatgcccatcaatgacagattggataaagaaaatgtggtacatatacaccatggaatactatgcagccataaaaaaaccamgatcatatcttttgcaggaacatggaaggagctaaaggctattatccttagcaaactaacacaggaacagaaaatcaaatactgcatgtttttacttgtaagtgggagctaaatggtaataatttatgaacacgaagggaaaacagacactggggtctaatgatgagggagggtgggaggagggagagaagcagaaaagataactattggacactgggtgtaatacctggatgattaaataatatatacaacaaaccac

SEQ ID NO: 245783 - DNA, 592 bp, Homo sapiens
gatgttgaaccataactaaggggagctagaaaatgtacaatttgctctaatggcttccactatgatcttgtgaggtttttattattattactatttttagtaatcatctcggcaatataatcagagcaaaaaagattctaaaggcacaaatcaaagaggaatcttagtttccagtaggaatagcttctcagtcagtcgcctttcttcaatcttctggtttcatgaaagaggtgatgtcataatttatgatgttaagctgactagtgaaatgtcattgtagaagtgatgttttaattgatgatgttaggctggttagcaagaaagtatcaaatgtcacttttctgacataaactggcagttacrattatataatatcaattattctttggaaaactgcattagatcagttagagctgaaccaatttagtttaagcaggttcatattttttttttcttagctgctcatccagtcctaattattaggtgtaaaatacactttggacatagtttagactttgataatgtcctctttggaaaggtaataggtgtcttacatggcctttgtgttccaaaagaggtacaagcaaagtct

SEQ ID NO: 245784 - DNA, 616 bp, Homo sapiens
tgccaatacaggagtgatatcagcctccttgaacatatctagtgcaacctgacaatctggtacagatttaaaaacaggccatcgctctagaggagagtccaggaggtgccatgttgagcttggcattaactgtccaatttctggattttgggctggtccagcagggtagacttatgggagaggggtcagarggactaaggcaggaggtaggctctgagggggtggtgtatacttaccacatggcacagctgtatttcaaaaactgaatagcagatacggtcctaccattcaaagctgaggacataaactcatagattattggccttctcttgtccctcccatatctcctatttccagttctatccacacttactccaaagtgagctgccttctttccactgctatagaagggatttcctccaaaacattgagctcatagctttttttcaaacacttcaattctagaggactgctttccttcttacaggtattatgcctttttgtgggtgtgtgtgtgtgtgaaaactagaaaaaattcaaacctggggctgaatgagtccattggaatcacagaggaatgtgaagttttaagacaatatcagacattctagaactt

SEQ ID NO: 245785 - DNA, 616 bp, Homo sapiens
tgccaatacaggagtgatatcagcctccttgaacatatctagtgcaacctgacaatctggtacagatttaaaaacaggccatcgctctagaggagagtccaggaggtgccatgttgagcttggcattaactgtccaatttctggattttgggctggtccagcagggtagacttatgggagaggggtcagaaggactaaggcaggaggtaggctctgagggggtggtgtatacttaccacatggcacagctgtatttcaaaaactgaatagcagatacggtcctaccattcaaagctgaggacataaactcatagattattggccttctcttgtccctcccatatctcctatttccagttctatccacacttactccaaagtgagctgccttctttccactgctatagaagggatttcctccaaaacattgagctcatagctttttttcaaacacttcaattctagaggactgctttccttcttacaggtattatgcctktttgtgggtgtgtgtgtgtgtgaaaactagaaaaaattcaaacctggggctgaatgagtccattggaatcacagaggaatgtgaagttttaagacaatatcagacattctagaactt

SEQ ID NO: 245786 - DNA, 534 bp, Homo sapiens
ataatgagccaggcaaaaggcatgtgttagagtgtacatgcttgtcaacatttaaaaatattgcagtcttgacagagagctgcctctcagagtgaagaaaagagtgatacttatccctctagccttcaaactcttatctgttgscatgccacaaatattactcatggaggaaattcagataattcacaccaagaaataaacctgttataggttcaaatgtttataaaactagcatattggacttatctggctaccttagagcagatatttttttctaatttttcaataaatatgaaagattaaattcaagcaccaagtgaattttatggttaagtcacaatttataagtgggcattaattaacatcagataaaaatgagattcctaaggaattacattttgccttctcattagtggctgttttgtcactataaaccttgctagaatgaataattgagaaattataataaataactatattataggaaggtcctgggataatgaaaactacagtgtttggcacaagttttagtca

SEQ ID NO: 245787 - DNA, 563 bp, Homo sapiens
tagttttaaataaacttgctagtggacttgaatcaaatgcataccacatcaaccgaaaagtgaaatatttcctagtttgctttttcccccatattttgagatttagggatttactgttatgatatcaaaatgtatctccttgatagaagaaaacaatatacaaaaatggctattttgctccttaaaaattccacccaactccatctccccaaggtrtaccttgtttttattaattccacctttttaaaaggcaatacaatttataaaataaatacttttattgtacctttaaaatttttagttcttgtcctaaataaagtgtttagaggtatcttttgatactgcaagtactactgttaccttgatctagtcactaagtattaataagtgcagcaccagaccaagggccacatcatcagctttccaggctgactcctgtacctcaaataaggaggccaagaatgcaaaaggaataaaaaaattctgacatgctgcagcatttatttgccctataacctactgacctagacaggttttctggggtaggaaagcataagccaaat

SEQ ID NO: 245788 - DNA, 567 bp, Homo sapiens
tggtagttcctaggcataggatggtaataggatcctttgaaaatttaaaacgaaagcatgtggaaaattacacatttacagtggcaactattcaatgtgatgtggaaagtcagttgtaatatataatgataactgaagaatgcggcatgtgaacttattttttctctagctctatgagcagttcccaaattgattagaagtagtagttataaatttagattcctgctgtggaaaataacagtaaagccatgttcatttttaacgtttttcaaaggtccttagaaatgccatttttcataccataaatctgtggtagttgaatgttgggttgctttctcaaaggaatgttgaragtacggttgcagtttgctgtggtcaagcttggtggaaagagtcactaatggggacccaaaaggattcttagagtatctgaccaatgttgtttttgacgaaatcatattgctacaactgagaaagattagagaaaaaaaaacagttatctgagactaaaatgattcttaccaattatatttggcaggttttcacccgttaatattttgttcctgg

SEQ ID NO: 245789 - DNA, 633 bp, Homo sapiens
gacagatttatcttctgagaaagctgggcagagcagtggattaaagtcatatgtgatctactttgagtggactcaattcagacacagygttcagttatgaccaacaacgccattcattctgcttacttcaattcatttggccctagttctcaatgaccctctgttaccatgcatacacctccgataagtaggccttgatgtttacagcactttggagaagaataaatgcaaactgcacattatttatgggtgtgcactcttagcttaagagggatttgtcagcagtgtgaatacaggtagaataagtagatgtgtgttagggcagatagcctggtttccagaaactaagtagaaagaaaggagctaaataaaatatcaccccaagacaacagctttcaattattgcccatgatcctgaattcctcccaatgaattgaaaggaaatctataccagatggcattttcctgaatcagccaagttcaccagtcattcccgcctcttagtgatgggcagcagtgccaaggaagagccggcctttcattttctgcctctgctcaccagtcacagaaagcaactttgctttctagggatgagtttcctaattgcactgaaatgtaattagaacagttaga

SEQ ID NO: 245790 - DNA, 586 bp, Homo sapiens
tgagaataaacacttattgctgctctcatgaattagactgatttcaaacaaaaacctgttagaagatgtaatgaaagaaaatgtcccatttataagagtaatgaataagataaaataccaaggaataaacagaacaataaatgattcactcccacataaagaaacattttaaatattactaacagcctcataaaagacttaaacaaacaaaaaggcatggcatgttcttggatagaaagattccaggccataaagatgtaaaatttctttaagttaatttctaaatttaatgtgatcccaatcaaactgacattttataagtttataagaaaaaagaataaacaaaaataacaatgaaaactgtgagaacaaagaagygtgaggacagattagcccttccagatgttaaaacatattataaagactcaaatatcaaaatagtgtggtgctggggtataaacagaaaaataaacgagctaaatggaaagtccagtaaacagtgcaaacatgtacggaatttaataaatggttaaagtgacatctttaatcaatgaggaaaaggagatcgatacaatagatgatgtta

SEQ ID NO: 245791 - DNA, 586 bp, Homo sapiens
tgagaataaacacttattgctgctctcatgaattagactgatttcaaacaaaaacctgttagaagatgtaatgaaagaaaatgtcccatttataagagtaatgaataagataaaataccaaggaataaacagaacaataaatgattcactcccacataaagaaacattttaaatattactaacagcctcataaaagacttaaacaaacaaaaaggcatggcatgttcttggatagaaagattccaggccataaagatgtaaaatttctttaagttaatttctaaatttaatgtgatcccaatcaaactgacattttataagtttataagaaaaaagaataaacaaaaataacaatgaaaactgtgagaacaaagaagtgtgaggacagattagcccttccagatgttaaaacatattataaagactcaaatatcaaaatagtgtggtgctggggtataaayagaaaaataaacgagctaaatggaaagtccagtaaacagtgcaaacatgtacggaatttaataaatggttaaagtgacatctttaatcaatgaggaaaaggagatcgatacaatagatgatgtta

SEQ ID NO: 245792 - DNA, 527 bp, Homo sapiens
acactggataagttccactgaattatacattttaaaatagtatgaaatatctactgtgaaggatcattgaaagattcagttggccatgtatgtagaacactgagtaagtgctttgtaaatagtaaatatatcattttatataaagaaaaatattgcattgcttatttcagttaacataatcactgagatgttaatgtacaaaartgtaatcataattattagaatagtataaaataaaatagtaaattttatgttacacaagtttcatgtcaataaaaagttttagccaaacaaatcagcataaagtatgaacttcagttaataataataataataataatgggccatactaacataagatgttaataatagggaaatcaagtgtggggtatatgggaattcattcacagaattttttggaaaagtaaaactatactaaattaaatttttttaaaagacaaaaaatttttaaaaacaaaattgaaaaacaaatgacaaagttggaaaaatctgcaactcatgacaaa

SEQ ID NO: 245793 - DNA, 591 bp, Homo sapiens
aacagacatgcattgagcatgtagcaaagtgttgaagagggtgtgttgttgaagcagatcatttactttcaaatctcagctccgtaattctagctgtgtgccttagatgcatggcttacctaactttttctcacytgaaaatgggaatagtaacagtttcaatctcataggacggttacgaagattaaataattttttgagaggtggtgcaagtactgacacatagtaagtgttaatgttttctttattatcattgttatcatcatcatcatcatcataccaatcacatgccagtcccatagctagtgctaaatatttattgaattccttgtacaattgaattccttgtacaaactaggcattgttctaggtgttggggatgtaacagtgaaaagatagactaagcctctgccatcattatgtcatattagtcattggtttattcaacaaatattcactgagggcctttgatgtaccaggcacttctaggtactatgacagctgtttattaagactgaaaaatccctgctctcataaacttatgtttagtcatttaggtgtggtcttttcatctaaactatgtgtttcttg

SEQ ID NO: 245794 - DNA, 589 bp, Homo sapiens
acaacagctttacgctgagctttggtagcatgcctgtgggtgtgttaatgaagttatttttaagagttgcactacaaggtctgtatatttactttcaccttggtcttacactgtctcaacttttcactgcaggcattgattagtcttaacttttgcagaaggtccatcagctgatagcacaatatgccagttctgttgtcttctctcttctattctctcctgctacctctcatgcgatgaatgctcaactgttgacagattacattccaagactggttaaaacccaggccatttggacaatgaatagtaatgaatgtggactgctcagcccacacaggtgacattacaccttacactgggggaatgtgccatcttccttgttgtaccctgtaaatctgatagatgctattaaccttttcagtgaatccccatggatcactgcaatggcaaatctcagtagtaattgctaagacaaaaatgccccarcatgcctatattctctgtaaggatctatgaaacaggcaagttggctactcaagtgccttttccccaactgctgtcttgatttactttcagctgtcagtctgca

SEQ ID NO: 245795 - DNA, 498 bp, Homo sapiens
tttaagtaggtaacactctctcagtttagtctgctataagtcttactgtcttgccacatggaaagtgcttggggtgggaggtagtgacacctcacaggtgctggctaaaatactatttccggagcaaacagaatcaaggcatcagctgggaccaaggcactaattgcacatctgaagttaaactcggaggcatttttttcaggtttcttcccttcartgcagttttcctttagtactgatgcaatgccatggttcaacaaatagtgcatggtagaaagaacactgagagtctagaaactagggaagtaggttctgccacactctagtagtgtgttctcatagatgttcattaactaccatgatccttggtttctctaatctgcaaaatttaaggattgggtaaggtaatttctaaaatctctacaagacatgtctcttttttgttgcctacttttagagaggagtgcctgccagcctctggtggctgtatagtacttt

SEQ ID NO: 245796 - DNA, 562 bp, Homo sapiens
gacaactaaacattttttagattttattaaatgttttcaaccatgtaataggatacatataaaattacatgtagattacyatatgtaacaaggctctttttttctggttgattgtaactttaaatgaaaataaataaggtcctctgtcactgatttgctatacattactttctctttaatataaaaacatgtattatataatatgtaatatacatataatttacaacaaaagccaaggtggacatttttcgttttgacaatatgaaaatttaaatatatgttgtctagggtagaatttttcccagtcaatatttagaataaacaaaaacagtatgaatttgaatagaagaatcccaccagaatagtacctactaatttgtcagtaatccccacaaatgtgtttatgatcaactttcaagctgtaatttttcatagaataaatagagatttttttttcagaaagtaggagatgactacaggaagggctttaatagattatcagaatcagagccttgaacagagaagatatttaaaatttagctactaaattgatattgtactg

SEQ ID NO: 245797 - DNA, 619 bp, Homo sapiens
cttttaattaattttaaaaactacctaaagtactgatacttgtttagaaagatcactgactccagggaaaaagcagactaatttagaacacagataaagktgtttcttttaacagtccttgtggcaatgggaacagcacagtttatgatagttccaaattttcatgcactattcaatgtctatttaaaacaggtatttgggtcaggtgtcgtggctcacacctgtaatcccaacactttgggaggtcgaggccagaggatagcttgaggatgggaggtcgacaccagcctggggaacacagcaaaactctgcctctataaaaaattaattagccaggcatggtggtgtatgcctgtagtctcagctactcaagaggctgaggtaggaggatggcttgagcccaggagcttgaggttacaatgagctatgattgtgccactgtactccagcctgggcaagagagtgggactctgtctctaaaaaaaaagacaataataatacaataccagacatttgatgagcacctactacatgtcacatataactatgctaaactctggggacacaaagatgaagatactctactttgagaagttcagaatcttataggtgaaacggg

SEQ ID NO: 245798 - DNA, 619 bp, Homo sapiens
cttttaattaattttaaaaactacctaaagtactgatacttgtttagaaagatcactgactccagggaaaaagcagactaatttagaacacagataaaggtgtttcttttaacagtccttgtggcaatgggaacagcacagtttatgatagttccaaattttcatgcactattcaatgtctatttaaaacaggtatttgggtcaggtgtcstggctcacacctgtaatcccaacactttgggaggtcgaggccagaggatagcttgaggatgggaggtcgacaccagcctggggaacacagcaaaactctgcctctataaaaaattaattagccaggcatggtggtgtatgcctgtagtctcagctactcaagaggctgaggtaggaggatggcttgagcccaggagcttgaggttacaatgagctatgattgtgccactgtactccagcctgggcaagagagtgggactctgtctctaaaaaaaaagacaataataatacaataccagacatttgatgagcacctactacatgtcacatataactatgctaaactctggggacacaaagatgaagatactctactttgagaagttcagaatcttataggtgaaacggg

SEQ ID NO: 245799 - DNA, 596 bp, Homo sapiens
atttgggtcttctctcttttttccttatcagtataattagaggtttcataattgtatttgttttctcaaaccaacttttggtttcatcgatctgctgtattgttttctgttttctgtcactgatatctactctgactttattattattattattattttgagacagggtctcactgtgtcacccaggctggagtgcagtggcacaatcatagctcattgcaactttgagctcctgggcgcaagtgctcttcctgtctcagcctcctgaatagctaggatgatgggcatgcaccaccaygtctggcttactttgatttttgatatttcctttcttttacttactttaggtttcatttggccttccttttcaagtttcttcttaagatgagagctctcatgtcaatgattgaaggctttttttttttcaaatatgaatgttcagcgctatgaatttcttcctaagttcaactttagttgcattccgcaaattttgaatattgtgtcttgcatgttcatttagttctaaatacttcctaagttcccttttcttttttttcactgttataataactttaatttatcttgcattttacaga

SEQ ID NO: 245800 - DNA, 596 bp, Homo sapiens
atttgggtcttctctcttttttccttatcagtataattagaggtttcataattgtatttgttttctcaaaccaacttttggtttcatcgatctgctgtattgttttctgttttctgtcactgatatctactctgactttattattattattattattttgagacagggtctcactgtgtcacccaggctggagtgcagtggcacaatcatagctcattgcaactttgagctcctgggcgcaagtgctcttcctgtctcagcctcctgaatagctaggatgatgggcatgcaccaccatgtctggcttactttgatttttgatatttcctttcttttacttactttaggtttcatttggccttccttttcaagtttcttcttaagatgagagctctcatgtcaatgattgaaggctttttttttttcaaatatgaatgttcagcgctatgaatttcttcctaagttcaactttagttgcattccgcaaattttgaatattgtgtcttkcatgttcatttagttctaaatacttcctaagttcccttttcttttttttcactgttataataactttaatttatcttgcattttacaga

SEQ ID NO: 245801 - DNA, 266 bp, Homo sapiens
ctgtttcaatgctaatgctggtcagttgtgcctgaatttcaagggaggagggcacagtgaggcatgtctaaccctccctttccrtcatggcttgaactagtttttcaggtttactttggaatgcccttggccaagaggaggagtccattcagttggctggggggcttagaattttatttttggtttacagtggaagatggatcctttgcaatgtgaattggccactcccccttcaagttctggagtctactccagaactagattcc

SEQ ID NO: 245802 - DNA, 582 bp, Homo sapiens
gtctgtctttcaaataaaagtccagctggtaggcagcccaggaaaggtgggctgctctgcttcttgtgatggtctgaggacccttatgccttctgttttgttgctttgccatcctctcgggtgttgtcctatccacatgattgagttaaatgcccaacattatgtccgcattccagcctcaagaaagaggaaagaagaaagggagagcatgcaactttcttttaaggatgtgacctagaagtgacatacatcacttaggctcacatgccattggtgggaacttagtcatatggccacamctagttgcaagtgaggctgggatatgtcatctctagatggacaatcatgtacctcccaaaaacttggggattactattaccaaaaggaagaaagaaaatatgaatgggtgggattggcagtctctcatcagtaggaaagcatcatgactgatgctgagaaactctttgcccaagtctttatggcctatatatgtaactccatattactgacagtgtgcatcacagggtgtggtaggtggcttctaaaatggcctcaaatgattcctgtctcctggtactcatg

SEQ ID NO: 245803 - DNA, 543 bp, Homo sapiens
ttggtgaactctgaaatcattttggttataaacctcaatgactctgattctgaactgtcacagaaagatatgagcccagaataaaatatctagaacatatatatttaactcaatttttgtgacttcagttcagaatttaattaattttagttgggaatttagcaaacccamgtgatcatttagtgtctttattcttatattttgacagggaaagggtcatgacatctactacagcatttggcacagacccaggtaaataagataaaacttctaagtcacttctcctcttcgagatcatggaatatattgtgtcagacctcagcaatcagctgtggactttttaaaaaggaaaatcagatatggatttattacctgagcatttgccgttgtcaaaatgtgtagatgttaccccattcactaggttttctcttgtaaggaagcatttctctaatggtgatcttccaaccacctgtcttagagtcactggggtgatgtttataatgaaactagcttcctcaccactagaccaaacgaattagcagt

SEQ ID NO: 245804 - DNA, 543 bp, Homo sapiens
ttggtgaactctgaaatcattttggttataaacctcaatgactctgattctgaactgtcacagaaagatatgagcccagaataaaatatctagaacatatatatttaactcaatttttgtgacttcagttcagaatttaattaattttagttgggaatttagcaaacccacgtgatcatttagtgtctttattcttatattttgacagggaaaggrtcatgacatctactacagcatttggcacagacccaggtaaataagataaaacttctaagtcacttctcctcttcgagatcatggaatatattgtgtcagacctcagcaatcagctgtggactttttaaaaaggaaaatcagatatggatttattacctgagcatttgccgttgtcaaaatgtgtagatgttaccccattcactaggttttctcttgtaaggaagcatttctctaatggtgatcttccaaccacctgtcttagagtcactggggtgatgtttataatgaaactagcttcctcaccactagaccaaacgaattagcagt

SEQ ID NO: 245805 - DNA, 514 bp, Homo sapiens
aagctgcagttgtgtttggttgggtgctagcacactggccagccgcaaggggagaaaaatcatgactccacctctgagctgaggggagctcctgctgcaggttcctcacccctgctgccaaactcaaaggcttatggggcccagtgagagagtgtgtatgtgtatgtgtgcgtgcatgtgcgcacaggtatgtgtagctagaaagcacctggctccagccagttgttgccaagtggggctttgagctgtgtatggcataaacacctatggccaacagggcacgtgggagctgaagcccagcacaytctctgttcaccaagctatggcatggaattgcatatgcatagacggaggggctctttttcatttgtttgtttgtttttgagacagggtcatactgtattgctgttgtccagactggagtgtagtggcgccatcatagctcattgtaatttcaaactcctgggctcaagcgatcctcctgcctcatcctcctgagtagctaggactgcag

SEQ ID NO: 245806 - DNA, 410 bp, Homo sapiens
gcacattctttacaatgcaatgctgcaggcagtcagagttggcatgagatgagtcaggtttgctcttcctggactagatggtctctaatgtactgttttgtaagactcccaagctgtgcttgtgtgtaacatatcatccagtagcaagacttttccggagacaatttcttgaactttgagattcgatagagtagatatttaggtggttgggttaccctcagatcacacctaacctcctaggagagaggcaggtcttagtagaggagtggcatttcatcaggaggacttcccacctggcacccttctggaagagttcctgcctgttctgctgaggaccccattcccagcccctaaatccctakgccactggccaggggcctccatgcagaggtgagccagtgcctctgatt

SEQ ID NO: 245807 - DNA, 617 bp, Homo sapiens
aataagcaatgccgcaaacattttggatatgttgtgacactgtactgacataagataaaaattcaraatgcttcccctcaaatcggattggcacatttgtaaacaaattacttaggaatatttttcttttacctcagttactgctttggtctatatgtggtttgcccccttcaaaactcatgctgggctgggtgcagtggctcacacctataatctcaggatttggggaagctgaggtggaagaatcacttggggccagaaatttgagaccactgtgggcaacacagcaagatcctgtctctacaaaaattgttttaaaaaatattagctagatgtggtggcacgtgactgtattcctagctactcaggagtctgaggcagaaggatcacttgagcccaggagttcaaagttgcagtgagccatgatcacaccactacactccagcctgggtgatggagcaagaccctgtctcaacaacaacataaaaacaaaacaaaacaaaattcatgctgaaatttgatccccagtatgtcgtggagttgggaggtgggaggtgtttgggtcaggcgggtgagttgaatccctcatgagtagattaatttgggggccgggggtg

SEQ ID NO: 245808 - DNA, 617 bp, Homo sapiens
aataagcaatgccgcaaacattttggatatgttgtgacactgtactgacataagataaaaattcaaratgcttcccctcaaatcggattggcacatttgtaaacaaattacttaggaatatttttcttttacctcagttactgctttggtctatatgtggtttgcccccttcaaaactcatgctgggctgggtgcagtggctcacacctataatctcaggatttggggaagctgaggtggaagaatcacttggggccagaaatttgagaccactgtgggcaacacagcaagatcctgtctctacaaaaattgttttaaaaaatattagctagatgtggtggcacgtgactgtattcctagctactcaggagtctgaggcagaaggatcacttgagcccaggagttcaaagttgcagtgagccatgatcacaccactacactccagcctgggtgatggagcaagaccctgtctcaacaacaacataaaaacaaaacaaaacaaaattcatgctgaaatttgatccccagtatgtcgtggagttgggaggtgggaggtgtttgggtcaggcgggtgagttgaatccctcatgagtagattaatttgggggccgggggtg

SEQ ID NO: 245809 - DNA, 617 bp, Homo sapiens
aataagcaatgccgcaaacattttggatatgttgtgacactgtactgacataagataaaaattcaaaatgcttcccctcaaatcggattggcacatttgtaaacaaattacttaggaatatttttcttttacctcagttactgctttggtctatatgtggtttgcccccttcaaaactcatgctgggctgggtgcagtggctcacacctataatctcaggatttggggaagctgaggtggaagaatcacttggggccagaaatttgagaccactgtgggcaacayagcaagatcctgtctctacaaaaattgttttaaaaaatattagctagatgtggtggcacgtgactgtattcctagctactcaggagtctgaggcagaaggatcacttgagcccaggagttcaaagttgcagtgagccatgatcacaccactacactccagcctgggtgatggagcaagaccctgtctcaacaacaacataaaaacaaaacaaaacaaaattcatgctgaaatttgatccccagtatgtcgtggagttgggaggtgggaggtgtttgggtcaggcgggtgagttgaatccctcatgagtagattaatttgggggccgggggtg

SEQ ID NO: 245810 - DNA, 617 bp, Homo sapiens
aataagcaatgccgcaaacattttggatatgttgtgacactgtactgacataagataaaaattcaaaatgcttcccctcaaatcggattggcacatttgtaaacaaattacttaggaatatttttcttttacctcagttactgctttggtctatatgtggtttgcccccttcaaaactcatgctgggctgggtgcagtggctcacacctataatctcaggatttggggaagctgaggtggaagaatcacttggggccagaaatttgagaccactgtgggcaacacagcaagatcctgtctctacaaaaattrttttaaaaaatattagctagatgtggtggcacgtgactgtattcctagctactcaggagtctgaggcagaaggatcacttgagcccaggagttcaaagttgcagtgagccatgatcacaccactacactccagcctgggtgatggagcaagaccctgtctcaacaacaacataaaaacaaaacaaaacaaaattcatgctgaaatttgatccccagtatgtcgtggagttgggaggtgggaggtgtttgggtcaggcgggtgagttgaatccctcatgagtagattaatttgggggccgggggtg

SEQ ID NO: 245811 - DNA, 508 bp, Homo sapiens
ggagagagaatttagcaaaattttgtgaatagttagtgtgcaaaaaaacagatcgatcttaatttttttaatggaaagaaccaaacaaaaacaaagattactctgtaagatggttagatgaatgaatttatctttgakgagaacaatgtaagcattgaaattctgtcttagcatgactctgaatctccttttctataaatcttgatgtatggaaaaacaccttttctacctaggattagacctatttttatctttgtttttttgaacattagtaatgaggcagatttttatttaaaggctagctattagaatactgttgcctgaatagctgtggtagatatagaatatagtgatatctgaagtttacatacataagcaaacaagtggaagctcagctcacaaagggatatttgatcctccgtgaaaagaaaagctaaaatcgcatgctcagtagtaacctaatgggttcatttggacaaaactctcactctctgacagaaaaagacct

SEQ ID NO: 245812 - DNA, 462 bp, Homo sapiens
ttattgttaccgagcacagacctgttattcarttattaagttgtctgaacattttctgatttgggtctgaataactatggcattcaaataaaaatactttatgcttacttgtcttagtttgagtttcctccaaagtagatcctgattgcctttcaagcacatacctcttcatcccctaccgctcatgataaatatcgcaaatgggttgttggaaagatattacagcgtgatgttatcggcatgctcttaagccaaactactgggtgtgtggtctgatgttgccatttaccagccatgtggcctttgagtagttgcttgtctgtgtcttgacattcttataaaaaaaatgctcacattaattcacctcttagagttgtggcaagtataaagtaaattaaaacaaataccaggtttagaataggacctggtacatgacaagtgtccaataaatattagctcttt

SEQ ID NO: 245813 - DNA, 462 bp, Homo sapiens
ttattgttaccgagcacagacctgttattcaattattaagttgtctgaacattttctgatttgggtctgaataactatggcattcaaataaaaatactttatgcttacttgtcttagtttgagtttcctccaaagtagatcctgattgcctttcaagcacatacctcttcatcccctaccgctcatgataaatatcgcaaatgggttgttggaaagatattacagcgtgatgttatcggcatgctcttragccaaactactgggtgtgtggtctgatgttgccatttaccagccatgtggcctttgagtagttgcttgtctgtgtcttgacattcttataaaaaaaatgctcacattaattcacctcttagagttgtggcaagtataaagtaaattaaaacaaataccaggtttagaataggacctggtacatgacaagtgtccaataaatattagctcttt

SEQ ID NO: 245814 - DNA, 527 bp, Homo sapiens
gtctctttagagaaccctgactaatacaggttttcagacattactctgaagacctgtgtgggagtcatgtttgcatccttcttcagtaatattagaaaaattaaaataacatagaactttttaaaacaccaaattaattcaaggcaaagagatgtgttttgttcctaattatatcctttctacctttttggtatttgttaagcttttattgtatttaatcatggtcacagtagaaggtaattttatcttctttcatctagttttgtggcctatatttggcaaatgaaaatgatgatgactcaatattggctttccataattttgggtggagaaaatatttactgactcatgacatccaaaggtctgggatccctaatttgaccaactgctatgtctcattaggtagcccccaagctgagcaaccacagtgagaaataaaagggacttccctaaccatttattttcttaagaggatagtggmtttgattctgaatggacttttactacatttggcatgctttaaaaaa

SEQ ID NO: 245815 - DNA, 523 bp, Homo sapiens
ggtcagacagcccaagctttgaatcttaactcctacgcttactctctgtttacaaccactgttccctcacttgttaagtggaaatagcaattcatctctttaaacgccattatgagaacaaaataagaaaagatacataaagcatcyggaaccatacttcatactgatagtttcttaataataaccagctattgttattaaaaagccaaataattccactgtacacttcttctgtagattagtgccataaacattttatttgactgacatgcccagcactgaaaaataaattgaataacttctgcttctggctacgagagagtaataggatccaggttcatcctcccaccataaataattacaaaagtagacaaaatatataaacaactgctttcagacattggaccacaggcagtacaggagtgtgatccttaataaagacaaacaacagaggtgagtcctaaaatttctctggcttaatttttttttctgatgcagagaggaggaatccaaacagagcccc

SEQ ID NO: 245816 - DNA, 523 bp, Homo sapiens
ggtcagacagcccaagctttgaatcttaactcctacgcttactctctgtttacaaccactgttccctcacttgttaagtggaaatagcaattcatctctttaaacgccattatgagaacaaaataagaaaagatacataaagcatccggaaccatacttcatactgatagtttcttaataataaccagctattgttattaaaaagccaaataattccactgtacacttcttctgtagattagtgccataaacattttatttgactgacatgcccagcactgaaaaataaattgaataacttctgcttctggctacgagagagtaataggatccaggttcatcctcccaccataaataattacaaaagtagacaaaatatataaacaactgctttcagacattggaccacaggcagtacaggagtgtgatccttaataaagacaaacaacagaggtgagtcctaaaatttctctggcttaatttttttttctgrtgcagagaggaggaatccaaacagagcccc

SEQ ID NO: 245817 - DNA, 448 bp, Homo sapiens
ctcgataaaggaaaagccgaaaaagaaaaacctcaaaaacactcaaccatttaaaatgtctaaagcctatcatccatttaaaaattgatagacatacaaagaagtagtcctagaaacatgaaaaaaaataagtcaatgtaaacagatccaggcrtgatggagatggtacattggcaaatgatgatgttaaatatgcccaatatgctcagaaatttgaaagaaaaatgttaatgtaacaaagaaagatagaaataaaagatgtaaaaaaaacaaaatttgtagaaataaaatataaattatgtaaaattaaaattttactggataggatttgcagcaattttacactacaaaaaaaatcaataaaattggaaacataataatagaaactatccaaaaattaaatacacagaatagaaagattgaagaaaagagaaattttttaaagaaa

SEQ ID NO: 245818 - DNA, 563 bp, Homo sapiens
caagacaagggtttattccactatcctataataaaatcaaagcaaagactgaggagaatgaggaatggtgtgaggtgagaacatkgcttataatgaaatacgttagaagatgaggctagcagctgaaatagtttttttaaatctactttttaaaataaaaatgccatgattgcatttttaaaatatttgcaattccctctgctaacctaaccagaagcagtctgggctccaaggatcttctctgagcatgcctacattttccaaggattaagcaacaacaacaacaacaacaacaacaacaacaacaacgaaaccccaaaagtaaccatttttatttgctaaatggtagcattgagaaaatgagaagaggaggtcaagaagaaaatcctccccatctaagtttctggaggtttcctttgctagaaaagcccaggtgtctggacagtgagccaggtgtactcccattgttaggttcagctgccagttcctgctcttggtgctactacttgaacccagaggaagcctcccagctgctcaggccgccctgtgtgcccctgccctgg

SEQ ID NO: 245819 - DNA, 540 bp, Homo sapiens
ctgagcatgcctacattttccaaggattaagcaacaacaacaacaacaacaacaacaacaacaacaacgaaaccccaaaagtaaccatttttatttgctaaatggtagcattgagaaaatgagaagaggaggtcaagaagaaaatcctccccatctaagtttctggaggtttcctttgcyagaaaagcccaggtgtctggacagtgagccaggtgtactcccattgttaggttcagctgccagttcctgctcttggtgctactacttgaacccagaggaagcctcccagctgctcaggccgccctgtgtgcccctgccctggcctccttcttccctccttcctggcctccctcttcgctctgcgctcaccagccttgttaacctgccttggcccctagattctgagtccctgcggaatgcaggccatgtaagatgatgctccttctttctctccctcagtccttacctcaagcagatgctcattatgtgtctgtccaaccattccagttgaaaaaggagttccaaataatgaattaggca

SEQ ID NO: 245820 - DNA, 556 bp, Homo sapiens
ggttgtccagtgtcatcagtttatgagaggcagatgtgatatttaagaattatgtcctatcatgaaataatatgcacccataaaaaagaatgagatcatgtattttgcaggaacatggatggagctggaggccattacccttagcaagctaatgcaggaagagaaaaccaaacactgcatgttcttatctgctagtggaagctaaatgatgagaacccatggacacaaagagggaacaacagacactggggcctacttgaggatgaagygtaggatgaaggaggggatcaaaaaaaaataactactgggtactaggcttggtatttggggatgaaaaaatctgtacaacaataccccatgacacaagtttacctgtgtaacaaacctgtacatgtacccctgaaattaaaataaaagttaacaaaaaaaaaaaacagaaaaaagaaagacaaaagcacaaactaaggaagcgttatccagaattatactgttcaaagtaaaaacagatacaaattatgcttacactattattgaaaggttgcaaaaccaacagcaa

SEQ ID NO: 245821 - DNA, 556 bp, Homo sapiens
ggttgtccagtgtcatcagtttatgagaggcagatgtgatatttaagaattatgtcctatcatgaaataatatgcacccataaaaaagaatgagatcatgtattttgcaggaacatggatggagctggaggccattacccttagcaagctaatgcaggaagagaaaaccaaacactgcatgttcttatctgctagtggaagctaaatgatgagaacccatggacacaaagagggaacaacagacactggggcctacttgaggatgaagcgtaggatgaaggaggggatcaaaaaaaaataactactgggtactaggcttggtatttggggatgaaaaaatctgtacaacaataccccatgacacaagtttacctgygtaacaaacctgtacatgtacccctgaaattaaaataaaagttaacaaaaaaaaaaaacagaaaaaagaaagacaaaagcacaaactaaggaagcgttatccagaattatactgttcaaagtaaaaacagatacaaattatgcttacactattattgaaaggttgcaaaaccaacagcaa

SEQ ID NO: 245822 - DNA, 549 bp, Homo sapiens
ggactgcatcttccaacagaaattgcaatttcattagcatttatgactagccttccagggatgtttgccaaagggatgaaagcagaaataaaacaaaacaaaacaaaaaaccgcagcagccctttcacaggcccacacaaaggtgctaattagttagtgatggttttcctctgtgggcaatggcccagaatgctgggacttgtgaccgtagacctatttccattatgcctagcagaacaacaaacacgttaaatgaaatgaaaattttcctttgtggagttttatgtcaacgaatggcctccaagcatataaggagttgttatgcagaggattatgagaagttgttttatacaaaggaagtttgccactgcctaggaaaggtgagtctggattttccaattgtaagactstttcagtataaaacagatgagttacagacagaggtgggaggaacgttcttgtaatacagaaatgttttaattaaaaaaattgtttcccttaaaatgaacccatggtaacttgactcaatttactacttaatattctaga

SEQ ID NO: 245823 - DNA, 472 bp, Homo sapiens
ttcttttcagctggacgtatcttatttcctattttgcttcttttatgtttttgatctcaaggttaagtatttgtctgcctttttcacaggccacatggtctttcagaatagcaattatctcttacttgtgaagaggagtgattaagaagcagggaaatgcaaattctagaagtgcactatctaatatggtaaccaaaaggcacatgtagccatttaaatttaagttagttaaatttaaaaatcagttccttagtcacacttgccacatttcaagtcctcaacagccacatgtatagctggtggctrgctaccatactgaacagtatagctacagaacatttccatcattgcagaaagttctactggacagattgttctaaaaagctgcttggtctagatcattttgttcgctttacacattccgataccatcatttcaccaaataagtcttgttgattttttacaactgtag

SEQ ID NO: 245824 - DNA, 587 bp, Homo sapiens
  misc_feature (1)...(587): n = A,T,C or G
attactcacatttcaatttatctcctggagatcttggggaggggcagtagtttacytgtttatgcttgttccaagctgcagcttgtggcccagagagagtagcaagagacagcgtaaagcctcccttttccaccagaacccttaattagaacaccctagcctcctctaaggtgtggcttagaggtatgaactcgccagacagtgagttaatgaggacggggaaagttctgcttttccagtggggccgacccaggagcccatgggtaggggatgattgaaagaactacactgctttcctgggctctgtaggctcagtgtcaagtgcaatgattcaaaacaaaccctacacatgccggatggtccagtgcacaaataggaccttcacaatagtanaatagccccatgtattttaatggcattttgcaacttacaaggaattttcatgtattatctcatctgagccatggaaacccagatagaaaatagtattctcattttacagatgaagaaactaaatccagaaaaattcaaataatttcccaatgtttatatactcactcagtgattagccatgacttagccttaag

SEQ ID NO: 245825 - DNA, 587 bp, Homo sapiens
  misc_feature (1)...(587): n = A,T,C or G
attactcacatttcaatttatctcctggagatcttggggaggggcagtagtttacttgtttaygcttgttccaagctgcagcttgtggcccagagagagtagcaagagacagcgtaaagcctcccttttccaccagaacccttaattagaacaccctagcctcctctaaggtgtggcttagaggtatgaactcgccagacagtgagttaatgaggacggggaaagttctgcttttccagtggggccgacccaggagcccatgggtaggggatgattgaaagaactacactgctttcctgggctctgtaggctcagtgtcaagtgcaatgattcaaaacaaaccctacacatgccggatggtccagtgcacaaataggaccttcacaatagtanaatagccccatgtattttaatggcattttgcaacttacaaggaattttcatgtattatctcatctgagccatggaaacccagatagaaaatagtattctcattttacagatgaagaaactaaatccagaaaaattcaaataatttcccaatgtttatatactcactcagtgattagccatgacttagccttaag

SEQ ID NO: 245826 - DNA, 587 bp, Homo sapiens
  misc_feature (1)...(587): n = A,T,C or G
attactcacatttcaatttatctcctggagatcttggggaggggcagtagtttacttgtttatgcttgttccaagctgcagcttgtggcccagagagagtagcaagagacagcgtaargcctcccttttccaccagaacccttaattagaacaccctagcctcctctaaggtgtggcttagaggtatgaactcgccagacagtgagttaatgaggacggggaaagttctgcttttccagtggggccgacccaggagcccatgggtaggggatgattgaaagaactacactgctttcctgggctctgtaggctcagtgtcaagtgcaatgattcaaaacaaaccctacacatgccggatggtccagtgcacaaataggaccttcacaatagtanaatagccccatgtattttaatggcattttgcaacttacaaggaattttcatgtattatctcatctgagccatggaaacccagatagaaaatagtattctcattttacagatgaagaaactaaatccagaaaaattcaaataatttcccaatgtttatatactcactcagtgattagccatgacttagccttaag

SEQ ID NO: 245827 - DNA, 587 bp, Homo sapiens
  misc_feature (1)...(587): n = A,T,C or G
attactcacatttcaatttatctcctggagatcttggggaggggcagtagtttacttgtttatgcttgttccaagctgcagcttgtggcccagagagagtagcaagagacagcgtaaagcctcccttttccaccagaacccttaattagaacaccctagcctcctctaaggtgtggcttagaggtatgaactcgccagacagtgagttaatgaggacggggaaagttctgcttttccagtggggccgacccaggagcccatgggtaggggatgattgaaagaactacactgctttcctgggctctgtaggctcagtgtcaagtgcaatgattcaaaacaaaccctacacatgccggatggtccagtgcacaaataggaccttcacaatagtanaatagccccatgtattttaatggcattttgcaacttacaaggaattttcatgtattatctcatytgagccatggaaacccagatagaaaatagtattctcattttacagatgaagaaactaaatccagaaaaattcaaataatttcccaatgtttatatactcactcagtgattagccatgacttagccttaag

SEQ ID NO: 245828 - DNA, 473 bp, Homo sapiens
cacaaatagatgtattccaattttcagttctttagtatgctttcattgatgagtagatcaaataaaataaggtataacttttttaaaaatacaattgacatggtgggcttaaactcagtggagtgtgtctgcagagctgtaaaacaatgacccttgctcctcttcattgaagtgatgggtcagagacagatatgaccattaactgttgtcccatctggacaccttaaccatcacatatgacagcagccatagaatttcctaacctgatctgccaatgttgagaaggttaacgattgtgattgcttaaattttacttctaagctagattttttcaggtatgtcacatcaatggagcttgaggaggattacacatgaaagtttgaatttccgaaagaatgtccatttttctcaagttcttcaagactttgaaaaaattaygtttttaaaaacttattttttttgcaagacatcaa

SEQ ID NO: 245829 - DNA, 244 bp, Homo sapiens
ggcgccatgtgctgttggtattagtgctgtcaggctgcttttgattcttcagcacccagttgtctcaaaccctttgccacttctactgaagactaggatcttgccaggaaaatgtctgatgaattttctatggcaaatgctctacytgaacacttccctgaccaggtcctgctgtgattaatagaaatctagtcaacctccttaaggccggccagattccaaaccttggaagaacccatgtgct

SEQ ID NO: 245830 - DNA, 531 bp, Homo sapiens
aaatgcaaagtgatatgtcagcgtgaaaaaaggaaatcttcaacatttmaacagcagggagaaactggaagtcaatgtttaaagtgacatcaagttaaataatggaatgaaatttaaaattggaaaattttaaatatagcagtaaaattactagtatatcttttaatcgtctttaattactgaaagcttaattaggtatccttccgatgtgcccctatatccctatcttgtcacattgtttttatacattacatttgatttgtttatccttccctccagactttgagcttcttgaacatagagactgggttacattcatcattgtaaatctggggtccacctcaatgacgagcacatgagaggcattggataaatacttcctgaaggtaaaaatgaactacttccaatagcatctctttgtacagaatgcaatgatgcaaagttacctggtaatatttagattttcagaactctacaagtaaagcggaagggttatgaagagttggcaataacaataataccacctttcat

SEQ ID NO: 245831 - DNA, 620 bp, Homo sapiens
ctgtgacaatttctcaggctttgtttttgatgaccgtgacagttttgaggagtactggtgggatattccacagaaagtctcttttgggatttgtccaaaattcttctcatgattagattggggttatgggtttaggggaggaaaactacagaggaaaaatgctatttttcagtacatcatatcatggataggtactatcaacatgacatcactgtggttgatcttgatcacctggatgaggtgttgtgtgcagcgacactaaagaataakgtgttatgctccgtatctttgaaagtggagatttacataaattatttggaattcttctgcacggaggagttgtctattctccgtcatttatttaatgaatccttacttatatcagtagggcttgtggatatttatcttatatttaaagttatcatccaacactttatttatttatttgtttattgtcaaattgtttcaactctggctacttagagctctttcagttgtattcctttggcattctttctttcattttcagttatttttgtttgagcacttacttattttatggcactgtaagatgcttcaagctattcttatatatttcatgccccagacatacaatctgc

SEQ ID NO: 245832 - DNA, 585 bp, Homo sapiens
ctttgtgtttggaattttgtttcttttaatatttaggtttaaatattgatgaaatttgtatctgtacaaattagatgagaaaacaaggagagaaaagggcttcctagatcccatgagaaaaatcaagtaagagaatgtgtttccttccacaacaggacacattttacatttctgccctcataaatattaaaatttgaagtctagcctcagttatttctgaacaaggataaccagatttttacaatggggagaaaagactacattggcaatgcaaccagatttctyggtctactggaaaaataccaaaaatatgataattttaccaaaatgaaacaaccaggacaaggcctttaggaagtgcacacactagctctgtaacactgtgtttgtacactgagatatagtaaacacgatttataatataagttccttttacttgctattgataatttttcaaagtatctatgaagtatacatttcaaggtatatattataattccggctctcaaaggattaaaggggttctttcctgaggaagggacttttctgcccagttttcccttacagctaggtttgggccaatgt

SEQ ID NO: 245833 - DNA, 592 bp, Homo sapiens
tgataatatttcttttttctccattttcatttctcaatttttccttttttaattgtggtatattagtagtccattataataatgttcttacattttttaaaacattttcctagtgataatttttttaattatttctatttgtgtgttaatacaaacaatactgcaatggatatttttgtatgcatttatgtgtataaattctgggagtatttctgtaggaaaaagtttcttaaatgcttgatctctttaaaaaattatcagttactctactactgctttctgaaagtgtatgcctgtttccacacacccttgcaagtatggtattgtcaatttttataaagattctactaattataagaatgaaacatcttgtttttggcttcatttgtatttctttgcttattagagatgttgagtaatttgcaaataattttttgttttttatcaaaaacacttgtcctttttctgtcttttctgtctctgtttttttttttttttttggtttgttcattttttctcctattgatttataggagtcctttayatatgtagccaaaaccctcttccattaaatattttgtaatgttttcta

SEQ ID NO: 245834 - DNA, 560 bp, Homo sapiens
ttttacttttcacttgaataatagaccttaaaagctaaaaattagtcaattcaagtttgctcatctttcagggttgtatttgattattcataatgagaaggcagcacatttgaaagtagactattagaggaaatagaactttaaaaaatttttctagtgactgcacaaataaagaacctcattaatgaagatgactccattaaaaagttggctttagacacacatcacatgcagttgtcatttttacccctttgggatctatttcactttcagacacttgcaaaacaagttttatcctcttgcactcaatcaggattctaatccctttgtcatcaagtatttggaaagtattataggagagaaatgattcaacaaacatttatgaggtaccaactgggccataggtgttgtgcaagacactcatgatatagagaaaaatgcaatcatctctctcacttgtctccaaagccagagaagagacatgaaatgagyagagccttccaacagcaagagataagtactgtaatcaaggcctgttggatggttagaaagtacagtta

SEQ ID NO: 245835 - DNA, 576 bp, Homo sapiens
ccccttgctgacttttattttttatgtttagcaatgatcactatgagccactatatgtaattgcccaatgggttctttctgcccattgcacagataaaatcaatccactgagactacaacattagttgacttgaggccagcccatgtgagagaactggaattatcactcaaatcaatctccctgaaggatcagaggttagggatctttatggacaatttggtgggcaggggctagggaatgggtgctgctgattggttgggaaatgaatcatatgggtgtataaatggtcctcatatgatgagtccatctctgggtggggccacgtgatcagttgagtcatgggtcatgagtccagatggggtcagtctgaaaaacatctcaaacaaaccaatattagattctacaatagtgatgttatctgtgagatcacttgggaaattcacaaatcttgtgacctctggccacatgacccctgaacagtaagggattatagaaactacrcctatggtttatcagagtttaggcccttctcataatcctaaccttgtggcctgtcattagttttacaatggtag

SEQ ID NO: 245836 - DNA, 559 bp, Homo sapiens
tcaactgtcaaatttctcttactgttgtaattttggcaaaagtggcttcatatgttatgtacttattgtctctttattttcaatctctcccactaggctgttaaggcagagagaataacaactttacaatatctttgattaagtaagtcttgcatataattaaccaaatgattttaatgtacagtgaaaattcttgtagtgactcatctcttcagtccctcttccctagaagatagccacatttattaaattctcgtctgtcttttcagttaccctatagaagtataagcaaatatgaatatatgctcttaactttcttcttctttttttgcagaatagagaattcattaaacatatcactgggctactggctttctccgtattgcagttttctctcatcaatgcatacagaaagtcttcagtttatttttgttttggggatttggaggttgtggattgttyaatttacagtggcataatgtttcactaaataccatagtttgtttaactagacctccactaatgagcatttgggtattttctaatttatatctcttta

SEQ ID NO: 245837 - DNA, 563 bp, Homo sapiens
tcaactagcagcgcttcctcctaattctgaatgtaagttatcttccaatattggccctgacccacaagtcttctgatgctcttatccaagaaactcttccttgtcattgaggactcattgtggcagttgctctgaggagcttgtcttggcagaatccccactgccgaaccaatattggctattcattagtacctactgcctccaggctcccattgtactctgtacttccctctgtggcatgtatcatactctgtcttaattgttgtttatcactctattgccccaacagcccgaaaggttcttaagaccaggatagcctcattcatctttgtactcwgagaatctcatatatacccggcacagttctaatggacactcaataaatagttaactttcaaaatacgatacccattacaaaaggcaaggtgaaaaaattcactagaaaactcatgtttgcaaaaaaccgatagttgcaaccctgtggtatcattcaagaaagtgcaggtggggtgcacagggtggggttgggtataaaaagtctatgagttcaaggctgccaagga

SEQ ID NO: 245838 - DNA, 653 bp, Homo sapiens
ataataatgttattaatgttgtaaggaatactgggcccatttgttgtaaaatgacaaccatttcacagaaattgcttggggccagtttaggggatgaaaagtgttcattttccctgtgtgctttcatgcgccatccccagagacaaagcagagacaaagagctaactcagatcctgtttggaaggactggtacattattaggtactccagtttctttccttaaaagccttgaggcttggaattgaccacacaaaggacacacttccacagtgtatcacctgcaactggccaaaacttacaatgcatgagaaagaggaatctatggaagaagccacaggaagacaagagaarcctcagtcacaggagaatatagcagagctgcatgatgtcaccagttgcccatgagaacccaagaaataggaaaaggcgggcctctgtaataaagggaaactgtaggtcaaaatgtaggcagttgcagccatccaggacccagaaaatcttgcctttgcctttctcacgcgttctctctgatgctcagggtcttccctttagaattcattttctttattttttcactctttacccaatttgactacctgactctcaattttgcaattcccgtcttgacctatgactctagcctcagccagttt

SEQ ID NO: 245839 - DNA, 574 bp, Homo sapiens
agcaagtcatttgaaacccattagggcaagagcaggaaatagttctgtgtgtttgctattgttgcctgtgttaaaagaaaaacttcagccaaattaaatttaaaggagtttaattgagcaatgaactattcacaaattgggcagcccccagactcacagcagattcacagagastccaatgcagccacgtggtggaagaagatttataggcaacaaaaagtgaaacgatgtacagaaattggaagtgaggtacagaatggctaggttggttacagctaggcatttgccttatttgaacacagtttgaactctcaggagtgtatgaatgattgaagtacagccgctgggattggccaagactcagctattgttataggtgcatactccaaagttgggttttcaatcttgtctacctgttaagctaggttgcagctcatccacaaggattcaaatatagaactactgagtccttctcaggccatatttagtttgctttaactcctggaatgctcagagtatgagacaggtaagcattcagtgactgaaggagggggccagaacatgcccagagcag

SEQ ID NO: 245840 - DNA, 590 bp, Homo sapiens
tataggcaacaaaaagtgaaacgatgtacagaaattggaagtgaggtacagaatggctaggttggttacagctaggcatttgccttatttgaacacagtttgaactctcaggagtgtatgaatgattgaagtacagccgctgggattggccaagactcagctattgttataggtgcatactccaaagttgggttttcaatcttgtctacctgttaagctaggttgcagctcatccacaaggawtcaaatatagaactactgagtccttctcaggccatatttagtttgctttaactcctggaatgctcagagtatgagacaggtaagcattcagtgactgaaggagggggccagaacatgcccagagcagaggggctgcaggctgcttggtattggacagcacagtgggagcccaggagacaccaaacttctggggacagatagtgtgtggcaccaggaggaggattagaaaagggggagttagagttgccaacaaaacagacttcgcctccttcctctaaggcagccataagaaagtaatcaaattcttctccagaacagttgctgacattgtcaagctgtgaaaagga

SEQ ID NO: 245841 - DNA, 427 bp, Homo sapiens
ttccagtttgaagatgcattattcaacaaaacaagcagcaatagcctttaattttcacttattcctaagyacttaggcacaaactgtagccagaaaagcacttttttttgtcatttatgcttgttccgaggttttctttcacatttgtcccaaatgcatatattatcagaactgaccagacttttagcacttttggattaaatcttctcaatgaaacaatttatagatttaacaaatatttgctgagtgcctactatgtgctgctttgtggagattcacagatgaattcatggttcctgcctttgggggatattgcaaatcatggagattgatttgtaagtggaatatgaccttggtgctaaaataatttagtaataaaagaattaccctaaaaaagctctaggtgaccagttaggaagcaaaaaca

SEQ ID NO: 245842 - DNA, 583 bp, Homo sapiens
gttagcagctgagctaacttgtctgactattggtaactcacaataatctgcctctgtcgtccaggactttgctgacgtgtgaattataactagatacttgtcatctatcttcaggtggctgttttttgccgttcccttggcacattccttatagctttagtagtacaacatctgaagattttgacattcattgagcactttgatagtgaaaaaggaaatgttcctcccaacttggtaaaatggtgcaataatgatattattttaaaatatcatgttgatgactttgctactcagtgttagacaagggatatggtaagtgtataggaaataatctttaataacgctttacatagggattggcagttgacaaaattctttcacaaattaatatgatgccaaagttttattgagataaatttaattgtaatgtatgtttayttaaaaactagtatgttcatatattttattctttttttaaaaaacaggttgggagaagaaacttcagaatgctgtttatagtgaactgagtgtgtgagttttcccacctattttacaatagtattttgtttagctatatttactt

SEQ ID NO: 245843 - DNA, 533 bp, Homo sapiens
tagccttgctggcacagagaattccaccttttctggagttctgctctccctatgaagttctgagcccaatccacagcttyttctgagctctcctgcagaaaatgagagtctctgtgtactgccaaaaaagaccttctggttttcacactatgctttccattggtgattacttatcatgcccagcctttcattgccttcttccaggcatcaatggtgtgcagcaaccactatcctgttccattgtgctgatagttgctacttcccaaaacctctcagaagcctaaggcagtggacccactagtgcctcccttgcccggccatcccctctcacatgactggtaaaggttgtaaccatgacactgcaaccttcacgccaggggctaactttcctccattcgccatggtgaggagggtccttccagctggacagcaggtaatccaactctaaaatcccattttagagtctacttccatcccatctatcttaggctggattccccaggaaagagaccctgagacagatttgcaagcag

SEQ ID NO: 245844 - DNA, 533 bp, Homo sapiens
tagccttgctggcacagagaattccaccttttctggagttctgctctccctatgaagttctgagcccaatccacagctttttctgagctctcctgcagaaaatgagagtctctgtgtactgccaaaaaagaccttctggttttcacactatgctttccattggtgattacttatcatgcccagcctttcattgccttcttccaggcatcaatggtgtgcagcaaccactmtcctgttccattgtgctgatagttgctacttcccaaaacctctcagaagcctaaggcagtggacccactagtgcctcccttgcccggccatcccctctcacatgactggtaaaggttgtaaccatgacactgcaaccttcacgccaggggctaactttcctccattcgccatggtgaggagggtccttccagctggacagcaggtaatccaactctaaaatcccattttagagtctacttccatcccatctatcttaggctggattccccaggaaagagaccctgagacagatttgcaagcag

SEQ ID NO: 245845 - DNA, 533 bp, Homo sapiens
tagccttgctggcacagagaattccaccttttctggagttctgctctccctatgaagttctgagcccaatccacagctttttctgagctctcctgcagaaaatgagagtctctgtgtactgccaaaaaagaccttctggttttcacactatgctttccattggtgattacttatcatgcccagcctttcattgccttcttccaggcatcaatggtgtgcagcaaccactatcctgttccattgtgctgatagttgctacttcccaaaacctctcagaagcctaaggcagtggacccactagtgcctcccttgcccggccatcccctctcacatgactggtaaaggttgtaaccatgacactgcaaccttcacgccaggggctaactttcctccattcgccatggtgaggagggtcctkccagctggacagcaggtaatccaactctaaaatcccattttagagtctacttccatcccatctatcttaggctggattccccaggaaagagaccctgagacagatttgcaagcag

SEQ ID NO: 245846 - DNA, 419 bp, Homo sapiens
ctggtgctggcaggggcaggagtaggctttgcactccattttttcccaataaagagtccctcgagtcctctttcagctcaactgagagtgggtcgatggagccacttcctaaagaatcctgaggggcacggagcaggggacacagcacctgccaaatatgagagaaggcggtggggcctgcccttgtggctcattcctagaggccccaccccagtcggcccaggaacgcaccctctacccggtgactctgaccctccatccctccttcactgtttcctgcataccacgctatttaaaaagaaggggcctacrctgtggcacacgtctgtggtcccagctacttgggaggctgaagcgggaggattgtctgggcccaggagttgggggctgtagtcagccttaattgcccactgcactcc

SEQ ID NO: 245847 - DNA, 419 bp, Homo sapiens
ctggtgctggcaggggcaggagtaggctttgcactccattttttcccaataaagagtccctcgagtcctctttcagctcaactgagagtgggtcgatggagccacttcctaaagaatcctgaggggcacggagcaggggacacagcacctgccaaatatgagagaaggcggtggggcctgcccttgtggctcattcctagaggccccaccccagtcggcccaggaacgcaccctctacccggtgactctgaccctccatccctccttcactgtttcctgcataccacgctatttaaaaagaaggggcctacactgtggcacacgtctgtggtcccagctacttgggaggctgaagcgggaggattgyctgggcccaggagttgggggctgtagtcagccttaattgcccactgcactcc

SEQ ID NO: 245848 - DNA, 504 bp, Homo sapiens
agtgctcaatttgtggaagaactataagtatgtagggaacttacagttaatgagtactacatgcctaaacatgttactaagctctttcccatatattatctttcttcactttataaactttataagctaggcactattctgtctgttttatatgtgaggaaactgaactgagggagagagagcttgtgacctaaacaggggtatctaccttctatgtagtggagccacgattcaaacctagtctttctagttctattataccttactgcctcttaaagtagaaactattttcatrgggatgatttttatattttaagttgtaaacagacttttctaaatcccaggtcaattacgcaataggaatgctatttatgttgttataccagtagcttgcatgatcagatatctcctcttcagagagaccttttctgaccacccaattgaaaatagcttcctgctttccactgttattttatgttgctttatttttttccttcatagtgc

SEQ ID NO: 245849 - DNA, 578 bp, Homo sapiens
ctttctaattagctgcactccagttgccacagrcttgcctttactattcactccaaggatccaggtacatttcattgtccagcaataaatatttattaattacgagacagatatttcagaaattatcagagaatcttagaattaaaaagagtttggaaaaaaacaaaaagatgaactcccaaggaagatatatagtcagataaagagaattagttctagaggaggagagccttggggaaacttcttggaggatatttgtttagggatgggagcttgaggattcactatgtcaataggtgaggttaacagagataacaattttcatcgagtagaagcttgaataaagaaacagaagcaaggacacaaataaaaagtccattttaatggaaggttgagacaatcaagatgaggctagaaagataggtcagccctgtggtgaagaggcaagaatataaacttcaggaagctccatgatgtacgaattcactaagactcactagagatacttgagcacaaaagagccattattaaaactgctggagtttcgtcttattggtgtgtaatgtttggattaagaa

SEQ ID NO: 245850 - DNA, 575 bp, Homo sapiens
atgaggattttcttagtagtttctgctcttcccagacaacgtgctattattagaatagccagactggccctggtctgaaaagaagcctggtttgcgccagttcatccaagaccagaggggaggagggccagaacagggaggtcctccatcccaggagctcaaagtgcttcgtaattcaagtttaaaaaaagttaaaagcatttttctaccccaagttatgactagtaaacaygtggggaccttacacagcgtggcaaatgcagaatcttcctctgcattcccattgtttatggcttaggagtcaaggcaacacccggttaatgatgcttgtgaagtgtctgggccatgtggcaaagggataagagcttaggtccagattcccactgcaggactcactttccagagcaaccactaatcaattgctgtgtgaccctggacaagttactaaatctctctgaacctcagttttctcatctattaaatggtgttaatgttattaactcatggacttgggaagtttaagtgagatagtttatctgtgtgaaacatctgatgcttggaaggctatctgtaaa

SEQ ID NO: 245851 - DNA, 575 bp, Homo sapiens
atgaggattttcttagtagtttctgctcttcccagacaacgtgctattattagaatagccagactggccctggtctgaaaagaagcctggtttgcgccagttcatccaagaccagaggggaggagggccagaacagggaggtcctccatcccaggagctcaaagtgcttcgtaattcaagtttaaaaaaagttaaaagcatttttctaccccaagttatgactagtaaacacgtggggaccttacacagcgtggcaaatgcagaatcttcctctgcattcccattgtttatggcttagragtcaaggcaacacccggttaatgatgcttgtgaagtgtctgggccatgtggcaaagggataagagcttaggtccagattcccactgcaggactcactttccagagcaaccactaatcaattgctgtgtgaccctggacaagttactaaatctctctgaacctcagttttctcatctattaaatggtgttaatgttattaactcatggacttgggaagtttaagtgagatagtttatctgtgtgaaacatctgatgcttggaaggctatctgtaaa

SEQ ID NO: 245852 - DNA, 595 bp, Homo sapiens
ccaggtggagtctgcgtgaagtccatggcagggttgacatgattctgtgagtaaaacaaaatcatgataaggtgaattcttcagcagattttaccaaccaccagagatctgatttccctcctcaagagtgaagtgctacaaggtaaggtccaaataatcaaacatgatgacattttctatctccatgtaaacctactgaggtggatgcagggacttctttctactgctcctcaggacagcaaaaccagatttyatacctgggattaggaaaccaagctaaatattcaaacataggattattcttagacatgtgacattgtgagaaaaagaaaatgatgcaaaaattatttctggtggctgcactaaaatgaaaccaacagcatttgggtagaaaaaaactgggataaagccacacctctggtatttaatttggaagctgactccaaggaaaccacgacctacccacaccttgactccgcatccttacgtgggaggttaaatacagccccatacattgatgggctttgtgaactgtccagggctacacagtccacaggcctctgagcacagacactggataaagttcagatatcca

SEQ ID NO: 245853 - DNA, 507 bp, Homo sapiens
aatttattctcaaggtagcgaggtgcttttgcttggcagagggaagttacacagcgaggtaaagagaagaattcatccttctaggcaaagtgtgcaggagcccagtaggcagcctggggaatttttcaccatgccatagaagactgacttaattatcttaagaatttacattgtaaattgtcattttctcactcagcatctgacaagtgaatgaacataaagcaaattccattttgccacacaatatgaaagaatgatttttaacccaaagggctgcacaatgtgcttctgcatcaccatcttccagtcttgaagccataaacctcccattctatgatgcccraaactaaaggaatagcagcagattttccatggtcttcaggaaactgaccctcatatcactatagcccacagaattgggacagctttacaatgtaaggctgaaaaatgccgtctccgtgccatcactggtttttgtaggggtaataggataatcaatgctcctaa

SEQ ID NO: 245854 - DNA, 507 bp, Homo sapiens
aatttattctcaaggtagcgaggtgcttttgcttggcagagggaagttacacagcgaggtaaagagaagaattcatccttctaggcaaagtgtgcaggagcccagtaggcagcctggggaatttttcaccatgccatagaagactgacttaattatcttaagaatttacattgtaaattgtcattttctcactcagcatctgacaagtgaatgaacataaagcaaattccattttgccacacaatatgaaagaatgatttttaacccaaagggctgcacaatgtgcttctgcatcaccatcttccagtcttgaagccataaacctcccattctatgatgcccgaaactaaaggaatagcagcagattttccatggtcttcaggaaactgaccctcatatcactatagcccacagaattgggacagctttacaatgtaaggctgaaaaatgccgtctccgygccatcactggtttttgtaggggtaataggataatcaatgctcctaa

SEQ ID NO: 245855 - DNA, 603 bp, Homo sapiens
gaatcaaatatgatagcctaaatgcaaaggatcgacagattaagttgaatttgtggtcaatctttattcttagcagagcagcagctagctagagttttaaattagaaactgcttctatgcttttcaaagatattacaatagaatttgatactgagcccagaatatttaatagggaggtctaagtagtatcatttatagaaatgaaagctttaatattactcattctttccatttactacttgttaaaaataacattgtattttaattttcataaagtaaatgaatagtcctgaaaaaataataaatgagtatttatgtgataactgagttccaaacaaaggtccactttctgggcaggggcttgtagtgggcatggtaaacccactcagatcaccctagattcaagcttttgttggagaaacagcactgtatatatatacataccatatatataacgtggaaggaccacataaccctagatgtgactgattgtgccaacatggttacrtggctcaagccagacaagatttttgatccagaaaatttgaagtactcttcttagggatcatttatataggtctacttataatagcatacaaaaga

SEQ ID NO: 245856 - DNA, 597 bp, Homo sapiens
agacaaatctatagacaacgtagactaattggttgcctggggctggggaggacraacagattggggtgacagctaatgggtcttgttgggataatgaaaatgctctaaaattgactttggtgatggctttacaaccctgtaaacatactaaaagcacccaaactgtacattttagatgagtgaattatatggtctataaattatacatcaataaaactgttaaaatatgagttatgttctcagttttacaaattttgtaaaagtgattaaataaaacttcccaattcaccccattcttctaataacatattatgcttttagtgtacagcatttaataactttgtttactatagatattactataaccagttttttattatcagtcatctactccaaatgaattctgatagtaaagaaaaatgaccatgcaggtaaactgtagtaaactgtattactgtatatacaaggccgcaggtgcactgaaatgtgataatttgactatttcaattaaagaattgccttagctaatttttgtgtagactaaaaactgttaagcacttgaattcacagtgactgagacagcacagtttttaaaaa

SEQ ID NO: 245857 - DNA, 597 bp, Homo sapiens
agacaaatctatagacaacgtagactaattggttgcctggggctggggaggacgaacagattggggtgacagctaatgggtcttgttgggataatgaaaatgctctaaaattgactttggtgatggctttacaaccctgtaaacatactaaaagcacccaaactgtacattttagatgagtgaattatatggtctataaattatacatcaataaaactgttaaaatatgagttatgttctcagttttacaaattttgtmaaagtgattaaataaaacttcccaattcaccccattcttctaataacatattatgcttttagtgtacagcatttaataactttgtttactatagatattactataaccagttttttattatcagtcatctactccaaatgaattctgatagtaaagaaaaatgaccatgcaggtaaactgtagtaaactgtattactgtatatacaaggccgcaggtgcactgaaatgtgataatttgactatttcaattaaagaattgccttagctaatttttgtgtagactaaaaactgttaagcacttgaattcacagtgactgagacagcacagtttttaaaaa

SEQ ID NO: 245858 - DNA, 597 bp, Homo sapiens
agacaaatctatagacaacgtagactaattggttgcctggggctggggaggacgaacagattggggtgacagctaatgggtcttgttgggataatgaaaatgctctaaaattgactttggtgatggctttacaaccctgtaaacatactaaaagcacccaaactgtacattttagatgagtgaattatatggtctataaattatacatcaataaaactgttaaaatatgagttatgttctcagttttacaaattttgtaaaagtgattaaataaaacttcccaattcaccccattcttctaataacatattatgcttttagtgtacagcatttaataactttgtttactatagatattactataaccagttttttattatcagtcatctactccaaatgaattctgatagtaaagaaaaatgaccatgcaggtaaactgtagtaaactgtattactgtatatacaaggccrcaggtgcactgaaatgtgataatttgactatttcaattaaagaattgccttagctaatttttgtgtagactaaaaactgttaagcacttgaattcacagtgactgagacagcacagtttttaaaaa

SEQ ID NO: 245859 - DNA, 597 bp, Homo sapiens
agacaaatctatagacaacgtagactaattggttgcctggggctggggaggacgaacagattggggtgacagctaatgggtcttgttgggataatgaaaatgctctaaaattgactttggtgatggctttacaaccctgtaaacatactaaaagcacccaaactgtacattttagatgagtgaattatatggtctataaattatacatcaataaaactgttaaaatatgagttatgttctcagttttacaaattttgtaaaagtgattaaataaaacttcccaattcaccccattcttctaataacatattatgcttttagtgtacagcatttaataactttgtttactatagatattactataaccagttttttattatcagtcatctactccaaatgaattctgatagtaaagaaaaatgaccatgcaggtaaactgtagtaaactgtattactgtatatacaaggccgcaggtgcactgaaatgtgataattkgactatttcaattaaagaattgccttagctaatttttgtgtagactaaaaactgttaagcacttgaattcacagtgactgagacagcacagtttttaaaaa

SEQ ID NO: 245860 - DNA, 496 bp, Homo sapiens
gtctgatgagaaggtgtagacacattaagggattggccccgggtcactcgtgaaggagggaacgaggtagtgagtcattcccagccaagaacgcagcgtgctggggagcaacctcccctgagtcacctgcttctcacctcggaataagtggagaaactggagcctggagccaggttcttagacggcccagcaaggtagccaccaagggcatgggctaggctgggggragcagcgcccctcctgctggaaaagggaatgcttggcccgtctgaagaaggctccaatgtctctttccagggtaccccaggtgcttcttttccaattcctcttttgcacttatttagccactggtatgcactggcttaatggtggttttgtttgcatggcacctttaggtatgtggtctgagtttatgcaaaagtaatgacaaaagccgcagtgacttttgcacccacctaatataagtaaacaggaaataagttgagggcaaggactg

SEQ ID NO: 245861 - DNA, 496 bp, Homo sapiens
gtctgatgagaaggtgtagacacattaagggattggccccgggtcactcgtgaaggagggaacgaggtagtgagtcattcccagccaagaacgcagcgtgctggggagcaacctcccctgagtcacctgcttctcacctcggaataagtggagaaactggagcctggagccaggttcttagacggcccagcaaggtagccaccaagggcatgggctaggctggggggrgcagcgcccctcctgctggaaaagggaatgcttggcccgtctgaagaaggctccaatgtctctttccagggtaccccaggtgcttcttttccaattcctcttttgcacttatttagccactggtatgcactggcttaatggtggttttgtttgcatggcacctttaggtatgtggtctgagtttatgcaaaagtaatgacaaaagccgcagtgacttttgcacccacctaatataagtaaacaggaaataagttgagggcaaggactg

SEQ ID NO: 245862 - DNA, 489 bp, Homo sapiens
aggagggcttctctaccacagggctgcagttggctcttgtgtaagcttccacccctggccgcctctcactccctcctcacccacccactgggatccccttcacacactcyttcttcccccattaatagacacactcatacccctttacactctgtctttagagatttgctatatcctaaggtataaaatcaagaataactcaaattccactgatagaaatgtagcatctgcattttagttgcaatgctgcaagaagcaggggtttctctcccttaaagatttgtatggtttgaaatgaataaaagataaggctatgaacatagcacagggttcagaagattagtatgcatgtagctgtttattccctccaaggctaaacagctaaagtcatttccttccaaatgaaggtattttaggacatttttattcagcgttcagaatttaaactcatgccctccttaaatggcccagcttgctacttcagttcca

SEQ ID NO: 245863 - DNA, 489 bp, Homo sapiens
aggagggcttctctaccacagggctgcagttggctcttgtgtaagcttccacccctggccgcctctcactccctcctcacccacccactgggatccccttcacacactccttcttcccccattaatagacacactcatacccctttacactctgtctttagagatttgctatatcytaaggtataaaatcaagaataactcaaattccactgatagaaatgtagcatctgcattttagttgcaatgctgcaagaagcaggggtttctctcccttaaagatttgtatggtttgaaatgaataaaagataaggctatgaacatagcacagggttcagaagattagtatgcatgtagctgtttattccctccaaggctaaacagctaaagtcatttccttccaaatgaaggtattttaggacatttttattcagcgttcagaatttaaactcatgccctccttaaatggcccagcttgctacttcagttcca

SEQ ID NO: 245864 - DNA, 489 bp, Homo sapiens
aggagggcttctctaccacagggctgcagttggctcttgtgtaagcttccacccctggccgcctctcactccctcctcacccacccactgggatccccttcacacactccttcttcccccattaatagacacactcatacccctttacactctgtctttagagatttgctatatcctaaggtataaaatcaagaataactcaaattccactgatagaaatgtagcatctgcattttagttgcaatgctgcaagaagcaggggtttctctccyttaaagatttgtatggtttgaaatgaataaaagataaggctatgaacatagcacagggttcagaagattagtatgcatgtagctgtttattccctccaaggctaaacagctaaagtcatttccttccaaatgaaggtattttaggacatttttattcagcgttcagaatttaaactcatgccctccttaaatggcccagcttgctacttcagttcca

SEQ ID NO: 245865 - DNA, 587 bp, Homo sapiens
tttttttgcaattctttgaatataaactcattcttgaatatgcttcttttactcaataaatacttccaaaatacccaaggtggccgggcacgtccacaatgtgcccagcatgcctgtaatcctggaattttgggaggctgaggcaggtggatcgcttgatcttagsagttcaggactggcctgggcaacatggtggaaccccaactctactaaaaattacaaaaattagctgggcatggtggtgtgtgcctgtagtcccagctacttgggaggctgaggtaggagatcgctcaagccccagaggcagaggttgcagtgagctatcaccaccactgcattccagcctgggtgacagagtgagactctatctcgaacaaataaacaaacaaatacccatcatatgccaggttttgtgctagatgttgagaaacaggggtgaacacagtctttctgaccctatgtattcctgcagtaatgggacttcctctagcatagcatgccccaatctgaattataattgacatgatttgtccatatcaccattagaatctaagctctatgatggagagggatgggttatgtttatt

SEQ ID NO: 245866 - DNA, 577 bp, Homo sapiens
ctttctctcttgcttgctcctgctttctccatatgatgtgcacgctcccgcttcaccttccgctgtgagtaaaatctccctgaggcctccccagaggccaagtgatgtcgctgctaggcttcctatacagcctgcagaaccacgagccaattaaaccccttctctttagaaagtacccagtctcaggtatttctttatttcaatgcaagaatgacctaatacactatctatgtatctatgtatctatgtatctatctatgtatctatctatctatctatctatctatgaaagcaaattggagaaattatgacaattcatcccaaatgcttcaacttgcatctccaaagaatatagacattctgctgcacaaccatagtatcattattatacccccaaaatggacaaaaattacatatcatctaatacccagccatatttgaattccctcaattaatcctccmacctgttacggctctttactgttgttactgttgttgaaaccaatcatagattaagcactaaatttgtttttatgtcccttcagtttctttcaatatagaacagtgtcctgctttg

SEQ ID NO: 245867 - DNA, 589 bp, Homo sapiens
ctctttattctttgattaggtagttttacagttcctgattctattacttagatataacatgtagaagaatatctacacttcagatgcagagagagaaaaaaataaaaggggtaccccacaagaagaaacagcaaacacacacaccaaagacaagaaatgtaagcataatcttttgttttttcccctgacacacagatttagcaagcttaccattggccccttgggtcatccccaaaccagagctttaaaaatctgtggttacctgagaccctagagctaagtcagacattctaggacctaagccaaagggccaatagaaactttagyccaagtaatggtcacacatgtttactatagagagcaaactgaattggtctcagagtttatctttctgaactcatgatggaacacagagagtacagaagggggaattgggcttaatttggtgcagctgttagaatatcccctggtctctgagctatttgtttgtcttactgaactccagcagattaccattgtcgggcaatctggcacattttgctcctttgttcatccccagccatgttatgtaggagtcatcaacttcccc

SEQ ID NO: 245868 - DNA, 432 bp, Homo sapiens
ctactgcaacatctctgcttgacaccctgtgttgaacaagagactatttagtagatctcaacaattatgcatgtactttcctggcagagaactctttgctgctttgtttgtcaagattatgttgaatcagcataaaaatcaggcctgacttatttctggaaggaagcagcctctctcgtaccattggaaacaatatgatcataataaagttttgcatatagaacatttcttttgagtgtagacaacaacttattcttgtaaagaatttaacatttaagtctcatatttccatacttatttctattgggactgctgcctactgccccacccccatcccccaccagccagcyttagtttttggtatatttctagctctgtccatcttggagcagctacgtgaggattttacagctgtctttgtttctgatggaa

SEQ ID NO: 245869 - DNA, 607 bp, Homo sapiens
attctgtgataatatagatgcatgacagaaagggaatgaatattggaaggtaatgtttgtgtgtgtgtgttacaggcttgttggagttcatcactttactttctgtacataaaggtgatttgttctaaatgttttaagcagcagcagcagcaaactttctgaagtctttaatcattgggatgattacttagggcatgctttaatgaaggaccactttaaaaagtagctccagagtaagrctgaagtccaattgacattttctctatgtgttatctaatggaaatgatctccatggcagagatgaaaataagacctttgaattgtgttgagtaaaataagatgggtcagatggatttgggcaatttggggatgatccttagaaaggagatagttgcatctggatggagctagggagacccagtgacagagggagcctgggatcatcttatggtgcatgtcatgtttgtgtagaaacgtacagtttgagcagaatacaaagttatataggtctaagaaattacaaaagaaaaccaacagcttcccctttattcctgatgctatggctggcagacaaatggggtcttcgaaatatgtgtgtgcatgcagc

SEQ ID NO: 245870 - DNA, 582 bp, Homo sapiens
tgcagtgttgatgcccttaggaacagcatcacttgtggactgggtggtaacaaagaactagaaagatgtgcttctcatatcttgatatcaatgtctatcagagaagatggagaaagctgagagatactagtctagcttgctgtgcaacccccttcttctgtcccatcctccttcttatgaaagacttcctaaccctcctcctaaagcctctttttctctgtattttacacctggtccatgcccttaatatccagtccagtagagatgaatatgcctagttcctggtgtcctgcttttakggccttagaaagcctttctctaaacatctctactcttcatgcttgcattcaggcttcatgtgaaacttgcaaacattgagcataataagaaagaatacatagtaaaccatcttaaaagaaagactataaattattttggcactaaaactattaaaaagtatatttcactttagtagacagcagagaaaaatctcttttttaagtttaaaagaaaaatgcattttcttagcagaataaatgagttaacagagtgtggtatggattgatcaaagacataaaataa

SEQ ID NO: 245871 - DNA, 610 bp, Homo sapiens
gattgatcaaagacataaaataatatattttattgcacacttctagctctttgctggaaatacttgactataaaaaccttttaaaaagtagtttgaaagacagggatatagcacattgtttgtcttactagcagaggaaacaaaatgatcaatgaragcagggtaaggatgaaggaatccttaaactgttttccatgcatatgattccatttaatcagcgctggaacaaaggatagcatttttctttcctttttccgtgtgtgttatttcatattattaaatgagatttgagtgaactgaagtaaatcagccaaaacccagcttggattagatcccctaaacttccttatgcccagattttttccagatggtttctcatgtcgccagtttaatatcaacagtgtgtgacacgctagaagaatatttcttagaccagttcagtccttgaaagataattatactgtcagttgccatcactgttactgtgaaagtgaagataactggggtaagtatattaaaatccagccccaaaccagcctgactttcagacagtgcatctaagaaccttcgctcatttttgtcactatctgtctatgctacccgacgtaac

SEQ ID NO: 245872 - DNA, 592 bp, Homo sapiens
aagcatgttagcaggcaattgtaggtaccgtgtcaacaaatgtgggaaayagaacaagactaacacataaggaatgcctgcaaaatcatgatttgaggtgaaaataaaatggtttcatgaaaatgctttttcttctttttattttaatataatcacaatcttacagaaaagttgcaagaatgctggagagaaggctggtaatatgtttaccagagttaccagttgtcaacattttgaacatttttcccatatgctttttgtcattatatatgtatttttcccttgaacaatgacaataagttatgaacatcttgccactttacttttagataattgagtgtttcctatgtacaagaatattttcttacatgaccccagataaactaccatgctacaaaattatagtgagtaaaatactgttgtttaatccacaattcacctttaaattttgccagttttcctggcaaatgtactggatccattgcatttaattgccatctccagttagctctgggatatcatgaagctgctttcaaaaatacagtattttaaaagacaatatggagcagctaccccagcaagcctgccacca

SEQ ID NO: 245873 - DNA, 592 bp, Homo sapiens
aagcatgttagcaggcaattgtaggtaccgtgtcaacaaatgtgggaaatagaacaagactaacacataaggaatgcctgcaaaatcatgatttgaggtgaaaataaaatggtttcatgaaaatgctttttcttctttttattttaatataatcacaatcttacagaaaagttgcaagaatgctggagagaaggctggtaatatgtttaccagagttaccagttgtcaacattttgaacatttttcccatatgctttttgtcattatatatgtatttttcccttgaacaatgacaataagttatgaacatcttgccactttacttttarataattgagtgtttcctatgtacaagaatattttcttacatgaccccagataaactaccatgctacaaaattatagtgagtaaaatactgttgtttaatccacaattcacctttaaattttgccagttttcctggcaaatgtactggatccattgcatttaattgccatctccagttagctctgggatatcatgaagctgctttcaaaaatacagtattttaaaagacaatatggagcagctaccccagcaagcctgccacca

SEQ ID NO: 245874 - DNA, 528 bp, Homo sapiens
gccttgccaacacttgttgtctttcatattttttataatagccattcaagcaaatgtgaggttttaatttggttttgtgtggttttaatttgygttttcttgatgattagtgatgttgagcatttcttcatgtagctcttagaatgttggcactttgaaatagttttaaccagtctgagcaaagttctctaatatgtacactgtcacagatttataggcttggggatcagtcttgatgggggacggagaatagaatgactacaactcgtatgtacatcttttagttatgaacgactgagaacccaattcaaaccagctcaagcaagaaaagaaattgattggctctagcaactaaaagtccaggggaaggactggctccagttacacttggattcagcactcaaaacactgcattggcactcacactttttctttcactattgtgttgttctccatgctggctttatgttgagccactacatgttggccctagctttagaaattctcaggttcattcaagtttagcaa

SEQ ID NO: 245875 - DNA, 528 bp, Homo sapiens
gccttgccaacacttgttgtctttcatattttttataatagccattcaagcaaatgtgaggttttaatttggttttgtgtggttttaatttgcgttttcttgatgattagtgatgttgagcatttcttcatgtagctcttagaatgttggcactttgaaatagttttaaccagtctgagcaaagttctctaatatgtacactgtcacagatttataggcttggggatcagtcttgatgggggacggagaatagaatgactacaactcktatgtacatcttttagttatgaacgactgagaacccaattcaaaccagctcaagcaagaaaagaaattgattggctctagcaactaaaagtccaggggaaggactggctccagttacacttggattcagcactcaaaacactgcattggcactcacactttttctttcactattgtgttgttctccatgctggctttatgttgagccactacatgttggccctagctttagaaattctcaggttcattcaagtttagcaa

SEQ ID NO: 245876 - DNA, 528 bp, Homo sapiens
gccttgccaacacttgttgtctttcatattttttataatagccattcaagcaaatgtgaggttttaatttggttttgtgtggttttaatttgcgttttcttgatgattagtgatgttgagcatttcttcatgtagctcttagaatgttggcactttgaaatagttttaaccagtctgagcaaagttctctaatatgtacactgtcacagatttataggcttggggatcagtcttgatgggggacggagaatagaatgactacaactcgtatrtacatcttttagttatgaacgactgagaacccaattcaaaccagctcaagcaagaaaagaaattgattggctctagcaactaaaagtccaggggaaggactggctccagttacacttggattcagcactcaaaacactgcattggcactcacactttttctttcactattgtgttgttctccatgctggctttatgttgagccactacatgttggccctagctttagaaattctcaggttcattcaagtttagcaa

SEQ ID NO: 245877 - DNA, 520 bp, Homo sapiens
cataaattttcacagactgggcacatccatgtaaccagcacccagagcaaaaactggaatgtctaagcctctcaacagtcccccgcgtctctttccggccacgactccctcctccccaaaggtaccattattgttgacttcttagaagataaattggcttaaacttgtttactttatatattttaaaacacatttcaatcatttrctctatctttacttttaaaataataattttgttcacttatggtttcatccatctattcattcaacttattgattcaaacaaaaattcttaagcatctgccatacgagtaacaaccatgaggtttagaatattttaaacctttcaattgtttcctattttttttaatttgtatgcactaaaattcacttcttttctctttctttctttttctgtgaatgattacatgaattttgacacatgtaaattaatgtaaccaccaccttacaagagattcagaacaatctcatcaccccccaaaagcacctgttaataccc

SEQ ID NO: 245878 - DNA, 520 bp, Homo sapiens
cataaattttcacagactgggcacatccatgtaaccagcacccagagcaaaaactggaatgtctaagcctctcaacagtcccccgcgtctctttccggccacgactccctcctccccaaaggtaccattattgttgacttcttagaagataaattggcttaaacttgtttactttatatattttaaaacacatttcaatcatttactctatctttacttttaaaataataattttgttcacttatggtttcatccatctattcattcaacttattgattcaaacaaaaattcttaagcayctgccatacgagtaacaaccatgaggtttagaatattttaaacctttcaattgtttcctattttttttaatttgtatgcactaaaattcacttcttttctctttctttctttttctgtgaatgattacatgaattttgacacatgtaaattaatgtaaccaccaccttacaagagattcagaacaatctcatcaccccccaaaagcacctgttaataccc

SEQ ID NO: 245879 - DNA, 633 bp, Homo sapiens
ttagactgacttacggagataataaacacttttatgactgagccaaccagatgttggaatggtggaatccagtaacagattaacctaactgaatctaattgctgcacattcagactgagtgrttgatgctccactgatcttgcatatagccaaaatattcatctactgcacgacagctgattctgcccatacttgttgacatggcacgtttgactttagtcacatgtccatatatttttcttctttctctctgataatagaaatcatgtgcttctcatctttgtatcatccacgatgtcatgaataagtgaccaaaaattatttattgaataaaagacatagcaatttatgtgcacaaataaagagagtgctaatctgttttggacatgtctaactatgcagatggcaattacctctagaaggttcactttaggtgtaagagatagaagtccaaaagtttaggatttgaagagtgtgtagggcctagaggagaaattagaaatttgtacttgttttacttttgtcttttctaatgtattatcttttagatctttcctacttgaatgaattcctcgcccaacattatacaaaatgagataatgcaattatcaggccaattaacaataatgcaat

SEQ ID NO: 245880 - DNA, 633 bp, Homo sapiens
ttagactgacttacggagataataaacacttttatgactgagccaaccagatgttggaatggtggaatccagtaacagattaacctaactgaatctaattgctgcacattcagactgagtgattgatgctccactgatcttgcatatagccaaaatattcatctactgcacgacagctgattctgcccatacttgttgacatggmacgtttgactttagtcacatgtccatatatttttcttctttctctctgataatagaaatcatgtgcttctcatctttgtatcatccacgatgtcatgaataagtgaccaaaaattatttattgaataaaagacatagcaatttatgtgcacaaataaagagagtgctaatctgttttggacatgtctaactatgcagatggcaattacctctagaaggttcactttaggtgtaagagatagaagtccaaaagtttaggatttgaagagtgtgtagggcctagaggagaaattagaaatttgtacttgttttacttttgtcttttctaatgtattatcttttagatctttcctacttgaatgaattcctcgcccaacattatacaaaatgagataatgcaattatcaggccaattaacaataatgcaat

SEQ ID NO: 245881 - DNA, 420 bp, Homo sapiens
ggtttttaagtattaaattargctattacgttggcatagctcaagtttttcattctgagtgacttacaaccactgcctctattagtgtgccaagttacagtttacaaagcatttacacacatcacagatagtcccaccaccaacagattattactgtttacattttagtgtattttctcccactttaacttctatttgtatatatgtgtaatttttaaagaattagattcatactaaagtcacagttatgcctcttatttttaaaataatgttataattaaaatattcctcatatcattaaatatatttcaaaacaagttcttgatagctgcattttccttcctgtggaagtaccagccttaatttaactattcctcaggttgaacatttagattaagtattttttatatcataaataat

SEQ ID NO: 245882 - DNA, 420 bp, Homo sapiens
ggtttttaagtattaaattaggctattacgttggcatagctcaagtttttcattctgagtgacttacaaccactgcctctattagtgtgccaagttacagtttacaaagcatttacacacatcacagatagtcccaccaccaacagattattactgtttacattttagtgtattttctcccactttaacttctatttgtatatatgtgtaatttttaaagaattagattcatactaaagtcacagttatgcctcttatttttaaaataatgttataattaaaatattcctcatatcattaaatatatttcaaaacaagttcttgatagctgcattttccttcctgtggaagtaccagccttaatttaactattcctcargttgaacatttagattaagtattttttatatcataaataat

SEQ ID NO: 245883 - DNA, 689 bp, Homo sapiens
tagtagacatctgttgtttgtttttgtcaccccaaatctgtttgcttttctcctgacaacaccattctgactttcttttggggaacatacccttgctcccattctcactccaggttcttcagatggggtgagttcatgggtgggcatgtgactcagcctcggccaattcacacgacatattctcctggccatggtggtgcatcagaggtggcaaactctcaagccaaagccagtgacatgcgaaagaactttcactgagactgttgagacagaggccgtctgccctttcctgctgattataacttggaagaagaaagccctggagatcttggccactgatatggtttagctgtgtccccacccaaatctcatcttgaattgtagctcccacaattctcacatgtcgtgggaggggcccggtggtaggtaattgaatgatgggtctttgccatgctgttcttgtgayagtgaataggtctcatgagatctgatgattttataaaggtgagttccctgcacaagttctctttttgcctgtcaccatgtaagacatgccttttaccttctgccatgattgtgaggcctccccagccacgtggaaccatgagtccattaaacctctttcttttatgaattacccagtcttgtgtatgtctttattaacagtgtgtaaacagactaatagagcc

SEQ ID NO: 245884 - DNA, 607 bp, Homo sapiens
acaatgattaacagtgatttgagtcatgcatttgaacattccacttaaaagtcaatttagacaggcaatgcccatgcaaatattgattataaacccactgtgtttctagcaagctagattaatatcatgggctaaaattcaaaaatctatttttcttttctacttcattaaagagtataaccaaaaaccacatctatttgcagattggtcatatattttgcaaatgcctgtgggactgaaatttaatttactcaacatatcttccctcccaccctacctccrgtcaaaatcatcaaaaccagaactcttgttacatttatggggcagttgaaactgtatatttcactttgttttattgcactttaactttttgcactgtattagctgtgagtattccatggatcttgttaaatgtgagcagcttccttgaaaacaagtcatttcaatggacatgttttggcttatgttcagtattttacagccaatgtatcagagccataagtttataattttaaatgccgcagatcttacttattcatcatgattagatgtttctatctgctattctattgaatggcaagctctaatactgataaataaagagagc

SEQ ID NO: 245885 - DNA, 524 bp, Homo sapiens
gatcagaactaacaatactgaaactttgagattttcgtttttaccttataaaaatgtattttggccaggcgyggtggctcacacctgtaatcccagcacttggggaggccgaggcaggtggatcatgaggtcaagagattgaggccatcctggccaacatggtaaaccccatctctactaaaaatacaaaattagccaagcatggtggtgggcacctgtaatcccagctactcgggaggctgaagcaggagaatgacttgaacccaggaggtggaggttgcagtgagccaagatcacgccactgcactccagcctggcaacagaaccagactccatctgaaaaaaaaatgtatttcaagttactgcatactcatagctatatatttcacctgagatttacctggttaaataacttgcctgagaacacacaagtagtaaattatagacttaagatttgaaattgaattagtgtgtaaaccaaagtccatatctaagctgggtgcagtggctcacatttgtaatcc

SEQ ID NO: 245886 - DNA, 600 bp, Homo sapiens
atcatgggtgatggctttagcattggatatcaccatttccctttgcagtgacggtgtttccaattgaccaaaagggaaaaattaggtagagagcaaagagttctctacatgattgttcaagaaacagaaataaagtatcaagtctgtaagcccagggttctttggagtagtatcattcttaccttggtgacrgtttggtgaggattttactgctgcttccttctcctctcatcaactaaacaagaaactatgaagtccctttcctcaaggaaagggactgtcctgatagaatacccgacctatatcatgacttgttggaatattgtgaaagcacaaaattgagagaaaaataaagttatccaatgtttagatgctgaattacactgttgtataaccttgattggccactacctgtgaggtgagacactggagttagccattgtgaattcaggagtcagtaaacatccagaggtgtgaagcctgctgcaggcctccagttcccccagaaaacagtatctggttttaatgattttatcagagttgttttcaaggtcagtaagtttgttgatattttggtcatgagattagtgcgaaccaacc

SEQ ID NO: 245887 - DNA, 549 bp, Homo sapiens
cccttaggctgggcggcttcttctgccctgttacctactgaagtactcccctaatgaccaagaggttgctcagcttgtcagtgagacaagaaaattcttggagatgtgacaatcattctggacctattcctcacctgtaagataaggtgaaaatcatctaggaaaaatccttaaatcagatactggggcataccctaaatctactgtatcagaatatctgagaagatagtggcctatattttgaaaatttcttcaggtagtggttgagaaagattaggccagttgctctcaacaatcttttatggctaagacatactgcaataaaaactcccatttgttctcttcaataaggaaaaggctatgttaagtgagaactgtgagagtaaatctctcctctcaaccagtttacgactggccttctaacaaggggttaggagtctagggttggggctgtattgtctagctagtcctggggtggccacagcttaytttctactcacaagcacttgacatgggttgaccaataagtgagtttgatgaagtttacac

SEQ ID NO: 245888 - DNA, 617 bp, Homo sapiens
gatgataaatgtattctctgaaatgtattattagacttgttaaatgtgtaattaaagggattccatgaagttgttgcagcaggaatgggatttaaattgcccccaaacccccttccacacacacattattactttacctgtgaaaatcttaaaagctgttggtttacccagcagcttagagccttgaactaagtgaaacatgaaatatcttcaatatatgtaccagaggctctgtgtgtgtgtgtgtgcgtgcacgtgtgtgagacattgacaagagaaagattgatatactcaaaccctacatcatactgtttttcataaatttccatattgaatccargagacctcattttgaggatttaaaataatgtggcatcttgcttcattaccaataaaagtaagctttttggcctacccataataccccagggtaactggatttcaaaagcaaatcaacttgagcttggtctttcactaactaaaaatacagtcatgtgccacataatgacattttttgtcaacaacagaacacatgtaaaatggtgatctcataagattctaatgaagtagaaacattcttttcacctagtgatgttctgatgattctgaactgatgt

SEQ ID NO: 245889 - DNA, 597 bp, Homo sapiens
gaatgtttggcttgagctgctgatggagatctggagttgtaggaaaagaaatcccacacatgcacaccacagttcatgcctgtgggtcctgcaattttatctggtgatgccttaaagtaaatgtgacattacacacattttagcatctattttcccagcaggaagtgtaagataaagaggctcaatcagtatgttaaaataagatctgatgcaggggagggaaaaaagctttcagatcataagaaataccattccgaggaaattaaaagcctgaaatatggcatatgattactgacaccaaaatcctgctgttgtgcttttgaaggacttttaaagatgctttctattttctaaataaatctgwaaaactacgtggctttccaggtgtcagtgagcttcagtgaaaaaaaaatgatgtgcatggataccatcaccaaactttctcaacagaggaattattgaagaaaaaggggttgctgaaattaacacatgtcaaatgaaaacagtctcgatgattactttttttcaagcttcagtttccatctattctttccaagtaaatagatgaacaaacttgtgatggatgtgaactggttt

SEQ ID NO: 245890 - DNA, 634 bp, Homo sapiens
ttgatgataaaaatccaaccatttggacaattacaagttaaactggggaagatgcataagtaggcagctagagggactggtgttcttaccacccagaaactggatcatttgggagagaagcgcaacaaaaccagccatctatggcagtctctgacgaagccttaagcaccctttaaagagattctacaagaattgcctgactccatatgatttaaaagctaaatttattcagagaaaagaaagattttttgctgagggaaggacgttgctgtatgtttcatcacttgagtcgtggcagataatttgggttgagttcaaacacaatgtacttttcaaaatgtaaatctgtgaagaaaagctgaatttttagagccatcacagttttagaaattttatgctgtaatctgattttgtagtcaaggtcagtggctaaagaatgctgttggaagggsctagtctgggtcagacaaaggactgatttggggaagatttggctgatgtcttcttttgtgcagggagagttattctctcactgggttttctgtgcaccagtagggaaagaagctgcgcacacatggtatgtgtgtctgtgttactccaaaacccatcccaggctgtgctgcagtccttagtg

SEQ ID NO: 245891 - DNA, 516 bp, Homo sapiens
tgatgataaaaatccaaccatttggacaattacaagttaaactggggaagatgcataagtaggcagctagagggactggtgttcttaccacccagaaactggatcatttgggagagaagcgcaacaaaaccagccatctatggcagtctctgacgaagccttaagcaccctttaaagagattctacaagaattgcctgactccatatgatttaaaagctaaatttattcagagaaaagaaagattttttgctgagggaaggacgttgctgtatgtttcatcacttgagtcgtggcagataatttgggttgagttcaaacacaatgtacttttcaaaatgtaaatctgtgaagaaaagctgaatttttagagccatcacagttttagaaattttatgctgtaatctgattttgtagtcaaggtcagtggctaaagaatgctgttggaaggggctagtctgggtcagacaaaggacygatttggggaagatttggctgatgtcttcttttgtgcaggg

SEQ ID NO: 245892 - DNA, 634 bp, Homo sapiens
ttgatgataaaaatccaaccatttggacaattacaagttaaactggggaagatgcataagtaggcagctagagggactggtgttcttaccacccagaaactggatcatttgggagagaagcgcaacaaaaccagccatctatggcagtctctgacgaagccttaagcaccctttaaagagattctacaagaattgcctgactccatatgatttaaaagctaaatttattcagagaaaagaaagattttttgctgagggaaggacgttgctgtatgtttcatcacttgagtcgtggcagataatttgggttgagttcaaacacaatgtacttttcaaaatgtaaatctgtgaagaaaagctgaatttttagagccatcacagttttagaaattttatgctgtaatctgattttgtagtcaaggtcagtggctaaagaatgctgttggaaggggctagtctgggtcagacaaaggactgatttggggaagatttggctgatgtcttcttttgtgcagggagagttattctctcactgggttttctgtgcaccagtagggaaagaagctgcrcacacatggtatgtgtgtctgtgttactccaaaacccatcccaggctgtgctgcagtccttagtg

SEQ ID NO: 245893 - DNA, 528 bp, Homo sapiens
gggttgccagtgataaatatatagggctgagcaatatgggaagtgaattgcgataaagtggtaggaactgatgcaaagaacctctgatgaatcacagctgaagtcaactttctattatttctgggtcttatgcatttaatgagttacaatgtccttcatttctccctcttcaatatgatcatgtcacagttcataamagtgagggaaagaactctagatacaatctgacttctatcttagatgtaggaaaaacctttgtaaattcaatgttaatttctagaaacactctaggatggtttactaagcagatgatatgtgagcacttaaaagagaatattttttgatcatcaggagttgcatggattttctgggattcagaattactttgaccagtctaagcacttggctgaaaccagcaaggtgaaatggagagggaataatagagctaaaatctactgtttcctagcaaatgggtaggcactgtgttagatgttatctcatttaatcagcgctgaaactcctgagtgt

SEQ ID NO: 245894 - DNA, 528 bp, Homo sapiens
gggttgccagtgataaatatatagggctgagcaatatgggaagtgaattgcgataaagtggtaggaactgatgcaaagaacctctgatgaatcacagctgaagtcaactttctattatttctgggtcttatgcatttaatgagttacaatgtccttcatttctccctcttcaatatgatcatgtcacagttcataacagtgagggaaagaactctagatacaatctgacttctatcttagatgtaggaaaaacctttgtaaattcaatgttaatttctagaaacactctaggatggtttactaagcagatgatatgtgagcacttaaaagagaatattttttgatcatcaggagttgcatggattttctgggattcagaattactttgaccagtctaagcacttggctgaaaccagcaaggtgaaatggagagggaataatagagctaaaatctactgtttcctagcaaatggktaggcactgtgttagatgttatctcatttaatcagcgctgaaactcctgagtgt

SEQ ID NO: 245895 - DNA, 583 bp, Homo sapiens
ttcactcttgttgcccaggctggagtgcagtggcacaatctcggctcactgcaacctctgtatcctgggttcaagcgattctactgcctcagcctccctagtagtgggattacaggtgcccaccatcacacccggctaattttttgtatttttagcagagatgaggtttcaccatgttggccaggctgatctcgactcctgacctcaggtgatccacctgccttggcctcccaaagtactgggattacaggcgtgagccaccgcgcccagcccggatgataccttttaacagagatactgagaaatggaaataactacgatgatgacagaggttggaaatagtcgcaagagagaaacagctgaaaatgttttggtttgatgaaggcatgcaaggggtcagagaggtagatgtctttgggaaaggctgtccagataggttgacagtaccttgagtcctcttwgttcttggtcttgcaggtgcaaggatttcactttatcagttaattagtattcagagttgatcttggcaactgactcattctaaccaaacttgtaagagactgttgcatataccagaatgcca

SEQ ID NO: 245896 - DNA, 415 bp, Homo sapiens
caagggcaacggggcatgcaccgctacacccggctaattttctaatcttttttttttttttttttttttttggtacacaggctttctgtgttgtccaggctggtctagaactcttggcctcaagcaatcctgcctcagccttggttcctatttattttgaggatgatttcttttacacagaaacaaccatctcagttttaatgttttcctatcagccacttggtaaaagagagtttatgtccccatctaccttstgttcttttggggggtaagaagacctaaatgtaaaaattttttaattaagattatccagcaattttgagttcctaccaagtgttcttaactactgggtttaaaactttggggatttaaaaatgaattgtgtttatttacttgtctgtccaactcatatgtt

SEQ ID NO: 245897 - DNA, 566 bp, Homo sapiens
agccttccaatactagcacatgagtgcgtaaataaacataaaccaagtgattatttagtaaataacaggattctgatttcatgtaaatgaatacctttgtttcactttgagatgatcctacatctggaacagtgcctgaaacatgactgctatggcataagtcactttttwaaaaaaattgttctacatttaccagcctcatgtttcgtaaaaggcacacatttagttcatgaagaaaaaccatggtttagatcccagagagattctcccacaagtcctgagggaggatgttcattgcagcattatttgtggaggcaggaaattggagtaccatccctgggagagtggagagggaaaatgtgatagatgttcaccctggggtacagcaatcagctgaatggatcacaagtggacgtagcgacatggatgcttcttaaaggcaaagttctgagtggaaaagtaagaaacaaagcaagatttatgacaatgttatttatacaataccattttaagaagttaaaaatacatacacacaaagcacaggatacatttcagttgtgtggttg

SEQ ID NO: 245898 - DNA, 590 bp, Homo sapiens
tcatcttactatgctgggagcaagtatgccttagctatgccatgtcagccttccaatactagcacatgagtgcgtaaataaacataaaccaagtgattatttagtaaataacaggattctgatttcatgtaaatgaatacctttgtttcactttgagatgatcctacatctggaacagtgcctgaaacatgactgctatggcataagtcacttttttaaaaaaattgttctacatttaccagcctcatgtttcgtaaaaggcacacatttagttcatgaagaaaaaccatggtttagatcccagagagattctcccacaagtcctgagggaggatgttcattgcagcattatttgtggaggcaggaaattggagtaccatccctgggagagtggagagggaaaatgtgatagatgttcaccctggggtacagcaatcagctgaatggatcacaagtggacgtagcracatggatgcttcttaaaggcaaagttctgagtggaaaagtaagaaacaaagcaagatttatgacaatgttatttatacaataccattttaagaagttaaaaatacatacacacaaagcacagg

SEQ ID NO: 245899 - DNA, 590 bp, Homo sapiens
tcatcttactatgctgggagcaagtatgccttagctatgccatgtcagccttccaatactagcacatgagtgcgtaaataaacataaaccaagtgattatttagtaaataacaggattctgatttcatgtaaatgaatacctttgtttcactttgagatgatcctacatctggaacagtgcctgaaacatgactgctatggcataagtcacttttttaaaaaaattgttctacatttaccagcctcatgtttcgtaaaaggcacacatttagttcatgaagaaaaaccatggtttagatcccagagagattctcccacaagtcctgagggaggatgttcattgcagcattatttgtggaggcaggaaattggagtaccatccctgggagagtggagagggaaaatgtgatagatgttcaccctggggtacagcaatcagctgaatggatcacaagtggacgtagcgacatggatgcttcttaaaggcaaagtkctgagtggaaaagtaagaaacaaagcaagatttatgacaatgttatttatacaataccattttaagaagttaaaaatacatacacacaaagcacagg

SEQ ID NO: 245900 - DNA, 610 bp, Homo sapiens
tcacaacaaataagacagaaaacccacgtctgctttttggagcagaggatagtatagcatttggtgtgaattctatcttggaaactattaatagcctgctctgccaatttttcagtcccctgcccccaaggactggacaactgaattgcgtggtagactgcatctattgtgatattaatttggtctttctctggtgaaaagacataaatgaatggatggtaggaatctasgaaaatggatataattaccccattttgcaaacgaagagactaaaagaggtttcatagcctgtccaaggtcacacagataactgatggagccaagagatgaactcaagtcagctaccttcagatcccagctctttgcattaaacggtgctgaaataccttaacattcttggagttcatttacctgccccgttatttcaccatctgccctacagaaaggaatggaagaaaatataagcagtttttaagaggattggcacatttacaaagggcaaagcccaaaaatctgagaaaagatattgggttgatattgttgatattgaaagacaatcgggccttccctgaagctaccactggtgaaccagcaccaggcaggagtttct

SEQ ID NO: 245901 - DNA, 610 bp, Homo sapiens
tcacaacaaataagacagaaaacccacgtctgctttttggagcagaggatagtatagcatttggtgtgaattctatcttggaaactattaatagcctgctctgccaatttttcagtcccctgcccccaaggactggacaactgaattgcgtggtagactgcatctattgtgatattaatttggtctttctctggtgaaaagacataaatgaatggatggtaggaatctaggaaaatggatataattaccccattttgcaaacgaagagactaaaagaggtttcatagcctgtccaaggtcacacagataactgatggagccaagagatgaactcaagtcagctaccttcagatcccagctctttgcattaaacggtgctgaaataccttaacattcttggagttyatttacctgccccgttatttcaccatctgccctacagaaaggaatggaagaaaatataagcagtttttaagaggattggcacatttacaaagggcaaagcccaaaaatctgagaaaagatattgggttgatattgttgatattgaaagacaatcgggccttccctgaagctaccactggtgaaccagcaccaggcaggagtttct

SEQ ID NO: 245902 - DNA, 573 bp, Homo sapiens
gacagtgaagtgcgagaaggaaatgctgacagctaaattrcccttcaagtaaaggaagataattctcctgcctagatgagggggcattcatgccagagctcaaatttaaattccaacagccctgtatggaccttcagaccattattcgctttcttgtattcagttatcagctctttcttcattgcttaaatgtttggatacatccagccagaggctttttggttgatgagcacatttccacaaagcagaaaaaataaacataatatggttgctgcctacttcaagaaccccatatggccacttttagacaggggtgtccacctctggagaccagcttcccatatgaaagggtgtttgtctcattctgagaccagctttataaatcaattacaaaattcaaatctcattctgtcacttcagccacgtaagaaaggaaggggagacaattttaatgactctggaaatttccatatgcgtaaaagctgtaactagcaaatattcattttctttcttggcagatgactctggtaattaaggtaaactactaataaccctttccagagtgtaggatag

SEQ ID NO: 245903 - DNA, 456 bp, Homo sapiens
tctgggctgaatgataaatcagggattgtaatggaaatcactgttgacctttaaaagggcactgtctttatattttcacactgtgctgtttgaaatgtcgactcagaatcaggaaaataatataccatcgatttctctccatacctcttataacagagcttgaaattgacctagaatgcattggtatgtgttttctcattacggttgtcaacatcatcggaaatggtgattaatgattcagtcttgggaacagtgttgttagaccttgtaattactgtatgaatcgtgtccaagcagcaaytagcctaccctatttataccaccccccagaagtgggtgtattttaaccttcatgtggtaaaacttcatggttctcgattaaaagcctctactagatgggaatatcatttcctcacattgttgtttatcttggttaccgtcttccccttgtccatt

SEQ ID NO: 245904 - DNA, 611 bp, Homo sapiens
gatagggatccagctacattctttttgaaaatatttttttatttttgagacagaatcttaatctgtcacccaggccagagtgcagtggcacaatctgagttcactgcaacctccgcctcccaggctcaagcaattytaatgcctcagcctcccgagaagctgggactacaggcatgtgccactgcacctggctaatttttgtatttttagtacagatgggcttttgctatgtcggctaggctggtcttgaactcctgacttgaagtgatccacccaccaccttggcctttcaaagcgcggggattatagacttgagccactgtgcccgacctcagctgcattcatttgcatttgtatgttttcccagtaccatttgttgaaaaaaaaaaaaccagttctttccccactggattgttttttcctgcttgtcaaaaatcaattcatctaccagatgctgtggctcacacctgtaatcccaacactttgggaggccaaggtggacagtattgcttgagcccaggagtttgagactagcctgggcaacatggagaaaccctgtctgtacaaaaaatgcgaaaaaaagttagccaggcatggtggcatgcaactgt

SEQ ID NO: 245905 - DNA, 418 bp, Homo sapiens
tccaacttgggcttggttctgatattgtttgagactgtttggtaatttatacatatatgactgtaataatgtccttttcttctctcccccmacctccgccaacagttacatgggaattggtctttctgctcaaggtgtgaacatgaatagactaccaggtacacttgtaattgaattacagtattatgtcttatgagtagctctttctggttaaatttttcaagtaagaaattgtaatatttaaagatactgattttctgtgtttttaatcatcattatgaattttaagtgaaagctgagtggggtttttttgttttgttttgtttttgagacagagtctcactgtgtcacccaggttggagggcagtggcgcagttttggcccactgcaacctctgcctcctgggatcaagcggttt

SEQ ID NO: 245906 - DNA, 612 bp, Homo sapiens
atttcatctttatattatcttgtactgttctgatttatcataatcttagtgaataaacctagtacagaggaaccttacttttcattgtaaatatgccggaactttctccttaggttgggataagcattcatatggttaccatggggatgatggacattcgttttgttcttctggaactggacaaccttatggaccaactttcactactggtgatgtcattggctgttgtgttaatcttatcaacaatacctgcttttacaccaagaatggacatagtttaggtactgagataatatattgcatgcaaaataaccaaatatggagattattatacttccaggatggtagttgtatttattatgtgattctcctttatagatggatgcctctggaaatggtttctttctttttcccagacagaagctgaggaaatggtgaatatttatattcaccctatttatattctgtgaaggccatctatataatacatatatgtataggagttactgtagaaataatccccacactgagatacttattctagaaatagaaatgccaagagttttctactttaaataaarcgctacacagtataatctaattctctgggta

SEQ ID NO: 245907 - DNA, 534 bp, Homo sapiens
ttatgaacagggttctttgtgtttttaacaatatctggcacatttaagcaaaactctttactgaaacwtggagcctggataattgtgtgcttcgtgatctatgcccagcaggggccccaactctgctcttcaggcagacaggaatacagaaatctattattgtagtttgacattttctttgaatgattaggtcagttggtaaatctccacttcacagttcttagaagcccagatttccctttataaagcaatgtggttctgattatagcattattgaaatccagacatagtacctgtgttctgctagcagttctacttcttgctttctttgttaacataagcaatatattgaccctctctcccacttctttgccttcaatggatgagaagattgagaaacctggggcttgtggtgaggagagtgaagacagagtaaatattatgcacatttcaagttatggtacgatgctctaaagttagaagaagaaaataataatgaatattactaaaagtaaaaatgttcttgtagtgtag

SEQ ID NO: 245908 - DNA, 534 bp, Homo sapiens
ttatgaacagggttctttgtgtttttaacaatatctggcacatttaagcaaaactctttactgaaacttggagcctggataattgtgtgcttcgtgatctatgcccagcaggggccccaactctgctcttcaggcagacaggaatacagaaatctattattgtagtttgacattttctttgaatgattaggtcagttggtaaatctccacttcacagttcttagaagcccagatttccctttataaagcaatgtggttctgattatagcattattgaaatccagacatagtacctgtgttctgctagcagttctacttcttgctttctttgttaacataagcaatatattgaccctctctcccacttctttgccttcaatggatgagaagattgagaaacctggggcttgtggtgaggagagtgaagacagagtaaatattatgcacatttcaagttatggtacratgctctaaagttagaagaagaaaataataatgaatattactaaaagtaaaaatgttcttgtagtgtag

SEQ ID NO: 245909 - DNA, 568 bp, Homo sapiens
tcttattcatcgtgggccattgcctggcctggcatagttacccaatgggtgaagcaaagagcaaatcattgaatttatctaaactctctagtcagaatgaagctcaggaagggttccagagtctccgtctactacaaccaactcagggtccatgaattttccttcacttgctgccacagttgctttgattcttatgagagccttacattcatttagtttctattagtacctagaaagagaaccgaacacattctagatgcttggtcaatgttaatagaattggaatcttaatattttattttcagcaagttgagcaaccttaggcttgccatatactttattaactctactaaaaaagccaagcttgtaaacataaaaagaaaatatagtgataacactccccccaatttttatgtcagcaasacacttttctataattgctgaaatatgaaggctaagccagctgaaagttaaaaataatacttggagtttttaaaggaacatatttcaaagagtttttacataccactgcactgtatctgttcacatagaatttaaggaagtgttc

SEQ ID NO: 245910 - DNA, 501 bp, Homo sapiens
acatgggcaaacacctaaggagattcaggccattggtggtgggaagggctctgagttggctcactggactgtrttgcctgcacccactgccaaagcctaactcttaattcccacaagtagaagcaaggataaaattacaaaacactgaaatgtggttccccaaagatatcttgtagacattttgtttttccccatatggaagggttaagtgataggaggaaaatggcctcaaatatttgagaaaatgctatatagagacaagtatgaataattagggaaagagcttcttcttttttttttttaatgaaaagctgtgggggttctatgtattggtgcatggaataccttcccagttccagctacatcatttgtgggcaaagtacagagcctcagtttgacatcttaagatggagatgacatctgtttatcttgtgcttttattttgagatctaatctattactaggtttgtaaaaaatatttagtagttgataattttagaa

SEQ ID NO: 245911 - DNA, 628 bp, Homo sapiens
aggcgggtggatcacctgaggtcaggagtttgagaccagcctggccaacatggtgaaaccccgtctctactaaaaatacaacaattagctgggcgtggtggctcatgcctgtcatcccaactacccaggaggctgaggtgggagaattgctggaacctgggaggtggaggctgcattgagccgagatcttgccactgcactccaaactgagcaacagagcgagactccatctcaaaaaaaaaaaaaaaamaaagaaagaaaatcagtagggtctaagtttagtcatcataacttaaaacagcctctttttggggaagaaaataattcaaataatggctatacataagagtacaaataagatatagctaaaaatttattatattgcagtttggtcatgtaatactgcctgtaagtagagaggaccccggaattgcagtcttagcaatgttaagaaggcaaaatgaattaaatgctttattctttcagtcctgagtatcagtcatacaaactgtgttgttctctaacatctctaattcatttgaccacaattcctgtgactacaggtattaaaaaatagcagcttttaagcacagttagtattatatctaccctgccataattagcatat

SEQ ID NO: 245912 - DNA, 509 bp, Homo sapiens
acaaattgtgactgcacaggttggctctgcacacatatgccagctggcaaatgttacttaatgacttattatctaactattggaagccaaagactagaaaacctacaatcccttctgctaaatatgtgctggcaaggtcccagttaagaaaagtctagttttatgccagttacttttatcttactttcawataagaatttgtgacaaaaacaaagcactactatcatttgctatgggttgctctgatcatgtcaatagtctcatattcccagtcttaacaaaaattaccaagagaggttctctgagctgcaggccttttacaaaagcagctatgctttctagattaatattcagagggtgacattctggggctgctactctagagactctgccatgcctagaggccacattctgtgccaacaggtgaaaagactgtcccctgtattttaggaaatcttgtttcataagtctcctgcgagtttaggtcattgtcctctttgcttaaaatt

SEQ ID NO: 245913 - DNA, 559 bp, Homo sapiens
ttatggtagttgtaatattttagccccagttttttttttttttaaatgcgtataaagttatgaccttctctgcaataactctgtttacctccaaggcccactgcaatgagaaccatgctatatttagcacaatttattctgtgcttagcagaataacctagaaaaccctgttacagtaaacgtactcccacaaaacactttaraaaaaatttttcacccaaaacactttctacacaaatcatgaggaagagagattatgtttctgccatgcttctaactttctgcttgcacacaaagggtcttttccaaatctagtaagcaccatcttctcaaatctaaataagcatgttctaaccaatgatcagttgttactttctatctctcctctgctaaagtcttggccagaaaaagaatgttctaaataaaaaaatcacttccttctacacaattccaataagagcctaagttttagaaattcttaaaacgaacacataacacagtcatgggcagtatactattaagccttcctagttattggatgtagacatggaggtcagac

SEQ ID NO: 245914 - DNA, 559 bp, Homo sapiens
ttatggtagttgtaatattttagccccagttttttttttttttaaatgcgtataaagttatgaccttctctgcaataactctgtttacctccaaggcccactgcaatgagaaccatgctatatttagcacaatttattctgtgcttagcagaataacctagaaaaccctgttacagtaaacgtactcccacaaaacactttagaaaaaatttttcacccaaaacactttctacacaaatcatgaggaagagagattatgtttctgccatgcttctaactttctgcttgcacacaaagggtcttttccaaatctagtaagcaccatcttctcaaatctaaataagcatgttctaaccaatgatcagttgttactttctatctctcctctgctaaagtcttggccagaaaaagaatgttctaaataaaaaaatcacttccttctrcacaattccaataagagcctaagttttagaaattcttaaaacgaacacataacacagtcatgggcagtatactattaagccttcctagttattggatgtagacatggaggtcagac

SEQ ID NO: 245915 - DNA, 545 bp, Homo sapiens
aacagccatgatatttataaaaacaatgaaatatttctgtaatagtcggtaaatagcctttgccctaagcaccctgagtgttcccctgcttccttggcctcttccccaaacacccctcagatagtcccactatccagcaaataaaacattggcagttgatgcagcaaaagcctccagtatcctgctccagaatggcagaaatccattcygattggtaggtattcatgacgcatcaggttctaagtattttgatcaccactcttgggtcctgttctaatagcaacatgcagcaatagggaatcccttacaccaagacgtgacattctggtgtaggagggaatcactgccactgtgctcccacaggcgtgtttgtgaagatctgaggaatgactgctatgctcgaagcactggacacatgcctcatcttttgtgatccttaattaactttgggaatgttaaaatataacatatttgctctcttatgattttattttaaaatatatacctactacattgctaacagctgcgaattcatacagaatgaa

SEQ ID NO: 245916 - DNA, 622 bp, Homo sapiens
  misc_feature (1)...(622): n = A,T,C or G
nnnnnnnnnnnnnnnnnnnnnnnnnnnnnngaattctatagcatttgtgcaaytgaattagtttttttaaatggcttctagattcacatctgacctgcaaacgcttttctcactcagattataaaaacattctcctatggattgaaaagtttgatccattttggaattcattttgatgtagccaaatgtgaggtaaggattcaacttcattttctaccaaatgtttactcagttgttccaacatatttattgaataaatgctttacctccactatttctaatgccaccttcatcatatactaaaggcctgtatatatctgaatctatttatggccctttcagtctattgtattaatcagtctgtctatccatgtgccactatgctgttttaattattgtaccactataatgtgctttaattgggcttgctccttccttattattgtcatctttcagaatttttcttgctctacttacttgtctatttttatacattaactttagaaacagcatatccacttccaaaaaacatccttgtcttataaatttaaaactaaatatatacactaaggaaaatctttaagaggttgtgtcttactaaaaatatattatatgcatttcc

SEQ ID NO: 245917 - DNA, 503 bp, Homo sapiens
ttggctccctataaccactaccaatactattaaacttgcgctagtatagccttttcttggaagatcttaacaattcatttaaaatgcatgttaattataactgtcttttgatgaaaaacaaggccgtagagaaaggtaaaagtggtgataaatataaaactakattcaaagccaatgaaatgcctaaataataaaaatatttataagccctagctaacagctccacctttctaagtagtattcatggcaacaaaattcaaggtaaaaaagtacatttccctagagtttaatgtaaaaaaaatttggaaaatttcttactctaatgaaaatatatgttcacatctaatatagtgctttatagttatgttcaatacttttattggaattgaattttaatatttaatgtagaacattttatgtataagtaactagaagctttaagataactagataactttttaaaattagataactttaaatagaattgtcaaatgtgggcactc

SEQ ID NO: 245918 - DNA, 585 bp, Homo sapiens
taatatgctttcccaatttggctccctataaccactaccaatactattaaacttgcgctagtatagccttttcttggaagatcttaacaattcatttaaaatgcatgttaattataactgtcttttgatgaaaaacaaggccgtagagaaaggtaaaagtggtgataaatataaaactatattcaaagccaatgaaatgcctaaataataaaaatatttataagccctagctaacagctccacctttctaagtagtattcatggcaacaaaattcaaggtaaaaaagtacatttccctagagtttaatgtaaaaaaaatttggaaaatttcttactctaatgaaaatatatgttcacatctaatatagtgctttatagttatgttcaatacttttattggaattgaattttaatatttaatgtagaacattttatgtataagtaactagaagctttaagataactagataactttttaaaattagataactttaaatagaattgtcaaatgtggscactctctgcattatttgttatatatcatattgattttttaaagaacagataagcaaatggataaaagaa

SEQ ID NO: 245919 - DNA, 520 bp, Homo sapiens
cacttctcctgacattagacacaattttttcctgtgtccttcctacagtgacaattaatctttatgtataattccccagaatctcttaactcggcttacacgctaaactcaagacagaaatcaaattatgacactctctccttaactcaatgttcaaggcgcttgatccataattcaaagaactctgtcattcaactccaaactaccattccagctttcactgtcattaaacccctgcttcctgagtttscaaccagagcaccactttcctgtcatggtggcatatgcacactcacactctttcctcaccagaaaggccctttcctcctcaaaccacctcccagattcttactctcctttcaaggtctaggtcaaatcccattctatctggaaaaccttcctatattggtctcattctgtttatatgtttcataatggaattatttaaatttttttttctactggattatgatggggggacactttctagtcatcattatttccccacaacacttagtcc

SEQ ID NO: 245920 - DNA, 652 bp, Homo sapiens
atgtttgctgaatttatgaatgaatgcattagggckaaagtggaaagcaaagaccaaagaaaggacacagaaggactgaaaaagcctttggaagagaggaaaatagttcaaggtcagaggattcaatggaggattttaatgtcttctgattgctttaaattatggtaggagaccatgccaaagagctgagcctctgtggaaaaaggtctggaatcaacagtttattgtgattgtataacgcataccacaaagtgaattggacacatctttaatataaataattctttttattctgcatgactatcaggtataaatagtttgcaattaggataactgactatgatttccattacggttacatggctcaaatgagcatgtgggtagatttagttggggaaaaaaataatagagcaggcagaggccttaggctgttgtagccatctaaatgacaagagcatggtgtaagaatagccattgacatggatgccattcacttacagaacatgacagttgctctctgccctttcccacctttttgcagatctccaaaatcttaaagaaatgaagggcaaggaacttatagcctgaaagcttttagatttcctcaggatatagaaaccaattgttttaaatcctctaatatgtcagagat

SEQ ID NO: 245921 - DNA, 652 bp, Homo sapiens
atgtttgctgaatttatgaatgaatgcattagggctaaagtggaaagcaaagaccaaagaaaggacacagaaggactgaaaaagcctttggaagagaggaaaatagttcaaggtcagaggattcaatggaggattttaatgtcttctgattgctttaaattatggtaggagaccatgccaaagagctgagcctctgtggaaaaaggtctggaatcaacagtttattgtgattgtataamgcataccacaaagtgaattggacacatctttaatataaataattctttttattctgcatgactatcaggtataaatagtttgcaattaggataactgactatgatttccattacggttacatggctcaaatgagcatgtgggtagatttagttggggaaaaaaataatagagcaggcagaggccttaggctgttgtagccatctaaatgacaagagcatggtgtaagaatagccattgacatggatgccattcacttacagaacatgacagttgctctctgccctttcccacctttttgcagatctccaaaatcttaaagaaatgaagggcaaggaacttatagcctgaaagcttttagatttcctcaggatatagaaaccaattgttttaaatcctctaatatgtcagagat

SEQ ID NO: 245922 - DNA, 404 bp, Homo sapiens
gtatgtcaagtaatttgctgtctaatgaactcagaatggtctctttgcatcaccaattgttgaaacaacttgtcacttaattttgtttatttctacttggctacctaagaacaaagagataatcatttcttagccctcttatagactaacagtcactcaggtgattgtcttagctcaccattgaagggtttttcttacatcatcatttgactcatccagttaatggataatactcttgtgctttgaccatttctargctaattataatctttctcttcataggtggccaattgctttttactgttaaaatatacaatatttattttttgtttcttattctataacaaagtatttcaataagtttattcttaaaaaaagaaagacaacttagagcagtcaaaaat

SEQ ID NO: 245923 - DNA, 613 bp, Homo sapiens
ggcattgttggaaacatacactctgtacctccactaaagcattttattaagttctgaaggtgctcagtgagaaccratattatctattttgaggagtggtgagatggggatagtcaagattagtgatttacctgagtacaaagcaacataactttctttgctatatcattatatggtttcagtcctgaagatgggcttgtcacagatactgcccttaatattttgacctatgattgttaaagaaagattactctcttttctttcgatcagcactcattaaaatagcctttatgtctggttgcaatagaatatatatttaatatttaaaagtttatagagatacacacagaagttaatatacttctggaaaaataaatggaattacttgaggctgtaggttaatcagcgttttctgtgtgtgtgttgtaagaatgcatatatgtatcatttattctaattagaaaatacataaataaaaagaaaattttcaaattaaaaatatgttaaagtagaaaaaatgctacagattactgctaatattttgtgtgctttcttctagtagattttctatttatataattgtaaaattttatatgtatgtattttacaacac

SEQ ID NO: 245924 - DNA, 574 bp, Homo sapiens
taaactaggctgtgcgtagttaaaatccagtgtctgtactaacaaaatctgtcagcccaccatcatttatgttttataataaatatagtgcttaacagaatgtgggaataacattaccatgtattgacaagcctattatactttgaacaggtactacaaagaaagctgtaaagcaaatgtctttgttcactgtgaagtctgcatcgtagaataatccctagagatgaggaaggaagagtttcagacacaattagggccccttttaaagggtatcctcagtaaaatactgtgtataagttcttcagcattagcacatgtaccctctcttatgattgctaataagtcctctgggcctctagtcaactttctggtctttgctttaaaacctgtctcaactgaaaggcaatgaaaggtcccttcaagtcagataataggggtgtgcacagaagcaggtgagattgtttctctctggtttgattggtactatctttggaatttcagcctaygattttatagtctctacactgttattccatatacctgcttgagtgttaaatggaagagcagaatagta

SEQ ID NO: 245925 - DNA, 581 bp, Homo sapiens
tggcagcatactatatatttttaattttttatttaatttacttgagatcactgcatataaattcaaataaaactctcttcttcttgttctccttctccacttctcttttttcaagtacataatattccattgtatcataatttgattggctagtctcctaccactggacgtttggggtgattctaatattttgctatagggaacagtagtttagttaatatcttggtaaagagtcatagaattgcaaggtcaaggattatgrcaataaatgcacctctaaagatttgtcactggtttacattcccaccattggtatgtgagggtgcttgtttccccacaccaaataatccagcttctctttttttgcatctttggaaatccaagatgataaaatatgatgcattttttttttattatgagtaaggttgtgtgaatcttttcatacattttaagaccatcagggtttaaaaaaatatttataaggtgtctgcttagttacctctttctacgttttgtctgcttttctattgggtggttttgttttccaaggaggtctttacttaaggaaatagcctttaatt

SEQ ID NO: 245926 - DNA, 648 bp, Homo sapiens
tgtgtgtctgtagtcccagttacttgggggctaacgtgggaggattgcttgagcccaggaggtcgaggcttcagtgagctaagatcaggctactgcactccagcctggtgacaaagtgagacycagtctcagaaaaaaaaaaaaaagaaaaaaagaagagaccattcttggcatttcttggatccacttcctaggagcaactccttcacagttctgttggatgtcttttgctgaggaaacttaaaagaagagtgttagtggtataaacatcagacactgctactgtagttggtcttgagtctgcaactgatactcattctctcccatctctgtcattttaaattcccttggttggcacatgaaggtttagatgacttatcttatggcgatgatccagaatctcattgccaagaggtctgatctcattgtcaccatacctttgttagtctgtggtcacttcatttcttcatttaccatcaaaattggcaagggagtatcaagagacacccaggtggatcacatgagtactgaacatattccttcctgaccccagtgtatgacagcaactctctctactcgtgatgatcaaggttaattatccctgctagcatagtaatttctttctttgctcttggtgtcctgacatgc

SEQ ID NO: 245927 - DNA, 596 bp, Homo sapiens
atcactggggactgttttagagactgcctatcacagcatcccatccamgtttacaactcatgaaaattttaacattcataccactactgcaaaccagtgatcactggcgttctccttatacacctttgatggggtcctcgttgccagtcggccagcagtaatctactgccaaaatttcatttttgagcgtgcttccttggatgaatcttggcaccaagtgacagatttcctggaaaacagactctgatgaagagctttacatgtaagaagtttatagaaggtgctgtcaaatttaacatttgtgtggaggaggggcattggaagcaagattgaacagagggagaattgaatttttatgcagttatatcaaagacctcaactgatataagaggaattctgtaactgtaattctgtaattctttagagttgtcctgaattaagacaaggagatgaacctttataacaccccatcaaacagtgattagatagataggatattataaatgatataaaatataatataatattataaataatatcctatccatcagtgatctatctatcttccattatctctctatctatccaccagaatt

SEQ ID NO: 245928 - DNA, 456 bp, Homo sapiens
tgtgagtgaaaatatgttggccatatatacctgatatatgtaattataatcttcataatcattcatttcagatttgccaacttgcacatgtggaaatgttcaatttgtaatgtgattataacacaaaaacaaagcatgtttgatacctgtggcttggtcgtttcatagtaactgcagaaaattcaaaaaaccgtgttacatttcatattcctggccaagtcaaactctgaaagtagctctataattcttggggaatctctttaagcagacttgtgtcaaggtcaattagaatccaaacagcctttttctaattggggtgaggtatgcagttgaataattctgtcattaagcaaaccccttataaaggttacaactccaaggcaaacctcagccccagggctgaawaaacacaggagaataagagtgcagcattccacgactggcaccttcacctca

SEQ ID NO: 245929 - DNA, 590 bp, Homo sapiens
attaagtagtgttattaaaaactgaaggcttaactttatagtaaattgtgatttagagaaaatatagtgctggaacaaattaaagtaatcatatgtcaagaaacaataaagctacccctaggaacattcagatgattttttaaaggactagatctggtattcacttaatgacaggtaaatgatcttttgatagagcagtaattcatggatttaatttcaacaattgatctaaattacatatatataaaagaataagagaagcatgtttgatttcccaaagtgttgaatttcctaaaaggaaaaagagaaacacaataacgtaaatgaagtaattctttaacacttatttttaacacaatraaaattatatttcagtgacatattaactttttatagccttttgaattttattctataactttttaaaattgctgataacaacactagaacctactttttgaaaagtatatactaattgtactacagaatggtctttaagattagaacagtttagaacagttaatgggtttttttgtttgtttctacctaatgatttttgccttggtccacaaataattttaataattgta

SEQ ID NO: 245930 - DNA, 570 bp, Homo sapiens
aatcttagtatgtaatgctaacaaatttttaggttaaattcctaaactgagaatctctttttcatgggttatgctcataaaaagaagtatgtttttaataaaacaagagtaattcattcttattgaaaatatcaaatagtcaaaaatgtgtaatataaaaaattacccactgcgctccctagaggtaaccctgaatactagtttggtatatgtccttttagataatttatctatttattcattatttaataaaatgtatagaatagacacaatgtgccatagtagtcactggagaaacagcattgatcaaagtagatacagttagttcattcatggagcctaagacattagcaatagagttcttaaataatacactaatacctatgtatacaattacagattgcaataggtgcattgaatgygtggcaaattgtttgatgagagacacaacaggactagttaatttacactaataggtgagagaaagtgagaagatatcaaggaatgtttcactgaaagactaacatgtacattaaaatctgaagaataaactaaattagccaagtgaga

SEQ ID NO: 245931 - DNA, 558 bp, Homo sapiens
cccatttggaaatcgagacgcgaggcttttaaaaaattattattattatttttaaacatctctaaatgttgctcgggatcgtttgaaaggattttcgtgcaggagcgttgggggctgctgattattttattttgtttattttgattcttctgtgawtgcctattattgctgagttgaggccatagaaatctaaaggtaagagaactcctcactttaaaaggaaaaaaagtctgggcgatgtgaaagtttgtcacttcggacagtttcctgccggggcaccgtttctacgggcgccccccgcccccagccttctttcctcctcgcccgcagtctcgcggagccctgctgcttatctacgttgctaagccgggcgatttccttgttcctcctgcgaaacggtgcggtctggacacgtctccggggtgggtcgtccggccttcggtgggtttctctgccggcttgtcggcctcttttccttgcgctcttctcctccttcccctccctccgtgtgtctctgtccgtcggtttcggggacgcacaaggtgcggttgccaaaat

SEQ ID NO: 245932 - DNA, 573 bp, Homo sapiens
gggcgatgtgaaagtttgtcacttcggacagtttcctgccggggcaccgtttctacgggcgccccccgcccccagccttctttcctcctcgcccgcagtctcgcggagccctgctgcttatctacgttgctaagccgggcgatttccttgttcctcctgcgaaacggtgcggtctggacacgtctccggggtgggtcgkccggccttcggtgggtttctctgccggcttgtcggcctcttttccttgcgctcttctcctccttcccctccctccgtgtgtctctgtccgtcggtttcggggacgcacaaggtgcggttgccaaaatctgaattcctggcactggccacgcgactttggagccgctctcggccgagttccaccttgccaagtaacagctttgctgtccaacatcgtgtgctgcttcgcgagaaagtcacattcggaccctttggctagattgtggggatttttttttttttccttttgctgttggttttttgaaagggcctttctctaaagtctacctaaacggtttttttttaagctatctttggaggttgacagcttttaaa

SEQ ID NO: 245933 - DNA, 533 bp, Homo sapiens
ttgctcacctctggtccttcaaagctcactcctgtatgcacagtaagggacttactagggtcagctaaggctaagtcaggggctgataatagtttttgcagagtaatgagtacccagtcaatggatggctcaatactaatttccttaaatgttgaagaacctrggttgatgagacagattccttttgttctctagctttctcctgcttggtcaaatctaccctgatcttattcttataactcacagttacatcattaatggtttagcaatcatgaaataagcttcacaaactttatgtcatatccatcatattcccagaaggagaaaaaatcagacggtgacaatttctatgttcatcctcactttggctaatccctgtgatccgaggaacaccggcatttatcaggaggtaatttcagtcttgctttctccaaaaagttccttttaatcttctccaaagacaagctgatatctccaaatagcttgtgtctcaactatttttgctactaactgttgaaagatggcatgaaacc

SEQ ID NO: 245934 - DNA, 551 bp, Homo sapiens
catgctcagtttgatctatctgtgagatatacaggcaggatatacgtgtctgggggtatagagggatctgggctgcagatacagggtaggaactcatcacattatctatgtccaaagatcacccagctagtaagtgacagaggttggatttatacccagtctaggtractcccaaaccctgtacacaactaacactcagtactgttgctttcttagatgacctgcaatcccaaagtcaagattctaaagatggcattattccattggctgtagtccatgccattccttcacctccagagtctccattcctcattccatacccttaaggggacttagaaccatccttccctttcctgtgctgtgcagcttgtgtttgccaaaatgagctttagcctctgacatggtttggctgtgtccctacacaaatcttatcctgaattgtagctcccataattcccatgtgttgtgggagggacctggtgggagataattgaatcatggggatggtttcccctattctgttcttgtggtagtgattaagtctcacaaga

SEQ ID NO: 245935 - DNA, 551 bp, Homo sapiens
catgctcagtttgatctatctgtgagatatacaggcaggatatacgtgtctgggggtatagagggatctgggctgcagatacagggtaggaactcatcacattatctatgtccaaagatcacccagctagtaagtgacagaggttggatttatacccagtctaggtgactcccaaaccctgtacacaactaacactcagtactgttgctttcttagatgacctgcaatcccaaagtcaagattctaaagatggcattattccattggctgtagtccatgccattccttcacctccagagtctccattcctcattccatacccttaaggggacttagaaccatccttccctttcctgtgctgtgcagcttgtgtttgccaaaatgagctttagcctctgacatggtttggctgtgtccctayacaaatcttatcctgaattgtagctcccataattcccatgtgttgtgggagggacctggtgggagataattgaatcatggggatggtttcccctattctgttcttgtggtagtgattaagtctcacaaga

SEQ ID NO: 245936 - DNA, 512 bp, Homo sapiens
taggaactttttggtttcctactgcatataaaaagttatatttacactatactatagtctattatttgtgcaatagcattacatctttaaaacttacatactttaggccggacatgatggttcacacctataatcccagcactttgggaggccgaggtgggcagatcacttgaacccaggagttcgagaccagcctgggcaacatgaaacctcatctctaccaaaaatacaaaaaaaaaaaaaaaaaattagtgaggcgcggtggtacacgcctgtagtcccagctactagggaggctgaggtgggagaattgsttgaacccaggagttcaaggctgcagtaagccaagattgcacctatgcactctagcctgacgtagagcaaaaccctgtctccaaaaaaaaaaaaaaaaaaaaaaaaagttgtagttattaacctgctggaagatgttgtctcaatgctgatggctgctgactgatcagggtgttggttgctaacaactgcagtagctg

SEQ ID NO: 245937 - DNA, 577 bp, Homo sapiens
cttagatgggtgaagttatttccctccattaactttcagcaatacggccttgtgttcagatgtagaccctagtaagtagccagaagtggaggtgagaagccagaccattgaatcagggcaccaataactctagataaatcacttggcttgtgctgctgaaggtgattaatctctggcttgggtctgtcttcttatgtttacctatcctgtagttgcagagtctcgtgaggtctgacccacaggactataagtcttgagggcaggaattatactcaacaaacagttgagggccttccatgcctttggttccataccaatggctgggcatataatggtttggaaaataggcatgttcccatctttcatggaacatagagttgagtggggagatgagcattagtcatataatcgaaggtaataatcagctgtaggaatactctaaaagtgtaatagtaaagaaaaccctactggaaagaaatgacattgamctaatatgtgaagtataaacagaagctaaggagctaaaaatgacacagtaaataatccctcttctatcttctagagctattataaataa

SEQ ID NO: 245938 - DNA, 560 bp, Homo sapiens
gcctttggttccataccaatggctgggcatataatggtttggaaaataggcatgttcccatctttcatggaacatagagttgagtggggagatgagcattagtcatataatcgaaggtaataatcagctgtaggaatactctaaaagtgtaatagtaaagaaaaccctactggaaagaaatgacattgacctaatatgtgaagtataaacagaagctaaggagctaaaaatgacacagtaaataatccctcttctatcttctagagctattataaataaatgttctctcctttatatataagagccctcaaatcatatagtttattatatccatatttgtttgtttcttcttagcaaaacaaaaacatcatgctatttttagcycctattcttactacctaagtctttttcctctcagtagttccttgtttgtttgttgatgtcctgattgaatttctcagtgtcacttcagggacgatattaatgcaaaaaaaaattcacatttcttggccactaatatttgaggcactgtatgaggcactttacagatgttcatatta

SEQ ID NO: 245939 - DNA, 636 bp, Homo sapiens
ttctttcaaaattggaatagatcttctcataccctattgctgctttatcaactaagttttgggaatgtccttagtcctttgttgtcattataacaatgttcacagcaccttcaccaggagaaaattccatttcaaggaaccactttcttcataagaagcagcttctcattggttgaagttttatcatgagattacagcaatccagtcacatcttcagacaccacttctaattgtaactgtcttgctatttctaccacagstacagttccttcttccactgaagtctcgagcctttcaaagttatccatgaggtttggaatcgacttctttcaaactcctgttaatgttgatattttgaccttctcccatgaatcacaaatgtccttaatggcaactaaaatgatgaatcattttaggttttcaatttactttgcccagattatcagaggaatcccttctatggctagagtcatatgaaatgtattattttaataataagacctaaagtgaaaatgactccttgatccatgaactgcagaatggatgctgtgttagcagcatggatgtaaaaacaacattaatctccttgtgcatctccatcagagctcttgggtgactaggtccattgtcaatgag

SEQ ID NO: 245940 - DNA, 577 bp, Homo sapiens
tgaatccatgaccatgctaaagctggtaagtatcatggcataaatgaagtaggtcaaaacaccataaggaaactggttatagaaatccactcaagtctttaaactctgcttcgccttattttcttatctacaaagtgtagtctatagagatgattttagaggcttcatacctaatttgagaccttaaagattatctaaagcaatgttcttcaaatacattagatagtttttaaggttctaaatgccctccccaaaacctttcccaaagccttccaaggaatgctcaggcgctaataaaattataaatcagtttctaggaattaaccatcgttcacacttgtactttatagcatcatgcaatatctccttttccaccycactcttcacaatagcccctctcccactaaacttatggaagtcataatactcagctatccagaatctcattatggagaattgctccagatatgaatatcttcagaacatcaaataaaacaatagtttaagatagtattttctagaagactctttaatgaaccattatagcaccaaaatttcacattcatcatggagttct

SEQ ID NO: 245941 - DNA, 444 bp, Homo sapiens
ggcgctaataaaattataaatcagtttctaggaattaaccatcgttcacacttgtactttatagcatcatgcaatatctccttttccaccccaytcttcacaatagcccctctcccactaaacttatggaagtcataatactcagctatccagaatctcattatggagaattgctccagatatgaatatcttcagaacatcaaataaaacaatagtttaagatagtattttctagaagactctttaatgaaccattatagcaccaaaatttcacattcatcatggagttctatatttcctgtaaagatcaaagcatggctttggaaattgtgtgctttggccctttttgacagatcctgaaggcaagaagaatttcagtggtaagcatgatgatgaatttcctcttgtgatctagattttatccccaaattgttgttacaaaaa

SEQ ID NO: 245942 - DNA, 527 bp, Homo sapiens
aaacatgcatttcagaggtagcattcttgtgttcaaagcctggctctgcccctttacttaayttgtctatacctcaatttcatcatctttaaaatggctataacctgatttcatagggctacagtgataatcacatgaattagtatacgcaaaggatttataatttggcctagtttatttttaacaagcactatataagtgttttagtagtcataacacatgctagttgtcacagtgttatcattcttggacccttacaatatgccagaaagtagtgaatcatgcaaatggtgaggtaactgctaccctcttctccatttccatcctttggtgttcacaccaatgtacaccttccccagtttgttccaagccaaggactgagcacagtaggggtactaactctgggtgatttctacctgataagggactcttctaacagacaacctttcctcaaagactgcccattgacctggccacagctttttcagaactgcacagctgtctgaggctcatcgggtttgggtttc

SEQ ID NO: 245943 - DNA, 527 bp, Homo sapiens
aaacatgcatttcagaggtagcattcttgtgttcaaagcctggctctgcccctttacttaacttgtctatacctcaatttcatcatctttaaaatggctataacctgatttcatagggctacagtgataatcacatgaattagtatacgcaaaggatttataatttggcctagtttatttttaacaagcactatataagtgttttartagtcataacacatgctagttgtcacagtgttatcattcttggacccttacaatatgccagaaagtagtgaatcatgcaaatggtgaggtaactgctaccctcttctccatttccatcctttggtgttcacaccaatgtacaccttccccagtttgttccaagccaaggactgagcacagtaggggtactaactctgggtgatttctacctgataagggactcttctaacagacaacctttcctcaaagactgcccattgacctggccacagctttttcagaactgcacagctgtctgaggctcatcgggtttgggtttc

SEQ ID NO: 245944 - DNA, 527 bp, Homo sapiens
aaacatgcatttcagaggtagcattcttgtgttcaaagcctggctctgcccctttacttaacttgtctatacctcaatttcatcatctttaaaatggctataacctgatttcatagggctacagtgataatcacatgaattagtatacgcaaaggatttataatttggcctagtttatttttaacaagcactatataagtgttttagtagtcataacacatgctagttgtcacagtgttatcattcttggacccttacaatatgccagaaagtagtgaatcatgcaaatggtgaggtaactgctaccctcttctccatttccatcctttggtgttcacaccaatgtacaccttccccagtttgttccmagccaaggactgagcacagtaggggtactaactctgggtgatttctacctgataagggactcttctaacagacaacctttcctcaaagactgcccattgacctggccacagctttttcagaactgcacagctgtctgaggctcatcgggtttgggtttc

SEQ ID NO: 245945 - DNA, 510 bp, Homo sapiens
agctattctattttctaaagtaaaccaaggtggtgrccatttagctcagttggttagagtgttgctgaagaagtaaaccaagcctgcagccttatagtatatatggttatagaacatgtctctgatcatgattgtgaagcctgagagttaaatccaatgcccctccttatctcagggctccacaatggtctactttggcctcagctagactgacagggaccaccatgctccaaaaatttgaaacgtcctcctaatgaggacttgtcttacctgaactcctggttatctgatatatttgagtaagatcttgcactaattgtctcagctctgtgagccccagttatgtcctctgtatattgaggctaagcagacccagatcacagtcttactgtgaggatggagtacagtggtatttattcctgggatgtggcaactcctagatcactgatcctttctccaacacagtgttatcttaaattcgaatatccactaagataatgctccccttgc

SEQ ID NO: 245946 - DNA, 510 bp, Homo sapiens
agctattctattttctaaagtaaaccaaggtggtggccatttagctcagttggttagagtgttgctgaagaagtaaaccaagcctgcagccttatagtatatatggttatagaacatgtctctgatcatgattgtgaagcctgagagttaaatccartgcccctccttatctcagggctccacaatggtctactttggcctcagctagactgacagggaccaccatgctccaaaaatttgaaacgtcctcctaatgaggacttgtcttacctgaactcctggttatctgatatatttgagtaagatcttgcactaattgtctcagctctgtgagccccagttatgtcctctgtatattgaggctaagcagacccagatcacagtcttactgtgaggatggagtacagtggtatttattcctgggatgtggcaactcctagatcactgatcctttctccaacacagtgttatcttaaattcgaatatccactaagataatgctccccttgc

SEQ ID NO: 245947 - DNA, 510 bp, Homo sapiens
agctattctattttctaaagtaaaccaaggtggtggccatttagctcagttggttagagtgttgctgaagaagtaaaccaagcctgcagccttatagtatatatggttatagaacatgtctctgatcatgattgtgaagcctgagagttaaatccaatgcccctccttatctcagggctccacaatggtctactttggcctcagctagactgacagggaccaccatgctccaaaaatttgaaaygtcctcctaatgaggacttgtcttacctgaactcctggttatctgatatatttgagtaagatcttgcactaattgtctcagctctgtgagccccagttatgtcctctgtatattgaggctaagcagacccagatcacagtcttactgtgaggatggagtacagtggtatttattcctgggatgtggcaactcctagatcactgatcctttctccaacacagtgttatcttaaattcgaatatccactaagataatgctccccttgc

SEQ ID NO: 245948 - DNA, 510 bp, Homo sapiens
agctattctattttctaaagtaaaccaaggtggtggccatttagctcagttggttagagtgttgctgaagaagtaaaccaagcctgcagccttatagtatatatggttatagaacatgtctctgatcatgattgtgaagcctgagagttaaatccaatgcccctccttatctcagggctccacaatggtctactttggcctcagctagactgacagggaccaccatgctccaaaaatttgaaacgtcctcctaatgaggacttgtcttacctgaactcctggttatctgatatatttgagtaagatcttrcactaattgtctcagctctgtgagccccagttatgtcctctgtatattgaggctaagcagacccagatcacagtcttactgtgaggatggagtacagtggtatttattcctgggatgtggcaactcctagatcactgatcctttctccaacacagtgttatcttaaattcgaatatccactaagataatgctccccttgc

SEQ ID NO: 245949 - DNA, 536 bp, Homo sapiens
ctgtccttgttcttacaaactagaggagaagattgtaaaaaaatcaaataaatgtaataacattttttatgaaggaatatctctgtgtctggatgggagaggacttctcaaatctaagggtcagggaaagatttcatgaggcatttaagcctgtgcatagrctatcattcttgcttcttctctagaattgctttgaaatatcccttctgagaggtcctatgtagatttcattgcccagctcaactctggcttctaatgtgaccactgtgtctaactctggtttaattcatatgaaaaatgaggatggaaatagaacatcttctcaaggtttctataagaattaaataaagagtagatttaaaaatctttatcaagtacctggtttagagaaatgtaattcttattactattatatggcttttcattaacccaactcctgtaaaaaattatctctgccaaagatagccttgtgggatgatgtttagctttcattaagggatcttgcatgttttttctctggtgatagcagaagtggg

SEQ ID NO: 245950 - DNA, 536 bp, Homo sapiens
ctgtccttgttcttacaaactagaggagaagattgtaaaaaaatcaaataaatgtaataacattttttatgaaggaatatctctgtgtctggatgggagaggacttctcaaatctaagggtcagggaaagatttcatgaggcatttaagcctgtgcataggctatcattcttgcttcttctctagaattgctttgaaatatcccttctgagaggtcctatgtagatttcattgcccarctcaactctggcttctaatgtgaccactgtgtctaactctggtttaattcatatgaaaaatgaggatggaaatagaacatcttctcaaggtttctataagaattaaataaagagtagatttaaaaatctttatcaagtacctggtttagagaaatgtaattcttattactattatatggcttttcattaacccaactcctgtaaaaaattatctctgccaaagatagccttgtgggatgatgtttagctttcattaagggatcttgcatgttttttctctggtgatagcagaagtggg

SEQ ID NO: 245951 - DNA, 478 bp, Homo sapiens
aattcttattactattatatggcttttcattaacccaactcctgtaaaaaattatctctgccaaagatagccttgtgggatgatgtttagctttcattaagggatcttgcatgttttttctctggtgatagcagaagtgggttttctgtgttattttccaaagcaaaggttaataacagtgaacaagaacccagggcacaaggcccagcaacacacccccatgtatatgtgcccatagttcccaactttggaagactgggatttagtttattgaaagagaatatattatacctccctactttttctttcccagacacaatccaaaattttatrtttcttcttaaaatgttatctatctaccatagcaagtttagttgttgcttcattaaggtttcccttgaagataaccctacacagttctacaataaactgcagaaatgactgacttctccactaaagaatgaactcctgagaagca

SEQ ID NO: 245952 - DNA, 526 bp, Homo sapiens
gataattttggtgactatgtgaaatattttaaaaatacagctacagcagtgaagcatgcagtgcaggcaagatgttcttgaatgactacarcaagaacagtagaaatggatgtgctgagttacatgcatctctctggatcttccactatagagcaagtgatctgatttagatggattcaaaaactctaaaacatgctcttaaattatggggtggtatgagttggtccatttgctctcttcatatagaatgcctaaacaggatattttctgtagttttcaaaatattggggaaatcattaatagttattttaagatgatagttctatctttaaatttttgagaaggttttatactttttcataatggctataccattttacactcccaccaacaatgtacagtggttctcttttctccataccctcatcaacacgttatctcttgtaattttgataatagccaacccaaaacgtgtgaggtgatacctaattgtggcttgaatttgaatttctatgaaaattagtga

SEQ ID NO: 245953 - DNA, 526 bp, Homo sapiens
gataattttggtgactatgtgaaatattttaaaaatacagctacagcagtgaagcatgcagtgcaggcaagatgttcttgaatgactacaacaagaacagtagaaatggatgtgctgagttacatgcatctctctggatcttccactatagagcaagtgatctgatttagatggattcaaaaactctaaaacatgctcttaaattatggggtggtmtgagttggtccatttgctctcttcatatagaatgcctaaacaggatattttctgtagttttcaaaatattggggaaatcattaatagttattttaagatgatagttctatctttaaatttttgagaaggttttatactttttcataatggctataccattttacactcccaccaacaatgtacagtggttctcttttctccataccctcatcaacacgttatctcttgtaattttgataatagccaacccaaaacgtgtgaggtgatacctaattgtggcttgaatttgaatttctatgaaaattagtga

SEQ ID NO: 245954 - DNA, 526 bp, Homo sapiens
gataattttggtgactatgtgaaatattttaaaaatacagctacagcagtgaagcatgcagtgcaggcaagatgttcttgaatgactacaacaagaacagtagaaatggatgtgctgagttacatgcatctctctggatcttccactatagagcaagtgatctgatttagatggattcaaaaactctaaaacatgctcttaaattatggggtggtatgagttggtccatttgctctcttcatatagaatgcctaaacaggatattttctgtagttttcaaaatattggggaaatcattaatagttattttaagatgatagttctatctttaaatttttgagaaggytttatactttttcataatggctataccattttacactcccaccaacaatgtacagtggttctcttttctccataccctcatcaacacgttatctcttgtaattttgataatagccaacccaaaacgtgtgaggtgatacctaattgtggcttgaatttgaatttctatgaaaattagtga

SEQ ID NO: 245955 - DNA, 526 bp, Homo sapiens
gataattttggtgactatgtgaaatattttaaaaatacagctacagcagtgaagcatgcagtgcaggcaagatgttcttgaatgactacaacaagaacagtagaaatggatgtgctgagttacatgcatctctctggatcttccactatagagcaagtgatctgatttagatggattcaaaaactctaaaacatgctcttaaattatggggtggtatgagttggtccatttgctctcttcatatagaatgcctaaacaggatattttctgtagttttcaaaatattggggaaatcattaatagttattttaagatgatagttctatctttaaatttttgagaaggttttatactttttcataatggctataccattttacactcccacyaacaatgtacagtggttctcttttctccataccctcatcaacacgttatctcttgtaattttgataatagccaacccaaaacgtgtgaggtgatacctaattgtggcttgaatttgaatttctatgaaaattagtga

SEQ ID NO: 245956 - DNA, 492 bp, Homo sapiens
ggttgactgaaataaaaaatgtactaggaagactcaagacaatatttgagctctcagaagaaataaccagttaacttgaagataagtcacttgaaattgtcctgtgtgaggaaaagaaaaaatataatgaagaaatgtgaacagagattagtggatctgtaggatatcatcaagcatattatcatctctataatgggagtcccaaaaggaaaacagagaagggagaaaaatttgaagaaaaaatgactgaaaacttttcaggttgaaagaaaaatattacacatccaaggatctcaacaaatcacaaataggataaattcaaagggatacacattttgacacatcatagtcaaactgttaaaagataaaaayaaatagaaattcttgcaagtatcaaaagaaaaacatctcatcacatgcaaaggatcttcaatacgattaaaagtggatttcttatcagaaaacatggtggcaaaaaggcagtaggattat

SEQ ID NO: 245957 - DNA, 573 bp, Homo sapiens
actgggtaaactttttttttttaaagtttaattgattcacagttcccccatccttctacagaaatcatgyggctggcattctgctcagcttctggggaggcctcaggaaacttataatcatgacagaatgttaagggggagcacacacatcatatgactggagtaggagcaaaagagagagtggaggtgctacatacttttaaacaaccagatctcacaagaactcactatcagaagagcagcactaagggaatggtactaaagcactcatgagaaatacaccactgtgatccaatcacctcctccaagccccatctccaaaagtggggattacaattcaacataagagttgggcagggacacagatccaaaccatatcagccatgtgcaaaaattaatcaagatggaataaagatttaaacataagactgcaaactataaaatcctagaagaaaacctaggaaatgcctttcttaacattggcttggcaaagaatttatggctaagtccccaaaaacaattgcgataaaaacaaaaactgccaagtgagacctaactaaagcgcttctgcac

SEQ ID NO: 245958 - DNA, 573 bp, Homo sapiens
actgggtaaactttttttttttaaagtttaattgattcacagttcccccatccttctacagaaatcatgcggctggcattctgctcagcttctggggaggcctcaggaaacttataatcatgacagaatgttaagggggagcacacacatcatatgactggagtaggagcaaaagagagagtggaggtgctacatacttttaaacaamcagatctcacaagaactcactatcagaagagcagcactaagggaatggtactaaagcactcatgagaaatacaccactgtgatccaatcacctcctccaagccccatctccaaaagtggggattacaattcaacataagagttgggcagggacacagatccaaaccatatcagccatgtgcaaaaattaatcaagatggaataaagatttaaacataagactgcaaactataaaatcctagaagaaaacctaggaaatgcctttcttaacattggcttggcaaagaatttatggctaagtccccaaaaacaattgcgataaaaacaaaaactgccaagtgagacctaactaaagcgcttctgcac

SEQ ID NO: 245959 - DNA, 573 bp, Homo sapiens
actgggtaaactttttttttttaaagtttaattgattcacagttcccccatccttctacagaaatcatgcggctggcattctgctcagcttctggggaggcctcaggaaacttataatcatgacagaatgttaagggggagcacacacatcatatgactggagtaggagcaaaagagagagtggaggtgctacatacttttaaacaaccagatctcacaagaactcactatcagaagagcagcactaagggaatggtactaaagcactcatgagaaatacaccactgtgatccaatcacctcctccaagccccatctccaaaagtggggattacaattcaacataagagttgggcagggacacagatccaaaccatatcagccatgtgcaaaaattaatcaagatggaataaagatttaaacataagactgcaaactataaaatcctagaagaaaacctaggaaatgccyttcttaacattggcttggcaaagaatttatggctaagtccccaaaaacaattgcgataaaaacaaaaactgccaagtgagacctaactaaagcgcttctgcac

SEQ ID NO: 245960 - DNA, 578 bp, Homo sapiens
gaatgaagcagtaaccgaaagagatctcaagtgattaaaataatatcagtcaaaatatattttaaggcagaaattgttactagagacacaaaaggacattttataataataaaatatcaatctatcacaaatacataacattacattatatacataatgtgtatatacaaaatacataatagatatatgatgtatatctaataacktatatatgtaattatatatacacacacacacatatatatattcaccacaatgaagctccaaaatacatgaagaaaaaaaatctccaaaggtccatttttactttcagaataaatccttaaaatccaaacttctgagcctagaataatatagagttcatggcaggcccttccatgtttccattgatagtcttcctgccacttccattaccatcctatattccatgcatacacactactttagacttcaaagtttccatttcccttctagccttttcacatgctattattctgcctggaatgtcataaatcaattcaatgtcatctcttaaaataagcatcctctgacacgtccaggaacaccaaaatatgttc

SEQ ID NO: 245961 - DNA, 382 bp, Homo sapiens
aggtttccataacaataccatactaggtggtataaacaatataaatttattttcatatacttttggatgctggaagtctaagatcagggtgctagcatggtcaggtcctggtgcgtactctcygcctggcttccagacaaacacttttttgctgtgcattcacgtgaattttcctcagtgcttgtgttgaaggagtggagagagagagaatgaatctttctcttctaataaggcccccaatcctatcagaatcagaccccacctatatgacctcatttaaccttaattacctcctaaaagctctatctccaaatacagtcatactgggggttagggcttcaacaaaggaatttcggagacagacaatttagtccatagcaat

SEQ ID NO: 245962 - DNA, 613 bp, Homo sapiens
tcaacaaaggaatttcggagacagacaatttagtccatagcaatatacaacagtatttctgttatattcatgtctagcagtaatccatatactagaacattaccagttcacccaggcccattcccttctatgttgtctcattttggaaccagtgtctttgaccttgctcttcaagctgagatcccaaggtaagaaaaatatgttgatttatcattgggcaatccataaatcagcatccatttccccaatcctcttgatttgcataaggagcctcttgtcccagcctgacactggtagaaatagaaatgtaccaattaaatgattgttctgcttatcaaaatcctcattggaatatgttgggaaggaagcaattttctcctctcttattttcatgaatatacataggattgaaacattgaaaccaaatacacattaatctgattctataaacaaatgatggtggttctgatttttttttattttatagctttaggaaaaaaacatgaataaagagggaagacaaagtcatcatattttaaaaggtttaacagtttagaaagaatgtatatatgtacttttctttttgaaggacaygttttaggtgttcattact

SEQ ID NO: 245963 - DNA, 453 bp, Homo sapiens
ttttaaaaggtttaacagtttagaaagaatgtatatatgtacttttctttttgaaggacacgttttaggtgttcattacttcacagataatactttgaaatgctaattttccccaagataattcagctgttaaatcaccagtgaatttaattccatccactaatttcagcgtctgtgttcctccccgtcactagctgcctcaaaaaatccaaaacttaatttttattttgctctgcactttacacattattttggcatatactaacttaacccatctgttcacaacagtcttgtgagctgggcataaagaaattgagggtgaaactttttttaagagactaacacaggcaaagccccaattgaaagagtttaattctgagcatcattagtcagcctgagattcacagcacccaatgcacaacattrctcatacatccctgatgactggcaggc

SEQ ID NO: 245964 - DNA, 636 bp, Homo sapiens
ctacataatttctccatacaaagccagtttttccttcagtactaaacaggtagctattgctttgattgagtgccaaaaatagttcataatttggatctatttattattaaaaatgctttttttgctaatttcttctgctgagtatatgtaaatgaattacaattaggtgtaaggtataactcctgtatatgtgatttgttttttaatataacagcttcattgagatataagtaacatatgataaaatttacccttttaaattgtacaattcagtgatttttagtatcttyactaaattgtgcaacaatcatcattaaataattttagaacattttcaaatttctttttaaggctgaatgctattccattgcatggatagaccacagtttacttagcctttcatcaattgatggacatttggattatattcactttttggctattatgaataatacttctatgactatttatgcaaaagtgtctgtgaggacatacattttcaatcttttagaagaactactaaactcttttccaaagcggcttcaccgttttacattttcaccaatcatgtatgagagttacaatttccctacatccttgccaatacacgttattgtctgacttttttattctatc

SEQ ID NO: 245965 - DNA, 636 bp, Homo sapiens
ctacataatttctccatacaaagccagtttttccttcagtactaaacaggtagctattgctttgattgagtgccaaaaatagttcataatttggatctatttattattaaaaatgctttttttgctaatttcttctgctgagtatatgtaaatgaattacaattaggtgtaaggtataactcctgtatatgtgatttgttttttaatataacagcttcattgagatataagtaacatatgataaaatttacccttttaaattgtacaattcagtgatttttagtatctttactaaattgtgcaacaatcatcattaaataattttagaacattttcaaatttctttttaaggctgaatgctattccattgcatggatagaccacagtttacttagcctttcatcaattgatggacatttggattatattcactttttggctattatgaataatacttctatgactatttatgcaaaagtgtctgtgaggacatacattttcaatcttttagaagaactactaaactcttttccaaagyggcttcaccgttttacattttcaccaatcatgtatgagagttacaatttccctacatccttgccaatacacgttattgtctgacttttttattctatc

SEQ ID NO: 245966 - DNA, 578 bp, Homo sapiens
ggagagctacaaaaatatttgtattattattgttacaattgtgaatacgtaatatgctatgcaaggttattgatcttaaaaataaaatatgagaaaaaaagaaaccatctctgattaagggaaagaaaggaatctgttggaagaatgtttgcgggcccatagactcaaaaggaaggatggataatgtgactcagaagacaggcagaacccatgacagcctgagaaatcagcccaggccaaaagatcatgaagcaagacagtggtgggaaagctgcagccmctgccccatccaggtgatctggtaccctagccccttatcactctgccacataccttgccactgctgtaggaataaacttttagtttctcctacctcttatgtcacttaccccagaccaaaagttctggaaggcaacattctattggccagtctttgtttgtttgtccactgggagcaggaagaggaattatctcccttcctttagctttcttggacaaatcaaagccaaaattcccattacaaataacatatgtagaagcacatagtatggtgccaggcacaccacaaaaatgtgtaa

SEQ ID NO: 245967 - DNA, 578 bp, Homo sapiens
ggagagctacaaaaatatttgtattattattgttacaattgtgaatacgtaatatgctatgcaaggttattgatcttaaaaataaaatatgagaaaaaaagaaaccatctctgattaagggaaagaaaggaatctgttggaagaatgtttgcgggcccatagactcaaaaggaaggatggataatgtgactcagaagacaggcagaacccatgacagcctgagaaatcagcccaggccaaaagatcatgaagcaagacagtggtgggaaagctgcagccactgccccatccaggtgatctggtaccctagccccttatcactctgccacataccttgccactgctgtaggaataaacttttagtttctcctacctcttatgtcacttaccccagaccaaaagttctggaaggcaacattctattggccagtctttgtttgtttgtccactgggagcaggaagaggaattatctcccttcctttagctttcttggacaaatcaaagccaaaattyccattacaaataacatatgtagaagcacatagtatggtgccaggcacaccacaaaaatgtgtaa

SEQ ID NO: 245968 - DNA, 569 bp, Homo sapiens
tattgggaactggagcaaaggtcacccatgttatgccttagcaaataatttggctgcattctgctcatgccctaggaatctgtgtaaatttgaacttaagaataataatttgaggtgtctgacagaagaaatttctaagcaatagagtgtttaagaagttgcctggctgctcctaacagtctactgtcagatgtgggagtaaaagaatgacttgaagttgcttttaagagcctatactcagatgcagaggcaaaagaatgacaaagttaaaacatgtttaagagaaaagcagaacatgaaartttggaaaatttgcagcctggccgtgtggtagagaaagaaaaagctttttcaggagaggaattcaagtaggctgaggaggaaccacttgctaaagatacttgcataactaaaagagagctaagtgctaatatctaagacaatgggaaaaggcttcaaaggcctttcagagacctttgtggcagcccctcccatcccaggctcagaggcctaggaggacagaatggcttaatgggccagacccagggccttgctgctttgcacagact

SEQ ID NO: 245969 - DNA, 498 bp, Homo sapiens
aaacatgtttaagagaaaagcagaacatgaaagtttggaaaatttgcagcctggccgtgtggtagagaaagaaaaagctttttcaggagaggaattcaagtaggctgaggaggaaccacttgctaragatacttgcataactaaaagagagctaagtgctaatatctaagacaatgggaaaaggcttcaaaggcctttcagagacctttgtggcagcccctcccatcccaggctcagaggcctaggaggacagaatggcttaatgggccagacccagggccttgctgctttgcacagactcaggacacttctccctgcatcccagccactctagctctagcttcagctgtggctcaaagaggctgaggcacagctaaggcttccactttggagaatgcaagctgtaaactttagcaacttctatgtagtgttaagcctgtaggtgtgcagaatgcaagaataaataattcttggcagcctccacctagatttcagagg

SEQ ID NO: 245970 - DNA, 498 bp, Homo sapiens
aaacatgtttaagagaaaagcagaacatgaaagtttggaaaatttgcagcctggccgtgtggtagagaaagaaaaagctttttcaggagaggaattcaagtaggctgaggaggaaccacttgctaaagatacttgcataactaaaagagagctaagtgctaatatctaagacaatgggaaaaggcttcaaaggcctttcagagacctttgtggcagcccctcccatcccaggctcagaggcctaggaggacagaatggcttaatgggccagacccagggccttgctgctttgcacagactcaggacacttmtccctgcatcccagccactctagctctagcttcagctgtggctcaaagaggctgaggcacagctaaggcttccactttggagaatgcaagctgtaaactttagcaacttctatgtagtgttaagcctgtaggtgtgcagaatgcaagaataaataattcttggcagcctccacctagatttcagagg

SEQ ID NO: 245971 - DNA, 560 bp, Homo sapiens
ctactcagggagctgaggcaggaggattgcttgggtccaggaggttgaggctatagtgagtcgtgattgtgccactgcatgacagagtaagattctatccctccttcaaaaaaaaaaatagcraatgtcctgctgtgttttggacttgcatagggcctgtagtccctttgttttggccaatttctcccttttgtgatgggaatgtttccccaatgcctatatccctcattgtatctttgaggtaaataacttgttttgatttttcaggttcataggtggaagggacatgccttgtctcagatgagactttggacttgagacttttgagctggaacaagctaagactttggaagactattgggaagacatgataatattttgcaatgtgagaaggacatgagatttgccagggggccaggggtggaatgatatagtttggatatttgtccctgtccaaatttcatattgaaatataatccctaacatcagaggtggggcctggttggaggtgtttggatcatgggggcagatccctcatgaatggtatgggccatctcctt

SEQ ID NO: 245972 - DNA, 601 bp, Homo sapiens
gctatgcttcctgtacaccttgtagaatcaagagccaattaaacctcttttccttataaattgctgagtctgaggtatttttgtatagcaatgcaagaatggcctaattcaatttgtgtatttttagttgggaagcatagattcaaagataaaacactctgcagcactaattctgtrctagttgttaacaggacctaatcaggaatcagaggtggttttctctgatgtctctctcttattttttaacttgacaaatgtaattgcatttatttatagggtacaatgtgatgttatgatgcatgtacacattgcagaataattaaatacctcttgaagaagattaaatctttgaatttcagatcaattcatgagtttcttagggtgacgttgtggcaaaactgtttctacctgttgataagtttgggtatataacaaagcctttttcttaaattgttaaattattgtatatgtatttcatcctgacaagcatattagtatatttaacatttttcatcctgaaaagtattaaaggatatgtacatcagtttactttttctgaacttacattctgatttgttagtttctttttttaatcttacat

SEQ ID NO: 245973 - DNA, 567 bp, Homo sapiens
ttcctatcaaaattccaatagctttttttttttacagaaatagaaaaagcaatcttgaaatttatattgaaccacaagaagcycatatagtcaaaacaaccttgaaaaagaagaacaaaactggaggcctttagctttctgatttcaaaatatattacaaagcttttgattatattacaataatcaaaacaatatggtactggcaaagacagacatatagactaatataacagaatagagatccctgaaataaagccaagtatgtatggtcaagtaatctttgacaaaggtgccaagactacgcaatggggaaaggatagtctctgcaatatatggcactggggaaactgaatataaaaatgaagttggagcctcatattacatcatacacaaaaattaaaattggagccttatattacatcatacacaggaataaatacaaattgattaaagacctaaatgtaagacatgaaaccataaaactctttgaagagaaacataggagaaatgtttcataacattggtcttgacaatgatttcttagatttgacatcaaaagaataggca

SEQ ID NO: 245974 - DNA, 567 bp, Homo sapiens
ttcctatcaaaattccaatagctttttttttttacagaaatagaaaaagcaatcttgaaatttatattgaaccacaagaagcccatatagtcaaaacaaccttgaaaaagaagaacaaaactggaggcctttagctttctgatttcaaaatatattacaaagcttttgattatattacaataatcaaaacaatatggtactggcaaagacagacatatagactaatataacagaatagagatccctgaaataaagccaagtatgtatggtcaagtaatctttgacaaaggtgccaagactacgcaatggggaaaggatagtctctgcaatatatggcactggggaaactgaatataaaaatgaarttggagcctcatattacatcatacacaaaaattaaaattggagccttatattacatcatacacaggaataaatacaaattgattaaagacctaaatgtaagacatgaaaccataaaactctttgaagagaaacataggagaaatgtttcataacattggtcttgacaatgatttcttagatttgacatcaaaagaataggca

SEQ ID NO: 245975 - DNA, 567 bp, Homo sapiens
ttcctatcaaaattccaatagctttttttttttacagaaatagaaaaagcaatcttgaaatttatattgaaccacaagaagcccatatagtcaaaacaaccttgaaaaagaagaacaaaactggaggcctttagctttctgatttcaaaatatattacaaagcttttgattatattacaataatcaaaacaatatggtactggcaaagacagacatatagactaatataacagaatagagatccctgaaataaagccaagtatgtatggtcaagtaatctttgacaaaggtgccaagactacgcaatggggaaaggatagtctctgcaatatatggcactggggaaactgaatataaaaatgaagttggagcctcatattacatcatacacaaaaattaaaattggagccttatattacatcatacacaggaataaayacaaattgattaaagacctaaatgtaagacatgaaaccataaaactctttgaagagaaacataggagaaatgtttcataacattggtcttgacaatgatttcttagatttgacatcaaaagaataggca

SEQ ID NO: 245976 - DNA, 534 bp, Homo sapiens
gtctggtctctgcttcccagatggtgccttgaatgaagcrttctccagggaggaggaacattatttctcacatgacagaaaaatggaagagcaaagagagaaaacccacccctgaaagcccctttctaaatgcattaaacctgccccataaaggtggagcctaattacctgttaaagtcccacctcttaatacctttccaatgacaactgaattttgatatgagtttttgaggcaacaagcattcaaacatagtagccaatgaggcttcaaatgcaagtttaaattattaatcaacttttttttctccatcctgggttttggaaagtctttcaggaaggcaatcttaaaatccaaaatttgtgggaacttccccataacatttaaagaatacaaaccctaggatatctaagattttattttctttttatttaaggcttttcacaaatgatcaatgttgttaaatgtcagagttctccaaagtgagtcactgtgatatcaaattgctcttggtgaaattatggcatttagaaaga

SEQ ID NO: 245977 - DNA, 534 bp, Homo sapiens
gtctggtctctgcttcccagatggtgccttgaatgaagcgttctccagggaggaggaacattatttctcacatgacagaaaaatggaaragcaaagagagaaaacccacccctgaaagcccctttctaaatgcattaaacctgccccataaaggtggagcctaattacctgttaaagtcccacctcttaatacctttccaatgacaactgaattttgatatgagtttttgaggcaacaagcattcaaacatagtagccaatgaggcttcaaatgcaagtttaaattattaatcaacttttttttctccatcctgggttttggaaagtctttcaggaaggcaatcttaaaatccaaaatttgtgggaacttccccataacatttaaagaatacaaaccctaggatatctaagattttattttctttttatttaaggcttttcacaaatgatcaatgttgttaaatgtcagagttctccaaagtgagtcactgtgatatcaaattgctcttggtgaaattatggcatttagaaaga

SEQ ID NO: 245978 - DNA, 534 bp, Homo sapiens
gtctggtctctgcttcccagatggtgccttgaatgaagcgttctccagggaggaggaacattatttctcacatgacagaaaaatggaagagcaaagagagaaaacccacccctgaaagcccctttctaaatgcattaaacctgccccrtaaaggtggagcctaattacctgttaaagtcccacctcttaatacctttccaatgacaactgaattttgatatgagtttttgaggcaacaagcattcaaacatagtagccaatgaggcttcaaatgcaagtttaaattattaatcaacttttttttctccatcctgggttttggaaagtctttcaggaaggcaatcttaaaatccaaaatttgtgggaacttccccataacatttaaagaatacaaaccctaggatatctaagattttattttctttttatttaaggcttttcacaaatgatcaatgttgttaaatgtcagagttctccaaagtgagtcactgtgatatcaaattgctcttggtgaaattatggcatttagaaaga

SEQ ID NO: 245979 - DNA, 581 bp, Homo sapiens
gaaagaattatatttaggataaagctggcagaagggaagagatgaagccattacatattcaatgcctacactttaccagacactgtgataagcactatagagacatggtatcctttgatgctcacagcaattttgtgaaggttagtgttattatccctttttatgaatgaggcaactgtggttgaacgctttctttttagctcctttcgcagacatgtagtgatatatattatgagacaggattttgtaaaacttgaagtgctacccacctgtggggaattaaaaggtgatacttgagccagaataaacttaaaacacagatataatcaaggcagtaacgttggaaatagattaaacttaattgacccttatttaatgcctaytatgttcttactgtgggactggatattttaagtttgaattagttttgctactttgtgacaaaggataaatcacccaatcttatttgataaactacagtttattaaaggggctatggtatcacaggcaatttgcttacattaccttatttagttaataaaacaaagttatctaacaggattagttaatatcattttaca

SEQ ID NO: 245980 - DNA, 579 bp, Homo sapiens
aagaacaggggtgtgtcccatatgtttaggagctggatttgtcttttccatatagaagctgataaagtattatcaactttagcaaaccttgtttgaagacttgtggagcataaagataccttgaaagggttgctgaaaactgatttctgcaggaataatggggacgtggatggttacacatgaaatccctttaactggtcagggaagaatgtgatcaatttttattgtttttatttattgaagaaattgcttaataacttatttggggaaaatgtttttgtacaaccaagataaaaataaaggaaaatcagggtttagtcagagagtaatgataccagtaaaagtatagcatcactgggggaaagaggaaggcgtcctctcacactagttggagctgatggggggatggtataacttctatcatggtaagagagaaagtttggaataagactccttaggtctgaaccttaactttgcctcttaacttcataacctatggaaaaattatttaagttctctaagcctcagttttctcataaagaaaatggsaataagtgggagtaagtaccttataggtga

SEQ ID NO: 245981 - DNA, 574 bp, Homo sapiens
aaaatagaagaacaataaattctatttgtgtaagccattctcagttggcatatacatgtaccaaatgcattcaatccttactgaaaaagagaataaacaacataacagtcataacttgcagaccacaatgcctggcacactatggaaattcattaggtgttgcttttgcttccttgtgttagttactgtattaaacaagagatggattaattaatattcattctttttaattagctttccaaatattaaataccaatgacatactagacattctgtgaaacatgataatacaaagatgaatgagactgagcccttgcccttgagttgttcagaatcttaatgggaagataattaactgcaattcaaggtaatgagtactagtgtggaaacaggtatatataatgctttaggagtatgggatatawaactgaatatcaatagctgtgagacaaacataaaaaagaaagaaaaatcttccaacccagagaaagagtggccaagcccagcatgtggctattgaaaattttgcagagaaaagtagatttatctgtctatgtaatagcattgagtcaca

SEQ ID NO: 245982 - DNA, 625 bp, Homo sapiens
tttaatattcataactctttgggctaagagctaatgttattcacattttacagatgagtggctgctttctgatctgccatccataactcccacctgtgcaaggtatagtaagtgaaggccagtaacatttttatttcaatttgttctatttttgcctgtttatatattttcaagatagtagccacctcagtgagtgctggaatcctaggtcccctagatcaggccatacctgaagacatcctaactctggactttcattacatgagtgtaaaacatcctcttttgtttcccctaatccagttggagttgtgtttcttttcttttgacccaaggaatcctaactaaaacactatgcatcctcccaaaagtagaaccccttagtatatagttaaggagcttggaatttgtggaaactcagtatttaatgatgcattgtttatcattgtatctccagcacyaaatcctttgcctaacactttgtaaatcctctttaagtattcagtgtcagaaagcctatctctctcttttttattttaaatgtaaatctactttgtttctcatgattaatgagcattttagttcctgaatctgatcagtctcatattcttttttgcctaggacctta

SEQ ID NO: 245983 - DNA, 552 bp, Homo sapiens
ttagtatatagttaaggagcttggaatttgtggaaactcagtatttaatgatgcattgtttatcattgtatctccagcactaaatcctttgcctaacactttgtaaatcctctttaagtattcagtgtcagaaagcctatctctctcttttttattttaaatgtaaatctactttgtttctcatgattaatgagcattttagttcctgaatctgatcagtctcatattcttttttgcctaggaccttatgttggcagattaaattttctaaaaaagccccttgcaattcccgagacaatatcaggtcaaacatgtcctgtgccttggtcatgggtagcacacaggatggagctcctttcaatccacactgaattcatcggttccagtacttccaatttgctcctacctgaagctctcatttctccaggagccttctggagccaacagggattatttttggytcagacccttcttgtcaagctcactgccatctccaattcacaggctggcagtcatggggcagccactgaagtctcatgcccagtgggcagc

SEQ ID NO: 245984 - DNA, 565 bp, Homo sapiens
aagaaatagagtaagagaaagaatgagatttcccaaaagaagatcaaagagagaagaagtacaatagaaaaataacctctcctggacaaaaaaaaattcaaaaatgactttcttcaagaagaaacagggcttctattaagttggtgcaaaagtaattgtggttttgccattatagcaaaaaccacaatgacttttgctccaacattatgtgttactaagatctcccttcagacctctccccacctaacccctccayccagtctgtcttctaaagctcttcagtgtttttgttcttgatccaaaatggatcaagatggggtcacagaaaataacctgagacctctatcaaggttagcaatgtagctcttactcggattaccatgtgtctcattttctcaatactcaggtttctgaaaaatgaactacacaaaagtgttaatttgaatttatgacagttactgagtcctaataaacaagaacatctttgaattcacccaaagaagtgacaagtagaatttcagaaaccgcagaaggtcaaggcgggaactatcttttgccaagcagg

SEQ ID NO: 245985 - DNA, 565 bp, Homo sapiens
aagaaatagagtaagagaaagaatgagatttcccaaaagaagatcaaagagagaagaagtacaatagaaaaataacctctcctggacaaaaaaaaattcaaaaatgactttcttcaagaagaaacagggcttctattaagttggtgcaaaagtaattgtggttttgccattatagcaaaaaccacaatgacttttgctccaacattatgtgttactaagatctcccttcagacctctccccacctaacccctccacccagtctgtcttctaaagctcttcagtgtttttgttcttgatccaaaatggatcaagatggggtcacagaaaataacctgagacctctatcraggttagcaatgtagctcttactcggattaccatgtgtctcattttctcaatactcaggtttctgaaaaatgaactacacaaaagtgttaatttgaatttatgacagttactgagtcctaataaacaagaacatctttgaattcacccaaagaagtgacaagtagaatttcagaaaccgcagaaggtcaaggcgggaactatcttttgccaagcagg

SEQ ID NO: 245986 - DNA, 565 bp, Homo sapiens
aagaaatagagtaagagaaagaatgagatttcccaaaagaagatcaaagagagaagaagtacaatagaaaaataacctctcctggacaaaaaaaaattcaaaaatgactttcttcaagaagaaacagggcttctattaagttggtgcaaaagtaattgtggttttgccattatagcaaaaaccacaatgacttttgctccaacattatgtgttactaagatctcccttcagacctctccccacctaacccctccacccagtctgtcttctaaagctcttcagtgtttttgttcttgatccaaaatggatcaagatggggtcacagaaaataacctgagacctctatcaaggttagcaatgtagctcttactcggattaccatgtgtctcattttctcaatactcaggtttctgaaaaatgaactacmcaaaagtgttaatttgaatttatgacagttactgagtcctaataaacaagaacatctttgaattcacccaaagaagtgacaagtagaatttcagaaaccgcagaaggtcaaggcgggaactatcttttgccaagcagg

SEQ ID NO: 245987 - DNA, 621 bp, Homo sapiens
taattgttttataaatttgggagttccagtgttaggtgtattatatatacatttaggattgttatattttcctgttgaacaaggccttttatcattatatattgcccctctttctcttttttaactgctgttgctttaaagtttgttttgtctgatacaagaatagctactcctgcttgtttttggtgtccatttgcatggaatgtctttttctatccctttaccttaagtttacatgagtccttatatgtcaratgagtctcttaaaggcagcagatacttggttggtgaactcttatccattctgaaggtctgtagcttttaagcggagcatttaggccatttgcattcaatcattcaatgttagtactgagatgcaaggtactattccattcatcatgctatttgttgcctgtataccttgttttttatttaattacatttttgtttcataagtcctgtgagatttctgctttaaagaggttctgttctggtgtgtttccagcacttttttcaagatttagagctccttttagcagttcttgttgtgctgcttggtagtggcaaattctctcagcatttgtttgtctgaaaaagactgtatctttccttcatttatga

SEQ ID NO: 245988 - DNA, 556 bp, Homo sapiens
tattaagccttgaatagaaagcagctgttaatagctgcttgcttcctttgaaaaatcaatttacaaatggatatgatattagtgtatagcaggcactcactaaggagagttgagataaagtgcataataaatactctttatatgcttataaaattgatgtaggatgatagaatgaatataaagacagaagggaaataactccagtttagttaactccagtagttgactaaagccaatgtagrtatcttacaacactttataagttataagcaatatgcatatatataatttaatttttatttgttatcttaatatttcaatcaaataaattgtatctcagaagacgtgaagggattgacccagtcctcacatctggaagtaaaatggcagccaggcttctggaggctgcatgtcatgatctttcctctacagaagtatttcttgttatcatctctcacattactgaatgtgttatcaacaggagatacacccaatataaactacagcagagcccacaagccagactgaacatctagatttcactcttacccagttt

SEQ ID NO: 245989 - DNA, 556 bp, Homo sapiens
tattaagccttgaatagaaagcagctgttaatagctgcttgcttcctttgaaaaatcaatttacaaatggatatgatattagtgtatagcaggcactcactaaggagagttgagataaagtgcataataaatactctttatatgcttataaaattgatgtaggatgatagaatgaatataaagacagaagggaaataactccagtttagttaactccagtagttgactaaagccaatgtagatatcttacaacactttataagttataagcaatatgcatatatataatttaatttttatttgttatcttaatattwcaatcaaataaattgtatctcagaagacgtgaagggattgacccagtcctcacatctggaagtaaaatggcagccaggcttctggaggctgcatgtcatgatctttcctctacagaagtatttcttgttatcatctctcacattactgaatgtgttatcaacaggagatacacccaatataaactacagcagagcccacaagccagactgaacatctagatttcactcttacccagttt

SEQ ID NO: 245990 - DNA, 556 bp, Homo sapiens
tattaagccttgaatagaaagcagctgttaatagctgcttgcttcctttgaaaaatcaatttacaaatggatatgatattagtgtatagcaggcactcactaaggagagttgagataaagtgcataataaatactctttatatgcttataaaattgatgtaggatgatagaatgaatataaagacagaagggaaataactccagtttagttaactccagtagttgactaaagccaatgtagatatcttacaacactttataagttataagcaatatgcatatatataatttaatttttatttgttatcttaatatttcaatcaaataaattgtatctcagaagacgtgaagggattgacccagtcctcacatctggaagtaaaatggcagccaggcttctggaggctgcatgtcatgatctttcctctacagaartatttcttgttatcatctctcacattactgaatgtgttatcaacaggagatacacccaatataaactacagcagagcccacaagccagactgaacatctagatttcactcttacccagttt

SEQ ID NO: 245991 - DNA, 629 bp, Homo sapiens
tctaagacagagttgctcttgtgaccttaacctgtttcgatcactttcctatgtacccagttcagtttcccttctcagaagcttccagccctgttctgctgaagaagtaggcctggaactacatgtttgtatcagattgtgccttagtcttaccaaaggtaattggacacattgcagaattgtggtcctttagctgatccccacttttgagaatctgaactcaaacatcaaaagcagtgcatattgggaagtgaaggtctaagcgcacatagagaagacagatttagaattcgagttaacagtgttaacycaaagttaacaggatagtgccttatcaaggaagctggtttgcagaggaaaaaatggagcattcttatagagaaaaaataaatacatattttgtcccaagaaaggaatagagagaagatgtctaatgattttgaggttcctatgaactccccttgtttaacttcttgtctttgagttctcagtgagggtcctttatcctttccaaaaaaaaaaacaacaacaaaacaaaaaaatgtttttcttaaacttgtttgataaaagaacgatccttgactagaatatcctacacatgactgagtctcatggactggcaggtagat

SEQ ID NO: 245992 - DNA, 629 bp, Homo sapiens
tctaagacagagttgctcttgtgaccttaacctgtttcgatcactttcctatgtacccagttcagtttcccttctcagaagcttccagccctgttctgctgaagaagtaggcctggaactacatgtttgtatcagattgtgccttagtcttaccaaaggtaattggacacattgcagaattgtggtcctttagctgatccccacttttgagaatctgaactcaaacatcaaaagcagtgcatattgggaagtgaaggtctaagcgcacatagagaagacagatttagaattcgagttaacagtgttaacccaaagttaacagratagtgccttatcaaggaagctggtttgcagaggaaaaaatggagcattcttatagagaaaaaataaatacatattttgtcccaagaaaggaatagagagaagatgtctaatgattttgaggttcctatgaactccccttgtttaacttcttgtctttgagttctcagtgagggtcctttatcctttccaaaaaaaaaaacaacaacaaaacaaaaaaatgtttttcttaaacttgtttgataaaagaacgatccttgactagaatatcctacacatgactgagtctcatggactggcaggtagat

SEQ ID NO: 245993 - DNA, 249 bp, Homo sapiens
ggattcctcaggaaacttacaatcatggaagaagacaaaggtgaagcgggcaacttcttcacaaagcaggggcaagcagagaaaacagccacttataaaaccaccagatctcatgagaactcactcagtatcatgaaaacagcacargggaaatcacccccgtgatccaatcacctcccaccagctccctccctgtggggtttacagtttgagatgagatttgggtaggaacccagaagcaagccatat

SEQ ID NO: 245994 - DNA, 532 bp, Homo sapiens
tcttgtctgctaccatgtgagacatacctttcatctytcaccatgcttgtgaggcgtccccagccccatggaactgtaagtcagttaaacctctttcttttgtaaattgcccagtcctgggtatgtctttatcagcagcatgaaaacagactaatacaatctcccaaaaaacgttgccatgatttctgctcttgatcaatgtgcttttgctttgagtggaccacttccacctcttggtagccattgctttgactgtgctttgtcttcaggatcataccgttaacctatttcatcttctattacaattccttgaagaaatgcttcagaatcttgatcttacttgtttaacatttttttgaaagctctgctcttgtctgcagctgatctgggtacaatggctttggcacccatcgagtggaaagtttgcacaacttcaatttttcagtcagaatcatgtaagctgaatcaactgaaatgtctatggtgttggctattgtttgtactgttaatcattggttctcttccattttgg

SEQ ID NO: 245995 - DNA, 610 bp, Homo sapiens
atgtcagtagtaggggaaaccagatgtagaacatatggaactttccattctatcttttcagtttttttcctgcaagtctaaaattattccaaaaatatagtctgctttgaaaaggcatattgactttaagctgtcattcttttgttagtaattttttggtttattgtatggtagtcagagaatatggtctgtaaattttttgctttctaggatgtattatattttatttgtgttctaatacatgatataactgttgtaaaaatttgcacatgaatgaraataatgtggccaggcgcagtgggtggctcacacctgtaatctcaacactttgggaggctgaagcaggtggatcgtttgaactcagaagttcaaggccatcctaggcacatagtgaaacccagtctctacaaaaaatacaaagaaattagccagtagtggtgtgcatctgtggtctcagctacaaagaaattagccagtagtggtgtgagtctcgctctgttgcctaggctggagttcagtgactcaatctcagctcactgtaacctctgctgcccgggttcaagcaattctgctgcttcagcctcccaagtagctgggattatgggcaccc

SEQ ID NO: 245996 - DNA, 632 bp, Homo sapiens
ctccctttcatatatccatatatcctattagttctgtccctctggaggaccctgactaatacaaatgctttctaacatctgtactacatggccttcttctttctgtattgtgtctgtctctggaacattttatttcatttatatatttatttatttagaaacagagtcttgctcctttgcccaggctggagtgcagtggcctgatctcagctcattgcagcctccgcctcccaggttccagcagktctcctgcctcaggctcccgctatgacccctggctaatttttgtagttttagtagagacggggtttcaccatgttagctggactagtctcgaactcctgacttcaggtgatccgcctgcctcagcctcccaaagtgctgggattacaggcatgagccactgccctgggccatttttctttttttaatgcaattctgccagccaatttatatttacccttctggtctcaaattaaatggcatatccatatggaaaatcttcctgcatgtcattcaagctaataaagaatctcctgttttatattataacaacctgtccacagcatgtattataatgtaattaactatgtttgttatttgtgtaataactgggttagtctttttctgtt

SEQ ID NO: 245997 - DNA, 632 bp, Homo sapiens
ctccctttcatatatccatatatcctattagttctgtccctctggaggaccctgactaatacaaatgctttctaacatctgtactacatggccttcttctttctgtattgtgtctgtctctggaacattttatttcatttatatatttatttatttagaaacagagtcttgctcctttgcccaggctggagtgcagtggcctgatctcagctcattgcagcctccgcctcccaggttccagcaggtctcctgcctcaggctcccgctatgacccctggctaatttttgtagttttagtagagacggggtttcaccatgttagctggactagtctcgaactcctgacttcaggtgatccrcctgcctcagcctcccaaagtgctgggattacaggcatgagccactgccctgggccatttttctttttttaatgcaattctgccagccaatttatatttacccttctggtctcaaattaaatggcatatccatatggaaaatcttcctgcatgtcattcaagctaataaagaatctcctgttttatattataacaacctgtccacagcatgtattataatgtaattaactatgtttgttatttgtgtaataactgggttagtctttttctgtt

SEQ ID NO: 245998 - DNA, 643 bp, Homo sapiens
gcatggaataataatctcataagccaaaaaataatgctaactgatgacaactttagaagccacggtatagtaattgttttagcacattgatttgttaatgtggaaagcactacaggcctagaatctgggacaaactgggcatttatcctgcattgagcacattcatttttgttatatttctctatttttgaacttaagtacaaagtggtgtttctccttctccttagttcatagcacattaatattatttgtccagtaaattccccccttttaattttattttacttcatgtttttttcctcatttctcattctcactcccactctgattatcaattctgttgtatttgatatttatctttagatatgtttcaagatcatatattactgttaggttataaatcrcatctgatgaacagtttctgcacccagaacagtagttctttactgagggaaattttgtctcctcaggagatgtacagtgcctagaaacatttttggttgtcacaagccagagcatgctactggcatctacaggtgtgctgtgaaatgtcttacaatgccctgaacagacccctacaacacacttatcaatagtgctatggttgataaatgattacctagaataggaataaaattatgtg

SEQ ID NO: 245999 - DNA, 620 bp, Homo sapiens
ttaagtgtagagtttattcaagctcaaagcttgaggatggccacctgggagcacagattcaagttgtcctgaatatacccttccattagcagtagttacaagtgtgtttttacrgaaaaaagaagagttcctaagttgttaccaataatttacattaaaataacataagctattaactggctatacattgttctttgtaacataacttccaggaacatgaagataacgagtgagacagctagtgagcaaccaaatgtctttaacaactgcctctgagcatggggaataggggaggaagtggaggcatgactgtcgtcccatactcctgtctctctgggcttgataacagtttggcataccccacagagctcagactgctctgtactatttttctgttctcatttccccctttttgccaagatcttttgaagaaagcattgtagatgaacctaaagggttttggcttcttttatgttcaggagcttagtccaccattgttaggaggactccttcccagacagccctgtcccaaagctggggtgaggggagggaatctaagtatggagaagctatccgtgtggatatttatagcagataaatagaaatgtggcacaaaaact

SEQ ID NO: 246000 - DNA, 618 bp, Homo sapiens
aacattggatacagtttggcaatttcttatacaactaaaaatatacttactatatggttgagcaatttgcacgtcttagtatttacccaaacaatttagaaatttatgttcagacaaaaacctgcacacaggtatttatagcaaatttactcataattgccaaaatttggaagcaaccaagttgttctttaatagatggatatatacataaactatgggaattccatacaatgaaatattattcagtgcaaaaagaaaagagatgtkgacaacaaaagacatgaaggaatcttaaatgcatattgctaagtgaaagaaggcagtcttcaaagctttatatattattattccaactatatgacattctggaaaatgcaaaacaatgaaaaaaaaaaatcaatgattgccagggaataaggggaaggcagagatgaacagccagagcacagaggatttttcagagtagtgaaactactctgtatgatatcacaatggtggacacatgtcattatactttgttcaaacccacagaacatacacaccaagagtacatcctagtgtaaactatgaactttgagtgataatgatgtttcaatgtaggtttattgattgtgacaa

SEQ ID NO: 246001 - DNA, 585 bp, Homo sapiens
tttgcttcacgccagatagagaaactgaatctaaagatgtctaaataactttgtcatcacatactttaactgtkgtcttaacatttatttgaagccagatttgtttgagtccaaaatgtgtggcttttctattatgccacattgtcaccttagatatttctatgccaagacaggaggaagtttcaattaagagaggatgaccaaatatgtaaaaatgctgaagtgaggttaaaaaaagtaaacactaaaaaggagacaggggaaaaatgttctatggatttgatgattaactgctagtctctttttagtgtagtatcattagttttgtggcaaccaaatatgtcagaatcaggatcagaaggaaaacttaaaatcaaggacttgggtgagggtcatatttgtcaccatcacctcaatgtttcccacattttctattaatatatttaatcttcttgctaacatatattcttcaatttttttcacttgaagtctgcaaatggtgacatctctttctcttttataatgtgtctattttgtgcttatattgaagaatagtttagctgactgtaaaattttgggttgagt

SEQ ID NO: 246002 - DNA, 661 bp, Homo sapiens
ctcaaatgcccaattgtaaacaaacaaaaaaaaacacaaagtatacaaagaaacaggaagcatgacccattcaagggaacaaaataaattgacagagactgcccttgaggaaacctagacattggaattagtacacgaagattttgtcaaatatcaatatattcaaagaactaaattggagatagagatggacaaaagccaaaggaaataagaaaaaaagatatgtgaacaaaattagaatgctaaaaagaagattgaatatctctctctmtatatatatatctactgatatatctatatctactgatatagatatatatgatatatatatgatatatatgatatagatatagtatatatagatatactgctatatctatatctgtatctatatgtactgatatagatatagatatgctggaactgaagagttccaagagtaccataactaaaataagagaggttaagcaggtagatttgaagagtcaaaagaaagaatcatgaatttgaagacagcaaagttgacatcatccaatctgaagagcaaaaagaataaataaagtaaaaagcctatggaacctatagaacactatcaagtacactaacatgtgcataatgggaaacccagaaacaaagagagagaaatgtgcataaacaatat

SEQ ID NO: 246003 - DNA, 632 bp, Homo sapiens
tatgtcagaatcaggatcagaaggaaaacttaaaatcaaggacttgggtgagggtcatatttgtcaccatcacctcaatgtttcccacattttctattaatatatttaatcttcttgctaacatatattcttcaatttttttcacttgaagtctgcaaatggtgacatctctttctcttttataatgtgtctattttgtgcttatattgaagaatagtttagctgactgtaaaattttgggttgagttattttcccataagacagtttcttttgatatatattgttgctggcgggtagtctgctttcattctaattattgtttatttgctcttaatctctcccttctctctttaaatattaagatttttctcacccaggtattaagcctagtacccattagttatttttttctgatcccaaaataatctatacgacaaacctccatgacacaagtttacctatgtaacaaacctgcacttgtacctcagaacttaaagtaaaagttaagaaaaagattttcactgtaacatgatrccatgctgtttcactaagatgttttgggatgtagatttatttttgtttattttaatctgtacttatatgacactttttatttaaaaggacttaaggc

SEQ ID NO: 246004 - DNA, 484 bp, Homo sapiens
ccaggcaaagggcatttttcttcagtgtgggcctctgaagggatcactttggaaacatgaaaaaaaaagaaaaaggctaaaagttatttgggattattcttgggttggggaaaaacagaagagataacttggtgttgtgaggagagaaagcccgtggagcttgtactggagcctgttttgaccatcagatagcaggcccaggtgcttgctgctggacyatgatgataagaatggggtggtgaagaagcatggctggtggaaatggaaaggcattaatagaaatggacattaagggtagatggaaacttccaggaaggataggcatgccaccattgcaaatactcataatttgaaaaaagtcaagaattgttcagatgtcctacttcaacacataagatggtctgcttgacaaagagtgtcacaaacagtttttaattttaattttttgggtacatagtaggcatatatatttataaggtacatg

SEQ ID NO: 246005 - DNA, 484 bp, Homo sapiens
ccaggcaaagggcatttttcttcagtgtgggcctctgaagggatcactttggaaacatgaaaaaaaaagaaaaaggctaaaagttatttgggattattcttgggttggggaaaaacagaagagataacttggtgttgtgaggagagaaagcccgtggagcttgtactggagcctgttttgaccatcagatagcaggcccaggtgcttgctgctggaccatgatgataagaatggggtggtgaagaagcatggctggtggaaatggaaaggcattaatagaaatggacattaagkgtagatggaaacttccaggaaggataggcatgccaccattgcaaatactcataatttgaaaaaagtcaagaattgttcagatgtcctacttcaacacataagatggtctgcttgacaaagagtgtcacaaacagtttttaattttaattttttgggtacatagtaggcatatatatttataaggtacatg

SEQ ID NO: 246006 - DNA, 555 bp, Homo sapiens
tgtgcctagggattttggaagctcttgagtcttctttgagccttctttttggatattgctgattgtagatcatgaatttgaggtgataagagaggccagggacccctaattattgataggaaaatccagtagaaagggaagaaaagctgaggaagaggaataggaaaaattagccttacaatattgggaaatgagaacagacatccttttgaaatgatgaggtaagattatctgaattattcagccaagtccctaacgtacgcacataaaaacacaattaaattagcytaaatgtttactagtgctcagtctttaaatacaaactccaatatagaactccagcaatctagactagtacctatggaaaactgtcccccaaactcagactcaatcgcaaagtgccccagtttgaaagatctctacatttctcagcatcaggagaaaatttatcataattttattgataactcaagaatgtgagctttgtattctgaccaataagactaatactccttcttgaaggtagattaattaggtaatttgagggaagaaaga

SEQ ID NO: 246007 - DNA, 477 bp, Homo sapiens
aaacacaattaaattagcctaaatgtttactagtgctcagtctttaaatacaaactccaatatagaactccagcaatctagactagtacctatggaaaactgtcccccaaactcagactcaatcgcaaagtgccccagtttgaaagatctctacatttctcagcatcaggagaaaatttatcataattttattgataactcaagaatgtgagctttgtattctgaccaataagactaatactccttcttgaaggtrgattaattaggtaatttgagggaagaaagaatgttctttcccctgaaggtcagaaatatacttttcaaatatacataatttttaaaagctccagttgttaccaataataaaaattttataggtgactgcatttcttttctctctgcagtctagtagctgtagtccagaagttggaggaagtttccctaagggctaaaaccgttaggatcaccaaacaagaa

SEQ ID NO: 246008 - DNA, 607 bp, Homo sapiens
gctactctctaactttaaaacagcaatctcaccaaacacctgggagagagcatgcttttagttagcaagatctagattgaatctyaaattggccatttaatagttatatgacattgggcaaaatacttgacttatctgcagctcattgttctcatgtaagaaaggagaggaaagggtgataggtgattattctacaaagttttacattgtctctgaagtcagaaacttagaagtcatctttgatttgaccctgttttccatccctcacatctaattgaccagtaagccttctccaactctatctacaaaatatcttttgagattatcacctgctaatttttctgtagaccagaacttcaccacatctgatttggactattgaaatgaccttctagttggtttttcttcctctagtctgacacccttttccaatttatttctcacttattcaagataatattctttccagttccatatcttattcaattcctggccattcattgtaaccaaaaaagtgacagtaaagtctagatggcttttaatgatatgtgaccttttccacagtctggctgtagcctgaaactctaattgtttctttatttatctc

SEQ ID NO: 246009 - DNA, 556 bp, Homo sapiens
ccagcctggtcaacatagtgaaaccccgtttctaataaaaatacaaaaattagctgggtgtggtggtgcgtgcctgtattcccagctactcgggaggctgaggcaggagaattgcttgaacccaggagatggaggttgcagtgagctgagaccacaccattgtccttcatcctgggtgacagagtgaaactctgtctcaaaaaaaaaaaaaaaaaaaaaaaaaaaaagaaaagaaaagaaaaccaaaccaattgactgatcctggataaaaagtgaaaaactgactcagtcaacataggtattaaaatctgactcctattcagggctcttttccccaatcatacaagttatcaattattgaatacccattaaatgacatatattttcttagattacttaygttaataatcttacttttttcttatgcacctccccatttaacagataagaatcctacagcttacagtgattaggtaaacttccaaggttatgtaaatagaaagtggcagagatgaacactatgactcattagcagaatgcctcaagatcactcact

SEQ ID NO: 246010 - DNA, 605 bp, Homo sapiens
ggctggagtgcagtggtgcaatctcagcttactgcaacctccagctcctgggttcaagtgattctcctgcctcagcctcctgagtagctgggattactggcatctgccaccatgccaggctaacttttttgtattttcagtagagacggggtttcaccaaattggccaggctggtctcaaactcctggcctcaagtgatctgtccacctcaacctcccaaagtgctgggattataggcatgagccactgcgcccagctcaatgttcttaaagaaaataattttcaaaccagaattccatatctggccaaactaagcttcataaggaaaggagarctaaagtccttttcaaacaagcaaatgctgaggaaatttgtcaccaccaggcctgcctttcaagagctcctgaaggaaacattaaatatgaaaaggaaaaaccattaccagccactgcaaaaaaaaaacactgaagtacaaagaccaatgatactatgaaggaactacataaacaagtctgcaaaataaccaggtagcatcatgatgacagctggcatcaggatcaaattcacacataacaatattaaccttaagtgtaaatgggctaaat

SEQ ID NO: 246011 - DNA, 489 bp, Homo sapiens
agtctgaaaggagccttcccaatgctgccacacacagcattttcctttgataccttgaatccacacaatcttgggatccccgagaagggtcaaacactttccatgtctgatcattacccttgaaataatgacttcattctggaagaaggttaaagttcttgaaatattttccatcacatcaactgatcctagataccagcttgtggaattagaaaagaagaggagaygcccaagtgaaattttataggaacaaaatgccccccacagaccttctggaaaactttctgaaacaaaatgtaacacatcctgttcctggcaaagagcctaccttagaggcagcccagagagaaggaaaaagcacacccattgttctgacacctggtccccttcctactctgcctggagcacctgggagcccatctctgggcttgtttcttcaaggtgagagcctgaactcaataatcaatattcacactgggctcagcccag

SEQ ID NO: 246012 - DNA, 489 bp, Homo sapiens
agtctgaaaggagccttcccaatgctgccacacacagcattttcctttgataccttgaatccacacaatcttgggatccccgagaagggtcaaacactttccatgtctgatcattacccttgaaataatgacttcattctggaagaaggttaaagttcttgaaatattttccatcacatcaactgatcctagataccagcttgtggaattagaaaagaagaggagatgcccaagtgaaattttataggaacaaaatgccccccacagaccttctggaaaactttctgaaacaaratgtaacacatcctgttcctggcaaagagcctaccttagaggcagcccagagagaaggaaaaagcacacccattgttctgacacctggtccccttcctactctgcctggagcacctgggagcccatctctgggcttgtttcttcaaggtgagagcctgaactcaataatcaatattcacactgggctcagcccag

SEQ ID NO: 246013 - DNA, 557 bp, Homo sapiens
cttgtttctccagcaatttcatttacaaagttacctcagtgagcctcctgcacttttattcccacctacctaaaccaacaagtcttgcctcccatctcctcattctgacaaytgctcatttcagaaacttgacacttctgtctttaatacaaagatcttttaaaaagtgttcctatacctttctattatcaataaaatacccctaacttatttgaatactgctaacataatgaaacttctaaatataaatttgatcatgccaccagcttgtttaacaatgttcactggtttatctggcacgcaggggataaacctaatcatcgtgtattgtcttgaaaccttcttgattttttccttgccaatctactttggaaatacagagatagtgctgcctagcccatgccctcaggcagaaatcagtctgcaagccacagaggtggcaattctccccaagtatgagcttgttgcaatcacatttattaggctatgaacatcccatgagtgaaagaaagatctgatgaaaagttaaatggatggaaagatggatagtggaattt

SEQ ID NO: 246014 - DNA, 491 bp, Homo sapiens
gtaataggcagagaaaatgatgacaggacctagaggaatggaacaagatctagagcagtggttctcaacctttattatgtatcaaaatcatctgatttttgactgtgagtttttgactcagaatttaaattttccataagttcccaggtggtgctaacgcactacaatttgagaaccactgatctagaataatatgcagagaaacactggaggaagattttcctagaaggtgtgctatataggtgtaggacattttggaagaaggctagaaagtgtgcaaaaccaccactgtrgatcattgccaggaatccgttgctttgattacatctcttattttgaatgatggtaggaaattactctgacatctaaaactaaactccttgaaggaaagctcatgaagaaagatcaaactaacattacctaactcatagtatggctgttaacttgaaatgaatcaatgcataggaatcatctagcacataagcagacaa

SEQ ID NO: 246015 - DNA, 598 bp, Homo sapiens
cgtctgacagacatggaaaaatgctcatcattgcaaattatcagagaaatgcaaattataaccacatgagatactatctcacacaagtcagaatggctatattataaaaagtcaaacaaacaaacaaacaaaaaaagcagatgctgatgatacaggggagaaaatggagcacatacactattggtgggaattagtcattgtggaaagtagtttggagatttctcaaagaatttaaaacagagctctcatttgacacagcaatcccattattggttatatacccaaaggacaatggatcattataccaaaaagagacatacacttgtatattcatcgccatgctattcccaatagsaaagacatgaaattaatctaggtgaccatcaatggtgaactggataaagaaaacatggtacatatacaccatggaatactacacagccataaaaaatattgtatcctaagtgaattaatgcaggaatagaaaaagaaagccacatattctcatttataagtggaagctaaacattgagaacacatgggcataaacatgggaacaattgccactgtggactactagagggggaaagtaaagagg

SEQ ID NO: 246016 - DNA, 584 bp, Homo sapiens
gcccattagactaacagcagatctctaagcagaaaccagcacaagccagagagattgtgggacaatattcaacattcttgaagaaaagaatttccaatgtagaattttatatcccaccagactaagcttcattatgaagcttcatttatgaagcttcataaattacaatcttttccagacaagcaaatgctgagggaattcatcaccaccrggcctgccttgcaagacctcctgaagggagcactaaatatgtaaaggaaaaacccataccagccactaaaaaaacaccctgaagtacacagactagtctgcaaaacaagcagcatcatgatgacaggatcaaattcacacataacaatattaaccttaaattaagtggcctaaatgccccaattaaaacacacagaatagcaagctggataaagagtcaagatccattggtgtactgtattcaagagacctatctcacatacaaagacacacatagactcaaaataaaagggtggaggaaaattaccaagcaaaagaaaaacagaaaaaagtaggtgctgcaatcctagtttctgacaaaacagactttaaac

SEQ ID NO: 246017 - DNA, 555 bp, Homo sapiens
aagctgaactcctggttttaaagacctttctgcttaaaatcatcatattggttttgactatatgcagtggtattctgactagatattaataaaagaaattattgtctataaaaattcttaaaatcatacatttagcaaacaagtatatctttgtgtacacttaagcaataggcagaatttttataaagtcacctctaaaattccagtggagtaaacatatacccacactcagatacacttacagacacaagatttaaataaatagaaagccattatacttgcagaagacttatcattgtttattaatttaattacctaaaagttctcctgaattttctgattgtttgtagtagcattttttagattggagttttaccttgtttcttatgcccccaaaattttcagttagatcaaattctaacctaaaaaataagccacaaaaataytaaaattaagcatgactgaatttacatatcatcttgaagcagacaaagcattgtatgtaagactcagaatttacaaactctaaactaaaataataaatatagtcacata

SEQ ID NO: 246018 - DNA, 580 bp, Homo sapiens
atatcttttttcaggcttttaatatcaacctatttgtgtctttgaatataatgtgtgtctgttataagaagcataatttggatcattgttttttatccattttgccaatttctacattttgatggaatgtttgatcactttacattcaatataattacttataagatagtacttatatctgccattttgctttttattctctatatatcttatgcctttgttcctctatccctcaatttttatccttgtctctgtaaaatagatactttctagaatcccattttatttccttactttttcttgtactatatatttttacttattttattagcagtttccctgggcataacaattagcatcttattttaagacaatgtggtttagatgaatactacctcattttcaagcatgtacaaaaatttggttcaatgtattgataaactttgttagtttccaggtaaagtcttacacattttttayacctaggcatatgatatatgtatttctaaactgcatagatgattttcttaaaatccacccacaagttagagccactgatctcatctaagcaaactggaag

SEQ ID NO: 246019 - DNA, 561 bp, Homo sapiens
acctcactgtatccccatgaaatacttcttttatgtatttagactgaaaaggatgccagacagatctggatattgatcccagctctagcatttccaacctgggtgacaatgtgcatagtcctcacagtcttttatctggaaaatggagatactcatgctcaacttcctgtgtgggtatgaggattaaattgtttcccatatataaagaaactactgtagttcctggaacaggtgttctgtaaaagagattattttattagggttcttaccctattgttgaattcagagaaagaaattccagataggcaaaaaacattaaatatttaatcccataatcagcatatcctttattaaggatttataaaggagttcaattgaaacagaagtaaaaagagtatatctttattgtatggagrggagctctacacaagcctaagcattaattccactggagaaaaaaacacgcaaagattaattgttcattacagttacattataaagagtaaaacaagagattgattcatgttgatgccctagtcctaatataatttgcaactaaca

SEQ ID NO: 246020 - DNA, 540 bp, Homo sapiens
aggagtaataacaatatctgcatacacacttcagaagattgaaggaagcaaaagagctttgtaaactataaartcctgtactaatggaagctatctgtattatcttcgtatctccgcctatgactcagtttcctcatctgcaaatggatggagttaataaaagcacatacacatatgcatgctgtgtctgggccacaggaagaacccgttactgttgctgtcattatctgtgtcactttcattttctttatgatctcctgtggaccttgtccatggtcagcactcagtacaaattttttgaaatgaatgactttggcatttgagatgttagagaatatgggattaaaatccagagaccatgtaaagatgcagagttcaatcttatcagaaatgctacaccgtggcctttgagtccaaaggtgagctcagctgggtcactgggacacagccccttgctgtcacgggacacagggccatttcctggagtgggcggaaagtcaaggaatcccagcctggggtgacctctgtgccggcggccca

SEQ ID NO: 246021 - DNA, 575 bp, Homo sapiens
tgttcccctgacgtccctaggactttactgttggaggaaggcaggctcagtaacccattctaaccttcttggccaaattaacacattctgacttttgacccttgacctctgactcatgcatgactcaaagctgtggccggggaacattgtcagtttccactgaagactgggccccgaggctagccttggtgactgctgtttggatagtcttggtcctaccttccttctccccacaatctgccagaaagtgggtgaggagagaggagagtaatgatcttcccagaggttctggaaggcygctagaggctaggtcttctgctcactgctgggttgccctgtgaatgtgggaacagaaagggcctgcgatgggtgaggggcacagctgaggcagagcttcccctgagggaagcccagttcctcttggggagagaggctcacagcattgagatggactgcggcttaaaggagccatgaccttgcagacctgctgctgccatcgcgggtacatgggcggtgtggggttctggcttcccccgaacaggtgcagaggacggacagtcaaacttcccagcaag

SEQ ID NO: 246022 - DNA, 610 bp, Homo sapiens
ctatggtattagttccaattgccacacacaggaattttcaaagcaaacccactgggcagagaatgatgtgctgggaatcttggtgtgagagatatgtggtagtgagcaccctcctgcaaagagagttttatggttcacacaacacttttgctttcgtggacagcatctcactccacaaatacacacacacacacacacacacacacacacacacacacacacacactttttagaggtagggtcttgctttgtcacccaggctggagtgcagtggtgcgatcatggctcactgtagcctcgacctcctgggctcaagtgatcctcctgcctcagcctcccaagtagctgggactayaggcatggctgactgtgcccagctaatttttatttttttttttaaaaaatagacaaggtctcactacgttgctcagactggtcttgaattcctgagctcaaacaatcctcctgcctcagcctcccaaagtgctggtattataggcatgagccattgtgcctggctgaaataagttttaaactaacagatgccattgatcaagcacatgctatgggccaggcctggtttcaaagccttgacatctgtttttcccct

SEQ ID NO: 246023 - DNA, 610 bp, Homo sapiens
ctatggtattagttccaattgccacacacaggaattttcaaagcaaacccactgggcagagaatgatgtgctgggaatcttggtgtgagagatatgtggtagtgagcaccctcctgcaaagagagttttatggttcacacaacacttttgctttcgtggacagcatctcactccacaaatacacacacacacacacacacacacacacacacacacacacacacactttttagaggtagggtcttgctttgtcacccaggctggagtgcagtggtgcgatcatggctcactgtagcctcgacctcctgggctcaagtgatcctcctgcctcagcctcccaagtagctgggactataggcatggctgactgtgcccagctaatttttattttttttttwaaaaaatagacaaggtctcactacgttgctcagactggtcttgaattcctgagctcaaacaatcctcctgcctcagcctcccaaagtgctggtattataggcatgagccattgtgcctggctgaaataagttttaaactaacagatgccattgatcaagcacatgctatgggccaggcctggtttcaaagccttgacatctgtttttcccct

SEQ ID NO: 246024 - DNA, 594 bp, Homo sapiens
tcttgtgtaattcagattggatgtgtgctatagcttcttctggctgttttctctttaccttttctccccatttgtatttcaatttttgtctttctgttccattatgagaagtttctttacctctgttktcaagttcacccattctctttataattgtatctaactggatgtcaaatctataaataaagtttctaatttagttatgttacatttttatttttgagatgtattttttatgttatctggatctatttcaatagtttcttgtgtattatactttcaattccctcttatttttaaaaacatattaaacataattgccttatattttgtatctgctcacttaaatatctgctgtctttatagatctgatactgtactttatttccttcagttagctttcattcatagagcttattttctcatatgtttagtgatttttgtttgtgtctgtgagatcatgttctatcaatgcattataagtgggaattctttgagctctgagttttagaaatatctctccagagttttgagtttgcttctgctagcctgggaccaatttaaagtaaaatttcagcatatggctttttaggc

SEQ ID NO: 246025 - DNA, 620 bp, Homo sapiens
gcaattaccagtcagtattcaacatcctactataggcaaaagtactcctttctccctattaattaattaatcaatttacgaatgataccgtgaattacgatttcttctatagtctgcaatacattactgtactaaattattttggtactcaagttcttccatatttggccagtggaagccccttcaagctagttcctgtgatatgcccctgtcattttgagcacgtccttattttctggcatattaagatattccaggcttatattttacttacccttcctcatttctgaaatttgtcatttctctgagtagcctggctttcttctagtggggagtggtatctggacacttagatatagtaatgtgctcactgttattagggtgtctgtttcttagccctttaagttgacagagctagggaaaatatacatatacagrtagtccctgacttatgatggtttgacttaatgttttttttgactttataataggcttactggggtattaaacacattttctacttgatattttaaacttggattgggtgtatcaggacatagccccattgtgttgaggaacatctgtatatatacacacgcatatatataatacacatgtgt

SEQ ID NO: 246026 - DNA, 620 bp, Homo sapiens
ctgcgaaaactttaatagatctgttgacatttccaaaggattttgaattccaatttcccttccttgaccaccagttcccaatcattttacttgtttccctgggagtttcaaatcactttatctttgcccccaagcagaatctgtaacctaacagacacatttgacctccctagaaccacaacagaacttctgcagcccatcaaaatgtgtggtggtctcaatgacagatgacgcttaccatagtcaggaagtgagtaaaaattaattgtgctttcaggaactgtgaggtgacagcaggctgaaccaaaggcagagtccatgaaacaaacaccccctggctcagtttatggccactcaagcttccttggcagtgttcatggctgacttagcatttggatgctccatgagagcagggaccctttctgttccccacagtgctcaaacatcactcattgaatgaactaatgaaacttaaattgtacaaatgtaacataaatatgttatgtaacrtaaatatctgaatgggaatactaaacacagactacaaactttccaatccaaagagtcttagaaatcatctatgcccctaccttccctttggaggtaattacggcatcaga

SEQ ID NO: 246027 - DNA, 565 bp, Homo sapiens
gcattcctctggtctgtgaaacaaacaaatcaacaaatactcccttgatcgagacatacatactttgtaaaaatgtccttgacataaactcaagttttcctttgcacgtgcacacacacacacacacacacacacacgctccccttattgaataagagtatcctccaacccttggaaatttactgtatagctcatcttttctaatacctgatccttcccagagtggtccttatagttatcttgcagatagtgccaaggccttaccagcccactccaaagtagtgtcccagtcaccccatctcgcttccacatctcgatactctcacccaacactgggcactgcacagtcaaaaatgagtacagttcatgttcctgaccattgatctgccatcaattttttccaagcctgaggcatgcgattatctgcaaagctgacttacaagataaaatccccaggcctctccccttcccctcctcctccaacaagcagacattgattttacacagaatgtgcatggctttgatgstgttattgcaatcaacatgaaaaataccaccacagtgc

SEQ ID NO: 246028 - DNA, 575 bp, Homo sapiens
ctagtggtctgaggcagcaccccatagtcaaacatgtggacatttttgtagcaaaatgtctgaatattcacataaagataaatacaggaaaaaaaagtttcatgtgaattcaggtcaagttttgatgcaaatgtgtaaccctaaacattttttttaatttgtttttcagagcatttagaatttggaattatggctaaggtatagtattgtgagcctttatttttctttaattcatgcatttgcataaaaattaatatgcttttttgttaacaaaaggacactttatttcatacatggaaaactggtattcctttctataaatagcacataactatcaaaataaatacaataaatacaaaataatctatttaattctagcaaaccaaagctacagaagggttgtaactgggtcctgtatgatctcctccrtctctccctctctctctcttcccctataatgtgtctcaatctctctgctaaaaaagagattagcaagtattaggtgttaaagacatattcgcaccaaactgagattttctcactgatgtaataagaaagcctgaaaggaaaatgga

SEQ ID NO: 246029 - DNA, 565 bp, Homo sapiens
aatgaattttttagatgtttgcaattctttcttcctaaaattactatgatttacatgtatggagcagtaaatgcaaatgatttccaatcaccacgggtacgtgtactcaattacaaagtctcttaatgagcattgaaaagatttcagcattcactgaacaagacataaagcaaatgaactcttcagtgccctccccttcccacagagggctgaaagggactcactcttgttacaagaacacggccactcctccctctcttcctcttcccagtccatccctcaccccagtttcagccaccatccaaaaagaaatcgcagcatggcccttgaagcacattgagcttaaaagtgcctagaagataaagcctaaactkcagcacgacaggcaagacctttcaaaatctggcctcgaccatcctctctgggtctcctttctgagaacccctattttctgccttttcacaactccacacttatgcatgatgctgttttccctccctggctcacccaccccagtgttcttcttctgtgatggtaacctccccagaaagtctcttgagctaga

SEQ ID NO: 246030 - DNA, 565 bp, Homo sapiens
aatgaattttttagatgtttgcaattctttcttcctaaaattactatgatttacatgtatggagcagtaaatgcaaatgatttccaatcaccacgggtacgtgtactcaattacaaagtctcttaatgagcattgaaaagatttcagcattcactgaacaagacataaagcaaatgaactcttcagtgccctccccttcccacagagggctgaaagggactcactcttgttacaagaacacggccactcctccctctcttcctcttcccagtccatccctcaccccagtttcagccaccatccaaaaagaaatcgcagcatggcccttgaagcacattgagcttaaaagtgcctagaagataaagcctaaacttcagcacgacaggcaagacctttcaaaatctggcctcgaccatcctctctgggtctyctttctgagaacccctattttctgccttttcacaactccacacttatgcatgatgctgttttccctccctggctcacccaccccagtgttcttcttctgtgatggtaacctccccagaaagtctcttgagctaga

SEQ ID NO: 246031 - DNA, 565 bp, Homo sapiens
aatgaattttttagatgtttgcaattctttcttcctaaaattactatgatttacatgtatggagcagtaaatgcaaatgatttccaatcaccacgggtacgtgtactcaattacaaagtctcttaatgagcattgaaaagatttcagcattcactgaacaagacataaagcaaatgaactcttcagtgccctccccttcccacagagggctgaaagggactcactcttgttacaagaacacggccactcctccctctcttcctcttcccagtccatccctcaccccagtttcagccaccatccaaaaagaaatcgcagcatggcccttgaagcacattgagcttaaaagtgcctagaagataaagcctaaacttcagcacgacaggcaagacctttcaaaatctggcctcgaccatcctctctgggtctcctttctgagaacccctattttctgccttttcacaactccacacttatgcatgatgctgttttccctccctggctcacccaccccagtgttcttcttctgtgatgrtaacctccccagaaagtctcttgagctaga

SEQ ID NO: 246032 - DNA, 620 bp, Homo sapiens
acttataagtgctttaagtatttattcatagcctgcctttctctacaaaggaagtgaggtgacttttaaaagcatatgtgatttttaaaaggtaagtaacaggtgaatcaaagcaaggaaaaagtaaatttgagaaaataataaagcytagatggccagcacacaggaatgcatatcctactgccctagacagctactaaatgggtttcctgtttgactccaagcttcttggccatcaatgcaaagaaagaacaagaatggtaagattaatgcccagtaagatacagcgaagtggatttttttcagttcttcttgatatagtaacctaagaagattctctgtaaatcatcatttaaaaagacaccatgaggtgtaatgagctatacattgtaaatagaactttttaaaaaaaatgatgttcacgaaactattactcataatcctctcaatacaaagtgaagccttaatcagtgtgcaattcaataaagcagagagggcctgtgaaggcaactgtgaagtggggtgccacataatatgccatcgtgagcattcagctctctcacaagtctggcagaaatctcttatcaaattaggttatctggatgaacggaaggaagcaa

SEQ ID NO: 246033 - DNA, 620 bp, Homo sapiens
acttataagtgctttaagtatttattcatagcctgcctttctctacaaaggaagtgaggtgacttttaaaagcatatgtgatttttaaaaggtaagtaacaggtgaatcaaagcaaggaaaaagtaaatttgagaaaataataaagcctagatggccagcacacaggaatgcatatcctactgccctagacagctactaaatgggtttcctgtttgactccaagcttcttggccatcaatgcaaagaaagaacaagaatggtaagattaatgcccartaagatacagcgaagtggatttttttcagttcttcttgatatagtaacctaagaagattctctgtaaatcatcatttaaaaagacaccatgaggtgtaatgagctatacattgtaaatagaactttttaaaaaaaatgatgttcacgaaactattactcataatcctctcaatacaaagtgaagccttaatcagtgtgcaattcaataaagcagagagggcctgtgaaggcaactgtgaagtggggtgccacataatatgccatcgtgagcattcagctctctcacaagtctggcagaaatctcttatcaaattaggttatctggatgaacggaaggaagcaa

SEQ ID NO: 246034 - DNA, 570 bp, Homo sapiens
tgtcacatcagtgctctaaaaagttttggattttggagtatgttggatttcagattagtgctaaattatatttgctaattgatattctgtgtattgttttcttactggtgaaaagacaaattgaactcaggaaagaaaaattacaaatatatagtcaaagagtcaccagatcatttgagcaacataatgagtttttatttcttaatatacagggtttaatttgttaaccacaccrgaaaaagaaatgttcaaacagtcgactttctacttgaaattaaaatggaaattagcccttaggaaacagtgatgactttaagtttatacatcagtggctggttcatgaattattaactgattttaatgatcctggctatattttatttgaagttattctcctacttgcaacgacttttgaacccacaaaactctttcatccattctccacagacacagtacactttcatgagcactgacatttgaaaaggatccatatactcacagaatgtaaagataatacacatgcatataattgatacaaaggactctggtcatttgttaaagagagtaatg

SEQ ID NO: 246035 - DNA, 575 bp, Homo sapiens
catttcccatccagaaagataatacatgtcatcaaaagttaagtctttagagattaattaataatgtgagtattttcaaataaaataaatgcatgtctttatatgctagtttttacattttcagtataaacctatattgaacagcaccacttcagacacacaaattagctgtgaaacaaaatgctataaacctttaattagcacttgctgctttatamccataaagttaatacttcctcttctactatattctctgtaaaggaaaattatgggaaataaaattgtgtttttcacttccgaaaataaaagtagcaaaatatagtattgtggctcagtttaaagatagttatatttttacttgcaaggaagtcaatacaaagatcccttacaataagtataatttgattcctaccaatattaagcgctatgtctaactttcataacttgggtacacagagcactgatgacgatcagattgctaaataagtaagaaagcaagttatttcaggcaaatagctgcattaagaaaatacgacagtaagccaacttgtatccacactcctgaagctgaacaa

SEQ ID NO: 246036 - DNA, 426 bp, Homo sapiens
gggttgatcttgaaaaaaaaacttagatttttttcatttttataaaagcaatgagatttttcaatataatatttggaaaaaatagaaagaagaaaaatatcacatcatccattgttatattccataaagagacagtagtactattaagattttggccagttttcttccagtccttttttctccatttaattgtcacacgcacacacacacacacacacacacacatatrtatatacacacacaattctgtgccttacttcagcatgagagtataacattttcttttatattttaattagagttttattgtatagataatagaaaagtaaataaatcacttttaataagggtctctatgaccacaatttcagtacaaaaagtacatcttttgggttgcttttggctgcaaataacagaaaacccaac

SEQ ID NO: 246037 - DNA, 600 bp, Homo sapiens
ctctagcctacaactacagactgcatatgaataggcattctaatcccccttcactcttgtccagtcccatgacagaagctattatacaaatgtctcatccctactgtagcaagttccctggcatctgggtgtggtcatgtgataaagatctgatatgagagaaaattaattttcccttcttcctttggatattctcatgtaagaacttgatacttagagtacagactccatcttgcaaatctgaagtgacaactttgagtatgcaaaaccaagaaactatagatagcaggatggatgaacagaaagagctagaggtctatgtataccattaaacaaccaagccatccatgaatcactgacctccagagctcttgttatgtgagaaaagtaaatgtcttcagctgttaatccagtgttaactaggattttcttttatttcagctaaaatcatccacataccatcgagactaccaagatgtcaagtcagtcagatactttcttgggggccttgaaacaggaagmtaaggaatgcaggcaaatagcaataaagtttaaatacagattttcagtaaaatacaggtttttaggtaaaaaacaaaa

SEQ ID NO: 246038 - DNA, 557 bp, Homo sapiens
cctcatttgttatgtttttcttctttccagggaaaatgaatgtagagcatattctagtatggagtcttcccccactcagctatgagctgagttcaattagctcatctacttctggtgtatgcatctacggtttctttcctcttctgatttcaacatgtaataccctttgtctggtccctcaagaaatgatatattttcaaattcatagtcttttattgtaagcaatagaaatgaacactagtaaagtaaataaataaagacaaaagaggaggtagtaggcttatttatggaatgaagagtggaacacttgcaaggacttgggaaggaaggaccaagcctgctaaggaaatcccacagtgaaaattcctaaaccttctctaacaagcattttccaagtcaacttgatgataggactcacttagaagtgtttgttaaaacactgattgctgggtctaacccacamctgctgaatcagaactttgggccgggggtatgctgggatctgtatatttaatagaaaagaccaagaaacactgaagacagtgctaatattaact

SEQ ID NO: 246039 - DNA, 569 bp, Homo sapiens
taactccatgagagaaggctccatgtaaatatttgctaaatgaatgcgtaagtgaatgactcaattggataatattatgctggcatgtaagccaatgagatgatgggataaagggtaaaaagtcaaataaatagatactctattttataaagcttagagaaaaacaacaacgtttgtaaacatgacaaggtgagaataattaataggtaatgcattcacagcaagctattaatggaagctagaatgtttgaaataaaatcytaagcactgaggttgacatcagaaagcacaacggttcgcttttattaacagtcccttgggctacttgcaccatagaattaagccaggttggtaaaaagtggtactatacaatcataaagaaacagctgtaatgtgtaggtcaaacttagcagtacataaatatgtatgcttgtgttccacctgcaaaaaaaaaaaattagggtgagccagtccagactcaggtaggcgaaaccccaagcatccttgctcactaagcattcacattctctttctcaggaactctgatcctggagttcactgtatgtgtt

SEQ ID NO: 246040 - DNA, 523 bp, Homo sapiens
aaggatattgcatttcccccatggaattagtttctgatttggaaagaactatagctatattcacattgtttggccaaaatattctgaacatcatttaaaagatgaaagctaggtatgccagcatttggacacaatttataaaagtgttattatggacaaaatggtgccattccttccaggtaactgtccaaatatccaaagatggatgtcttaatttggcatccaaaatacacacaaggggtcagactgtatgtaggtaatttcctcmgatgctattatttgtcccctgggatcccacatacgcaataccaattatagaggagaggattaagaataggccaaaagggtgagggctgcaacagcaggcctgaatgatttggactaagatcttatatcaaatttgcaaattaccaattaaggcaggtttagaacatggcatcatttttgctcactgtgacaaactggaaattaaggctctctctgcatgtcagaaggatgacagtaatgacagaacaagaaatgc

SEQ ID NO: 246041 - DNA, 597 bp, Homo sapiens
actatattagcagctacttcacagtttgggttcaggctgaaattattctaaacttatacctaaaggactatattagttgcctcacagttctttgaatagagatttaggatcctctcaaagtgcatttactgaattaaaaaacaaacaaaccaaaccctagtattttaaatttattccttctaaattctatcctattgattttttttctcttttttggtgtcattgaattctacctggaagtatttctgaatcctgattctagtatgcaatgtgtaagttttaagttatcccctctaartcagtcacaggcttcatgagcccaatcatggttaatattccctgaatgccttttgagataccggatcttggtttaaatccatatacggtcaattattcatgctttaatgcacaaaatcacctatacctgctctggataaatgaatgaataaatgattcacttaagaagtacatgcacactgttactctattcacttcactccatctagttaaccaactatactttaattcttaacatctgcagcccacacagtcagctgttttctgccaatgtgcaagtctgagtacaacatcagtata

SEQ ID NO: 246042 - DNA, 598 bp, Homo sapiens
taattctacttaatgaatgtgaatttccaagagagtcagatgcctttcagttagagcttcacctggagccaagttttccttcaatgaaaaacattatttaaacaagaaaaactatatacagacacacatatttttctagttgagtcaaacaactatattcttctcctggaagaaaatctggcactgttagtgccacaataccctgaccaatggcaagttgctattactttccagagtagctttttttccaaataagaggagttcaatttcattctctgtaaaacaatattcaaatgtcgaccacctttgacrcctttcttggataaccatgatgtgccctaatcattattattttttaagaataaacaagaaatgtggagtctcacattttaaacaaaaattcagaattaattctcctaaggaaatttttgtgtcattgacttaaaagggttgagacagaaagctggagaaaaagatttaccccaaagagacataatcaatgatagttttaatcttcctttctcagctaagattcaatgaagatacattggctgtattgcctttacacaaaacctagaccctcgcttaaaatggagca

SEQ ID NO: 246043 - DNA, 556 bp, Homo sapiens
ataagaggtcctctttaagacatgacaatttcagtwtggtacagtggcaagtatgaagatcagcggacgtgtgattggagggaaaggaatccctctcaactgtaatggctaagctgttacctaaccccatctgatcatatccctcaagagtctttaaccattacttctcaatcctctggactgaagttctgtgactgtgagaagactgtcagtgtatttaccattcctgggcccaatgggggtgctaacatgatgttatagaataaacccttcatcttgaaaccccttcaatttctgcagcatcacttgaacctcccttctctgttcctcatcactcttaatcttctctagctcctcttcttccttttgctacttagaaatagatgatgctcagggttctgtccttgacttactccttaatactctctgagaagtcctgattactttcacatcttctcatccacgtgctgatggtcccaaaatctatagttccagttccccatgactgagttctagactccaatgtaagcacgtcaaattcaactctaacatccca

SEQ ID NO: 246044 - DNA, 556 bp, Homo sapiens
ataagaggtcctctttaagacatgacaatttcagtatggtacagtggcaagtatgaagatcagcggacgtgtgattggagggaaaggaatccctctcaactgtaatggctaagctgttacctaaccccatctgatcatatccctcaagagtctttaaccattacttctcaatcctctggactgaagttctgtgactgtgagaagactgtcagtgtatttaccattcctgggcccaatgggggtgctaacatgatgttatagaataaacccttcatcttgaaaccccttcaatttctgcagcatcacttgaacctcccttctctgttcctcatcactcttaatcttctctagctcctcttcttccttttgctacttagaaatagatgatgctcagggttctgtccttgacttactccttaatactctctgagaagtcctgattactttcacatcttctcatccaygtgctgatggtcccaaaatctatagttccagttccccatgactgagttctagactccaatgtaagcacgtcaaattcaactctaacatccca

SEQ ID NO: 246045 - DNA, 504 bp, Homo sapiens
cctcttcccactagatgctaacaacgtccctccccgtaccagtcatgacaatgaaaaatgtctccagactttgccccaggcggggcaaaaccactcccagttgagaaccactaacctacccaagatacagtacataaaaggcaagttaaaaaataactatacaggacagccttgttttctttgggraaaaaaaaagtgtatcctaacattaacaatggttacattataaggggtagaatgggaggggcaaggaggggagagtttcaactttttctacgtacatgtgtatgctgttttgataagctgtgaccacaatacaaaagtaaacattgttcaattcccacctatgagtgagaacatgcggtgtttggttttttgtccttgtgatagattgctgagaacaatggtttccagtttcatccatgtacctataaaggacatgaactcttcattttttatggctgcatagtattccatagtgtatatgtgccacattttcttaat

SEQ ID NO: 246046 - DNA, 504 bp, Homo sapiens
cctcttcccactagatgctaacaacgtccctccccgtaccagtcatgacaatgaaaaatgtctccagactttgccccaggcggggcaaaaccactcccagttgagaaccactaacctacccaagatacagtacataaaaggcaagttaaaaaataactatacaggacagccttgttttctttgggaaaaaaaaaagtgtatcctaacattaacaatggttacattataaggggtagaatgggaggggcaaggaggggagagtttcaactttttctacgtacatgtgtatgctgttttgataagctgtgaccacaatacaaaagtaaacattgttcaattcccacctatgagtgagaacatgcggtgtttggttttttgtccttgtgatagattgctgagaacaatggtttccagtttcatccatgtacctataaaggacatgaactcttcattttttatggctgcatagtattccatrgtgtatatgtgccacattttcttaat

SEQ ID NO: 246047 - DNA, 504 bp, Homo sapiens
taagactctgggatctccactgccatcatccccctttaacaaaatcaactccatttccatttgttttataaattgaggttcctcataatatttcattacaaaaaaaaaaaagattattttgcagtgtgacagtatggaaaccactcctgaagagtactggtggtggggccaaggccttgccaaaacttagagtcatccacatagtcttcagatccaaaaagatgccatctcccactggacaagataccaagggcctctagactatttttaaagtaacctctgacccacataattgatgcatcaaaatgtgccaccactcaccacggttcacagttatcccataatcacctcctatgagtgaagattatagtataagacgattaatggctaaagtgtctctttggaaattcaagctcytttagggccacaaattattaacaactgccttggggaacttgaggatcctcaacagctccaatcattttccataaaagtaacctttaa

SEQ ID NO: 246048 - DNA, 522 bp, Homo sapiens
gctcagtataaaagtatttactgagcccctactatgtatcaggccagagaaggcaatatatcaaaccttatatctttgagaaccaggaaattaccatgygattattttacacattaaacaaaatcctgaatggatgaacaaatttactacaacataatgtaggccagaataatttttatatactcccaccaaaattgctcacaatttttcccagtagtaatgacacaataaggaaatgtataactatgaatatagcccagagaaatttaatgtgattttgttaatattacttcttacttacaaaaattaagtcctgaaagatttaccagtgatcatttaaaggcaaagcagctattgggttctaagagattgcccactatcataaccaacaataagagctgaatgctggtagctttttcaactcctttcacaattacattttatatgtaatgttcctttatatagtttcctaaatttttcagtatttgggaaaaactcattctctctgccttgtctcgtttt

SEQ ID NO: 246049 - DNA, 632 bp, Homo sapiens
ggctcgagatgagtattccgtgcaccagtcctggccccccaaaccgcctaacaacatatatcacaacctcaacgttatttaaatgtaggttttgttggggaattagaaatccatttaaagcaaacagctcattatcacagagtattttttttaagattaaacttacttattatctaatagcacctaaaacaacaaagaaaaataaaatggctattaaactaaaggcctaaacaattcaaaaaacaaattaagcttagagtgaaataagaactgggttagaaatcctcttctgaacagttagtatgcgaatgtaattactgaagaaactacagctaatcagctgtgaattgtatccattaattagtatttgccctggagaaatgagaaaaatcagtaacaacactggcaccgcagtgcacactgatgagcagagcaggccacgcagcgtttagtcaagcaggtggctccagtggtccaggtaatttgaaacgctcttacctgaagtactgagctagcattacaaagcactcyttgcatatcttttgtatctatagaaggccttaattaatggcttttaatttggaaacacttgctgatcaggcgggaacagttataaatcacttcaaatagaa

SEQ ID NO: 246050 - DNA, 575 bp, Homo sapiens
gcccagtgacaccctctacatactttatttcatttagttttccaaactgggactaatcataatctattttcccaacacccagtaagataattatcatccctattttatggatcagtagactgaggcttctagggctcaagtaacttgccgaaggttatagattcaaccacggaagtctagcctcctccctacctcatgatctctatcatttacattccggtatctgcaaaagcttgagtatttcactcagtgatcaattcagttttacttttttatctattttactcaaagttagaatttcccagaggtactcaagtctagtaaaatgctcctcaagaaatggttccatggtccagtaaggttgggaaaggctgacttccctttgatgagtcacgatgctcgctataaagttaaaggctctgagaaggcccacagttccttcatccaacaaatatttatgtgcctattatgtacaaggggctgtgctaggcactggaggcaatattatggaaaagatgacgmattttctacttggatgaagcttacatttttcttaaagggggagacaggaaaca

SEQ ID NO: 246051 - DNA, 571 bp, Homo sapiens
tgaagaacttctctgagtaaggaaggtgtccttgctcttattgaaagattgactgaaaagcagctaagttgttttctatcctcagtagtccttgttgaaattgagttgtaaataaccaaaagcttggagagggaaaggcgatgaagtcaaagaagggaaaagagaggagagaaaggcaggaagctacccttttttgagaacctgctacgcaccagacactaaaaaaactaattcttaaaattgatagaagcccctagaaaatggttggtggtctttttccacttgagttttaattaagtgatttttcagttccatactttggtttgctataaaagggcctttgcaacattttgtaatcatcctcttctttcttaagctttcctttcaaaaccaattttgtatattctaattgcaaactctagttcaagttcctgaaacactttcttataattatcaccaaacaaatgcagtgatttcacaaagcccaaacatgtgtcacattaattctcacaacgaaaayactttcatttttcttggactccaagcaaaatggaccataagcaaagtgttt

SEQ ID NO: 246052 - DNA, 548 bp, Homo sapiens
tattatggaagccaaaactcgtttgaaagtgctccccacaagggtgacagggcaggaatcccacccaggaaaggtcaacctaaccaggtcccaggagagcctgctccttgaaacctgaaccatcccaagcgctatcacttcaaggcccagagacctaagaggattaaggtaagtgtycctcctaaaagcctgaagaaacaaagcttagtttttagcatcacaaaggaacacacaattatataggttctgaaggacgggagataggttaagacttttggattgggggtggaggtgaggaggacgctggacagaaaaggcagatcatccctaagccagggagagaacattcctgcaagattagccactgtttacaaagaagtagactgtaactgagatttatgcaaaaggaacaaagaagacatgtacggggaatcttttaggcttaatttactaagtgtgcatttgtgattgaacaaaactgtggacttttcccccctcactatataaaaagggttgtgaggattcttaggatagtgaatactaaagtc

SEQ ID NO: 246053 - DNA, 585 bp, Homo sapiens
ataaattataagaaagtacaaaaagagcaatataaaagcagtgagatgtctatagaactatcaaaaatgtaattttaaaaaacctcatttgtaatagcaacataaatttctaagtacccagaattaaatatatcccaacawgtataagtcctttacaatgaaaattataaaattttatagaagatcataaaataatgtctaaataaattcaaaatgtttttggaaggaaggttcaatatcgtaaatgtagcaatcactcttaaataaatctataaattcaatacaattccaagaaaaattctaacagctctttctcagaaggtgacaagctgatcctaaaatttatatggtataacaagagttgaaaaacattcaggtgagcactcaataaacttttaggtactgtcatcatttccatcaccaccaccatcatcatcatcatcatcatcattttgacaaagaacttcatgtctctctagtgatactcaatttctgctgtgattttcttctgaataaatgcaacttggaaaatgtaattgccatttcatcagctgctggaaagaagtgtcccatgacattgcttcg

SEQ ID NO: 246054 - DNA, 522 bp, Homo sapiens
tttttattaaagggtcagatagtcaatacttggggctttgtggtcgtgtggtatctgttgcaactgctcaagtcaggttgtagcaggaaagtagctttggacaatatgcaaatgaatgggtggggctgtgttccaatacaacttgctttacaaaaacaggttggatttggyccttgaggcatcgtttgtggacccctgatgtcaaggctgaaagaatggctttaggatctaagccgactgcattcaaatattctaccacatactggacatgcaaatttcaagttatttaacctcactatgtaaaattgggataatagattatagggttgtagtgagaattaaataactgaacttttttttttttagaaattcacaaataaaaagtattattgtgtgtccacgtctacttcaaaattctttaattaaaaccaagattgacttatggcagacaccagtcaaggcaagccagctgactttaagatctccaaagaaagagcataatgttttgggtaagatcagata

SEQ ID NO: 246055 - DNA, 522 bp, Homo sapiens
tttttattaaagggtcagatagtcaatacttggggctttgtggtcgtgtggtatctgttgcaactgctcaagtcaggttgtagcaggaaagtagctttggacaatatgcaaatgaatgggtggggctgtgttccaatacaacttgctttacaaaaacaggttggatttggcccttgaggcatcgtttgtggacccctgatgtcaaggctgaaagaatggctttaggatctargccgactgcattcaaatattctaccacatactggacatgcaaatttcaagttatttaacctcactatgtaaaattgggataatagattatagggttgtagtgagaattaaataactgaacttttttttttttagaaattcacaaataaaaagtattattgtgtgtccacgtctacttcaaaattctttaattaaaaccaagattgacttatggcagacaccagtcaaggcaagccagctgactttaagatctccaaagaaagagcataatgttttgggtaagatcagata

SEQ ID NO: 246056 - DNA, 537 bp, Homo sapiens
tgcagctattccatgcttgatacatgatctggattctgcaaggttttgtttctgtttgaaagtctactgaaagcatattttaaaataaaaatattttacctgcaatcatatcagtttattaactactgactgggtttaagtcaaatttggggatggaggggggaatgaaacaagaaataacagagtcctaacctaatagaaagggattgtaaaaagaccacttttctcgaagttggcrcttgttcaagctacatatggtcacataatcttttaaaaagcacaattcaagtctcaatttaattatgtaatagcgtaaatggaattatactactgatgaagtttagtgcttcagctcaagcacacacccactgggttggcagagtgactgtgactcagttcactcggccatcatagcagcccaggatgcctgccctgctcaatttccttgaactaaatcgcagtggctgggctggatgggctcctccacactgatggatcatcaatgcaaggttagtaactgttttacaggaatacatt

SEQ ID NO: 246057 - DNA, 537 bp, Homo sapiens
tgcagctattccatgcttgatacatgatctggattctgcaaggttttgtttctgtttgaaagtctactgaaagcatattttaaaataaaaatattttacctgcaatcatatcagtttattaactactgactgggtttaagtcaaatttggggatggaggggggaatgaaacaagaaataacagagtcctaacctaatagaaagggattgtaaaaagaccacttttctcgaagttggcgcttgttcaagctacatatggtcacataatcttttaaaaagcacaattcaagtctcaatttaattatgtaatagcgtaaatggaattayactactgatgaagtttagtgcttcagctcaagcacacacccactgggttggcagagtgactgtgactcagttcactcggccatcatagcagcccaggatgcctgccctgctcaatttccttgaactaaatcgcagtggctgggctggatgggctcctccacactgatggatcatcaatgcaaggttagtaactgttttacaggaatacatt

SEQ ID NO: 246058 - DNA, 548 bp, Homo sapiens
ctttattttggcaccaaagagatccttggggcctaaatttattccattttgcaacacctggccagtgccacctgctagataactctggaagaccctgtttttccaagtgacaggtgtttaagataattattttggtttgggttcccctagaagtaggcaccaagatgaggattcatgtgcagattgtagggaagtggccccagaaaacaggatggtaaatggaggagtaaaacagggaaaggaaagtagccaataaagagtgttatcaagcaaatcaaactggggctcagcactggtggggaacactgggagcaagtatagaatgcatacacttcttggaactgtcctgtccaagaggggagggagctggggtatttgtccaccaactttcatcattcatgaatgtgggctgcttccaaagagcatcatttccctgcatgtgagcccagycagtgctgcagcctgagaaagaccccaggcaaagggatgcaggagcttagacttcctgaaggccctgaagtgacaaggcctgaggggcaccaacagtg

SEQ ID NO: 246059 - DNA, 613 bp, Homo sapiens
tgttcataattagttcttgtgcattacatcttttccctttccaatattgtaagcacccaatggcgtcttgtgcctgtccaatgggtgacaaaaatctataggcatctactctgtgccagscactgctctagacactggagaaatgacagttaacaaaaaggctgaaattctctgccttcgtggaactcacctcttaattgggaagatgacgtccaccacacttgggatacaaagattcaagggaaggcactgaatatagacacatggaaagaacggatgtcccttggtctaagctcaatgtggcccagctctgccagctgcacagcatgctgttctttcatgcattaaaatcgagaccctcatagtcatctttagaaccgcattttcgcctacatgtagctataacccaagctagattgaatataaactccagcacttttcttgcttcatccctgccagctttgattgtttcagcgaaaaccatttagcagacaaaatatctcccttccaagaatgatcatctcttaacctgtcctttcaggctgaagtcactgggagatactgaagggccgtgcatgttatttgacaagtgtcacatctgttacaaaagtgg

SEQ ID NO: 246060 - DNA, 573 bp, Homo sapiens
atacactctacagtattcgacgtaccatttgatgtcattctagactgttcttgactccaggtgactgataatgttctagattgctttactttctccccttgcagatgccagatggaatgacacagattaagaggtcaggagtgatcagtgtttacagctgaacagaaggtgggagcacacgctacatcaggcccacgtttgcttgtagaattttaacccctttgcagccatttctttcatataaccagggagaagacgggggtggcccttattctcagttcctcctattgtagagaaaaraggtggaggagtgggagtaggagaaaatccagagtccaactgtgtgagagcatgtttcagtttcacagtttcccacaaggcttgacaaaatcaacagcatttgggcatgaatcaccctgccatcagcccccagagctgggtcttctgatggattcatccttccccaaacaaagacatacactgttctctggttctaaagatgatggactgttcatggggcacgagtctgggcatgtatccccaggcttggaaaatctgttttccctgactgtg

SEQ ID NO: 246061 - DNA, 502 bp, Homo sapiens
aagcttgatacaaattccagctgtgaaggcaggcaaaagacagaaagcagatgtttctcctgtggtctccaaggcctgtgtgatcagctcctggctttccctctggcctcatctcccccactgctccttcgtgccctctgctttaaccacaccagcmtccccactgttcttcagacacaccatgggtattgctaccacagggcctttgcacttgcactttcctctcctgggaatgcttttcctggacttagctcccctacttccttatgcctggattccaaaagtcaccttctcaatgagatcttctttggtcctttatctaaaatttcaaaaccacctctccaaagcatcatgaacattctacttctccaccttattttcttggcctgagcacttgtggccatcaagtatgctatctatttaatttatttttttcttatcatttgccttctactaaaatgaagctccatgagagaagggatttttcttttattttgctgag

SEQ ID NO: 246062 - DNA, 502 bp, Homo sapiens
aagcttgatacaaattccagctgtgaaggcaggcaaaagacagaaagcagatgtttctcctgtggtctccaaggcctgtgtgatcagctcctggctttccctctggcctcatctcccccactgctccttcgtgccctctgctttaaccacaccagcctccccactgttcttcagacacaccatgggtattgctaccacagggcctttgcacttgcactttcctctcctgggaatgcttttcctggacttagctcccctacttccttatgcctggattccaaaagtcaccttctcaatgagatcttctttggycctttatctaaaatttcaaaaccacctctccaaagcatcatgaacattctacttctccaccttattttcttggcctgagcacttgtggccatcaagtatgctatctatttaatttatttttttcttatcatttgccttctactaaaatgaagctccatgagagaagggatttttcttttattttgctgag

SEQ ID NO: 246063 - DNA, 661 bp, Homo sapiens
ggtgtatagcagagctactgatttgtctacattgattttgtatcctgaaactttactgaatttatttatcagatctagacgctttgtggatgagtctttagggttcctctaagtctctctgtttcacataatctagttggagtccatttctgtaatttgcagccaaaacttaactacctttaattaataaaccattaaataatctttgggaatttgaggaatagtcagtgatttgtgtgtagtttcttaaaatgatacagccatatatacatgtatatatgtatatgtgtatatatgtgtgtgtgtgtgtatatatatatawaaaacatattggtatttttcattgaatcacatttcactgagcacctactatggtccctatggtggggatgaggaagacatattcgctgatctcaaggagttcatatttctagcagcaaaaacggatatgtgctcacctagcaggttatgatgacatttaacccccatccactcagtgagatagaaatgattttcacatgtaagtaaaataaaactaaaatcgatagtggttggcaatgctctcaggatcatgcaaccattaatcagcagactactggaactcctactcagattggccttacaccaaggccattattctaatcatcacacagtattgtaa

SEQ ID NO: 246064 - DNA, 544 bp, Homo sapiens
tacactttagccacattgtccttcttccagtaacgcaaatgcacgatgctgcctccagtcacgtggcttttaaacatgctgttctttctgcctgaaacacctttttcatcccwttgccacagtcccttagttaatgcttatttctccttcagtccactctcacttccctagggaaggtttctctgatctctccagcaaagtcaattctcataggccttgtcacaattatacttttatttctggaagtctctctactagaggataaactccattagggacgaaaccatgcttgcttttgttcaccatcgtatcatcagcctggcacatagtagttactcagtaaatatttgctgattgacatattgaatgaaatatttattaaagaataaacgaacatgggaacaaaagaggtaagttccataaagtttatttcaaagtgtactcctagaggcaattgtgagagtcatcatgaagcaccttgtacaactgatccttgagcaaagtgggggtcagggtgctgactcctcacgcagtcaaaaatcca

SEQ ID NO: 246065 - DNA, 582 bp, Homo sapiens
gcacctggctgcatgtcctcttggagatattctagggtgcccccaagtggagttggtttgtccacagtccattatttgcatgtccatcacagcaccaaagagtctatctatcatcttgtcttctagacaacgagtttccctaagggaggaatcttgtcctatcctcaccctcaaatatagcatctagaatgtgctaggtgtttatattccatacatatcggttcagaggagcttggaaaaatggacaattgttttaggctggcatcttccaacacgggatgtgtgcaagctgaagttcgtgagatcctacaaaagaaggttttgtgttaaataagttgaacgaaatctgcttgttttratttcagtctcagaggctcatatcaacacttgaatggagccagtgtggtgtagggttttaaaaatgcgagctctggggttagcattgatttgaattctggccacacccttgttcaagtcactaaacacatgtgcctcatttttcttaactataggatagcaatcacgttctgaatccttacctcatagagatgttaatgttgagagaataaactaaaatatttc

SEQ ID NO: 246066 - DNA, 568 bp, Homo sapiens
attttcgttccgcagccctggggtggggcctgagattctgcatttttgcttcatggacacattggttagtgcagtaatgagatcctgggtgatgggggtgctgcaggcgcctgagtagcaggatgagacgtggggagggtgcagacctggtgagggtgcagaccagagttctcttggttcttctgctgayggaaacagccctgagctggggccctaaggagggctccgtggaagaagcgtagcagaatcagatgcgcagagagaggactagggagccggcaggccctatttaaaactgtggctctggcatttattagctgtgtggccttgggcatgtttcttgacctctctgaagtgaggacagcaacgggtgtgcccacctcgcagggtggtgtgaccagatccatcacatccggcatgcggcaggggctcaagacatgccagccactacgtttatactaaactaactgctgtgccctcggattggagagcccaaaggcaccagagggagatgccagcgtcaagagacagagccacaacgaagcgaaaggcggggctgcagagaggc

SEQ ID NO: 246067 - DNA, 539 bp, Homo sapiens
atgttaaatatcatcccactgccttctggcctccataatttctgatgagaaatcagctattaatcttattgaagatctcttatatgtgacccaaatagcttttcccttgctgttttcaaagttctctttgcctttgtgtttcagtagtttggttgtaatgtgtcttgatgtggatattttgagtttaacctacktggggtttattgagcttgttggatatgtatatggatgcatttcatcacatttgagaaaaatttggccactctttctttgaatgtttttttctgccaccttttctctctattctcctacctggattactgtggtttgtatgctggtattgttgatggtgttccacagctccctcagtttctgttcatttttctttctttctgtatttttctttccactcttcagaacgggtattaattttctcaggctgctataacagaatagaataccatagtgtgggtgaaacaatagacatgtattttttccagctctcaagactgagaaatctaagatcaaggtgccagcaa

SEQ ID NO: 246068 - DNA, 574 bp, Homo sapiens
ccgggttcaagtgattctcctgtctcagccacccgagtagctggcattacaggtgagcaccgccacgcctggctaatttttgtattttcagtagagacagggtttcactatgttggccaggctggtctcaaactcctgacctcaagtgattcacccgcctcggcctctctaggtgctgggattacaggtgtgaaccaccgcgcctggctgggtctttcaattagagagaattcagtggagggaactgattatacaagagacatgagggctgagaagccaagcagagaaaggtaaaacagcccagaggttagcaactgtgggaaattgctactaccaggaggctggaaggagagagaggaggtggagttgtgagagcttgagagctagggctgtgcagcaggaggctgaatttgaaggttggtgggggctctctgctgggagctgagagctgacacagtggtgttggggacaccacaggraacacagtgaggggagaaacactttagcttttctctcccctcgctctccacagtgctgcccattggccaaaccaacccagaaaccaggtggccaa

SEQ ID NO: 246069 - DNA, 572 bp, Homo sapiens
ttcctggtctgatcattccaaaatgcctgctatatataagtcttgttttgatacttcctttgtctcttcggacattttgttttgttttgtcttttgcctttctgcatgccctgtaattttttaktgaaagctggatatgatgtattaagcaaagggaactaaggtagacctttactgtggaagttttaaggttgatctgactgggaattaggctgtatatactgttcacagtagctgttgtgttggaggcaattatttcctctagtgtccttgtttttgtctcctctggtgtgtcggtttcgctacagactccttcttaaatgaaagataatgattacagtgctttgggctgtaattccctgttatacaggagcccagttgatgaagtactggaataggaaaagtgttctgtcatcttgtcattaggtctcactcttttagtgaacctgtgtccctgggctgtgaccttcacaagtgcttctcagcttccctgtcttcttaggtgagataggaggatgagagggagctgaagttgagtatttccctttccccaggtcagttaggcttttgtt

SEQ ID NO: 246070 - DNA, 621 bp, Homo sapiens
ttttgaatatattaacttggtaatatgtgttagacatgaaaatattgatgtttagcatttagtttgatatgagagcctagagttcagagactggcagtctatgctggaattatacatttgggagtgttggggactaacctaagtcaagttaattatatataagtcttaggttcttttggcaataactgtagccattaaagaatgtaacagttaccaaacattggtaactactttccttactgccagtaaacataaaagaaaatctctaaccaaattctgtgcaaataaagacattaatgaaataaacattcattagcaagcagatacaaaactattcatatrttttatatactctctgagtatttaggtaatccagccactactttgcatgaatggttaacttaaggaagataagacatatatcacaaaactaaacaatatcttgagataactaaaaacaaaacacaaacaaaaccaaacatattggatgaagcaaaagcagtactcagagggactttatggctgtaaatgcaatgttaaaaaaaaacaacgatctcaaatcagcaacctaattttataccataaggaacttgaaaagaagaccagactaaactcaaagcc

SEQ ID NO: 246071 - DNA, 527 bp, Homo sapiens
acaacatatttttggggatctagaagactttgcaaattcctagaaaggaaaacacctcattcaaataatcagctcccttctgcttcaccatgaagccctgcgtaagcaggaaatgaaaactaaggctgtcattttytgaactttgaaggcatgccttcacacacaaatcactttgacaaagggtgggagatgtacaggcaagagatttagggaaatcttacaacaaatcactggctgaccactaaataatactgacccaggtatgccaagtaggaagccagatgtagaataaaaactttaaaaataaaaattaaaaagaccctggggcaactgctgcagggaatacagaatccacagaattcactacatgaaaaaaaaaaaaaagtcactaaacaaataaacagtaacaaaacaacaaacccttgggtggggttaagcgataccagagttatcaatattatcttaaaagtccagttttcaacaaaaattataagacatacaaagaaacaggaaagtaggctaataca

SEQ ID NO: 246072 - DNA, 557 bp, Homo sapiens
aactgtcacagatcagaggagacaaaggagacaggacamctaaagtaatgtggtatcctggactagattatagaacatacaaaaatacattaatgaaaaagctggtgaaatttgaataaaattgagagtttaattgacagtaatgtaccaatgttgtgctgattttttaattttgacaaactaagcaaggtaacataaggtaataacaataggagcaatgaaactgggtgaggggtatgttatcactgctgtctttgcaactttttcataaatataaaagtactccaaaatagtttattgacaaactatctatgcatatatagtattatatttatatatatgcactttattgagttgttatgcatattgaatgaaagagcacatatgaagcagccaggatagtgcctgacacataatagggcctcaaatgttagctccctttacacactggaggctctaaacagtgggcaggtgggaggggtatgaggattgaaagactacctattgggttcactaatcaggtgatgggtgcactaaaagcccagacttcatcacca

SEQ ID NO: 246073 - DNA, 544 bp, Homo sapiens
cagtggtcattttggccaagcaaatatatttttatttgaccttcacaatgtatttctttaaaacattttattttaagataattacagattcacgtgcagttgtaagaaataatacgaagagatcccatgtaccatttacctcattttcctcaatggtaacatcttgtaaaatgacagtacaatatcacaaccagtatatgagaatctatacagtcaaaatagccaacacttccgtcatcaccacatgaaatccctcatgttccctattgcagccacaacaatttcctgccttcatcccaccattaacccctagaaaccactaatctgttttccatttctataattttgtcatttctagattttgtatcagtgaaatcatrcagtgtgaaacaatgagattagcttttgtcactcagcgtaattctcaggaaattcatccacattgttgcatgtatcaacagttctctcctttttattgctgaatagtataccatggtatggatgtattatagtttgtttaatcattcaccctttgaagaacaag

SEQ ID NO: 246074 - DNA, 557 bp, Homo sapiens
aactgtcacagatcagaggagacaaaggagacaggacacctaaagtaatgtggtatcctggactagattatagaacatacaaaaatacattaatgaaaaagctggtgaaatttgaataaaattgagagtttaattgacagtaatgtaccaatgttgtgctgattttttaattttgacaaactaagcaaggtaacataaggtaataacaataggagcaatgaaactgggtgaggggtatgttatcactgctgtctttgcaactttttcataaatataaaagtactccaaaatagtttattgacaaactatctatgcatatatagtattatatttatatawatgcactttattgagttgttatgcatattgaatgaaagagcacatatgaagcagccaggatagtgcctgacacataatagggcctcaaatgttagctccctttacacactggaggctctaaacagtgggcaggtgggaggggtatgaggattgaaagactacctattgggttcactaatcaggtgatgggtgcactaaaagcccagacttcatcacca

SEQ ID NO: 246075 - DNA, 586 bp, Homo sapiens
taggaatgaatattttccaggattgactatatgttaggacacaatccaagtatcacaaatttttttaaaaaatcaaaatcataccaagtatctaatctgaacacaatggactaaaactggaaatcaacaatagaggaacatgttaaactatactaatacatagaaattaaacatgctcctgaatgaccaatggatgaaggagaaaattaaggataaaattttaaaaatccttgaaacaaatgaaaataagacacaacatctcaaaatgtatgagacacagaaaaagcattattaagagacaaatttatagcaatgaatgtctacataaaaaaattagaaagactttaactaaacaacctaatgatgcatctcaargaactagaaaagaaagaataagccaaacccaaaaattagtggaaagaaataaataacaaagattgtagcagaaataaatgaaatgagacaaaaatacaaaagatcaacaaaacaagaatttttttgaaaggacaaacaaaattgagaaatcattagctatattaaccaagaaaaaggagaaaatacccaaatatgtaaaatcagaaacaaa

SEQ ID NO: 246076 - DNA, 586 bp, Homo sapiens
taggaatgaatattttccaggattgactatatgttaggacacaatccaagtatcacaaatttttttaaaaaatcaaaatcataccaagtatctaatctgaacacaatggactaaaactggaaatcaacaatagaggaacatgttaaactatactaatacatagaaattaaacatgctcctgaatgaccaatggatgaaggagaaaattaaggataaaattttaaaaatccttgaaacaaatgaaaataagacacaacatctcaaaatgtatgagacacagaaaaagcattattaagagacaaatttatagcaatgaatgtctacataaaaaaattagaaagactttaactaaacaacctaatgatgcatctcaaggaactagaaaagaaagaataagccaaacccaaaaattagtggaaakaaataaataacaaagattgtagcagaaataaatgaaatgagacaaaaatacaaaagatcaacaaaacaagaatttttttgaaaggacaaacaaaattgagaaatcattagctatattaaccaagaaaaaggagaaaatacccaaatatgtaaaatcagaaacaaa

SEQ ID NO: 246077 - DNA, 556 bp, Homo sapiens
aagtaaggtccttgagggaggaaaccatggcttatctctccatttctctactcagtaaaaaacaggagtgagggagtctttacctgggggtccgtggatgaaggggcttcacataacttgcaagctttctgaaattgtgagaaaaattgtttttcatgtgtagttttctatgaacagggcccatcatttttattagattctcaaaggggtcagtggctcaatggttagctactatagattagtcactctactaggcttatgataaatatttgaatggtagaaactacaggaagacagttattatcttgatgtatgagacagcattgttatgattggaaggcatgcttttggatggctatcagtttcccagcactgaagatagtaagttaatagctggataccccatcaattataacattgttgggattttgacctactctttctgttctgtgattctatgataatatcaatctacattagagaatacttctaattcttcaccattccccatctccatttttgtrtgactcattctttgaactatttatacatctaa

SEQ ID NO: 246078 - DNA, 612 bp, Homo sapiens
tgagctagttacctttaaatttaggcctctaagcaattttagtttgtgctgcaatttcactactttcattcaaagaaattaggacartgcaactccagagatgagtttcagaagtgcaaagtggtcaaaccacatttcgttttcaggtacattcactttcggttatgtacatatacaaatttgtgcatgagtatatacatgtatgcaatatgttcatgccttgatactcatgaacatatggatccatccacatgaatatatttatttatacatataccagttgtaaggattattaaacatagttaatagaaaattttcacttgtagggaaatagagtatgtcaaagtagttgaataataggtgaaaaggatattttaggtaatatatcaatgctactttcagggttaatatcaaacagcaacacaggatatataaggaactgagtacaggtagaacccaagctgacagtgtcataccaagagataatttaggtaagagaagtccaaaagatattcattgtaatctaaaggaaattggctatgttatatgctccggttttccttggaaaagcgtggttgttaaatcatcatcaccaacagctctactttgttg

SEQ ID NO: 246079 - DNA, 539 bp, Homo sapiens
tttattgttatatagaatttagttttacctgttttagaaggcacaaaatcagttgttattattattaacaaccaatacataaagagatatgccgatacattttgttaatttatttgctaattatgctccttatatcccactccttccttctgggttcatttttcttcttgctgaagtatatcctttcatgacttactgcagtgaaaaaaaaaacactggttttgctccatatataattcttgttatttcccttattacttggaagctatttccccactgtccgctggcgtcaatttaccaatgagaagtaagctttcagtctaatgactggctctttgtaggtaatctgtcttccctcctggtagtatttaggattttctctttatccctgctgttctgaattttcaatatgaaatgcttagaggtggatttatttttgtttttctgtctcagcaattgatataaacaytcagtctgagggctcatgtctttctttactcctcagcctgaaatatttttggccattctcagccattatt

SEQ ID NO: 246080 - DNA, 562 bp, Homo sapiens
tggcattactcaatcaaaagttttgtgcatgtgtggtttttttagataatgtccaaattctcttccagaagggtggcatctgcttgccttcctaccaccagtgtatgggagtgcttgtttccccacagccttgccaaaagaatgtgttgccatgcttttaaaattttttttaccaatctaataaatgagaaatggtatttcagtgttgttttaatttgcatttctctatgagtttatttttcaaacatttaagagccactttagattgtgtgtgtgtgtgtgtgtgtgtgcgtgtgtgtgtgtgtgcrtgtgtgtgtgtgtgtgtgtggttgctcatgttgttcttccatttttctgctctacttttggtcctttgtctcctgatttttaatagttatttatttattagggatattaaccccttgtctgtggtatatgctgcaaatattttctcctagtttgtcaaagtcttttgatttgcttacggtgtttttatttttttcttttgccatacaaaaagttttatgtagtcacaattattaatcttttattgctgctgagt

SEQ ID NO: 246081 - DNA, 632 bp, Homo sapiens
aacataagcctgtgacctgtaactgggattcttctactctcccttcattgtcctggaaccatgatgaacctttcaggctttggtgggaggtggggagaacagctggtcactaccctacaggtttagggctgtgtctaggatcctgtggtttctaatattgggcacaaaattacaggcttaacaggggttttggtgcccccacagagctaatggaagatgaatcctatgagtttggggtatcttattcataggcatactgttccctggggatccttcctttctgtggtctgagcttttgatagaatttttaacaatttaagctgcaggaaattattgtagctttggctgatgaacaacccatggtgtaggaggcagaactgaaaaaagtaatgctttgatttatatcctattggctaagaattttgtcatgtacagaggaacatggtgggagtggggttagagasagctggatggctggatattgggtcatcttaatatctacataaatagctaatgtgacaagatttcagataggggattaaagaaatgataaaacttgcagcccaggaggggtcacagggctgtagccaattctctactaggggtagcatagaagcatacagagctggggt

SEQ ID NO: 246082 - DNA, 663 bp, Homo sapiens
tggggattcctgggatcgatttttgtaagactcttccatcccaaccagcctttttggtatcttttactttttctttccgagttcttctcttcattttatttatttacttctctaggatcataagatcatagtacttctgagctggaaaacacctcccaacttctctygtacatttctatcctcacaacttgcaatgttcaactgtgctcatgttgcctacttttaaaaactcgtatacatagatatgttaatagccaagcacaaaccaaacattttattatatccaatttattataccaatgtggttttaatgaaatagctttaatacaaatgagaaattttttttctagttctaactctgattttaattcatagactgaccctggacaaatctctctaattttgcttggtctccatttctttatctgaagatgacaatagccttctctcataacttattatcgagtaaatgagctaatatatgtaaaggctccttggaatatgtgaggtactatgtgtaagctatagggatactcattcataatgtctgtctctggagtccacatcagcttggtggctttaactgtgaccttatccaaggtggcaaaaccctatcagaaatctacaaaaatgtgcattttccttgaccaaacaatttcacta

SEQ ID NO: 246083 - DNA, 555 bp, Homo sapiens
agcgattgcaatatgtgtctttaactaccaaagtatatctccaaaaactatgctactttacatacaagacccttaaaacagtatacttccatttctcctcccatgctgtgtgctattattgttacatatttaatttctacatgtgttataaatcccacaatacattgttattatctttgctttagacaatgatcacttaaaggaatttttaaaatgagacacaaaatgtcattgtggccctccagttagagtaggggattatgtgggctaggttaattaatggagttttagctctgttccaatttacagtgggtccagtaggtccytggacctatcctgtagttatttccccagttccagaatgcataattggaataggcacaattggaatagacatagctggcagaatttccatgttggtcccctaacctgtgggagtgaaggatattatggtgggaaaagccaaatgggagccattagagctgcctctacctaggaaagcagtgaatcaaaaacaatagcacatccttggagggattacagagattagtgcca

SEQ ID NO: 246084 - DNA, 554 bp, Homo sapiens
agcgattgcaatatgtgtctttaactaccaaagtatatctccaaaaactatgctactttacatacaagacccttaaaacagtatacttccatttctcctcccatgctgtgtgctattattgttacatatttaatttctacatgtgttataaatcccacaatacattgttattatctttgctttagacaatgatcacttaaaggaatttttaaaatgagacacaaaatgtcattgtggccctccagttagagtaggggattatgtgggctaggttaattaatggagttttagctctgttccaatttacagtgggtccagtaggtccttggacctatcctgtagttatttccccagttccagaatgcataattggaataggcacaattggaatagacatagctggcagaatttccaygttggtcccctaacctgtgggagtgaaggatattatggtgggaaaagccaaatgggagccattagagctgcctctacctaggaaagcagtgaatcaaaaacaatagcacatccttggagggattacagagattagtgcc

SEQ ID NO: 246085 - DNA, 554 bp, Homo sapiens
agcgattgcaatatgtgtctttaactaccaaagtatatctccaaaaactatgctactttacatacaagacccttaaaacagtatacttccatttctcctcccatgctgtgtgctattattgttacatatttaatttctacatgtgttataaatcccacaatacattgttattatctttgctttagacaatgatcacttaaaggaatttttaaaatgagacacaaaatgtcattgtggccctccagttagagtaggggattatgtgggctaggttaattaatggagttttagctctgttccaatttacagtgggtccagtaggtccttggacctatcctgtagttatttccccagttccagaatgcataattggaataggcacaattggaatagacatagctggcagaatttccatrttggtcccctaacctgtgggagtgaaggatattatggtgggaaaagccaaatgggagccattagagctgcctctacctaggaaagcagtgaatcaaaaacaatagcacatccttggagggattacagagattagtgcc

SEQ ID NO: 246086 - DNA, 554 bp, Homo sapiens
agcgattgcaatatgtgtctttaactaccaaagtatatctccaaaaactatgctactttacatacaagacccttaaaacagtatacttccatttctcctcccatgctgtgtgctattattgttacatatttaatttctacatgtgttataaatcccacaatacattgttattatctttgctttagacaatgatcacttaaaggaatttttaaaatgagacacaaaatgtcattgtggccctccagttagagtaggggattatgtgggctaggttaattaatggagttttagctctgttccaatttacagtgggtccagtaggtccttggacctatcctgtagttatttccccagttccagaatgcataattggaataggcacaattggaatagacatagctggcagaatttccatgttggtcccctaacctgtgggagtgaaggatattatggtgggaaaagccaaatggragccattagagctgcctctacctaggaaagcagtgaatcaaaaacaatagcacatccttggagggattacagagattagtgcc

SEQ ID NO: 246087 - DNA, 632 bp, Homo sapiens
tcaattcatgcccaccctttcccactaatgccagtcagaaacgttcaacagcactgaagaccttctcccaacacaattttattcatgagttgaagtactgcccatgagatacaatctctggacatcaagtccactggcatgccttctattcaactccatgacctgactttttcatttcaatgttgtgggtaaaaactattacaggattttaatcaaatgccacgtttaccagtttccccactgccaagagaamgaagtagctgactctctccttaaacttaattaagaaggcaaaaaaaatctccacctgcttgattcagagtctgaggtaataaactctggaaattaggaaggaaagctacagcatggacactgcacaaaaccaaagagtcagaacgcaaaatacagtgagtccttattactttggggctaaaaaaccaaacaaacatcaatgtctaaccatattgactgactgatgaagtggtaaccatgacaggagttgggtcttcctcccttctccagagttgtaggccgccaaaggatgctcatagctaacacagcagaaataagaggcaagccgtcaggaggacaaatgctgacttggggccaaggaacattccacgggtgacaca

SEQ ID NO: 246088 - DNA, 622 bp, Homo sapiens
tatgttatcgcttttaaataacacttcaccagattctggttcctgaaaccacttttgggaaaaatgctttcctaagtgacatcaccccattttccaaataaaatgaaaaaagaaaggctcatattcagaagcagcaggctacaaaaggaggattggtagatcttaagagcttgcgatggaacccctactgccttgagagaaacaaagaaataaattaaaaatataaaaccccccaaatacacayagttgagcttaaaagaggtgggctggttttccccaaatccattaataatacaaatcactgtatttcatattcacggtcatctctgaaagttcccctcttaattactccatggcttcatgttttattttagtaaagttcagattttattgccaaagactaatgggcagagtccctgaagaacttgttttaaaacatcgaccagtcaaccataaaagggatattaaaacagctacagaggctaaataagaattaaaaagtatggccacttatttttaaattagaatcctctttcacatttaggaatataataaaatgtgtcataaactttctactttcgttccaaagtattgttgtaagaaccgacagtaatacagacac

SEQ ID NO: 246089 - DNA, 565 bp, Homo sapiens
ctagggggtgcaaataggtctcatttaaattgcaagtaccaatcaattggtagtaactatttggtgtgccatgttaagaaggctatatacaagtttagaaggaaaatgtgcatcgagattagtgatatttgccaagggtgacatacatgcataaaatgaaacaatagtgtcttctctaacctcactgtttctcattataaaatactaaatatctagcctgggcaatacagtgagacccctatctctacaaaaaaaawttttttaaaaattagccagtcatagtggtgcatgcctgtagtacttgctacctgggagacaggtaggaggatcctctgagcccaggagtttgaggctgcagtgagctatgattgcagcactgcattccaacctgaacaccaaagcaagaccctgtctataaataaataaataaatatctctttctaggggaacactgcatataaatcaggactaactaaaactatagttttatgcataaagaatgatgagcaagaaaagtttatttctttccaaatgaaaagagacaattccaggtttcataaagatg

SEQ ID NO: 246090 - DNA, 531 bp, Homo sapiens
actggtttccactgtgctcttcccacttggcatagagctgtgggcatccacatcacctgagaatttkttaggactgcaactattcaagcccattcaggaagggcctgcaatctgtgtttcacaagcccacaggtgattctaatgctaaaattacagaaccactggcctagagcatgggctctggaaccaaacttcctgcttgggaatcccagctcccctgcctcccagccttgtgcccctgggaaggttacttgacatcttttggctccacgtacccttttcttaaaattagagataataaacatacctaccattgtaacagttaattcacataaagcacttaaaaagtacttggcacagagaggcacttaatatgtactagttagtattattattatttaggattaaacacattcataatacatgcaaaggatttggatgcttttgtaggggttcaatgaggattttaatttttagtggtattcttctgagtttaagcttcctgagggcagagaccctgtcttattcacc

SEQ ID NO: 246091 - DNA, 531 bp, Homo sapiens
actggtttccactgtgctcttcccacttggcatagagctgtgggcatccacatcacctgagaatttgttaggwctgcaactattcaagcccattcaggaagggcctgcaatctgtgtttcacaagcccacaggtgattctaatgctaaaattacagaaccactggcctagagcatgggctctggaaccaaacttcctgcttgggaatcccagctcccctgcctcccagccttgtgcccctgggaaggttacttgacatcttttggctccacgtacccttttcttaaaattagagataataaacatacctaccattgtaacagttaattcacataaagcacttaaaaagtacttggcacagagaggcacttaatatgtactagttagtattattattatttaggattaaacacattcataatacatgcaaaggatttggatgcttttgtaggggttcaatgaggattttaatttttagtggtattcttctgagtttaagcttcctgagggcagagaccctgtcttattcacc

SEQ ID NO: 246092 - DNA, 561 bp, Homo sapiens
aagcttccacatgtaaaacattgagagtggcttattttatccactgataagatatcatatttgattcctaagtgatttaataatttttcatatgcgaattctaaagcgagtgaattgatttctgcattgtgcctttcaaagttttaaacatactttgctgaacatcgttattgtaatcacctgggaatgccagctcattgttcagagaacctagtttccaggtggaactgcaatttagtccaattgaatatggcagttttcacacaactgctaggagtaggaacagagaaagagaatgatgtaaatatgcactgcacagaagagtccattgctctttcagcctgtaatttcccrttctcacctgtgggcacattttaagacagctgtgagttcatggcaatacattttgttgtgaaaaatgaaagctgcactattgaatgataaaattagaaataatgcaaaagatggattgttaattttttttaatgccatggcagatgcaaatgttcagttttgatgtctgttttgaggacctgaaacaaggcttttaatcaatgtatt

SEQ ID NO: 246093 - DNA, 534 bp, Homo sapiens
cctcgggccttccgccacagactgaaggctgcactttcagcttccctacttttggggttttgggactcagactcgcttccttgctcctcagcttgcagacggcctaytgtgggacttcaccttgtgatcgtgtgagtcaatactccttaataaactccccttcctatatacatctatcctgttagttctgtgcctttagagaaccctgactaagacactaagtacaagaattcagtcacaaaaaccacatactgtataattctattcatgtgaaatgtccagaataggcgaatccatacagacagaaagattagtggctacctggggctgggggttgggagttgggaatggagaatgactgctaatgtgtttgtggtttctttttggattgttgaaaatgttctaaaattagattttggtaatggttgcgaaagtctgtgaatacattaaaaaccactgaactgtacatttaaatgggtggattttatggtatgtgaaatatatctcaataaagctgtaaaaaaggtttaaatg

SEQ ID NO: 246094 - DNA, 274 bp, Homo sapiens
acacaaagatgacattttattctcatatttgttcacagacatgattcacatttttctatctagtgcataaggaaatcattctacattcagcaatagtgccagtttgactaaaaaaaaaattttccatatccacaaaaatgttaatcagattcttgttagaacatgtrtaagaactggttttcattttcacagctcttgatgtcagattactaaaataatttatgttttgttgtgggaacatgagtgcacgcaaaacctctccaatcacatgacc

SEQ ID NO: 246095 - DNA, 629 bp, Homo sapiens
ataagaaatagcagcatgatactgagaactcatgtctgtccttgcttggtgtttggactagagctgaccctcttgggtaaaagcagggtttctcaactttgacactgagtgcatctggggctgtgagaggctgccatgtgcattgtaaaatgtgtggaagcatctacctgtagatgtcaggagtaccttccaaacccacagccaccaaaaatggctctagacattgtcagatatcccaggaggttggcggggattgtccctgattaaaaacaactgggtcaaagtcgtcccaaagaggttcttgaacaatttaaagaatgaattctcaagagggaaatattagatatcttggctctaggggatgcaggagctcaagaaatttrctagaaaaacaagaatttctacaataagactttcgggatataaatataaagggcctgacttacagtaaatgctcagtaacattgcaatttccttgctgtgctcttgctcttttgcatgtctttttcttccatgagcttttaaagatcactgtgagtatgcatatgctaatttcaaaatcaggaagaaatactggaggagagaaaagggggcatctgtgtccaattaaaagacgccccttacacaaa

SEQ ID NO: 246096 - DNA, 542 bp, Homo sapiens
gcttttgaaagcaataaggttatatgggaggccaggttatgtctggaaaatctctgtaccttcctctcaattttgctgtgaacctaaaactgctctcaaaagtcaagtcttttttagaaaaaaacagtaagtggtaacttgatagagctcatgaatagccagtgggtttgtggggcttggcctttacgtccaggtgacagcctcataacgggttccaagagtactctatccaaaaccacaggagcatggggcaccgtggctcacccctgtaatckctgtgctttgggagggaggccaaggtgggaagatctcttgagcccaggagtttgaaaccagactgggcaacatattgggatcctatctctaaaattttttttaaaataaagaaagaaaatagccagacctggtggtgtgtgcctgtaatcccagctactcactcatcaaagcagggggatcccttattccctgggggttccaggttgcagtgagccgtgatcgtgccattgcactccagcctgggtgacagagtgagaccctatctc

SEQ ID NO: 246097 - DNA, 582 bp, Homo sapiens
tatccctttgattcgctatagaaaaaaaagtgtccctgggtcccagggtctttaatccctctctaacccttgtcagctcctttttaggaaaccacagatgaacctaggtctcagaatctttggcaagccacagcgtctagctatgacttaataacagcttttatggttttcagtatacttattttttctattagtttctatttatgctaactgattttccatctatgggagtgaaaaaatattccttttttwaaaaaaatttacgtaaatgtagtgagccaatgaaaagggtaatattaaataaccaagagtatgagcgattcacagacatggcaaaagttgtaaaaatgatgtacacacatgatttaagtctagaaaaccctcaccaacccaacccaccatcctagcagtagagaactcaggccaagtttaaggtcacttgcttttcggtagcagaattcgtccagggctcattctatacatgcagccaagcctaagagatgagcagtggaaaaaaacacagagtcaggtcccgtgtaagcaggatagatcatcagtgatgggcaaggaggtaaaaggaaa

SEQ ID NO: 246098 - DNA, 420 bp, Homo sapiens
ttgtggccaggagttccagactacccagggcaacatgctgagatcccatcactaccaaaaaaaaaattaaattagccaagcatggtagtgcacactactcgggaggctgaggtgggaggatctcttgaaccaggaattcaaggctgcagtgagccatgattgagccactgcactccagcctggacgacagactgtatctctaaaaaacgacaaaaaaaaagctatttggaattttattttctttactctttataggcagaatccatgtcagttattttacctgtccaggtgtggcagccccagtgggtgtgtgcccatatcccttcaccattcaactctacaagctgcaygctgcttggaaggaagacctgactctgtctgggggctctttctggccttggaagtagggagcggtggccg

SEQ ID NO: 246099 - DNA, 582 bp, Homo sapiens
tatccctttgattcgctatagaaaaaaaagtgtccctgggtcccagggtctttaatccctctctaacccttgtcagctcctttttaggaaaccacagatgaacctaggtctcagaatctttggcaagccacagcgtctagctatgacttaataacagcttttatggttttcagtatacttattttttctattagtttctatttatgctaactgattttccatctatgggagtgaaaaaatattccttttttaaaaaaaatttacgtaaatgtagtgagccaatgaaaagggtaatattaaataaccaagagtatgagcgattcacagacatggcaaaagttgtaaaaatgatgtacacacatgatttaagtctagaaaaccctcaccaacccaacccaccatcctagcagtagagaactcaggccaagtttaaggtcacttgcttttcggtagcagaattcgtccagggctcattctatacatgcagccaagcctaagagatgagcagtggaaaaaaacacagagkcaggtcccgtgtaagcaggatagatcatcagtgatgggcaaggaggtaaaaggaaa

SEQ ID NO: 246100 - DNA, 492 bp, Homo sapiens
ctctaggctgctgttctgagcaggagcccagagtcagcacctccataaagaagggggcatttgaggccttccttgctccagtgagggagcccagagaggacttcccaggggtcttccatcaccaacatccagcctggaggatgtgctcagggaggccagactctggtctcctgatttgtcatcagactaattattaaatggaaccagaaaagaaagccagcacactgttcccctggacctccctcagccccggaaatgctagctggtggcttagggtccccatccccataggactctgcctatttcactcagggctccaggtcctcgtcaatgccactgccatattctacaaatcacatcatgcagcaagatgcttctccacatggtcaagggctgaatgagccctctgctccctccaggacctgcctgtcagttcccccrcaatccttcctctccatctgctttgattgacacttttctgaggatgacccc

SEQ ID NO: 246101 - DNA, 587 bp, Homo sapiens
ttgggctcggcccgcagaacagaactggatttacatttacaaagcaacagggttgaggtgaaggcagctgacgggcgcgcaccccctcctcacctactccccgacccttgccccgctacgcctcactagaggtgcctcgtggtggtattgaaatcaccgagaaccgaattcactgaattaaggaaggattgttgctgcaactaagttcacagaattgtttagctaaaaatattcactttggtgacagtttccccagcttttttttttaaaaasgggggaattgtaaaaatacagaacagcccagagaagaatttaagaaacgctttgtgtctatcactcaaaatttacaaacgttaggaatttgtagtttattcgaggttttttgttgtttttgttccccccacccctccccaggaactgcgtttcctgttcttcctctctgcctgggtagctgtcattctctcattctctctatctttccttccttatattccgtcgtgctttttctttcttccttctcccgtcatctccactaccctcccttttccacccacccccccgccacgggcttccttcttcctggaaaa

SEQ ID NO: 246102 - DNA, 543 bp, Homo sapiens
tattctacaaatcacatcatgcagcaagatgcttctccacatggtcaagggctgaatgagccctctgctccctccaggacctgcctgtcagttcccccgcaatccttcctctccatctgctttgattgacacttttctgaggatgaccccaataaaacaaaacgtgattggctgtagcctatagaaaacttcatactctgtataagggcagtatataattacaatgatcgattagtggaaaatttatcaattggtgactcctttaaaaaaaatgccctggtacaaatgcatcccactatcataagattcttctatgataaaatctttttcttccttaatgtgtgtgtgcatgtgtgtgtgttggtggtggtggtggtattctttgttttccartttctcaagttgaatggtttggtttgtgtgttctcagtcttatcttttaataagcaccttggtggtgctcaagttagtggtagaagtgccattcactgcttccctccagagacaccttcccaacacatggccttcttctaacccaccagg

SEQ ID NO: 246103 - DNA, 601 bp, Homo sapiens
tccttcaaactcttgccatgtttataactacattagtggaatcccatctttacttttacttatttaataatttaagctgactccccttttaaaacttaagtatatttatttcaaaaggaatgggaaacattaaattcatttatctccaatagtctttctaatcctgtgccagagaaacccttatagtgcagaatggttttacactggtgacgttccccaaattcaaagtaatctgaacaaatcccacggcttcactcatcgacaccctttctgggttctcttctaaccatctgtctcttgtttcagacaagcatgaggtctgtaagtcttacagagttttatttaarccccatctcactgcccatatctgtcaatacataccttagacccggcctagagttttccaaactgcaggatgtgacccactggtgcattatgaaatcagaatatataatcgccaggactattttttttaatgtaatagaacagaaaatatcagagtataccacatgtagtaagggtaagtggtgtcttgtgaagcttttgtttcagttatatatatgtgtgcactgggcatggtgccgttcttagcgtgagttga

SEQ ID NO: 246104 - DNA, 486 bp, Homo sapiens
ggaacttctttggctatatagaggttggtctgagttgaggcctgagtcatttagaattatccctctcaatctgggagcagaagtgacttgcccaaggtcaacttatgagttgaagataagatacactaactcattcttggttctcaattcaatacttcctgtttaaataataatttaaaaaaaaaaaacccaccctagtagttcctttatcrgcatcagctcttcagcctcttcgatccatgccctttgccaggtaacttacagtccctccccacttccctgcctctttgggtttgactatgtggcttgctttggtcaggagagtgaggtcgatgctatggtgtgccagttctgagccaggcctcaagaagcctgcatgtttctacttgtgcccttgcacctctgagaagcacgtgacatgagaagcacgtgccggctgctctcaggaaaagagtggaagccctgtggagcggagctatccccagc

SEQ ID NO: 246105 - DNA, 597 bp, Homo sapiens
tgtaaaaatgatgtacacacatgatttaagtctagaaaaccctcaccaacccaacccaccatcctagcagtagagaactcaggccaagtttaaggtcacttgcttttcggtagcagaattcgtccagggctcattctatacatgcagccaagcctaagagatgagcagtggaaaaaaacacagagtcaggtcccgtgtaagcaggatagatcatcagtgatgggcaaggaggtaaaaggaaaaggccctgaagagtctgaaatctgatcaacaatgatcctgtgttacacatctgtctgcagggttaattcttcattaggaggcatagctcagggtaggagagcatctaaaccctagagttcaaggccatttccttttgcacatatctctctgyggctaaagtagaaacatcttgggtccagcctccttggctcagtggttggatctgagataaaacatatgaacatatgaatgtaaaagagccaatatggggcatcattgtggaccagcagagatcttgtcagaatgaacagttaccacactgcactgcagtcatcttcaacagtgactccatgtggtggggataagaaatagcag

SEQ ID NO: 246106 - DNA, 338 bp, Homo sapiens
tatgatttgcaaatgtcttctttttgtggtttgtcctccattttcttgattgtgatatcctaaaggacaaaagcttttaattttaaagaagtccaatttatctattttgttgttgttgctcatgcttttgttgttacagctaaaaaaccattgcctcatccaaagtcattaaratttatgtttatgctttattctaagagttttataattttagcttttacatttagttccttgatctacttggggtctgtttttgcatatggtgtgatgtaggggattggtctcattcttttgcatatgaatatccagttgtcccagcaccatttcttgaagatatt

SEQ ID NO: 246107 - DNA, 546 bp, Homo sapiens
ggtttagggaggcttcataaagagaccattgtataaaattggctttttttgactacaaattgggttcagtatatactcctcaggtgatcggtgaagcaaaatctcacagatcaccactaaagaacttattcatgtaaccaagtaccacctgtttccccaaaaacctatggaaagaaaataaattaaaaaaataaatggttgttgttttctaaaaataaataataatacaataataaaaacaggctttttaaatattgacacataccagctgtatatatttttgaggtamatgtgataatttaatacattcatataatttgtaaagatcaaatcagtgtaattgaggtatccaccaccttaaaatttgtcttttcgttattctagaaacattagaattatgagaccatcttgaggagggcgtttttctttggagaggtttaagctggttctcctgaacgaggttctctgattgtgttggaaaaggggaagactgaccaccttccatgtctgtcatgccaacaggactgttgagaagctcccccaccc

SEQ ID NO: 246108 - DNA, 546 bp, Homo sapiens
ggtttagggaggcttcataaagagaccattgtataaaattggctttttttgactacaaattgggttcagtatatactcctcaggtgatcggtgaagcaaaatctcacagatcaccactaaagaacttattcatgtaaccaagtaccacctgtttccccaaaaacctatggaaagaaaataaattaaaaaaataaatggttgttgttttctaaaaataaataataatacaataataaaaacaggctttttaaatattgacacataccagctgtatatatttttgaggtaaatgtgataatttaatacattcatataatttgtaaagatcaaatcagtgtaattgaggtatccaccaccttaaaatttgtcttttcgttattctagaaacattagaattatgagaccatcttgaggagggcgtttttctttggagaggyttaagctggttctcctgaacgaggttctctgattgtgttggaaaaggggaagactgaccaccttccatgtctgtcatgccaacaggactgttgagaagctcccccaccc

SEQ ID NO: 246109 - DNA, 516 bp, Homo sapiens
tagcccactctttcactggatacctgtgtctgagtgcatttgttcatccgtcatttggccagggtctgcgggtyggacctggcaagcaccatcaatggccaaacttttattttgtcttgtcccaggtccatcttatccttctctgggactcctattgccaaaggacttagagccaaagacttaaagccaatttaaacattccaggccagacaggaatggaggtgagcactgatcctgattttctgtgcttgtctttgttcagtcctccccactctcactatgccattcgctggatttggtggtctcctccaaattcctcctgaggctttaagcctcaggcttccattattaattaattaattcattcattcattcatttgctcatgcaatgagaatgcattgagcacctaccaggcatcacgaacagggtaagacctcaggcttggtgcctcctttgaccttagtatccttcattgcccactgtggtccctggcttggtgagacctccctgcctta

SEQ ID NO: 246110 - DNA, 392 bp, Homo sapiens
gcactgatcctgattttctgtgcttgtctttgttcagtcctccccactctcactatgccattcgctggatttggtggtctcctccaaattcctcctgaggctttaagcctcaggcttccattattaattaattaattmattcattcattcatttgctcatgcaatgagaatgcattgagcacctaccaggcatcacgaacagggtaagacctcaggcttggtgcctcctttgaccttagtatccttcattgcccactgtggtccctggcttggtgagacctccctgccttaccttgtctcttcccatctctctggggtcccagcctggccatttctaggctcatattatgcgggaagggtgaggaaggatttggaaatatgtgcctcatttc

SEQ ID NO: 246111 - DNA, 619 bp, Homo sapiens
tcatttattcatcatgcatgtgctgagagtctgccacatgccaggcaccatgctaagggctgtgttggataggacctgttcaagctggacagtgaagccatctgaagaacaagattgagcagggggcttaaggagcacatctccatgaggcttgaagttctggctcagagaggaaatggcaggctgccacttccttccacttcaggattttgaggacaagacatgagscttctcaggccctaggaccaaactgtagacctagcagcaagtccaagatatgcaataatgtggttcagaccttgggtgtttgggagtttgggtagctcccttctttctgtgagatgggcgatgctaaatcccaggtgattagaaaagcagaaatgaccctggttctagtctcaatgctttctggccttgtagctctgagaatgtcctccccaccacctatctatacttacaggtccagctcatgaaacctcgtccagaatgcttcttgggaccccccagttatgttctcttctccttattcccacggaactctggcttccttcatggcttattctgaagtccttgctatagtattggtgataatgagagtactaatgattgatgatgatga

SEQ ID NO: 246112 - DNA, 600 bp, Homo sapiens
tgtttatgtcttggtcatcatggtgaaatcacttcgcctttaggttcttatttctcatatggaaaggaggttaaaaaagcacacttggaaaaagggcaaacagggccaagtcctcactggattaacccaccctgacatcccagttgtccttctacccataggtgacattcaaaatatgtaacawcctatatggcaaaaggcaccatggaattagaacaaatgccagttatataaaccaggccctgctctgccaggtgtgaacccttcaattttcaagctgtagggagatctgagactctcagaagatggcccagggcagtggaggttgcagaggagttttggggggagctcaaggtagtagctattttaaaaagagcctggacttattttagtatcttaacaaccaatacagctccactagtgaatgccaactaaatgcctctgcttcttcccttaccccagcacccttgattgctgaattatcacatcgttcatgtcaggggccgtatatctgtcttggttactactgtacctagtgtctagcaccatgagtaggtgctcagtaaatatttattgaattggtatatgcatggtatgtcc

SEQ ID NO: 246113 - DNA, 535 bp, Homo sapiens
tcattactacatcctcagcagcacttgctatcgtcagcttgttttttcctttttttttaaagttattctaataggcgtacggtagtgtcacattgtggccctaatttgcatttccctaatgactaatgatgttgatcatcttytcatctaattatttgccatccacatattttctttgtgaagtgtgttcaaatatttgcccactttttaattgagttgttttccttattgttgagttttgagttatttaaatattctgggtacaagtagttatgtaatttgtaaatgacttctccttttctgtagtttgttttttcattctcttacctgtcttttgcagaggaaaatctttttagtgaagtccagttaattaccttttttcttttattgtgttttttttggtacaaaaaatgtctaagatctctttacctcacctaaggtcacaaagtttttcaccgtatgtagtcttttaaaaattttatagttttatatttaagatctgtggtctattttgagttaatttttgtataaggtg

SEQ ID NO: 246114 - DNA, 535 bp, Homo sapiens
tcattactacatcctcagcagcacttgctatcgtcagcttgttttttcctttttttttaaagttattctaataggcgtacggtagtgtcacattgtggccctaatttgcatttccctaatgactaatgatgttgatcatcttttcatctaattatttgccatccacatattttctytgtgaagtgtgttcaaatatttgcccactttttaattgagttgttttccttattgttgagttttgagttatttaaatattctgggtacaagtagttatgtaatttgtaaatgacttctccttttctgtagtttgttttttcattctcttacctgtcttttgcagaggaaaatctttttagtgaagtccagttaattaccttttttcttttattgtgttttttttggtacaaaaaatgtctaagatctctttacctcacctaaggtcacaaagtttttcaccgtatgtagtcttttaaaaattttatagttttatatttaagatctgtggtctattttgagttaatttttgtataaggtg

SEQ ID NO: 246115 - DNA, 535 bp, Homo sapiens
tcattactacatcctcagcagcacttgctatcgtcagcttgttttttcctttttttttaaagttattctaataggcgtacggtagtgtcacattgtggccctaatttgcatttccctaatgactaatgatgttgatcatcttttcatctaattatttgccatccacatattttctttgtgaagtgtgttcaaatatttgcccactttttaattgagttgttttccttattgttgagttttgagttatttaaatattctgggtacaagtagttatgtaatttgtaaatgacttctccttttctgtagtttgttttttcattctcttacctgtcttttgcagaggaaaatctttttagtgamgtccagttaattaccttttttcttttattgtgttttttttggtacaaaaaatgtctaagatctctttacctcacctaaggtcacaaagtttttcaccgtatgtagtcttttaaaaattttatagttttatatttaagatctgtggtctattttgagttaatttttgtataaggtg

SEQ ID NO: 246116 - DNA, 513 bp, Homo sapiens
gttctgcttttcattgtcgctcttcaaacagcatgttattgtcatgcttctgcctccttttaataaagaggaatgaggagggttttcttgtacacgcaaaattaacacaaatcaaaactgctgctgttctttgatccgtcctggactctgattcgtgtcagccttttcattttcccactgagagtgtacagctcaggaaggattacacggggaggaaaaccgcttaccacttcccatttgattaacacaatttaatgcagcaataatgccagggaagttcattaccagggaaaagctctgatgcaggctgcccacagtgtctggggacggggtctttttatttaaaatgcaatcaagcccctatggtgagtggatccgtgaaatccttcctaagctggggaaggtggaattgccatttaatgtagacagacaaaaatccctcctgtttgtacagcttttgacaatttattcaygctgtctacgaatatttagtgtggcttcttatgctcaaaa

SEQ ID NO: 246117 - DNA, 617 bp, Homo sapiens
ctgcaatgaaattgggcttcactttgtggtcttgggtggaggggaccagactgagggcttgtcgaagttttcttactatttcctatcggtgtgaattcagctttctcatcctgtacataactgtcacatgcaatcttaggaacgcactttacttccctcttgcaggcagaagacacatctgtaatcagcctcctctgttggagagaaaatacctgcatgagcgaagcgaattgaatagggggaggagagcctctttttgccagctgagagcctgagcctggctctgtggagccacctgggccttgcatggtgacaggaactctttgctgacaagcccttagtctgtgggaaggtttatctgccagcgctttaataaactcttcattatagcagctcaaacctggtgacctttaccctctgtgggggcctccatgtgtcacgcactatttattcactgcctcgagacttccagkcaggaaggtcgagacctgctgtaatttgataagcatttgggatgtcaaagtacagaatccagcttcttttctcctttggacaacagaaatagtgtgctgatgtttggtgtttcttcctctcccattcctctgcagtagtgatta

SEQ ID NO: 246118 - DNA, 525 bp, Homo sapiens
tcttcccctgagattcctaaggatttctctctcctgccctctgacagcactctctgcaaccccacctttgctcaagctcccacacctgcctttgtcccagtgattagcttcacaagccaccttgccacctggccctctgcagaggagcccaccctgcccacacagcgagtcagccaagctaccgccccagctgtgtgatgggctgtcctcaggatacccagctcggcgctgagttcccttccccaccccctcagcagcccttcgcttgatgcctggagttcctgagaagacagaagaactggctttaatggtggctttgttccgtaggcaggcaaatttgagtgatttgtctccttcacacttataatttactgtacaattggcccaatgcagcagcattaagaaatttaatgtttttaagtaaaagttaattgattgaaattaggcagacagcaacagctgcrgaatggcaaaaaaaaaaaaaaaaaaaagctctcatttaactgatgaagctcaagttaaaca

SEQ ID NO: 246119 - DNA, 457 bp, Homo sapiens
catgctttcccacaatactccattttttaaaggctccttagaactaacaagctaaacctcagtcaaatgaggagtcatagtcatttgcaggtaagtgatctttcagctgcacagagagaggtaccctacttggctgctggggagccggcggtgactcaacctgggcgtggggacacagacttccatgcttgcgggaaggtcccctggcagatcgaccatctgcaagtgccctccatgtttcctggatttccaggtcttatgcctcctctcccccaagccctcactgggacgtacccttggcttcgcggcggggtgggtttgtctgctgtctggacagttgtgtttccctgcagggtgctgctcagtggctgggctcargtaaagagcttgcatttgtccaatgcataaacgggggaagcaaattcatttcacagctgaggttgccagcctctgacaa

SEQ ID NO: 246120 - DNA, 540 bp, Homo sapiens
gttattgagcatctatatgctacatgtgcccagtctatatgtgtccagtgctatacaaggcattggagatatagcagtgaataatggaagccactctgctttgtagagcttatagtttaacaggtaacaaatgcaaattgaaccctgtattgtgatcttggcctatggatktctccttcttttctagactctaagggtgtggctactgtcttttatttttctgcaatttttgagtgttcagtacaaagtttcatgcataataagtggtacatcagtgactgaagacatgggttatggcaaaatgagtcaccaattcaagctagagctgtccccaccaagaattgttgggcatggacactagatcacgtgggaaagatctcaaatggaataatttggctggaatcttgggccaaggataaggcatggcctgtataactagtaagaactagggaccaggggcaggagtccttcctgatgatgtcttcagggcaatcttctcccaaatcctttccaccatagaatgaatcgattgtccctaaa

SEQ ID NO: 246121 - DNA, 644 bp, Homo sapiens
agctattactatgggaggtaccattatgagagtatggaggaaagataagaaataaagatctcatggctcattttgggggcttcactaaaagaaaaaggaaagaacgaagcagggtatggaaggaaaaaagcaagataaaaaacattctctgaagatatctttattctaatgtatgcaaagcaattaaaatgctctgctactttatacatcttctaccccagagtgatgratttgtgatcctgagcacaggcaagctccctatttagggcagagggcagagtccttgatcaataggaacacaacttttttctctttcatgtgtctctggatgaactatttacttacacttgcttttaatttactggccaacaattagagccgcctaacaggccaacaagctggcatgatgcacccaattatcttctgaaaatgtatttctatgattggggctttaattgcagcttaaatcaaatgctcatgaacccagttaccatcgagggaatgagaccagctaatgaaataatgagggctttaactccaattcagaggtaaaggaacacagagaaaggagattgttcctttttaaaatctcctttcctcttattttatttttttttgagattgcctttgcaaacattgatgtc

SEQ ID NO: 246122 - DNA, 594 bp, Homo sapiens
acatttgggagaaaatctcttttgaaaagcccagggtaggtcatgtttttttcatgcttgtcaacttggctgaataatttgcttaaaataaatggaygagaatggtaagttgcaatgtaagggaaatgaaacagactcctagctctgtgtgcaacatgcctcagcctctgaagggtctggcgtgggtggtggtgagctttgtgggtggggaggtggtttatgcatttagacagggtcaatgtcttggcattagcacaagatttctgagcatcagcacattagccactttccagtgcaaacagatttaatccatcactgatgctgaaagaaagctctacatctaaggtgtgtcatcttcccaaatataagctaaatgagttaatatcttctcattgttgtctttattaagccttagttaaaccattcttggataatgatgtgtctttgtcagaggtcttttaataaagtaggtgttcctttatataatctctctaaggagaatgctgtggctttcaaagttcaaggaactgcaacatccaaaatgtaagtgaccaggctaatccccaccatggtgagcccaggattttagcagca

SEQ ID NO: 246123 - DNA, 620 bp, Homo sapiens
agcatttgggattattatgactgtaaccaattgtctcctgaaatgcttgactgccctcgaggcttggacaatagaatataggtcttccctctggacctgtatcattgtctcaaggttatggctttttaaaatagagatgaggatgtacctgtgtcccaaagttccacatctcttccttccagaactccctgctttcttctccaaggatatctggagaaactgggaccttatccagctttacctcccacctctgcaacttgagtggatcatttcttccttctggacctcagcgtcctcatctgtaagatggggctaaaagaagcccagtgttccttgaggggctgtggtgagaggtaaagaaatgagaatttgaaggttgttgggggactgtctgagatgaagttagaagaagggaagcttaaaagaaggccccaggccctggtcttctcatcaggaccccaagaaagagtggtggtgactgccatctcccccaggacagtgggtgcttgagacagagtctggatctcatccatttccaggcccaggacasagggggcacttggcagatgtttgttgaatgaatgtctgagtgagtaagtgagttagtgagtgagaatgtg

SEQ ID NO: 246124 - DNA, 556 bp, Homo sapiens
ccttaggcctgtaatggaggtgggggtgagacccgtggtggctggttggcaagcactgctcagacgctccccaagacctggaccttgtcatgggccaggagggaaggtgggctcctggaggatgggttcaaccctccgtgcctggcctgctgccttcgggtcagggcggcaatcaactctagttgaacaagtagagtggaagtcagggttctagggactggtggggccaatgctgacctggcaagatgccagaaatgtatttttataaattaccgtggcctttgcttctatctgctgckctcagcatcttctaaggtgttcagggctcccaataagccaggacttttcacttggcaggaaagtcccttccactcccagccagcctgcagagcctggggatccatctccccatgttgaatgcagtgcccaaggtcaccacactggcactggtccttaaacccaggcatacatgatgccttccctcagctctttgcttctttgcctccagagcattcaccccaaatactcaccctccaaaaatggagcaaaagcaaaa

SEQ ID NO: 246125 - DNA, 633 bp, Homo sapiens
tacaataagtgaaacagagttaccatatgaaatgcattttttacaaacctaggataatttcagatgagattgagcacattcagggtggtatggcagtagacccaagataatttcaaagaaaaatattaagtaaatagtcatacaggttttacaaagaaatgccaggatagtgaagttgggaagccaagagctaaaggtggggaaacactgccttgggctttaaagttcagagccaggttcaaatggccccgtgcttgtgaagccttcctcaatccctcctctgccacatcagccaccggctccctccccaccttaagatatttagctcacgctgtgagtgttatcattggctctgtatcytttagccagagtctgagtctttttatccctgttagcactctcagttctttctatccttattcaaatgacatggttttggatccttctccattttagtcaccctcttgcagataaagatgattttgtcaatgttcttcagaaatttgatacttcaattgtagctcctgtgatctggtacttcacttctattgatataacccaagattgtgtgtgtgtgtgtgtttgtgtgtgtgtgtgtaggagagaaagaaagacagagaaacatttttcctc

SEQ ID NO: 246126 - DNA, 567 bp, Homo sapiens
cttaaacaaatgattctatcaaaacctgaccagttgcaaagacaccagcaattacaggactcttagaaggctcaagagaagcatgtaatagcttcttttcaaaacttaagacaagcccccagagctcttttcctgtgtcctgcaggcccagccttctcatttgagacaaggctccctgcaagccacctctaggaagactcccarcgtgccctgtgccgtttccatagaaagcaccagaggaggaaaacaaatctttacagatctggcctacggttctgcacaatttaacaactgacaagcttgtggaaataggcaggaatcattactgaattagcatcattgccattgaaacagatgatgaaattaggagcagccaaagggagctgcttgtgctcccagctgggtggctcatgggagcgacccttatgggaaactgtactccctgggcaggctctactgggagaggtccacacaggacagtttcagtgggcactgggtggactagggagtgggtgaccattgagtatagcattggggttcacacagagaaagccagactgcattcct

SEQ ID NO: 246127 - DNA, 596 bp, Homo sapiens
cgctcagtaaatgcctttctgtgaatgatgatggcaatttcttctcccttctctctgccgatcccagtccttgcctattcttgcagcctcagtcacagaagtccaatatcaccctccaacttcaccttgagagtcccaggaattcagagctgaaaatgacaggagagctcctctggccattttacggatgaarctagaaagagcaagatattgtccaatcttacaggggaaatgagcagagccaggaatctcaggcttggagctgggccaccccacccacccatctccccctgctgactccagtttccatcccaggcccttggggctcacatccttctccaaaactggctccctggcaaggccaggccaggccaggcaggggaaggggcagtctgggcccataactcagccaagtcacctggcagctgctcctggcacacaagccattaaaaccttcacatctgttatctgcaccaacagcaaatcaacatgaggccgctctccttccctcagcaggtccgagggcttggatgcagccaccactgtattaactcattaactctcaaattttagccccatgcctcaacccaatctca

SEQ ID NO: 246128 - DNA, 596 bp, Homo sapiens
cgctcagtaaatgcctttctgtgaatgatgatggcaatttcttctcccttctctctgccgatcccagtccttgcctattcttgcagcctcagtcacagaagtccaatatcaccctccaacttcaccttgagagtcccaggaattcagagctgaaaatgacaggagagctcctctggccattttacggatgaaactagaaagagcaagatattgtccaatcttacaggggaaatgagcagagccaggaatctcaggcttggagctgggccaccccacccacccatctccccctgctgactccagtttccatcccaggcccttggggctcacatccttctccaaaactggctccctggcaaggmcaggccaggccaggcaggggaaggggcagtctgggcccataactcagccaagtcacctggcagctgctcctggcacacaagccattaaaaccttcacatctgttatctgcaccaacagcaaatcaacatgaggccgctctccttccctcagcaggtccgagggcttggatgcagccaccactgtattaactcattaactctcaaattttagccccatgcctcaacccaatctca

SEQ ID NO: 246129 - DNA, 596 bp, Homo sapiens
cgctcagtaaatgcctttctgtgaatgatgatggcaatttcttctcccttctctctgccgatcccagtccttgcctattcttgcagcctcagtcacagaagtccaatatcaccctccaacttcaccttgagagtcccaggaattcagagctgaaaatgacaggagagctcctctggccattttacggatgaaactagaaagagcaagatattgtccaatcttacaggggaaatgagcagagccaggaatctcaggcttggagctgggccaccccacccacccatctccccctgctgactccagtttccatcccaggcccttggggctcacatccttctccaaaactggctccctggcaaggccaggccaggccaggcaggggaaggggcagtctgggcccataactcagccaagtcacctggcagctgctcctggmacacaagccattaaaaccttcacatctgttatctgcaccaacagcaaatcaacatgaggccgctctccttccctcagcaggtccgagggcttggatgcagccaccactgtattaactcattaactctcaaattttagccccatgcctcaacccaatctca

SEQ ID NO: 246130 - DNA, 596 bp, Homo sapiens
cgctcagtaaatgcctttctgtgaatgatgatggcaatttcttctcccttctctctgccgatcccagtccttgcctattcttgcagcctcagtcacagaagtccaatatcaccctccaacttcaccttgagagtcccaggaattcagagctgaaaatgacaggagagctcctctggccattttacggatgaaactagaaagagcaagatattgtccaatcttacaggggaaatgagcagagccaggaatctcaggcttggagctgggccaccccacccacccatctccccctgctgactccagtttccatcccaggcccttggggctcacatccttctccaaaactggctccctggcaaggccaggccaggccaggcaggggaaggggcagtctgggcccataactcagccaagtcacctggcagctgctcctggcrcacaagccattaaaaccttcacatctgttatctgcaccaacagcaaatcaacatgaggccgctctccttccctcagcaggtccgagggcttggatgcagccaccactgtattaactcattaactctcaaattttagccccatgcctcaacccaatctca

SEQ ID NO: 246131 - DNA, 366 bp, Homo sapiens
agccgggtgtggtggcgtgtgccatctgtaatcccagctactcaggaggctaaggcagaaggattgcttgaacctgggaggcagaggtcacagtgagctgagaccgcgccaatgccttctagcctgggtggcagagtgagactccatctcaaaaaaaaaaaaaaaattgtaccccataaatatactcaattgctcaattgtttttgtcaataaaaatttttttwaaataatttttaaatgccttcactaaataaaaagacattaagtaaatatcttaaccttcaaccttaagaaagtagaaaaataaaagtaactaaacctgagcaagcagaaagaaggaaatcattaagattagggtagatataa

SEQ ID NO: 246132 - DNA, 464 bp, Homo sapiens
gaatcctggtcttgtaaataatggccagtaatgaataaaaaatagatgaaaagtcttcaacactgcaaaacgaagaagttcttcagtgaaggtgcacttgaggatggagatatgtagggagtatcagagaaccaatgggttgtggatgtgtctaaaatgcaacattttgaagtgggaggattgcctgagtccaggagtttaagaccagcctgggagcatagcraaacctcatttctacaaaaaataaaaaagtagacaggcatggtggcacaaacctgtggtcccagctatttgggaggctgaggtaggaggattacttgagccctagaggctgaggctgcagtgagctgtgatcaaatcattgcactcagcatcggcaagaggtgaaaccctgtctctaaataaataagtaagtaaataaataaataaaaagtgcaagattggagaaagttgggaggaataaa

SEQ ID NO: 246133 - DNA, 395 bp, Homo sapiens
atagcgaaacctcatttctacaaaaaataaaaaagtagacaggcatggtggcacaaacctgtggtcccagctatttgggaggctgaggtaggaggattacttgagccctagaggctgaggctgcagtgagcygtgatcaaatcattgcactcagcatcggcaagaggtgaaaccctgtctctaaataaataagtaagtaaataaataaataaaaagtgcaagattggagaaagttgggaggaataaacccagaagggtatattgaggtatgactaaatgccagattaaatatttgggcttcatctcaaggcaactgtaggtatcattgactcccagggcttggccatgaaaggtattcaattaatcttgtttaataagtaaggaactactgaaaa

SEQ ID NO: 246134 - DNA, 395 bp, Homo sapiens
atagcgaaacctcatttctacaaaaaataaaaaagtagacaggcatggtggcacaaacctgtggtcccagctatttgggaggctgaggtaggaggattacttgagccctagaggctgaggctgcagtgagctgtgatcaaatcattgcactcagcatcggcaagaggtgaaaccctgtctctaaataaataagtaagtaaataaataaataaaaagtgcaagattggagaaagttgggaggaataaacccagaagggtatattgaggtatgactaaatgccagattaaatatttgggcttcatctcaaggcaactgtasgtatcattgactcccagggcttggccatgaaaggtattcaattaatcttgtttaataagtaaggaactactgaaaa

SEQ ID NO: 246135 - DNA, 444 bp, Homo sapiens
agcatatgcatttgatcaagcaggggcccaagaagggcaggcatggagaagatgagggagacgcgtgtttagtggtgacagttatttaataaccacycttggatctcctggccttttctctcctgttgctgtaaagacattcatttttctttaaacccaataaattattctctgtcagcaagcttgggggaggggatgaagagaagacctcggtttgctcttggctttccctctgtctagtccaaacactggaaatgtcaagtttgcccactaattaaacatgtctgtcttggactgcacttgtatctttcactgagaaggtgtagatttccagggagacattacacattcatgtttccaaatacagcattttacaatctccctgtgtgacacaaataccaactttgtgaaagtgtctcctggtaggaaagacacctgagtaag

SEQ ID NO: 246136 - DNA, 578 bp, Homo sapiens
cagcttaccatgaacatgaaaagggtcaaccccagcacaaatatgatttgctttcttgggatatttacatcacaaagtcaatggttcagagatgcactttttagacagctatggagccacattaactgtatgggagaagggactgcagatggggcagatgtcttgtcagcagagatttgggtaccaggctgggaggaggcactagagaaccaagcaggcttccagctctgagtcttacactgtggagtcttttggcttctccagattgcttctctactcttctccactctgctgcacctcaggggctgacctatgtgaactacatggtccgactcccctgcctcctggcttctgcttgcatttggctgatgaaagctgccaatgaggataggaagatgggaggagcaagaggygaggctttattcctcgttctctcctgccaggtcattgtggcttggccccgcaggacacctctcccatcaggtggctcttcctttacattattctccccagtttggggaactgccagctccctttgctccttcatgcctctgatggggggatgcgggtgggggtat

SEQ ID NO: 246137 - DNA, 486 bp, Homo sapiens
tttggtgttggaggggagccacttctggcctaaggagctgttggtttgatgtttcttccttaccttctgcattcaaaaggagtatgtgttacctggatatcacctggccacttgtgaccctaacagaagcaatgaataaatctggaagcaaaaacaaacagagaagccagagaagaaggtgagctatatattagaaaacactgcttacaaagaataggatggtgtggatggtgaaaagggaaagaagaaaacacaagaacctccaatactcagactggagagaggacttgggagcattttgagaggattaagtgagagtgtgtatgtaaaatatttagtacagttcttggcacctaggagtgttcaatamatgataaataataattattattatatactaaaaatattaacaatgagaacttgtaccttttaataacccttctgttatctaagcagtttatctgaattttagaagcacacagaatg

SEQ ID NO: 246138 - DNA, 554 bp, Homo sapiens
atagatagatagatagatagatcaatagaaatagcttatgctgtcttgggttggtgtcatttatttgtacctgaatgaatcctaactaatataaaatataaatcctttcctcttctgatacaccaccctgcctcttaaatgttgtcctttgagaaaatactatggtacagtaaccactaaatacttgagtgtatctccctagggagagtcctcccatgtaagtctagcacctgtgcttgtgggagatgctaatgaggtgcactggcccccatgcagacctggctgtggggaggaggaaggatgatggggagcagaggccagagagtgcctacaggcaggaatgagcagactttcctgcatgcctggcaatgacatggcaccttagcagtgagagctgtcagcttaggcatcagctgtgccacagcagccttcatcggaaaaggcatcttaacaggaaacagtgaaaccacctctgaggtggctgtgagtgtcatgactgagacgtagagggaaagtggccatcstgcatggaatagcaggaaatcaggagttgc

SEQ ID NO: 246139 - DNA, 607 bp, Homo sapiens
gtatctagctgggaatgctgggctcagattgtcatcctctgtcactgaattcaacttgaaatatggagtcttaggagcttcaagctcctaaggactgtgaaaagagagcttgtttaagaatagacaaccattccagtaagtagagctgagaaatgaagaaagagagaatgaaggcatgtcatttgtacataggaattaagcacaatctaaagcccagttctgaataattcaatgaatcaatacattttctctttttctgcttragccaatgggtcaggttttctgacacttcctatcaaaagaattctagctgatagaccaatcagagaacagtggggctatcacctcccttgaatagatcatgataccccaatggatgcagctgcaagtcctcactgttgtcagcagctgtgttgtcttgtcagcgcctattgtttgagcttatagccaatgagagctcacactttcctgttcagcagtttccttctcaatttctctctgagacatcctctgagggtttatgtaaagcccttttatgaatttagtatttattagacctccctcttgcacttgacacgtatccatttttgcctgagttgcaaactcc

SEQ ID NO: 246140 - DNA, 597 bp, Homo sapiens
tggttctattttcctgcaaggtgggtctcagacaatgcagataagtatcaaggaggcaggcactgactcagtatgagaaagagctagctaagagttaagctgggaattttgaagttggattctgtatttactatttaggtatttatattatgtaatgctattttatgtatttatcaaagtttccttaagaaaacttccaccgcttatatggtccttttgctctatgttcaaagaatcaaaaacgtagattcttagtttcctggaattgcagggttaaggattatcatagaaatccaacttcctgcccacccccacccccccactggcatgactcaagagttggtgttctgctgcagcagtccctgtgatgaggaactcccacctcccagcctcttctgaaaggcaggcccttttccactcttckgttacacttcccgagtggggtcccttaggggtaatgcttgaactgtgtatttagagccctctgtctggtctcacatttgatgagaacccttaggagttaacgtatttgaggaggcagcatgtgctaccactcagcagaagtgggatggcttatccaggggtagggcaagaaag

SEQ ID NO: 246141 - DNA, 525 bp, Homo sapiens
tatccatcacccgaatagcctacattgtacccaatcacttatttctcatcctctaactccctcctacccccttaccctctcaagtctctgttgtctaacattttattctctacttccatgtgtacacattatttagctcccacctgtaagtaagaacatgcaatatttttctttctgtgtctgactgtttcatttaataatagtctccagttccatccatgtcactgcaaaagaaatgattttattctttttatggctgaatagtattccatggcrtatgtataccacatttttaatccaatcatttgttgatggacacttaggttgatttcatatctttgctgttatgaatagtcctgagataaatatatgagtgcaggtatcttttttatacaataatttatttttcctttgggtagatatccatagtggggttgccaaatctgatggtagatttttgttgctgctgttgtttattttttagctctttgagaaatctccatactgttttccacagagactgaa

SEQ ID NO: 246142 - DNA, 460 bp, Homo sapiens
ctgagagtgctcgtctaggaggagtgaacagagcagaggaagggaagatagaaatctgggcctctccagggaattacaagaagcttagattagccagggagccagccaggggcaatggtagatgagactagaaaggcagatcccacacccacactacgtttacaaggaagaaaagatccttcttaacctaaattcccccacatgtaacccccagacctttccaacagcagtagagactcaaaccatgaccaagtgtggggagctgggagmttgactctggcatctgcctcactggaggccagaacagacctcggtttgcatttactcctgcaggctgaggtctgctagagccgattcagctgtttacctctgcccacatcatgaggctgctctgatgaaagttcatacacaccaatcaatcaggccgatttcaattaactctaattgttctgttgggatt

SEQ ID NO: 246143 - DNA, 583 bp, Homo sapiens
tctttgactaccaattctattatctgtgtcatttctgtgtcaattttgattgatttattttttcctcattatagattatatttccctgcttctttgtattcctgatcatattttaacatgagacattgtgaatttcaccttgggtgcgttatatttttgtagtctttaaaatatttttaagctttgtttttggacagggtgaattgggaactacttgattctttgtgggtcttgcttttaagttttgttagcaaaactagggctgcatttaatctagagttaagtttctgccaatactgaagcaagacccttgttctttgactatgacccttgattatgaggtcttaccctccagctgttgagttaggcattatttctgatgctgtttggcccctggatactgttttctctaatattttcatgtgattctttacctggcctcaggtagtttcctcatatgtatgcgttgattagtacttgactgaatgctcactgagccttctgcctatttcagcatttttctctttgtaaaactttttccyttccagtaccctgtgatgtgaagtctagccacctctacttc

SEQ ID NO: 246144 - DNA, 495 bp, Homo sapiens
ttaacaactacatcttcaatttatttctctactgtcacattttattataaacagccagggggaacaaagccattgcttaaaaactttacctagaaatattcttggctaaatattcaattttattgcttccaagttctaccttttgcaaaaagctaggacatgaacacaattcaaccaagtkccttgccattttataacaaggatgacctttcctccagtttctaataatatagtcctcatttccatctgaaacctcaccagaatggcctttgtaatccatatttttgccaacattctgtttacaattatttgtgtattctctaagaagatggatgctttctctatagctcttctcttttctttctgatccctcatcagaatctccccttttcatgtccatatttctagcataacctcgaaactcctttagcctttgcccactacccagttttaaagccacttccacatttttaggtatttttcacagcatcaccc

SEQ ID NO: 246145 - DNA, 598 bp, Homo sapiens
cattcttttattgcaaattaaagatttaaaatatatatactgacaaaataccttggaaggaaagagcaccagtgttcctttagttctgaagagctacagtttttaaaaatgggagaaaaagttaaactacataaaatattcataacaacatattaagactgtcattctagaaaaaaatatcagcagcctattgttactgatgtgggtacacgtgtaaattgtactgtcctcataactaggcctctgatgggccctgctctttcacaggcagtattacagtgatgggaagtagatctcagagtggaagacaggttggtttggaagttaaacacttaattgtaactatgtgatgcaagctatgtcatcacaagcgagtcacttaactgctctgagctccggtttccgcaactgaaaactgggttagttaaacctctgagtgttcttgtagcttgaagtgctattcaaatatacagaatattagttttcaggttaaatcrtacttatgaaatttggcatttggatggaacactcttggccaagaaacaatactttttttagagaaaaaaacacaatatgttatttctttataagataaata

SEQ ID NO: 246146 - DNA, 567 bp, Homo sapiens
ttcacctatgttgtaccagtttaccacattgattttccatgtattttcattctctgtctgtctctgtctctctctcttttttctccatttatgtgtatgcgtacacctgtttcaaaggacagttatgtacactatggcccctgattcttaaatacttaygcatttcctaagaataaggttattctcttcataaccatcattcagctgtcaactttagtaaacttaacattggtcgcatattttaatctcccattcacgttccgattttgtcagttgacccaaataatgttccctttctagcccaggtaatgcagttaattgctatgtcaaatacacagagttttgagtctttcattctgaagaatgtcagaattgaactgagctgaaagggacatcacttttaagtgatcagcatgtttctacctcatttcttttatgctgttggtttttaaaaaaaatcaaacttttaccttcaaatattgtgtaagttttgatatctgaagttgtagtgcagtagccaggttgttcataatgatgacaagatattcttcatatatttttatggca

SEQ ID NO: 246147 - DNA, 652 bp, Homo sapiens
tgtcaactttagtaaacttaacattggtcgcatattttaatctcccattcacgttccgattttgtcagttgacccaaataatgttccctttctagcccaggtaatgcagttaattgctatgtcaaatacacagagttttgagtctttcattctgaagaatgtcagaattgaactgagctgaaagggacatcacttttaagtgatcagcatgtttctacctcatttcttttatgctgttggttttwaaaaaaaatcaaacttttaccttcaaatattgtgtaagttttgatatctgaagttgtagtgcagtagccaggttgttcataatgatgacaagatattcttcatatatttttatggcaccttactctttacagcagctctgatcatgcaaaatagtatctgtaggaggaaaaaatgatatttcaaaaaagttatttcctggccaatagcaaaagccatgcgaatgttctgacctatttccaaataccagatgcattgcttgagggagctgagactagagaggcctcctgtggggaaggacactcttgtctgcctgctttgatttcattgtggcaaatgataacattcagcacttttcatgaaaacttgccctgaaatttaaaaaagtaaactttatttagttataatt

SEQ ID NO: 246148 - DNA, 589 bp, Homo sapiens
aggtttggtatattttaatcataaactcattatttttctaatttagctataatgaataataattttcttttgcaaaggcaagtaacttggatgagagaaaacatactcattatggctcatcagttgacacccagtgtgaggttctgttcagcttttgcctttccttcttgtctctacactttcccaactccccattgcttctctagttactagttcatctccccctgctccaattccttattattattatttttgagacagagtcttgctctgtcgccaagctggagtacagtggtgcaattttggctcaccacaacctctgcctcccgsgttcaagcgattcttgtggcttagcctcccaagtagctgggactacaggcacacgacaccatgcccagctactttttatatttttagtagagatagggtttcgccatgtttgccaggctggtcttgaactcctgacctcaggtgatccacccgccttggcctcccaaagtgctgggattataggtctgagccgctgcgcctgtccaattccttattattttaatgcaagaattttaaaaagagaaaagtatatgtaaat

SEQ ID NO: 246149 - DNA, 627 bp, Homo sapiens
atctttttatatgcttacttgccatctgtatatcctctttagtgaaatatctgtttatgtcttttgctcattttctcattggattgtttttatttttctgttgaattttgagaattctttatatattctagatacgaggcctttgttgcatatgttattggcaaatactttttcccagtatgtggcttrtcttctcatcctcttcacagattcttttgcagagcacaatttttaaatcttgatgaggtccagcttatcaatttttcctttaatggattgtgcttttggtggcaaatctaaaaactttttgcctaatcgtaggtcctttttttcccctgctaagttttatggtttcatgttttccatttaagttgtgattcattttgagttaattttttgcataagatgtgaggtttagattgaacttcatgtttttacctgcggatatctaattgctccaatgtcatttcttgaaaagactatccttcttccattgaatcacttttgtacctttgtaaaaaatcagctggacatatttgtgcagatctatttctgagttctgtattctgttccattgatctatgtgcctccctctgccaataccacattccctttcttgattactgt

SEQ ID NO: 246150 - DNA, 627 bp, Homo sapiens
atctttttatatgcttacttgccatctgtatatcctctttagtgaaatatctgtttatgtcttttgctcattttctcattggattgtttttatttttctgttgaattttgagaattctttatatattctagatacgaggcctttgttgcatatgttattggcaaatactttttcccagtatgtggcttatcttctcatcctcttcacagattcttttgcagagcacaatttttaaatcttgatgaggtccagcttatcaatttttcctttaatggrttgtgcttttggtggcaaatctaaaaactttttgcctaatcgtaggtcctttttttcccctgctaagttttatggtttcatgttttccatttaagttgtgattcattttgagttaattttttgcataagatgtgaggtttagattgaacttcatgtttttacctgcggatatctaattgctccaatgtcatttcttgaaaagactatccttcttccattgaatcacttttgtacctttgtaaaaaatcagctggacatatttgtgcagatctatttctgagttctgtattctgttccattgatctatgtgcctccctctgccaataccacattccctttcttgattactgt

SEQ ID NO: 246151 - DNA, 561 bp, Homo sapiens
agcactcaagctcagtaaaacctggagctgagattttactgtttagattagatagatataaaaagttgttaggtttagttgttgaaacctattgttgaaaactttaaagtggctgttaaattgtgttgcttgtccacgtattaaatggctgtattttcttaggttaatgatgaaygcagacacaggactcaaagtacagctatttttctctttaatttgttaaatcaatttggagtgtatatgtggcttgttagttccttgcataggtaaggaagccaccgtctcagctttcttaaagttcagccttcctggattcacactttcgtcagttccccaattatttcccactctctcacccgaggaaagccagtcagctcagtgtgacattcaagtctctctgtgagtgatccctcacctgccttcctagcattatttcttattgttgcatgtataagtcatgcataaatcatgtgctccagggcaaactagctccttgctttctcttaatggagggcccagcacaaattcttagccagaggaccacaaactagtagaccttat

SEQ ID NO: 246152 - DNA, 560 bp, Homo sapiens
tattaggaataaaggagagtacactgagataaagttgatacattcaattttgagattagtccttcacctacagcaacttgaaaatcagtggaaagaataaaataaaacacaaatgactataaaacaaagcatattttgataagtatcataaaaggtatagtcagaatgtgacatgtatttgaaaaactatcacatccaggtatagaaggaacttgaaaaaccaaatggaagcttatatggcatattaaatattacatagtgattccaggtacttgaaataatagtttcctttaaaattaaaaccaaacattcatatctcaggaaatcaactaatattggtacttacttcctattctccttgcttcgtattatatgatcttaaatttgatcaagagctagacgaataagtttagcttttcaaargtagtgtgagattgcatcaatcattcaccatttagattaacccaaaggacaaattaatatatgaatgttggttctttgggggcacattaattgcttcaagctctcattctaacaatactgttactattgttacagta

SEQ ID NO: 246153 - DNA, 578 bp, Homo sapiens
ttttgggggtcggagtaggccaagcagataaatatattccttttttttttttttttttttgagacaaagtcttgctctgttgcccaggctggagtacagtggcataatctcggctcactgcaagctctgcctcccgggttcacgccattctcctgcctcagcctcccgagtagctgggactacaggcgcccgccaccttgcctggctaattttttstatttttagtaaagacagggtttcaccgtgttagccaggatggtcttgatctcctgacctcgtgatcagcccagcttggcctccaaagtgctgggattacaggcgtgagccaccacgccccgcccgcagataaatatattctaaagaaaagtaaccttggaagatagactttgggcccagcacaacacgaattaatgtgtgtgtgatcgtagcactggaaaaagaaaagggtgctttggattgcatgggacccctgctttcaatggtgtcaccatgtgacaatgacagaactaacagcagcaggaatgttcttgaggttgggagggattaggaatgacagaatagctttagactaatcaaac

SEQ ID NO: 246154 - DNA, 495 bp, Homo sapiens
ttacccaaaaattgtttcatataaaagtgtcaggctcaaatgagttcataaacaaaatattttaaatctcaaagaactgatcattcctatgccattttaaatgtttccaaatacagagagaaacagatatcctctcaaataatgttataaaactattttaactttgataaccgtctgaaaaacaactacacataaaaacacagaccagtcatttcacaaatacaaatgcagacaccttaaataaaatacataaaatactaatacattyactctaacaatatactaacaaaataatgaactgtaataatactgtctttttcccaggaatgcaaggacagtttaacattaggaagtatataaatataatttaatatatccataaattaaatgagaaaaaacatgatcatagtgctcaatggccaaaaagacatttcaaacattttttaacattcattacagatttttttaagtcaataaattagaaaagctcttttt

SEQ ID NO: 246155 - DNA, 475 bp, Homo sapiens
cttcgttagttctggtccaaaatggtaccataaattagattctgtgttgattataaacaataacctgctaaatcataatgctcctttgcttagagtggaatttggaattgttgaaatgatctcaactacagatttgtttaggttcctacaaatagtactagaagaaaaccagatgaaacaactgggtttctttgcaagagaaacaactggaaaacctggcttggacaaaagtagccccagagaggaaggagggtctacgaaacacagttataatggtgtaatcagaatacagttatgaggatgaatgaattgccaacatttccttagagaagacaaacttattttcctaagcaataattttctacattagggtgtacaaaactaaggtcttttagtctttgtatccctctactcaagactggaaggagcagtcaactggcccaggtggcatcaytagttttcctcttgaggacca

SEQ ID NO: 246156 - DNA, 637 bp, Homo sapiens
ttataaatgctaattaagctttcctgattataatcgttggagataagaaggatgagactgcaaaaaaattctgaatgccaaatacagatgcatcatatttatgtcatggacatcaacaggcaaccattattgaataagaatgctaatgtagggaacatcagtctggcaacagcatgctaaagaaagacaaggtaggggaacaaagtgatcagctgtgctaggatggcaattcaataaagccaagaaaaaattcaaggaaacccagagatattgcaaggaaataataactaattccatttacatctgaactcaagtcttgcatcaatatctttaagtggtctatgatcaaaactcatttggtcttcaaagatttatggatgacaattagagaacgaggtattaggaactccatgagtttaaaaaaaaactstaatcctccactaaaggaaataatacagttactatgtgagaatcatgggctagtttcttaaaacctgacacaaaaattctatttacattttgaaacatatttctaaaccaaatattttcagcccaaaacatgttcaagattattatgctaagtaattcatttatgtattagaaaaaactttatcaaattttcaatttatacatgatg

SEQ ID NO: 246157 - DNA, 580 bp, Homo sapiens
tcagtttaaatcttgttgttttayagatgtatcttttacaattttctctttcttatgacattcttacattttattctactggatctaggggtgggtttagtaatgcagcagatactttgaggtcatatctttctttcattttttcatgttacttttaaatttctttccttatattcattatttaaaaaaaaaatccttcaaggcattgaagatgccattagacagatgttaacaggatagatgttcatcctccatgtcttatttattttattcttttcatgtctttattctgttgcattctgggaagcttcctctatctgatttttcaggtcacgaatttcatctttgattctctctgttctactcttctgtttacctatttaattatttgtttcaacaatgatatacttttttgttatttttgttgtttgtttgtttgagacagagtcttgctctgttgcctgggctggagtgcagtggcacgatctcagctcactgcagcctctgcctcctgggttcaaacgattctcctgcctcagcctcccgagtagttgggactacaggtgtgcaccaccacgcc

SEQ ID NO: 246158 - DNA, 552 bp, Homo sapiens
gcttcctctatctgatttttcaggtcacgaatttcatctttgattctctctgttctactcttctgtttacctatttaattatttgtttcaacaatgatatacttttttgttatttttgttgtttgtttgtttgagacagagtcttgctctgttgcctgggctggagtgcagtggcacgatctcagctcactgcagcctctgcctcctgggttcaaaygattctcctgcctcagcctcccgagtagttgggactacaggtgtgcaccaccacgccgggccaattttttgtatttttagtagagatggggttccaccatgttggccaggctggtctcaaactcctgaccccaggtgatctgcctgccttggcctcccaaggtgctgggattacaggcataagccatcgcacccggccatcaatgatgatgtactttatacattgaatccacttggttcttttttcacagcagttgttcttgccttatgtttctaatatcctcttttatttttctgagagaacactttcacttaaattcttgtttgtgcttttcc

SEQ ID NO: 246159 - DNA, 511 bp, Homo sapiens
ttgtcttattgacatgatatttgcccgcctatcatttgtgtcatttttttagcatatttgtgtttctgtgccttttctatttgaaattttgtaagtgatttttttgtttcattttcctctactttatgaacttagatacttgtttgaagacttgtggatattcagaggatattttccatttggcagcaaccttgtatgtctgtgtctgcactgctccccaggtgaaatagctattttaaataatttttattagtgtggaaggaggtttttgtgcctaacttaaggccgaatttaaaatatcacaggaattacgccttgctaaaattttattttgtttaatcattagcatataggattaagttagattctgacttgtagttttaagtttctttttattattgttgtcattytgagtgtcttcctttttgggaaattctcaggctatgtttctaataatgaaggaaatgaggcagtggtttttaggaagagttaatatgtttaatgaaatact

SEQ ID NO: 246160 - DNA, 511 bp, Homo sapiens
ttgtcttattgacatgatatttgcccgcctatcatttgtgtcatttttttagcatatttgtgtttctgtgccttttctatttgaaattttgtaagtgatttttttgtttcattttcctctactttatgaacttagatacttgtttgaagacttgtggatattcagaggatattttccatttggcagcaaccttgtatgtctgtgtctgcactgctccccaggtgaaatagctattttaaataatttttattagtgtggaaggaggtttttgtgcctaacttaaggccgaatttaaaatatcacaggaattacgccttgctaaaattttattttgtttaatcattagcatataggattaagttagattctgacttgtagttttaagtttctttttattattgttgtcattttgagtgtcttcctttttgggaaattctcaggctatgtttctaataatgaaggaaatgaggcagtggtttttwggaagagttaatatgtttaatgaaatact

SEQ ID NO: 246161 - DNA, 602 bp, Homo sapiens
gttttcttggctttaagatcaggctagtgggaattcttgctttacagcattgttataaggatcaaatgacataatgaataaaaacacttgttaaagcacacagtacayggtaaacatttaataaatattagctagtatacttattattattgagctaccagctgaaacctagaaggaatgacatttatcattttattttttaatgtcattagttaactattatttactctctacaaataaaagaattattcaatacaatttgattttaccagaatctgtaagaaattaggtatagtataaatagatatttggatgaactgaatcagcttcatgtagacaatattgactgattagtctaaaagtgaaactagtaaagtgatagaacatcagtaggtactaattgactatttattgtatgagtctacagcataaattattcatttttaaggcacaataattcaataagctatattgagggaaatatttcttttaggatacagaagatattaagagcttatagagttttaggatcctttaacctgtcaattgtcatttatagtactttgttgcctaaactttccaagttaaattttgaggtaaac

SEQ ID NO: 246162 - DNA, 561 bp, Homo sapiens
ttataactgtaatggtaaaattttaagctttcaccattacaggtgtcagactgaatttatttgccttttgtggggctgaaaattagttctcaatatctaatttgttggtttgcaaatttcttttctcagctagtaaatatctaagtgaagcctacaatgtaaaaattagtgtactagggtccatttagaatcataattattccttattttactagacaatttccttctttttgacttcctatgagtactttagttttcagttacagaaaatgaagtttcagcaaaaaatcacagtgttagaaatattaatgagaagaaaagagygaatgggagagtaaaatcagccttagtacatcaccaaatgtgatgtcaccaaaaaagaagtaccatatagggtgtgtgtaaataaatgtacataaacacataaaacttatatcaatatattctctccaaaaccattttgtagaatagtcatgaaagaatgaaaacaataaggactaatgaagaatggcttaaagaattaagatttgggccatcatgttgggttacgtctgtaatccc

SEQ ID NO: 246163 - DNA, 594 bp, Homo sapiens
tggtggctcatgcctggaatcccagcactgagaggcagaagcgggaagattgcttgagccaggaattcaagaccaccctgggcaacagagtaagaccctgtctctacaaaaagaaaaaygtatatatatttttgaaagacatatgaaacaatataaactaaccaacacttaaaaacaaataaacaaggccaggcacagtggctcacgcctgtaatctcagcactttgagagaccaaggtgggtggatcacctgaggtcaggagttcgagaccagcctggccaacatggtgaaaccctgtccctaccaaaaatacaaaaattagcctggcgtggtggcacacgctcctgtaatcccagctactcgggaggctgaggcacgagaatcacttgaatccaggaggcagaggttgcactccagcctgggcaacgaggtctcaataaataaataaataaataaataaataaataaataaaaacacaaaaaccctgaataaagaccaaattcctaaaatgattatctttggtgaaagagtttggtaataatttttctttttgctttctacttttctatactttattggttttctggttgca

SEQ ID NO: 246164 - DNA, 582 bp, Homo sapiens
tgaacgtagagtaactacctgtggagatatttaaccttttatctgtagctatctgcttaggaacaaaaggaaatgcagtttcttgcatgactcarctttcagcttcatttttttccttttggcggagtgaattggggtcccaagtttttattttcctttcacaaattctagagggcttagagtttattttctttccttaagaaaccaagctcagaaggcagttgctcagaagtaggcagttaattctatagctcaagaatgtcaacagcgctataaatatccttggcctttccttggcctggaagtggctgccacagctccagctattatatccacattccagaaaagaaacaagaattggcaaggaaaatgggtcaaacagtactagggcaagaaagcaaaatttcccagaagtcaagggcagacttttccttctgtcttagcaaaatctgtcagatgcccatctctagcttcaagaaagttatttttagctagatgtgttgctgtctagctatgaacaatatcttgattctgttcataaggacaaagacagcaattgatactgggtcccagcaagtagtg

SEQ ID NO: 246165 - DNA, 595 bp, Homo sapiens
gtaacacatattaaattttgtggaagtatttcttgtaggcatttcttattaggcatttggtgactgggcgggtaggktgatgggcttgtaggtgggcagccagtcagtatcttgagaccagaagtgagctggcactgcaatgccaatgctatgctatagacttttcctctgaatccccaacaatcatagaccttcaagaatctcacggtgacttacccaagccatactttgcatcttttttcaggttcactaaggtgatctccctttctggtgaagatactatgctccatcttttgtgtagcacatctattgggaatttataatttaaaaataaatataacatgctcaggcattaagactgtcagcttgttttaacaatttaaatgttaacaaagtgtgttaattgctcagtcacttaaacatatattttaagtttactgatactgttaacattttatatttttatagtgatttataatttataaaatgactacgtattacatttattcttcataagctattcttttgaaataagtatatttcagttacaaatgattaaataaacctcaataggttaaatgatttgcacaagttt

SEQ ID NO: 246166 - DNA, 524 bp, Homo sapiens
tgggcagggactttaattcacgttttctaagatacccacagatctttcttccacactgtatttctttattttaagcaatgacatttcaataagcagaattcagcaaattcatgrccatattgtaaacaatacattttgtttttgttattgaatctaattacatttgtgaaaagtgatacagatatctgtgtacaaaacaaactggggttaggagactttagcaaaccagacaaatggctgctaggctcataaaacgttagacttttccatatcaagggatgaaaaggagatatgaggccatcaccacttccaggtgtacaaaatgtttaactctctgcaaaggtcagtctttggtaaaatgttaccaggtaatgaaaattttggtgagtatatctcttatattcccttttcttccacatattcgagggcatgctgagaaattcatcctttcttggttttcattttgtatcttttctatttttcctcctacctcccaggttattcctcttcagtctcttctacaa

SEQ ID NO: 246167 - DNA, 572 bp, Homo sapiens
caatataatctcacgggaaaacatccacccagtccagtctccgtgatcctttgatgtcttctgacagagcaagtgatggctctctagtgagtgactttgataaaagcctgtctagtcaaaccccagaagaaactgaacattggtggatgatggatttgggttccaaatggactatgaatgttgtgtcagtcaccaactgaagagaatgtattcatggacaaataaagacacttgcgattttaattgggtactcacttgctcagagtggcaagacaaattccaggtaagggttgaaattttaagtgttaaaaatatcaagttaacaactcattaagctttcatatcattttatgcccattcagcagtagttcttatttccacttatagtttgaagaattaactgcagacagygttcttaacatttgtataatctagctatatggaaatacactattctcaagtgaatatttaatatattcatcaagttggtctttcagcttgctaaaatgaaactcatttcttgcaggtaaaatgggcatttaataacatttaccagtaatttgcttacaaca

SEQ ID NO: 246168 - DNA, 591 bp, Homo sapiens
atcttcacatatcatcacattggagaaaggggcttcaacatattaatttagggagacacaaacattcagttcataacacgtctagtgtgttgaagaaatatccagaaggccartgaagctaaagcagacttggtgaaggaaacaatggtaggacataagatcagagggtctgttagcttgaaatattgggaactactggaaaagcattacccttattgtaaatgagatgggagccactgaagggttttgaactaagaggtaatataatctgaattatgatttaaaaggggcattttatctgttgtaaggagcataacctatagggtgcaagaatgcaagagatgatggtcatttgaaccagagtggtagcaatagcaatggtgagaagcagttggattctggatgtattttgaaggtaaagccaacctattggaaattagagagggattagatgtacagtataaaagagaaagaagagttaactgtagcttgagaaactagagttgtgaagggatgtacttgtcattattgatgtggggaagactaggggaggagcaggattaagaagggggcagagaaaaacaggagtgt

SEQ ID NO: 246169 - DNA, 591 bp, Homo sapiens
atcttcacatatcatcacattggagaaaggggcttcaacatattaatttagggagacacaaacattcagttcataacacgtctagtgtgttgaagaaatatccagaaggccaatgaagctaaagcagacttggtgaaggaaacaatggtaggacatragatcagagggtctgttagcttgaaatattgggaactactggaaaagcattacccttattgtaaatgagatgggagccactgaagggttttgaactaagaggtaatataatctgaattatgatttaaaaggggcattttatctgttgtaaggagcataacctatagggtgcaagaatgcaagagatgatggtcatttgaaccagagtggtagcaatagcaatggtgagaagcagttggattctggatgtattttgaaggtaaagccaacctattggaaattagagagggattagatgtacagtataaaagagaaagaagagttaactgtagcttgagaaactagagttgtgaagggatgtacttgtcattattgatgtggggaagactaggggaggagcaggattaagaagggggcagagaaaaacaggagtgt

SEQ ID NO: 246170 - DNA, 529 bp, Homo sapiens
aattacccactctcaggtatgtctttattagtagtgtgaaaacagactaatacatttggccatgtgccctttgtttgccacagtctctagcacttcctattgccttccttccactcgtttatgttacccgcttgaattgtgtaggcatttcattttgcacytctggtgtgctagactttaaaataatctaaaaagctcgtctgtggatcatttagcaatttccttaacctttctgtcagtggtctgaaaaagggaacaggtttgctgcatttgcttagatagattcttggcatttctccagaaagtctggggctggattaaatcaattaattaatgaaaacatctgtatacctatgtggtaggctctggagacactaagagttacaaagacatggtttatacccttgaggggcttattcgctgttgtggaagatgggtgtacacaacagtagctagtcaagtgttacccagtgctaagggcctagaatgtctgcttagtgagacggacagtaagtgcagtaggtgtttc

SEQ ID NO: 246171 - DNA, 523 bp, Homo sapiens
atggcatacacttctggtatttctgtgggtaagattcaaaattattttctgagaaaaactttggctttgtgctatgaaccattttyacagaatggaattccgtgtaaacacaagtcaaagattcccaactttctttacagagtattaactgtgccacctgcttgtctaaaacatatgggtctctctttactcagcacagaatatcagcatttcaggttgtcaacaacctttaactgactgtcatccactttccattaaggaacatgctagctgaatcttattctgggagctagaatctttatatttgtgaaattatgaaatataaatttgctctttgaccccgtttcctggcatacaagtcttaaaatcctcggaaactcaaaaatgatgtctttttgtatgctaatgagttgactggtggctagagacccctaggtagattcaggatgggggctgatcatttaaaaggccaaagcgggattacaggattagaactttaagctgcattccccaaactgtgggg

SEQ ID NO: 246172 - DNA, 532 bp, Homo sapiens
atgatttattaatagatctgcaaatggtcaaataattttgaaataatttatcaacttttattactcctataatttaaaacatacataaggcttttaaacattaaaatgtgtcataaaacagaactattcttgaaattaaatcaaaggcataygcatacatagttctagttatggggctaccttctttgagttctttcaaccctcatctccttttattttttaaacattatgcttaatactgtgccaggcactctaatcagaagcgttcattaattctgaacttgactatatcaacaccagattgcatataaggctaaaaaagtcttgtttacttgtgataaatatggcccactggaaacaatagataacattctatggtgcctaagcctagtcttctacacattagtaaacgtccatcttcacaaatggatgacacacacacatacacactcatgaatacaaaaatacacttattgtactgcacgaagtgtatttacatttctacgtgtatcaaggccacttgaaatcactt

SEQ ID NO: 246173 - DNA, 307 bp, Homo sapiens
tggaacccccatgctgcaagtattttaaaagcttgcatttgtaagtcatattttattattgttatagcccaacaaattcttcttgcctgctgcacagaaaaagcaaatacatggaaacatcaggtattataktagagaaagaatttaatcattgtgtggtgtgaagcaagtaggatgggagatatttctcaaattcacttccttgagaactgagaggctggggtttttaaggataatttggtgggcagggggctagggaatgggtgcggctgattggttgggaatgaaatcatagggatgttgaaac

SEQ ID NO: 246174 - DNA, 307 bp, Homo sapiens
tggaacccccatgctgcaagtattttaaaagcttgcatttgtaagtcatattttattattgttatagcccaacaaattcttcttgcctgctgcacagaaaaagcaaatacatggaaacatcaggtattatagtagagaaagaatttaatcattgtgkggtgtgaagcaagtaggatgggagatatttctcaaattcacttccttgagaactgagaggctggggtttttaaggataatttggtgggcagggggctagggaatgggtgcggctgattggttgggaatgaaatcatagggatgttgaaac

SEQ ID NO: 246175 - DNA, 557 bp, Homo sapiens
gccccaggacagcttatctggtaccagygttagtgggtctaggcagatcaattctttggcctccaagtaacttcctcaggtgccagcagtagcagcagtggcctaggctggtgggtggattcccgggttcctgggcagcaggcatggcatgagtagtggaagtagccatgataggacaagcttctggttcccaagcagtctgcactggtgttggtagtggctgtgacaggctgggcaggccagtctgcaggtccacaagtggtatatgctggtgggtaccagctgtggtggtagcagcaggttatgtggcccccagaagatgtactcaggtgccaacagtggtggactgggctaggagatctctagggcccctacacggtaggctgaagcactgggagggtgcaagtgagccaggtggacctgtcctgagacctgtcttcagtccccaccctgtggtgtgtacaggcactggcttcagtaggcaggggtcattctcaatttttataagctcaatgaacaaggtgtccatgcggtatacttactagacttataaatac

SEQ ID NO: 246176 - DNA, 472 bp, Homo sapiens
caatgcatggcaaagtgtagatggmatctttttggctttacaacaactatggtggctgtggtggtccatcctttttcttagcccgacttcccctgtatcccagcccagatatcatgatgactcactttagaataaatcgaagtaaccaagccacatattcacaaaattgcttagagtgtgcttagaacatagcatgtgctcaataaatgtttttaaatttagctgtatgagaaagacacctatatacatgagaaacctgctttaatgatccgatttcattcttaccatttatacatacatgctgaaacaggttaaagagggatcttatttgtgctacttaagttaatactgataatggcttttttcctcaacctcttgacatagccttgacacagaattgagctaccccatgatctcagctggaagttttggattgtcatgtgactataaagaaaccttaaccaggctgatg

SEQ ID NO: 246177 - DNA, 472 bp, Homo sapiens
caatgcatggcaaagtgtagatggcatctttttggctttacaacaactatggtggctgtggtggtccatcctttttcttagcccgacttcccctgtatcccagcccagatatcatgatgactcactttagaataaatcgaagtaaccaagccacatattcacaaaattgcttagagtgtgcttagaacatagcatgtgctcaataaatgtttttaaayttagctgtatgagaaagacacctatatacatgagaaacctgctttaatgatccgatttcattcttaccatttatacatacatgctgaaacaggttaaagagggatcttatttgtgctacttaagttaatactgataatggcttttttcctcaacctcttgacatagccttgacacagaattgagctaccccatgatctcagctggaagttttggattgtcatgtgactataaagaaaccttaaccaggctgatg

SEQ ID NO: 246178 - DNA, 627 bp, Homo sapiens
ttcctggtaatgtcagccccatttttctccttcagttgctaatggcctttggtcctagattacttttccttcaaccacctctgataagcttgaagtttcacttgtatgagtctgatatacacaattattcctcaccctctgtggcgtagtcactaggtggtgatcttttcctccacatttctctgagccaaagagaaaaaatgctggagcgtagagagcacctttgttcacatcccatcttttttttaatcgctaattatctgaaatggttggagaccccactgacaagctgtgccaaagtaatatttgagtcaagttaggcttgaagaaggtgtcactgccatgcccatgccccttgcccccagaagccagatcacgtgacttcacttatctgactgggccattaatcattacctgtctgtattcagacaagaggctgctmctgtctagatctttcccatatttgcctgatcatttcacccacactaacgatacttctcacagcatgaatggaaatgaagtataggaactgcaggcctgtttgatggctacacgttcatgaaggtaatttaattaaccaactagactctaaactacagaagtacaggaaagagggcagagttactg

SEQ ID NO: 246179 - DNA, 598 bp, Homo sapiens
aagccttaaaagcaagcatgagctcacatgtccatagcmcccccaaatctcaaagaaatcaagaaatatctgtattctgattttcttttccttttgtgtatgttaaccacaattgcttaaattctcttatttaacctaacaagcacagaagaaaacaattctatctggggaaagtagaaagttttgcagattaatgaaaaaaaatgttttaaactattttcaatgatgatggtatagtttgtgtgaactatagaagatgcatctctatttttcctaattttcatgaggaacctgtgctttttattacagtgaccagtactttgaggacaatgtcacagcccctgactatatgaaaaatgtccttgttctgacgctgtctcctgggaattcccttctaaatagctctttctccaggaatctatcaccagtaagctattattttatgttatagtataaattatatattattattttatttgtcaagggtaagataatttttctccatttaggacccaaattctaaaatgagcaattatttttacttgctctaattcattcaacaaatgttaactgaaaccaactacatgtacagcatttt

SEQ ID NO: 246180 - DNA, 598 bp, Homo sapiens
aagccttaaaagcaagcatgagctcacatgtccatagcccccccaaatctcaaagaaatcaagaaatatctgtattctgattttcttttccttttgtgtatgttaaccacaattgcttaaattctcttatttaacctaacaagcacagaagaaaacaattctatctggggaaagtagaaagttttgcagattaatgaaaaaaaatgttttaaactattttcaatgatgatggtatagtttgtgtgaactatagaagatgcatctctatttttcctaattttcatgaggaacctgtgctttttattacagtgaccagtacttkgaggacaatgtcacagcccctgactatatgaaaaatgtccttgttctgacgctgtctcctgggaattcccttctaaatagctctttctccaggaatctatcaccagtaagctattattttatgttatagtataaattatatattattattttatttgtcaagggtaagataatttttctccatttaggacccaaattctaaaatgagcaattatttttacttgctctaattcattcaacaaatgttaactgaaaccaactacatgtacagcatttt

SEQ ID NO: 246181 - DNA, 564 bp, Homo sapiens
tacgttcctgcctcactggggaaagaggaaaagatagagagagagagaaagagacctggaggaagaaaaagcaacttacttctctatagaaatatgtggcttactttggtaaacttttctctacagctgagcctgtaagctatgacttagggtagctgaggagsaataagaatcacttcccagtgaccagaggagcaagggctcctctacttagaaggcgtttattgtcacgactaggaaggtgaaagggaacttgtgataaatgtgctcaatttaaggaaaataaaaaagtgaaattttcctatgacaaatccacagaggtatttactaggtgtttgagcaggtaattagcacccaaaccaggtttcaggaaatagttctggtcacctcaaatgaagaatatataatgagctgaagagcttgattttcaatggatgatttactcaggacaatagcccaaacagaactgggtaaagggtttacaaatggtaacttgagaagcagtgggcttccttcccagaagcttaatactgtctcctcctcttcaaactctcccctgtcttc

SEQ ID NO: 246182 - DNA, 508 bp, Homo sapiens
aggtataatagagcctcttcattytggagagctgccaagacatgggtttgcccagaatgaaggttttccggaaaagggacatacaggtggggtgaccatatacattatttctcaaaccaggacacttttgagagtaaaagggaaggctattcataattatgtggaggccgggcatggtggcttatgtctgtaatcccagctctgtggaagaccgaggtgggcagattacctgtggtcaggagttcgagaccagcctggccaatgtggtgaaaccctgtctctactaaaaatacaaaaaaaaaaaaaaaaaaaaaaacccaaaaaaaccattagatgggtgtggtggtgcatgcctgtgaccccagatattcaggaggctgaggcaggagaatcgcttgaacccaggaggtggaggttgccgtgagtcaagatcgcaccactgcactccagcctgggcaacagagcaagactgtctcagaaaaaaaaaaaaatatgtggagaaacaggc

SEQ ID NO: 246183 - DNA, 508 bp, Homo sapiens
aggtataatagagcctcttcattctggagagctgccaagacatgggtttgcccagaatgaaggttttccggaaaagggacatacaggtggggtgaccatatacattatttctcaaaccaggacacttttgagagtaaaagggaaggctattcataattatgtggaggccgggcatggtggcttatgtctgtaatcccagctctgtggaagaccgaggtgggcagattacctgtggtcaggagttcgagaccagcctggccaatgtggtgaaaccctgtctctactaaaaatmcaaaaaaaaaaaaaaaaaaaaaaacccaaaaaaaccattagatgggtgtggtggtgcatgcctgtgaccccagatattcaggaggctgaggcaggagaatcgcttgaacccaggaggtggaggttgccgtgagtcaagatcgcaccactgcactccagcctgggcaacagagcaagactgtctcagaaaaaaaaaaaaatatgtggagaaacaggc

SEQ ID NO: 246184 - DNA, 508 bp, Homo sapiens
aggtataatagagcctcttcattctggagagctgccaagacatgggtttgcccagaatgaaggttttccggaaaagggacatacaggtggggtgaccatatacattatttctcaaaccaggacacttttgagagtaaaagggaaggctattcataattatgtggaggccgggcatggtggcttatgtctgtaatcccagctctgtggaagaccgaggtgggcagattacctgtggtcaggagttcgagaccagcctggccaatgtggtgaaaccctgtctctactaaaaatacaaaaaaaaaaaaaaaaaaaaaaacccaaaaaaaccattagwtgggtgtggtggtgcatgcctgtgaccccagatattcaggaggctgaggcaggagaatcgcttgaacccaggaggtggaggttgccgtgagtcaagatcgcaccactgcactccagcctgggcaacagagcaagactgtctcagaaaaaaaaaaaaatatgtggagaaacaggc

SEQ ID NO: 246185 - DNA, 582 bp, Homo sapiens
ggcttagttaacctccagaaagtttcattaagggattctcttttargataactgtggatttctttcttgaaatataagtacatgtgtcaaaactcaacatgtaattgtttcttaaaggttagttgcaaaacagcattgcaaattattttaatgaacttttcacatactgtaatatcaaaattcgatggcctgtcttgcatgttgaatgagtctacccgtacatgattttgtacattatatattcttagtttagaaaatgtgggtacacatgttctcactcataggtgggaattgaacaaagagaacacatggacacaggaaggggaacatcacacaccggggactgttgtggggtggggggaggggggagggatggcattaggagatatacgtaatgctaaatgacgagttaatgggtgcagcacaccaacatggcacatgtatatatatgtaacaaacctgcacgttgtgcacatgtaccctaaaacttaaagtataataataataaaaaaaagaaaatgtgggttcaatgatttctgatgatcttttcatcattgacctaatataaaaaaatcacgtaca

SEQ ID NO: 246186 - DNA, 582 bp, Homo sapiens
ggcttagttaacctccagaaagtttcattaagggattctcttttaggataactgtggatttctttcttgaaatataagtacatgtgtcaaaactcaacatgtaattgtttcttaaaggttagttgcaaaacagcattgcaaattattttaatgaacttttcacatactgtaatatcaaaattcgatggcctgtcttgcatgttgaatgagtctacccrtacatgattttgtacattatatattcttagtttagaaaatgtgggtacacatgttctcactcataggtgggaattgaacaaagagaacacatggacacaggaaggggaacatcacacaccggggactgttgtggggtggggggaggggggagggatggcattaggagatatacgtaatgctaaatgacgagttaatgggtgcagcacaccaacatggcacatgtatatatatgtaacaaacctgcacgttgtgcacatgtaccctaaaacttaaagtataataataataaaaaaaagaaaatgtgggttcaatgatttctgatgatcttttcatcattgacctaatataaaaaaatcacgtaca

SEQ ID NO: 246187 - DNA, 540 bp, Homo sapiens
atccatatactaaccacctcttgaggtaaacagtatattatttccttttaagtaggaagaartagagactctggaaaggggataatgacccagattcaccagctaataaagccaagctgctagaatttaaattagtatctgatttcaaagttgttatttttttgtaaacaacaatatattggctgggtgctgtggctcacacttgtaatctcagcactttgggaggcagaggtaggtggatccccttatgtcaggagttcgggaccagcctggccaacatggtgaaaccctgtctctactaaaaataaaaaaattagccgggcgtggtggcaggcgcctgtaatcccagatactcaggaggctgaggcaggagaattgcttgaactggggaagtggaggttgcagcgagccgagattgtgccattgcactccagcctgggtgacaagggtgagactccatctaaaaaaaaaagaaaaagcaaaacaaaaaacaacaatagcaatatattgtctcctttaagacgaaggacaataatggaa

SEQ ID NO: 246188 - DNA, 543 bp, Homo sapiens
ttcaccttctcatttattcattcaatgaacatttgctgagcacttcctagaggccgagcattgaagtaggctttgagggacagtggtaaatgagactgacaaggtccttcctaacctaacttttaagaagttcaaggttctgccaagcgcagtggctcacacctgtaatcccagcactttgggaggccaaggcaggcggatcacctgagatcaggagttcgagaccagcctggcaaacatggtgaaaccctgtctctgctaaaaatacaatacttactagaggccaagcattaaagtaggctttgagggacagtggtaaatgagactgacaggtccttccctcatggaattttcattctagtggggattccaacaatagatagggaagtatgtacatattgtgccaagcaytatgaaagacagagcttcacatgtgttgtttcattagctattgatataatcagtatctggccccaactcacttttccattttcctttcccatgacatacacactcacatactcacaagcaccatgcccttca

SEQ ID NO: 246189 - DNA, 610 bp, Homo sapiens
tagtcagtttttccccctaaagtttatgtgcagacatggggaggagagtattttagacttaaaagtgtacaggtagggatgaaatttatggaatcctgatagactgaaggggggatataaacaatgaccaagtcagctattgctgcttggattctttatttcttcagactgcaagggaatgagtaaggggtggttgggtggtgatggggrggtggtacggtcgtggcgggagagcagtaaacaatctttcatctcattcagctgttcagtgggtgggactaaaggagataagagttgagtgaagctatgaaataaatgtggaagctacataggtgatttgcatggtagcattgtcttattctatgatgggacaacatgatggaaccaggtcttcataacacagttattaaaaatacatattttaccacatcttaggcttacagaattcaaattcacaacaaataacagaaatgttaagttgattttaattagttcttatcctttaaaaagaaaggatattgtctttttctaatgtagcttaacaatttttgttgcaggctttggtttggagatatttgatgcatacataatacatgaaaggtagtgttaa

SEQ ID NO: 246190 - DNA, 621 bp, Homo sapiens
aagtgcaaaagccatgaagtgatagtatgcactgtatgtttggggggtagttagggattcagtgttggggaaagtgaagtgagcaaggggaggaagtgtagcaggagatgaggccagaagtaagagtagagccagatcttgctaggctttgttggctagtggctttcattggtacacattggaactacttgaggagctttaaaaaatactgatggatgggtttcgcttgcagagattaatgtaattgatctggaggtgcagctgagacattaggattttataaaagctcccccaagtgattctaagatgctgctaaggtagagaaacactgtaggccatcattgggacttcggcttttacttttgaggaagttcggaagtcattggatgattttgtcatggaataattttgtaattaactttaaaactggggttttgtttattacatttaattaccttaactataaaacggactccagttgtttgaagtgggttgtgatataactcatagatttgtatcagtataaaaatgcacacttttcacagtttggccaaggaktatctattttattttctgtgcttcattagttgccttttagttttcacagttcacatatgtctc

SEQ ID NO: 246191 - DNA, 621 bp, Homo sapiens
gaagtttaagggtataggacagtttgcctcagttggagattattattgccttcttttgaaaagggaggcattaggacaaatttttgaaggatagaattggggccaagattgaaggagcagtcctgttggsggaaataatagccatcatttacataacttttttatgtgccaggtaatgttttcagtactttatgggcattatctgctaacttacgattcttacaacagccctatgaagtaggtattgttatcccattttggagctgaagaaactgaggcatagcgagattaggttacttgcccatggttacattgctaggagatggcagaaccaaacccagtctactgctcagttagtctgggatgttcttaaccaccatgcagaggctaatctggggatactgggtatagtgcagtgtttataagagtacatccaatatgccttgaacttagatgaattcagtgaaagagagaatgaatgagaatgagaactagagaacttaaatagtacaagtaatttttcctgttattccactggaatgagcatctggcctagagtgggtgtgaagtgggagaggtgcatttgctattctcctagtcattattagcttccacatagtt

SEQ ID NO: 246192 - DNA, 532 bp, Homo sapiens
gtgatgaatgttttatttttaggcttgaaatttaacattcttgagtagtgatagaatatgtggctttcatggacaagtcctcaaagataagaaggacatgggttattttaacatgcttattaggttgaagtacatgtgttgtattactgactctagttactcttgtttcttaattttcatagagtaacaccttaaattgtaaatattatgttttgttttaataaggacaaaaaaatttaaaatccagttatttccccttaaactgcagtraaatgagggaatgataatgacattgttgcaaaacatgtataatgcatttcaaagtcagaataaatgtaaaataggcattaatttggaacattcagaaatttatttggatttattaaaatattagtttgaagaaatatgaaatgttacagatattctttttatcttgagtaatttttttcttaagccagtatatatattattctgaactctattcttaaatgttttctaaataatgcagaagtacacttgatttgggttgttt

SEQ ID NO: 246193 - DNA, 559 bp, Homo sapiens
ttgatcctttccttcaaaagacttcagaattaatttgcttcctagggcaattataatataatatcattctccctttgggagaataaatgcttcgcccaggatgggcaactccttcgtagatgtgactgcagcatttttgcagcttgctgataaagtggggtagtgctaaggtcacttttctatacctgggtgatgatctctgctctccacagaaaaaaataatggaacaatacaggtcctagctgacatgagtaagaaaggtacaagatagtaaaggaaacacatcacagaacaacatttttactagaaaccagagctgcaaccttcctcagatatctcttaagatggctaataacagtttcttggaaactagcctgttaataactattgcatttgagaacaggattcaatatataaawacaagccctaatatagaggcacatagcaagcatcactaaaatattgagctgaaatcatctccatattatgaaattattattcagaaagcaatagctttcatatatatatgaatagaatggaaaagagtctatttataata

SEQ ID NO: 246194 - DNA, 479 bp, Homo sapiens
tcctttccttagtgtatatttttgttaactttgtcaaagaccagttggttaaaggtatacggttttacttctgggctctctagtcttttcattgatgtatgtgtctattttttataccagtaccatttgttgttttggttactataaccttgtagcataatttgaagtgaggtaatgtgatgcctccaggtttgttcttttggcttagaattgctttggctattccagctgtttttttgttccatatgaattttaggattgtttttttctaattatctgtgaaaaatattgaacctgtagattgctttgggcagtatggtcattttagtaatattgatgctcscaaaccatgaagatggaatgtttttccatgtttgtgtcatctacactttctttcatcagtgttttgtagctctctttttagagacctttcatgtccttgggtaaatatattcctagatattgttttatgtagttat

SEQ ID NO: 246195 - DNA, 604 bp, Homo sapiens
caagattaatagcagatttctcagcagaaaccctaccaagctagaaaagatctgggtcttatctttagcctccttaaacaaaacaattgtcagccaagaattttgcacccagtgaaactaagcttcataaatgaaggaaatatacactctttttcagacaaacaaatgctgaatstacaaggaactcaaacaaactagcaagaaaatagaaaaaatcccatcaaaaagtgggctaaggacatgaatagacaattctcaaaagaagatatacaaatggccaacaaacatgaaaaaatgctcaacatcactaatgatcaggaaaatacaaatcaaaacaacaacaatgcaaataccatcttgttcctgcaagaatggccataatcaaaaaatcaaaaaataatagatgttggcatggatgtggtgaaaagggaacacttttacactgctggtagaaatgtaaactagtacaaccactatggaaaacagtgtggaaattccctaaagaattaaaagtagatctaccatttgatctagcaatcccactactgactatctacccagaggaaaaaagtcattatacaaagaaaaaaaaatacttgcacac

SEQ ID NO: 246196 - DNA, 589 bp, Homo sapiens
gctttgaatctttaggtttcataagtaggtaagatttagacttgaaaagagtagaattcatggagcaggagagaggaaaaagggaacatttcttggcagtcagtgtgaaagataggtgagaaaatattgacttgtttagggggyggggtggttcagttacactagagtggaggttttgggtaggcaggttgtagaagataacatgagtataccagaggtcgatgacattgagaataccagggacctagtcttgaattcccaactctgaagagatgtaatttggaggtggagccatgagagaaatgaagagattgcaatatctgaattgtgtaacatgtacagtctggtctgtccttaagaggcaagaagcatgaaagggttgcaatgatcataactcaacaagaggagatctagaggggcaccaaaggacataatctggaacaaaatggctagatgactttttttttaatcatattgttagcacttggtagctgtttttgtcctagagtagcataaaaaccagagaagaactgtggactcaattctggagaactgggttggagaattaattatagaatttatatagaat

SEQ ID NO: 246197 - DNA, 589 bp, Homo sapiens
ttcctggagcttacagtccagtgaggaagacaaacaccaaatacattaagcacataagtatatgtcaggtatatacacagctgtcaaggacagtcaagcagagttgaggggatggagagtgaccagggcagtggagtgctgttttattcaaagtggtttggagaatctctataataagcaagttttgagggaagtgagccatggaaagatctgagggamcaaccttccaagtaggaggaactgcaagggcaaaggttctaaaagggatgcttgcaagatgtggttgaggaaaaccaagtaggcaaagtgaggctgcaatgaggaggaggaggaggaggagggacctaggagtcagatcatgtaagacctcatagggcttgataaggactggaattttctctaaataagatgggaaactgcgcagttttgagcagagaagtgacgtgataggaattaaatatgaaaggacactgcttactattggggaagaggctgtgggtgggcaggggtgtacattgggacaccagttaggaggctgttgcagataatctgggtggggcataatagtgattgagatgattgtgccgaa

SEQ ID NO: 246198 - DNA, 589 bp, Homo sapiens
ttcctggagcttacagtccagtgaggaagacaaacaccaaatacattaagcacataagtatatgtcaggtatatacacagctgtcaaggacagtcaagcagagttgaggggatggagagtgaccagggcagtggagtgctgttttattcaaagtggtttggagaatctctataataagcaagttttgagggaagtgagccatggaaagatctgagggaccaaccttccaagtaggaggaactgcaagggcaaaggttctaaaagggatgcttgcaagatgtggttgaggaaaaccaagtaggcaaagtgaggctgcaatgaggaggaggaggaggaggagggacctaggagtcagatcatgtaagacctcatagggcttgataaggactggaattttctctaaataagatgggaaactgcgcagttttgagcagagaagtgacgtgataggaattaaatatgaaargacactgcttactattggggaagaggctgtgggtgggcaggggtgtacattgggacaccagttaggaggctgttgcagataatctgggtggggcataatagtgattgagatgattgtgccgaa

SEQ ID NO: 246199 - DNA, 585 bp, Homo sapiens
tgtcacacaatcacaagagggactaatgtgaagcagattttatcagtttttctggatattttttagatagcaccaatgattaaaaaaaaaaaactccacggaattaatatgccatctgaagtcatgcatttcttccctctgacatacyggctactggaccactctttctctaaagccaaaatgtcatcttgttcatttcataaactgtcacattggaatcactagttcttaactttggcagtggtcttggaaagcctctggatgcctccttatcatgatgtttttaaacatatgaaataatatatatagaatttctaaagaaaccaattacattgaagtactattctatccaaagatgcatgtatcccaggttaagaacccatgaaattttcatcttctgatgacagtcactcagaaagatgtcaaaagtatcttataattctcaacaagaaacatgacttaaatgggaattagaaagaaatatgttctctcttaacacatcaaaaaacctacctagcagtttgctcagattattaatcctctgaaggtgaatatagtagcgcagtagaaggatccatgtaatat

SEQ ID NO: 246200 - DNA, 592 bp, Homo sapiens
gtgttaatcatctctaagccctttgtatgtttgtaatttttatagtcagggaccagattttcaagaatcctgttgttgacagaaaaaagaattccataaattttatcatagttctgaccccagatgcattttacctttctgaaaaaggatttcagcttccacctcatgttcctccactgctgttgttctacagagcttcagtgccacatcaaacagatgaagagcaggtaaccacttcgaggggtccttccttttattcttgtaatatacttgcttggccactgtatgtcctaaaagaaaaacagttsggtggggaagaacaaaaaaatacacggtgtttataacaagcctccaagttaccagactgctctcacagtaatgaaatctatcaagaactttggtagtttttacagtttttagcatccaagaaatgttttaaagacatataatacccaatatttcaatgaactacagtaataaccctttgaaattttttctttgatacatttctaacatgttttcttcttttttaaatgaaggataatctctcaaaaccctttccttctaaaattcacaatgctctacagaacaa

SEQ ID NO: 246201 - DNA, 592 bp, Homo sapiens
gtgttaatcatctctaagccctttgtatgtttgtaatttttatagtcagggaccagattttcaagaatcctgttgttgacagaaaaaagaattccataaattttatcatagttctgaccccagatgcattttacctttctgaaaaaggatttcagcttccacctcatgttcctccactgctgttgttctacagagcttcagtgccacatcaaacagatgaagagcaggtaaccacttcgaggggtccttccttttattcttgtaatatacttgcttggccactgtatgtcctaaaagaaaaacagttcggtggggaagaacaaaaaaatacacggtgtttataacaagcctccaagttaccagactgctctcacagtaatgaaatctatcaagaactttggtagtttttacagtttttagcatccaagaaatgttttaaagacatataatacccaatatttcaatgaactacagtaataaccctttgaaattttttctttgatacatttctaacatgttttcttmttttttaaatgaaggataatctctcaaaaccctttccttctaaaattcacaatgctctacagaacaa

SEQ ID NO: 246202 - DNA, 593 bp, Homo sapiens
attgtggttaaaaataggtctcatcttgaattgtaactcccacaattcccgtgtttcatgagaggaacccagtgggaggtaattgaatcataggggcagttctttcccatgctgttctcctgatagtgaataagtctcatgagatctgatggttttaaaaatgggagtttccctgcatgagctctctctctttgcctgctgtcatccatgtaagacatgacttgctcctccttgccttccaccatgattgtgaggcctctcagccacatggaactataagtgctttaaagctttttcttttgtaaaaaaaaaaawatatatatatataggttataaaaaagaatttgttataataaaatatacaatttataatgtcaataggccttggtttctgacaggtctaggttggaatctcggccttgagtcttgttagttgtgtgaacttgggcaagttatttaacttctctaagcctcagttttctcatatgtaaaaaagtacaaattccaacctctcacagttgttgtgaagattaaagtagataatatattttcagtatttgtcataaggcctagtaaaaataattgtttaggaa

SEQ ID NO: 246203 - DNA, 622 bp, Homo sapiens
ctgcccccttctgcccaggaacctgtctgcctcctgctgccattcattacatgcaggcttggccccgactttgctctgtgattggagcaggtgccaacagcaaggagaagccaggcagtgggagcaggcacttccaagacttcccgggcccccaagaatgtagggatacctgagtttacagctgcagtttgggcagctgcaggtgtgctagtagggtggagkttggagtggggatcctgcctgttccatgaagtgggaggcccaggtctacagccctggtttgggcagctgcagctatccctgggagtgtggggctcccactagctccatggagtgtgcagccccagccatgccttcctgctgcagctggtgtgatggcagtggtaggcgatctggagtggctgctgccatcattaggagagcagcagtcataaaggaaaagaactaggacaggtagaaattacctgtctaggggagagaaggacaaaggatggagcagagccctaagtgacatggtagggaacagaaagatagccacagcacaagtaggatagttgactggaagcagaggaaaaacacctctttttttaggtctctgaatggcagatcaaggtggaaaaag

SEQ ID NO: 246204 - DNA, 591 bp, Homo sapiens
gatcacctcccactagattcctccctcaatgcctagggattatgattcaagatgagatttgggtgggaacacaaagctaaccatatcagatgggaaagacagagtccttgacccaaaaaggctgacagtctagaaggaagggatgtgtcttttgcttacatacaaagacaatggttttgtgtttaaaatggatgattgttttgcacaaagatggggagaatgaagtgggccaggtgacaagacttgcccaaagccacacagctggtaactgtcatagccgagtcgggcagactccagagcctgttgttaaccattgtcagtatgttaagatggctctgttgagccttttcagtctgaagattcttgctcattcaaatggaggggctagattaatatgtccctgagagagagttagaacccggatttgtgaagcagtatgtgtagtggttagtggacagactctggagagtctagttgcctggctccaaatcccagctcagctctattttctagtcrtataatcttaggcaacttgtttaatctcaatgctttgatctctctgtttgtaaaataagaatgaaaatagtactt

SEQ ID NO: 246205 - DNA, 584 bp, Homo sapiens
ctttgtgttaattaatgaagctgtaaattcataatttgtgggttttttttttttttttgagatggagattcactcgtgttgcccaggctggagtgcgatggcacgatctcagctcattgcaacctctaccttctgggtccaagasattctcctgcctcagcctcccagtaactgggattacaggtgcctgcccccacgcctggctaatttttgtatttttagtagagacagggtttcaccatgttggccaggttggtcttgaactcctgatctcaggtgatccacccacctcagactcccaatgtgctgggattataggcatgagccatcacgcccggccatgatttgtgttcttttctgtatatattttataatagagtaaaatgcttattttttaaaaaacaattttgtggtgacttccaatttgaagacattcatataagattggcacatcccttttaccccctgaaaattatcacaagacaagaaagaaaacaagtaacaaaaacacaaattccattttcagtaaatcagagaagagctaaaaatcctaagccacaaaatgtgtggaataatgcccaaag

SEQ ID NO: 246206 - DNA, 530 bp, Homo sapiens
ttttaatccaagaaagtgacaaaaaagttaacaaaaaccagcctccaaatacaatrttcacatttaggttcattatgcttttttaagaataaaatgaatgactggcttatttaacaagtagacaagaaattaataaaaacttgttctctaattttttttttttttttttttttaaccaggattcagacccacaaggctgtaactcattgtggtcattctacacaagtatatacctagattggcatgaagtgggtccccagcaaacatttgttttctttccgtcatttttgttctctcttccctgtccttcccccaatcaataaccagttctatgaccacaaaagccgtctttattttccatttttcagcctgcccaggatgactttggctgtactagctctcgctcgtgataacacggtgcctcttttagatacactgatctccaaacatagcttcctggtgcatccttcttcactgtgtcaagacttatgctccaaatgagagagggagatttgccaactggtcaatct

SEQ ID NO: 246207 - DNA, 598 bp, Homo sapiens
tatgtgtgccatttcagcagtttagaggtatgaaactttgtgccttacctgagacacacaagttagctatctttcatataaaattattagaaattgctatttgggtattttgagaactttgtcaacagtttgaaacaatgcatttcatgaacacttttatgtttttcctcaggtcccatttgatatctcactgccrtctatattcaatcttgagagactttttgatctggctaatggttgcattttatcaggaggaagccttttcaactggatagtgtcaattattccctgaatatcctatacacggtaaccttatacaggatttaattgttgttgtttctcttcatttgagctaagtttttggaacggtcctcttataacaacaaacataaaattgtttttttacacaagctaaatttctttaaaattattattttgaggaatgtcttaaattgtacctgaattaaatgacggtgctgctgcttattaaaactatcttacagagctattcatagaaaacaagtttatgtgcagtgcaactgttttcacatttggagtcatttatgtttaggttgtttttggacaggtccataaagca

SEQ ID NO: 246208 - DNA, 626 bp, Homo sapiens
tttgaatagtattatagtgccagtcaagttgaagaattattttgagaccaattgttcatagtttaaagaaaaaagattttaaaattataaacctatatgtgatgagccaaaaaaattatttgttgcagcctttcaaactcaaagctagataaatgcattagttagagaaatgtacacaaaaacctagagactaataaaattttatacagttgacactgatgaatgcacatcctgaggtctaagacctaaatattccatttgcagtaatcacccatggaaaaaaatttagccaatgaaatcatggcactttccaataataaaataacttgttagattttaaatgtagctgcaaacataaagactcagttcataactcatctgcagaattatacttttgccttgtaaatggctcaaaacttttcaaagaagcatgcctagattaccttttgtttttatttttaaaatttgtacgggtacataacagttgtactacaaatggctcaaatttacagatgtggctagacttgcagttttgcttatrtttgtctaacagtatcagcaccaactattcaaagatctcttcctatgtcaatgattggcaactttttctgaatctaatggtttat

SEQ ID NO: 246209 - DNA, 569 bp, Homo sapiens
attctgtttatacggaaacatttaaaggaagcattatctatctaatcagctttttagtactttggtactttaagctcttaattaagaccctttgttaatgactgtgataaaagacaaatcaaaatgaggatatgaaaataatcatatgcagatttttggagatttaaaaccygacagcataattgacaacatttttcaagagaaagtaagaattgttcataacccatataatactggagaagaaaatttgaaaatttaaaaatttgtaatttacctttctgtgctgaagaaaccaaaaagaaaaaaaaagagaataaaaagccttgtataaaagtgttcattattttttgccagcaatattattagtcatagataatcgtgaaatcattctgaacaaatatagtcatctagaaagaaaatatattcgtgtcatatatcttgtaatgtataaggctacattatacatatctttgacttacatgtctttcctttcacctgctctttctctacccttcagtaactctgagccaaaaagacaacataatttccaatgctttccaggaacaagc

SEQ ID NO: 246210 - DNA, 512 bp, Homo sapiens
ttagaagtatctcattaccttcatcattcatttgttcactcacttattcaacaaacatacattgagcacctactatgtgcctggcactgctctatagttggagttagttacaaagctgagagacaatctgatgagggagggaggcatgttagcaggaagtccgtgtgaggactgaaccagatttgaagaaggggaggcaggttcaggacacgcagcaggaggaggaatagtgaagctgagagaggagtgtgcacttctgccagcggttmtggatagactttatttttttctacttacagacataaacttctggcaattccttattaagtaaatctacttgttttatttgttgacaaaagtgacaattacttttacttattaaatagaaggacacagttttcatttctgggagttcctcttgttctgccttacaaaaatttaaagtagcggatctgtgctcacatagtaaatacattaagggaaaatattacttatgtttggagaactttagt

SEQ ID NO: 246211 - DNA, 565 bp, Homo sapiens
ctttttagctgtgtgacccatgaagaagtgattcaactgctttagggtcaagtattttttatctgtcaattaaaagagttgacgtcaaatgtccaagctccatgttagttgttattattatgatttaatgttttcttactggagatatcagatcgtctcttctacttatgttgcattttaggactgtcctcatcagcarataaattcatggatttttaaagggataatatcaataatgcttgtttaagtagcaattcaatttacttactgtttttggctgttgctctttgctagctctctctctcagacaatattgacagggtttgagacaaactcagcaacctttcacctaatcgaagtgcatttgctcaggctgctcactggccccttagaacctgctttaggtaatgcttgagatgggggttagacttctccaaaaccagctttttaagtggattctgcaatagttttgtttatttgttgattttctaaaacacatataaaaggcctatctgagcaaaagcacatgtcatattttgtgtttataatgttcatgtccacagcc

SEQ ID NO: 246212 - DNA, 442 bp, Homo sapiens
tgcccacgctatacatcatttgaaatatatagaataactctcctcttcatattataatgtacaaacaaaattaagaatttttaggaaattcagaattggtcaggcgtggtggaggaaatttagaatttagaatttttaggactgcttttaaatgtaggttatataaaaatgagtttagactcttgtgctcatatgcacacaactaaatgaatacaaacctcctagttacaggttttataatttgaaacaagagtttttaaaataagatttctagcactagggtttatatgggtaggaaattgatcattacrtcagtttcaactaaatgcatttgaaattgtttttaattgagccagcaaaacaatattttaagattccatttcattaaaattttaaatctctttaaaagttcaaaatttcaacagctgtcagttaaacattt

SEQ ID NO: 246213 - DNA, 565 bp, Homo sapiens
attatgttcattaacaattttcctaatcacttttttgaacgacatatccttatccaaaatgaaattatctgttaatttacctcatgtttaaggagaagatactcaaagttaaaagtcaaaatattgccacatattaagcaatgaagatactacttataagaaagcctgaataatatagatattcccaaatttagttttaagaagttgcacttccctttatcactaaaacagcattccccaaaacacacrttacctgccaaaaatttaaaaatcatatcaggcccctctcacaaaatattcttggcacattttgttgaggaacgctgccctactccatcaattgccctgcatatcactctgaccccagccagccttcgcataccaggcatgtgattcccaaccatctttatctggcttaccaagactgctgctgatctattattgctctaccctacacagatgaagccatggtccatgtcttagttctgaaaagcatagtcaagacttaaccaaattatcctgagaatttaaggaaatgtaaagaattctaacacaaccaagccac

SEQ ID NO: 246214 - DNA, 573 bp, Homo sapiens
tattataaatcgttacaagtatgtaatagttaattaaaaggaaaactacttaggtctgtaggtttaaaatatctaaaaagagaaaagggtatcttttttaaaagcctataaacatttaaaaacttccccagagttctgattagtaaagaattgactgcacaaatataaaaatcagcgagtaggggagataaaatgcaaaaatagggtttttttccttcttcttctttaatgaggtagaaccagtattttaaaaaacttgttatccattgggaaatgtaaacaatcatggtgtttttgtgaatcttttttggtatagggcagtggttctcaacgtgggacagtttgcctcttctggagacatrtggcaatgtctagagacatgtttgctttttacaatgcagaaaggatgtaaaggtgctactgacatgtagtatacaaagggcagggattatgctaaacatgctttaatgcacaggatagcctctcaaaataaagaattatctgaccaaaaatgtcaatagctctgctgttgagaaaccctgctataggagaaaataaaataggaaatgtaag

SEQ ID NO: 246215 - DNA, 470 bp, Homo sapiens
gtgacatttgagtcctgacaatgtagagatgacagaagtaaaaaaagtgaaggagatgcagaaaatgttttttaaaatgtttaggaataaagtcagggctttttctgcagaacaaactaaatattccaaaaactccccaatattttaaaaatggaatggcaatgtcagttttattcagtcctcggcctctatacatggccatctaaagtgatggttccctttgaagtaaatgcgtctgatccactgaagacaccagtgtccagtggggaagggtcagctttgatggtgctggggggaatcattgaagaaaggaacaatgtggagcccagagaatcgcctcgtgagaatcttactccagagggtccaagagagaaggaagcaatatgacagctttaaatctctgagctccacaatttgattttaaaccacttgttggagaggtttrtcagacagaacagtatgatgaaagc

SEQ ID NO: 246216 - DNA, 568 bp, Homo sapiens
tacttctgtagcccttgcaaaggctattttctgagattcttggtcaatggcaatctctcctgaagactcttcaggaaacagagatacaggttcagtatgttcatgtgcctgatgaccaacttcagtatctctctctgtgactgattctgccccttttytggctgttccactttcaaattcctcatggaatgggactgtggggaaaacatcaggctcaccacctgaaaaatgttctgatgtttcagggtaagtctcaggcttccatgtaacttcaagagactcagttgtttctgtagattcattaggttgcacagcagtagacaattccgttttggctattacaaatggatgagtatcactttcagagctgtccgagaaattttgagaaggtgcaacactttcaaactggccacgcctagcttctgcagcttctgggtccttgggcacagtggtaacgagatgcttcccatttatgtactgcacagatggggtggttgtcacatcagtagcatttgcacactcttcttcttcttcttcattttcttcactgtggtataggtctatttca

SEQ ID NO: 246217 - DNA, 609 bp, Homo sapiens
tgtgggacttagcctacttctctatctatctatctatctatctatctatctaaaattggccctgttactctaaatgamcttgactaataaagattttgttgttgttgttgttgatggagtctcattctgtcacccaggctggagtgctgtggcgtgatcttggctcactgcaacctccacctcccgggttgaagcaattctctggcctcagcctcctgaatagctgggactataggtgcctgccaccatgcccagctaatttttgtatttttagtagagaaggggttttgccacgttggccaggttggtctcgaactcctgacctcaagcgatctgcccctctcggcctcccaaagtgctgggattacaggcatgagccgctgcgcctggccccaatagagcttttaggcattggaaagcagcccagatttcagtcaggcctctgcctttgaaaactgtctgcagttttgtctatagtggtctttgagattgtgaggggacccttattggagtgagacatctctgttgccttctagtgcagtttgggtgtagcctgattcagcagctcactatttgcttctagagatgaataatgggagcttagactgg

SEQ ID NO: 246218 - DNA, 628 bp, Homo sapiens
tgtaatttcactgctccaatctttacagttttataaccatgtttacatttagttatgtataacaaatttaatatagaagaaccaagttaaaattagtcatttctcaataatgtagagagcatgggaataagttaaattgactatcatgctgctaatgggggttttaagttttattaggaaaatctgtctcatgtctcgcaacagaagcagagaagatggcccataggacaaaaatgccataagtacagtgaygtgaaacatctgtgggcagacagctgcaaaggttggaaaggaacttttgtgggaagagaatcgtgttgatttatgttggcttcctcaataataaagttgaaggaatactggtagttttccagagccaaaacttctccatgtgaatgcacctattggaaggacactgttagaataatctggaattgtttttacctttacaatagtcatcagaatacagtggtatttattcttaaaatatctcttcgtagatattgtgctttataaaattatttccttttgtggaatggttgaaacaaatggcacaaatcctcagatacactgacttgtgatcaaaatcagctgttaagttgatgaaaaagccacccaaactgaaaag

SEQ ID NO: 246219 - DNA, 637 bp, Homo sapiens
agtttactcacctctaactgctcacctatactaatattatttattttctatgagaaattttatcctccaacattttgagctttggcaagggaaaatcctaaagcagatgttcaattaatgaatttcaaggcaggtgtataccttaataaggaaaagtgcatatgtgcctggagaaccaacctttttatgtatcaaggcacaattttccagactggaaagtccttggtgcatgtgtgaacttgtataaatctattcacaggaatagaatacacctttatatatactgtatatccaagtaagcaaaaataccacccatgctattytaaaccaaggcattcaataattttttgctgcactcagcgagtcatataaatcttgtttttttttttttttttttactactatgaaacaaaacatgctactcaggacacacttatgttatacttgctcaaatggatcttaatagcaacttacggtgctctagctagagggcaactgtagttagcagttaaaaaaatctgaaagaacttttcagctcataaaagttttatgagctgaaaaatgctatggggtgtgtttaacagtggttcaggggatactgaaaactttactcctgtctatttcaggagtaatttgc

SEQ ID NO: 246220 - DNA, 600 bp, Homo sapiens
ccatattgtacctcaacaatttgcttaggtagttgttccaccaaatatcttctttcatcagttagttctactttctacaaagcactaggacatgaacacaattcarctaaattctttgccactttataacaagaatcacctttcctccagtttctaataacgtatttctcatttccatcttagacctcatccaaatggcttttaccatccataattccaccaacatcctgcctgccatcttttaggtaatctctaaaaagactgaggctttctctacgtctcccctcttcttctgagccctcaccagaatccacctttatgttccatgtataacaatgcaggctttttgtagcatgcagctccaaattcttccagcctgtatccattaccctgttcccaagatgcttccacatttttagatatttgttacatcagcaccccactcttgataccccttttcttcttagtccatgtgggctgctataacaaaataccttagactgggtaatttataaacaataagaatttgttactcacagttctggaggctggaaatttaaagatcagggcaccagcaaatgtaatgtttgctgagcgttc

SEQ ID NO: 246221 - DNA, 600 bp, Homo sapiens
ccatattgtacctcaacaatttgcttaggtagttgttccaccaaatatcttctttcatcagttagttctactttctacaaagcactaggacatgaacacaattcagctaaattctttgccactttataacaagaatcacctttcctccagtttctaataacrtatttctcatttccatcttagacctcatccaaatggcttttaccatccataattccaccaacatcctgcctgccatcttttaggtaatctctaaaaagactgaggctttctctacgtctcccctcttcttctgagccctcaccagaatccacctttatgttccatgtataacaatgcaggctttttgtagcatgcagctccaaattcttccagcctgtatccattaccctgttcccaagatgcttccacatttttagatatttgttacatcagcaccccactcttgataccccttttcttcttagtccatgtgggctgctataacaaaataccttagactgggtaatttataaacaataagaatttgttactcacagttctggaggctggaaatttaaagatcagggcaccagcaaatgtaatgtttgctgagcgttc

SEQ ID NO: 246222 - DNA, 562 bp, Homo sapiens
tgaattaatctggagggtgtttccttctactttctctgttggcttctccagtgatactggttgagaagagggtgtaatgaggataataatctgtaatgggaggcatcttcagttctgagtatagacatttagagatgtcagacacaagggctcccagacttgaagactttaaagaccagagaattaaaaaaaaaaaattagaacaccataataaagctgccaagttttaatttttccaataagaatattaaaataaaaacttcttcctactaatattatcatttcataaaataaaagacattaacataaaacagaaataattttgaaaggccaattctccaaggtaaatatctttagctacaggaaaactcactacatgtctttgtgtttctgatttcactacagtccacctttctgcattctgccmtaacccactgtttttgtttgtcatttctttcctaggccttagcacagtccctcacatgtcataggtcactatgggaaccacttatcaagacaatacaaaaaattcctagggtggtaattccatagtgtttgcctc

SEQ ID NO: 246223 - DNA, 600 bp, Homo sapiens
ccttagtttgcagatgaaaaaagcagacctttgaaaaagtgttaactttctcaaggtcaaatagctggtgaattcaaagatgaatggattccttcattgtcccagacacactgacctggaaggcagttacagactttaactgatggtttacctacttaaattgagacatagagtctgaaatgtaaagtgattttgctaacactatggcagacaaagaaaacatagcctagcaatcaaaagaaatttcaaagtagctcatgttctatatttgagcaatgcttcttaaaaatcccatttctcccctagcccttccttcccaacctgtggccrctttggtcctttctcaccctaactctcctaaaagactcctttctcagtcctagccatctgctcctctagccctttcccttctcttctctcattcagacttttcaccattctcttgattgtgaatcaaaaaaagccaactctgcaggacatctgtgagaagatagatatatcaccttgagacagaacatcacctcctggcaccagacacactgcttgataggctgagcacatgctgatactcaggaccacttcccccttacaccaggtgcc

SEQ ID NO: 246224 - DNA, 600 bp, Homo sapiens
ccttagtttgcagatgaaaaaagcagacctttgaaaaagtgttaactttctcaaggtcaaatagctggtgaattcaaagatgaatggattccttcattgtcccagacacactgacctggaaggcagttacagactttaactgatggtttacctacttaaattgagacatagagtctgaaatgtaaagtgattttgctaacactatggcagacaaagaaaacatagcctagcaatcaaaagaaatttcaaagtagctcatgttctatatttgagcaatgcttcttaaaaatcccatttctcccctagcccttccttcccaacctgtggccactttggtcctttctcaccckaactctcctaaaagactcctttctcagtcctagccatctgctcctctagccctttcccttctcttctctcattcagacttttcaccattctcttgattgtgaatcaaaaaaagccaactctgcaggacatctgtgagaagatagatatatcaccttgagacagaacatcacctcctggcaccagacacactgcttgataggctgagcacatgctgatactcaggaccacttcccccttacaccaggtgcc

SEQ ID NO: 246225 - DNA, 600 bp, Homo sapiens
ccttagtttgcagatgaaaaaagcagacctttgaaaaagtgttaactttctcaaggtcaaatagctggtgaattcaaagatgaatggattccttcattgtcccagacacactgacctggaaggcagttacagactttaactgatggtttacctacttaaattgagacatagagtctgaaatgtaaagtgattttgctaacactatggcagacaaagaaaacatagcctagcaatcaaaagaaatttcaaagtagctcatgttctatatttgagcaatgcttcttaaaaatcccatttctcccctagcccttccttcccaacctgtggccactttggtcctttctcaccctaactctcctaaaagactcctttctcagtcctagccrtctgctcctctagccctttcccttctcttctctcattcagacttttcaccattctcttgattgtgaatcaaaaaaagccaactctgcaggacatctgtgagaagatagatatatcaccttgagacagaacatcacctcctggcaccagacacactgcttgataggctgagcacatgctgatactcaggaccacttcccccttacaccaggtgcc

SEQ ID NO: 246226 - DNA, 550 bp, Homo sapiens
agtataacaaggtgtaagggagtatatgtgtgtaagtgttgtgagggtagaaagggggaacaactttccatggatggaaggagtattttgttactgacatcatttaaaattgtagaagcacagtgataatacaaagcaggctgacttctagtcatttttattayagtttttaaattctccacagacaacgtacccctttgttacctgcccaggactgactgctcttctccaaacccccttccatctcccatacccttggtaagacactggtattaagtgctctatgagcaaaataaaagaagagattgatttttttctgagaaagctacagataaaataacacggtcatggacatttaaactggattttgaaaagaactgagttcaccaagttaactggaattagaatataataaaacattattccctactttttttttggaatctactgttttatgtacagtagcactgtttgtttatacttgtaaccagtatttcctccagctacatcagctaaaaggtgtcccagttttgcttcaagatgagaagaa

SEQ ID NO: 246227 - DNA, 523 bp, Homo sapiens
aggtgtcctgtgatccatgagaaactaaggagaggagggtctctagagggtggacattgggcagwggggaggcaaggatggcaaggacactttttattgtacaggtttgtacacatgttggttattgaacctattgaatggcctacatatttaagaaatagaattctcccacaaaatgcctcgaccgtatggctaagcgactctgaaccattacaaaatcacttctttagaagaatatttaaagaaagctagagattacttttttgttgaattaagattttgcagtcattttacagaatacaattacatatattttagttagcagatgtcctttacaaaacatgccattattttgaaactgagataattttagaaacaaaataaaaaaagtacacagtctgaatttctcaataaccatataatggaatttagatgattttgaataacataaggcagtatctgaaaactgttaattcagttccactgcacgtttctcctagttacaaatagcttcaattttgca

SEQ ID NO: 246228 - DNA, 523 bp, Homo sapiens
aggtgtcctgtgatccatgagaaactaaggagaggagggtctctagagggtggacattgggcagaggggaggcaaggatggcaaggacactttttattgtacaggtttgtacacatgttggttattgaacctattgaatggcctacatatttaagaaatagaattctcccacaaaatgcctcgaccgtatggctaagcgactctgaaccattacaaaatcacttctttagaagaatatttaaagaaagctagagattacttttttgttgaattaagrttttgcagtcattttacagaatacaattacatatattttagttagcagatgtcctttacaaaacatgccattattttgaaactgagataattttagaaacaaaataaaaaaagtacacagtctgaatttctcaataaccatataatggaatttagatgattttgaataacataaggcagtatctgaaaactgttaattcagttccactgcacgtttctcctagttacaaatagcttcaattttgca

SEQ ID NO: 246229 - DNA, 620 bp, Homo sapiens
gaagtgtggttttatggtcttcacacagacgacatacaccagatttatcttagcaatatttgctcctctgagaaggaaatttcactgctcaagtctcaccttgaaatagattacttggagctgggcgtggtggtgtgctcctgtaacagctactggggaggctgaggcaggakgattgcttgcttgagaccaggagtttgaggctgcagtgagctatgaccacgccactgcactccagattaggccacagagcaagaccctattacacacacacagaagaaatagcttacctgctgctaagctactcctttttccttacatatagtaattgctgatgtgctggagctcaccgttcagcctgcaccatcccaggctaggggttaagatcaagaacattatttcatgtgcctggacttgagtcctggctctgccattactctgtgtgcccttgagcaaggcacattctccctctcagcttcagtttcctcatttctaaaggcagcttcgaggattatatgagctgatgtatgcaaagcacctaccacagggtctggcattgaccacaggctcaggaaacgttaagcgtttgtgttgtgaggctttgcaggtgatgaaactat

SEQ ID NO: 246230 - DNA, 620 bp, Homo sapiens
gaagtgtggttttatggtcttcacacagacgacatacaccagatttatcttagcaatatttgctcctctgagaaggaaatttcactgctcaagtctcaccttgaaatagattacttggagctgggcgtggtggtgtgctcctgtaacagctactggggaggctgaggcaggaggattgcttgcttgagaccaggagtttgaggytgcagtgagctatgaccacgccactgcactccagattaggccacagagcaagaccctattacacacacacagaagaaatagcttacctgctgctaagctactcctttttccttacatatagtaattgctgatgtgctggagctcaccgttcagcctgcaccatcccaggctaggggttaagatcaagaacattatttcatgtgcctggacttgagtcctggctctgccattactctgtgtgcccttgagcaaggcacattctccctctcagcttcagtttcctcatttctaaaggcagcttcgaggattatatgagctgatgtatgcaaagcacctaccacagggtctggcattgaccacaggctcaggaaacgttaagcgtttgtgttgtgaggctttgcaggtgatgaaactat

SEQ ID NO: 246231 - DNA, 466 bp, Homo sapiens
gcagagctgagattaggtctggaagactccagaaagtagggggagtgcaggatttctcttgaagctgcatgttatggacgcataaaaaagttcttttcagagaaagatgcattcttcccactttttataagactgaggaaatgacacttgtctgtggcaaactattaaaatattagaattaagatactattgttagcaaaagggaaaacaataataataataataattagaatayttggctgggtgcagtggcttacacctgtaatcccagccctttgggaggccgaggcaggtggttggcctgagctcaggagttctagaccaacctgggcaacatggtgaaacctcgtctctaccaaaaatacaaaaacttagctaggtgtagtggtgtatgcctgtggtctcagctacttgggaggctgaggtgggaggatcacttgaacctgggagggggaggtcgcagtaa

SEQ ID NO: 246232 - DNA, 466 bp, Homo sapiens
gcagagctgagattaggtctggaagactccagaaagtagggggagtgcaggatttctcttgaagctgcatgttatggacgcataaaaaagttcttttcagagaaagatgcattcttcccactttttataagactgaggaaatgacacttgtctgtggcaaactattaaaatattagaattaagatactattgttagcaaaagggaaaacaataataataataataattagaatatttggctgggtgcagtggcttacacctgtaatcccagccctttgggaggccgaggcaggtggwtggcctgagctcaggagttctagaccaacctgggcaacatggtgaaacctcgtctctaccaaaaatacaaaaacttagctaggtgtagtggtgtatgcctgtggtctcagctacttgggaggctgaggtgggaggatcacttgaacctgggagggggaggtcgcagtaa

SEQ ID NO: 246233 - DNA, 466 bp, Homo sapiens
gcagagctgagattaggtctggaagactccagaaagtagggggagtgcaggatttctcttgaagctgcatgttatggacgcataaaaaagttcttttcagagaaagatgcattcttcccactttttataagactgaggaaatgacacttgtctgtggcaaactattaaaatattagaattaagatactattgttagcaaaagggaaaacaataataataataataattagaatatttggctgggtgcagtggcttacacctgtaatcccagccctttgggaggccgaggcaggtggttggcctgagctcaggagttctagaccaacctgggcaacatggtgaaacctcgtctctaccaaaaatacaaaaacttagctaggtgtagtggtgtrtgcctgtggtctcagctacttgggaggctgaggtgggaggatcacttgaacctgggagggggaggtcgcagtaa

SEQ ID NO: 246234 - DNA, 605 bp, Homo sapiens
atagctagtatatagaaaaggagttaagcctgctaagcacagtggacaaaaagacagatcaacaggtaaaaatagcagggagttagattttaattcaacacaagaaaaaactataatttacgtttgtactatccaaaacagtagccatcagccccaagtgaccactgagcactgatctagctagtctgattgagaagtggtgacatgtaaaatacacaccagatttctaagatttagtacaatacatatgaatgtaaaacaatgtaaaacattccattaaatttctaacttttttttttkagactgagtctcgctctgtcacccaggctggagtgcagtggcatgatctcagctcaatgaaacctccaccccccacgttcaagcaattctcctgcctcagcatcctgagtagctgggattacaggcatatgctaccacgcccagctaatttttgtatctttagtaaagatagggtttcacaacattggtcaggctggtctcgaactcctgacctcaggtgatcccctcatcttggcctcccaaagtgctcagatgacaggtgtaagccaccgtgcctggcctaaatttctgaatattgaatacat

SEQ ID NO: 246235 - DNA, 598 bp, Homo sapiens
tggtttgtaatatccaggggggaggggggatgatattactccccatatcgcagggggtgtgatatgtttcataacatccaggggtggggagaggagggtgatattactgtctacatcgtggggggtgtgatatggtttgaaatatccagggagggagaggggggtgatattactccccagttckcagaaagtgttcacccctctgcgatgtggttgctaatatctgaggggggagagggcggtgatattactccccatatcgcggggcgtgttgacgccactgcaatgtggtttgtaatatacaggggggaagggggggtgatattactccatatatcgcggggagtgtgatatggttcgtaatatccaggggaagagagggtgatattactccccatatcgatgggggtgtaaatccccctgtgatatggtttgtaatatcctaagggggatagggtgatattactttccctatggagggcttgtacaattccccatgatatggttcgtaatatccaggaggaaagagtgtaatattactccttatatcgcacgggatgtacaccccctgtgatatggttcgtagtattcagggagg

SEQ ID NO: 246236 - DNA, 598 bp, Homo sapiens
tggtttgtaatatccaggggggaggggggatgatattactccccatatcgcagggggtgtgatatgtttcataacatccaggggtggggagaggagggtgatattactgtctacatcgtggggggtgtgatatggtttgaaatatccagggagggagaggggggtgatattactccccagttctcagaaagtgttcacmcctctgcgatgtggttgctaatatctgaggggggagagggcggtgatattactccccatatcgcggggcgtgttgacgccactgcaatgtggtttgtaatatacaggggggaagggggggtgatattactccatatatcgcggggagtgtgatatggttcgtaatatccaggggaagagagggtgatattactccccatatcgatgggggtgtaaatccccctgtgatatggtttgtaatatcctaagggggatagggtgatattactttccctatggagggcttgtacaattccccatgatatggttcgtaatatccaggaggaaagagtgtaatattactccttatatcgcacgggatgtacaccccctgtgatatggttcgtagtattcagggagg

SEQ ID NO: 246237 - DNA, 631 bp, Homo sapiens
gatattcttcatagtatcctaaggagatattacccytaatatcacagtgtatgtacaccatatttgtacactctttaatattattcataatatcctcagaagatattacttttaatgttacagtgggtgtacacacattgtgtacaccctgtgatattatttgtaatatcctagggtgatattactcttaatatcaaagtgggtgtacaacatgtgtgtacaccctgtgatattatttgtaatatcctagggagatattactcctaataggacagtaggtgtacactttgtgatattatttataatatcctagaaagatattactcctaatatcaaagtgggtgtacaatgtgtgatattattcataatatcctaatgagatattactcctaatatcccagtgggtgtacaccctgtgatactgatcataatatccaagggaaatattactcctaatatcactgtggttgtacaccctgggatattatttttaatatcccagggagatctttcctttaatatcacagtgggtgtacaccatgtgtttacaccctgtgatattactggtaacatcctagggtgatattactcccaatgtcacagtgtgtgtacaacacgtgtgtacacccag

SEQ ID NO: 246238 - DNA, 598 bp, Homo sapiens
atattggacggggtatacgccccctgatgatattatttctcatatccagtggcagagagtatgacttactcccaatattgcagggggtgtacacccctttgtaacattgtttctaatatctaggcgtggggrgaggatgttattactcccaatatcacagatagtgcacacagcccctgtgatattgtttataatatttagggggcgagagggtgatattacttccaattttgctggaggatgttcacattttctgtgatattattattaatatccacgggaggaaaggatgatattactctgaatatcacagggggtgtagacctccccggtgatattgtttcttatatccaggggagcagaggatgatattactcccaatatcgcagtgggcgtatgcccctgctgcgatactgttcttaatatccaagggagagaggataatattactcccaataccgcaaggaatgtacacccccctgtgtcattgtttctaatatccaggaagggagggtgatattactcccaatatcatagcacgtgtacaccctccccctttgatattgtttacaatatccgggggggagaggatgatatt

SEQ ID NO: 246239 - DNA, 607 bp, Homo sapiens
ttactcctaatatcatggtgggtgtacacgatgtgttggatagtactcaaaatgtcctcgagagatgctactcctaatatcayagtgggtgtacaacatgtgtctacaccctgtaatagtattcgtaatatccttgggagatattactccaaatatcacagtggctgtacaccaggtgggtacaccctgggagagtattcacaatatcctgggaagatattacacttaatatcacagtgggtgtacaccatgtgtgtacaccctgggatagtattagtagtatcctggggagagatattactcctaatatctcagtgggtgtacacacatggtgtatacattattcgtaatatgctgggcagatatttctcctgatatcacagttggtttacatgacgtgtgtacaccctgggacattattcataatatcctaaaaagatattattcctaatatcacagttgttgtgcaccacatgtgtacaccctgggacattatttgtaatatcctggggagatattactcctaatatcacagtgggtgtaccccatgtctgtacaccctaggacattattgtaatatcctgggaagatattactcctaatatca

SEQ ID NO: 246240 - DNA, 607 bp, Homo sapiens
ttactcctaatatcatggtgggtgtacacgatgtgttggatagtactcaaaatgtcctcgagagatgctactcctaatatcatagtgggtgtacaacatgtgtctacaccctgtaatagtattcgtaatatccttgggagatattactccaaatatcacagtggctgtacaccaggtgggtacaccctgggagagtattcacaatatcctgggaagatattacacttaatatcacagtgggtgtacaccatgtgtgtacaccctgggatagtattagtagtatcctggggagagatattactcctaatatctcagtgggtgtacacacatggtgtatacattattcgtaatatgctgggcagatatttctcctgatatcacagttggtttacatgacgtgtgtacaccctgggacattattcataatatcctwaaaagatattattcctaatatcacagttgttgtgcaccacatgtgtacaccctgggacattatttgtaatatcctggggagatattactcctaatatcacagtgggtgtaccccatgtctgtacaccctaggacattattgtaatatcctgggaagatattactcctaatatca

SEQ ID NO: 246241 - DNA, 582 bp, Homo sapiens
taatatcctaggaggatgttatttctaatgtcacaggttatgtacccctttttgatactatcagtaacattttagggatatgttactcctaatgtcacagggggtgtacaccctttgatattattcttaatatcccagggggatgttactcctaatgtcacagggtgtgtataccctgttatattatttgtaatattttagggtgatgttactcctaatatcacagggggtgtataccctgtgatattattcrtaatattgtaggggaattttaatcctaatattacagagggtgtacaccctgtgatattatttgtaatctcctagggtgatgttactcctaatgtcacagggcatgtaaacctgtgatattattcttaatatcttaggggaatgttaattcttagggggatgtcacaggggatgtacaccctgtggtattattcctgatattctaaagagatgtgttcctaatgtcacaggggggtgtccaccatgtatgtacaccctgtgatattattcgtcttatccttggaagatgttacacctaatgtcacagtgggtgtacaccatgtgtgtaca

SEQ ID NO: 246242 - DNA, 582 bp, Homo sapiens
taatatcctaggaggatgttatttctaatgtcacaggttatgtacccctttttgatactatcagtaacattttagggatatgttactcctaatgtcacagggggtgtacaccctttgatattattcttaatatcccagggggatgttactcctaatgtcacagggtgtgtataccctgttatattatttgtaatattttagggtgatgttactcctaatatcacagggggtgtataccctgtgatattattcgtaatattgtaggggaattttaatcctaatattacagagggtgtacmccctgtgatattatttgtaatctcctagggtgatgttactcctaatgtcacagggcatgtaaacctgtgatattattcttaatatcttaggggaatgttaattcttagggggatgtcacaggggatgtacaccctgtggtattattcctgatattctaaagagatgtgttcctaatgtcacaggggggtgtccaccatgtatgtacaccctgtgatattattcgtcttatccttggaagatgttacacctaatgtcacagtgggtgtacaccatgtgtgtaca

SEQ ID NO: 246243 - DNA, 582 bp, Homo sapiens
taatatcctaggaggatgttatttctaatgtcacaggttatgtacccctttttgatactatcagtaacattttagggatatgttactcctaatgtcacagggggtgtacaccctttgatattattcttaatatcccagggggatgttactcctaatgtcacagggtgtgtataccctgttatattatttgtaatattttagggtgatgttactcctaatatcacagggggtgtataccctgtgatattattcgtaatattgtaggggaattttaatcctaatattacagagggtgtacaccctgtgatattatttgtaatctcctagggtgatgttactcctaatgtcacagggcatgtaaacctgtgatattattcttaatatcttaggggratgttaattcttagggggatgtcacaggggatgtacaccctgtggtattattcctgatattctaaagagatgtgttcctaatgtcacaggggggtgtccaccatgtatgtacaccctgtgatattattcgtcttatccttggaagatgttacacctaatgtcacagtgggtgtacaccatgtgtgtaca

SEQ ID NO: 246244 - DNA, 542 bp, Homo sapiens
tccaaatccatggaatgcagggagcagattctatacaaccccagattctccctgggaagaatgatgggcagggcagcttttcagagccctacagcagtatcccagacctactgctctccctcccattctcttctcactcccccatcctgtctggaaagtccagctttgcctggtcacatttggctttctctgatcagccatgtggtggcagggggaccatcgacatctcaattctatctcctaggctgcccccacaatccaggcagcctctccctgcgcaatgtaagccacctggtctcccaattcctgctcccttccaatccattgtccttacagcagccactggttcccttgatggcctcccagaaattaacaacctttttttttttttttttgagatggastctcgctctgttgcccaggctggagtgcagtggtgcgatctcggctcactgcaagctccgcctcccgggtccacgccattctcctgcctcagcgtcccgagtagctgggactacaggcgcccgccactatgccccgct

SEQ ID NO: 246245 - DNA, 542 bp, Homo sapiens
tccaaatccatggaatgcagggagcagattctatacaaccccagattctccctgggaagaatgatgggcagggcagcttttcagagccctacagcagtatcccagacctactgctctccctcccattctcttctcactcccccatcctgtctggaaagtccagctttgcctggtcacatttggctttctctgatcagccatgtggtggcagggggaccatcgacatctcaattctatctcctaggctgcccccacaatccaggcagcctctccctgcgcaatgtaagccacctggtctcccaattcctgctcccttccaatccattgtccttacagcagccactggttcccttgatggcctcccagaaattaacaacctttttttttttttttttgagatggactctcgctctgttgcccaggstggagtgcagtggtgcgatctcggctcactgcaagctccgcctcccgggtccacgccattctcctgcctcagcgtcccgagtagctgggactacaggcgcccgccactatgccccgct

SEQ ID NO: 246246 - DNA, 620 bp, Homo sapiens
atttgaaaccagcctgggcaacatgatgacaacccaagtgttcacactgctgcactccagcctgagtgacagagtgagactttgtcccaaaaaaaataaataaagaaaataaaacacagatgcctatgcccactctagatctactccatcaggatctccaggtgtggggccaagcacrgacagttattttagatccataggggattctgatgatgcctctgcacttgctattctcataaattgatgctgaccctgaaattggatttatctttcttgaaaaatactggtattcagggttttaagttattcatgatcagacttatagaaagataaatcaaactgatatggcctcttttgaatagagaaagaaggcagcccttcattggaagggacactgtgcctctaaacataggcacaggaggctggagttgcactggggtggacatgtcaccagggtggagcacatcgtgtgtcaggcacctggaacttcaccatacatgcagagactgtgacagcgtgtataagatcatgacagccttactccatctatgctgccaagcttaattctcaatgcagcttaggatgctgagcagaattttgctgctcaaagagtttcagat

SEQ ID NO: 246247 - DNA, 508 bp, Homo sapiens
tcactgtactatccctgcaacttttctataaatctaaaaacattccaaaataaaaactttatttgaaaaaacaaaaagcaatatatgcttaagaaagtgacctatatgcttatctatgcgtagaatatctctggaaggatacccaaggaattagcaatcatggctgccgccagcgagggaacacaggtgactgggagaaagtggagagagacaggtaaaagasggtggattccttctcactgtgaggcatgatttgtttttggcatgcacatatattaccttcctgcttaaagaatgagtaaaaagctgagatggtagagagtagtgagtgggtgtgctcgtgtgtgtctgggtgtgcccccaggtgtcagggcacagttcaaccaacaactgcaatgggaagcaaagaagaatgagcccccacagccatggcagggccttgggctgagcccccagagttacactctgcctgacttgatccacctctacaagttgaaagagatccagc

SEQ ID NO: 246248 - DNA, 619 bp, Homo sapiens
aggcattggaatcattcgggcatggggttaaatcccagagccaccactaactagatctgtcattttaagcaagctatctgaactttcattgcctcggtttccacaaccacaaaatgggaatttagtacgtatgtcctaaaggactgcagaaagaagcaaaataatacgtctaagcagtgtagcagaagacctggcacttaacagattataagtttcccattgctgctgtaacaaattgccataaagttagtggcttagagtgatgtaaaatgtattaaagtcctggaggtcagaaacctaaaatggaccagcaggccttcctagtgcttccttctaaggctttagaggagaatccatttcttaccttttccagtttgtagagtctgcccacattccttagctcatggccacatcactctaactctgtttccatggtcacatcyccttctctgactcttccatgcccgcctcttataagtacagtcacaattatattgggcccaccagataattttggatgaggctctcatctcaagacggatccataacttaatcacatcttcaaaatcccttttgccatacatcataacatttatacaggagtcagagtttagaaggt

SEQ ID NO: 246249 - DNA, 596 bp, Homo sapiens
tcaaatagcaacaagaacttcaaggaggagattcatttgcaactaggtgctaatgaaaccaggtcctccttccaagaaaatcaaactgtgtaactcagaatagccaatttaggatgcaagaggcatttggctaattatactcaattgtagacctgttatccatggtgttaaacaaggactaaaggttaaagatactgattaataattaataaactatctcattaaaaaaagaaatcattgcaatattttgctctgcatattctaggtgaccttttcctcccccatttttcttcatattttggatgaatttatctgtcagtggaaatgtcttgaaagaataagttcactccaccttcacaaggatggtaatgatgatgatgtttatagcagctaccatttatcggggaactgaccttgggcctcacgactgtgctaagcacttaacakacaatgtttcgttttatcattattatgacctgaggccctgaaaaagaatttgagctcccagtggtttgagaaatgatcccaggaaacactggtaagaggaaagagaagtgagacagggaagtaaaaggaaacaataaatggtaaatttt

SEQ ID NO: 246250 - DNA, 546 bp, Homo sapiens
gttataggaaatatcccaaagcgcccatgtcctaccattccagggtrcaaaagagcacgaacccacaagaagatattggaagatttactgagccacagggaaatgaggaaatgagagcaaagtaaggaagttatataagggtcacacacacacacactcaaaaaacccagggttaaggttagctgcagcacacagagacttgcagcttacatttagggagacgaataagtttaaagaacagataaattaaaaagactaaggctccatacacgtcagagccctgacttaacctcaaccatccaggctcaagttaaaccaacgaaagtgaccaggcatagtggctcatgcctgtaatcccaacactttgggaggtcaaggcaggaggatcaaggccacaagttcaagaccagcctgggcaacacagcaagaccctgtctctacaaaacatttaaaaattacccgggcatggtggtgtgcggtggtgagtatagtctctgctactcaggaggctgaagagggaagattgcttgagcccaggagttcaag

SEQ ID NO: 246251 - DNA, 605 bp, Homo sapiens
catgtaaaattctcgggtctcatcccttttccaattaggtatttaatacaactctgatcctggtgccaccacataataatttacacagaacacttaattagcttcttagataaaaataacatgtaatttgtttggtaattatatgtttccacaactgctgaaagcaactcattataggaatttggtatacttaggatagattaccttaattctattttctgtttatccaattagatttgccggtcttaattgtactataaattgtgttgagctggtgaagatgactatgaagttgttgttccttcagatttcatggttggtatgcatgtcgctggtgtttgctccaggcactgactaactctgtctgggttgtgaaaacaaggacactgtaagacctttcataccwttcaaagaagaaagtggacaacgccttccgctaagggcctccttaacgtggtgtattccagtgtgtggtatactgatggtgtacaagatcattttagatggtgcagggatacattttcctcttaaattttcaaaaattcaggagccattctactatattaaaaaatataaatagcatatctgaaccataatttcaagca

SEQ ID NO: 246252 - DNA, 465 bp, Homo sapiens
ctgatgtccaaaggcaggagaagaagagtgtatgagagcaagaattcacccttcctctgcctttttgttccatctgggtggcccccagtcaattgggtggcacctgccgaccttgagaataggtcttccccactcagacagccaactcacgtgccagcttcctccaraaacatcctcacagatgtacccagaaataatgctttgccagctgtctaggtatccctttatccagtcaaattgacacctaaaatgaaccacacagggttgtgcctgttgtggcacgtacctttcctgcttctttacctgagacaattcacacatcccattcaggattctgtgagtatccttttttgttaaagtgatattagtatttttttgtttagatcataaaatatctatttttaatacactaaaataatacctcctttgttcataaaactaatttgttcataaacatgttttaaa

SEQ ID NO: 246253 - DNA, 617 bp, Homo sapiens
ctagcagtgcgatgctatgaggcagtgcaccatacactatccaaggggctatactggtattgaactcctaggtgttaaggagaaggtccttggtagattggaaagatccttcaagaatgagcagtggcagccgagtgtggtgactcatgcctgtaatcccagcactttgggaggccgaggtgggagaatcacttgaggccaggagtttgaaaccagactggccaacttggcaaaacatcgtctctactaaaaatataaaaattagctgggcgtggtggcaagaacttgtagttccagctactagggaggctgaggcataagaatcacttgaactcaggaggtggaggttgcagtgagccatgatcaccccattgcactccagcctgggcaacagagcaaaactctgtctaaaaaaaaaaaagaaattttttttggtttttctacagtgacaaagttaagtcactaaatacaagaccatgtaattataatagacttcatcaaacatttggctrttacatgttttggagattaaggggttgcctataggtaaacataacacactaacatatcagtgtcatttaaaacatatgttttaagtctctttatgtgaattaaaa

SEQ ID NO: 246254 - DNA, 564 bp, Homo sapiens
aatagacgtaatgttcacccatagtcacattctttcagtttcgtattacataaaaaactaatagtccataaaaatatggtaaagttaagctacacttagaatagacatgaaaaaaattttaagccaaactagatggtctgaatagcatattgaatgatgaattagaacttaaagaatgcctattatagctttccagttctgtaattttaaatgtatttattagaaagtagattaatttacattttgatgtcttcattataatgtggatgtgacaacttcrtactcattttatacttctctatgagatatttggttcctctcccaagggtcgtgagtttgctttgtctcccacagagacagcatggttttctgggatgtttgacaactagctttagttaggcatgacggttgttagtgacttttcgtgaaattaaggttagctctgaatagtcatgcttcagaaatgatcattcattttggttatgaaatttttcttgaagacttattagcatcactcctgtgtagcacagggtcatattttattggcgcttttatccctcatct

SEQ ID NO: 246255 - DNA, 594 bp, Homo sapiens
aattcctttcatttctctttcatattagagtgttatactgattttttaaattacttgtataagtagkttatattcgctataaatttcatttcagaagggggcattaccaaatatttttatttaaaacagatattgagtcttctaagatcaagtccaaatatgccaaagtagctggaccagcggtttgctaataatgtcagattatatcagaccgaaatatctagccaaggaaaagcacaatggagaacacagcacagagaccttcgggctaccgcttagaatggctgagcccagatttcacccaccaagacagggtgcgcaagacagctggcacaagagtgacagcacggtagtgtcactctggaaaatggacagaatccaagcgtcacaagccctctgtggaagcaacccactgtcagggacatctgcaggctgcacctcaccgcatgcacccccaatctgatgggaggaacatcctggttttccttttaagcaaactctcctccatccttgttcctgctccacggagttcaggtgagggaaagccagccacccccagctccagggggaatgggacccaggcttgggcaggaa

SEQ ID NO: 246256 - DNA, 588 bp, Homo sapiens
agaaacaagggctctgggaacctggagtcaggagaacctccaggaatggccacaggctctagaactacacggtctgggtttaaatcctggttctgcttttgactagctgagagacttgggagtttcttaacttctctaagcctctgtttcctcaaaatgggaatcatcacatatgatcagtcaagggtgaccactaagcgtgatctcagtccctggctaaaaaggcagaggcaggctcatacccctgccctaacagtggactcactgcactgtggccggcgcctgcagtgtgctgggcagctcaacatgtggactctggaggcagactgcctgggttaaagtcctgctgctaccacttttgagttgtaggaccttgggcaggttaagtgcctccattttcccacctggataatgggacattatyagtacctacccaatgtatagtttattttactgtgcttagaacagcacttgggacatagtttatgttacgagttcttttatatttcatgaataatattattacaatatcattattttagccactctcacttcttccccactatgtggacttttaaaatgcaagaa

SEQ ID NO: 246257 - DNA, 575 bp, Homo sapiens
ccaacaggtaggtcaccaaacaagacatcttctgagtgctccctggctctgtgtcctgtaactggtatgttgcttcctctctgcccaggtgatggtgtggatccacggaggggggctgatggtgggtgcggcatcaacctatgatgggctggcccttgctgcccatgaaaacgtggtggtggtgaccattcaatatcgcctgggcatctggggattcttcaggtaagaaatyggactctcctcactgcactttggcccccagaacgaggatgctaggacccagctctggtcatgccagccctcaggggagcttagctaggttccacagtaaggcatccaagccccttcgtaattggacactacctaccctctcactacccagccactcatccacttgcctctgagcttttgcatgtgctgttccctctgcctggaatgcttattctatccgaagaacacctcttcatcctgcaagacccagcccccagttacctccactgaaagactcatctcctcttcacctatgtttctccagcacattgcttttctctgtcatgacacttagcagtcagccc

SEQ ID NO: 246258 - DNA, 606 bp, Homo sapiens
cccagcccccagttacctccactgaaagactcatctcctcttcacctatgtttctccagcacattgcttttctctgtcatgacacttagcagtcagcccagcaggtgaaggttgacacatctgacttctcatggaaaggagggaaggggcagagtcacagagggagctcagggcatgttgtgggtgaaggaatgggggctgcagatggtggggtgtgggagcatctgaccccttcctgtgggagtgttgggacccactcagctcattttctgcttgaaatttggcaagtgtgggaagcaaggatggagtcttcccatcaggtctccatggggacaggagtcagatctccttcaaggcgcaactgctatgaaccttttctaaggttctcctccatccatgccagtcaggtttcttcctgaacacgccactcagttggtctcattgcggtcatcaatgacctccccctgctctccacccaacctctcaggacytcccagcagcagcagatggccactcagcctctgtgacatgcttccttcccagcccctttcctggtcctccctcctccctgtccacaggcctctcttgtctccctctccctcctta

SEQ ID NO: 246259 - DNA, 490 bp, Homo sapiens
cgggggaactggggtcacctggaccaggtggctgccctgcgctgggtccaggacaacattgccagctttggagggaacccaggctctgtgaccatctttggagagtcagcgggaggagaaagtgtctctgttcttgtgagttttcctgtcaccaggcccaaccccacgcttgatgtgatgctgatgagacctcttggacacctgtcaatccagctatggatacctctgattacaatacctgaattcaggactggccctactcacagcccagcatcagggggtagaaagctaaagaccagctctccttggcccccaggaagctcagagctcagcttagtgtcctggggccatatgaatctccagttgcagcctgcaatggtggcattctcctcttccagcttggttgagctctctctctctctctctctttctctctctccttcmcactcattttaacataaggactcacatcccttctcttgggaagtag

SEQ ID NO: 246260 - DNA, 531 bp, Homo sapiens
acccacgggtctacagtatcttctgctgctccctgccactagtacaagttgggcttgggatagaatgccactttcctctttgatggagggaagggatgtcgctcttgaactctgttgttgcctgtgatctttgcagcaaattgctatcactgctgggtgcaaaaccaccacctctgctgtcatggttcactgcctgcgacagaagacggaagaggagctcttggagacgacattgaaaatggtaggttgcctgttcccgtagcccaaaccctgtaaacttggtcccagacttcttcatttcagctgtcctcttgcccagggacagtttcctgggacaatttctcaactctcagtatctgaatggggaatmtgatttgtccttttttattgtaaaatgccacaaatgtaaaaaaagaaagtcaaaaaataacatgataaaaaattgtgtaacaatccccagtcctgaccaaaatttaatattttgccattcttgttttcagatgtatttttaagaaattaaatgttacatat

SEQ ID NO: 246261 - DNA, 475 bp, Homo sapiens
gtgcagcattaggggatagagtttgtgggtggcttcaatttaagtagcaggatcagggaatggttcaatgagaaggtggcatttgagccaagctctggaggaggcaggaagccagctgtcaggaaacctggagaagcctattccaggcagagggaacagtcactgcaaagaccctgacakaaggggccagtctggctggagaggaccgagtgtggggacagactggcttgaggctaaagaggtaatgggcagtgggagagagatcaattaaagtacttggatttggattcagagcaagatgggaagcctttggaggttttgaacagaggagtcacatgatcttagatctcacaaaggtctctgtctctggtgttcaaatagactgtaggaaaggggcaaagtggatgcagttgaccagctgggcagccactgcattgccataatccaggcaagggctcctggctgcttagacagg

SEQ ID NO: 246262 - DNA, 470 bp, Homo sapiens
ttttgtagtgatgtcactgtttagagcgaacccaagagtagcgctgctgtctggcgttcctgagctaaacaggctgtgctgtgccttacggggaaggtgcctgtgtgagacaagcttggatgaggcaggagctgcagtgctgctggccgtgcatttggtgttgaaaaatccacataatagcacattcagaaaaaggagaaggaaattggccgattcatacatgaggctgtgatagaaagggctaaagtaacacctattgtgtgggatggagccgtggaagtctctttcaacagaaacccacacataaaagaaggttgatgaaaatgttgtggccagaggtttgcaaaaacctaacccagtatttcccccttgagtgatgaccctgtattctctaattcagtactcacgggggctttatcagaagcaactgccaggactaccgaaaatcaaytgtggacacacagaggaaa

SEQ ID NO: 246263 - DNA, 588 bp, Homo sapiens
ctgtgtgctctttagtcattgccagcaaaataaagagcacctgttgtatgcagtgtactataaacyaggttcttaggatgcaaaatggagcaaacttgtcacgagttccagtctttaggtgaagctgaccgagggcactttctcccgggcttgctatctcaaaacacagctcactccaagttgtttggtggtttgtctctttgtgggtctgtctcccaaacaggaaaaggcacaatgagggcagagactgtgactttttaatctctgtgtttctaatgcccaagataagtcctagatcacaggaatgtggtagaaggtgcccaagaaactgctgttgaataagctaatgaaatgctccaagccctcaaagacctccaaccgtattcagaaacaacaacagaaacactcagtggtaactaataaagtgaagccacatacaacagtggggcaggggcagcctattcattagtggtcttagctgtggagtcctgggttccagtttctagctgtaaggctttggcaagtctccaagcctcagtttcctcacttgtcaaatggaaataatggtgctcagctcagaacattgtt

SEQ ID NO: 246264 - DNA, 625 bp, Homo sapiens
taggagtggtttggcctcacaaattagagttgggaagatatcccagagaggctattatcattctgatcattttgtttcaacccagaattggagttgggctttattatagtgaatcaaacagaagacagctgcacttctggcattcccttgtgcctgacgagatctggtaagcagtggtcctgtgggaggaggggagggaggctggtccagagaaggaaagggcagctgttttgtgggggtgatggagaatctggtggcccaggcttccaccctgtcccctaggctgacaacacagtaggagaagtcggagcagcacagataagcctcaccttaggcacttagtgggcttctgaattttccccaatttaattgcaccccatcctacttctggagattggatagcttcatttttatctcctccccaaaggcactgatacacgtagtctctatctggggctcaatttgttcctctacagcggatcgggagtggtcagaactaagtgttcatgaatgggtttcaaaatttttcagaatcttctgagattaaattcaaacttctgtttgaatgaatttgtgctcatttttggggaaaaaggatccawacattcatcaagttttcaaatat

SEQ ID NO: 246265 - DNA, 606 bp, Homo sapiens
tatacagtttcataaactgcaagcgattattttgtttcctaagaacaatcactatgcaaatgaaacctccagctaatacaaacagggctgttaaattcacttgccaatgtttatgaaaagaaactcagcctggccctaaccaagctcgctaagaaaatgtttaatcacaagacacattcgagtgaggaaattaggcaaataagaaaagatgtcctgacttcgctcccagagccccctcccacctcccaccccctcctttattcggcaagacaatgatggtgaaatgaaaaggttcccagaagacggacagatgtcaaggcttaagaaggaaaagacagaaaatgcagagattagggaagcactggttcccaaatttcaacagccccctcaggaccttcccactgtatatgttatacttgttttwcagggatttcgtgggaagggaggaggggagcatgtgcaggggggcagcagggctgggtgggcagggagggcagggagggcaggtggaaactccaggccgctcctggatcctggctcttgcacttggctcctgtactcggtcaggccactggaccacagaactggaactcaggatggagcgag

SEQ ID NO: 246266 - DNA, 514 bp, Homo sapiens
aatgttctttctcaaaatgaaaacatttttaaaatgtcctttttcaaaatggaaacattcaagtgttatttgatgaagtcatttcaattgaaagatcacaaaagaagatwaaagatgattttaaagaacagatgagaaaagtacattcagaaaaatgagagaaggctcatccacagttagttcccaggacagacccatacttgtggtcgttaccaccaagatgattccttgctaaagagtaaaagaatgagctcatgctgtcctctcaacactttgggaggccgagatgggaagatcgcttgaggccaggagtttgagaccagcctgggtaacatagcgaaaccctgtctctacagaaaaaatttaaaaaattagcctggtatggtgacacaagcctgtagtcctaagagtcaggaggctgaggcagaaggatcactttaggccaggagttcaaggctgcagtgagctacaatgagaccctacctcattcattcattcatacacatatacacaa

SEQ ID NO: 246267 - DNA, 597 bp, Homo sapiens
ggaggctcgcttgagcccaggaggtagaggctacagtgagctatgatcgtgccactgcattgcagcctgggtagcagagcaagattgtgtcttgctctgatttagctcatttagtttataggaagagaaggagaaagagaaagagagaagacaagaaagcaagccagccagccaacaccaaatgtcaggttgcatcttttctctctcatcctttcattatgggaaagccccacaggaggcatttaccttgcaaaacaactcttgacctccactgcccctgggactgggacaaagctgaaatacaaagataaccaaaaataaatacatatataaaaattaaaatttaaaaaaggtgtggggctttcaagaacccatgtccttcaatggtaatactgaccttaactgattttccctggagactgagcttccgtatcagacccaaccctcctatacaacagtcccccaaagtgatatgttccaagacccccagtggatacttcaaaccatggatagtactgaagcctatgattctgtaaaaaaataaaataaaataaaaaataaaaatactatkatttttcctatacccacattaactat

SEQ ID NO: 246268 - DNA, 580 bp, Homo sapiens
ggccaggcccagtggtgtgtgcctgtgatcccagctacttgagaggccgaggcaagagaatcgcttgagcccaagagtttgagaacagtctgagtaacacagtgagacctcgtttcaacaaaaatttaaaaattagctgggtgagatggcagacacctgtagtcctagctactcatgaagctgagatgggaggattacttgagcccaggaattcaaggctgcagtgagctataattgagccattgcactccagcctgggtgrcagaacaagaccctgtctctaaagaaaaaaaaaaaaaagaaacatatttgtattttggtctttatccccagttcctgatactggagaaattcctaatcccttgaaatttcctgggtgatgggagtgtcttttgttctgatgaagtgaatcttggtgagttcctgggttcctgaacggggctgggaaccagaaagaccaagccactactagaaacttggattcccccacccccatcctctgggtaagggtaagaggtgggagagtgagttaaaaatcaatcatgactaaatgatgacatccataaaaatcccagaacta

SEQ ID NO: 246269 - DNA, 636 bp, Homo sapiens
aatgaatgaatgagtaaattccactgggggcaaccagcaagagaaggtgaatgaaatagacaagaggagctgcttcttgcacctgtgtccccagggagcttgggctccctccttccgttgggaatcctcagaagcaaacatgtggctaggagaaccctgtaagctgctgcttacagatccttgtgccatcgttaaccacttgaatattgcattttttttttttatcaaggcctctcttggcccccagggaggccyaccctctggaacctctgggatgcagctccagtctccaagtggtggccctggcaacgggccctgggagcactgggtccttggggctttctccagctcctcctggtcccctgggtctttggtgtcctctgctcagcaacctgagctgagccccagcccgagaggggacaggtccctgagggaagggactggaaagtgagactctggggtcagggccctcctaggaagcaactaggaaggaggggaggtttgcttgggagttgtccagctccaatcacccagaggccagtccccagggccccgcacccacgggggctgagcccagggaggcagcaggctgtgttgtcaaaggaagcctcaggccactgggaagttgctgggaaa

SEQ ID NO: 246270 - DNA, 590 bp, Homo sapiens
aatgtattaccactttcaacttttgcctcggatgctgcctggcttaatgtattggcttccatgcccataacagcccactcttctcctcttgccaagggtattgagggttctagaaatagtcccggccctgggtctgggccactgggtcccaaagtcccagctcccaggttcccaccgagctccaggtctcaccaccagcagatgtagtatcgaccagaatttcccagacttccctggagatacaaatcctgggggtggaggatgcttgttggctacccagatttccaggcctcctcacacccaagttccatctcttctctcgttcattaaatacttattgaatgagatggaacttgggcgggtttgcatccatcccagcctctggccagctgtgcaacctcgggaaagtgtctgtccctctcaaagcctcagcttcctgaaaagtaaaatggaccacttagtcgtgaagcttccagctttttcttggcttcaacagagcagcaasccccttctagacactgctccaaacaaagagagaactccaactcagccttctaaaagagaaccaagcccatcccacctccttccat

SEQ ID NO: 246271 - DNA, 583 bp, Homo sapiens
gccgccttgcctggggaggtacctgggctttgtttctgcaatggcccatctccccaggcctccaggcaggcagagccatgattttcagctcatccctgctcacacaaggcccaaaggcagggagaggaaggcctgggggcccccaggaaacacggtccccttgagtttcagtccctgcacagccgcgcacagctgtgcatccttgggtatayggcatcacctttctgagctggagcccctctttaccaaaacacaggccacagcaaggttcctggattgttgctacagagatgacctaaaagttggtgcccagcagagcaccactcacatagtaggggctttcacaaagtggtgcttgatgccggatgcagagcactccagggaggctcacacagcccaaggctttggaggctctagaaacagctccctggccatcagaaaacccagcaccatggtgggcagtgccagaaagggaggggtgatctgggttgaggggcacccaggagaagcgggcacagtgacccagcccagctgcactgccccacagcctgagcacagctgtgaccacccgggaccccacccc

SEQ ID NO: 246272 - DNA, 592 bp, Homo sapiens
tgctatagatgtaccacaaacgccactgccactgaattatggccatatattgtactatttataatcgcaatgtagttaagttggatttattccttttttcagcaaagactcacctgacccttaaaacaggaagtattttgcttattgcaaaaataagtacatatcaaaaaaaaaagaatatttccagatctctcttttggcatgctggctaaggatgggggtgtgctagatatgctctcaagtagcatctgtgacaatgggaaggaaccccttctgtggccttgagtcagactcaggggccaggacccaatccctgccaagagcctttctcaacacaagagaagacatcccttaaacatatgaaatcaaaacagcccccatgttgtagccaggggaaagcgaaggacagctggcagcaggtggctctacagagaaatttcccaggacaaaagtagatctgtgcagctccccagatccaagaatcaccctaccatttcagccaggggggcctgagcatggtgtggtggcactgagctcctggagcctttggaagtagtgtggaaacacccaratgtccttattcacccaactc

SEQ ID NO: 246273 - DNA, 586 bp, Homo sapiens
aaggaaagtggttctcaaactttagtgaatcagaatcagctggagagtcttttaaaacaaagattacaggctgggtgcaatggttcacacctgtaatcccagctctttgggaggctgaggcgggaggactgcttgaggtcaggagttcaagaccagcctgggccacatagtgggacccsctgtctacacaaaattttaaaaattagccatgcatggtggtacatgcctgtggtcccagctaatcaggaagctgaggcacgaggatcacttgagccaggagtttgaggctgcagtgagctatgatagcaccacagcactccagtgacagagcaagatcctgtctctaaaaagacaaaacactgattgccagtcctcacccagagtttctgattcagcagttgtatgtggggctgggaatttgcatttctagcaagctctcaggtgatgctgctgctgatgctgatgctgctggtccttggactctacttggagaaccactgatctagtgacccctgctctgagagtcttggtgaaacctagtaggtatccccatgtgggggacagcttgccatacctaagactggaa

SEQ ID NO: 246274 - DNA, 550 bp, Homo sapiens
tcatttgcgatcaccaggggtttcacttgctttcaacacattttttttagatttaaaaaaaactgctatcaccagcattaactctggctccccrtctccctgccatttcatgtaataattccacggggagtcctggcgggtatttagctcctaatttaagctccactaaacaagcccaacgcaaaactagcttctcagatcagcagtttcccctcctacttgccgcagccccttcactctctaggttcttcaggcctctaacatcacatccggccagcattcacaacacccgggctgtgagctaagtgcagagcatgtgttaggagtggctgccccagtcctcgttcagcagcacagggagataggcccgactgtgcctaggaggaaatgaaaccaggacaggccacatccccaagctgtatggctagcagtgggtggggcttcgacagaggccaggctggagggcaccgtgctacctccggcagcatttgccctgggtgtcccgacttccaagccagcccttctcaaacttgactgagcatgcaaatca

SEQ ID NO: 246275 - DNA, 550 bp, Homo sapiens
tcatttgcgatcaccaggggtttcacttgctttcaacacattttttttagatttaaaaaaaactgctatcaccagcattaactctggctccccgtctccctgccatttcatgtaataattccacggggagtcctggcgggtatttagctcctaatttaagctccactaaacaagcccaacgcaaaactagcttctcagatcagcagtttcccctcctacttgccgcagccccttcactctctaggttcttcaggcctctaacatcacatccggccagcattcacaacacccgggctgtgagctaagtgcagagcatgtgttaggagtggctgccccagtcctcgttcagcagcacagggagataggcccgactgtgcctaggaggaaatgaaaccaggacaggccacatccccaagctgtatggctagcagtgggtggggcttcgacagaggccaggctggagggcaccgtgctacctccggcagcatttgccctgggtgtccygacttccaagccagcccttctcaaacttgactgagcatgcaaatca

SEQ ID NO: 246276 - DNA, 589 bp, Homo sapiens
atggactggagctaggggcaggaggaagttggagcctggggtgctcrggaatgtgtcagtcacagacccagcttgttcactgagcagataccagccaggcctagaagatgctagaataagctctgataaccacaaagcattgtcttccaagcttaaaaagtcccttttgtaaatattggtttgtaggcaccaacacccatgtgcttagagaaggaagatgcaggaatgcaaacctctcccacacttcccatgaaaatgagagttatagctggttggtgcaagggtgtaagaggcctctgtggagcccatttcaaatgacaaagaagatccctcccacagcccccatcgtgtcccttagtagctaactggatatacgaaagaacgtctatctaatcccttttaggagctgggcctctattgtggaatgaattggagtggctgctatctactgcctacgcttagggcatcctgtactttgtccaaaaactgtgtttttcaagctttaagggggctgctgaactttggttttctgggacttttccaacagcccataccacagcctccccgagcctcctagagctataggaat

SEQ ID NO: 246277 - DNA, 554 bp, Homo sapiens
tcaccaggcacaatgtctcgttggttttgatgagggacaagtagcccctgtgaagacttaacagccaaaatgattccacaayggtttacacaagcacaaactcgctgtcacaaagagagggaaagaccgattttcccagaaatgggtggaggctttcagtttgggaggccaagtcccagggtgtgtaacgtcttgagggtcaatatccagtttcccatgcgttcctttaggtctgaatctctctccctctgcagagctcctgagcccctgacaatgacagacaggccttggaaacggtccctgtgctttagacaaacaaaagcaaaaagaatgaagtgccactgaccctgcatttggcgaatgttcgaggcatccagatgaagcctctttggcaaaataacctgaggtgccacagacctggatcagagctggggcttggcaggtgggaagagtgaggctatgaacatcgggggtccaacaaacatgtgggtaggggttgtggggacaggtggaaggagctgatctaggagctgctgctgagtcagaagcactga

SEQ ID NO: 246278 - DNA, 554 bp, Homo sapiens
tcaccaggcacaatgtctcgttggttttgatgagggacaagtagcccctgtgaagacttaacagccaaaatgattccacaacggtttacacaagcacaaactcgctgtcrcaaagagagggaaagaccgattttcccagaaatgggtggaggctttcagtttgggaggccaagtcccagggtgtgtaacgtcttgagggtcaatatccagtttcccatgcgttcctttaggtctgaatctctctccctctgcagagctcctgagcccctgacaatgacagacaggccttggaaacggtccctgtgctttagacaaacaaaagcaaaaagaatgaagtgccactgaccctgcatttggcgaatgttcgaggcatccagatgaagcctctttggcaaaataacctgaggtgccacagacctggatcagagctggggcttggcaggtgggaagagtgaggctatgaacatcgggggtccaacaaacatgtgggtaggggttgtggggacaggtggaaggagctgatctaggagctgctgctgagtcagaagcactga

SEQ ID NO: 246279 - DNA, 554 bp, Homo sapiens
tcaccaggcacaatgtctcgttggttttgatgagggacaagtagcccctgtgaagacttaacagccaaaatgattccacaacggtttacacaagcacaaactcgctgtcacaaagagagggaaagaccgattttcccagaaatgggtggaggctttcagtttgggaggccaagtcccagggtgtgtaacgtcttgagggtcaatatccagtttcccatgcgttcctttaggtctgaatctctctccctctgcagagctcctgagcccctgacaatgacagacaggccttggaaacggtccctgtgctttagacaaacaaaagcaaaaagaatgaagtgccactgaccctgcatttggcgaatgttcgaggcatccagatgaagcctctttggcaaaataacctgaggtgccacagacctggatcagagctggggcttggcaggtgggaagagtgaggctatgaacatcgggggtccaacaaacatgtgggtaggggttgtggsgacaggtggaaggagctgatctaggagctgctgctgagtcagaagcactga

SEQ ID NO: 246280 - DNA, 450 bp, Homo sapiens
ctgacagtcctgaggttgacaaagaccaggaagttcagtaatggtgactgaagctcccgcggcctgcaatgtagaaataaatgggcctgtacccagccccaccctgccatgtctcaatataaccacagcggtgccccacagtgcattctgtctgcaaccccagtttttaartcctgcaatattaagaacctttgaaatttaataaaaagctatacaggcacatccagctgcagaaaaacaagattgacaagatcaaattttgtgtcacctgcgaaaaacacctggccagttgtggtttgctctaccagcgctgagaggcacacctgggaccgatacactcttgttgaatttctcaaagaaggcgtaccagtgttgcagttccaagcatgtcaggcatccagagcggtagtgaggggtagcttctagtactcaattgtttgctcaatgtag

SEQ ID NO: 246281 - DNA, 591 bp, Homo sapiens
gcgggtggatcgcctgaggtcagaagttcaagaccagcctggccaacgtgatgaaaccccgtctctacaaaaatacaaaaactagccaggcaagatggcaggtgcctgtaatctcagcaactcaggaggctgagatgggagaatcgcttgaacccgagaggcagaggttgcagtgaactgagattgcaccattgcactccagcctgggcgacagagcaagactccgtctcagagaaaaaaaaaaaaaagaaagaaaagagaaagaaagaacagaaaaaagaaaagagagagaagatactatctcaaaagagaaaaaaatttatgaaaatcaataatcaaaatgaaataggaaaaaaacagatctcacttgaacacaccaaatattaggamcacagaggtaaagccatgggacttgaaatcctggctcagacttttatagctgagtgccctttcaaaagttaccaacagtcctcattctcagtctccgcatctataaaaaagggacattaatgcccactccacagctctgtggggtgctaagcccagtggccgggaagtccccacttgaccttcagctttagcagccatggg

SEQ ID NO: 246282 - DNA, 591 bp, Homo sapiens
gcgggtggatcgcctgaggtcagaagttcaagaccagcctggccaacgtgatgaaaccccgtctctacaaaaatacaaaaactagccaggcaagatggcaggtgcctgtaatctcagcaactcaggaggctgagatgggagaatcgcttgaacccgagaggcagaggttgcagtgaactgagattgcaccattgcactccagcctgggcgacagagcaagactccgtctcagagaaaaaaaaaaaaaagaaagaaaagagaaagaaagaacagaaaaaagaaaagagagagaagatactatctcaaaagagaaaaaaatttatgaaaatcaataatcaaaatgaaataggaaaaaaacagatctcacttgaacacaccaaatattaggaccacagaggtaaagccatgggacttgaaatcctggctcagacttttatagctgagtgccctttcaaaagttaccaacagtcctcattctcagtctcygcatctataaaaaagggacattaatgcccactccacagctctgtggggtgctaagcccagtggccgggaagtccccacttgaccttcagctttagcagccatggg

SEQ ID NO: 246283 - DNA, 565 bp, Homo sapiens
atttaaaactcatcttctagcaaggatatatttcttttttaatttacttaatgaacttacaatagacttagttattttagtttctctaccgttacttaaattacaaatctgaggccraagtgggacgatcacttgagctcaggagttcaagaccagcttaggcaacaaagtgagaccctgtcgctacaaaaaattaaaaagttagctaggaatggtgagagcctgtaatcccagcactttgggaggctgaggtgtgaggattgcttgatcccaggagttggaggctgcagtgagccatgattgtgccactgcacggcagcctgggtgacagagcaagaccccaactgaaaataaataaataaataaaatttatgttttagtgtatttacgtatttatataaaaactcagtttcaataccaaagtcaagattcatccatttgttcaacagcaattgagcatcttccatagatgccagcactcttgggtactcaagatacacctataacaagtactcagaatagcgactcaaaaattagtttgtgattttaaaaaaaaagctggaaa

SEQ ID NO: 246284 - DNA, 565 bp, Homo sapiens
atttaaaactcatcttctagcaaggatatatttcttttttaatttacttaatgaacttacaatagacttagttattttagtttctctaccgttacttaaattacaaatctgaggccaaagtgggacgatcacttgagctcaggagttcaagaccagcttaggcaacaaagtgagaccctgtcgctacaaaaaattaaaaagttagctaggaatggtgagagcctgtaatcccagcactttgggaggctgaggtgtgaggattgcttgatcccaggagttggaggctgcagtgagccatgattgtgccactgcacggcagcctgggtgacagagcaagamcccaactgaaaataaataaataaataaaatttatgttttagtgtatttacgtatttatataaaaactcagtttcaataccaaagtcaagattcatccatttgttcaacagcaattgagcatcttccatagatgccagcactcttgggtactcaagatacacctataacaagtactcagaatagcgactcaaaaattagtttgtgattttaaaaaaaaagctggaaa

SEQ ID NO: 246285 - DNA, 565 bp, Homo sapiens
atttaaaactcatcttctagcaaggatatatttcttttttaatttacttaatgaacttacaatagacttagttattttagtttctctaccgttacttaaattacaaatctgaggccaaagtgggacgatcacttgagctcaggagttcaagaccagcttaggcaacaaagtgagaccctgtcgctacaaaaaattaaaaagttagctaggaatggtgagagcctgtaatcccagcactttgggaggctgaggtgtgaggattgcttgatcccaggagttggaggctgcagtgagccatgattgtgccactgcacggcagcctgggtgacagagcaagaccccaactgaaaataaataaataaataaaatttatgttttagtgtatttacgtatttatataaaaactcartttcaataccaaagtcaagattcatccatttgttcaacagcaattgagcatcttccatagatgccagcactcttgggtactcaagatacacctataacaagtactcagaatagcgactcaaaaattagtttgtgattttaaaaaaaaagctggaaa

SEQ ID NO: 246286 - DNA, 541 bp, Homo sapiens
aaactcgcgatattggttcccacaaatgagagtagaaaagtgtttttcctggtttcactctctttttttttttgaaatgaggactcgctatgttgcccaggctggtctcaaactcctgagctcaaggaacccgtctgcctcagcctcccaaagtgctgggattataggcgtgaccactgcacctggccctggttttgctcttactaaatggaagaaattgaagatagtagattctttattcaaaaagaatgtgttcttttcatgggcaagcatacattgctgaaaatgtaaaaattttagggcaactgtgttctcataattaggactcctrtataagagcaggagggataaaaatacatttaagcaaactctcaaaaccacttgtttataatttctcactgcatagaataaaatgactcaagttaattctgttcactaaaagaagaaaatgctcaattaagtggaccaaaatagtcccaattaaagatatacatttctctgatgagcaaaaattgagaatcttccatgatatgaagacgta

SEQ ID NO: 246287 - DNA, 593 bp, Homo sapiens
ccaaactgcctggatttgaatctcagatctgctccttggtagttttgtaacttcagctaaattatgcaaccttagtttcctcatttattaagtgggcataatgccagtttctttggtacagagagataatatataggatacaggcataatgctaatcttccaggcttatttcaagtcttaaagtgttaattcatgtaaagcacttaaatagtgcctagctgcagagtcaatactcagtaagtgtgttaacccaaatctttaagggggaaaaaaaaaacgttgttayaactttgcccaaagtcaacatcttagttgagataaccatgaggaaattttacctaatcttttgaaccaagcaaactcctgaaaactggactaaaggcaaagagaggatatttggcctctcattctgaaaatggtgtttggtgttttcctgaagaacctctctgaaaacattcaagctcgtgactatctgatagtgctgctttttgagacgctcttttctcctttagaactagccatcttgattggcattttataaagatttaacaatccttctaactgacaaataccctgccctcagcaactgaggt

SEQ ID NO: 246288 - DNA, 606 bp, Homo sapiens
cttttacttgttttaacctaggaattcctcatgacaaacccatgggctggtgcttcaatgatccccattctgcagataagaaaacatgatctaaagaaaggtcaagtagcttgcccaacatcacacagctgatgaatggcgcaggcatatggtgaccatactgctttcctgtcattctcttaccccaactctttgcctagatgacagctctttagggaaggaactattgttgctcctkttggcaccctagcactttacttacaacgtagcatccatcagggactcgggaaataatgaatgagtgaatgaatgaattaatgaatggcctgcatacttgttcagcagctgcctggatcttccagatagggcaggtcattcattcacctgcccagggatcccttctcatgttattctacctgagcctcaaagatgggcattaccaatggcattcattctcagcaccaaaaccttcagggaattttaagtcaacttaaccacaaccaccaacttctctcccccagctccacaggattgctcctggccacaaacccatgttccaagctgcctggtgggaggtaataattacaataatcagcagcaacagtg

SEQ ID NO: 246289 - DNA, 606 bp, Homo sapiens
cttttacttgttttaacctaggaattcctcatgacaaacccatgggctggtgcttcaatgatccccattctgcagataagaaaacatgatctaaagaaaggtcaagtagcttgcccaacatcacacagctgatgaatggcgcaggcatatggtgaccatactgctttcctgtcattctcttaccccaactctttgcctagatgacagctctttagggaaggaactattgttgctccttttggcaccctagcactttacttacaamgtagcatccatcagggactcgggaaataatgaatgagtgaatgaatgaattaatgaatggcctgcatacttgttcagcagctgcctggatcttccagatagggcaggtcattcattcacctgcccagggatcccttctcatgttattctacctgagcctcaaagatgggcattaccaatggcattcattctcagcaccaaaaccttcagggaattttaagtcaacttaaccacaaccaccaacttctctcccccagctccacaggattgctcctggccacaaacccatgttccaagctgcctggtgggaggtaataattacaataatcagcagcaacagtg

SEQ ID NO: 246290 - DNA, 606 bp, Homo sapiens
cttttacttgttttaacctaggaattcctcatgacaaacccatgggctggtgcttcaatgatccccattctgcagataagaaaacatgatctaaagaaaggtcaagtagcttgcccaacatcacacagctgatgaatggcgcaggcatatggtgaccatactgctttcctgtcattctcttaccccaactctttgcctagatgacagctctttagggaaggaactattgttgctccttttggcaccctagcactttacttacaacgtagcatccatcagggactcgggaaataatgaatgagtgaatgaatkaattaatgaatggcctgcatacttgttcagcagctgcctggatcttccagatagggcaggtcattcattcacctgcccagggatcccttctcatgttattctacctgagcctcaaagatgggcattaccaatggcattcattctcagcaccaaaaccttcagggaattttaagtcaacttaaccacaaccaccaacttctctcccccagctccacaggattgctcctggccacaaacccatgttccaagctgcctggtgggaggtaataattacaataatcagcagcaacagtg

SEQ ID NO: 246291 - DNA, 592 bp, Homo sapiens
ttgtgttatggagatggcttctttcctcaaacctaaagaactaacttctgctagcttcaaacttttcttctgtagcctcctcatctctctcagtcttgtaagagctgaagagagttagagccttgctctggattaggctttggcttaaaggaatgttgtggytgtttgatatgctatccagaccactaaaactttcttcaaatcagcaataagtctgtttcactttcttatcattcatgtgctcagtggagtagaacttttaatttccttcaagaaccttgcttttgcattcacaacttggctaactgtttggctcaagaggcctagcttctggcctgtcttggcttttgacatgccttctaagcttaatcattgctagcttttgctttaaagtgacagatatgcaactctttttttcatttgaacacttagaggccgttgtaaggttattaatcggcctaatttcaatattgttttgtctcaggaaataggaagagctaaggaggaggagagagaccagagaatggctggttgatgggagtcagaacacacacaacttttattgattaagtttgccttctatatgggtggg

SEQ ID NO: 246292 - DNA, 603 bp, Homo sapiens
tgcaataatctgtgaagtgcaataaagcgacatgcaataaaatgaggtatggctgtgacagactaggtggattataaataacagaaatttatttatcacaattctggtggttggaagtccaagatcaaggtgccagtaaggtcagatagggatgagggctttctttagctgatgactgatgactgatgacttcttgttttaccctcacacagtgaaaagagggcataagagagctctttggagccctttttataaggacattattcccattcatgargtctccaccctcaaaacctaattgtgtcttgaaggccctgcctcctgataccatcgcattaggcattaggatttcaacatgtgaatttggtggggagaacataaacactcagtccataacaccagagaaactaaaatgcttctcaaggtgatattcctgatgcaccctgagggatgaacaggactgtgcaaggagaaaagggtgggcatagccaaaggaacagacaataagcagtgctcttcatttccaagacatgagctgctttttagggcccaagattaaaatccttggcagagctttcagggatgatatgggtttggatttat

SEQ ID NO: 246293 - DNA, 603 bp, Homo sapiens
tgcaataatctgtgaagtgcaataaagcgacatgcaataaaatgaggtatggctgtgacagactaggtggattataaataacagaaatttatttatcacaattctggtggttggaagtccaagatcaaggtgccagtaaggtcagatagggatgagggctttctttagctgatgactgatgactgatgacttcttgttttaccctcacacagtgaaaagagggcataagagagctctttggagccctttttataaggacattattcccattcatgaggtctccaccctcaaaacctaattgtgtcttgaaggccctgcctcctgataccatcgcattargcattaggatttcaacatgtgaatttggtggggagaacataaacactcagtccataacaccagagaaactaaaatgcttctcaaggtgatattcctgatgcaccctgagggatgaacaggactgtgcaaggagaaaagggtgggcatagccaaaggaacagacaataagcagtgctcttcatttccaagacatgagctgctttttagggcccaagattaaaatccttggcagagctttcagggatgatatgggtttggatttat

SEQ ID NO: 246294 - DNA, 581 bp, Homo sapiens
aaaatccttggcagagctttcagggatgatatgggtttggatttatgtccctgcccaaacctcatgttgaaatataatccccattttggaggtaggccttggtgatagggtgatgggagcagatttatttctctgtgctgttctcatgatagtgagtgagtgctcatgagatctggttgtttaaaaagtgtgtggcacttcccctcatctctctattcctcctgctctggccgtgtaagacatactggtttcccctttgccttccaccttgattgtaagttttctgaggcctctccagccatgcttcctgtacagcctgcagaactgtgagcgaattaaacctcttttctttataaattatccagtttcaggtatttctttatagaagtgcaaaaacagactaatacaagagttttgataatatcatctctgcccacttctctaacttcatgtcactccctctcccttgctcagaacatgggcttccacctgacctgggaactttgcatgtgctgtttcctcttcctggatgtctttccctgtcatcctsaactctcatcctaaacatcatttcttcagga

SEQ ID NO: 246295 - DNA, 630 bp, Homo sapiens
gagacttgtccctagtgcctctaaccaggtcagttctgtctatcatactcaggaacttttcttcacagaatgagtcgcagtttataattacatttttgtgggatgattggattaatgtctgtgttcctctgtgacagactgaaaaaccgtccccagttctttatccttccctgtgcctgcaccttttgccatgtggttttgcaatctccaccscgtaaccttgatctccgccatatgagttgctttagctgatggaatgcaggtggaagtgatgatgtgccacttctgaatctagaacttaagaggcctgttgtgcttctgccatcaccatgagaagtacattcccagctagtcctctggcacaaggaggacaaaagttgtgtggatcaggcccagactcaccctgcaacttagaatgccccactgagcccagctagatcagtcataccctagccaaccacagaggcataagcaaaatcaatgcttattgctgcatgctactaaaatgttggagttctttgttattgactgatacacccccactatatactaagctttgtttaagcaagcatcaaatgtttgttcaacattgaatccttactaccttatacatagtggacccttaatatt

SEQ ID NO: 246296 - DNA, 671 bp, Homo sapiens
ccattatcttaagcaaattaatgcaggaatagaaaccaaataccacatagtctcacttgtaagtggtagctaaacactgagtacacatggacataaaattgggaacaacagacacattgggaccatcagatgggggaagagggaggagagcaagtgttgaaaatctaactgttgagtactatgctcagtaactggataatgggatcagtcataccccaaacctcagcatcatgtaatatgccatgtaagaaacctgcacatgtaccacctgattctaaaataaaagctaaaattatttttaaaatttaaaaacaaagtacctttcaaagccctccctacccttttcccaaggttcctgaagtgtctgggcaggwaggtcagcatggtattggtggcaattactgtgtagtcactgagctgtggggccacaggcaatcaaaggcaccatctaacagttcatctgatgagacccctcccccagctaaggatgcagacccttccaggtggagacactgccctggctcagatcgtattgaaacattcctcaagatgcactttcagaccccagacacaaacctcactaccaccaacacttacggagacttgacaatgaaccaggtgctgccctgatgctttacctgcattgatacagttagtcttcatgcagtgct

SEQ ID NO: 246297 - DNA, 555 bp, Homo sapiens
ggatcattttaaaatattagtacagcgtatgctgttctaggtttagctcaagttgtacattattcagaaagtaatttttaatataaaaataagtgtcatgtccacaaaaatgttagtatttcagacatttaaaaagccttaaaaatgttacaatatcccaaaagaaacaaacaaaagcaagcattgtggtcactgaggggagggcactggtccagttctacacactggttaagagctaaggctctggaaccattgccagtcgtgggaccctggacaagctactttcttctttgcacaccagcctcttcatctacctggattttttgttttcttcaacatgagttgccctttgtacccaggctggagagcaagtgctacaatcatagctcacagcagcctcaaactcctagrctcaagtgatcctcccaccttagcctctcaagtagccgggactacaggcatgcactaccacatccagccacgtttttttaattctttgtaaagatggggtctctctgtgtttcccagactggtcttgaactcctgacctcaagc

SEQ ID NO: 246298 - DNA, 593 bp, Homo sapiens
ttgttgtacagcctgaagaactatggggcaagtaaacatgcctttatagcaacacaaatggactaagacattagactttctcaatgaaggaagcagtgcattaatgtacactctggtgcaagctccttaccttctcatagactggtactttgaatagccctgtatattatccttctgtctattgctagaacacattgggtctattcctaccagacatctctgtccttgctgttcctgctgcctgacattgtttttcctggcttcttcccagccttcacatggcttatatggtcccacctcaggaagaccttcctgactccctatataaaatatccactaacccattacccatattacaacaccctacttatgttcttcaaggtgataatcatgatgtatatttattctgtatttrttggttgacatattgtccatctcctccacttgaatgcatgttccataggggcaggaagttggcctggctcctttgcccattatatcacagcaccaagcacagagttggtgcccaaaaaatgctgaattaatgattgaaaaaatgtgcagccaacatacattccaagttcattatgtga

SEQ ID NO: 246299 - DNA, 615 bp, Homo sapiens
atgcactaccacatccagccacgtttttttaattctttgtaaagatggggtctctctgtgtttcccagactggtcttgaactcctgacctcaagcaattcttttaccttggcctctcaaagtgctaggattacgggcatgagccaccatgtctggccaaaatctggattaatgagtccccaccttttaggatggttataaagcttaaataaaatgattgatgtcaacacttactgagatggctggcacatgttaagttctcagtgaatgtgaactaytattttcacataactgtctactgaatctgaaccccaagtcccctgatttccagtccaggatacttttcactacccccgtgacacaaataataacagcttacatattttgagcatttactttgggccagacattgtactaagtactttatgtggattatcttgtttattatccccatttaacagaagagggaactggaaatccagcaggcatgaacttgcacaaggtctcacagtaactaagtgaggaaatcagaattcaaatccaggtggatctgcctgtagaccctgcattcactattaacctctccagcctcccaaggctctggttagcaacttcc

SEQ ID NO: 246300 - DNA, 541 bp, Homo sapiens
ggcacaaatcaaaatcttcccttctctctatcacctgttttttctgtgggcaaatgtctgtctacatcactttgcttagtggcttccaaagcataaattactcatggaaccatgcagtcttgtcatcaccaggaaagagaactgtaaatagatttggtccatgccattcaatagcatatggttcctgaccatttcctaagtcccattcctcaartcaggtgggcccagggtacaggcttggaggcaagaggatgaggaagccatttctggcctgtaaggggcttccaggtcagtgatggtgcaaaaagccatcatacggccataacctatcatctggagttgagagtgtgcgagtgaaaaccagcttcatcgcatttccctctgtagcttcagaatctctctgtggactgctaagtgtgcttttctacctcaggataaaatatcaggcaggtgctgtagttttctgggcttttttagtgagaagatctgttttgtttccataattaaaaaccaccatctagtgcacctcttcctacttgct

SEQ ID NO: 246301 - DNA, 535 bp, Homo sapiens
gaggcagcagccaaaatctcactattgcagccaaaggagatgtgtatttccccttctccactccttgcatctggtccatgctcaaagtaagccaaaccagtgctcttgtgcagaaccctaaatcgaaagggggtgacacataaatccaggcacaatggagactaccaaagccagcagtagtggagatgacaatccagcagtggtgagggagaacaggactatcattatcactacttgagggtgcctgggtgtggctagcagcccacactcgactcaccaagctcatacatctagcttgtagtggcaaagtgggcacttttttctaattcccataaatgaatagcagcagttctgagctgaggttcaggtagaagcacctgcagccrgcatctattccagggtcactccctcagtcgctgctctccagccttcctgccggttctgtgagctctctgttatccttccagcgcgtcacttttctgaagtttgaaagaatcagtttctgttgtttgcacacctgtaagagccctgactg

SEQ ID NO: 246302 - DNA, 526 bp, Homo sapiens
gacagtgtacagtgaagccacagacttatcccctarccacaggtgattgaaccagggtggacactgacccatgaggcatcctggtggaaaaagctcagctaaaaaagagaaaatggaatcaatggagcctgtcagattatctcttaggaatttgatctggaatacatgctggacagatcctaagtcctaagggctataactaagctgaagttatgcagaagcaggagccctgaggaggagaaaaatacacaggggagcaggaaacggaggcaggaaggatgtcaatcaaagtaggaaaggtaaaggcaaatattaggagatgttatattaccttaaaatagtatgtctgcaaactccaactgagggcccaaaatgatcctgtcagtagaaaagcctcagaaccttcccatccctgaactgtgcctcacttcaactctttgaaggctctcaggacaagtcagagtcttagcttccttttttgctatgtgcatcctgatagtaagacctcactgctgtttctttgcaa

SEQ ID NO: 246303 - DNA, 495 bp, Homo sapiens
gtgttcttactcttagtttatgcaagagctggttgtttaaaagaccctggtgtctctcttgctccctctatcattatgtaacacaccaactctccctttgctttctgtcatgagtggaagctttctgaggccctcactagaatcagatcctgccaccatgcttcttgtacaacctgcagaaccataagccaaataaaccttttctttgtaaattacccagcctcaggtattcctttatgacagcacaaaatagactaataggcagggttaagattcaaataaagggagtccactcagtagttagagtttgggggtaagaccccaggctgaattaccctgmataacagaagagagggaaattccaagggtgtggtaggatggaagtggacaggaaggaagcagcaacgcagccaagaactgtagtgaagagaaatttctaagacttttttagcttgttcgccacaagactgaatgtaaaccctctcctcccttgcc

SEQ ID NO: 246304 - DNA, 552 bp, Homo sapiens
tgatggcacagactgagttctgcatttgagtcggtgcagggtgaaggcaagggcatccgagaatgacagggctgtccacatcatctacactttgttttaacttaaagtcatagtcttcttatatgcaacagtgttttggtcatgtaaatgggattttagaaattttctattcattcttttttaatgtgctttttaagttattactcaatgattacagttcactgtaaaaaatatgggcagaccaaaagggtaaaataaaaaatgtcctttatttcactactcagaggtaatcactgtgagcttttgatatgcattcattcaggctttctctacacraatattctccctcaagttttaaagtgggatcatagtgtcacgtggtttttaatctactttttaaacttaagcagctttatgggtatcacttcaggtcaataaatactgtccttcaacaacattttaatatctgcataacagcccattccatgaaagaaccataatgtatttaatgaaactactgttattacttatgtgtaatgtttccaatatttt

SEQ ID NO: 246305 - DNA, 450 bp, Homo sapiens
actgcttcccctgtcttctgcttgtccagctactcagaacaccaaaaaaaaaaagagagagagagagagagggagaaagaaaggaaggaaggaaggaaggaaaagaaagaaaagcctaaaaaaggacacacacaaaatgtaagaggaaaagcacataaccaagaacaaatacaaaaggatgaagaaaccttaacaaacagtgtcagaaggagctcttcccatgaacaaaacttgtgcctaatgagttagggaacagaagattttgaaaaacrttgggagcaagacaaacctgtaaggaacagaatgacaactgagggctgaggatgccgtgttaacatagaatggaaggaaaacaggcaaactcaaccttagctttgcagaacacgggctgttcaacttagaacaggtagcacaatcaccgtttggagggaaaccaggcctaaggaacta

SEQ ID NO: 246306 - DNA, 450 bp, Homo sapiens
actgcttcccctgtcttctgcttgtccagctactcagaacaccaaaaaaaaaaagagagagagagagagagggagaaagaaaggaaggaaggaaggaaggaaaagaaagaaaagcctaaaaaaggacacacacaaaatgtaagaggaaaagcacataaccaagaacaaatacaaaaggatgaagaaaccttaacaaacagtgtcagaaggagctcttcccatgaacaaaacttgtgcctaatgagttagggaacagaagattttgaaaaacattgggagcaagacaaacctgtaaggaacagaatgacaactgagggctgaggatgccgtgttaacatagaatggaaggaaarcaggcaaactcaaccttagctttgcagaacacgggctgttcaacttagaacaggtagcacaatcaccgtttggagggaaaccaggcctaaggaacta

SEQ ID NO: 246307 - DNA, 580 bp, Homo sapiens
aacctgtaaggaacagaatgacaactgagggctgaggatgccgtgttaacatagaatggaaggaaaacaggcaaactcaaccttagctttgcagaacacgggctgttcaacttagaacaggtagcacaatcaccgtttggagggaaaccaggcctaaggaactaatgagatcatarggaagtaccacccccagcacaaagacatctcggggtcacagggaacttcagtcctggctgcagcaccattcagtagacagaggaatcatgaagttttggggtgccaggcaagaagagacagggaaaagtgtcctaatctttgaaatgaatataaatgtaaaggattctatagcccagaaaactgaaagacaaaagcttgcacattttagaatgtgcacatataggagaaaaaagaaatgtgatctgctggaacaagtgtgaattcacctttaaaataaatatgacttcagccttggaggccctgttaggttgagtccaccttaacctccacattaccttctctgaatctctgcaacctggaggatactaactcaggctccatctttattcactgatgtgacaga

SEQ ID NO: 246308 - DNA, 580 bp, Homo sapiens
aacctgtaaggaacagaatgacaactgagggctgaggatgccgtgttaacatagaatggaaggaaaacaggcaaactcaaccttagctttgcagaacacgggctgttcaacttagaacaggtagcacaatcaccgtttggagggaaaccaggcctaaggaactaatgagatcataaggaagtaccacccccagcacaaagacatctcggggtcacagggaacttcagtcctggctgcagcaccattcagtagacagaggaatcatgaagttttggggtgccaggcaagaagagacagggaaaagtgtcctaatctttgaaatgaatataaatrtaaaggattctatagcccagaaaactgaaagacaaaagcttgcacattttagaatgtgcacatataggagaaaaaagaaatgtgatctgctggaacaagtgtgaattcacctttaaaataaatatgacttcagccttggaggccctgttaggttgagtccaccttaacctccacattaccttctctgaatctctgcaacctggaggatactaactcaggctccatctttattcactgatgtgacaga

SEQ ID NO: 246309 - DNA, 580 bp, Homo sapiens
aacctgtaaggaacagaatgacaactgagggctgaggatgccgtgttaacatagaatggaaggaaaacaggcaaactcaaccttagctttgcagaacacgggctgttcaacttagaacaggtagcacaatcaccgtttggagggaaaccaggcctaaggaactaatgagatcataaggaagtaccacccccagcacaaagacatctcggggtcacagggaacttcagtcctggctgcagcaccattcagtagacagaggaatcatgaagttttggggtgccaggcaagaagagacagggaaaagtgtcctaatctttgaaatgaatataaatgtaaaggattctatagcccagaaaactgaaagacaaaagcttgcacattttagaatgtgcacatataggagaaaaaagaaatgtgatctgctggaacaagtgtgaattcacctttaaaataaatatgacttcagccttggaggccctgttaggttgagtccaccttaacctccacattaccttctctgaayctctgcaacctggaggatactaactcaggctccatctttattcactgatgtgacaga

SEQ ID NO: 246310 - DNA, 593 bp, Homo sapiens
gtcttaatttgctacaagagcaataggaaactaataaacctgcgttttgcattatcttatacttattttctaatcaattaatatggactctccttctctgcatctgattactctgcctcactcaacatggccatctctaccagactgaaacaaaggctgtggttatctcagagctcacgtctcctcagctttgctgtcagaaagaagggagtgatctcttactttygattcacaatttcccgtggaagtgctctgattgacatgccttggcagggcacttgtgatgggcaaccccccaaaaaacacttggttagaagtgggaggcagaaaagacatggaatcaacccaaatgcccatcaatgacagactggataaaggaaatgtggtatatatacaccatggaatactatacatccataaaaaggaatgaaatcatgccatttgcaggaacatggatggaactggaagccattatcctcagcaaactaacacaggaacagaaaagcaaacaccgcatgttctcacttataagtgggaactgaacaatgagaacacacagacacagggaggggaaaaacacacactgggtcctg

SEQ ID NO: 246311 - DNA, 541 bp, Homo sapiens
ggtcatcccttgaacctgttaagcttggagttgaaattgctgtaaatgtattttaaagagagaaaaagtaaagactgcaaggtgagggtgggtgttactctctggggtgggtctatgggatgatcctgttttttaaagcattttctcatatgttttcatcactctcttccacggaaagacctactgagggctgttcagttggtctcccagatggcccctctctcaggaggtttctctcatgaaaaaaatgacctgttagcagctgcagagctcagtgaagtcaagctggtgcttggtgtgacatcacccatgacactgtaggaaaatcaatgtcataactcattattggggaggaagtcagcctggatctggacctggactccctccccgcccccacatcaggcatgtatggrctagagggaaaagactagccaccaagcctcagaggggtttcctaatctaagcctctaagacagtaagatcagaggtcagagaggctaacagcaatgaaaggcagaagggcagagtcaaacctgtggtt

SEQ ID NO: 246312 - DNA, 561 bp, Homo sapiens
gattcactcacaaagagctcactaatttgtcaccagacttgccccaccttaacacctcccctcacaaccgtcggaccccaaagaagggagtgtctacagctcagcattcacaaccaaaatggacagaagtagcaagctggtagcaaactcgcggcatccatccatctctggcatttaatggcaatgcttccaagaatgaagtaaagaatgccatacagcactgcagaaaaacaaagacactaaaatttaagaggggagtaaaatttgtttatagacctcactaaagaaaagttgctgagtattgagtctagagacccatgctgctattgttgcttgggacttttttggaggattgggagagggcatgcactattttctgggttgarcagttgcttattattgttttgttcaggagtcttgttttaatcaaggcctgttttcaggggacatcataatttaaccaggcttttaatcaacaacccaagaaattctaataatgtaaagactacttcaacagagcattcttctagctttaagcataaatttcagaatgcgccagcc

SEQ ID NO: 246313 - DNA, 561 bp, Homo sapiens
gattcactcacaaagagctcactaatttgtcaccagacttgccccaccttaacacctcccctcacaaccgtcggaccccaaagaagggagtgtctacagctcagcattcacaaccaaaatggacagaagtagcaagctggtagcaaactcgcggcatccatccatctctggcatttaatggcaatgcttccaagaatgaagtaaagaatgccatacagcactgcagaaaaacaaagacactaaaatttaagaggggagtaaaatttgtttatagacctcactaaagaaaagttgctgagtattgagtctagagacccatgctgctattgttgcttgggacttttttggaggattgggagagggcatgcactattttctgggttgagcagttgcttattattgttttgttcaggagtcttgttttaatcaaggyctgttttcaggggacatcataatttaaccaggcttttaatcaacaacccaagaaattctaataatgtaaagactacttcaacagagcattcttctagctttaagcataaatttcagaatgcgccagcc

SEQ ID NO: 246314 - DNA, 666 bp, Homo sapiens
acaaagctatatgaggaaaattataaaattctgataaaagaaatttaaaaataactaaatatatggatagaccacactcatggattgggtgactcgatattgtcaagatatcaatcctactcaccctggtttatatatttaatgcaatcccaatcaaacccctgctagttatttagacatctgcaaattgattttaaagtttatatgaagagcaaaagagtcagaatacrtaacacagtattgaaggacaagaacaaagttggagaactcgcagtacctgactttgagactcactataaaactacattaatcaagaccatgtggtattggcaaaagaacagacaaatagatcaatggaacagaagagagagcccagaaatacactcacatgaatatagtaaactgatctttgacaaaggagcaaaggctatgcagtggagaaagtattttcaacaaatagtgccagaaaaactaaacatacacaagcagaaaatgaacttagaaacagaccatacaccctttacataaattaactcaaaactgatcacagactataacacaaaactataaaactcctaaagataacataggataaaatccagatgaccttgaatttggtgataatattttacatatgataatagcaccattatttatgaaagaaag

SEQ ID NO: 246315 - DNA, 583 bp, Homo sapiens
ttaaaagaaaaacggtaaaaataaaaattattttaaaaaatcagaatatataaagaactacaactcaacaacaacaagaaaaaagtagcctgatttaaaaataggcaaacaacttaaacagacatttctccaaacaagatacctgaatggccaacaagcatatgaaaaggtgttcaatatcactaatcattagagaaatgcaaatcaaaatcacaatgaaatatcaccatataccctcagatggctactctttttttttttttttgaggttttgttttttttttcaattgtttttcaggaacaggtggtttttggttacacgaataagttatttagtggtaattactgagatttttggtgtacccatcacctgagcattgtatactgtacccaatgggtactcttttatccctcacccctctccacctcttcccccatgtccccaaagtccattatatcattcttatgcctttgcatcctcatagcttagctcccacttataagtgagaacatttrgttttctgttcctgagttacttcacttagaataatgatctccaaccctatccaggttgctgtaaatg

SEQ ID NO: 246316 - DNA, 609 bp, Homo sapiens
ctttgtattcattcatgtcattccataaatatttacttaaatatttgctgagttctctcctcacatcaggctcctcatggctaaagccaaagaaggatgactagggaaaagggccactcatggggggctacagggcaagttctcacacgattataggcactaggcaaagcaaggctgataataaaaatatatataaggattggaaattttgattcacaactacatcagactcccagaattcttgtgcacttcctccttcccctagtaaagccttacttggggtaaaatacctgtatctaacatttatatctcaatgtgaatttaaatttcaacatataactctctcagatgtcattgcagtttacattttataataaatgtgatatttttcatatacttaagattttttatattagagaaagtatagatatttggggaagagtaaaggctttatcatgtcactgctctacctcccatgcttgtgcccaacacccagaacatagttaatgtatacttactgtttggtgctttagataactcctgggcccctttttaaaatcctctcaatcccacctctatctccagttrcaactgaagaaactgcttcca

SEQ ID NO: 246317 - DNA, 414 bp, Homo sapiens
aatctgccaacagccaacatgcaaaataaccaattttccaaaagtccaataaacagttgaaaaatttaccaaattcatcctttgttttctagatgcccctacatattaccctgcttctgtytccaccacttgaatattcatcttcaaatttctatcaaaatgatcaatggaattgaacactcaatgaactggtcattcagtgaattgattcttagctaactaattttccacaaacagcccctcacctggtgcatacacaggcttgtgaatcactctcctgttctacaattggagtttcaaagcacctgttagaaagaggttcagtcccgatccacataagccggtctgaatatgggaggtttgtcaccatcatctattgagagacaacatccttccccaaggtggaaaagaagc

SEQ ID NO: 246318 - DNA, 597 bp, Homo sapiens
ttaccaaattcatcctttgttttctagatgcccctacatattaccctgcttctgtttccaccacttgaatattcatcttcaaatttctatcaaaatgatcaatggaattgaacactcaatgaactggtcattcagtgaattgattcttagctaactaattttccacaaacagcccctcacctgktgcatacacaggcttgtgaatcactctcctgttctacaattggagtttcaaagcacctgttagaaagaggttcagtcccgatccacataagccggtctgaatatgggaggtttgtcaccatcatctattgagagacaacatccttccccaaggtggaaaagaagctttagtgttgaaagcttgcctgctgtttgtttacttgaatttgggcgctttctctgacctcgctgaaaagtcatgatgaaagagcaggctcttggcaggtgtgtatgttataagtgacatgctttaaaaacacctcgtgtaaatcagatattgccagaaaatggaaattgcagctacaaattgcatacttattacagcagtgtctgatatatgaggcaatgttgatgctacataacaggtagcctgag

SEQ ID NO: 246319 - DNA, 621 bp, Homo sapiens
gtgtgtgtgtgtgtgtgtgtgtgtgtgtgtgtgtgtgtaaggcaaccctgtggtcccaggctggaactgtgtgcaagccagttccaactgtgtgtcaccacatattagcactatttaatatctgctaatggaatggctctgtctgccatcgacagcaggatcaaaagagggccatgcatcttttaaattattagcactaattaggcaaatcaaagaggaggagggcagagagaccagagaatgcattagaaggaaagcaaggggatcgctacctacttcatactgtcaagatccagctactaaacagccaattagtgctgaagacctttccggagcaacggaagaatgagcaggcctgccccaagtagaagcacgatggcttcattatggtaactccgaattaaaatgtaaaggttgctgatcattgcrtaattaaataaggttgcaggcgcccgctatccaggagtttccagggctcctttattaaagccaccttctctgcttcctcaatggccctcccacaggcaggcctggagctgtccgtagtcctgacaaacatactgacttcttaaaaggcctgttagagccaaagcgctttgagggggctttcttcctaactac

SEQ ID NO: 246320 - DNA, 559 bp, Homo sapiens
tatgctttttcttttctgtatcttctatcttgtttcctctctttccttttctcttctttcctatcttttctctcatatttctagttcctcttctttttatttctcagatctcttctttctctatccctatttctccctctttttttgaaaaccaractttaagaagaaataggattcgatttatctaaacctttgagtttggtgtgggactcagcttattcactggaaatgtgcctcatactcaggaatcgaatccctgtaaatcttaacagtcaattacattgttacactccttccatctaggaactcaagaaaagtaatttaggacactatcaaaccacctttaggtacttattttagaaacatatggataagcgttctagaaaacaagaaaaaaataggaaagaaaaaagcagcgtatgtttgttcacagccttgaatttgattcctgttttgttacttcaggaaaaatgtcctatttcagggcagggggaatgggagggcagccatgtatgtcacactggaattcaacccatgtggaggttgaaaaaaccaggtc

SEQ ID NO: 246321 - DNA, 604 bp, Homo sapiens
tgaagtggttctccttccatcactcactgccttagtttggattctctggaacccatactctgagttagagagctgtttgcaggaagcctctagggactgcccttaggattagcacctatgggggagtgaaggaagcagaaccaagcagagggaggagttaagctgagatgcatcacagtgaaggcctccactgatcccactgtgaacttggagtkggaggggccctgtagagctgctcctcttttatttcacttcataacatacttctcactttctataattatcttgttagtttttttcatgcatgctgtctgtctctggccccataatagaagcttcatgggaatgggaaatcatttggcattttcacttccgtatcccagcacctagtacaatgcctgcctcatagtggcactcagtccgtgtttgctgaatgcatgaatgggtggtgactgaatatgaatggcagagttgttaagtccccaagggcaggccctgtttcctactgttcttgaagcagtgactccctggatacttgattggcatcacctgttaccttccatcccctctaaccagccacttgtgactctccgaatgtgagaga

SEQ ID NO: 246322 - DNA, 605 bp, Homo sapiens
cagtttgaacagttggacccctttgattggccaaaactcggagactggcacaagaataggttacaatctgtttacacattcagttaggttacagttcactgtgtatggggaaatctttggactgaacttagaacatgtaaggaggaakctttaggctaaacttaacacccttgttttcaagacaactttgaggtgtaatttacactccagacatccccttcaggatcaagcaggagccaccctccacagcactttgtctaaaattgcactcttgcttggcagcctttcctcactggacctacctccccttcccttaccagttcctctaggagcacttccttgatagatcacttgcattcaagtcctgatctcagagtctgcttctggggaacatagccaagacatcagctcaattgtcggtccctctaggacactgtccctggccctctaagaacttttacttgttttaacctaggaattcctcatgacaaacccatgggctggtgcttcaatgatccccattctgcagataagaaaacatgatctaaagaaaggtcaagtagcttgcccaacatcacacagctgatgaatggcgcaggcatatg

SEQ ID NO: 246323 - DNA, 655 bp, Homo sapiens
ttactttgtaaattgttattacttggtcaagtctggacttcttgtagttcttgtgttttgtggaatattcttttatgtccatccgtgcctttggctggaattttgttgaaattatgttaaatatataaattgacttgaagataattgacatgttcataacatttagctttcctttctaggtgcacagcatgattattcatttattcaaaacttccttttaattttttatagtaggtcttacatatctctcattaatgtttaatcatttcacagtgctagatgattaattgtgggctggcaatctttgtrtatgtttcaaaagcctggaggaaatcagctctcttgtactttactcctccaggactgcaaagcctgttcctcttgtaacatttttacatttgatcttggcagagaggctactttattgccaaaagaaaatttggtagaggggtcatattctgaagttgcttgcttgatttttaaaaatctgatgattatttcattatttgctgtaaaaatgtgttctggtaacattttgtcatactctgctataattcagtggcttttttaaaagagaagatttgcagcaaattttgaccccatttttcatctgatctacaaaaggacttgcagtgcagtctagggagaaaagcag

SEQ ID NO: 246324 - DNA, 508 bp, Homo sapiens
aaaaacaaacaaacaaaaaacaacaaaaaattcaacctgggaggtacaaattcaataggtttgtgacagggctttggaatccacatattataaaaactcttcaagtgattccaatgtcagccagaactggtgaccaacaataattcacatcccatggagctccacatgggcactcctgtgagtgcaaagcaccttccggtctctggacacactgaactcaaccatgaacagaaatayggactaacgtacagctggtatttgagttaattatgccaatcatggaaaaaaacagacacagcttctcaccaaagggtgtaacttccaacttctcctaaatagcgctgttctaaagctaggcacgcccatgtgggcagactgaattcaaccttctttcccatgaccaacactctcctgacctctaggaagccacaaaatcgttgcagagaaggaaaagccttctatattgtttcccccaccaaaaaaaaaaaaagaagaagaagaagaagaa

SEQ ID NO: 246325 - DNA, 578 bp, Homo sapiens
tcaattcagttaatcctcacagcaaccctttcaggtgggtactactgttaccagaaaggggtcccgatccagactccaagagagggttcttgggtctcgtgcaagaaagaattcagggcaagtccgtaaagtgaaagcaagtttattaggaaagaaaaggaataaagaatggccactccttagacagagcagccccatgtgaggrctgctggtcgcccatttttaaggttatttcttgactatatgctgaatgaggggtggattattcatgcctcccctttttggaccatctagggtaacttcctgacgttgccatgacatttgtaaactgtcatggtgctggtgggagtgtagcagtgaggaagaccagagttcgccctcgtcgccgtcttggttttggtgagttttggccggcgtctttactgcaacctattttatcagcaaagtatttagatctgtatcttgtgttgaccttttatctcatcccgtgacttagaatgcctaacagtctggaaatgcagcccagtaggtttcagcctcattttacccagcccctattcaagatggagttgctctgg

SEQ ID NO: 246326 - DNA, 616 bp, Homo sapiens
gggcagaattttgcccagtatcgttggttgccaagtttgctggactgagaaatggccagaaataaaaaatctacgtgactcatgagcagttgttaacagttcgaatggtcttgaacttggaaggaacagaactgaaatactggtgagaaagaagtctgaggaaaatatatgtgggaggacttcttctctgaattggcagcctgaagatatttttgtcccacgtgaatgctcaccaaagggcactcactgcaaaggaagctctcaataatccagtggacaaaattacacactctgtgaatatcagtcagcttctttcctcaaccaccccattgaccgctcagtggacccacgaacaaaatggccatggcagggatagaggttcttcctgggctcaacaatacggacatccccactgaactgggaacttcacctgatgggtcataatctactaacagaatatatcaacaccgagccccatawggatccatccgtcagggataccagccagcctcctcatggcaagctgattaccttggctctccttccactactgagagaacagagatttgtcctcacaacagcagacacatattctggatatgaatttgcctttcct

SEQ ID NO: 246327 - DNA, 484 bp, Homo sapiens
attgtgttaagtcctctatttccttatttatcctctctggttattctatctattattggcactggagtattgaaatctccaaytgttattgtagaattgtctatttctccctttgattctgcctgaagtttttgttccacatatactgatggtcttttattaggtgtgaaactgtttataattgttataatttcttgctgtattgaaccttttattaacatataatgtctcttgtaagctttttaaaatgtaaagtctattttttctcatgttagtgtagcccttcctgctctcttttggttactatttgcatagaatatcttccctatcactcttagtctgtttttgtgtctttggatcttaagtgagtctcttgcagacagcatatagttggctcatatttttcaatacattctgccaatctctgtcttttgatttgacagtttaatccatttaaatttaaagtaattactaatgagggact

SEQ ID NO: 246328 - DNA, 484 bp, Homo sapiens
attgtgttaagtcctctatttccttatttatcctctctggttattctatctattattggcactggagtattgaaatctccaattgttattgtagaattgtctatttctccctttgattctgcctgaagtttttgttccacatatactgatggtcttttattaggtgtgaaactgtttataattgttataatttcttgctgtattgaaccttttattaacatataatgtctcttgtaagctttttaaaatgtaaagtctattttttctcatgttagtrtagcccttcctgctctcttttggttactatttgcatagaatatcttccctatcactcttagtctgtttttgtgtctttggatcttaagtgagtctcttgcagacagcatatagttggctcatatttttcaatacattctgccaatctctgtcttttgatttgacagtttaatccatttaaatttaaagtaattactaatgagggact

SEQ ID NO: 246329 - DNA, 597 bp, Homo sapiens
tcagctgtgtgagattgccgaggtcctgatgcggctctgacccatccaggctccccttgccctctgccttctgccccaaactgtgtcactttttgtttccctcaaatgctctttcctttcctgttctcatcttatcaacccacatacggccctctgttcccttcccctccgtgtaagggtgggaggaagttgcctagcacaccttttgttgtggccagacaactgattgtacctggccagtgtctgacacttcasttcctacaggctcagcaacctgctgctggggttctttccagaaagctcgtaaagcaaaggcacctagaagatgccatgagctggtagtgaggagacacaggaaggctcaaagatacgtagggtgcctcgagaagcatggccacttctgttgatgcccacttactctcatatttggtgctcccacccagggaatcatctgtttgtttcctttttgagtctctgccccgccctgcctcacccactctgtttctctgcctttcttctctatcttgtgacctctccctctggcataaggaattctttgatgtagttagtactactggcaccttgatttcattcgtt

SEQ ID NO: 246330 - DNA, 593 bp, Homo sapiens
ctggacctccctccctgccccactgaagcctgagaaacacagaactccttgtccatgagcaagggagctcaagcactgggccaggagcggggcagaaaggtgccagtggatagctagacctgaccatcctgggcaactatcacacaccagagcaaaaggggtttaggtgctttgccaagaaatttcttctgtgcatgcctgtatgagagagagagagagaaagagagagagagagagtgtgtgtgtgygcgtgtgtgtgtctgcctatgtttgtctctgtgttcaatctcagtctgctagccaaatcctagggaccccacaccctgcaatcacaaggactgacctggcaggtggaatcttcatgaagcagaagctgagatctagagatccagatttagagtgttctgtaaagcctagagaagtgtccctttctttctcctccctcacctcaccctatatctccaccatcccctaaaagggcatcctaccaactagctatgaaaaaaaaaagaatttgctgagaaatctgttacccaagaaatattttcaggctgcaagcaaatgtctagttgtgcacatttccatccttcaaa

SEQ ID NO: 246331 - DNA, 632 bp, Homo sapiens
gagaccatggggctgggctgtccactcattaaagtgggcggccgccctcccatcggmgggggaagtctagtgcagcaaaccctggcctgccttccaccactgccactgaggtctgtatttctcggaggggccctcctgttctcacccccctcttgctgtgctaactgcacctcctgttgccgacgggttccagaacgcagaggaaaactcccgcatctccatcaccttcttccgcctgttccgggtcatgcgtctggtgaagctgctgagccgtggggagggcatccggacgctgctgtggaccttcatcaagtccttccaggtagccgcccctcatgtcctgcggcccggggatcgcagggctgccgcgtggcccagaacacagctgacacaaggaggagccctccactctggggccctgctccttcctctgtgtggcagaactcggccgctctgcctggctccctgtttccgcaccgagaggcctagacgaagcatgtggtttccaaggcaggctcagagccccagaaggccaggtggtaaaggagggatgggagctaaggggaggcagaaagggtctgccttacttttaaccatcgtttatgtctttctgcacaagaatttactggaca

SEQ ID NO: 246332 - DNA, 479 bp, Homo sapiens
tgacttaaggagcacaggaaatgggagtaagtaagtcagtacagagaacattccagcgatctgctgctgatgcccagctctcttaaggcctcttaaggaactctcagaagtgctacaagcccatcagacctgggctcacagctgaggtcatctcagcttctagcctaatcaagatgtaggactggtctttggcaaaactttgaaggaggcaaagtgtagcttcctcctgttgattctgcttttgaattgttgtataagactgctcttccccaaagtgctcattcttcagatatttgtccttgtctcagtgtyttagtctattttgtgctgctataaaggaatacctaagcctgcgtaatttatttaaaaaaaaaatggttcgcagttttgcaggcttacaaaaagcatggcaccagcaactgcttggcttctggtgagggtatcaggctgcttccactcatggcagaaggtgaaggaga

SEQ ID NO: 246333 - DNA, 479 bp, Homo sapiens
tgacttaaggagcacaggaaatgggagtaagtaagtcagtacagagaacattccagcgatctgctgctgatgcccagctctcttaaggcctcttaaggaactctcagaagtgctacaagcccatcagacctgggctcacagctgaggtcatctcagcttctagcctaatcaagatgtaggactggtctttggcaaaactttgaaggaggcaaagtgtagcttcctcctgttgattctgcttttgaattgttgtataagactgctcttccccaaagtgctcattcttcagatatttgtccttgtctcagtgttttagtctattttgtgctgctataaaggaatacctaagcctgsgtaatttatttaaaaaaaaaatggttcgcagttttgcaggcttacaaaaagcatggcaccagcaactgcttggcttctggtgagggtatcaggctgcttccactcatggcagaaggtgaaggaga

SEQ ID NO: 246334 - DNA, 561 bp, Homo sapiens
gatgccctgtgccaccttggtactctgtagagagtccccaccagcaagaaggccctcaccaaatgtgtcctcttgaccttggacttgtcagtctccataattataagaaataaactcctgatgcagtggctcacgccagtaaacccagcactttgggaggccgaggtgggtggatcacctgaggtcaggagttcgagaccagcctgaccaatatggtgaaacgctgtctctactaaaaatacaaaaattagctgggcgtggtggtgtgcacctgtgtcccagctacttgggaggctgagacaggagaatcgcttgaacccaggaggtggaggttgcagtgagctgagattgcgccactgcagtccagcctgggtgacagagtgagactccatctcgaaaaaaaaaaraagaaactcctttaaaaataagttatccaattttagaattctgttataagcaacagaaaatgaactaagacaatgtcattaaacaaaaacaaacaaaaacgaacataaaacaatattttgtactgattggttgatgaacatattgtgaccagaa

SEQ ID NO: 246335 - DNA, 585 bp, Homo sapiens
tctatgctacaatcgcatcaactatggtacaaatatctgtttattatgttcagacaaaaagaaaagaaaaaccagtatctatttattctttcagaattcactttgtatttattttgtccaattaaaaaataaatgtattgggattgactggaatggcattaaggtatataaaacagttccagaagaactaaaatcattctaatattccatttccaatttaatattgkggcatatttctctgtttatccaaattttccatctttatttatgagtcttaaccattccctgataaagtttgattgtttaacaatttagtatgcatctcagagagggccagactggacagattacagccggtctggaatcccattccgctgaagtgaagacaagcagcatgcgggctctttaaagccgcaaccttagctgcccttgctgaccattcctgagatatccctggccccacagtcctagaaactctcattattttgatacctctttatttttagggtcccaaaacattttgggtaagcacaactagtttacatccctcctactaactaaaacactagaaagaactatcgaggg

SEQ ID NO: 246336 - DNA, 488 bp, Homo sapiens
agcaatgcatgagtgtaattagaagttattttctagtcacccatagttgactttttgaggtgagtagtattcctctcatataaaagagctatgggatgcgcatgtaaaaatatactttgaggaggcaaaatggagagaacttaggtagcagaattttaaattttaaataaagtagatatttggttagtacaccctttctgcaagacaaattgtcagtgtgtactaagagcattaaaactctttgacttagatcctaaagatgcacacaatgattaatgaatgaaaattttgtatgtaccaattatttatattagggaaaatttataaatmcaataattatatgattaattaaattatgatatagccacataatagaggcataatcagtcacaaatattattttttatttgggaaaaactcactaaacgtaaaggtaaactcacaaaatgaaaatgaagtatgtgcctttcaaagagaggtaaagaaaa

SEQ ID NO: 246337 - DNA, 598 bp, Homo sapiens
ttttttttctttttgcttaggcaaactcctgaaaactacttctcttcctattttcatgcagagaaacttaatttctccttgccttttctccccctgtggagttaaaaatagtatggatgcatttattttgtgtcaatttccattaggatgcctgcagatactaacagattcttcaaagtccaaaaagcaacctcagattttcacattggggtaagtggaaaatagaaggcccttgattcctattaactaacctgattgggtatcaccattgttttcattgctaataattgttttccaatgagaatatgaatatttttattttaatggaagttttatacctacagtaaattcataggcattagttcattcactactaaaatgtatacttctctgaactcagacacacaggccatttaacaggatacatgtgacataataaattaaagtgacatgaaaatgaaagtttcatctatttagaactgcagagaagatttcaggttgtcagattatatgttattactaastcttggttattgaggttagtgcagtaaattgattgagtgcttcatttaaaatactaattgagcacctgtctgta

SEQ ID NO: 246338 - DNA, 602 bp, Homo sapiens
tagagaagcagagtgccgagggagtgggggcggtgggaggcggtaagtgctaagcatcggtcccctcagcagtttgaatgattttatgaagcaggtaagattccttcataggaagctgagagagggtgagggtaagtggaggggcttggatgatcacagtatgaaaaaatgggaaaaatggaaggaagactattctattcaagaagacctaacagcaaagccatgctcatggaccagtgactaggccaatctgaccagagcagagatttcagatgggaaaaagcgtgaaaatcatattttagtagcgttggaaaatatytaagatttcatcagcaagtttcctggaagagattgagactggaaggttagtttgatttatcagtgtctagtaaagttgaaaacacacatacgatatgttctagtcaatgcttggcaggaaacagaatgagctctcaccctgggtaattgaggacaattcaataaaagaactatttaccaaaatgtgggcagggttaatggcaaccttaaaaagcaacaagggtagcaatagcaggggagcctgggggacttcattgctgcccccaggcctgaagaggcaaaga

SEQ ID NO: 246339 - DNA, 602 bp, Homo sapiens
tagagaagcagagtgccgagggagtgggggcggtgggaggcggtaagtgctaagcatcggtcccctcagcagtttgaatgattttatgaagcaggtaagattccttcataggaagctgagagagggtgagggtaagtggaggggcttggatgatcacagtatgaaaaaatgggaaaaatggaaggaagactattctattcaagaagacctaacagcaaagccatgctcatggaccagtgactaggccaatctgaccagagcagagatttcagatgggaaaaagcgtgaaaatcatattttagtagcgttggaaaatatctamgatttcatcagcaagtttcctggaagagattgagactggaaggttagtttgatttatcagtgtctagtaaagttgaaaacacacatacgatatgttctagtcaatgcttggcaggaaacagaatgagctctcaccctgggtaattgaggacaattcaataaaagaactatttaccaaaatgtgggcagggttaatggcaaccttaaaaagcaacaagggtagcaatagcaggggagcctgggggacttcattgctgcccccaggcctgaagaggcaaaga

SEQ ID NO: 246340 - DNA, 573 bp, Homo sapiens
tacttgttaacattgtggtagcagctccactttcttgcccatctgcctccaggtaagggcgtgtgacagctgggcaggatgcatctgatggctccattagggttaactgttggagcgcctctgcccagacgaaagcctggcaggtgatttcagggggcgtctgggccattactcctgaatgcccaatgcactgggagtagcagaggctgtgcacagtctgagattctagggaatcttttccttctcaagctgagaattgataatcgaagcatgccaaacattcgttattatatgcaacttgtaaaatcctaaatagtcttgtccaattgtccctttgctcttargttttgaggcatttatcttggaattttatctgccagtttagaaatctttagctggtcgggcttaattctgggggcagtttgtatttctgggaaggcgggagaaaaatgacaatctcagttttgaattggcgttttaatatcgttcaccagatccacgctgaaagccggtgtaaacagcgttcaaaaattccgccctcccaaaaaaaggatgctgaaaccgatttccaac

SEQ ID NO: 246341 - DNA, 545 bp, Homo sapiens
acacatttccctactgctttcttgcctgtataaatggggtgctcctcaggtcaaatctgctcccctgtggcttgctttccttcaaatcatattctagaaacagatcccatataacagcttctgacttgcagggtcccagaatgtcagtgctgaaagagattgcacagcccaacgccttaccttcttaagatcaggaaactgggagcaccagaagcgctgactaatttgtctgagtcacagtcatatttaggaacaaaatccaycttttttccaaagtcattcagcaagtctctctatgaacacatttaggtttgcataggtcagtgattctcaaccaggggcgatttttgtcaggggacatttggagacatttttggctgtcacacagaagaggtgctgctggtatctagtaggtagaggtgagggtgctgttaagcttcctgcaatacacagagtgccccccaccaacagcccccagcaacaatgaattatccagccccaaatgtcgtagtgctgaggttgaaagaccctggtgtagggtaata

SEQ ID NO: 246342 - DNA, 510 bp, Homo sapiens
ccatagtcaaactccctttcatgggcttccagtctcctggttgatgattttttcccttttcttttgggtagcaaaaagatgaacaaattgagagtgctttgtgctgaggtaagtcacaccaagatctctgtgcacctttctaagaaagaaagataaaattatattatctcagcaaatggagtatgtaacacttgcaaaagttcctaggaggaatctttgtccaaaaatcatgcccacttgctgtttaatgctgctactgaagtacagaaaagaaccagctcattaaacctggcttagataaggtaaaacaagtgattcyaagtcctcctccctgccaattcttcctgatttgggagagataccaaaagatagaaattctgggtctgtctgaatatgtttaaaaatatttatttcaaaagcaagggcgcaaacacccaggagaatgaaattacggtgcacatgtctgaatgtgttgtcatgtgattttgagtagaaaatgacgaggcagca

SEQ ID NO: 246343 - DNA, 573 bp, Homo sapiens
aagccggctggggagttgagtgaatttctattagctgcaagaacgttgttgcagagcaggatttatgaatcaggcataattgaaggaaggtggaaaagcgaaaaaagctgcggtgctcctcagaaaaaccacataaaccaaaactcattgttcatggcatgaactccccccaracagaaggagaaatggtcatgtcatctggccttggaccaggaagccttcctttcctaattggggtagatttagactaatgctaaaatgatacaaattccctaaagtacagcagctcctgatgacgctgagctcaaccaaagttttgggacttcgcacatgctgttctctttgtctggaatgttctaaccaactttcttgagccctatccttcctgtggctcaccaacttctcagtcttggatgttttagctcataagacctcatccaagaggtcttctctatttcccctggtctgagttgctgcagcatgttggctcacgcctcgagtactctactgtatactgtaattgaccaattactcagtcactgtccccgccccccacagactctgagtccccag

SEQ ID NO: 246344 - DNA, 573 bp, Homo sapiens
aagccggctggggagttgagtgaatttctattagctgcaagaacgttgttgcagagcaggatttatgaatcaggcataattgaaggaaggtggaaaagcgaaaaaagctgcggtgctcctcagaaaaaccacataaaccaaaactcattgttcatggcatgaactccccccaaacagaaggagaaatggtcatgtcatctggccttggaccaggaagccttcctttcctaattggggtagatttagactaatgctaaaatgatacaaattccctaaagtacagcagctcctgatgacgctgagctcaaccaaagttttgggacttcrcacatgctgttctctttgtctggaatgttctaaccaactttcttgagccctatccttcctgtggctcaccaacttctcagtcttggatgttttagctcataagacctcatccaagaggtcttctctatttcccctggtctgagttgctgcagcatgttggctcacgcctcgagtactctactgtatactgtaattgaccaattactcagtcactgtccccgccccccacagactctgagtccccag

SEQ ID NO: 246345 - DNA, 573 bp, Homo sapiens
aagccggctggggagttgagtgaatttctattagctgcaagaacgttgttgcagagcaggatttatgaatcaggcataattgaaggaaggtggaaaagcgaaaaaagctgcggtgctcctcagaaaaaccacataaaccaaaactcattgttcatggcatgaactccccccaaacagaaggagaaatggtcatgtcatctggccttggaccaggaagccttcctttcctaattggggtagatttagactaatgctaaaatgatacaaattccctaaagtacagcagctcctgatgacgctgagctcaaccaaagttttgggacttcgcacatgctgttctctttgtctggaatgttctaaccaactttcttgagccctatccttcctgtggctcaccaacttctcagtcttggatgttttagctcataagacctcatccaagaggtcttctctatttcccctggtctgagttgctgcagcatgttggctcacgcctcgagtactctactgtatrctgtaattgaccaattactcagtcactgtccccgccccccacagactctgagtccccag

SEQ ID NO: 246346 - DNA, 573 bp, Homo sapiens
aagccggctggggagttgagtgaatttctattagctgcaagaacgttgttgcagagcaggatttatgaatcaggcataattgaaggaaggtggaaaagcgaaaaaagctgcggtgctcctcagaaaaaccacataaaccaaaactcattgttcatggcatgaactccccccaaacagaaggagaaatggtcatgtcatctggccttggaccaggaagccttcctttcctaattggggtagatttagactaatgctaaaatgatacaaattccctaaagtacagcagctcctgatgacgctgagctcaaccaaagttttgggacttcgcacatgctgttctctttgtctggaatgttctaaccaactttcttgagccctatccttcctgtggctcaccaacttctcagtcttggatgttttagctcataagacctcatccaagaggtcttctctatttcccctggtctgagttgctgcagcatgttggctcacgcctcgagtactctactgtatactgtaattgaccaattactcagtcacygtccccgccccccacagactctgagtccccag

SEQ ID NO: 246347 - DNA, 577 bp, Homo sapiens
atgactgggttgggatattcactgggctagatgatttccaaggttcctcccaatgcagatgctaggggcccatgactgcacctgacttgggaccatcttcccaccaaaagaagtcaccatggctgcaggctatgtctgcttctgcccttaagggggatgaagctgtcatttcacagtgagatgtgcactgcaggtaaaaccctgaaacggagcagagtgacagggtgacctcacagttaagagcatgggttttgtgtctgggtcaggatcctggctctgcagggtgacccactcttgggcctcagggctatcatcgctaacataggaataaaaatacaactacctgcttcccaggagctgatgagtagaaagtgcctggaatggcacctggcacacagtggtcattttcattagatccrtgtccaggcttaagtgcctggggcaggtcacttcctaagctcaggtcctgaccatagagaaaaaggaggccagagggatggtgaagaactgaatgaggagaggggagggagtgaagaaatgaaacaaggaggtaagaaagacaggcccaatcagttgc

SEQ ID NO: 246348 - DNA, 585 bp, Homo sapiens
attcattacacatagaagaaaagccaaactttccctggcccagtgcaatctaatttttatctcctacactttttcctttgagcacacaaagcacgttcctactaggagcctaatcacctgcagttccctgacatggaatgcttttgccctagatctctgcatggctggaagcttttcctcacttaggtggtttttcaaatgccactttctcagggagaacttcctgaccgtttygtctaagttagacctcatcagccccacccccagagaccataccatggtcccatttcattttgtaaacactgatcatgctctgactctgtttcgtttatttattttcttgcttttggtcagtaagctccagaaggataaagaacatgtctgtcccatcaccactgtagtgcctggaaccaagtgggcactcctgattatctcttgattatgcccaggggaatgatgtgttagaaaaataagctagaggccggatgtggtggctcatgcctgtaatcccagcactttaggaggtcgaggcaagtagatcacctgaggtcaggagttcgagaccagcctggtcaaaatggtaaa

SEQ ID NO: 246349 - DNA, 585 bp, Homo sapiens
attcattacacatagaagaaaagccaaactttccctggcccagtgcaatctaatttttatctcctacactttttcctttgagcacacaaagcacgttcctactaggagcctaatcacctgcagttccctgacatggaatgcttttgccctagatctctgcatggctggaagcttttcctcacttaggtggtttttcaaatgccactttctcagggagaacttcctgaccgtttcgtctaagttagacctcatcagccccacccccagagaccataccatggtcccatttcattttgtaaacactgatcatgctctgactctgtttcgtttatttattttcttgcttttggtcagtaagctccagaaggataaagaacatgtctgtcccatcaccactgtagtgcctggaaccaagtgggcactcctgattatctcttgattatgcccaggggaatgatgtgttagaaaaataagctagaggccggatgtggtggctcatgcctgtaatcccagcactttaggaggtcgaggcaagtagaycacctgaggtcaggagttcgagaccagcctggtcaaaatggtaaa

SEQ ID NO: 246350 - DNA, 450 bp, Homo sapiens
agatgccactaccatgccatccacacttttaagagagattctcagtggtggyaaaccccaggcaagggactgtctgctttcagctttcaagccagggaagtccatcactcatctgatggaggaatttcaccatctgatcacagctggccccaccctgttctcatttcactcttctgctggcttcctggttgacaaggaccctcttgcactaccgaaatatgggcacaaagctttcccaggacgcatcatgaatgaacaatctgagattggtctttcaggatggaggcctaaaaacactccaggccaagagagaagagacagggcagctgaaggccagggtcttgcaagatcagcacccacatggagcttttctcccaaacactcctggggtcatgtaacctcaatgcctgcttcactcagagcagtttggttcactaagcatccactgga

SEQ ID NO: 246351 - DNA, 484 bp, Homo sapiens
actatcatctgtgtatgaactgtgagcaagtgtgatataagaattggttgtgaggccrggcgcggtggctcacacctgttatcccagcagtttgggaggctgaggcaggaggatcacttgagcccaggagtttgagacaagcctgggcaacatggtgaaaccctgtgtctacaaaaaaatacaaaaattagtcaggcgtggtggtgcgcacctgaagtcccagctactctggaggctgaggcaggaggattgcttgagcccaggaagtggaggctgcagtgagccaagattgtgccactgcactccaggctaatcaacagagcaagacccagcgtccaaaaaaaaaaaaaaaaagtgattgtgtgattgtgccccttttccaccaactttctcttgtgccccgaggcagaagatcgactcttcctaggcagggcagggctaaaagatggatggagcttggatccctgaatcacttgtggatgaa

SEQ ID NO: 246352 - DNA, 587 bp, Homo sapiens
actgccttgtccaatggttatgatgctgtagtaagttaaaatgtgaaagtgcttagaatagtgcctggcccacagctaacactcartgaacttcaacgtttgttgttagtgctatgatggacactgagtctgcaacagcaataataacacctacaatagcaataataataacaccaatattggcctagtgctagatgaggacttggagaccatctaaactggtctggtgcctgggtgcccactctgactcatcaggagggaatgcctggagtattggcttgggttgctttgctatttcatctgggcttagtgagaatggtgctgcaaccgattagcaatgcctgcagtgggcaaggaagggaagagttagggaagccatgctattgattagccattcctgatgctggtccaagccctctccttgtacagatgaggaaactcagagaaggaagagggcagctcagaggaagctcagagaaggactaaggcttgctcaaggccacacaggcagtcagagacaagactcctgagcctgcctctgcagttccttgctgggccctggtctatgtcacttaatcctgcggaga

SEQ ID NO: 246353 - DNA, 587 bp, Homo sapiens
actgccttgtccaatggttatgatgctgtagtaagttaaaatgtgaaagtgcttagaatagtgcctggcccacagctaacactcaatgaacttcaacgtttgttgttagtgctatgatggacactgagtctgcaacagcaataataacacctacaatagcaataataataacaccaatattggcctagtgctagatgaggacttggagaccatctaaactggtctggtgcctgggtgcccactctgactcatcaggagggaatgcctggagtattggcttgggttgctttgctatttcatctgggcttagtgagaatggtgctgcaaccgattagcaatgcctgcagtgggcaaggaagggaagagttagggragccatgctattgattagccattcctgatgctggtccaagccctctccttgtacagatgaggaaactcagagaaggaagagggcagctcagaggaagctcagagaaggactaaggcttgctcaaggccacacaggcagtcagagacaagactcctgagcctgcctctgcagttccttgctgggccctggtctatgtcacttaatcctgcggaga

SEQ ID NO: 246354 - DNA, 353 bp, Homo sapiens
ccaaatgctctgttcatatcctcacmccagaactgcaaagttggctgaatggtgatctttggcactgtttgataaagaagaaactgaggtccagagtaggggagtgacagatcttgagccacactgcaagtggagccaaggccctgtcctttggcaccatgaggaagaagaagggcaagaggggcttggaacagggctggccacagcagctcttgcagcctattcatcttctgagctgaaatatttatttacgcaccccatttaatcaggatatgccgtaattagcagcagatttgtgcctcctgcccatggtgttatttatttcgggttccaggcagccactttcctggctg

SEQ ID NO: 246355 - DNA, 607 bp, Homo sapiens
gaagtggctataacaggtgtggggtgggggctgtccaggggagtcagccacgtgggtctcattttgcagatgagaaaactaaggcttaacgaggagagatgacttgcccaggtgcagactgtaagccccggaggctctgagagagccccagataaacagctcctgggccaggtgaggtggctcacacctgtaatcccagaactttgggaaatcaaggcaggaagattgtttgagcccaggagtttgagaccagcatggacaatctggcaaaaccccatctctacaaacattttaaaaaaaaaatttagctgggggctgggcacggtggctcacrcctgtaatcccagcactttcggaggccaaggttggaggatcacctgaagtcaggagtttgacgccagcctggccaacatggtgaaaccccatctctgctaaaaatataaaaattagctgggcgtggtggtgggcacctgtagtcccagctacactcaggaggctgagacaggaaaatcgcttgaacctgggaggcggagattgcagtgagccaagattacgccactgcactccagcctgggcgacagagcaggactccatcacaaaacaaaac

SEQ ID NO: 246356 - DNA, 607 bp, Homo sapiens
gaagtggctataacaggtgtggggtgggggctgtccaggggagtcagccacgtgggtctcattttgcagatgagaaaactaaggcttaacgaggagagatgacttgcccaggtgcagactgtaagccccggaggctctgagagagccccagataaacagctcctgggccaggtgaggtggctcacacctgtaatcccagaactttgggaaatcaaggcaggaagattgtttgagcccaggagtttgagaccagcatggacaatctggcaaaaccccatctctacaaacattttaaaaaaaaaatttagctgggggctgggcacggtggctcacgcctgtaatcccagcactttcggaggccaaggttggaggatcacctgaagtcaggagtttgacgccagcctggccaacatggtgaaaccccatctctgctaaaaatataaaaattagctgggygtggtggtgggcacctgtagtcccagctacactcaggaggctgagacaggaaaatcgcttgaacctgggaggcggagattgcagtgagccaagattacgccactgcactccagcctgggcgacagagcaggactccatcacaaaacaaaac

SEQ ID NO: 246357 - DNA, 607 bp, Homo sapiens
gaagtggctataacaggtgtggggtgggggctgtccaggggagtcagccacgtgggtctcattttgcagatgagaaaactaaggcttaacgaggagagatgacttgcccaggtgcagactgtaagccccggaggctctgagagagccccagataaacagctcctgggccaggtgaggtggctcacacctgtaatcccagaactttgggaaatcaaggcaggaagattgtttgagcccaggagtttgagaccagcatggacaatctggcaaaaccccatctctacaaacattttaaaaaaaaaatttagctgggggctgggcacggtggctcacgcctgtaatcccagcactttcggaggccaaggttggaggatcacctgaagtcaggagtttgacgccagcctggccaacatggtgaaaccccatctctgctaaaaatataaaaattagctgggcgtggtggtgggcacctgtagtcccagctacactcaggaggmtgagacaggaaaatcgcttgaacctgggaggcggagattgcagtgagccaagattacgccactgcactccagcctgggcgacagagcaggactccatcacaaaacaaaac

SEQ ID NO: 246358 - DNA, 610 bp, Homo sapiens
aagtaaaactctctctgaccttcattyctactccccagaagcaacaaggcattcattcattcattcattcattcatcagttggtcactcgactatttattgactgtttactatgtgtcatacaccatggtagctgcttttaacaattgtgtgtatgtgtgttaactctctgtcaatgttttctggatacaccctgtttctcagaggatgtgagcgtacaacaatctaatttgcgtgtttttttttctgcacccgacagctcagcctagagggagttctgtgtgagcacgtccacatctccctcatgctttttaaaggtgatagaggagccgatgaatgaatagccaaatgtattaaacctgtcctctcttggcagacattcaggttgcttctctgtttccttttctatcacacacaccaccgcagtgaacatgcttgttcatgcagtcaccttcttcattgggtgggctgattcacatggttaattcctgtgacttgaagatcttttatattttacaattggataaatttcaaaatttaaatctcttgccatgcgaggtgtgtttccagtcctgtcagaacatggaccccaatctccactcaggctgaca

SEQ ID NO: 246359 - DNA, 529 bp, Homo sapiens
cccctagtcccccaccaggaggcttatgcagcctggacctggaagaagaccccttgggaagtgctctatcccgggggctgcggggactgcctgatgaagacagagccatttgctaataccatgtggctgctgtgacagtctgttaatgccatttacaacgtgctgtaattatgtctcacacatgctggcggcccagccagcaggaacgttccctgggaggggcctaggaaagattcctttagcaggactgggggctggtcttccttagaagtctgcggacctggggggctggcagccactgtgaaggagaaaaaattcttccccttgatctagcagaacccakcgaggagagtgtcatgcacatcaatgtcttcatgaaggcccctggggttgtgcactgcacagcctgcccagccctacttggctgctctaggcatctgagaaagagttcatccctgcttggacctggggtttccaccctgaattgctgtggaactttgcacaagccatggcccctacctgggcctca

SEQ ID NO: 246360 - DNA, 412 bp, Homo sapiens
gagcagctatgattactaccctcattttacagatgaggaaactggggctcacagaggttaagtcacttgccccgggtcacacagccagtggtgaaatgcttactttaggttgtgtagtctttctttctttctttttgagacagggtctcactctttcacccaggctggagggcagtggcatgatctcgcctcactggaasctccccttcctgagctcaaactatcctcctggttcagcctcccgagtagctgggactacatgcatgtgccactaggcctagctaattttttgtatttttggtagagatggggtctcaccatgttggacaggctggtctccaattcctgagctcaagcttcccatccaccttggcctcccaaagtgctgggattagaggtgtgagccactgtt

SEQ ID NO: 246361 - DNA, 427 bp, Homo sapiens
gtcccttctctgtattaggtgctgtcttgggtgcagaagatcagtgaaccctcgggtcactggtattctagaggggagaggcagacacraggatgatacagatagaaaatgccacaggtcaacaagatgcatattttattttattttaaaaatagagacaaggtcttgttctgtcaccctggtaggagtgcagtggtgtgaccatagctcattgcagcctggacctcccaggtccaactgatcctcctgcctcagcctgttgagtcactaggactacaggtgcaactatgccaggctaattttatgtgtgtgtgtggagacagggtcttgctatattgcccaggctggtctcaaactcctggcctcaagtgatgttcccacctgggtctccgaaagtgatggcatcacaggtgtgaggtaccacccc

SEQ ID NO: 246362 - DNA, 546 bp, Homo sapiens
ttgggagtgcattgaggcctatggtgaaaaaggaaatatcttcatttgaaaactagaaagaaactttctgagacgctgctttatgatgtatgcattcatctcacagagttaaaccattctttggattcagcagtttggaaacactgctgttgtaaatcagcgaagggatatttgggagctcattgatgacaaatgcaaaaagcgaatatccccggatgaaaattagaagaaagctaattgagaaactgctttttgaagtttgcattcaccttgcagtgttaaagcttccttttyattgagcggtttggaaacaattgttttgtagaatctgcgaagggatatttggcagcccgttgaggcctatggtgaaaaaggaaatatcctcagataaaaactataaagaagctttctgcaaaactgttatgtgatatgtgcattcatctcacagcgttaaacttctcattgcattgagcagtttggaaacaatgttttgtccattccacgaatggacatttgggagctcattgaggccaatggtgaaaaagt

SEQ ID NO: 246363 - DNA, 491 bp, Homo sapiens
aagggatatttgggagctcatggaggcctaagagaaaaatgtaatatcttcagataaaaactcaaaagaagytttctgagagactgctttgtcgtgtgtacattcatgtcacagatttaaaactttctttggattcagcagtttctaaacactggttttgtctattctgtgagtggacatttgggaactgattgaggccaatcacgaaaaagcaaatatcccaggataaaaactagaaagaagctatctgtatgaaaaagacgactttaattctttgaggtgaatgcatacatcccaaagcagtttctcagataccttcctcctttttttaacctgggatattcactttttcacctttggcctcaaagatctcccaaatatccctttgcagtttattccaaaacagtgtttacaaactactgaatccaaagagaggattaactctgtgagaagaatgcacacatcacagaggaatttctcaaattctgtct

SEQ ID NO: 246364 - DNA, 491 bp, Homo sapiens
aagggatatttgggagctcatggaggcctaagagaaaaatgtaatatcttcagataaaaactcaaaagaagctttctgagagactgctttgtcgtgtgtacattcatgtcacagatttaaaactttctttggattcagcagtttctaaacactggttttgtctattctgtgagtggacatttgggaactgattgaggccaatcacgaaaaagcaaatatcccaggataaaaactagaaagaagctatctgtatgaaaaagacgactttaattctttgaggtgaatgcatacatcccaaagcagtttctcagataccttcctcctttttttaacctgggatattcactttttcacctttggcctcaawgatctcccaaatatccctttgcagtttattccaaaacagtgtttacaaactactgaatccaaagagaggattaactctgtgagaagaatgcacacatcacagaggaatttctcaaattctgtct

SEQ ID NO: 246365 - DNA, 491 bp, Homo sapiens
aagggatatttgggagctcatggaggcctaagagaaaaatgtaatatcttcagataaaaactcaaaagaagctttctgagagactgctttgtcgtgtgtacattcatgtcacagatttaaaactttctttggattcagcagtttctaaacactggttttgtctattctgtgagtggacatttgggaactgattgaggccaatcacgaaaaagcaaatatcccaggataaaaactagaaagaagctatctgtatgaaaaagacgactttaattctttgaggtgaatgcatacatcccaaagcagtttctcagataccttcctcctttttttaacctgggatattcactttttcacctttggcctcaaagatctcccaaatatccctttgcagtttattccaaaacagtgtttacaaactactgaatccaaagagaggatyaactctgtgagaagaatgcacacatcacagaggaatttctcaaattctgtct

SEQ ID NO: 246366 - DNA, 615 bp, Homo sapiens
cctctgccagataaattcgcacatcacaaagcattttctcagatagcttgcttcatatttttatcctggaatatacgcttttttgccattgacctcaatgaggtcccaaatatccatttgcagaatggacagaaacagtgtttctaaactgctgaagtcaaagcaagctttaactcagtgagatgaatgcacacatcacaaacaggtttctcagatagcttccttctagtttttatcctgggatattcacaatttcacaattggtgtcaatgagcgcaaaattgtcctttcacaaaatggaaaaaaaattgtgtttccaaactgccaaacccaaaaaaaggtttaactgtgagatgaatgcacacatcacaaagtagtttctcagtgaaattctttctactttttatgtgaatatatttagtttttcaacatagtcccaacatgctcccaaatatcccttcccagrttccactaaatcagtgttttcaaattgctgaatgaaaagaaagtttaactctgcaaatgaataaacacgtcacaaagcagtttttcatatagcttccttctagtttttatcctgggatattaggtttttcaccattgacctaaacaagc

SEQ ID NO: 246367 - DNA, 478 bp, Homo sapiens
gtttctttctagttttaatcctgggatattagctttttcacctatggcctcaatgaactattcaatatcctttggcagattctacgaaaacagcatttctaactggtgaatccaaggaaagtttaactctgtgagatgaatgcacacatcgcaaaacagtgtctctcaaagattctttstagtttttagctgaaaatgtttcctttttcagcataggcctcaatgcattcccaaatatcacttcacagatactacaaaaacagtgtttccaaatagctgaaagaaaagaaaagtttatgtcgagatgagtgcacccatcacaaatgcagtttctcagataacttccttctagtttgtaattcaagtatattcacttttttgcctttcacctcaattagctcccaaatatccctttgcagattctacaaaaccagtgtttccaaatggatgaatccaaagaaagttttaactctctgat

SEQ ID NO: 246368 - DNA, 555 bp, Homo sapiens
tttctcagatagcttccttgtagttttcatcctgggktatttccttttttgccatcagcttcaatgagctcctaaatgtccattcacagaatggacaaaaagagttattcaaattgctgaatccaaagaaagttttaactctgtgagacaaatgcacacatcacaaatcagtttgtcagaaaatttctttctattttttatgtgaagatatttcctgtttcaccataggcctcaataggctgtcaaatatccctttgcagattctaccaaatagtgtttcaaaactgctgaatgaaaataaaagtttaactctgtgacatgaatgagcacatcacaagtcagtttctcagagagcttccttcttgttttcattctgggatattccttttttcccctatagcctcaatgagatcccaaatagccctgtgcagattgcatgaaaacagtgttcctaaactgcttaatccaaagaaaggtttaactctgttcaataaatgcacacatcaccaagcagtttctcagaaagtttctttatagcttttatgtgagaatata

SEQ ID NO: 246369 - DNA, 594 bp, Homo sapiens
ctgtcaaatatccctttgcagattctaccaaatagtgtttcaaaactgctgaatgaaaataaaagtttaactctgtgacatgaatgagcacatcacaagtcagtttctcagagagcttccttcttgttttcattctgggatattccttttttcccctatagccycaatgagatcccaaatagccctgtgcagattgcatgaaaacagtgttcctaaactgcttaatccaaagaaaggtttaactctgttcaataaatgcacacatcaccaagcagtttctcagaaagtttctttatagcttttatgtgagaatatattctttttcaccactagccttaatgtgctcccaaatatcccttcccagattttaccaaaatagtgtttccactctgctgaatgaaaagaaagttttaaccctgtgagatgaatgcacacagcacaaagtgatttctcagagagctttcttctaatttttaacgtgggatattggcttttcccctttggcctcaaggacctcccaaatatcgaatcacagaatggaaaaaacagtgtttccaaagtgctgaatccaaagaaaggttttacgctgtgaga

SEQ ID NO: 246370 - DNA, 594 bp, Homo sapiens
ctgtcaaatatccctttgcagattctaccaaatagtgtttcaaaactgctgaatgaaaataaaagtttaactctgtgacatgaatgagcacatcacaagtcagtttctcagagagcttccttcttgttttcattctgggatattccttttttcccctatagcctcaatgagatcccaaatagccctgtgcagattgcatgaaaacagtgttcmtaaactgcttaatccaaagaaaggtttaactctgttcaataaatgcacacatcaccaagcagtttctcagaaagtttctttatagcttttatgtgagaatatattctttttcaccactagccttaatgtgctcccaaatatcccttcccagattttaccaaaatagtgtttccactctgctgaatgaaaagaaagttttaaccctgtgagatgaatgcacacagcacaaagtgatttctcagagagctttcttctaatttttaacgtgggatattggcttttcccctttggcctcaaggacctcccaaatatcgaatcacagaatggaaaaaacagtgtttccaaagtgctgaatccaaagaaaggttttacgctgtgaga

SEQ ID NO: 246371 - DNA, 520 bp, Homo sapiens
tgcgctcccaaatatcccttcacaaattctaccataacagtgtttccaaacttctgaatgaaaagaaagtcttaactctgtgagacaaatgcacacatcacaaagcagtttctcagaaagctgctttctagcttttatctgaagatattaactttttcaccataggcctcaatgtactcccaaatatccatttgcaattctaccaaatcaatgttttgaaactgctgaatgaaaagaatgcattttctctgctagatgaactcacacatcacaaagcagtttctcagataacttccttctagttttcatcctctgatagtcrctttttggcctttggcctgaatgagctaccaaatattccttagcagattcaacaaaaagtgtttccaaactactgagtctgaagaaagttttatctctgtgagattaatgcaataatcacaaagcagtttctcagaaaacttctttctagtttgtaatctgaagatattccctttttcaccataggccccaatgccct

SEQ ID NO: 246372 - DNA, 593 bp, Homo sapiens
aatgcacacatcacaatgtggtttctcagaaagcttctatctaggttttatctgaatatatttccttttccaccgtaggcctcaatgcactcccaaatatcccttcgaggattctaccaaaacagtgtttccaaccagctgaatgaaaacaaaggtaaaacccttggatatgaragcacacatcacagagccatttctcagatagcttccttttagtttttatcctgggatattggctttatcacatatagcctcaatgatctatcaaatatcctttcacagattgtacaaaaacagtatttccaactgctgaatctgtagaagagtttaactctttgaggtgaatgcacacatcacaaagcactttctaagaaagcttctttcttgtttttgtctaaagatatttcctttttcaccataggcctcaatgcattcctaaatatcccttcacagattatagcaaaacactgtttccaaactgctgaatgaaaaaaaaaaaaaagtctaactctgcgagatgaatgcacatataacagagcagtttctcagattgtttccttctattttttgtcctgggatattcgttttttcct

SEQ ID NO: 246373 - DNA, 554 bp, Homo sapiens
agatgaatgcacatataacagagcagtttctcagattgtttccttctattttttgtcctgggatattcgttttttcctgtttggcctcaatgaactcccaaatgtccattcgctgaatgaacaaaaacagcttttccraactactgaatccaaataaacatttaaatctgtgagatgaatgcacacatcacaaagcaggttctcagaaagattctttctagtttttatctgaagacatttcctttttcaccataggcattaatgtgctcccatatatccctttgcagattctaccaaaacagtgtttccaaaaggctgaatgaaaagaaatgttttcccctgtgagatgaatgcaaacatcacaaaactgtttctcatctagcttccttctagtttttatcctgggatattggattttttgcctatggcctgtatgagcaattaaatatcccttcacagattctacaaaaacagtgtttcctaactgctgaatgaaaagaaaggtttatctctgtgcgatgaatgcacagattacaaagctgtttctcagaaag

SEQ ID NO: 246374 - DNA, 554 bp, Homo sapiens
agatgaatgcacatataacagagcagtttctcagattgtttccttctattttttgtcctgggatattcgttttttcctgtttggcctcaatgaactcccaaatgtccattcgctgaatgaacaaaaacagcttttccaaactactgaatccaaataaacatttaaatctgtgagatgaatgcacacatcacaaagcaggttctcagaaagattctttctagtttttatctgaagacatttcctttttcaccataggcattaatgtkctcccatatatccctttgcagattctaccaaaacagtgtttccaaaaggctgaatgaaaagaaatgttttcccctgtgagatgaatgcaaacatcacaaaactgtttctcatctagcttccttctagtttttatcctgggatattggattttttgcctatggcctgtatgagcaattaaatatcccttcacagattctacaaaaacagtgtttcctaactgctgaatgaaaagaaaggtttatctctgtgcgatgaatgcacagattacaaagctgtttctcagaaag

SEQ ID NO: 246375 - DNA, 554 bp, Homo sapiens
agatgaatgcacatataacagagcagtttctcagattgtttccttctattttttgtcctgggatattcgttttttcctgtttggcctcaatgaactcccaaatgtccattcgctgaatgaacaaaaacagcttttccaaactactgaatccaaataaacatttaaatctgtgagatgaatgcacacatcacaaagcaggttctcagaaagattctttctagtttttatctgaagacatttcctttttcaccataggcattaatgtgctcccatatatccctttgcagattctaccaaaacagtgtttccaaaaggctgaatgaaaagaaatgttttcccctgtgagatgaatgcaaacatcacaaaaytgtttctcatctagcttccttctagtttttatcctgggatattggattttttgcctatggcctgtatgagcaattaaatatcccttcacagattctacaaaaacagtgtttcctaactgctgaatgaaaagaaaggtttatctctgtgcgatgaatgcacagattacaaagctgtttctcagaaag

SEQ ID NO: 246376 - DNA, 533 bp, Homo sapiens
gataaatgcacacatcgcaaagcagtttctcagaaaatttttcaaatgtttgtctgaagatatttcctttttcaacataggcctctatgggctccaaaatatccgttcaaaaagtctgccaaaaccatattttgaatctkctgaatgaaaagaaagctttagttctgtgagatgaatggacatatcacaaaacggtttctcagatagcttccttctagtttttatccagtgatattcactttttcaccaacggcctgaatgagctatctaatatcaattcgtagattctactaaaagagtgtttccaaatagaaacagagaaagttttatctctgtgagacgaatgcaagcatcacaaagtgatttctcaaatttcttccttctaatttttatcctgggatatttgtctttttacctatagcttcctttagctatctaatatgacttcacagtttccagaaaaacagtgtttccaaactgctgaatgagaagaaaagtttatatctgccacattaaggcacatatgacaaagc

SEQ ID NO: 246377 - DNA, 563 bp, Homo sapiens
tttttatccagtgatattcactttttcaccaacggcctgaatgagctatctaatatcaattcgtagattctactaaaagagtgtttccaaatagaaacagagaaagttttatctctgtgagacgaatgcaagcatcacaaagtgatttctcaaatttcttccttctaatttttatcctgggatatttgtctttttacctatagcttcctttagctatctaatatgacttcacagtttccagaaaaacagtgtttccaaactgctgaatgagaagaaaagtttatatctgccacattaaggcacatatgacaaagcagtttctcagatagcttcctttgagtttttatccagggatattcatttttttgcctttggcctcaatgaactcccaaacatacctttgcagtttctacraaagtagtgtttccaaactgctgaatccaaagcaaggtttaaccctgtgagatgaatgcacacatcacaaagcagtttctaagaaagtttctttatagttttcactagaagacatttcctttttcaccataggcctcaatgcgctccca

SEQ ID NO: 246378 - DNA, 523 bp, Homo sapiens
agcagtttctcagaaagtttctttctagttttcatctgmagatattttctttttcgccttaggccccaaggtgctgccaaatatcctttcactgtttctacaaaaacagtgttttcaaactgctagatgaatgcacacatcactaaacagtttctcagatagcttccttctagttttaatcctgggatattctctgttttgccattggcttcaatgagctcccaaatgtccactcgcaaaatgggcaaaaactgtgtgaccaaactgctgaatccaaagaaaggcttaactctgttggatgagtgaacacatcatgaaacggtttctcagaaagcttcttgctactttctatatgaaaatatttcctttttcaccatgggccacaatgcgctacaaaatatctctttgaagattctaagcaaacactgtttccaaattgctgaatgaagagaaaggttcaactctgtgagatgaatgcacacatcagcaagaagtttctcagataacttccttctagttttat

SEQ ID NO: 246379 - DNA, 404 bp, Homo sapiens
tgccctgaaccagtttatccttaaggttgtttacagtttttatctgaagatatttcctttctcacaatgggcctccatgtgctacaaaatatctcttgtcagattgtatacaccagtgtttctaaacagctgaatgaaaagaaagatttaactctgtgagatgaatgcaaacatcactactctgtttctgaaatcacttccttcaagtttttctgctgggagtttygctatttcaccattggcctcagtgagctcctaactatccattcacagaaaggacaaaaacagtatttccaaactgctgcatccgaggaaaagattaactctgtgagaagaatgaacacatcacaatgtagtttctcagaaagtttcttgctagtttttgtctgaagatatttcctttt

SEQ ID NO: 246380 - DNA, 568 bp, Homo sapiens
tacaaaaactgtgtttccaaactgctgaaagcaaagacaggtttaactctctgggatgaatgcacatatrtcaaacgggtttctcattaggcttctttctagtttttatcagaaggtacttcctttttcaccattgacctccatagtcttccaaatatctcttggaagatcctaagaaaccagtgattctaaacagctgaatgaaaagaaaggtttaactctgtgtgctgaatgcacacatcatgagcagttttctcagataaattgcttcaagtttttatcctgggatatttgctttttcacccttggtctcaatgtgctccaaaatgtccattggcaaaatggacacaaacagcatttccaaattgctgaatccaaagaactgtttaactctgtgagatgaatgaacacatcgcaaagcagtttctcagaatgtttctttctggtatttatcaaaagatatttcctttttcaccttaggcctcaaagagctgccaaatatcctttcacagtttctacaaacacagtgtttccaaactgctgaattaaaagaaaggtttaactctgc

SEQ ID NO: 246381 - DNA, 568 bp, Homo sapiens
tacaaaaactgtgtttccaaactgctgaaagcaaagacaggtttaactctctgggatgaatgcacatatatcaaacgggtttctcattaggcttctttctagtttttatcagaaggtacttccyttttcaccattgacctccatagtcttccaaatatctcttggaagatcctaagaaaccagtgattctaaacagctgaatgaaaagaaaggtttaactctgtgtgctgaatgcacacatcatgagcagttttctcagataaattgcttcaagtttttatcctgggatatttgctttttcacccttggtctcaatgtgctccaaaatgtccattggcaaaatggacacaaacagcatttccaaattgctgaatccaaagaactgtttaactctgtgagatgaatgaacacatcgcaaagcagtttctcagaatgtttctttctggtatttatcaaaagatatttcctttttcaccttaggcctcaaagagctgccaaatatcctttcacagtttctacaaacacagtgtttccaaactgctgaattaaaagaaaggtttaactctgc

SEQ ID NO: 246382 - DNA, 574 bp, Homo sapiens
aaaagaaaggtttaactctgtgtgctgaatgcacacatcatgagcagttttctcagataaattgcttcaagtttttatcctgggatatttgctttttcacccttggtctcaatgtgctccaaaatgtccattggcaaaatggacacaaacagcatttccaaattgctgaatccaaagaactgtttaactctgtgagatgaatgaacacatcrcaaagcagtttctcagaatgtttctttctggtatttatcaaaagatatttcctttttcaccttaggcctcaaagagctgccaaatatcctttcacagtttctacaaacacagtgtttccaaactgctgaattaaaagaaaggtttaactctgctggatgaatgcacacatgactaagtggtttctcagataccttccttctagttttaatcctgggatattctctttttcgccattggcttcaatgagctcccaaacctccattggcagaaaggacaaaaacagtgtgaccaagcttctgaatccaaagaaaggcttaactctgttggatgaatgaacacatcaccaagcagtttccagaaa

SEQ ID NO: 246383 - DNA, 544 bp, Homo sapiens
actgaatgaaaagaaaggtttaactctgctagatgaatgcacatgtcaccaagaagtttctcagataacttgcttctagtttttatcctgagataagcgctttctttcaattggcttcaatgaactcccaaatgtctatttgcaggattgagagaaacagtgttttgaaactgctgaattagaagaaaggtttaactctgagagatgaatgtacacataatgaattggtttctcagacaaattccttcaagtttttatcctgcgatatttgcytttttgccattggcctcaatgagttaccaaacgtccattccaagaatgtacaaaaactgtgtttccaaactcctgataccaaaaacaggtttaactccctgagatgaatgcacacatgccaaatgggtttctcattggactgctttctagattttatcagaaatatttcctttttcaccaatgacgtccatagtcttccacatatctcttggcagattctaagaaaacagtgattctaaacagctgaatgaaaagaaatgtttaactctgt

SEQ ID NO: 246384 - DNA, 544 bp, Homo sapiens
actgaatgaaaagaaaggtttaactctgctagatgaatgcacatgtcaccaagaagtttctcagataacttgcttctagtttttatcctgagataagcgctttctttcaattggcttcaatgaactcccaaatgtctatttgcaggattgagagaaacagtgttttgaaactgctgaattagaagaaaggtttaactctgagagatgaatgtacacataatgaattggtttctcagacaaattccttcaagtttttatcctgcgatatttgcttttttgccattggcctcaatgagttaccaaacgtccattccaagaatgtacaaaaactgtgtttccaaactcctgataccaaaaacaggtttaactccctgagatgaatgcacacatgccaaatgggtttctcattggrctgctttctagattttatcagaaatatttcctttttcaccaatgacgtccatagtcttccacatatctcttggcagattctaagaaaacagtgattctaaacagctgaatgaaaagaaatgtttaactctgt

SEQ ID NO: 246385 - DNA, 547 bp, Homo sapiens
tcaatgagctgcaaatatgctttcgcagttttcacaaacacagtgtttccaagctgcttaatgaaaacaaatgtttaactcggctacatgaatgcacacatcactaagcagtttttcagatagcttccttctagttttaatcctgggatatcctctttttcacaactgtcttcaaagagctcccaaacgtccattcgcagaatggacaaaagcagtgtcaccaaactgctgaatacaaagaaaggcttaactctgttggatgaatgaacacatcacctggcagtttctcaagaagcttcctgctacctatatctgaagacgtttccttttccaccattggacacaatgcagtactgggcattcatctcatagagttgaacaattcttttgactgagcaktttggaagcagtcttttgtagaatctggaaaggaatatttgggagcaatttgaggcctatggtgaaaaaggaaatatcttcacataaaaactagaaagaagctttctgagaaactactttgtgatgagtgcattcatataacagaggt

SEQ ID NO: 246386 - DNA, 382 bp, Homo sapiens
tgtgatgtgtgcgttcatctcacagagttgaaactttcctttgattgagcagtttagaaacagtctacttgtagaatctgcaaagcgatatttgtgagcagtttgaggcctatggtgaaaaaggaaataacttcatattaaaactaaacagaatcttttgggaaaacttccttgtgatgcgtgcactcatcccacagggttgaacaatccttttgacagaaaattttggaaacacagtgtttgtagaatctgccaagggatatgttcaytcacatagatgcctgaggtggaaaagtatatcttcttatggaaacttgacaaaagctttctgataaactgctttgtgatgtgagcattcatctgacagagttgaaccattatt

SEQ ID NO: 246387 - DNA, 510 bp, Homo sapiens
tcgtttcacatagttgaactagtcttttgattcagcagtttgtaaacagtctttttggtgaatctgcaaagggatatttggaagcgatttgaggactatggtgaaaaaggatatatcttcacataaaactagaaaaaagctttctgagaaactgctttttgatgtgtgcattcttcttagagaggtaaaygattcttctcattgagtagtttggaaactctgttcttctagaatttccaaatggatatttctgagtgcttttaggcatatggtgaaaaaggaaatatcttcacataaaaactagagagaagctttcagagtgtctggtttgtgatgtgtgcattcatctcacagaggtaaatgtttcttttcattgacggtctgaaaactttgttcttctagaatctgcaaagggatatttgtgagccctttgatttctatggtggaaaaggaattgtcttcacagcaaaactaggcagaagctttctccaaaatttctttatgatgtgt

SEQ ID NO: 246388 - DNA, 510 bp, Homo sapiens
tcgtttcacatagttgaactagtcttttgattcagcagtttgtaaacagtctttttggtgaatctgcaaagggatatttggaagcgatttgaggactatggtgaaaaaggatatatcttcacataaaactagaaaaaagctttctgagaaactgctttttgatgtgtgcattcttcttagagaggtaaacgattcttctcattgagtwgtttggaaactctgttcttctagaatttccaaatggatatttctgagtgcttttaggcatatggtgaaaaaggaaatatcttcacataaaaactagagagaagctttcagagtgtctggtttgtgatgtgtgcattcatctcacagaggtaaatgtttcttttcattgacggtctgaaaactttgttcttctagaatctgcaaagggatatttgtgagccctttgatttctatggtggaaaaggaattgtcttcacagcaaaactaggcagaagctttctccaaaatttctttatgatgtgt

SEQ ID NO: 246389 - DNA, 510 bp, Homo sapiens
tcgtttcacatagttgaactagtcttttgattcagcagtttgtaaacagtctttttggtgaatctgcaaagggatatttggaagcgatttgaggactatggtgaaaaaggatatatcttcacataaaactagaaaaaagctttctgagaaactgctttttgatgtgtgcattcttcttagagaggtaaacgattcttctcattgagtagtttggaaactctgttcttctagaatttccaaatggatatttctgagtgcttttaggcatatggtgaaaaaggaaatatcttcacataaaaactagagagaagctttcagagtgtctggtttgtgatgtgtgcattcatctcacagaggtaaatgtttcttttcattgacggtytgaaaactttgttcttctagaatctgcaaagggatatttgtgagccctttgatttctatggtggaaaaggaattgtcttcacagcaaaactaggcagaagctttctccaaaatttctttatgatgtgt

SEQ ID NO: 246390 - DNA, 489 bp, Homo sapiens
tctgtgatgcctcacaagccataaaaaccagccagattttattagggattttcaaaaggggaaggagtgtgtgaataggtgtgggtcacagacatcaagaactttacaaggtaatagaatatcacaaggcaagtggaggcagggcaagatcacaggaccacaggactgaggcaaaattaaaattgctaatgaagtttcgggcaccattgtcattgataacatcttatcaagagacagggttttgagatcaaccagtcttaaaaaatttgttgggtgggaatttcctcctcttaataagcctgggagcgctatgggagactggagtctatttcaactctgcagtcttgaccataagaggcaagcacgccactgggcctgtttataagcctatacctccaggcatatattctccttctcaggtgtattccttgctgagaaaaakaattcagcaatatttctccgatttgcttttgaaagaagagaaatatg

SEQ ID NO: 246391 - DNA, 644 bp, Homo sapiens
caagcacgccactgggcctgtttataagcctatacctccaggcatatattctccttctcaggtgtattccttgctgagaaaaataattcagcaatatttctccgatttgcttttgaaagaagagaaatatgcctctgttctgcccagctcactggcagtcagaatttaaggttatctctcttattccctgaacaactgctgttatcctgttctttttttaaagtgcccagatttcatattgctcaaacacacatgctgtacaatttgtgcagtwaacgcgattatcacatggtcccgaagtgacacacatcctcctcagctgacaggattaagagattaaaataaagacaggcataggaaatcacaagggtattgattggggaagtgataagtgtccaggaaatctttacaatttatgtttagagattgcagtaaagacaggcctaagaaattataaaagtattaatttggggaactaatacatgtccatgaaatcttcacaatccatgttcttctgccatggcttcagccggtccctctgtttggggtccctgacttcccgcaacatattccagtatgaaaactagaacgaagcaatctgagaaaccactttgtgatgtatgcattcacctcacagagttaaa

SEQ ID NO: 246392 - DNA, 644 bp, Homo sapiens
caagcacgccactgggcctgtttataagcctatacctccaggcatatattctccttctcaggtgtattccttgctgagaaaaataattcagcaatatttctccgatttgcttttgaaagaagagaaatatgcctctgttctgcccagctcactggcagtcagaatttaaggttatctctcttattccctgaacaactgctgttatcctgttctttttttaaagtgcccagatttcatattgctcaaacacacatgctgtacaatttgtgcagtaaacgcgattatcacatggtcccgaagtgacacacatcctcctcagctgacaggattaagagattaaaataaagacaggcataggaaatcacaaggktattgattggggaagtgataagtgtccaggaaatctttacaatttatgtttagagattgcagtaaagacaggcctaagaaattataaaagtattaatttggggaactaatacatgtccatgaaatcttcacaatccatgttcttctgccatggcttcagccggtccctctgtttggggtccctgacttcccgcaacatattccagtatgaaaactagaacgaagcaatctgagaaaccactttgtgatgtatgcattcacctcacagagttaaa

SEQ ID NO: 246393 - DNA, 644 bp, Homo sapiens
caagcacgccactgggcctgtttataagcctatacctccaggcatatattctccttctcaggtgtattccttgctgagaaaaataattcagcaatatttctccgatttgcttttgaaagaagagaaatatgcctctgttctgcccagctcactggcagtcagaatttaaggttatctctcttattccctgaacaactgctgttatcctgttctttttttaaagtgcccagatttcatattgctcaaacacacatgctgtacaatttgtgcagtaaacgcgattatcacatggtcccgaagtgacacacatcctcctcagctgacaggattaagagattaaaataaagacaggcataggaaatcacaagggtattgattggggaagtgataagtgtccaggaaatctttacaatttatgtttagagattgcagtaaagacaggcctaagaaattataaaagtattaatttggggaactaatacatgtccatgaaatcttcacaatccatgttcttctgccatggyttcagccggtccctctgtttggggtccctgacttcccgcaacatattccagtatgaaaactagaacgaagcaatctgagaaaccactttgtgatgtatgcattcacctcacagagttaaa

SEQ ID NO: 246394 - DNA, 644 bp, Homo sapiens
caagcacgccactgggcctgtttataagcctatacctccaggcatatattctccttctcaggtgtattccttgctgagaaaaataattcagcaatatttctccgatttgcttttgaaagaagagaaatatgcctctgttctgcccagctcactggcagtcagaatttaaggttatctctcttattccctgaacaactgctgttatcctgttctttttttaaagtgcccagatttcatattgctcaaacacacatgctgtacaatttgtgcagtaaacgcgattatcacatggtcccgaagtgacacacatcctcctcagctgacaggattaagagattaaaataaagacaggcataggaaatcacaagggtattgattggggaagtgataagtgtccaggaaatctttacaatttatgtttagagattgcagtaaagacaggcctaagaaattataaaagtattaatttggggaactaatacatgtccatgaaatcttcacaatccatgttcttctgccatggcttcagccggtccctctgtttggggtccctgacttcccgyaacatattccagtatgaaaactagaacgaagcaatctgagaaaccactttgtgatgtatgcattcacctcacagagttaaa

SEQ ID NO: 246395 - DNA, 554 bp, Homo sapiens
gctttgtgatggctgcattcatctcacagagttaaacattttttgcattcagcagtttagaaacactgtttttctccattctgtgaattgacattatggggcacattgaggccaacagcaaaaaagagaatatcccaggataaaaactagaaggaagctatctgagaaaccacttggtgatgtgtgcatttatctcacwgagttaaaactttcttttcattcagcagtttggaaacactgttttggtagaaccttcaaaatgatatttgggagcacattgaggccaaaggtgaaaaagtgaatattccaggataaaaatttctctgtcatgtgagcattcatctagcagagttaaacctttcttttcattcagcagtttggaaagagtgttttcttaaaatctgcgaatagatatttggtagcgcattgtggcccatggtgaaaaaggaaatatcttcagataaaaagtagcaagaattttctgagaaactgctttgtaatgtgttcattcatccaacacagttaagcttttctttggattcagcagtttggtc

SEQ ID NO: 246396 - DNA, 465 bp, Homo sapiens
ggtaaaaactgtgaagggatatttagcagtgcatcgaggcctawggtgaaaaagaaaatatgttcagataaaaacttgaaagaagttttatgagaaactgcttggtgatgtgtgcattcatctcacagagttaaacttgctttcaattcagcggtttggaaaacctgtttttatagaaactgcagtgggatatttgatagcaaattgaggccttatgtgaaaaagtaaatatcaaatgataaaaactaaaaggaagctatttgagaaactgcttttaatgtgtacaatcttctcagacatttaaacctttcctttcattcagtagttttaaacacctgtttttgtagaatatgtgaaagtatatgtggcagtccattcaggactagtgaaaaaggaaatgtctgcaggtaaaaactagaaagaagctttctgagaaaatgtgtgcattcatctcacacaggtaaa

SEQ ID NO: 246397 - DNA, 572 bp, Homo sapiens
tgatgtgtgcattcatctcacagagttaaacttgctttcaattcagcggtttggaaaacctgtttttatagaaactgcagtgggatatttgatagcaaattgaggccttatgtgaaaaagtaaatatcaaatgataaaaactaaaaggaagctatttgagaaactgcttttaatgtgtacaatcttctcagacatttaaacctttcctttcattcagtagttttaaacacctgtttttgtaraatatgtgaaagtatatgtggcagtccattcaggactagtgaaaaaggaaatgtctgcaggtaaaaactagaaagaagctttctgagaaaatgtgtgcattcatctcacacaggtaaacctttcttttgattctacagtttggaaacactgtttttatagaatatgcaaagggatattttggagctcattgagagcaaaggcaaaaacatgaatatcccagtataacaactagaaggatgcaaagtgagaaaccactttgtgatgtgtgcattcatctcacagagataaaactttgttttcgttcagtagtttggaaacactgttctgta

SEQ ID NO: 246398 - DNA, 499 bp, Homo sapiens
atattttggagctcattgagagcaaaggcaaaaacatgaatatcccagtataacaactagaaggatgcaaagtgagaaaccactttgtgatgtgtgcattcatctcacagagataaawctttgttttcgttcagtagtttggaaacactgttctgtagaaactgcaaagagagatttgggagcacattgaggcctatggtaaaaacgaaataccttcaaataaaaactagaaataagcttttggagaaaatgctttgtgatgtgtccattcatcacacggagtaaaacctttctttggatgctgtagtttcaaaaaactgttttagtccattctgcaaaaggccagttgggagctcattgaagccaaaggtgaaaaagtgaatattgcatgataaaaaatagaagaaatctatctgagaaactgctttgtgaagtgtgcattcatctcacagttaaacatttgttttcattcagcagtttggaaacactgtttatgtat

SEQ ID NO: 246399 - DNA, 499 bp, Homo sapiens
atattttggagctcattgagagcaaaggcaaaaacatgaatatcccagtataacaactagaaggatgcaaagtgagaaaccactttgtgatgtgtgcattcatctcacagagataaaastttgttttcgttcagtagtttggaaacactgttctgtagaaactgcaaagagagatttgggagcacattgaggcctatggtaaaaacgaaataccttcaaataaaaactagaaataagcttttggagaaaatgctttgtgatgtgtccattcatcacacggagtaaaacctttctttggatgctgtagtttcaaaaaactgttttagtccattctgcaaaaggccagttgggagctcattgaagccaaaggtgaaaaagtgaatattgcatgataaaaaatagaagaaatctatctgagaaactgctttgtgaagtgtgcattcatctcacagttaaacatttgttttcattcagcagtttggaaacactgtttatgtat

SEQ ID NO: 246400 - DNA, 499 bp, Homo sapiens
atattttggagctcattgagagcaaaggcaaaaacatgaatatcccagtataacaactagaaggatgcaaagtgagaaaccactttgtgatgtgtgcattcatctcacagagataaaactttgttttcgttcagtagtttggaaacactgttctgtagaaactgcaaagagagatttgggagcacattgaggcctatggtaaaaacgaaataccttcaaataaaaactagaaataagcttttggagaaaatgctttgtgatgtgtccattcatcacacggagtaaaacctttctttggatgctgtagtttcaaaaaactgttttagtccattctgcaaaaggccagttgggagctcattgargccaaaggtgaaaaagtgaatattgcatgataaaaaatagaagaaatctatctgagaaactgctttgtgaagtgtgcattcatctcacagttaaacatttgttttcattcagcagtttggaaacactgtttatgtat

SEQ ID NO: 246401 - DNA, 594 bp, Homo sapiens
aacctttctttggatgctgtagtttcaaaaaactgttttagtccattctgcaaaaggccagttgggagctcattgaagccaaaggtgaaaaagtgaatattgcatgataaaaaatagaagaaatctatctgagaaactgctytgtgaagtgtgcattcatctcacagttaaacatttgttttcattcagcagtttggaaacactgtttatgtataatctgcaaaaggatatttggagctcattgatgccataggcaaaaatgagaatatccctggataaaaattagaaggaaactatctgagaaatcgctttgtgatgtgtgcattcatcatgcagatttaaaccactcttttcgttcagtagtttgggaacactgtttttgtagaatctgggagagatttgaggcctatggtgaaaaagaaaatatcttcagataaactagaaagaagcattctgagaaactgatttgtgttgtgtgcattcatctcaaagagttgaacctttctttggattgagcagtttggaaacactgtttttgtaaaatttgtgaagggatatttgacagctcattgaggccaaaggagaaaaagcaac

SEQ ID NO: 246402 - DNA, 594 bp, Homo sapiens
aacctttctttggatgctgtagtttcaaaaaactgttttagtccattctgcaaaaggccagttgggagctcattgaagccaaaggtgaaaaagtgaatattgcatgataaaaaatagaagaaatctatctgagaaactgctttgtgaagtgtgcattcatctcacagttaaacatttgttttcattcagcagtttggaaacactgtttatgtataatctgcaaaaggatatttggagctcattgatgccataggcaaaaatgagaatatccctggataaaaattagaaggaaactatctgagaaatcgctttgtgatgtgtgcattcatcatgcagatttaaaccactcttttcgttcagtagtttgggaacactgtttttgtagaatctgggagagatttgaggcctatggtgaaaaagaaaatatcttcagataaactagaaagaagcattctgagaaactgatttgtgttgtgtgcattcatctcaaagagttgaacctttctttggattgmgcagtttggaaacactgtttttgtaaaatttgtgaagggatatttgacagctcattgaggccaaaggagaaaaagcaac

SEQ ID NO: 246403 - DNA, 520 bp, Homo sapiens
tgatggaaggacgtatgtctgtttgttcatttaggtctctggggcacctgtaactgtgcctgacaaaaataagtgctcagtagttactggatggatgatgtccaacacttgtaagacttctttatccaaggaattaacatttagatgagttttaccttttttagtttatcatgtgcccttcagttttacttattgtgttctctgctacacagaatttttaaaaaatcaaattaatgttttccttcatgttttctctctccttgcctcaggattagtgatattatatataccaagactgtgtgtgtgtgtgygtgtatgtgtgtgtgtatacattttttttctattttactttttgtttttaaatcatgtgggccttattttgctctctttagagtgcaaaatagagtgtttcatttttccatatagtgagcaatttgtctcaaaagtatttgttgaattacatgccctttctcagtcaaatcgaactgccattgtcactgatgtgaaatgccttgtcctt

SEQ ID NO: 246404 - DNA, 575 bp, Homo sapiens
cttccacaagctcatgatatatgtgcttttggagggttcaaacatgctcaccggagtcccgcccttgatttggcctgttcagagagaaaccaagccctggttarccactaagaaccaaggatgtccgaaacagtattcccttactaggtttgaacacctatcttctcctcaagttgagcctccccagcgtggagttttggagacctgcattctgtatttctttattattcatcacagtgctatttactaagacctaatatgtaataagcataatgtaaggccagggatagagaaatgggtaagccatgacctctgccctggagaaacatgttctgtagtttggagacaggcctgggaacagctcgttctattgcaaggggtatgcacagaggaaggtgcctttccctctgcctgtgagatattgggctggtgtttttctggtggaccaaggtagggtggggattctgggcagcaggaacagcatgtacaaaggcacagaagcatgcaagaatgatacgttggttggattgagccaatttcatttctcagctattcaacccatgtctcataaatct

SEQ ID NO: 246405 - DNA, 575 bp, Homo sapiens
cttccacaagctcatgatatatgtgcttttggagggttcaaacatgctcaccggagtcccgcccttgatttggcctgttcagagagaaaccaagccctggttagccactaagaaccaaggatgtccgaaacagtattcccttactaggtttgaacacctatcttctcctcaagttgagcctccccagcrtggagttttggagacctgcattctgtatttctttattattcatcacagtgctatttactaagacctaatatgtaataagcataatgtaaggccagggatagagaaatgggtaagccatgacctctgccctggagaaacatgttctgtagtttggagacaggcctgggaacagctcgttctattgcaaggggtatgcacagaggaaggtgcctttccctctgcctgtgagatattgggctggtgtttttctggtggaccaaggtagggtggggattctgggcagcaggaacagcatgtacaaaggcacagaagcatgcaagaatgatacgttggttggattgagccaatttcatttctcagctattcaacccatgtctcataaatct

SEQ ID NO: 246406 - DNA, 624 bp, Homo sapiens
agcaggcaaataattggcacatgcttaaaaaaaattaaaaacctcttggatgtgagtattttctaacagcatctggcgggagtgcccgggaggaatttaatcagcaagagttgtttaaatggggctccgcacaggccccggccaggcccgccatgaactcggcatcatgtgccacccctgtctgctgagaacattcaatttgttaattctgcagctggtgagagaggtcagataggaaagtgacgattgttttctgacgttccaacccctgctcacatctttctaattaatccttttaggagccacaggaagattaagaaggagaaaaggtgagggaatcaagtaccagagaaattgatggaaagacaacgctgctgcccttctcttctcaaatgggatggatgtgaggagctgggggtggggagagagaaaaaaaaaktgaggactgctgcctgccactcttctcgctcaaaggaaaatcatgctcggaagacatgggacccaaaagggccactggatcttctcctatggtgcctgtctcttttaaacaggaggcagcagcccctctcctggtctccatcactcagtcttggaccatcaggagccactgaggcctcccaagca

SEQ ID NO: 246407 - DNA, 576 bp, Homo sapiens
gaaaacaaaacaaaacaaaacacacaactgtcatctaagaatgctgattgcagcaaagctttccttcgaatatgaaggagatacaaagcctttcccagataaacaaaagctgagagaattcactaccaccaggcccatcttataagaaatgctaaagagaattcttcagtttggaagaaaaaaacactaaygtgcaaaaagaagacatttgaaagtataaaacccactggtaaagttaagtatacatgcaagcccagaatattataacactataaatgcagtgcacaattcattcataattctagtataaagcccaaaagacaaatatagaaaaaacaataacagctacagcaacctggtaagagacaggtaatataaaaatatgtaagttgagacaattaaaagtcaaaatgcaagagagggatggagttaaagtgcatttttttggttttggttttttctttgtttctattcttttctttgtgatataagataagttttcattgctttaaaataactcgttatacctacaagatgttttatgtaagcatcatggtaaccacagtgcaaaaaacc

SEQ ID NO: 246408 - DNA, 569 bp, Homo sapiens
tcctggtttccttgtgggagcagtttttgtgagttttgtgagtccaagtcgctcagatagtagaaaaaaatraatgatccaagaatggcattttgggcctggtaggaatcctggtctgaattgaagtcagaccgtgggaaagacagcagaatcccctgagcaaaacttcatcatgaggggcaaggaatctgatgctgcggcccagcccagctgtgggaccccacacgaggagtaagtgagattctgggcacaaaatgaccccaaatccctgacatatacatgctgctacttaagtgtcaggtatatatcctgggataaaaaaggtgtgtcactcgaaggagcttgaagagtcttgctctgctctcagctgattttaacatcaagggaggtgggggtaggtgtgggagtgggaggtgctcgcactcccaggagagcaacttggattccatgtgcagagcctgagaagagttgcagctttctagcactgaaacttgggatggcctgccagctgcaactcccctgagggtggtcaggtttccttgaccctgagcctcagaaagccccagtgg

SEQ ID NO: 246409 - DNA, 629 bp, Homo sapiens
ctgtacccattaaacaataatttcccattcccctttttccagcccctggtaactgcattctaccttctgtttctctgagtttgactactttagatacctaatgtgggtggaatcaggcagtatttgtctttcgtgactggttcatttcacttagcataatgtcctcaaggttcatccatgttgtagtatgtgtcagaatttcctttctttttatgaatgtgtagtattctattatatatgccatatttcatttatccattcatccatcaatggacatttgggttgttcccaccttttgactaccrtgagtagtgctgctataatgtggatgtacaaatatttgttcaagtccctgcttttaattttttgtggatttaaatatacccagaagtggaattgctagatcatacggtaattctctaactttttgaggaaccatagctgctgctacaccattttacattcacacccagcaatgcatctgtattagttagggctctgattaatatagagaaagagagagagagagagagagtgtgtgtgtgtgtgtgtctgcatgtgtatagagacaatatacatataaagagtatatatatatatacacattatctttctgtatgcatatatat

SEQ ID NO: 246410 - DNA, 526 bp, Homo sapiens
catctttcagtgaacactagtatgcatccctgtgcagatgtgaggatataaagaccataggaaccagttccttcccttaagaaacctgatttctaccttatccagatgcttctggaataaagccccatcaggaaaggtgcaccctatttgatgtgagcaaagactacagaaggggaagggcccaattaccmtcttgcatccagcggggtagatgagtacatgagatgagcgctttcccaaggtgagtggccatgaaggggtggtggtcagtacaagctggagtccaaaggctaaaatctcagcagcagtgtgatagtcactcagaaattatagattccattcactggggaatcactaaccactgacatgtgaaaataagggataaatgccaaggatctatttcaatgtaggttttcatttcaggatcatggagaaggacatatctgggctcattcatgtggatgcatttggagtcaggggtggcaatctgcacaggagaacacagatgagagaagccaggaagtgt

SEQ ID NO: 246411 - DNA, 601 bp, Homo sapiens
taagactctgctcccagatgagcscccccgggctggacactgagccgcagagagttgggctactgggggctctcctcaggaaggagtgggagcagctggagccacaggagcagcaggtgtcctgacagccctacatcagagctttgtgtttagaaactccaggaagtccttgctgcacttggaaatcttcccctcgcccccaactcccacaaagggccagacagcttagagggagagaagagcccctccaaaggctcaccaaaatgtgcagctgtctgttctttactgctgtcctgcgagcccttaaggcatttcaacaatgaacatcttgattttctgtgaatttatggaagaaaatgtgtcttttgaaactgtacatagtagtatgcccttatctgcagggaatagttccaagacccccagtgaatgccagaaactgcaggcagtacccaaccctatatatactgtgtatttttactatacatactacctgagataaactttaatttataaattgggcacaatatgagattaacaaccataactactaataaaatagaacaattatgacaacacgctgtaataaaagtcatgtgaatgt

SEQ ID NO: 246412 - DNA, 601 bp, Homo sapiens
taagactctgctcccagatgagcgcccccgggctggacactgagccgcagagagttgggctactgggggctctcctcaggaaggagtgggagcagctggagccacaggagcagcaggtgtcctgacagccctacatcagagctttgtgtttagaaactccaggaagtccttgctgcacttggaaatcttcccctcgcccccaactcccacaaagggccagacagcttagagggagagaagagcccctccaaaggctcaccaaaatgtgcagctgtctgttctttactgctgtcctgcgagcccttaaggcatttcaacaatgaacatcttgattttctgtgaatttatggaagaaaatgtgtcttttgaaactgtacatagtagtatgcccttatctgcagggaatagttccaagacccccagtgaatgccagaaactgcaggcagtacccaaccctatatatactrtgtatttttactatacatactacctgagataaactttaatttataaattgggcacaatatgagattaacaaccataactactaataaaatagaacaattatgacaacacgctgtaataaaagtcatgtgaatgt

SEQ ID NO: 246413 - DNA, 590 bp, Homo sapiens
catatttatactgagcacactctacatgcagatttacctgcatgcagtcatcaagaggaaaacacattcactttgtctagaggtttttctaggagtgtcttaatctgttccttctaggctcccacccaatcaatcacaatgattatttctgtcaatggaactcatctttatggagagtgttattgtggccagtaaggttctgtcatctatttaagtaaaattctgtcttaaaccttttacataaactgtcttgtttaatcccaagcacagagaggccaagcagtttttctgagtccattttacagttgaagaaatagaggctcagaacaccacgtgatttcttgagatcatacaattaataagttacagagccgagatgtaagtccagtccccttgactcccaagtctgtgctcttgcaaagaggactgtggttggttggagtctcagaaatgagttattggtaaggttgtaccaagaaatcagacattcctgcagtttataatcatctgcttgcagaaagagtcattttctccaaagatagtgagaaagatggtcacatggctcttmctgatgatgccaggaatgcaag

SEQ ID NO: 246414 - DNA, 504 bp, Homo sapiens
tggagaggtatcaaagaatttgaggccatttctaattctccataaatactatgatcatttccaaatacagacsaagaaaccaaggcccagggagagagtaactaacttgcccaaggtcacacagctaagtggtaccagaatttggtccctgacagtctggctcttgagcccttaattgccacagacctactctatgacctcgagtaactcactcctctccttaggctttggctcctataaagtgaaggggttgggccatattctctcaaaagtcccttttaagtgtccagagattcctcagaaaagtcaaatcaagaggtgtaagaaccggagtcaatggtaagggggtgtctgggcctttggaataaattcaggggcagtgaatgcactgccagaggctgctccccagcctctatcaggcctttatttacaaccttgaaacgtctctagagtgggactctacccatggacttttccagcatctgattaagagaaggaaccagc

SEQ ID NO: 246415 - DNA, 585 bp, Homo sapiens
gatttgttcactgcgccttcttagagctcgtcagagatggtccatttgcacagcaaacctcctgcccagcttctggtcccacmcttgcatcctccattggtgtgaaaatcctgcactagagccaggctgtggtcctggcatctcgagttgcctagatatccaagttcttctctgaatagcaagagatgggacacacatactttgtctcttgtccccccgcccccccagacactgcctgaagccttgttcctaatggaccaataaccagggatcatgacattgctgctcttccagtatttccctgttacatgggaatccacccaaaccaaggcttttactcagcctcggagcaggtcagcttgagttaaaacccttctgggcaactaatatgcacccattaaatatttattggctgaattgggtccatggaggaggaaaaacttgattgaggcttgagcgtgggacttttagacaagtggctagaagtgcgaaggcattctccctaaaggcaaaagctcagagtcagcatcttgttgtttattgttcagaggacaacagtttctcttctttcactcttgatggcca

SEQ ID NO: 246416 - DNA, 561 bp, Homo sapiens
cattctttataattaaacaaggagccaaatttttaatacctttcctgtctttctctccctggtgttgctaatgtaacacattcaggtcaaatctctgttggttttggtcactggctgtttcaaggcctaaaaggaaagagtgagatctttcaaagaatggagattaaaatcaaacacaacgaaggagctacttttgaatgtaataatgtggaacactttaaagtcgaattaattaaaggaaacataaaccaatgcattcctggctccatgttaactgcggctgtctaaaagaccttgagatgttcaagagaccagtgtaaataagttattttggttagcacaagctcaggggcctgccactttcctctcgctggtgctgtmtttggtagagccatagatagaaccagccacaaacttgattcgggcataagcaggagacacacacatcagcataaagggggctccaaaaaaggccctcttgcttggagacacaggaaccagactccccaaatgtctctcacttacacagcaatcctcctcagacttaggaggctctgtcaa

SEQ ID NO: 246417 - DNA, 561 bp, Homo sapiens
cattctttataattaaacaaggagccaaatttttaatacctttcctgtctttctctccctggtgttgctaatgtaacacattcaggtcaaatctctgttggttttggtcactggctgtttcaaggcctaaaaggaaagagtgagatctttcaaagaatggagattaaaatcaaacacaacgaaggagctacttttgaatgtaataatgtggaacactttaaagtcgaattaattaaaggaaacataaaccaatgcattcctggctccatgttaactgcggctgtctaaaagaccttgagatgttcaagagaccagtgtaaataagttattttggttagcacaagctcaggggcctgccactttcctctcgctggtgctgtctttggtagagccatagatagaaccagccacaaacttgattcgggcataagcaggagacacacacatcagcataaagggkgctccaaaaaaggccctcttgcttggagacacaggaaccagactccccaaatgtctctcacttacacagcaatcctcctcagacttaggaggctctgtcaa

SEQ ID NO: 246418 - DNA, 590 bp, Homo sapiens
ttgactcccacctccacatcttaattgctatatgctcctgggcttgtcactttgtccctaagagcctcagtctactgatttgtaaatggaaatggtagtgtctctttcagagcttgttgtgaggatcagaaataacacacgcagagtgcctagcacaatacctggcttggtgagcagtaaaaagtcacacttccagaatctattgctaactaacttaccaaaggcaaggtaaaatctggttggctgtctttccaggtaagaagtattttaaatgtgttagttacagttgtcttagattctgaaacttagagaaaaatctacttgtgagcttcctctgcagggtccctgccttatttgtcttcaagtccaagcttagtactgagccagctggttattcttgtcacacctagtccatcatcacagtccagtcgcctcccacctctgcaggtggccccttccacccagggctcagctttcattcttaaagcactgtccctcccacctggaccctatgwccccttatccagaacccttcccctcacatacccccaccatctcctggactttaagcactgcttcttatcagactt

SEQ ID NO: 246419 - DNA, 503 bp, Homo sapiens
tccccattttccagatgagaaagctgaggcccagagaggttaaagtgccctgccagtgatcacacagtaggaagtgacagggccactttgtaagccagaagccctcaggtttgcctttcagtstaaagccaggaagacgtttacaaagctggagaaccaggtagcggagaaaggaaatgctggctctgagctgtgcctaggatttgagctcagggttttctcctctctgcaccccactagattcatagcacagctgccacatgaacctggaaagcagtgcagatgtcagaacaaaatctccaagaggcttcagacaacacctgggccatgggatgaatgttagtgcccctgccccatattcacacattgaaaccctaaccccgaatgtgatggtattaggaggtggggcctttgggagggtagagccctcttgaacaggattagtgcccttatgaaagggatcccagaatgtaattaaactaaagagcttctgcacagcaaaa

SEQ ID NO: 246420 - DNA, 503 bp, Homo sapiens
tccccattttccagatgagaaagctgaggcccagagaggttaaagtgccctgccagtgatcacacagtaggaagtgacagggccactttgtaagccagaagccctcaggtttgcctttcagtctaaagccaggaagacgtttacaaagctggagaaccaggtagcggagaaaggaaatgctggctctgagctgtgcctaggatttgagctcagggttttctcctctctgcaccccactagattcatagcacagctgccacatgaacctggaaagcagtgcagatgtcagaasaaaatctccaagaggcttcagacaacacctgggccatgggatgaatgttagtgcccctgccccatattcacacattgaaaccctaaccccgaatgtgatggtattaggaggtggggcctttgggagggtagagccctcttgaacaggattagtgcccttatgaaagggatcccagaatgtaattaaactaaagagcttctgcacagcaaaa

SEQ ID NO: 246421 - DNA, 596 bp, Homo sapiens
tgctgcagtctcaggataaaacttgaatagacaaggagttgcttcatatggatgagcaaacaaagtagtttcttaagatggaatctattcctggtgaggatgctgtgaacactgktgaaattacaacaaagatttggaatattcccaaaactgagttgataaaacagcagcaatgtttgagaagactgactacaattttgaaagaagttctgctatgggtaaaatgctatcaaatggtatcccatactgtgaaaaatcttttataaaaggaagagtcaatccctggggccaacttcattgtctcattttaagtaatgtcccccatagaccgcagcctttagcaaccaccactgtgatcagtcagtagctagcaatacttaggcaagaacttccaccagctaaaagattataatttgctaaaggctcagatgatcattagcattttttagcaataaaataagtatttttaaattaaggtatgtacattggcttttttaaaaaaaatgctattgcacacttagactacagaatagtataaacataacttatatgcactggaaaaccaaaaagcttgggtgactcactttattgtgata

SEQ ID NO: 246422 - DNA, 596 bp, Homo sapiens
tgctgcagtctcaggataaaacttgaatagacaaggagttgcttcatatggatgagcaaacaaagtagtttcttaagatggaatctattcctggtgaggatgctgtgaacactgttgaaattacaacaaagatttggaatattcccaaaactgagttgataaaacagcagcaatgtttgagaagactgactacaattttgaaagaagttctgctatgggtaaaatgctatcaaatggtatcccatactgtgaaaaatcttttataaaaggaagagtcaatccctggggccaacttcattgtctcattttaagtaatgtcccccatagacygcagcctttagcaaccaccactgtgatcagtcagtagctagcaatacttaggcaagaacttccaccagctaaaagattataatttgctaaaggctcagatgatcattagcattttttagcaataaaataagtatttttaaattaaggtatgtacattggcttttttaaaaaaaatgctattgcacacttagactacagaatagtataaacataacttatatgcactggaaaaccaaaaagcttgggtgactcactttattgtgata

SEQ ID NO: 246423 - DNA, 553 bp, Homo sapiens
gaaatggtcaggcatgctcaatcatggacctgtcagtgctgttcaatggctctatcttgaggggctctttcctgatagtttcctttcatcttcctccatccatcctcctgcgacacagcactctgtcactgtgtcttcactcccacaccttagctcaggcgcacacacacatccacaactctgacctcttcccagggatgtctcttcaagggtcyctgcagaagaagaatcccaaatcatcccctcaagcccttcttaacactgtccagagaagaacaaagtaaaaacaaacaccaagcctcccacgcagatggaagcattcagtctatgtttgcggatattaatttaaaccaagaaacaatctaacagaagaaagatagagaggatctctcaattcagataaacctttagaattctgggaaagggaatttgaaaaaaaaaaagaaaagaaagaaatactagaagcaggagatactactcatactgttagataagaaaaatgaagtggattagataaaagttcccttagaaaaggtgatgttagagaagctga

SEQ ID NO: 246424 - DNA, 485 bp, Homo sapiens
aaaacctgcaagccttttcttataaagaaagaaaatataattattatcactgatattattatgagtaaaaataatgccaaagtaattaattatttacccagaggctgtctctaagaaagttgagaatttgtattaggggatgagggaaggaagaataaaaattcaggatcttttactatcattaaggcctcctcacatatttttccaactgctttttattcatagataggattattagtatgtgtttgccaacaggaccagcctggcggataactgaaaccctgtcctctccatcatccaccccctgtcccaacaaagttccttcatttcccactttgagtgccaatattaccagaatttttgagttcttttcatggttagcacctgtgsgttcatagacaagtagggaggcctctcaaacaagtcatctccactgccctgagtttgggaaggttttcctcatgcccacttggcttttcagggtc

SEQ ID NO: 246425 - DNA, 619 bp, Homo sapiens
tcaggctatgtttgaaggcccgaggctctcctgaggtgaccagggcagggctctgagctcccctcaacgccttcccaaagtcagagcctctctgctttagatcacactgtgtacacagtgaggttttagtgaaatgattgcatgacaaagcccctttgcttttaaaaaatggaaaaacgacttacttaataaatgccccattgccttagaattccatggtgcygaaaacagctttttcaaaaagcgtttgctcaaaataccctgggaatgaaaagttgtggaggatacaggaactaaaagcaaagcttatttggtctgatttttttttttccctaagaagaagaaaaacatgagtatcaaatttaaaaacatttgctgagaagtctaacaagacaatttcatagatttttgttttttaaagtcagacaaagttttagaaacaaattgtttttggaatcaacagaagctttttattgtaccaggtaagaacattacaaaaacaaaacaaacaaacaaaaaaacaccaaaacaatcagaagaaaaatccccattatccatcttttaaaagggaatctttaccaccaaaaacataagaaggacataatatcagaagagagga

SEQ ID NO: 246426 - DNA, 521 bp, Homo sapiens
ttaaaagtctgttctgtatacaagctaatgaaatcatgctactttcctttgtatttatgtggaatcttctatccagggctctagatatgcattgacattttattgcttgcaaagtgaaactaacaaagtcttcaaacggaagcgcagaggcagtggacttccaaacactcttaatggagttccagtatgcactgggactgagatactgatacatgaytttttgtgattatattccgtagcaaattaagaaagaattatagttcactttttgttgttaaattataacgcagtgtgtggttaatcagacttgtagatttacttcccagagctacttttgctgcattgttttacttagctgtctgcctgatgctattggactgcaaaatctttgtggaacatgctacaagggcttagttcagtgtctggcacacagtaggtgctcaatatatatttgttaaaataaaaaatgaatgcatgaatgaatcaacaaatgcctgtaaaacatctcttgaaagcaaatc

SEQ ID NO: 246427 - DNA, 540 bp, Homo sapiens
agcgcaaacctgagtggagcccagaaggtttcagagcctgcggtgtagctgcagcaaaatgcgaccataagtgctcattccccaagacactctatctttctctgagtgcctgtagctcctgcttactgccaggccgcaaaagacaaaggctacctttcctgcatgaccagagtgcatctgatctgtatgcacccttcgtccactgacccctcccaagaccacctgcctggccactcccacaggagggtacctacaacacagcctccactgccccaccggagtgttttgccagcagcctgggagtagttcagtcccccaagcatggctggcccttaaccctgaggggtcagtggaaaaaaaaaatgcaggcctggtcccacccgcccgaggatctcagcacatcacccagggttactgagctgagatctgtggcctgagcttaagtggaggaggaggccccctctctcagaacactaagaagattgtgacgtgggttcatgtgccactgtagaakctgggcatccctccatttgcaagccc

SEQ ID NO: 246428 - DNA, 514 bp, Homo sapiens
gggcacagaaggctggaacaagtctagytggttgggtctgcacttgaggcagatgccggagagagacctgatcaggggagtgtgagttgcgtgggtcccacaacagtctgctgggctaaaaacctcaggccatgggtggcacaccagttacatacccacagtaccaccatcttgcctggggatcctccactcctgacccactgcatcaccagtccaaccacagacataccccacaaccagctctgactctgacaagtccagaggaccagcaggtccccagggagttgtgggtctcctggtgacctaacttttgacttggactgctcctatgggaggagggaacacagcctgccaaagcccccttgaggttaaggaaatacaagctcggctccggtaattgaagggggttccaccaaggcccaggaacagacttggtgatggagtcatctcttgccacctcctccccgcctcctcagagcactgctgcatatgcgctgaaatacaagaggcctgc

SEQ ID NO: 246429 - DNA, 514 bp, Homo sapiens
gggcacagaaggctggaacaagtctagctggttgggtctgcacttgaggcagatgccggagagagacctgatcaggggagtgtgagttgcrtgggtcccacaacagtctgctgggctaaaaacctcaggccatgggtggcacaccagttacatacccacagtaccaccatcttgcctggggatcctccactcctgacccactgcatcaccagtccaaccacagacataccccacaaccagctctgactctgacaagtccagaggaccagcaggtccccagggagttgtgggtctcctggtgacctaacttttgacttggactgctcctatgggaggagggaacacagcctgccaaagcccccttgaggttaaggaaatacaagctcggctccggtaattgaagggggttccaccaaggcccaggaacagacttggtgatggagtcatctcttgccacctcctccccgcctcctcagagcactgctgcatatgcgctgaaatacaagaggcctgc

SEQ ID NO: 246430 - DNA, 596 bp, Homo sapiens
gtttaccttctactgaggaggttgtggtcactctctggaaatacctgaattcattcctgagcggtggccagggcaggtcctcgttcttgccgatgcccatgttctggggggacacagtgacgacgcagtttagcaaactaaccatgacagcagcgatgagcacctccgagcctgctcactacaccaagatgcacggccaagattggcctattttattttttaattgacaactaataattgtacatatccrtgaggtttatagtgatgtctcaatacacataatgtacagtgatctgatgaggataattagtatatccatcattttaaatatttatcttttttgtgttggaaatgttcaatattcttctagctacttaaaactatttaatatattattgttaactataataattctacagtgctataaatcctaataatagccaaacaatgtggcttctttcagcttatgtgtaagctgaaaaggcagtacatgtcaggatatgagtaatactgaatgtacatgtcggaatataactgatactgaacataaccttgcttctcctgtagcagaacaacattaatattgacaagaacaa

SEQ ID NO: 246431 - DNA, 576 bp, Homo sapiens
gatgcaaagaatattgtattagggctattaacaataaactccccagtaagtagcataataaaataatgtcatagtttatttcttctccaataagttaaacagtaaaacattaaggtttcaggatagcagtcatgtatcacaaagtattagggaacaaggttttttccagctcactgctctactgtctccagcatgtggccttcatctttatattccaagatggcagcagcttcattcacggtagcaggatcaagaccatgatgagaaaaagtagatttggaggctctcttttaaagaaagcttytaagaagtaccaccagacctttccatttatatttaatggaccgcagttagttacaaagctacatcagaatgattcttcctatgtctttatccagggtagccaggcactagctaaaaactattctactctttagaataaagagagatgaaggaagttgaccaacccatccttccttctgaaaatgacaaagcacgtgatgtttccatactaacaaataagaagccataaatgtaaaaaaaaaaaaaaaaagactggatgaatattaggaaaca

SEQ ID NO: 246432 - DNA, 547 bp, Homo sapiens
gcaaaagtaacttcagccacccaagaagtgatgccgacatgtcctccacaaatctatttattctattcctaataccttaaaattttgtgatacttgttgattttgtgaatctgccatctcaccagtatctgtacatctatgaacctttgtcttctcccttagatttcttccatcccaccacactcaaagaagaatgctaatttaccctcttctgagatgtcagggtgcatagttgatcatatactttatcggataaaatagcacaatcccactgttatgcttaaagggtaaattttcatatcaataagactcactaagataacaatctaaaagcaaaagataccaaaggagagaaagccaatggcttttgtatattattccatgatagaacacactcttccacaagaaagatattctttttttttttttttttttattatactctaagttttagggtacatgtgcacattgtgcaggttagttacrtatgtatacatgtgccatgctggtgcgctgcacccactaatgtgtcatctagcattaggta

SEQ ID NO: 246433 - DNA, 568 bp, Homo sapiens
aatttccttaagatcaataacttgcttagtccaatggcaccagggccatcattatatccccatgcctggtacccaagcatattgcaaatgacggaatgtgcaacttttattcatgttcaatccagtttatggtgcttttagtcacagaaaacattagactgtattttcttttcagattaaacactaatgacccatcaaaaacagctgcakcatctctaaaaaaagtgaatggtgggacacatgagcacagttctgccattaccttggttttcagtaataccagctctctccccagttcctggttttctgttatttgcatttgttgttgaaaagaaggtttatctgaattcttcataggcaaaaagagaagacctatttgtcaatgttttctgtattcaaagcaaatatggttagcctacacacaacccctcaaatcttggctttatatcttagtcatcaatcccattagtaaggacactgtttgtgagtggaagcatgcaatgtcattattataggcagctgaatattcttgctttaaagaaagttatatattataacaaaaggagca

SEQ ID NO: 246434 - DNA, 593 bp, Homo sapiens
aaacaaaggaaaacaactgtaagatgctctctatagctaatgtaaagggccatgttttttcttaaggcatataattttctgctatttagtaattakatatttgaagttagatataatagttttcattgtgtgatctcagcaacattaaataactcagaatggatgtttaaaatgtatacgcttatatatttgaattggcatttccaaagatgctcagtatttactttaaattcagtgtctagtactgaatttaaagaaacattatcaaaacattcttatcaaaaaatccatgaggagtttcttcttatcagaaatatattgtctctaataaatcagattaggtttaagtttgtataaaattgacattgatatttaaaaaaaaattctcacatgtgtgtactttcatctcaaaagaaatgtgagtttcctgagaaaaaaattccccatatttataataatttccttgagttaattataatataatttcagatatggggagtcatgcatacaactcactgacagattggctactgaaatgtaacttaaaatcactttaattagtggtgtggaaactgaggataaattatgaatgt

SEQ ID NO: 246435 - DNA, 601 bp, Homo sapiens
caatagtgagggcagtgggataatagttgacacaaacagcctggcaatagagtgaatattttcagtcttattcaggcagctcagaggataagacattagtctaatggataatgcagtcaaggttaggttttccataaattttcagacttgattaacttttacctaacctgtgatagaaaatttactactcattagatatcagtgaataaaagattggatatttaaggaaacatatttgagtacaaaatcttcagagtgtgactcagagcacataaacatggaacgccaggtcagaagctcataacacttttaatgagaaaaatatatttttttaatattcataggacttctatggagttagggttggaaaaatatggcataaaatgtgctcttgtctgtccattgggaagtgctagccatatgcaaagaaaataaagccatctctgtgaaataactcctatratgacagaaaaatctatcttatgacatggagctggttggttgttatccatgcaagtacactaggcagaaaggatgaatccaacacctgtaagtgctggctaagataaggggatgataatgattcaaagctagaaattac

SEQ ID NO: 246436 - DNA, 606 bp, Homo sapiens
catgcaagtacactaggcagaaaggatgaatccaacacctgtaagtgctggctaagataaggggatgataatgattcaaagctagaaattacaacctgaaatcttacccacttaccccagttacttgggtactgaactgaggcttctttcaaagacagaaggagaggggtagtgtgtgcttccagtattcttgcccaggtgcctgattctttatcgctgtacactgagagctgaaggaaacagcatagtcagacacaagaaggagcaatagactacagggtacagaacaacaaagaaaagaaaactggatgcctaggacagctaagaataaaggcagagatttctagctaggctagtaagactttctcaacctaaggcactatggagaggtggctgtttcttaggatgtatcaataccagcacaaagcttcaagaaatacarattttcttttttaaatgacacaattaaatgaaggaaataaattcccagtaactgatcctaaataaattaagggctatgaatttcctaagaagaattatcttaaagaagctccgtgagttaacaagagaacacagataggaaactaagtaaaatcagaaaatgcc

SEQ ID NO: 246437 - DNA, 606 bp, Homo sapiens
catgcaagtacactaggcagaaaggatgaatccaacacctgtaagtgctggctaagataaggggatgataatgattcaaagctagaaattacaacctgaaatcttacccacttaccccagttacttgggtactgaactgaggcttctttcaaagacagaaggagaggggtagtgtgtgcttccagtattcttgcccaggtgcctgattctttatcgctgtacactgagagctgaaggaaacagcatagtcagacacaagaaggagcaatagactacagggtacagaacaacaaagaaaagaaaactggatgcctaggacagctaagaataaaggcagagatttctagctaggctagtaagactttctcaacctaaggcactatggagaggtggctgtttcttaggatgtatcaataccagcacaaagcttcaagaaatacaaattttcttttttaaatgacacaattaaatgaaggaaataaattcccagtaactgatcctaaataaattaagggctatgaattkcctaagaagaattatcttaaagaagctccgtgagttaacaagagaacacagataggaaactaagtaaaatcagaaaatgcc

SEQ ID NO: 246438 - DNA, 600 bp, Homo sapiens
aaaaactctttcaagggaactagtgtagtcatttgtatgaaaaaaaagacactctgactttttgagttgctagagttcttgcactggttctttctcatctctgtgggctgatgttccttttactataataatttgagtatggttagttggccttttttctagatgttttcagagggctgaggctttgtgcagggtctttatttgtagctgaattcttgtccttggtttcacagggggtaatattagcaaagaaaattaggttatgaagtttgggctgtgatctactagacggtgcttaagcataatggtcagtaggtaggcccttgctcagccacttggctccgctgtatttcctcacaaatgcacccatgctaccccttagmgctctgaaagtgtggactcctctcccccttgagtgctggctgcaagtgtcagctagcaaattccaggctacacaccataggcctggggtgagctcagtcttcatgttccctccccagcttggaggcaacagaggaagtatccttggcagtggctgtggcagaggatctttcacttgtctcttggggcttcaacacaaagaaatacagagccaccacc

SEQ ID NO: 246439 - DNA, 630 bp, Homo sapiens
gttttgtcaacttgcttctggttttgagctcagcttttgagcrtcagagtgtaattaatcctggaagacatcagaacatattgctcagaatcacattgtcctaaaaggaatctctgaggcctttccaaaagtgattgtctgtggcagcctcattctaaccaagcctgaagtctaaaatcatgaatgtggtttcaacccaaacctgaaagctgctgccatctgttcacgtgttccttatgttcatctggtggagtctatttttatagaagttgccatcaggtaatctggaaactatttaacaggcatcaatcctccaaaatgcatagcatggtccataagaatggacatgataaaaagtatattttgttttaaagaatacccaatttcctctttatcgacctggttatatatgtgagttaatcatctaaaattaaatatcagatgttgatcaattaataaatacccaaatttttgtttttgtcaattccaaaattgttaagtattttattcgacctataatattttttatgtagaatctcaagtcaagcagattgtgtaaagtggttctgtatattaaggttggacataaataaattttgtctttaagctgaacattttcagtagggtgga

SEQ ID NO: 246440 - DNA, 473 bp, Homo sapiens
  misc_feature (1)...(473): n = A,T,C or G
nnnnnnnnnnnnnnnnnnnnnnnnnnnnnnnnnnnnnntctaaaactggggattagaattgaacrtgagattttgcataggagccttttgcagtcctagattcttgcatgtcacagggtgggaaagaggggtgcagaaacacaacaatgatgagtttggggtttgtttgtcatccttgattatcttcaaagaatacagggacatttttgtcaccaggacagtggcaacatggcatacttgctctactctaatcacctatggaaatactgtttttaaaactgagtacctaaaaggaaggaacgcaatttttaaacccaaaaggatgaataccaaaaatatatacttcctgctttcttgaatcatcacctaaacctcattaattataattaaaataactataagcatttattataacttctgtcaccaatattcacacacatccctccttgtcctaaatatattttattaaattg

SEQ ID NO: 246441 - DNA, 536 bp, Homo sapiens
gctgtttcaattacacaagcagagtgggtttagcatagttcttaagggccctaggatttttgaagtggtaaatgagcatgtttcaacttaaacttgccagctttggtagcccctaacaagagtcatcctgttctttgaagctttgaaaccaggcattggcttctctgctttaactcagaaagtcctagatggcatyttgtttcagaacaaggctgtttcatttatatttaaaatacgtagtttattgtagccaccgtcatcaatgatcttagtagctagatcttctggataattcgctgcagcttctacatcagcagttgatgcttcatcttgtgcttttatatagaaagatggtctttttctttaatactcatgaaccaacctctggtggcttccaacttttcttctgcagctccctcacctgtctcagcttttaatagaattgaagagaattggggctgtcctctggactctggcttacaggaatgttgttgccgctttgatcatctatccagacctctaaaactttccccata

SEQ ID NO: 246442 - DNA, 617 bp, Homo sapiens
ctgccctttgaatagggtttttgttaatgttgtctttcttttcttttcttttcttttccttccttcttttctttctttctttctttctttctttctttctttctttctttcttycttccttccttccttccttccttccttccttttctttctttttctttttctttttttctgtcaggctcctcttctgtagggttgctgcagtttgctgtgggtcctttccagaccctaatcaccagggtccttcctgcacctggaagtatcacctgtggaggctacaaaacagcaaagacggcagcctgctccttcctctgggagctccattccagaggggcactgatctgataccggccgtaatgttcctgtaggaggtgtctagagaccccttttgggaggtctcacccagtcaggaggaacacgatcagggacccacctaaaaaaccaatctggctgtcccttggtggagccagtgttctgcgcttgtggaaacctcctcatagagacaacctgaactctgcagagccagtaggtgggaaaaactaagttggctgaaccacagagaccacagctgcccctcctgcctctgtctcagggagataagagttatttgcataaaa

SEQ ID NO: 246443 - DNA, 514 bp, Homo sapiens
actaaggttttgcttttacctttgagcagtggattattttgataaatttgagataaattgctatacttttttaaaaccaaattctgtaattattttaattgatccatcaattcattcaaaaygctgggtttcatagctcttgttagtcacagcttaacatgaggtaaattccttactgaaggaaaattaatgaagttgagcaatgaatcattgaaacctggtcattccattgtcaggaaaaaaaagagtatttaaagatgtttttattaaaacacacacacaatttgttgatcttacaaaatattctctaaacattcatctctacaaatataaactatatcaaactacgtgtgaggtatggcatatttaagagaaaaaaaagatataaaccagatggttgtaaaagtgaggcttagcagcagtatttagagacagtatccaggaaacatcaaaacatttttcaaaatgaatgagtgcatttttgaaaaattattccttttcaaatactcccaac

SEQ ID NO: 246444 - DNA, 594 bp, Homo sapiens
gtgacaggggtggctcgctcctttggctgccccactcctcaaacccctggaggaagcatgcagaagggcaggtacagaagccatggggagtgcttttgggctccagccccatggctgcatctaggggtgggtgtctgtgactcctgaagtccaagtgggcatgcattccagtgtgctcttccatctttgccatctgcagacagcttgtgctgatcagctcgatagaccctctgtcttatcgtaagggcagaggaccagtatgacagctgtctgtatcctgagtktttgcccagtgtaccagaaaaatcggatcacatgtgcacttgaaaggtgaatgcaagcttttattgagtgatggaggtggttctcagtgagatgggtggggagccagaaggggagatggaatgggaaggtggtcttcccctggagtcaggatgcccagaggcagactcccccctctctcttactctgctgtgtcattctgccatcactggtttgccaatctgctggtgtctattgctctactcctctgctcctctcgactttcacccactgtgtgtgtgcccgctaaggtcttggtttatatggacacag

SEQ ID NO: 246445 - DNA, 594 bp, Homo sapiens
gtgacaggggtggctcgctcctttggctgccccactcctcaaacccctggaggaagcatgcagaagggcaggtacagaagccatggggagtgcttttgggctccagccccatggctgcatctaggggtgggtgtctgtgactcctgaagtccaagtgggcatgcattccagtgtgctcttccatctttgccatctgcagacagcttgtgctgatcagctcgatagaccctctgtcttatcgtaagggcagaggaccagtatgacagctgtctgtatcctgagtgyttgcccagtgtaccagaaaaatcggatcacatgtgcacttgaaaggtgaatgcaagcttttattgagtgatggaggtggttctcagtgagatgggtggggagccagaaggggagatggaatgggaaggtggtcttcccctggagtcaggatgcccagaggcagactcccccctctctcttactctgctgtgtcattctgccatcactggtttgccaatctgctggtgtctattgctctactcctctgctcctctcgactttcacccactgtgtgtgtgcccgctaaggtcttggtttatatggacacag

SEQ ID NO: 246446 - DNA, 578 bp, Homo sapiens
gtatcccaggtcaccagcttccccatgatgccctattgcttcatggccaggttcacacttactattgcccatctaggcctgttgaccattgagcagggttcatcaggttcaggcatgttgacattttgagccagacgattctttgttggggcttgggaagttgtccagtacatttcaggatgattagcacatctctggcttttacccactagatactagtaacacacactctaccacccagttgtgacaaccaaaaatataaccagccattgccacaggaggaggacagtggcctcactgtgagaaccactgccttaagatttgggacctttgatctagatttgttaaacctgtggatgatatgggctctgtcagcaactatggaggtcactttttgctatccgctattaaaattgtcagtcctatwttttttagtgtgtaggagggctacagagaattgaggacaagctctaatttgggtcctgtgagaaggagatggaacagctgatggacttgcagaatacataggccagaagcaatcaaccatcaggcaccttggtccatcttgttgagtaaga

SEQ ID NO: 246447 - DNA, 612 bp, Homo sapiens
aactttgtcctttgtgattgaagacttccctctttgaaaagactacgatccagtagtgttgatgtgaaaattctagcataggtaatttgtgagttcaggaatcatgtgttatttatgtcttgaaagtacagtacaggttcttaagaatcactaatagagttgaatgtcttcttgaggttaatgcatcattcaccaagcatttgttttagttattgtacgaaacttaagttcctactttgaagatcaggtttcagaagattggatcttatatagagtaataaaaatgcctcagagaagcatttaatttttattccaytggaaattataatttaagtcctcaaatgcaagtaccactccatcaaaatcatacattgattactcgtaagttgagacaaacccaattcatgtgaaaccatgtgctcatttttgtaccaggtcactcaattgtatagcttctaatttagctgtttcatcatgacccattgtgaaaatatgaatgatatacttagtccatttgatctgcttgcaacccatgggatttcctttaaagatataaaacattgtgctagtgcttccttttttgttctgatacccacatcctgtgctctgtgg

SEQ ID NO: 246448 - DNA, 611 bp, Homo sapiens
ttaccttggcaaatagccgtacaatcctttgggaaattttaggcagcagacattctgaatgtatttgtaatggtattgcaatgcccttcctaaagagttagggtgggtctttgaattaagacagggcttaatctgggtttgagtttcatcaaactgagaaaacaattacaagccctcccagctaatcaaactagtatattatatcctgtgcatctatattaatcaattcatccttttctaaaattgtgttcctttctccttggtacaagcaccctcagaattcattcccatacatgtttatcactttgcttatacaaatgatgaagttccatattttttttttggtgtaagactgcttctccctcatttggcattttgttgtccctactccagggcatattggcatgrgactagagccataagcaaaggcattcaaccatgtggttagtatgcctccactggaagtactcagtgctattgcattcaggtcctacacaccaccattcctgccgtgagagcctgacctcccacttttacagtgggatcccactaagacatgcatctgagaaagccccacaatcaggagagaggtttgaatgctctataacaac

SEQ ID NO: 246449 - DNA, 598 bp, Homo sapiens
tcaatcagaggcaagtaatggaatgatccatgtagatatgtggaggaagagcattctagattgaagcattctggcatctttcaggaacagcaaagaagcccatgaacctggcacagagggagtgagatgggggtagcaagaaatgggggagaggagataatggggacaggtcttggaggactttgaaggtcctaatgaacatgttggcctttgttttttattccaagtaaaatgacaaaacactatgatttagatatagcccgttgaacatttttcaataaatatttactgagcatactatgaactttaatattcgtctaagccctgtggataacagatsttagtgagatatacgaggcctctgctgtcatggacattatatctggggtttggaaagagacggataagtaaataaacaaattagtaattctggaacttttagtgatactaagaagaaaaaatgttaaagggtaatacaatgagagtgacctgaaggggactgtgtgattcggtggtcaagaaaagcctcaggggaggtgattttttttttctttttttttaactgagacagagtcttgctctgttggcaggctggagt

SEQ ID NO: 246450 - DNA, 585 bp, Homo sapiens
agaaagctgagaagttattgtgactgcaaataacttctttaaatgagaaagactaatggcagaagttgtcaagaggacctctgtgaggaaagggcatttcagttgagacctaaaggttgcctggttgctagtcaggtgaaggggttgagaaagaacaaaccagacagtgcaraaggatttgctgaattcttaacctgggaaagagcttggagcgttcaagaaactgagaaaaggagtttggagaatggaaagcaggtggcagagagaggcacaaagtgagtctggaggcaccaatggggaagagtcattgcagaaactagacaagaccaatgaagatcaggaagtgcagcaacctaaaacttacttgtcagagctgttatagagatgacttctactgggaggttgaactaaacaaccctcaagctctcatccaaagctataatcctacaaatacaagaacacaatttgtttaatatttgataatgtgttctagattttttaaattaagaattgatagtgaaagtatagttataaaatataaaacagatcaaagcaaattaagtagtagctgccatataaagcaaa

SEQ ID NO: 246451 - DNA, 590 bp, Homo sapiens
acaagaccaatgaagatcaggaagtgcagcaacctaaaacttacttgtcagagctgttatagagatgacttctactgggaggttgaactaaacaaccctcaagctctcatccaaagctataatcctacaaatacaagaacacaatttgtttaatatttgataatgtgttctagattttttaaattaagaattgatagtgaaagtatagttataaaatataaaacagatcaaagcaaattaagtagtagctgccatataaagcaaatgtttaatatccagaaaagcaggaaaaacgtttctaggtagctacagctgtattcaaggataccaagacccactcacataattttgggaacagtttcatagaaaggagatatagacttcatatattggtgggatttwaatcaaaccagtaggaagtctattattagtcaaatattgctagtgttgagtggtgtataactatagacagggcattcagtctccttaaggatcttgattttctcctgtgtaaaataaaaggtaagggttgattattttaacatccctactgttcagctctagacttgggcaacacataattcttgttt

SEQ ID NO: 246452 - DNA, 567 bp, Homo sapiens
ttgtttctgaacacgcttaatttgggtgccctcaggaatgtacgtacttgatgagaatttatgcatctgtgattacagagcagcttatatttagataaaggtgaggaggagatgaaaaatggataaagacagaacatactgatcactaggtgcaggtacaccaacctgcaggctttgtgtcctttgtagacttggagaaaccttgctgggcatctgtttcctgtgcaagctctgaggaagtcataaaattctacattgcggttttctttggaaagtgattaaatgataataactgagttgctttgaagatgaatttccctcaaattatattgttattctgcttcccagcagatcttcttatcaagtgtattttccatggttctgattccttacagttttcaccctttcaaagttcactttgacttttaargtagacttatgcatgaggccagggacccagaaaccagtttcccattcttcagttctagatggtgttagattctagtgattttagtaaaacaaagccttcaaggtctaagtagtccagagcagtgaggttgattctta

SEQ ID NO: 246453 - DNA, 604 bp, Homo sapiens
ttcaccctttcaaagttcactttgacttttaaggtagacttatgcatgaggccagggacccagaaaccagtttcccattcttcagttctagatggtgttagattctagtgattttagtaaaacaaagccttcaaggtctaagtagtccagagcagtgaggttgattcttaaaatcaatatcgtaaatattgagacacatgaaggtataagcttggcaacttgagaacagagaactaactcaaaatagaaaaggaacaattaaaattcataaatattaactatatgtttaaagaaagatgttctgtttgcattgcaatattttataaccagtagaatatttttgacttatttttcaggaatcatgttttctaaaagtgtgtagacattaaaatcggaggatttaaacataaaactgctttctaattggtgttttccacagtaaacatgcattgtgcatagtcacttgatccraaagatgaaaataagaaatccaagaattaatgacatgcttcaaggagcaaaatttctgcctgttgtaggacattataaacattaggaaaaatgttaagttggttaaagctgatgatgttattacaacaaaaga

SEQ ID NO: 246454 - DNA, 544 bp, Homo sapiens
agtctttctgataaattaatttctgctaaagtagttatgactaaaaacagctataaattactgttcccagtaaatatatttgcttgtttacatgtaacaaaaatccaaagtcatgcctaatattagaggctccagacttaaaaatagagttgtacaagaagaatttggggcaaaaataactttatcagtaaaatctaatgtgacccaagtggatggcagtgctatgacctggaatttctggagcagctactgctttaaatattccattacactggcagattcagggttaaataaataaatatttaacaagttaaataaawgttttgatccatagttctgaaaatatggtcactatcctctcttgtagaaagggccttttgtcttcctcctgtagagtttctaagtccatcctcaggaagggaatttcatagaatttgaggctcattcaccaatactgtcaacaacacttgactgggtatctttgacaataagttctcagtttcccacctatttaacatctaaaagtacagatagccagctgggc

SEQ ID NO: 246455 - DNA, 569 bp, Homo sapiens
aggctgaggcaggagaattgcttgaacccgggaggcagaagttgcagtgagctgagatcacatcattgcactccagctctgggtaacagagaaagactctgtctttgggtggcggggcggtggggggtttggtgagaggggcgggaaaaatacaggtagtcctccccatccatgggttcattatccatagatttagccaactgcagatmagaagtatttggggaaaaaaataaatgattgcatctgtcctaaatatgtacagactttttgcttctcattattccctaaacaatatagtataacaactagttacatagcatttacattgcattaggtataagttatctgcagatggtttaaaatatatagcagaacattatatgccaatactatacaaggatttgagcacatgtggattttagtatccaccgagggtcctcgaaccaatccccgatgaacactgagaaactactgtatatgtaagtagattgagctggtgaattggcagatgctgtggtaattctgcagactaaagtattagtaactgatcaactagcctgagcattttt

SEQ ID NO: 246456 - DNA, 537 bp, Homo sapiens
gtcctgagctgatttttcaaagcatggatttggcattgtaatgctgccagctcagaaacgtcgatgtaatgggagaaaatgtatggggaattcagggcctgcctgaacctccatgggcccagccttggtacactcgggctagagagatctgtgaagggctgtttcacctcctggtgaccactcccacaccgacattggttggagatcctgccaactatccagggagcctgtggatctctttccaatgggatgctagcttttagtcaactgtttaaaaaattattatctttaacagctyttgaaagattagctttctattgccatttccaaatcttctttcctcccactctgcaccagcacctgcactataaagaaggtaaattggccaggagcggtggctcatgcctgtaatcccagcgctttgggaggccgagggagcgtggatcacttgaggtgaggagttcgagaccagcctgcccaacttcgtgaaaccactgtctctactaaaaaatataaaaattagccagacgtggtggc

SEQ ID NO: 246457 - DNA, 600 bp, Homo sapiens
ggtcaggctggtctcaaactcctgcctcaggtgatccacctatcctggcctcccaaagtgttgggattgcaggcgtgagccaccgtgcctggcttcagaatgtrtttttttgccagtgtgtcatgtttcatagctcggtgactgatgaagggacttattcagtgcttttcctttatgcactgatatttattttattaattttaaattaataaaatattaatttaaatatttttaaaattattaaaaatattaattttctgactctttaggaatacatattcctaaagagagtgttgtgttgtgttgtatttaaaagaaaagggctgtggattttgacagaccttcaaacctcaggcctcctactcattagctgtgtggtcttgggcaaattattcaccctgtctgagtttaagccttttaatttgcaaaacctctgaggattattttgaagattcaattaactaatatatgaaagtgcaatgcaacaggaggttgctaatattaatttgagttatagtccggcaactcaacaagtgtttgttaatattctatatatatctacactgagaaaatcagactgtaatagcaccaaatatttgg

SEQ ID NO: 246458 - DNA, 541 bp, Homo sapiens
ctttcatatatcacataactctacagagaaaagggatggattatctgcttcactgagggtggcatatcattttcatgataagggcaatgaatcrtgctgtgactggtgctgtttagcccattgaatcaggcgcctatggtgggaaaggaatcatcttcctaactaagcactgtcttaggaaaagatatgtctttatgagtgtggtctactcttctagtagctgtagagtgagacttaggaatcattcattggcagtgaggagtttctgggctaagaggtagggcagtgcttcttaaccctggctacatgttggaatcattagggagagtgttaaaaggtacacatgcttttgtcatatcagaattcagatttacaatacttaaattggtgtatggcctgggcactggggagtttttaaagcagccaagtttgagaaccactgagttaggaaaacccattttcctgtcttggtgactgatctcaaggaaggcattggcctctttgtgtgtatttcctagtctgctcaatggacattggttct

SEQ ID NO: 246459 - DNA, 536 bp, Homo sapiens
ctaaccatatcatgtccatagaataggctgttgttgaaatttaattttgattaccccagaatgcttcaagaatacagtgttttctgaatcttcagaggtggagaagtcttcctccctgtcacataatactgagataaacctttgcattctagaaaaatcttcataggccttcctttacatgagatatgacaaacccatttcaattaatatagcccatgattcaggaagttgtaccgagcagtaaattattttgctcaactcaggagtggagatttcaccaagtaggtaattgtgtcattcaaatacatgtcctggtattctcggtgttacyggtacaggattaaagcttgtcatgtcagttgttaaatgttttaaattaaaaaggaataatttgtatacagattatatagaaggctcatcctgcatggatagatgcaaaacttatccctctgcttttttattccattatctgtctataagtgatgtctctctgtaggatatctgcatcgtcttggactgggttttctgttccctgt

SEQ ID NO: 246460 - DNA, 565 bp, Homo sapiens
ggatacaaggcacagacttcattcccagtgagggggaggagtgataatgtagctttggggtctgtttcttctgtgatcctagtgttctggagcaaaaggggctcatcactcaatgygctagaagccaatactatgacactggattttgagaaaaagaaaggttttattgcaaatcgacttgcagggagacaggagggtcaagctcaaatctgtctttttgttctggctttttgaagtagtagttttattagaaaaagttgtggcaggggtgggttctaaaggggagggctggaaagtccttggacgtgggcagttatctctgcattctatctcaggggtcacgtgtggaaattcaaggggagttagtatgaaacatgtggtagaaattcaggctgtgacattagcaagctcattctgtacagattccagtcggccatatcggttccagtcgatttcagccagttctcttatcttataagcagagggagtttcagtgtttcagcaagttatttccttctttatctgccatcctgcaaactcaatttctgttcatcattggtttctg

SEQ ID NO: 246461 - DNA, 565 bp, Homo sapiens
ggatacaaggcacagacttcattcccagtgagggggaggagtgataatgtagctttggggtctgtttcttctgtgatcctagtgttctggagcaaaaggggctcatcactcaatgcgctagaagccaatactatgacactggattttgagaaaaagaaaggttttattgcaaatcgacttgcagggagacaggagggtcaagctcaaatctgtctttttgttctggctttttgaagtagtagttttattagaaaaagttgtggcaggggtgggttctaaaggggagggctggaaagtccttggacgtgggcagttatctcygcattctatctcaggggtcacgtgtggaaattcaaggggagttagtatgaaacatgtggtagaaattcaggctgtgacattagcaagctcattctgtacagattccagtcggccatatcggttccagtcgatttcagccagttctcttatcttataagcagagggagtttcagtgtttcagcaagttatttccttctttatctgccatcctgcaaactcaatttctgttcatcattggtttctg

SEQ ID NO: 246462 - DNA, 534 bp, Homo sapiens
tgaaacatgtggtagaaattcaggctgtgacattagcaagctcattctgtacagattccagtcggccatatcggttccagtcgatttcagccagttctcttatcttataagcagagggagtttcagtgtttcagcaagttatttccttctttatctgccatcctgcaaactcaatttctgttcatcattggtttctgtaactctttggaacatggtttcactggttcctccaccctgctgactcaatagacagaatgagatgggtgggggaggctggaaaygaattacttgtctccccgtgggggaaatgggggatatcaaagatactggacagaatagagcaagatgtctgttactgctctggaacaagcgtgtcctatccatcctgctggggaggagaaattgtttgccccaaacagatcactacagcaagcatgtttttgagtaactttgtcatacgctctgggcaatgagagggaataacacacagttttgttctcaaatgagacacacacacttaaggagagaacaaag

SEQ ID NO: 246463 - DNA, 486 bp, Homo sapiens
caaagaggagaatctgtgtgacccagagcaatggtaggcaggttagtgtaagatgcctgtgtgagaggctgggatcggtaaccaccagcagacgcagctcctggaaggctgcctggatctggtgcgggaaggttccaggagcaaagtggccagcaataggagtgactcaagtggtagcagcaaacttcagcaaagcccacttgccagtgttcctggagaatatgacactgaatcagcagggctttcaacagtgatgatggcatgagccaccagcagaagcttctcccaggtcctcttcagatttaggaygcagatgccatcacttttccttttgcagatgtactgttccacttggaagtcaatcttggtgccacccaagtgagttcctgctgcaagaaatttgaggacatcctcctctttcatgttcaggacatcacaggttctggccattgtaaaagtttccctttaagttctgagaggaattca

SEQ ID NO: 246464 - DNA, 593 bp, Homo sapiens
gtctgaatactaaaatgtttattcaacgtaaggattgcaagaatgactcatcatttccttcatatccctgaggctctataactctttctatttagacatctaaggggttaggaggacaatgtctgagaattgtttcattatctggggatgagctaatagaaastataagaaataatcattcttataggaagatccttaacattactgccttatccagaatcaatcaagtaactgaattttaataattgtagccatgagatgaattcttcctccatgaacttgttactagaccatgaacaaaccataaaagacaataataggtaagtgggactatatcaaattaagctgttatgaaaataaagaggcaagctgcagaatgagagaagaacatatttgcaatacatatatcttacaaacaatttgtatccagaatatatagataactcttacacatctacatgggcaaatgatttgagtagacatttctcaaaagaaaatatatgaatgtctaataagctcacataaagaagctcaataccattaggacttcgaagaaatgcaaattaatcacagtgagataccactacataccc

SEQ ID NO: 246465 - DNA, 593 bp, Homo sapiens
gtctgaatactaaaatgtttattcaacgtaaggattgcaagaatgactcatcatttccttcatatccctgaggctctataactctttctatttagacatctaaggggttaggaggacaatgtctgagaattgtttcattatctggggatgagctaatagaaactataagaaataatcattcttataggaagatccttaacattactgccttatccagaatcaatcaagtaaytgaattttaataattgtagccatgagatgaattcttcctccatgaacttgttactagaccatgaacaaaccataaaagacaataataggtaagtgggactatatcaaattaagctgttatgaaaataaagaggcaagctgcagaatgagagaagaacatatttgcaatacatatatcttacaaacaatttgtatccagaatatatagataactcttacacatctacatgggcaaatgatttgagtagacatttctcaaaagaaaatatatgaatgtctaataagctcacataaagaagctcaataccattaggacttcgaagaaatgcaaattaatcacagtgagataccactacataccc

SEQ ID NO: 246466 - DNA, 593 bp, Homo sapiens
gtctgaatactaaaatgtttattcaacgtaaggattgcaagaatgactcatcatttccttcatatccctgaggctctataactctttctatttagacatctaaggggttaggaggacaatgtctgagaattgtttcattatctggggatgagctaatagaaactataagaaataatcattcttataggaagatccttaacattactgccttatccagaatcaatcaagtaactgaattttaataattgtagccatgagatgaattcttcctccatgaacttgttacyagaccatgaacaaaccataaaagacaataataggtaagtgggactatatcaaattaagctgttatgaaaataaagaggcaagctgcagaatgagagaagaacatatttgcaatacatatatcttacaaacaatttgtatccagaatatatagataactcttacacatctacatgggcaaatgatttgagtagacatttctcaaaagaaaatatatgaatgtctaataagctcacataaagaagctcaataccattaggacttcgaagaaatgcaaattaatcacagtgagataccactacataccc

SEQ ID NO: 246467 - DNA, 615 bp, Homo sapiens
ggctcagccattccactcttaggtattcaccaagagaaataaaaatgtgccacacaaagatttgaagatcaaaggtcatagcaactttattcatagcagcaaaaaaaaaaaagaaagaaaaaaagaaagaaagaatttaagtgtacatcaacaggagaatggattttaaaaaggtagtatttctttctttctttttttttttttttytgagatggagtttcgctcttgttgcccaggctggagtgcaatggcaggatctcagctcactgtaacctccgcctaccaggttcaagcaattcttatgcctcagcatcccaagtagatgggattacaggcacccaccaccacgcctggctaactttttgtatttttagtagggatggggtttcaccatgttggccaggctggtctgaaactcctgacctcaggtgatccacccgcttcagcctcccaaagtgctgggattacaggcatgagccaccacacctggccaaaaggtagtatttctatatggtggaatactattgagtactaataaattaaaatgaaacaacacacagcaaaactcaaaaacatgacatggagtgaaagcagacatacacaaaagcatacata

SEQ ID NO: 246468 - DNA, 615 bp, Homo sapiens
ggctcagccattccactcttaggtattcaccaagagaaataaaaatgtgccacacaaagatttgaagatcaaaggtcatagcaactttattcatagcagcaaaaaaaaaaaagaaagaaaaaaagaaagaaagaatttaagtgtacatcaacaggagaatggattttaaaaaggtagtatttctttctttctttttttttttttttttgagatggagtttcgctcttgttgcccaggctggagtgcaatggcaggatctcagctcactgtaacctccgcctaccaggttcaagcaattcttatgcctcagcatcccaagtagatgggattacaggcacccaccaccacgcctggctaactttttgtatttttagtagggatggggtttcaccatgttggccaggctggtctgaaactcctgacctcaggtgatccacccgcttcagcctcccaaagtgctgggattacaggcatgwgccaccacacctggccaaaaggtagtatttctatatggtggaatactattgagtactaataaattaaaatgaaacaacacacagcaaaactcaaaaacatgacatggagtgaaagcagacatacacaaaagcatacata

SEQ ID NO: 246469 - DNA, 615 bp, Homo sapiens
ggctcagccattccactcttaggtattcaccaagagaaataaaaatgtgccacacaaagatttgaagatcaaaggtcatagcaactttattcatagcagcaaaaaaaaaaaagaaagaaaaaaagaaagaaagaatttaagtgtacatcaacaggagaatggattttaaaaaggtagtatttctttctttctttttttttttttttttgagatggagtttcgctcttgttgcccaggctggagtgcaatggcaggatctcagctcactgtaacctccgcctaccaggttcaagcaattcttatgcctcagcatcccaagtagatgggattacaggcacccaccaccacgcctggctaactttttgtatttttagtagggatggggtttcaccatgttggccaggctggtctgaaactcctgacctcaggtgatccacccgcttcagcctcccaaagtgctgggattacaggcatgagccaccacacctggccaaaaggtagtatttctatatggtggaatactattgartactaataaattaaaatgaaacaacacacagcaaaactcaaaaacatgacatggagtgaaagcagacatacacaaaagcatacata

SEQ ID NO: 246470 - DNA, 615 bp, Homo sapiens
ggctcagccattccactcttaggtattcaccaagagaaataaaaatgtgccacacaaagatttgaagatcaaaggtcatagcaactttattcatagcagcaaaaaaaaaaaagaaagaaaaaaagaaagaaagaatttaagtgtacatcaacaggagaatggattttaaaaaggtagtatttctttctttctttttttttttttttttgagatggagtttcgctcttgttgcccaggctggagtgcaatggcaggatctcagctcactgtaacctccgcctaccaggttcaagcaattcttatgcctcagcatcccaagtagatgggattacaggcacccaccaccacgcctggctaactttttgtatttttagtagggatggggtttcaccatgttggccaggctggtctgaaactcctgacctcaggtgatccacccgcttcagcctcccaaagtgctgggattacaggcatgagccaccacacctggccaaaaggtagtatttctatatggtggaatactattgagtrctaataaattaaaatgaaacaacacacagcaaaactcaaaaacatgacatggagtgaaagcagacatacacaaaagcatacata

SEQ ID NO: 246471 - DNA, 617 bp, Homo sapiens
aaagcatacatattgtatgatgcatttatatgtaattccacagaaggcaaatcaacttgcagtgacaaatagcatattaaaggcagcccaaggctagggttgactgcaaagaagcatcagggaaatttggggggtgataatattctctatcttgaagacacccatagttacacagagayatacatttctcaagactcattgagttgtacaattaaaataaatgaggcttattttaggtaaagtatattataacaaaattgtttcatgaaaaacattcaagtaagttttgttccacaactagcaaaaggtgcagatcaaattaaaaaacagatgaatgtggttatgttctaaaaagggatttaaggtagaggtacgttatggaaaaatctgattgcaatgtctgggatatgataggtgtattagtccattttcacactgctgtaaagaacttccctgggactgggtaatttataaagaaaggggtttaattgactcacagttctgcatgggtggggaagcatcaggaaacttacaatcatggtggaaggggaatcaggcatgttttacatggcagcaagtgagagagacagcaagagaggaaaccgccacttaaaaaa

SEQ ID NO: 246472 - DNA, 606 bp, Homo sapiens
aaagccacttctttaaaatgtgacactaccaaaaatattatgtatcatttggtttactcataaaattatccagtttggcatggtcctgatatatgaaaagtcctttcatgcaacaggcatttactacctaattttacttttaaatggttataaattctatcacaaaagtgtcagctgggagtggtgactcacacctctaatcccagcaccttgggaggccaaggygggtggatcacctgaggtcaagagttcaagaccagcctggccaacatggcgaaaccctttgtctactaaaaatataaaaaaataaaaaattaactgggtatggtggcaggtgcctgtaatcccagctactcaggaggctgcagcagaagaattgcttgaacccaggaggcggaggttgcagtgagctgagatgtactccagcctgggcaacagagtgaaacaccatctcaaaaaaaaagtgtcagaaaaattatctgaaataaggcaaaaatgtggtcagcatgttccagtaatatcatataagggccatggtcacccatgcatcgtctagataggcacagctctgtcccagataaatttctgtgatgtacagtgtggtag

SEQ ID NO: 246473 - DNA, 606 bp, Homo sapiens
aaagccacttctttaaaatgtgacactaccaaaaatattatgtatcatttggtttactcataaaattatccagtttggcatggtcctgatatatgaaaagtcctttcatgcaacaggcatttactacctaattttacttttaaatggttataaattctatcacaaaagtgtcagctgggagtggtgactcacacctctaatcccagcaccttgggaggccaaggtgggtggatcacctgaggtcaagagttcaagaccagcctggccaacatggcgaaaccctttgtctaytaaaaatataaaaaaataaaaaattaactgggtatggtggcaggtgcctgtaatcccagctactcaggaggctgcagcagaagaattgcttgaacccaggaggcggaggttgcagtgagctgagatgtactccagcctgggcaacagagtgaaacaccatctcaaaaaaaaagtgtcagaaaaattatctgaaataaggcaaaaatgtggtcagcatgttccagtaatatcatataagggccatggtcacccatgcatcgtctagataggcacagctctgtcccagataaatttctgtgatgtacagtgtggtag

SEQ ID NO: 246474 - DNA, 576 bp, Homo sapiens
atttatgtcacttatcacacccagtagttttgccattttataaaatagtaagttaatttccagcccaccggagccatacacactcacacacttggggtttagaagaaatatttataccagcagacccaactgtttatggattctctatctccacttagagacattagaccaagaaaatggtgccctgtttacagaatgagggttgaacaggactgttctttttgaatgtgtacccttgtttaaaaaatgctttataaattgcattaatgatatggtttggctctgtgtccccacctaactctcatcttgaattgtaatctccaggtgttgagggagagaccgggtgggaggtgattgcatcgtaagggcaatttcccccacgctgttctcgtgatagggagcgagttctcatgagatctggtggttttataagtggtagctcctctcttgttmtctctctcgtcaccacgtgaagaaggtccttgcttccccttgccttctaccataattgtaagtttcctgaggcctccccagccatggctaactgtgagtcaattaaatctctttcttttataa

SEQ ID NO: 246475 - DNA, 595 bp, Homo sapiens
caattgcataatagtaacaaagatggtgtgaaattaaatcaactctttcatgagaaagctgttgatatstaattttatttacaacctcttgtatatataatgaattgttatatgtgttcactaagaactgaatatgaacaaatttgtataaattataaaagggacaatgtaatttatctctaaggaccaatttgataaaattgggacaaaaaagattacttatttttctttgtaaacactgaacaagatagttctagttgagatcattctagtacaggacaataataggttttatgggacttgaagtttgtaaaatttgagaaagcctctttgatttaattataatataattaattataaatacaaaattaggtatgaaaacaatctttccaaatgacaaaaatcccagaaattacaaattcttttaaaaattgacaaatacaaaaaaatcacaaaatctagaaatatttttattagtaaattatctggcatgcctctacaatacttgcttttctttttttgagatggagtttcactcttgttgcctaggctggagtgcagtggtgcgctctcggctctgttgagtattaggtgt

SEQ ID NO: 246476 - DNA, 545 bp, Homo sapiens
aacttcaaagagtaaataaataayatagacaaaaagcagtaagggagggtaagggaaagcaatctaaagtgagagtattatggttcacatactgtgctggtatttttagtgtttgaaatattttaatgtatgttaataaattcatcattttatatatatgtctatgtgtttgtttatttatttatttatttatttatttttgagaagtcacaatacagaccaatgaaggacaagctccttccaaaaccataaattgctatagagcccagggagggagaggccatttcagaccaagttgttgctttttggaggaggtggtatttaagcaaagctatgatgggttgcatgattttggtaggtggagattatcagtacatgctccagggatagcaaataagatcatggatgtaacagatgtgcactgtgtccaggtttagtgggagagaagcctggaaatacaggctgaaatattctgcctatggtacgatgtgaagtggattcctctagttctgttcgaaggagagagaaacgggtaggaagagtct

SEQ ID NO: 246477 - DNA, 582 bp, Homo sapiens
agttctgttcgaaggagagagaaacgggtaggaagagtctctgccatttgaatgtatttgaaaaactttatgactcaggtttttatccttaaatccctgtgccttacttgtttctcctcccctgggcacatccattttawgtactaaagtcccacactcaattcaggactccagcaagtgtctggtctcagtagaaaatggcaaatcggatgaatgagagatatgatggagcctggttttcaactcttggttttgctaagggaagaagtattgagaaggggaaactttctaagttctctttccctggttatctgtggaatttgtcacctctaatcaagccatctctctgctagctctgacatctgaacattgctctttctcatgcacacatttcttttcaggagactattctctgtcttgcccattatatatacttatgaagcagtagttattgatttttatttactgcagcttgtttatggatacctctttcttcctcctagctttccctagatgtcattgaccctgtgtttaccatctttgcattgcctcattgtgtcacagagccaagcacagaccaga

SEQ ID NO: 246478 - DNA, 582 bp, Homo sapiens
agttctgttcgaaggagagagaaacgggtaggaagagtctctgccatttgaatgtatttgaaaaactttatgactcaggtttttatccttaaatccctgtgccttacttgtttctcctcccctgggcacatccattttaagtactaaagtcccacactcaattcaggactccagcaagtgtctggtctcagtagaaaatggcaaatcggatgaatgagagrtatgatggagcctggttttcaactcttggttttgctaagggaagaagtattgagaaggggaaactttctaagttctctttccctggttatctgtggaatttgtcacctctaatcaagccatctctctgctagctctgacatctgaacattgctctttctcatgcacacatttcttttcaggagactattctctgtcttgcccattatatatacttatgaagcagtagttattgatttttatttactgcagcttgtttatggatacctctttcttcctcctagctttccctagatgtcattgaccctgtgtttaccatctttgcattgcctcattgtgtcacagagccaagcacagaccaga

SEQ ID NO: 246479 - DNA, 582 bp, Homo sapiens
agttctgttcgaaggagagagaaacgggtaggaagagtctctgccatttgaatgtatttgaaaaactttatgactcaggtttttatccttaaatccctgtgccttacttgtttctcctcccctgggcacatccattttaagtactaaagtcccacactcaattcaggactccagcaagtgtctggtctcagtagaaaatggcaaatcggatgaatgagagatatgatggagcctggttttcaactcttggttttgctaagggaagaagtattgagaaggggaaactttctaagttctctttccctggttatctgtggmatttgtcacctctaatcaagccatctctctgctagctctgacatctgaacattgctctttctcatgcacacatttcttttcaggagactattctctgtcttgcccattatatatacttatgaagcagtagttattgatttttatttactgcagcttgtttatggatacctctttcttcctcctagctttccctagatgtcattgaccctgtgtttaccatctttgcattgcctcattgtgtcacagagccaagcacagaccaga

SEQ ID NO: 246480 - DNA, 582 bp, Homo sapiens
agttctgttcgaaggagagagaaacgggtaggaagagtctctgccatttgaatgtatttgaaaaactttatgactcaggtttttatccttaaatccctgtgccttacttgtttctcctcccctgggcacatccattttaagtactaaagtcccacactcaattcaggactccagcaagtgtctggtctcagtagaaaatggcaaatcggatgaatgagagatatgatggagcctggttttcaactcttggttttgctaagggaagaagtattgagaaggggaaactttctaagttctctttccctggttatctgtggaatttgtcacctctaatcaagccatctctctgctagctctgacatctgaacattgctctttctcatgcacacatttcttttcaggagactattctctgtcttgcccattrtatatacttatgaagcagtagttattgatttttatttactgcagcttgtttatggatacctctttcttcctcctagctttccctagatgtcattgaccctgtgtttaccatctttgcattgcctcattgtgtcacagagccaagcacagaccaga

SEQ ID NO: 246481 - DNA, 525 bp, Homo sapiens
agtctcatctgagacaaggcaagtctcttctgtttatgagcctttataatcaaagcaagttagttacttccaagatacaatggaggtacaggccttggataaataaacccattccaaataggataaattggccaaaagaaaggagctacaggccccatgcaagtcagaaatccaatagggtaatccttaaagttccaaaataatttcctttgactccacgtctcacctctgtctggggcagtccactgtgtgtaaaatgccatctgatgattacataagaacatcttttttaaagtatatttcttcaccatttcaatttgatcttctagaaatagcctcttttattgtttgtccatcttgtttttttkttgttgttgttgttgttaatttttgagagctcttttctatcctctgcaacagtaatatttattcaaagtctatgatttggtctattggttttgttagcagcatattttcccatacaaaagatctaactttatctgatatctttttgtttacactatt

SEQ ID NO: 246482 - DNA, 616 bp, Homo sapiens
cactgaaagaagagtcattttatagataaaatgaacactaattggttttcataaacagttttattgaagcattgatataaaaaaactgcacatgyttaatgtatacaatttggtgaatttgcaataacatgagtttgtaacagaacttgtgtggaagttgaaggatacggaagagtctaatgtctcagggtcttggctagattgcgactggactcatatctgtgccattcatgatgagaagtcgaagtgaggtaaacatttctaagggtagagcaacaacgagcccaacactggacacattcattttgaattgcctaataatagatggcaatttggaaatctggagctgaggcaagaaatcaaagttggaagtacaaaatggtattatggtgatagagctgatagtttagtgtgtgtgtgtgtgtgtgtgtgtgtgtgtgtgtgtgtgtgtgtgtgatggctctaaaaagactttgtaaagtaagaaaaaagttcatcaaaagaactccttcacattctctttaaaaactcacatttgacttcatgagtggcaaggtagtaggggatatttctacttataaagaagccaggctgaggagaaatcttcactcagttt

SEQ ID NO: 246483 - DNA, 581 bp, Homo sapiens
taaaattaatggccactcatccgaagctactgtgggcactgtttccttgacatcaattgtttgatgggattacctagaggttaaactaacaagcaaggtttaattggaagcaatgaaagaagcagtgatcattcgttatgtttaacctgcataaccacatctaaatgaatatctaaaaatgttaaactatttctcaaattaaaatatgcacatcacattctgatattacagatttgggtattgcagcaatcagctattaagaccacactgctgcaactgagatggggtaattaatgtatcaatcgacacctaaattcaggatttttttttcaccttttaaaaacagatggatataattagttgcaaaagaagccctaagctcacccagtaggaagcctcaaaggctgcaggtcatggggcccctcctgcacagagctcacagtggggccaggctgcatgcgcagtgcatgaaggygagcagagcttgctccatctctgaactggaatggtctgtacagtggtcccagaatagaaaggcaggcaggaaactggtgaagggaaagggactacgctgtcctgtg

SEQ ID NO: 246484 - DNA, 581 bp, Homo sapiens
taaaattaatggccactcatccgaagctactgtgggcactgtttccttgacatcaattgtttgatgggattacctagaggttaaactaacaagcaaggtttaattggaagcaatgaaagaagcagtgatcattcgttatgtttaacctgcataaccacatctaaatgaatatctaaaaatgttaaactatttctcaaattaaaatatgcacatcacattctgatattacagatttgggtattgcagcaatcagctattaagaccacactgctgcaactgagatggggtaattaatgtatcaatcgacacctaaattcaggatttttttttcaccttttaaaaacagatggatataattagttgcaaaagaagccctaagctcacccagtaggaagcctcaaaggctgcaggtcatggggcccctcctgcacagagctcacagtggggccaggctgcatgcgcagtgcatgaaggcgagcagagcttgctccatctctgaactggaatggtctgtacagtggtcccagaatagaaaggcaggcaggaaactggtraagggaaagggactacgctgtcctgtg

SEQ ID NO: 246485 - DNA, 581 bp, Homo sapiens
taaaattaatggccactcatccgaagctactgtgggcactgtttccttgacatcaattgtttgatgggattacctagaggttaaactaacaagcaaggtttaattggaagcaatgaaagaagcagtgatcattcgttatgtttaacctgcataaccacatctaaatgaatatctaaaaatgttaaactatttctcaaattaaaatatgcacatcacattctgatattacagatttgggtattgcagcaatcagctattaagaccacactgctgcaactgagatggggtaattaatgtatcaatcgacacctaaattcaggatttttttttcaccttttaaaaacagatggatataattagttgcaaaagaagccctaagctcacccagtaggaagcctcaaaggctgcaggtcatggggcccctcctgcacagagctcacagtggggccaggctgcatgcgcagtgcatgaaggcgagcagagcttgctccatctctgaactggaatggtctgtacagtggtcccagaatagaaaggcaggcaggaaactggtgaarggaaagggactacgctgtcctgtg

SEQ ID NO: 246486 - DNA, 549 bp, Homo sapiens
tttcaattgagtatctcagtgtgcttctatttcattctcctgtctgcacttgggttctccctgctcccccatgcctgcggacacacagggtcaccttatggactctgtgttttcctgtcatcaggacaagcctagactgatttgtgccctttggtcctgggcacaaattccacattcttaagcctgagaacataagtggcccaggctgagtcagatgtacatttttggtccaatcagcaatggatagagtcacactggaataataatattgatgacaagaacatgtgaaagttatgatgatggtaatrataacagccaacatttactaagctcttagaatgcactattttaagtgctttgcatgtttaattcctcatcgtcatacaatgcttgtatgatacaggcactacccttatcagactcactctatagatgaggcacagagaattgaagtaacatgcccatggtcacacagccagtgtgtggctgagctgacttaaaacccagtagtttggtcctaacatgcctgtgcctgaccactgcacaatg

SEQ ID NO: 246487 - DNA, 549 bp, Homo sapiens
tttcaattgagtatctcagtgtgcttctatttcattctcctgtctgcacttgggttctccctgctcccccatgcctgcggacacacagggtcaccttatggactctgtgttttcctgtcatcaggacaagcctagactgatttgtgccctttggtcctgggcacaaattccacattcttaagcctgagaacataagtggcccaggctgagtcagatgtacatttttggtccaatcagcaatggatagagtcacactggaataataatattgatgacaagaacatgtgaaagttatgatgatggtaatgataacagccaacatttactaagctcttagaatgcactattttaagtgctttgcatgtttaattcctcatcgtcatacaatgcttgtatgatacaggcactacccttatcagmctcactctatagatgaggcacagagaattgaagtaacatgcccatggtcacacagccagtgtgtggctgagctgacttaaaacccagtagtttggtcctaacatgcctgtgcctgaccactgcacaatg

SEQ ID NO: 246488 - DNA, 558 bp, Homo sapiens
agtccacgcaactcagatttttcccataatggctgatttatttagttgtattaataattctttcattttttccctcttcatcttaaaggctctttgcttgggtggacctccaagcttgggctcactctgcccatgctgaggcctgcctggagcatgggatcccatgtggatctgtgggcctgagtgtgactgtgtccacagacttgggcctctgtgtggacagaaaaccagctgggggtggccagagctctcctgggataaaacacacacactctttctcctgggcccaaggggagggcctgggcagggtagcaacaaaagcacagccaggcagcttaggcggtgatatggtttggtctgtgtccccacccaaatcttatcttgaattgtactcccataatkcccatggttgtgggagagacccagtgggagataattgaatcatgggggcggatccccccatactgttctcatggtagtgaataagtctcatgagatctgatggttttataaggggtttctgcttttgcttcttcctcattctctcttgtctgccac

SEQ ID NO: 246489 - DNA, 558 bp, Homo sapiens
agtccacgcaactcagatttttcccataatggctgatttatttagttgtattaataattctttcattttttccctcttcatcttaaaggctctttgcttgggtggacctccaagcttgggctcactctgcccatgctgaggcctgcctggagcatgggatcccatgtggatctgtgggcctgagtgtgactgtgtccacagacttgggcctctgtgtggacagaaaaccagctgggggtggccagagctctcctgggataaaacacacacactctttctcctgggcccaaggggagggcctgggcagggtagcaacaaaagcacagccaggcagcttaggcggtgatatggtttggtctgtgtccccacccaaatcttatcttgaattgtactcccataatgcccatggttgtgggagrgacccagtgggagataattgaatcatgggggcggatccccccatactgttctcatggtagtgaataagtctcatgagatctgatggttttataaggggtttctgcttttgcttcttcctcattctctcttgtctgccac

SEQ ID NO: 246490 - DNA, 524 bp, Homo sapiens
taatgtcagtgcactcttcaggctgacagaaatcccaccgataattgggaagaatggaaaatgaaaacattaaaatttgccatgtcatccgttcacttttcctgattgtctgatacccaccgtccactgacagatgctgtattattaacacttgattaaaaatcacttcaggtttgaaccagccagtygagaagggagcgtcttgacaagacttgtggtttgtgattgacaattagtaatattcggtgtgtcacaacatagatagtgtgacttattggtgctggtgtaatgcaacacatttcatctgagctcctcaaattggtacataggagtaagaaagaaaggatggagtcctcattcagccgactttgattaccaacaaaggagagattgtacgtacctgtctcggcatggccaacctggacttctatcaatcagccagacggctgcgatcccctctcctctttgggaacaggaacctcagcagagcgtgatctcattatgcaaccctcaacttctccatc

SEQ ID NO: 246491 - DNA, 540 bp, Homo sapiens
tcatgaatgtaaatgcagacatcttcaaaaaatactagcaaattggaatcaacaatgtataaaaagaattatgcactaccaccaagtgggaattttcccaggtatgcaaggtttgttcaacatttggaaatcaattaatgtaatctattacatcaacagactaaagaaaaatcatgtgatcacatcagtaggtgcagaaaaagcacctaacaaagtccaacacccattcaytattaaggcaaaacaaaacagaacacctctcagtaaacaggaattgaggggagcttcatcagtttgatacagaatatctacaaaaaacctacaactaacatcatcatcatacttagtgatgagaactagaagctcgcccactaagatcagaaacaaaagaaagatatcttctctcaccactgcttttcaatattgtactggcaattctagctaatgcaataagacaagaaaaggaaataaaacatattgagattgggaaggaagaaataaaactgtcattgcagataacataattatctaggtagaaaa

SEQ ID NO: 246492 - DNA, 540 bp, Homo sapiens
tcatgaatgtaaatgcagacatcttcaaaaaatactagcaaattggaatcaacaatgtataaaaagaattatgcactaccaccaagtgggaattttcccaggtatgcaaggtttgttcaacatttggaaatcaattaatgtaatctattacatcaacagactaaagaaaaatcatgtgatcacatcagtaggtgcagaaaaagcacctaacaaagtccaacacccattcactattaaggcaaaacaaaacagaacacctctcagtaaacaggaattgaggggagcttcatcagtttgayacagaatatctacaaaaaacctacaactaacatcatcatcatacttagtgatgagaactagaagctcgcccactaagatcagaaacaaaagaaagatatcttctctcaccactgcttttcaatattgtactggcaattctagctaatgcaataagacaagaaaaggaaataaaacatattgagattgggaaggaagaaataaaactgtcattgcagataacataattatctaggtagaaaa

SEQ ID NO: 246493 - DNA, 540 bp, Homo sapiens
tcatgaatgtaaatgcagacatcttcaaaaaatactagcaaattggaatcaacaatgtataaaaagaattatgcactaccaccaagtgggaattttcccaggtatgcaaggtttgttcaacatttggaaatcaattaatgtaatctattacatcaacagactaaagaaaaatcatgtgatcacatcagtaggtgcagaaaaagcacctaacaaagtccaacacccattcactattaaggcaaaacaaaacagaacacctctcagtaaacaggaattgaggggagcttcatcagtttgatacagaatatctacaaaaaacctacaactaacatcatcatcatacttagtgatgagaactagaagctcgcccactaagatcagaaacaaaasaaagatatcttctctcaccactgcttttcaatattgtactggcaattctagctaatgcaataagacaagaaaaggaaataaaacatattgagattgggaaggaagaaataaaactgtcattgcagataacataattatctaggtagaaaa

SEQ ID NO: 246494 - DNA, 540 bp, Homo sapiens
tcatgaatgtaaatgcagacatcttcaaaaaatactagcaaattggaatcaacaatgtataaaaagaattatgcactaccaccaagtgggaattttcccaggtatgcaaggtttgttcaacatttggaaatcaattaatgtaatctattacatcaacagactaaagaaaaatcatgtgatcacatcagtaggtgcagaaaaagcacctaacaaagtccaacacccattcactattaaggcaaaacaaaacagaacacctctcagtaaacaggaattgaggggagcttcatcagtttgatacagaatatctacaaaaaacctacaactaacatcatcatcatacttagtgatgagaactagaagctcgcccactaagatcagaaacaaaagaaagatatcttctctcaccactgcttttcaatattgtactggcaatwctagctaatgcaataagacaagaaaaggaaataaaacatattgagattgggaaggaagaaataaaactgtcattgcagataacataattatctaggtagaaaa

SEQ ID NO: 246495 - DNA, 583 bp, Homo sapiens
gaaaaaacccaactgagggatattctacaaaacaattgacctttacccctcaaaactgccatcaaaartgaaaaaaaaaatgagaaactatcacagtaaagaggcgcctaaggaaacataaatggtatcctgagtgggatcctggaacagaaaaaaattacataaattttaaggacatatgaataaaaatgtattttaggtaaaaataacaatggatcaatattggctcattaattgtgacaagtaaattatactaacctaagatgagaaaaatagagaaaacagtgtggggtttctgagaacctctattctgtcataatttttctgtaaatctgaaattattctaaaattaaaggtttagtcaaaaaaatcttaaaggtaagcactataagactagaaatgaaacgcagaggaatgaaagggagtataaattcaactacttcaaaagaagaaaagaaatgaagcacatgaaaactatggtaaacaagaaagtgcaaagtagtgtaatagactaaatataggcatatcagcttacaataaatataaatggactaaactttatgcatttaaaatcagatgttca

SEQ ID NO: 246496 - DNA, 583 bp, Homo sapiens
gaaaaaacccaactgagggatattctacaaaacaattgacctttacccctcaaaactgccatcaaaaatgaaaaaaaaaatgagaaactatcacagtaaagaggcgcctaaggaaacataaatggtatcctgagtgggatcctggaacagaaaaaaattacataaattttaaggacatatgaataaaaatgtattttaggtaaaaataacaatggatcaatattggctcattaattgtgacaagtaaattatactaacctaagatgagaaaaatagagaaaacagtgtggggtttctgagaacctctattctgtcataatttttctgtaaatctgaaattattctaaaattaaaggtttaktcaaaaaaatcttaaaggtaagcactataagactagaaatgaaacgcagaggaatgaaagggagtataaattcaactacttcaaaagaagaaaagaaatgaagcacatgaaaactatggtaaacaagaaagtgcaaagtagtgtaatagactaaatataggcatatcagcttacaataaatataaatggactaaactttatgcatttaaaatcagatgttca

SEQ ID NO: 246497 - DNA, 549 bp, Homo sapiens
atggtaaacaagaaagtgcaaagtagtgtaatagactaaatataggcatatcagcttacaataaatataaatggactaaactttatgcatttaaaatcagatgttcagactgaattttaaaaataaaaatccagttatttgaggacaaaaatatagaaagtaaaaaagaaaagttatacaaagaaaatactagccaaataaaagttgagggaaaaaacagactctaaggcaaaattatcattagagacacatcataaatgacaatgataaaaggaacatctcacttataatatatagcagttgtgttatattactatgtacgcacctaacgccagtctcacaaaatatatgaaacaaaaatgtactagattatttttaaaattgacaaatccattaccatagtggaaaattttaaataaaattaatcaataatttatagatcaaggaaacaaaaatttggcaagagtayagaagatttaaataagacaatacacttgatataatgaacaaacatagaatcctgcaacaattatagaaaacccattctat

SEQ ID NO: 246498 - DNA, 605 bp, Homo sapiens
tagtttttctttaaaaaaaagcatatagacactttcattggaattacattaaatttatcaattaacttggggagaaattacccttcatgacagcacgtcttcctaccccagaacactgaatgtattcccatttgttcaaaccttctttagaagtttcagaagtgttctaaattttttcttacaagttatgcaaattttctgataaatttatttctgaattttttctgctatgataaatgaggtattttattccgctctaccttctaactgcttgcttttgtacacaagaactgttsgcattcacatatcaatttgcccactactatcttgttgaattctcctgctgtttatagtagttttaaatgtgattctcttgtgttttctgtatatatgaccatattgcctgcaaataatgttgtttgagttccatttctaattttttatcactttaatttctttcttttggcaagtaccttcagctcaatgtttaacaacagtgtcatagcagatattcttgtcttgctcctgatttcagtgaggaaactttagcagggatacttctggtgccttctcattaaacatgatactgacttttgtccagagac

SEQ ID NO: 246499 - DNA, 605 bp, Homo sapiens
tagtttttctttaaaaaaaagcatatagacactttcattggaattacattaaatttatcaattaacttggggagaaattacccttcatgacagcacgtcttcctaccccagaacactgaatgtattcccatttgttcaaaccttctttagaagtttcagaagtgttctaaattttttcttacaagttatgcaaattttctgataaatttatttctgaattttttctgctatgataaatgaggtattttattccgctctaccttctaactgcttgcttttgtacacaagaactgttcgcattcacatatcaatttgcccactactatcttgttgaattctcctgctgtttatagtagttttaaatgtgattctcttgtgttttctgtatatatgaccatattgyctgcaaataatgttgtttgagttccatttctaattttttatcactttaatttctttcttttggcaagtaccttcagctcaatgtttaacaacagtgtcatagcagatattcttgtcttgctcctgatttcagtgaggaaactttagcagggatacttctggtgccttctcattaaacatgatactgacttttgtccagagac

SEQ ID NO: 246500 - DNA, 600 bp, Homo sapiens
gcttattctttcctcaaactgcggattccctggttcttggtatattgagtgattttcaactgtatcctgaaaatggttattgttctttaaaagacattgagtcctattcaagtcttttcttttagcaggcattaggcttgtttaggtttggcgtatgtctagcatatatttttggtacgtggtttgagtaacagtttagttttcagagcccttttagtgcttctctgttctgctttattcttctggtgctgccgggctcacacccaatcctggctggtgccgcctgcagctatagaaagtgctttcctgggccacctcccatggggtggcagrtgatgctggtccttggtctcctgatgccattgaatacagcaccaggtgtggatcagcctatgtgggcttcattgttgccactgtgggtgggtcagctcgctggtgctataggtgtgtagcaatggttgagttggttccctggtgctctgatatgctgcaggcagattagccaacaaatgccccaggtgtgcagcagctgtctgcttgctgccccttaccccagttctacaaccagagaaagctgcttttcttggagtattttgccga

SEQ ID NO: 246501 - DNA, 579 bp, Homo sapiens
ggcaagtcaccaccttctctgtgcatcaatttccttacttgtaaaataggtatgttatcagtagtttacctctttgggttaaatgatgcaatttatgtaaagcggagtctagtacatatttagtgggggtcaatagaggttattatgttgagtcctacctggggattcaggcaggaaaaattgatcagtgactcttaagggcgtacagcaggtgatatactctggaggggtgtgtatttttattttggtaaagcatttcactactaaaaataattgaatactgggataagattagayagaccttatttttcatatgcaaactaaaaaatgcagactcaaacaaagggttagtaaacttttgctgtagagttgaatagcaaacagtttaagtttcttgggttttacagctgcttcttcttcttcttcttcctcttcttctccttcctcttcttctcctcctcctcatattcctcctctgcctccttcctccttctctttctccccttcttttgctcctcctcctctttcttttcatcctcttcatctcctcctccctttctttcctcttccttttcttct

SEQ ID NO: 246502 - DNA, 571 bp, Homo sapiens
agttctgtttttaattctttgaggaatcaccacactgctttccacaattatgcgagaaagttcaataacaytcatcatcagaggcttctgttttgtaaaacaagtatgttggtctttgagttatgcctggatatttcctgctggcccctcaaagatgtatttttttgttaatcctacttcctgctctgcaccctgggagatggagggctgcagtttgctgccagttgtggtcaggccatgagagaaactcccagaaggtcagagggtggcaggagagagctcagagtgttgatcctcctggctctgcccagtggtgtcgctgctcagcattgccgtttatgctcctcaacatgaggacacagccttgtccttgagggacgctgtctcctggatttcttcaggacctagaaccagctctcttccatttcccgcttcaggatgaagaacagtaggggcttctcctgggtgcttcccaatcttgtttttgttcctgttacactaacaggatcactgttaattttcccaatctctttagtcactcatttgaatgaactatttctcacagctattc

SEQ ID NO: 246503 - DNA, 571 bp, Homo sapiens
agttctgtttttaattctttgaggaatcaccacactgctttccacaattatgcgagaaagttcaataacattcatcatcagaggcttctgttttgtaaaacaagtatgttggtctttgagttatgcctggatatttcctgctggcccctcaaagatgtatttttttgttaatcctacttcctgctctgcaccctgggagatggagggctgcagtttgctgccagttgtggtcaggccatgagagaaactcccagaaggtcagagggtggcaggagagagctcagagtgttgatcctcctggctctgcccagtggtgtcgctgctcagcattgccgtttatgctcctcaacatgaggacacagccttgtccttgagggasgctgtctcctggatttcttcaggacctagaaccagctctcttccatttcccgcttcaggatgaagaacagtaggggcttctcctgggtgcttcccaatcttgtttttgttcctgttacactaacaggatcactgttaattttcccaatctctttagtcactcatttgaatgaactatttctcacagctattc

SEQ ID NO: 246504 - DNA, 577 bp, Homo sapiens
catcttcaaaatttacaaaactctattctgccatgtacggatgcttgtttatccaccagctgtctgagaggggtgggaaaacagccttgatttgtggtgtttgtcwatttctttggtgtaaattctcccacaatggatcattttatgctgctaatgctttacaatttactcagaaatttagcaacctgttcctttgagcaaacactggtggcgttagcacacaactgatgtttttgcagtagaggtcttgtgcttctctatttcttcccaccagggacagtgcctttaagagcactcctgatggtctcagctccttcattgattacttctgacatttcaactgaggagagggctgtctcaatgacctagtcccgtccaacaacctcaggattaggatttgtttgtgtccatttcccttcataaattttacagtcaatgttggttcgggttattttaagggtagtttttgtgcacagaaaaaactgtttgagactgtgtgttcattaaaattacttcattaaattaaagcaatcaggatttaagttatatttaaacatttgattttgacttaaaagtc

SEQ ID NO: 246505 - DNA, 577 bp, Homo sapiens
catcttcaaaatttacaaaactctattctgccatgtacggatgcttgtttatccaccagctgtctgagaggggtgggaaaacagccttgatttgtggtgtttgtctatttctttggtgtaaattctcccacaatggatcattttatgctgctaatgctttacaatttactcagaaatttagcaacctgttcctttgagcaaacactggtggcgttagcacacaactgatgtttttgcagtaraggtcttgtgcttctctatttcttcccaccagggacagtgcctttaagagcactcctgatggtctcagctccttcattgattacttctgacatttcaactgaggagagggctgtctcaatgacctagtcccgtccaacaacctcaggattaggatttgtttgtgtccatttcccttcataaattttacagtcaatgttggttcgggttattttaagggtagtttttgtgcacagaaaaaactgtttgagactgtgtgttcattaaaattacttcattaaattaaagcaatcaggatttaagttatatttaaacatttgattttgacttaaaagtc

SEQ ID NO: 246506 - DNA, 657 bp, Homo sapiens
gcaaaaaaaaaaatgcagcaagacaaccctaaagaaaccatctaaatcccctacccaacaatcataggcgatgtctgggaagattgtgaccccatcgtcctcagcctatgaggaactggggaagggacctgcgcactaggggacaaattgcttgttgaaactgtgctgggtgttcccattcatcagacacccaatcttgcaagaccatcattaaaagtctcactttcacggttctcccggtctcttgagtccattctttgggtgtggacaggtgagtttttttctcacaatgtcaagtagcatttccagatccctgtgttaggaatggtctaaagtgtcctgttatgctgtgtccaatgggctttcactagccctttgcccatggtagattcccgtcttaatgaaccaatactgcccatgtgacctctttcccttgtrgggactcagcttgctaatcagagcccttttgactatttttacggacgtctgcatgtcactcttccctctctttcataatctttcccaagagactctttaattccaccatggcctagggtaatgactccaccatgatgtcctcgtcatctgtgcaagtctccacataggccacataggcaaagcttaaccgcaactgatctaagtcttggaatagtgccc

SEQ ID NO: 246507 - DNA, 623 bp, Homo sapiens
tcattttaagtgcacaatttataacagaatttttattataaacaagtagaaaagtaatgacacttttctcagtcctcttggatcagattgaatcatatgaaattgtggatgtttaactgtttttgacctacaatgtgattcaatcataactgaaatgccctttttcaaaattctttcagagcaagaaaatattttcccagagaattttccagctaatgagatgtcctcccacattccgtatctctctttgaagtaaactgtaatagatgtgttgctgtgtatattttattcctttataccttcattttgaaacaaactttaaataayctctaaactggacaaaattacttttcctttgcagaaaccacatctttatgtcttctttataaacttttcttttcttttcttttctttttgagacggagtctcgctctgtcacccaggctggagtgcagtggcgcgatctcggctcactgcaggctccgccccctgggttcacaccattctcctgcctcagcctcccgagtagctgggactacaggcgcctgagaccacgcccggctaattttttgtgtttttagtagagacggggtttcaccgtgttagccaggatggtctcgatc

SEQ ID NO: 246508 - DNA, 498 bp, Homo sapiens
ggagctatgatggtgccattatactgtagcctggacaactttgtctctaaaaaaatgactaaaataaaataaaatgttgccaactaaatagcgttttatttcaaaagctatttaaaccaacacaaaactaatttacgtacacattttttcctgttaatccaaatttagaaatggaagaagacmaagaaagactcttcctcattcaactgggcaccacagagacccaggagaactgacttggtaaaaatttcttagctttcttcactggcttttcatcaattgacccaagatcccatcctgaagttctggagccaacagagcaatttgttgtcctgctcacaataccgaactgaaaggaaagcttaaatttttccccagaaggtttgataagctgagtcaaaaaccaaactgataacagacaaattaacagggaaaaaaagcatacaaacttattaatgtgcaaatgggcacaggagtcatacaaaatatgaaaactct

SEQ ID NO: 246509 - DNA, 633 bp, Homo sapiens
tctctgtgacccacacctattcgtacactccctccccttttgaaagtccctaataaaaacttgctggttttgcagcttgtggggcatcacggaacctaccaacatgtgatgtctccccyggacgcccagctttaaaatttctctcttttgtactctgtccatttatttctcaaactggccgacgcttagggaaaatagaaaagaacctatgtgactatcagggcaggttccccgatagtctaggatgctgtggttctttcttctgtatgttgtccatatttctaaataataagcttatattattatgttcttagttatccatctcgggtgcaatcttttggtttcctgtggtacttgagggctcacctccctcataccactcccttgtcctctctgcccttctctccccactgcatccttccaacatggtgatatcacagctgggggttaaaggatactcaggcctcactgttgcctggccaaattgtacaatattttacttttcctgcaggcaataattatatctttttttttaacttttgtagttttctatggatctaccactacacaaggattttttggttcctaaatacttcaacagatctttccaacaaaatatcctgtaatggtttt

SEQ ID NO: 246510 - DNA, 633 bp, Homo sapiens
tctctgtgacccacacctattcgtacactccctccccttttgaaagtccctaataaaaacttgctggttttgcagcttgtggggcatcacggaacctaccaacatgtgatgtctcccctggacgcccagctttaaaatttctctcttttgtactctgtccatttatttctcaaacyggccgacgcttagggaaaatagaaaagaacctatgtgactatcagggcaggttccccgatagtctaggatgctgtggttctttcttctgtatgttgtccatatttctaaataataagcttatattattatgttcttagttatccatctcgggtgcaatcttttggtttcctgtggtacttgagggctcacctccctcataccactcccttgtcctctctgcccttctctccccactgcatccttccaacatggtgatatcacagctgggggttaaaggatactcaggcctcactgttgcctggccaaattgtacaatattttacttttcctgcaggcaataattatatctttttttttaacttttgtagttttctatggatctaccactacacaaggattttttggttcctaaatacttcaacagatctttccaacaaaatatcctgtaatggtttt

SEQ ID NO: 246511 - DNA, 515 bp, Homo sapiens
agtttagaaagtgtgtaacatatatgtatgtatgtatatatatgttacatactgatttatcacaaaaatctatattttctttgtctaaaacaattcttccsagaagtataaaataaaaattttaagtgataagaaatctttgattatcattttggctgcagttattccttcttggtggcatgcataaaataatgtacattttaaaatcaatggtttctcagatttgatgaaatacggtaagcatttttttctccaatcttttgatgcaggagcaattttctttgaacactggttggcattcccctttgtctttcttgcttcttctataatttgcacgtgcaatttctttaaagtgaagtaagaacttaaagatggcaaacaagagcagatttcagaaatacttgggaggtaagattggcagacttatctattaattggatgtgtcaggtgaaagagggaaggaaatatggatggctcccaggcttccgatcacaagggttggcaaactataaacc

SEQ ID NO: 246512 - DNA, 542 bp, Homo sapiens
agaagaatcaagttcaagtcatgtgggtcacttgtaagagttttccatgcagacactgtgggtggttcttttccctgtttgctctttgttcgtctgagaaaaaggtgccatcagtcatatcattcattacatacaatgattctccagtcttcagatgcagtaatatcattcattacacacaatgaatctcttcagattcttcctgaggggttcctaccttcctatcctaggttcagtctagggaagggkttgtgagggtctgaaagtcactgccccacccgagtctcatctatccatcaagaagagcaggtttcccacccatcgtatcaggaagatggtcaggggccattgttgtcagggctccagagtgtgacttcatcacctgccactttggcagtgtttccaaaaggttcagagaagcacagggggactgagccgcatcttggtctgaacctctgtacatcatttggggcttcccaatcgcataacactgccagcttgagacctcacaggatacatctgtctttttgtccaggcatggt

SEQ ID NO: 246513 - DNA, 563 bp, Homo sapiens
gtgaccccgatgccagtaccaccttccaatgagaatgtggtggagctacagggtcaggggaattctcctccaggtttagattttgccttgccgatttggcctctgatttcttgactctgagaaagtcacttcagagccgtacaccccagtaacctatcttccaagtgtagatcatgccaatgagcaaccatggagggtcaaagtagtaagatcctgggtacartaagagtagccactgccattcaaccaagaccaaatgttactgaacaaataggcttaactacaggcaactgagttggccagaggctcctgcaggactggcttcacacttcatggccaaaaggataagctctcaggataaggaggacacatttaagcagcttactgggttgccttgctaagcatgataactacagactgggagaagggacaaggaatgtcgtatactttctccattgtccgtaggggctacctagtaagtattttcagttgatcaaagcaatataaagtaagcctcaagtcactgttgttatgcttggaaatattgttcatggataagaaat

SEQ ID NO: 246514 - DNA, 361 bp, Homo sapiens
cttgcccgccgtctttgccgtgccttggcmtcctaggggtgctggtgatggtcagtgggcatcatcggtcagcagtgcacgtgtaaggcaatctcctctcctccaggttagttcagaaggtcgctatgggttggtattgcaaaaagatgagtatatgaacactaaacttattaagaggtttgaaattcattaaaaattagttttcagtttcttcatctttcttttcagacttctttaaaaatactgttcttaatctggtatatatagaaatctaatattatggtcttctaaatggtcaacagaactctccagtttaatgaggcaatttagaggattccttgaaagaaaatttcatcatact

SEQ ID NO: 246515 - DNA, 601 bp, Homo sapiens
taggaaagaaaacataaaacataaatgaatagttatgtctcttctaataaacagtgtcattaatgctgcagttgtgggtcaaacttagggagccttatttctaaatagcaaaaattctgttttcacttcagcccttatttttttttgttagtttttctctgcactgtgatacagagctaataagaggaaatgtgacgtttcagagagagagcaagcaaattgggtatgacttttttaccctatgttccccaatactggggatgtttggctactttgaacagcagtttttagtgatctaaagtttagatcaatactcgtataagagaaaaatctaactctcagtgagctccatagggcagcacagctttccatcttctctttcgccttcttgcgtctgcccaccacagtcccgaagaatgcacacgcacatatgatctgtacccatcccgcccgaagagtcatagaatcctcttctttcacttgtttcttttttcttcgtttgtttgtttttgtttgtttgttttttaagctggggaccactgaagtaagctctrtatgcacccaaagttccccttggaaaaattttcaacacgcagtgcag

SEQ ID NO: 246516 - DNA, 529 bp, Homo sapiens
gcagctgcccagggagaggggatgcaaagggaaagaggcgccccaccggggaggggaggctgagtgcagacaacacagctggaaacgctgcgctctccccttacatttggtcccccagtttggccactgcaggctctgcaatggtggctacgcgactgaacaagcagggactcctttcacctggcatatctccgcccccacccccacacagtgtattcagtaatatccgaccagtgyaaatagaaccttaaataaatctaaacatagttgtcccaggccgcatgacctccctagtgaccatggagggcgcctgaatggtcatcctgtctctgctctgcctggggctgaggacacagggctgtggagacagctgtgcctttgtgaaggacactcacgtcctttccttttaagtcatgcagacttcagaacctccttctagctcctttccttttttaagtgaagaattggagaccataaaatcagaatatgtagaggcagatgctgtttgcgtcagtgcattaaagaactc

SEQ ID NO: 246517 - DNA, 529 bp, Homo sapiens
gcagctgcccagggagaggggatgcaaagggaaagaggcgccccaccggggaggggaggctgagtgcagacaacacagctggaaacgctgcgctctccccttacatttggtcccccagtttggccactgcaggctctgcaatggtggctacgcgactgaacaagcagggactcctttcacctggcatatctccgcccccacccccacacagtgtattcagtaatatccgaccagtgtaaatagaaccttaaataaatctaaacatagttgtcccaggccgcatgacctccctagtgaccatggagggcgcctgaatggtcatcctgtctctgctctgcctggggctgargacacagggctgtggagacagctgtgcctttgtgaaggacactcacgtcctttccttttaagtcatgcagacttcagaacctccttctagctcctttccttttttaagtgaagaattggagaccataaaatcagaatatgtagaggcagatgctgtttgcgtcagtgcattaaagaactc

SEQ ID NO: 246518 - DNA, 529 bp, Homo sapiens
gcagctgcccagggagaggggatgcaaagggaaagaggcgccccaccggggaggggaggctgagtgcagacaacacagctggaaacgctgcgctctccccttacatttggtcccccagtttggccactgcaggctctgcaatggtggctacgcgactgaacaagcagggactcctttcacctggcatatctccgcccccacccccacacagtgtattcagtaatatccgaccagtgtaaatagaaccttaaataaatctaaacatagttgtcccaggccgcatgacctccctagtgaccatggagggcgcctgaatggtcatcctgtctctgctctgcctggggctgaggacacagggctgtggagacagctgygcctttgtgaaggacactcacgtcctttccttttaagtcatgcagacttcagaacctccttctagctcctttccttttttaagtgaagaattggagaccataaaatcagaatatgtagaggcagatgctgtttgcgtcagtgcattaaagaactc

SEQ ID NO: 246519 - DNA, 452 bp, Homo sapiens
actcagcacgtatttgttgagcccctgctctatgccgggcctggtttttgaggcagggacgtgtccatgaacaaaacaggcaagatcctgccttcytgcggctcggccgcagtgggcacagaggaggaggagtgggagcgaatgccacgccgcactccctgaagcccaaaagctttcattctccacagtgctcttctcaccccagcaggtgctcctgccccactttatagcggagaaaacaggcacaaagaggttgcccgcatcctgcctcactctttcttgagcccagtggtcctcagactgtggtgggcacctgcatcctctggagggcttggtagaacccaggctgcggggaccccccagagcatccaacacggcaggtctgggtgggcttcggaacatgcaggtcctccaggctcccggggctgctgctggggcctcgggccaggcgg

SEQ ID NO: 246520 - DNA, 547 bp, Homo sapiens
cagtccccatctaacttcccttcttggcaacacctgaaacaagtggttactcacttcctccttcctgaaacactgcacacggcttatgggaaatcccaccttcttagaccttccttttacctcactggttgttccttctcagtctcttttgctgcttcctccacctcttcctcatatgtaagtgttggcagcccctagactcagtcctggaagttcctttctcttctctctactcatgtatcagtgtctgtcaccaccatccacctggttgctcagttgggaaacttttaagtcacattttagcccactctttaccttacattctatttcacaaccattgacaagtcctgcctgcaaaatagatcccaaatctgactactccctgtctcccccaccactcccaccctagtcccagcccggtaacctctaaccagcccactgcaatcatctcctaactaggwcccctgcatcctctcctgcctccatcgtaatcaaagctccacacagcaactggagagatctttcaaaaatgcaaactaggccgggt

SEQ ID NO: 246521 - DNA, 625 bp, Homo sapiens
tttaagttttaaataatggcagcttgtaagaagttggcccttcagtgttttttgttttttgttttttttgtaatcattgacaataagcacttattctttctggagaagctggccacttgtttatctgctgaactacatttctccttcaaggctttgtagtggaaagcaaagatataaaacacaagattaaagaatgatctcatggagttgccaaagaaatctctatagtccaggragtcctagcatgcctggttggttgtttgtttccaacttgaatgaggtttgtgaaaagacaattagaattgtctttttgttccaatgggttatacaggaaagaaacaggaaatcttgatgaaagcttgggctttacaggatatttgtgtgagcatttagcccatgtgtttgatgtttttctttccacatctgcacactttatgcctggattttggctaagatactttaaaatactacttcgctgttttcacttcattacagttcctggcacggtgctttctgtaagagaggggctcaaaaattaaaactggagaaggaaactgaggcccagaggcacaagtccattcattccctctgaatgtcagtcagttccctcgttataaaatgtgag

SEQ ID NO: 246522 - DNA, 575 bp, Homo sapiens
tctcaccttgtgggcaggaggttctgcctgatattcacacagtttctttctcaaagtattgaggctttgtttagcatcacctttgtactgagaccttctagaccactcaattttaaattgtacattgcaattccccagccactaagtccacctagtccccctatccctgcttagctacccttttgttccacaggatatatcaccttcagattcactatataatctacatcttcattagggctgtytgtaatgtctctcctgcagtgtaatgtcaccccatgttcactgtcgtcagtgaaatagtatcaacgatttatcacagtgcctggcacatacagggaatcaataaatactaatcaaatgaaaacaaagattgcacagtgtacccaacttggttcaagacttgctgaatttacaatttccaacgtttagttccaaattctttaaaacacacacaaaataaataaaagcatgttggatctaactttttctatcactttgtccatgttatgatcagatgcaatgagaaagagatgttcttacagtcatgaaaaagctctccatgtcaacaacat

SEQ ID NO: 246523 - DNA, 605 bp, Homo sapiens
acactttggttttttgtttctaactcaagactttggtttcaagactctctttctttcagtgcttttcatattggacctcaagtgagattctccttaatctgtcctcrgcaatccagactccagtacccttgatattttccaagcaagccatggctgttcttgactctagggccttttgcccatcatactatcagtaggtcttttcatttttttttttcatccagtcagtcttttcaaagttgactcaggttttccttcttctctaaggtgttctttaatcccactaactgaataaatgccttccttctctctatgctctaggacttaacatctttattcttctagcacattgtgtatttctctataaaatggaaatgtttcaaatatgtaagctttgtttagtaatgcagataatgagcccacaaataaaagaactatggcaagtctttcttttgtatatttattaaatagctgccatggtatgcgaagtaaagatgtattaaattcttaaggatgaggaggagggacatcagcaagatggtagaataaaagttccacagctccagtctatctcatagaaatccaactagcaacaattcacagac

SEQ ID NO: 246524 - DNA, 605 bp, Homo sapiens
acactttggttttttgtttctaactcaagactttggtttcaagactctctttctttcagtgcttttcatattggacctcaagtgagattctccttaatctgtcctcggcaatccagactccagtacccttgatattttccaagcaagccatggctgttcttgactctagggccttttgcccatcatactatcagtaggtcttttcatttttttttttcatccagtcagtcttttcaaagttgactcargttttccttcttctctaaggtgttctttaatcccactaactgaataaatgccttccttctctctatgctctaggacttaacatctttattcttctagcacattgtgtatttctctataaaatggaaatgtttcaaatatgtaagctttgtttagtaatgcagataatgagcccacaaataaaagaactatggcaagtctttcttttgtatatttattaaatagctgccatggtatgcgaagtaaagatgtattaaattcttaaggatgaggaggagggacatcagcaagatggtagaataaaagttccacagctccagtctatctcatagaaatccaactagcaacaattcacagac

SEQ ID NO: 246525 - DNA, 503 bp, Homo sapiens
atgatgctaaatcattcaggagaacccgcccccatgattcaatcacctcccgccaggcccagactccaaaactgggaattacaatctgaaatgaaatttggtttgggacacagatctacaccgtatcaatagaattataagaaaatatggatagaaaagtaaataaaacttggaaaacaatatrcagacaaaagaattagtttgacaaaggaacggaaattatttttaaaaatagaaatcctagagataaagaatacaataactaaactgaaaaattttattaaaagcttgaacatcagactcaaacaaatagaagaaagaatcagtgagttcaaagacaggacatttaaaattattgagtcacaggagcaaaaagtaaaaagaataaagaaggcttatgaaaattatgggacaccatcaagagacctaactttcacataataggagatccaaaggagaagagagagagaaatgccccccaaaaaagcatatttaagaaaata

SEQ ID NO: 246526 - DNA, 503 bp, Homo sapiens
atgatgctaaatcattcaggagaacccgcccccatgattcaatcacctcccgccaggcccagactccaaaactgggaattacaatctgaaatgaaatttggtttgggacacagatctacaccgtatcaatagaattataagaaaatatggatagaaaagtaaataaaacttggaaaacaatatgcagacraaagaattagtttgacaaaggaacggaaattatttttaaaaatagaaatcctagagataaagaatacaataactaaactgaaaaattttattaaaagcttgaacatcagactcaaacaaatagaagaaagaatcagtgagttcaaagacaggacatttaaaattattgagtcacaggagcaaaaagtaaaaagaataaagaaggcttatgaaaattatgggacaccatcaagagacctaactttcacataataggagatccaaaggagaagagagagagaaatgccccccaaaaaagcatatttaagaaaata

SEQ ID NO: 246527 - DNA, 503 bp, Homo sapiens
atgatgctaaatcattcaggagaacccgcccccatgattcaatcacctcccgccaggcccagactccaaaactgggaattacaatctgaaatgaaatttggtttgggacacagatctacaccgtatcaatagaattataagaaaatatggatagaaaagtaaataaaacttggaaaacaatatgcagacaaaagaattagtttgacaaaggaacrgaaattatttttaaaaatagaaatcctagagataaagaatacaataactaaactgaaaaattttattaaaagcttgaacatcagactcaaacaaatagaagaaagaatcagtgagttcaaagacaggacatttaaaattattgagtcacaggagcaaaaagtaaaaagaataaagaaggcttatgaaaattatgggacaccatcaagagacctaactttcacataataggagatccaaaggagaagagagagagaaatgccccccaaaaaagcatatttaagaaaata

SEQ ID NO: 246528 - DNA, 605 bp, Homo sapiens
gtatggtgtgtaaagcaattttatctctagtatgatgsttaaaaaacaaaacttttaaaagcaactataactgcaataaactgttaagggaggccaggtgtggtgactcatgtctgtaatcccagcactttgggaggctgaggtgggcagaccacttgagctcaggagttcaagaccagcctgggcaacatagtaagaccccatctctactaaaaatacaaaagttacatgggcacagttgtgtgtgcctgtagtccccgctactcgggaggctgaggcacgagaactgcttgaacctgggaggcggaggttgcaatgagctgagattacaccactgcactacagcctgggtgacagaccaagactctgtctcaaaaaaaaaaattgttaaaggatacaaattataaaaagctgtaaattgtgaaatcaaaaacataaaattaagggagaataaaagtgtacagtttttatatgcaataaagttattatcatcttgaagtagcctgttataagtagaagatgttttatgtaagttgcatggtaaccacaaagtaaaaacctatagtagttgcacaaaacataaaaagaaaggattcaaagcatat

SEQ ID NO: 246529 - DNA, 605 bp, Homo sapiens
gtatggtgtgtaaagcaattttatctctagtatgatgcttaaaaaacaaaacttttaaaagcaactataactgcaataaactgttaagggaggccaggtgtggtgactcatgtctgtaatcccagcactttgggaggctgaggtgggcagaccacttgagctcaggagttcaagaccagcctgggcaacatagtaagaccccatctctactaaaaatacaaaagttacatgggcacagttgtgtgtgcctgtagtccccgctactcgggaggctgaggcacgagaactgcttgaacctgggaggcggaggttgcartgagctgagattacaccactgcactacagcctgggtgacagaccaagactctgtctcaaaaaaaaaaattgttaaaggatacaaattataaaaagctgtaaattgtgaaatcaaaaacataaaattaagggagaataaaagtgtacagtttttatatgcaataaagttattatcatcttgaagtagcctgttataagtagaagatgttttatgtaagttgcatggtaaccacaaagtaaaaacctatagtagttgcacaaaacataaaaagaaaggattcaaagcatat

SEQ ID NO: 246530 - DNA, 605 bp, Homo sapiens
gtatggtgtgtaaagcaattttatctctagtatgatgcttaaaaaacaaaacttttaaaagcaactataactgcaataaactgttaagggaggccaggtgtggtgactcatgtctgtaatcccagcactttgggaggctgaggtgggcagaccacttgagctcaggagttcaagaccagcctgggcaacatagtaagaccccatctctactaaaaatacaaaagttacatgggcacagttgtgtgtgcctgtagtccccgctactcgggaggctgaggcacgagaactgcttgaacctgggaggcggaggttgcaatgagctgagattacaccactgcactacagcctgggtgacagaccaagactctgtctcaaaaaaaaaaattgttaaaggatacaaattataaaaagctgtaaattgtgaaatcaaaaacataaaattaagggagaataaaagtgtacagtttttatatgcaataaagttattatcatcttgaagtagcctgttataagtagaagatgttttatgtaagtygcatggtaaccacaaagtaaaaacctatagtagttgcacaaaacataaaaagaaaggattcaaagcatat

SEQ ID NO: 246531 - DNA, 519 bp, Homo sapiens
aagcaagggaaatgccagatgtttataaaaccatcagctctcatgagactcacccactatcaagagaactgcatgggggaaaccacctccatgatccaattacctctacctggtcccacacttcatacgtggggattatggggattacaatttgaggtgagatttggatggggacacagagccaaaccatatcatagaatttaagtcaaaactgtaaaatgagaaacagaaggtcatcatatagtgataaggggctccactcatcaaayggatataacaattacaaacatatacatacccaatataacagcacctaaatatataaagcaaatattcatagatatgaaggaagagatagactgtaatacaataacaggagagaacttcagtactacactctcaacagtagacagatcatccacatagaacatcaataaggaaacatcagacttaaactacactttagagcaaatgtacctaaaagacattatgctcagcattccatccagcagcaagaga

SEQ ID NO: 246532 - DNA, 398 bp, Homo sapiens
gtatgatgactggttttgttctttaagtctatttcttatccaatgacacataatgacacaaacatatccagatagtgttcttgcttccttgtaagttgagaattcctttcattaattcaataacaataataggatgatacaytaaaacttaaaaatctctaagaatgcaaggaactgactagccagtttcaattgtgctacaaaccaggataaacctcactcgtcaacaccagcgcttttcagaactttgttttcatgacaaaccagtgggttttccaggtataaagttagcatcatatatctaatgactgttaaaaagaaaaggagtagaatttaaagccagatatttagcagcaaatagcatttaataaggatgtattttcaagaggagaaaaata

SEQ ID NO: 246533 - DNA, 554 bp, Homo sapiens
ttttttgtttctcaatgtatattcattatataataattctaaaatcattttctccttgttcttttgaattttggggactagtaatataggataatagttttaatgaaaattacaattatttactttttttttttaccaagccatttactgtgaaaagtggttctttcaataaattggtcaattgaatattcatatagaaaaaatgcatcttgaaccttcacatcatttaataaacccattttaggaacatcttagaattaaatgtgcagataaaatgataaaacttaaagaggaaatcttagaatatcttcttggcctggactagtcaaaggtttcttaaaagggaaattaaatgtttaccttaaagaaagatactaataaattagratatattaaaattaataccttttgatcaccaaaggtatcattaagaaagggaaaagaggctggcatggtggcctatgcctgtaatcccagcactttggaaggccaagggaggcagatcacctgagaccagcagtttgagacagcctggccaacatggcaaaaccctg

SEQ ID NO: 246534 - DNA, 554 bp, Homo sapiens
ttttttgtttctcaatgtatattcattatataataattctaaaatcattttctccttgttcttttgaattttggggactagtaatataggataatagttttaatgaaaattacaattatttactttttttttttaccaagccatttactgtgaaaagtggttctttcaataaattggtcaattgaatattcatatagaaaaaatgcatcttgaaccttcacatcatttaataaacccattttaggaacatcttagaattaaatgtgcagataaaatgataaaacttaaagaggaaatcttagaatatcttcttggcctggactagtcaaaggtttcttaaaagggaaattaaatgtttaccttaaagaaagatactaataaattaggatatattaaaattaataccttttgatcaccaaaggtatcattaagaaagggaaaagaggctggcatggtggcctaygcctgtaatcccagcactttggaaggccaagggaggcagatcacctgagaccagcagtttgagacagcctggccaacatggcaaaaccctg

SEQ ID NO: 246535 - DNA, 393 bp, Homo sapiens
ttttatgacatttaggtttgcaaataagaagactaaagtcatctaaactttgctttcccctccccctggggtctggacatttataaaaatcattctctttgtactgtaattcaaacattttttaatcttgtattsagttttagctgataaagagtgaaatctttaaaattacatacacagaccttctgaaaagttttctcatatctttagttatttttgtgttattttattctgagccttccttcagaaatatcagttgttatatactggttttctattttctgccttaatatcaccttcctcaaaatttttgattctttgtccctttcttttgcagtctgaaaggtcattatgccttgccttcatatcgctgatttaattctttacaaaatc

SEQ ID NO: 246536 - DNA, 393 bp, Homo sapiens
ttttatgacatttaggtttgcaaataagaagactaaagtcatctaaactttgctttcccctccccctggggtctggacatttataaaaatcattctctttgtactgtaattcaaacattttttaatcttgtattgakttttagctgataaagagtgaaatctttaaaattacatacacagaccttctgaaaagttttctcatatctttagttatttttgtgttattttattctgagccttccttcagaaatatcagttgttatatactggttttctattttctgccttaatatcaccttcctcaaaatttttgattctttgtccctttcttttgcagtctgaaaggtcattatgccttgccttcatatcgctgatttaattctttacaaaatc

SEQ ID NO: 246537 - DNA, 621 bp, Homo sapiens
cccccacatcccataacttccatctctacttttcttgggatcaaagcttcattatgactttgttgtactttgctgtaactctggcaggcctgaagggtaagyacgctagagtaggccgcagaatataaccttctatttccatactccctctgtcattctcagaaagatgctggcattgtcaccagttacatacctggtggacaggcaggtgtacagtcaatgtttctagacagtagaaatggaccaaggggatattaatctccttccataccaaagaatggtaaagaacattccttaaagggcctgattaaatcatcacaacaatccggtgatatcatcagcaaagggtgccttcataacaatgtgcgagcgaggggagcttgtccttctgaccagggttattgttactgtgtctcctataccacgcagcctttgatgtgtggtaagatgcgtcctctgtctacgttaaaggaagacattctttactcatatctgttggtatgaattatagtattctccatttatgacagatgcacaatgcctgtttccccatagactgtaagcttgagggagaaaccattccttttttatatacgtaggtccggcataggggcctggctc

SEQ ID NO: 246538 - DNA, 583 bp, Homo sapiens
tctcaaaaagcaatcaaaacagttaacaataattatgatttttcttgagatttactctactactcttgttcctgaattgaataatgtttttacgaaacaccaacattatggcagtagatgatgattttttttttttattgtgtgccactagaaatggttagagaggtgacatcacaggagcgcatttccaaattttgccccaagtctgaaacatctatgtacagtccgggctttaayaggggagcctggaacacactgcagctcttgaactcatggcatttgtctaacgacagctttggcagtaattggtggataagcagtaattggtggataattgaagagcaaaagttttcaaccctcacactccacttctcttgttgtgcctgtcaatgtcactataactggagctatcattttagccaacaagtgaggataacatttacatttcaaaaaattagcttttcaggaaacatttggtgaacacatgcattttgtacattaaatgacatctttgaaaataacgaaataagtaaggtcccacttgaccctagggatctggggtttgttttcgtaataaatactg

SEQ ID NO: 246539 - DNA, 583 bp, Homo sapiens
tctcaaaaagcaatcaaaacagttaacaataattatgatttttcttgagatttactctactactcttgttcctgaattgaataatgtttttacgaaacaccaacattatggcagtagatgatgattttttttttttattgtgtgccactagaaatggttagagaggtgacatcacaggagcgcatttccaaattttgccccaagtctgaaacatctatgtacagtccgggctttaacaggggagcctggaacacactgcagctcttgaactcatggcatttgtctaacgacagctttggcagtaattggtggataagcagtaattggtggataattgaagagcaaaagttttcaaccctcacactccacttctcttgttgtgcctgtcaaygtcactataactggagctatcattttagccaacaagtgaggataacatttacatttcaaaaaattagcttttcaggaaacatttggtgaacacatgcattttgtacattaaatgacatctttgaaaataacgaaataagtaaggtcccacttgaccctagggatctggggtttgttttcgtaataaatactg

SEQ ID NO: 246540 - DNA, 503 bp, Homo sapiens
cttacacacctgatataactaaaggcttcatgttggcagaacatatggtatacaatgacttgtggtcccttgcaaccctcccagttctcaccactgcagtgatcatattttactccctatttaaaatctcttccatatttaattacctcttcttcaagaacaattttaatatttctaaagaaatccattaaatataatgagaacaaaagayagatttttaaaacaatcattattagttgacacaaagttactaatgcaaatggaatactttatggtattatttagaaggtttgtctttaaaagaaatgctccctatctaaaagtggaccaaataccacagaatgtagtttccatggtaactgccacattttaaaaatatgcacaggactaaagatacactgtatcttctacaaatggatcattcttagagcaatcatttttcttgcctcatcttgtattttttgctttttaaacaatataattttctccatgatgagggcaaa

SEQ ID NO: 246541 - DNA, 390 bp, Homo sapiens
agtgaaaagacaatccacagaatgggagaaaatatttacaaactatctatctgacaagggacaaataaccaraatatataaggagctcaaacaacccaataggaaaaaaacctaataatccacttacatgatgtgcaaaagatctgaatagacatttatcaaaagacatactaatggtaaacagacatatgaaaagggactcaacatcactgattatcaaagaaatgaaaaattcaaactacaatgagatatcttctcacctcagataaaatggcttttattcaaaaaaacagtcaacaacaaacgctggcaagaatgtggagaaaagagaacccttatacactgtttgtggaaatgtagattagtaaaaccactatggagagcagtttg

SEQ ID NO: 246542 - DNA, 592 bp, Homo sapiens
atctgtatactaaaatatcaaatattactgagcatatattatgtggtaaaacatgaatgaggcaccatcttattttaagtgtttaggttcttcaaaaatgtgaaacctcaacaatgaaacatagataggtagtgaaaaaaccatgctttctgacacctaactatgtcattaaatgatcattgagtggaataagttgcactttttactgaaatgctttggtggtccataacataggtccaaccagcaaatttctatagattacttttgctcataatgctaatataaacatgttggaagtcactagtgtcaaaaaatgtcaatccactccccgtcacagaaattatggaagatggcttatagtccagacacctttctgtttttgtcatctatgaaaccccagttagtagtgcctacctggaagggccattttgctcctctatttccaggtctctgtgttgaagggccattacttatttccctwcaaagaaagtgaccgaattgaatacagagaacccccaacctccaggaaactttatgggaaagaactgcccactcattaactcaggatggtttaggaagctgacctcacctt

SEQ ID NO: 246543 - DNA, 587 bp, Homo sapiens
tagcaacagaaaacagcaaatgcctattgactgacagacagttacagagcaagccaatgacaagatgattgaaatatctgcctttatccttccagctccttgttccatcaaataaatgaaactatgctttattgatgctgtgtttatatttgggaaagcatgcayatgaacactgcctgatgttggattttgcaaatattattagaaaataaccagctgtgtttggacctgatgaagctatttattattttaaatacttggaaggaaggagggatgcccgtatgctttgtctacgtggtgtgatctcactaaaagacatgatgtgtatatatcaaaactcagtaaaagagggaaattccttcaagcttcaaatgttgacgaacccttttgcttatttctaatagtattccattcagttcacacagcctaaattatttctgaaacattacctcagcagagcttgttaatacattcttttatgtctgcccgccttttaaacactcagtttacacttacttttccctggctaacttcatgcagcagataggcaaactttatcctaaaaagtagtaaaatgaatctcaatg

SEQ ID NO: 246544 - DNA, 587 bp, Homo sapiens
tagcaacagaaaacagcaaatgcctattgactgacagacagttacagagcaagccaatgacaagatgattgaaatatctgcctttatccttccagctccttgttccatcaaataaatgaaactatgctttattgatgctgtgtttatatttgggaaagcatgcatatgaacaytgcctgatgttggattttgcaaatattattagaaaataaccagctgtgtttggacctgatgaagctatttattattttaaatacttggaaggaaggagggatgcccgtatgctttgtctacgtggtgtgatctcactaaaagacatgatgtgtatatatcaaaactcagtaaaagagggaaattccttcaagcttcaaatgttgacgaacccttttgcttatttctaatagtattccattcagttcacacagcctaaattatttctgaaacattacctcagcagagcttgttaatacattcttttatgtctgcccgccttttaaacactcagtttacacttacttttccctggctaacttcatgcagcagataggcaaactttatcctaaaaagtagtaaaatgaatctcaatg

SEQ ID NO: 246545 - DNA, 530 bp, Homo sapiens
ttggggagggggtgaaattgacactaaaactttctgtgtaaacggaaaaatgttgtttttaaaactgttttaaaatagtttctgtctctttagaggtcgatttatcttgggcaagcaataaatacttttgctctcrgaaaaccgccaaaacttattttcttattagctgagtagaaaacaagtactcaccattgtggctatggaagacataagcaggccaaaggcatcattcacctaagtagagacgaggtgacagcgtgctgtcagtcctcacagccctcgctccctcttggcgcctcctcggccttggcgcccactctggccacgcttgaggagcccttcagcccgccgctgcactgtgggagccccttcctgggatggccgagaccggagccggctccctcagcctgcagggaggtgtggagggagaggcacgggcgggaaccggggctgcgtgctgcgcttgcgggccagctagagttccgggtgggcgtgggcttggcgggccgcgcactcggagcggccagccg

SEQ ID NO: 246546 - DNA, 532 bp, Homo sapiens
agccagctgggctcctgagtcaagtggggacttgagaatctttatgtctagttaagggattgtgaatacaccaattggcactctgtatctagctcaaggtttgtaaatgcaccaatcagcactttgtgtctagctgagggtttgtaaatacaccagtcagcactctgtatctagctaatctagtggggacgtggagaacttttgtgtctagctcagggattgtaaatgcaccaatcagcaccctgtcaaaacggaccaatcagctctctgtaaaacagaccaatcggctctctgtaaaatggaccaatcagcaggatgtggatgwggccagataagagaataaaagcaggctgcctgacctagcagtggcaaccgttggggtctccttctgcattgtgggagcgttgttctctcactctgcagtaaatcttgctgctgctcattctttgggtccacactgcctttatgagctggaacactcactgcgaaggtctgcagtttcactcctgaagccaccgagaccacaaaccca

SEQ ID NO: 246547 - DNA, 544 bp, Homo sapiens
acattcgttttcacattcatttgaatgttgaataagcatctcaacttcacaagtccaaaatagatctcttgatttctcaagctcccaccaaccagtgcctccggccttctccatatctataaatggcatcatcctgactttgttattcatgctcagatcatgmctctctctgcctgaaaatccatatcacattcattaccaagtcttgtcagttttgcctgcaaaatattcccaagaatctatctcttaatcctctgtcaccaccacaaccaattcttgcattgttctcacgaagaaggcaacaattaactcctaactcacttccctgcttccactcttgccccagtcaatcaattcacacagaagatgaatgacttttaaaaaatcaaattgtgtgacttctttgtcctatactctttaattatttcctactggaaaaattatgaaatgtaatcttctgtccatgctcgttaagactcttcataatatgaacctatctctctttctgaccttatttcttatcactcttgtacttattccttcc

SEQ ID NO: 246548 - DNA, 488 bp, Homo sapiens
tcacagtgctttaatgtctttatcagaaaaaatgaagctcacactaaagcacttactctaactcactttgtgaagagtaaatgaaatcaaagagttaagaaaacctttgaaaaatgtaaactgtttcaaaatataaattactgtatgttgatgatgctatgtgcattctgtaacttaaacactcaggattgtatgtggctttcctatgaaagtgaaaagaatgctgtctgctagaactacagtttagatatcagatacatttgaactgaagtttactatatttctatgamaaaggaaaacacctagtttctaatttatgttgttgtacaaatactaaaataaatacaataattgataatcaaacttctaatctggaaaactagctagttaaaaatgatgtttgtactgctacaaacatatatttttctatgtaatcatgtttctaaaaaatagatcactttgacaagacttcatcttggaaaaaatat

SEQ ID NO: 246549 - DNA, 576 bp, Homo sapiens
acaactttacaaccaaagagttgaaataactgtaaatattccaactagttatgcccacgacatcacaggtggttgttgctataaagcacctgcaagacaaaattaaagtatcaagagttctagattcaacctttttccctctacacaggatttcaaggtccttaaatcatgcgtataaytgagtctttaggttttctttttcccaaacaggttgacattttcttttcctcttcgagccaagatactactctggtaaaaaataaaaaataaaaaaaagtggttgagggggatacagaaagaaagtttaaaatcctcccccttacactgaattttccatagaagtgtgtgaatgattaaagacactgattttttttcttctcacaaagagatggccttaaaatgctattaactaaaagctatataggtacatgaatagtcaataaagggtagatttgccagcaacaaacagaaaagtccacattgagcacaaaaccagtgaaacggaccagaatacgcacatggagatcacactcttaagttagaaaatgtttatatttatttatacctcaacatttt

SEQ ID NO: 246550 - DNA, 576 bp, Homo sapiens
acaactttacaaccaaagagttgaaataactgtaaatattccaactagttatgcccacgacatcacaggtggttgttgctataaagcacctgcaagacaaaattaaagtatcaagagttctagattcaacctttttccctctacacaggatttcaaggtccttaaatcatgcgtataactgagtctttaggttttctttttcccaaacaggttgacattttcttttcctcttcgagccaagatactactctggtaaaaaataaaaaataaaaaaaagkggttgagggggatacagaaagaaagtttaaaatcctcccccttacactgaattttccatagaagtgtgtgaatgattaaagacactgattttttttcttctcacaaagagatggccttaaaatgctattaactaaaagctatataggtacatgaatagtcaataaagggtagatttgccagcaacaaacagaaaagtccacattgagcacaaaaccagtgaaacggaccagaatacgcacatggagatcacactcttaagttagaaaatgtttatatttatttatacctcaacatttt

SEQ ID NO: 246551 - DNA, 563 bp, Homo sapiens
attattctacaatcacttgattggaaaaagccgagaagtctgacaatacccattgtcaatcaaagtaatattttatacaatgctggtagaagtggaaatcagtaaaaccacttcagaaaacaatttagcattgttttattaagtgggatattcgcataacctatgactcacaaaacccagagctaggtatacatgcaagataaattttatgttacgtgccagaagacatttccaagaatattcattgtatttcttctatttataataggtaataaataacgaaataacttkcaatgggaaaactgattcaaaaaatgatggccacaatggaatatcataaagcagtgaaaataaatgaactgcaacttaacacacaaaagataggtcctagtagcataattcagaacaatttgacattaaaaaaacaaattaaagtaaaacaaattttattatcttaataacattttactcattttagttatatagtagtccttccttatccaaagggaatacactctaggatccccagtggatgcctgaaaacacagttgataccaaactcc

SEQ ID NO: 246552 - DNA, 610 bp, Homo sapiens
ttgagaatcagggagtcaatggtatgaatttcagtccaaaggtagaagaggaaataagctgacccagtgcacgcagtaaaacggaaaaaaaaaagaaaaagtgagtttctccttcatccgcctcttgtattcttcaagttctcaacagattggatgatacccaccacattgaagaaggcaatgtgcattactaaatccactaattcaaatgctaaggttatcccaaagcacccacacagacacaccacaaaacggtgttcaatcggggcaccctgtggtccattcaagttgacataaaatkaacaatcacaaggtaaatatcttgcatggtgaatgatcagggcaggaatggatgaaggccagataatgcagcaggtctcatagttgctaaatagcaagattttatttggtggagatgtagcagagattagtcatagactccctttattttagattctttcacttgaaaatcccctttgtacaggccctattccctgagggcctttaatatgcttattgctttaaagattgtgttttttttaaataacataaatcacatggagtaataaaacaatgtttacatataaaaattatgaataaatgttaagta

SEQ ID NO: 246553 - DNA, 538 bp, Homo sapiens
aatcacaaagatttgaatcattaatgttatttttacttctgctctcaaggttaatttgactctttccatcatacatatatatttcttgaagtctccctcgtcagcttaatgctccttggaactctttatctccaccctcttcctatttttcattttacttgatacttgattttgcattccccccttgatgattttttaaaacctgtgttcctctagccagagattaaayttaaacttagttcatactctctctcatccttgaagcattataatatatactaaaagctactagccatagggaaatcatacttgttaatgtgtttttccccccagattgatgtgtcctatgtttaaattacttaagtacattatcaagtgcccacctacctccctttcacctgtggacacattatctgtcattcatacctctttataacaccacccctaactactgtggccttcattacttctcttgcatgtttagatttctgcttctcatgcatctcattagacttaatgattttagcattttatatcc

SEQ ID NO: 246554 - DNA, 550 bp, Homo sapiens
ttgcattccccccttgatgattttttaaaacctgtgttcctctagccagagattaaacttaaacttagttcatactctctctcatccttgaagcattataatatatactaaaagctactagccatagggaaatcatacttgttaatgtgtttttccccccagattgatgtgtcctatgtttaaattacttaagtacattatcaagtgcccacctacctccctttcacctgtggacacattatctgtcattcatacctctttataacaccacccctaactactgtggccttcattacttctcytgcatgtttagatttctgcttctcatgcatctcattagacttaatgattttagcattttatatcctgcatacatataacttttcatgatttacagtgtagtagcaatgataagttggtaaagcagatattatattcctcaatttccaggcagaaaagctgacgatgattcatctgcctcaaattatcgggttaatttgtgggatatgcaacatttaaactcagatgttttagccaagtctgaacactt

SEQ ID NO: 246555 - DNA, 537 bp, Homo sapiens
gccccaaatgagggtggtacacctccctcaggcttgataagaacaggctctgttgccctaatcctattctagcctcatcccaggctctataaggggaatggaaagaagagagagaaacttcagatttgagagacattaaactgaagagtgctaggtcttcctctctgatacctggagaggagggtgctaactactcctgtatctagtgtggctggtaccaagaaaatcacttttaaatatggagagtttctacaagaagggaagagggaagagttctatctccttcccacactggatataagtttaggtagtaaccttgtttatttatttattttttctgcatctacctcatctagggaaaagagatctggaaaggagatacctgagcacagacagggtccaggggtgaaacaracaacccttccaccttttgtttggtatagacagttaagtatcctctggggttcaatgtgcactatagcagattgatgtggtttgaatggattccttccaaatttcaggtgttgccagtatgac

SEQ ID NO: 246556 - DNA, 604 bp, Homo sapiens
tctttttctgcaggtttatttagcgttttgtttttgttttcttaatttccagaataaattattcacagaagcaatgactgagtgagaaataagagatgaggtgaggaacttttgtaaattcaacattgtctaactggacatgagtgagagattggtttctattggatattgctattgggcacgtacttttacaraggcatatggagtcaatcattcatggatgcaaggcttgcaaaagatttaaaatagctgggttaaaacctaaacatggagactgtttcttggaccaatggctggtctgaacttcatggaaacattcgatgaagagtcacccaaagtgagacaaagcccaggtgattagttgctgccgcctttgaatcctaaagtgagcaccttagagatacccaaataatttcttcaaatgtctagcctgaattcttttcattaatattaataatatatctggggtagaattgtggagataatactgtggacaacctgcctagaagtcatgtttgacccaaacactcaactttacttctataatgcctagtcccaagatatcttttaaaatattcatatctaatgtattgacattttgact

SEQ ID NO: 246557 - DNA, 527 bp, Homo sapiens
tgaccctgcaggcagtcagaccttatggttatcttcccttgttccctgaaaatcgctgttattctgttctttttcaaggtgcactgatttcatgttgttcaaacacacgttttacaatcaatttgtacaacagtggtcctgaggtgacgtacattmtcagtttacaaagataatgggattaagagattaaagtaaagacaggcataagaaattataagagtataattagggaagtgataaatgtccatgaaatcttcacaatttatgttcagagattgcagtaaagacaggcataagaaattataagagtataattagggaagtgataaatgtccatgaaatcttcacaatttatgttcagagattgcagtaaagacaggcataagaaattataaaagtattaattttgggaactgataaatgtccatgaaatcttcacaatttatgtttctctgccacagttccagacagtccctccgttcggggtccctgacttcccgcaacattaactcattttaacattaact

SEQ ID NO: 246558 - DNA, 543 bp, Homo sapiens
tgcttccactatgccacagttcagccagtgcaatttagaatcgttaaaatgtgcagccctgctaatcagagcttatcatgaaaacaccaycacagccttcacaatagatgggctgttagcaccactataattctctgaattctgtggtgcctgggcatatttcatcaggctgtccagttaatcctcccacaaagaagtgagactgtcatactcactagaatcagctctgttagaggctataaaactataagaaaaagtgcttgtaaatggtttgagtgtataaattatgaatgccagtaattaaattagaaattacaaaaggaaaggatttggcccagtctgcttggtgatgcagagcctttgctgaggattttggaacacctttccagaatttgcttgttttgtgaatttaatatttattattctgtgagggtcacgtaacataccttttatttatttgggcagaaattaatatacaaaggtaaaatgaatcacaccaaaacataattgatggaaataaaccagcttttaaataagatgata

SEQ ID NO: 246559 - DNA, 543 bp, Homo sapiens
tgcttccactatgccacagttcagccagtgcaatttagaatcgttaaaatgtgcagccctgctaatcagagcttatcatgaaaacaccatcacagccttcacaatagaygggctgttagcaccactataattctctgaattctgtggtgcctgggcatatttcatcaggctgtccagttaatcctcccacaaagaagtgagactgtcatactcactagaatcagctctgttagaggctataaaactataagaaaaagtgcttgtaaatggtttgagtgtataaattatgaatgccagtaattaaattagaaattacaaaaggaaaggatttggcccagtctgcttggtgatgcagagcctttgctgaggattttggaacacctttccagaatttgcttgttttgtgaatttaatatttattattctgtgagggtcacgtaacataccttttatttatttgggcagaaattaatatacaaaggtaaaatgaatcacaccaaaacataattgatggaaataaaccagcttttaaataagatgata

SEQ ID NO: 246560 - DNA, 584 bp, Homo sapiens
ttacgaagagtgtaaaccgctatgaatacttcaatttgtctaaagtgtgagtcattaggaaaggcagactacttaacttttttcacttttaaaaatacatttaataayattgtgtttatattttataatagcatgtgtaggacagtacttgaaatagcatgaagttcgaaagcagcgcaaaagggcatagattcaaaaagaccccaaagctgtcttctgctatttactaactctggttaatggaagaagcctagcattttattataatacttttaaattaaatcttctttcccacgatacagaaacaaagccaaaatagcgtaacagagctgacatggagcctaaataatatagtataattgaaaggtgtctcaaactatagcatgcagttactattctaaaaaacttggtaacatttttcctctcctgtgtcaatctcatttttgtggagttgccatggcttaacttttcgttgagaactaaaatactcaatttcacctttacattagagtttcattttcgaagtaatatttgtaagttgataaaagatgataaaactttagaaaaaaataatcacacttgaa

SEQ ID NO: 246561 - DNA, 584 bp, Homo sapiens
ttacgaagagtgtaaaccgctatgaatacttcaatttgtctaaagtgtgagtcattaggaaaggcagactacttaacttttttcacttttaaaaatacatttaataatrttgtgtttatattttataatagcatgtgtaggacagtacttgaaatagcatgaagttcgaaagcagcgcaaaagggcatagattcaaaaagaccccaaagctgtcttctgctatttactaactctggttaatggaagaagcctagcattttattataatacttttaaattaaatcttctttcccacgatacagaaacaaagccaaaatagcgtaacagagctgacatggagcctaaataatatagtataattgaaaggtgtctcaaactatagcatgcagttactattctaaaaaacttggtaacatttttcctctcctgtgtcaatctcatttttgtggagttgccatggcttaacttttcgttgagaactaaaatactcaatttcacctttacattagagtttcattttcgaagtaatatttgtaagttgataaaagatgataaaactttagaaaaaaataatcacacttgaa

SEQ ID NO: 246562 - DNA, 402 bp, Homo sapiens
ttaatttttgttcatagcaaaattgaaagcaggatrcagacagcacatatatatcccctgcccccattcagacacagcctaccccattatcaacatcttctcccaaagtggtgcatttgttgtaatagatgaacgtaaattgatatatcgttaccacccagagtacctagtttacattaggatttacacttggtgttgtatgttctatgagaatggaaaaatgtgtaatgatgtgcgtccaccaattatttatcctagtgtgctgtggcacagaaactatgcatatggagcagctttgctaccttacagatccttacaaatcctctgttctgtgcctgtttatgcctccctcctccctcactcctggaaaccaccagtatttttactgtccccattgtttta

SEQ ID NO: 246563 - DNA, 402 bp, Homo sapiens
ttaatttttgttcatagcaaaattgaaagcaggatgcagacagcacatatatatcccctgcccccattcagacacagcctaccccattatcaacatcttctcccaaagtggtgcatttgttgtaatagatgaacgtaaattgatatatcgttaccacccagagtacctagtttacattaggatttacacttggtgttgtatgttcyatgagaatggaaaaatgtgtaatgatgtgcgtccaccaattatttatcctagtgtgctgtggcacagaaactatgcatatggagcagctttgctaccttacagatccttacaaatcctctgttctgtgcctgtttatgcctccctcctccctcactcctggaaaccaccagtatttttactgtccccattgtttta

SEQ ID NO: 246564 - DNA, 402 bp, Homo sapiens
ttaatttttgttcatagcaaaattgaaagcaggatgcagacagcacatatatatcccctgcccccattcagacacagcctaccccattatcaacatcttctcccaaagtggtgcatttgttgtaatagatgaacgtaaattgatatatcgttaccacccagagtacctagtttacattaggatttacacttggtgttgtatgttctatgagaatggaaaaatgtgtaatgatgtgcrtccaccaattatttatcctagtgtgctgtggcacagaaactatgcatatggagcagctttgctaccttacagatccttacaaatcctctgttctgtgcctgtttatgcctccctcctccctcactcctggaaaccaccagtatttttactgtccccattgtttta

SEQ ID NO: 246565 - DNA, 586 bp, Homo sapiens
ttcaccactaggatgccagattattgtcccataaaacagttcaacaagactgttattggcaatatatactgtccttggaatccattttaacttgcatttaaaaataagttacaagtgaaaacgattacatacatacctgaaaaagaaacgtgcaaaaatattaaatcttctgtatcctgaagtacaagagacttttagaaaaatttgaagtggatatttgcaattttaagcttttctaatttgctaagaaggtagcaatgctaagcacagatcgcrccaaactgcctatggctgggagttcatgcagtagataagatgttaccggtaaatgtcaggacattgtgttaccatctaaccattttattttacgtgcacacacacacacgctcccactttcacacactcacacatacacagatacacgtgcacacacgctctcacacacacactaattaactatcattttatttctgatttagtagagttcctgagcagacggaacacagttgaccacaatgcgccatctttgtccaatgtgtctacttctcttagtatcagccttgttcctcctatgacaaccccatcc

SEQ ID NO: 246566 - DNA, 496 bp, Homo sapiens
gctggccagacatgggtgtgctctcaccggaagtcaacagaagatagcctggactaaatcctggcgaggaaatctggtgacaatttgaatcattsaaaaggaaaatggaatatttatctcttggcatctgtcaatcattgggtagaggttactctagagagcaaaaattcccaggcacctcccattcccctttgtgtacagcaaagtgagctccagcactatgggctcggattccagcaaagacacagatgctggtcactgtgagtaagacacaccctgagccaatgaggctattgtgcagactgatgatattgtccacttaacaaggctgctaccactctctgcacacaaaccacatcctctccctccaaagggcagcgtaagcacttagcatgacgttcgataaatcaatgcaaaaaggtcccatgacatctctagtagtatttatttttattacattaattctgcacctatcttatctctccagttagagttg

SEQ ID NO: 246567 - DNA, 496 bp, Homo sapiens
gctggccagacatgggtgtgctctcaccggaagtcaacagaagatagcctggactaaatcctggcgaggaaatctggtgacaatttgaatcattgaaaaggaaaatggaatatttatstcttggcatctgtcaatcattgggtagaggttactctagagagcaaaaattcccaggcacctcccattcccctttgtgtacagcaaagtgagctccagcactatgggctcggattccagcaaagacacagatgctggtcactgtgagtaagacacaccctgagccaatgaggctattgtgcagactgatgatattgtccacttaacaaggctgctaccactctctgcacacaaaccacatcctctccctccaaagggcagcgtaagcacttagcatgacgttcgataaatcaatgcaaaaaggtcccatgacatctctagtagtatttatttttattacattaattctgcacctatcttatctctccagttagagttg

SEQ ID NO: 246568 - DNA, 685 bp, Homo sapiens
tagaaaacttattagagggaagcataattatttagtctccagatcttttttcctaggaacgaggagagagaatcctctcctgtcctagctgttctctgctagagaagactggagtttccttctgacgtttttttttttctataatttctttagactgcatctgaagtgtttcttccagaaataatggagataacacccctgacgatgtgttctccaattatcaatgacaggatatctgcttagaggacattaaatacgtgaaatccttatctctgtcggggttgctgcttttttcacctttgaggccacgtctccaggtgataagggtaaatatacttaaaaaggtcaagcaggaataaaaagggtggagggcacaggtttaacttctgaattattctgatatttctaacagatgcccaggttttaaatgtcgaatagtttccactgtgttttgatatgccgaatggttatycaagagttattaatgccatctttgcagactggtctctactgaatgatggatgtgaactggtgtgtggtgtgataagcatgatttgcttacactttgttcatccctccattcctgggacttgtctccctatgggttgagaacatttccttatgctattgagaaaggactctgccatgagatttttggggtcagtgtgctgggggcggcagtgag

SEQ ID NO: 246569 - DNA, 640 bp, Homo sapiens
gaataagtgaatgaatggatgaatgtcttctactctcacatgggcttatgggtccaacgtagaccataatgtgggatggaaacatcctaatgtcagaaaataaagcagtacatgattggtggtgctcagtaccggcagttaaaagaaagcattctgctgggcatggtggctcgcatctgtaatcccagcactttgggaggctgaggcaggtggatcacttgrgctcaggagtttgagaccagcatgggcaatgtagtgaggcctatccatgcaaaaagtacaaaaattagccaggtgtggtggcacacatatgtagtcccagctacttgggaggctgaggcagtaggatcacttgagcctgagaggcagaggctgcagcgaactgagatcatgccactgcattcctgcctgggggacagagctgtcataaataattaaattaaattaaattaaaagaggcattcatgttttttgtagggagccttatccctgggatacgctcaggtatagccctaccaaatgtgagatcacaaatcaaactcacagaacactgaagaacatgttatcatagttagaaaaaacagaaataagaaacagcacagtacaatgcccataaaaatgcagacattaattttatgaa

SEQ ID NO: 246570 - DNA, 640 bp, Homo sapiens
gaataagtgaatgaatggatgaatgtcttctactctcacatgggcttatgggtccaacgtagaccataatgtgggatggaaacatcctaatgtcagaaaataaagcagtacatgattggtggtgctcagtaccggcagttaaaagaaagcattctgctgggcatggtggctcgcatctgtaatcccagcactttgggaggctgaggcaggtggatcacttgagctcaggagyttgagaccagcatgggcaatgtagtgaggcctatccatgcaaaaagtacaaaaattagccaggtgtggtggcacacatatgtagtcccagctacttgggaggctgaggcagtaggatcacttgagcctgagaggcagaggctgcagcgaactgagatcatgccactgcattcctgcctgggggacagagctgtcataaataattaaattaaattaaattaaaagaggcattcatgttttttgtagggagccttatccctgggatacgctcaggtatagccctaccaaatgtgagatcacaaatcaaactcacagaacactgaagaacatgttatcatagttagaaaaaacagaaataagaaacagcacagtacaatgcccataaaaatgcagacattaattttatgaa

SEQ ID NO: 246571 - DNA, 640 bp, Homo sapiens
gaataagtgaatgaatggatgaatgtcttctactctcacatgggcttatgggtccaacgtagaccataatgtgggatggaaacatcctaatgtcagaaaataaagcagtacatgattggtggtgctcagtaccggcagttaaaagaaagcattctgctgggcatggtggctcgcatctgtaatcccagcactttgggaggctgaggcaggtggatcacttgagctcaggagtttgagaccagcatgggcaatgtagtgaggcctatccatgcaaaaagtacaaaaattagccaggtgtggtggcacacatatgtagtcccagctacttgggaggctgaggcagtaggatcacttgagcctgagaggcagaggctgcagcgaactgagatcatgccactgcattccwgcctgggggacagagctgtcataaataattaaattaaattaaattaaaagaggcattcatgttttttgtagggagccttatccctgggatacgctcaggtatagccctaccaaatgtgagatcacaaatcaaactcacagaacactgaagaacatgttatcatagttagaaaaaacagaaataagaaacagcacagtacaatgcccataaaaatgcagacattaattttatgaa

SEQ ID NO: 246572 - DNA, 378 bp, Homo sapiens
gctggcaaccactattctattctgtacttttatgagttcagtgtttttagattttacatgtagtgaaatcatactcagaaaaccaaaatataacaaccatatgatccagcaatgctagttttgggtacatatccaaaggaattaaaatcactctgcccaaagtatrcatactcccatatttattgcagcattattcacaataactaagacacaacagcaacctgtttatcatcagataaatagacaagaatatgtggtatatatgaacaatgaaatactatttaatcttaagaaaaaaataaaattctatcatttgcagcaccatcaataaacctaggagacactattttaagtgaaataagccaggcacagaaatac

SEQ ID NO: 246573 - DNA, 378 bp, Homo sapiens
gctggcaaccactattctattctgtacttttatgagttcagtgtttttagattttacatgtagtgaaatcatactcagaaaaccaaaatataacaaccatatgatccagcaatgctagttttgggtacatatccaaaggaattaaaatcactctgcccaaagtatgcataytcccatatttattgcagcattattcacaataactaagacacaacagcaacctgtttatcatcagataaatagacaagaatatgtggtatatatgaacaatgaaatactatttaatcttaagaaaaaaataaaattctatcatttgcagcaccatcaataaacctaggagacactattttaagtgaaataagccaggcacagaaatac

SEQ ID NO: 246574 - DNA, 478 bp, Homo sapiens
tgattatatttagttgcctacctgtgttctattgtaactcactgaaattctttaagaggacgattttgtcaggtagtttgtagatcttcatttattcagggtcagttattggtactttattttcgtcctttggtggtatgaaattttcctgattatattcatgatcctgctgaacttgatctggtgtctgcctatttgaaaaagttggtgtttctccctgtctttacagattgcctttttatcaccagtcagactctacatgtattcagaattatctggccatgggggttcatgggaagggtgasctggaacttggagtaataggtgagtgggcctacagccagagtccacagggaccaatctgctgtatttttctgcaggggtgggcctacagtttgtgttaatggggcaggcctggaacctaggtcctttggggtatgcctgttgccttctaccatgtgcagcagacctgagtcct

SEQ ID NO: 246575 - DNA, 563 bp, Homo sapiens
tgtgctcttcatctccacaatttctgtttatctcttttaatgatttctttctctttgttgaacttcaaattttgttcacatattgtcttcttgattatatttagttgcctacctgtgttctattgtaactcactgaaattctttaagaggacgattttgtcaggtagtttgtagatcttcatttattcagggtcagttattggtactttattttcgtcctttggtggtatgaaattttcctgattatattcatgatcctgctgaacttgatctggtgtctgcctatttgaaaaagttggtgtttctccctgtctttacagattgcctttttatcaccagtcagactctacatgtattcagaattatctggccatgggggttcatgggaagggtgagctggaacttggagtaataggtgagtgggcctasagccagagtccacagggaccaatctgctgtatttttctgcaggggtgggcctacagtttgtgttaatggggcaggcctggaacctaggtcctttggggtatgcctgttgccttctaccatgtgcagcagacctg

SEQ ID NO: 246576 - DNA, 563 bp, Homo sapiens
tgtgctcttcatctccacaatttctgtttatctcttttaatgatttctttctctttgttgaacttcaaattttgttcacatattgtcttcttgattatatttagttgcctacctgtgttctattgtaactcactgaaattctttaagaggacgattttgtcaggtagtttgtagatcttcatttattcagggtcagttattggtactttattttcgtcctttggtggtatgaaattttcctgattatattcatgatcctgctgaacttgatctggtgtctgcctatttgaaaaagttggtgtttctccctgtctttacagattgcctttttatcaccagtcagactctacatgtattcagaattatctggccatgggggttcatgggaagggtgagctggaacttggagtaataggtgagtgggcctacagccagagtccacagggaccaatctgctgtatttttctgcargggtgggcctacagtttgtgttaatggggcaggcctggaacctaggtcctttggggtatgcctgttgccttctaccatgtgcagcagacctg

SEQ ID NO: 246577 - DNA, 567 bp, Homo sapiens
taaaaaacaatgcgtgaatgacctatttctgtgcctgatgcaaactgtttaaaaatactgcatccattttccccttcaaagtaaataacagacaaacgcttcatttcttagctagtttgtggtatctaaatttaataatcaaataaaggcaatggtttctttaacatttcaattctctcagtgggagttgaacagtgttaatagatttttctagcaataaaataagtctgtaccaaagtcattcgtggttccttattcaattatttaagttgtgcttggtttctaggaatcatagggttaggatactgggaaaagttcttctctcaattgattgccctttacgatcacataattcacagtgacagggaaaaatttattggaagtaaaatgcagagatttaatcagcatattctccaaggcagccatgtactcaaaatccttcagsaggctcataccctataatgcacacataaagtaaatgtagccaacatttccaattattagtaactgagagtatatgcaaaataatactcttattcccattagctgaatgttgtacttggtatt

SEQ ID NO: 246578 - DNA, 591 bp, Homo sapiens
taattttacaaattttgtgacgtgggcaaattattttgcctctttaataacttctagagttttatgaattaagtaaagtgatgcaaatttcttagctcagagcatcaaatacttcgcttatgcatccttagatctagacttagrtagaaaatcttcatagtgcctactaagtgctagaaactttataaaaacatgacgaccctataaaggagataatatttttaaaaaatattttagaggtctgaaaactgaaactagaaattaagtaataattccaagattatctgagtagttactagatacacatttttcccttgggttaatattcagcctcaccctgcctggtagtgccagccactgaacagcccctcagagacagcctaatcttttgctgatgcctacagaaataacagttctgactggatgcacccaaactctgtcatgtgggttctgcctggctcaggacttcctggagagacctacactatctgcgtcatcttatactagcatgtgtcctcaagtagaacctatctagaatgactaaagtctccttccatgccacgtggggcccagcagagctgagataagcat

SEQ ID NO: 246579 - DNA, 591 bp, Homo sapiens
taattttacaaattttgtgacgtgggcaaattattttgcctctttaataacttctagagttttatgaattaagtaaagtgatgcaaatttcttagctcagagcatcaaatacttcgcttatgcatccttagatctagacttagatagaaaatcttcatagtgcctactaagtgctagaaactttataaaaacatgacgaccctataaaggagataatatttttaaaaaatattttagaggtctgaaaactgaaactagaaattaagtaataattccaagattatctgagtagttactagatacacatttttcccttgggttaatattcagcctcaccctgcctggtagygccagccactgaacagcccctcagagacagcctaatcttttgctgatgcctacagaaataacagttctgactggatgcacccaaactctgtcatgtgggttctgcctggctcaggacttcctggagagacctacactatctgcgtcatcttatactagcatgtgtcctcaagtagaacctatctagaatgactaaagtctccttccatgccacgtggggcccagcagagctgagataagcat

SEQ ID NO: 246580 - DNA, 547 bp, Homo sapiens
tggctcaggacttcctggagagacctacactatctgcgtcatcttatactagcatgtgtcctcaagtagaacctatctagaatgactaaagtctccttccatgccacgtggggcccagcagagctgagataagcattgtcctaaccttttcccagactcttaccaagagccattttgaccttgctggcagcctcgtatcttctgttttctgtgcaccagaagtgggtaccagcctttttgtgcaaatacactcctatacttgaggaaattatgtccaactcgtccaaaagctctcatgtttgctaataagaaagcagcactaggttggactgtgactrtctgcagcccaggaagctgcctgtgaagattcccatcacatcctgcgtgtacatctaattactctctactaaggagcgtcttcacccccagagtttgtagggcaggtccaaggtacatcatttacaaggaatacggcatcacccaaaggattgtgttactttcactctccttcccattaacctcttcttaaacttgggggaaggaatag

SEQ ID NO: 246581 - DNA, 547 bp, Homo sapiens
tggctcaggacttcctggagagacctacactatctgcgtcatcttatactagcatgtgtcctcaagtagaacctatctagaatgactaaagtctccttccatgccacgtggggcccagcagagctgagataagcattgtcctaaccttttcccagactcttaccaagagccattttgaccttgctggcagcctcgtatcttctgttttctgtgcaccagaagtgggtaccagcctttttgtgcaaatacactcctatacttgaggaaattatgtccaactcgtccaaaagctctcatgtttgctaataagaaagcagcactaggttggactgtgactatctgcagcccaggaagctgcctgtgaagattcccatcacatcctgcgtgtacatctaattactctctactaaggagcrtcttcacccccagagtttgtagggcaggtccaaggtacatcatttacaaggaatacggcatcacccaaaggattgtgttactttcactctccttcccattaacctcttcttaaacttgggggaaggaatag

SEQ ID NO: 246582 - DNA, 617 bp, Homo sapiens
atttgtaaaaatagtggagaaatgttgtttattctaacataacagttttaatctcctaaaaggatttaactcaatgatagttaaacaattgctatatttggatttattctttttgttttattttatgttaataattcatcgtatttcattrtttctttttttttttttttcctaattttgctaatccaacttttctggttttgctgtcgattcacttttctttttttctttgtttatttgaaaattcgattaaacttttccatttctttaatagctgtcttccctgtacctgaatcagacaaaaacctctccaccactacaggactgctcaacagcagctcttctcactaacattctctgtgctttgtctcgcaacctcctcacctcaaccctaacaaatgaggcctttagaatatgctgaggccattgtctcaccataatcaaccccttctaccttacatatgagtagcattattgcctttgatgtctctttccccatgatgtgttgtcttacgatagtttaatttggagcaagttactttgaaacatatgtgcatatgtgattgtttgcaatttctagaaattactcagttctagtcacctcatcattatttatt

SEQ ID NO: 246583 - DNA, 617 bp, Homo sapiens
atttgtaaaaatagtggagaaatgttgtttattctaacataacagttttaatctcctaaaaggatttaactcaatgatagttaaacaattgctatatttggatttattctttttgttttattttatgttaataattcatcgtatttcattgtttctttttttttttttttcctaattttgctratccaacttttctggttttgctgtcgattcacttttctttttttctttgtttatttgaaaattcgattaaacttttccatttctttaatagctgtcttccctgtacctgaatcagacaaaaacctctccaccactacaggactgctcaacagcagctcttctcactaacattctctgtgctttgtctcgcaacctcctcacctcaaccctaacaaatgaggcctttagaatatgctgaggccattgtctcaccataatcaaccccttctaccttacatatgagtagcattattgcctttgatgtctctttccccatgatgtgttgtcttacgatagtttaatttggagcaagttactttgaaacatatgtgcatatgtgattgtttgcaatttctagaaattactcagttctagtcacctcatcattatttatt

SEQ ID NO: 246584 - DNA, 617 bp, Homo sapiens
atttgtaaaaatagtggagaaatgttgtttattctaacataacagttttaatctcctaaaaggatttaactcaatgatagttaaacaattgctatatttggatttattctttttgttttattttatgttaataattcatcgtatttcattgtttctttttttttttttttcctaattttgctaatccaacttttctggttttgctgtcgattcacttttctttttttctttgtttatttgaaaattcgattaaacttttccatttctttaatagctgtcttccctgtacctgaatcagacaaaaacctctccaccactayaggactgctcaacagcagctcttctcactaacattctctgtgctttgtctcgcaacctcctcacctcaaccctaacaaatgaggcctttagaatatgctgaggccattgtctcaccataatcaaccccttctaccttacatatgagtagcattattgcctttgatgtctctttccccatgatgtgttgtcttacgatagtttaatttggagcaagttactttgaaacatatgtgcatatgtgattgtttgcaatttctagaaattactcagttctagtcacctcatcattatttatt

SEQ ID NO: 246585 - DNA, 617 bp, Homo sapiens
atttgtaaaaatagtggagaaatgttgtttattctaacataacagttttaatctcctaaaaggatttaactcaatgatagttaaacaattgctatatttggatttattctttttgttttattttatgttaataattcatcgtatttcattgtttctttttttttttttttcctaattttgctaatccaacttttctggttttgctgtcgattcacttttctttttttctttgtttatttgaaaattcgattaaacttttccatttctttaatagctgtcttccctgtacctgaatcagacaaaaacctctccaccactacaggactgctcaacagcagctcttctcactaacattctctgtgctttgtctygcaacctcctcacctcaaccctaacaaatgaggcctttagaatatgctgaggccattgtctcaccataatcaaccccttctaccttacatatgagtagcattattgcctttgatgtctctttccccatgatgtgttgtcttacgatagtttaatttggagcaagttactttgaaacatatgtgcatatgtgattgtttgcaatttctagaaattactcagttctagtcacctcatcattatttatt

SEQ ID NO: 246586 - DNA, 564 bp, Homo sapiens
tttgatcgaacccattcaaaattgcaagcaagtagactacttaggaggctgttacagctgtcaatcaaacaaaatgaggattgccctatttgagtactgattatccgtgagtatcgcatgtagatttgtgagcaattaggtttggaggttatagagttggattttgagtctatgaaaaaagaaagaaatgaaattaagttgatacccaagtttatacgggtaccaatcgttggagtaaggaaaacgaaaaatagttyggagggtttccacggagataatgagtcctgtttcatctttgtggaatactgagcatacaagaagagatgtccagagtgcatttgtcactcaaatcttaataatgcgatccagacttggatgtatccacaaagatgatggtcattagggacaggagatgatttttgagggaaaaatgtagagtgaaaaggagtaaagccccaagacagaataataatttttttaaaagagcggtatttaagatacaggcagaggacagaaaacccactagcaggagtgtaaaggaaaaatcaggcaggggaattaaat

SEQ ID NO: 246587 - DNA, 564 bp, Homo sapiens
tttgatcgaacccattcaaaattgcaagcaagtagactacttaggaggctgttacagctgtcaatcaaacaaaatgaggattgccctatttgagtactgattatccgtgagtatcgcatgtagatttgtgagcaattaggtttggaggttatagagttggattttgagtctatgaaaaaagaaagaaatgaaattaagttgatacccaagtttatacgggtaccaatcgttggagtaaggaaaacgaaaaatagtttggarggtttccacggagataatgagtcctgtttcatctttgtggaatactgagcatacaagaagagatgtccagagtgcatttgtcactcaaatcttaataatgcgatccagacttggatgtatccacaaagatgatggtcattagggacaggagatgatttttgagggaaaaatgtagagtgaaaaggagtaaagccccaagacagaataataatttttttaaaagagcggtatttaagatacaggcagaggacagaaaacccactagcaggagtgtaaaggaaaaatcaggcaggggaattaaat

SEQ ID NO: 246588 - DNA, 564 bp, Homo sapiens
tttgatcgaacccattcaaaattgcaagcaagtagactacttaggaggctgttacagctgtcaatcaaacaaaatgaggattgccctatttgagtactgattatccgtgagtatcgcatgtagatttgtgagcaattaggtttggaggttatagagttggattttgagtctatgaaaaaagaaagaaatgaaattaagttgatacccaagtttatacgggtaccaatcgttggagtaaggaaaacgaaaaatagtttggagggtttccacggagataatgagtcctgtttcatctttgtggaatactgagcatacaagaagagatgtccagagtgcatttgtcactcaaatcttaataatgcgatccagacttggatrtatccacaaagatgatggtcattagggacaggagatgatttttgagggaaaaatgtagagtgaaaaggagtaaagccccaagacagaataataatttttttaaaagagcggtatttaagatacaggcagaggacagaaaacccactagcaggagtgtaaaggaaaaatcaggcaggggaattaaat

SEQ ID NO: 246589 - DNA, 617 bp, Homo sapiens
aatcatttaacttgatagttgctgctcagatagaatagaaatatttatctaactttattagccaggttttcacatgaaaatttattcacatgaatatttttcttttttcatctgcataaaaatgtctaatgtataagtgtatattaatcccttcaacatacggtggatgaaaactatcaacaatctttttctastcataaatatttactcatggcctatatgtctagtcatatttacgactagaggatgattttatttctacttaaacatagctaaaataaccaattttattatttaatagtaatcctaattaaggatacaaactgaaatccccaatctaattaataactgtcggttgaatggtattttaattttgctaaatatgttgaagagcttcgcaaaaaattacttagggatataaacaacttgtccaccttcaagtagatgtatcttattacatcaaaaatcccttgaagaattcttaaacattaattgggaaaattagatctagagaccaaaataagtcacatatctccaaggaatgtaagtagtttaatagtctagaatcagcaaaatgtcctttatagcacagcacgtctttatttgcctgttttctg

SEQ ID NO: 246590 - DNA, 617 bp, Homo sapiens
aatcatttaacttgatagttgctgctcagatagaatagaaatatttatctaactttattagccaggttttcacatgaaaatttattcacatgaatatttttcttttttcatctgcataaaaatgtctaatgtataagtgtatattaatcccttcaacatacggtggatgaaaactatcaacaatctttttctagtcataaatatttactcatggcctatatgtctagtcatatttacgactagasgatgattttatttctacttaaacatagctaaaataaccaattttattatttaatagtaatcctaattaaggatacaaactgaaatccccaatctaattaataactgtcggttgaatggtattttaattttgctaaatatgttgaagagcttcgcaaaaaattacttagggatataaacaacttgtccaccttcaagtagatgtatcttattacatcaaaaatcccttgaagaattcttaaacattaattgggaaaattagatctagagaccaaaataagtcacatatctccaaggaatgtaagtagtttaatagtctagaatcagcaaaatgtcctttatagcacagcacgtctttatttgcctgttttctg

SEQ ID NO: 246591 - DNA, 570 bp, Homo sapiens
cctgtagtacacatcaccagtggattaactttataataatgatttctcattattaaagactattttttaagaaaaaggcaaacatgaattaatggaaatgtaataggattcatcacccttgcatctttaagttctttgatgaggcactaatccttgaaaatcccccagagatgtgacaattctttgaacgtagctatwtttaaaaggagctacagtctggggatttcttcttcctcatacatttgctaatagttctcactcaggtttcatgtagctaatgccagaacctgccactgaaaaaaaaaagtctctttcaactatacctcaaggaacttgaaaattaattgcaatatgaaatttaggtttgtgaatcttcttgatctactgttagatggacccatgccaaattttactttttgaaactaatctccacaaggccatacgttaagcaaatggtcacaattttatactagattctcagaaattagtattagctctgagccagtgctgataatctttaaaaggattgcatattaacgtttcttcaggtcattgattatttttataaat

SEQ ID NO: 246592 - DNA, 570 bp, Homo sapiens
cctgtagtacacatcaccagtggattaactttataataatgatttctcattattaaagactattttttaagaaaaaggcaaacatgaattaatggaaatgtaataggattcatcacccttgcatctttaagttctttgatgaggcactaatccttgaaaatcccccagagatgtgacaattctttgaacgtagctatttttaaaaggagctacagtctggggatttcttcttcctcatacatttgctaatagttctcactcaggtttcatgtagctaatgccagaacctgccactgaaaaaaaaaagtctctttcaactatacctcaaggaacttgaaaattaattgcaatatgaaatttaggtttgtgaatcttcttgatctactgttagatggacccatgccaaattttactttttgaaactaatctccacaaggccatacgttaagcaaatggtcacarttttatactagattctcagaaattagtattagctctgagccagtgctgataatctttaaaaggattgcatattaacgtttcttcaggtcattgattatttttataaat

SEQ ID NO: 246593 - DNA, 560 bp, Homo sapiens
gtttcacaacatggattggaaataattaactagtatattttctggaagagattgtatagaatgagtgctatattttctttaagttcctgatagaattctctagtgaaatgatactgctgacagatatatttctcaaattttttaaaatttaaaattcaaaattcttaataaatatgagatacttatatggaatgagttgtagttttttaaaattaggtcttytaacttaaattttgaaatttacatgtagagaattacttatagtttttttttttttttttttttttgacagagtcttgctctgtcgtccaggctggagtgcagtggcgcgatctcggctcactgcaagctccgccttccgggttcacgccatcctcctgcctcagcctcccgagtagctgggattacaggcgcccgccaccacgcccggctaattttttgtatttttagtagatacagggtttcaccatgttagccaggatggtctcgatctcctgacctcgtgatccacccgccttggcctcccaaagtgctgggattacaggcgtgaaccactgtgc

SEQ ID NO: 246594 - DNA, 535 bp, Homo sapiens
tacccagtatgatcaacagagagaaaataaaccagaaaaaaaccaacagaacttgagggaccatggagactgtaacgaagatctaacatgggtactaccagcatccaggaaagagagaagaaaattgtgggtctgaaagaaatactcaaagaaataatggctgagtgactaaagtttaaataacagatcgtctgactagtgttgacttaaacaataataacatttctttctcttgcataaaaatgtagagttaagcattgtcagtgctgtgcatgtctcaatgacrctggagagcctgctcagcaccttggcagttctctgggctcttgctctttggttacaggatgtctgctatgcttttaggcattatatctttacatcagcatcttggactcttaggaaggactgaacagaaaaggggaaatttccatttatcagagagaaaacattttctaaaatagcctttcatcagattttaactaacaactcttctagcatgcaagaaagtggtcaaacaataatttacttattcatt

SEQ ID NO: 246595 - DNA, 535 bp, Homo sapiens
tacccagtatgatcaacagagagaaaataaaccagaaaaaaaccaacagaacttgagggaccatggagactgtaacgaagatctaacatgggtactaccagcatccaggaaagagagaagaaaattgtgggtctgaaagaaatactcaaagaaataatggctgagtgactaaagtttaaataacagatcgtctgactagtgttgacttaaacaataataacatttctttctcttgcataaaaatgtagagttaagcattgtcagtgctgtgcatgtctcaatgacgctggagagcctgctcagcaccttggcagttctctgsgctcttgctctttggttacaggatgtctgctatgcttttaggcattatatctttacatcagcatcttggactcttaggaaggactgaacagaaaaggggaaatttccatttatcagagagaaaacattttctaaaatagcctttcatcagattttaactaacaactcttctagcatgcaagaaagtggtcaaacaataatttacttattcatt

SEQ ID NO: 246596 - DNA, 541 bp, Homo sapiens
gagtatagaaatcagaaaacttcctttaataaccatcaaccatgaaaatcatttaagaataacttttttccatttatttggaaaaaagtctgactttacagcaaaacataattttctctcccttttgactactgagcctcagtttcattccatttgacttgtgcatacactttccaaggattctgagatgccgagaaggaccactatctcagtgtataatgttttaatgactatttggaggctcagacacctctgaattgacaaagacagaacaagtgtctttccccttcagtacctcattgaactagtagctctgtgttttattctcgccttaccttttaaaacatttgattttagctaagatcagatttatttaccaggaaacctttataagagctccctttctgctacgtgcaaatgtgttaatgtttattcattacatggcaatgtgcctatggttttcctttagtccttcttaggctgtrgcacatcacctcagtaaaccaaaaattaaatgctaagccccccagccaacagaacg

SEQ ID NO: 246597 - DNA, 604 bp, Homo sapiens
ttaatatgaaaagtaactggaagccactttaggagaggtaatagaacaaagcatcttttaggaggtaacatttaatctgaaacctgaattataagtcggttccgcacaaaaagagaaggagattccctgaagagtacacaattaatgctgaggcctaatttggaaaggtactttggagtatcccaaaacatgaatgctcaattttattttttaaatggtatacattaaagcatgcaaattcaaaaattcaaagaagaaatggctactctcatactcaagtcatgaaaatartttctaaaggactactaacaattagttaaccagacacatgaattctgggttggctggtagaggatgctggtcttgaaattctgattcatttgtttatttcttccacctttgactaatgctaatctagtttatctttcccacgaagcatgtataacttgctcacatttgtaatggaaaaaaggcagacttgctgctatctgtttctggggcctaattcctaaaagggatatatcttaaaataaatttgtttctcaactctattgtttatactgaacaatcgaatttcaactattaattttattataatttgtaa

SEQ ID NO: 246598 - DNA, 585 bp, Homo sapiens
agaagaaaatttgaaattaagatttgagctagagcagtagaaataacatgaaaaacagatttgggaaacattttgtagttaaaaatcaatgagcttacctttgtttataaagataaaatccaaatcctgcaaatataagtgcaaaaaaaggcacaagaatagcaatggctacagaactactatttgtaccatgaggttgatktgaagaatttgaaccttctgacatattcagtcctacaaaataaaaaataaattataaatacacaactcttttatcataattaatttctactcccatgaatcaattaatttcttctattctcaagatatctacctggaaatcacatagtaaacaaaaataattcatgaaactccttcaactcatttcacatatgtttgcacagtgcctcttagaagatatttttccaggaaagggtacagacaaaaaaataggcagagccccgaactaaggagtttatacaatagtgggaagacatatggagtatataataagtgtgtatatcaagcatgaataaatggtcaatgtgctttagaaaggaaaggagtaattctggaggatataca

SEQ ID NO: 246599 - DNA, 585 bp, Homo sapiens
agaagaaaatttgaaattaagatttgagctagagcagtagaaataacatgaaaaacagatttgggaaacattttgtagttaaaaatcaatgagcttacctttgtttataaagataaaatccaaatcctgcaaatataagtgcaaaaaaaggcacaagaatagcaatggctacagaactactatttgtaccatgaggttgatttgaagaatttgaaccttctgacatattcagtcctacaaaataaaaaataaattataaatacacaactcttttatcataattaatttctactcccatgaatcaattaatttcttctattctcaagatatctacctggaaatcacatagtaaacaaaaataattcatgaaactccttcaactcatttcacatatgtttgcacagtgcctcttagaagatatttttccaggaaagggtacagacaaaaaaataggcagagccccgaactaaggagtttatacaatagtgggaagacatatggagtatataataagtgtrtatatcaagcatgaataaatggtcaatgtgctttagaaaggaaaggagtaattctggaggatataca

SEQ ID NO: 246600 - DNA, 562 bp, Homo sapiens
tgggagaaaaaatgcatataaattcttacccatgatagcattatttcttatccataatacttacgtatgcattcaggctgaatcccactccacgtaagatcagggaggcaggtgcgtgttgtagacccttggagaaggtgtccttttttgcaatggaactgtacaacacttcctacctatagcaaattaaagagaggaaaaaaatattcccctacaacttcaaatatggcaacaaacagagcttgagtgagaaaatgttatcaagtgaaattccgtatggtaaagttggaagaaaaaaataattgaaatctgatttaaaataaaatgggaaaaattcaaaactaaaaaataaaatcctggctttatttgtttacatatcatcatcaaatagttgggtccttagtacatacatagawaccaagcttttttgccatgggaatttgaagaaaatatttaagacaccaaaaaatccaacaagctacatatgaatacaagatagagagatagatagttagataaagataaataaatgaagcttgataaaaatatatatggaaataaa

SEQ ID NO: 246601 - DNA, 655 bp, Homo sapiens
gtagggttaaatattttatggttaaatatcttgaggctaaatatctaaagagccggattaaaaacttttcatatttataataactttatgtaacaagccctaaatccaaataatgtactttccattgcccagagctcagtttaacaagtgatacagcagtgtgtatgtgtgcttgtcatttactccatggttaatcctgatgttgcatcaattattttgacagctattctcttcactatcaatttttagtaaaattattccaatttacaatattttaatamaaagacaaattatgttgaatacttttttcaatgatagagttttcatcatctctagcaatgagtaatatattttgtatgttaataattattgatgtcccaaaatctactatataaatctataaagaaaaagagagtgaacaaatgaacacattaaagagaaaattaagaaaatgatctgagtgcctctgtagttcataactttctcttgctcttcccaaaaatgggcttcctaacagctgtgattttgcgtcataactcactaccggccacctaatgaaaccaacataaatacgaaagttgggacattctgattctccttggaaatctggaattgagattgagatgatcactttctgtatgtagctgagatgtaa

SEQ ID NO: 246602 - DNA, 584 bp, Homo sapiens
cataactttctcttgctcttcccaaaaatgggcttcctaacagctgtgattttgcgtcataactcactaccggccacctaatgaaaccaacataaatacgaaagttgggacattctgattctccttggaaatctggaattgagattgagatgatcactttctgtatgtagctgagatgtaaatagaaatgattcactcttggccatatggccaatctgcggagagaaaatatgaagtagataaacagaaagtagtataaaaaactgagtacttgaagccagtacctacactctgggtttgatgagtctcacatggattctttctttgggagtctggacatacctgcacagtaatgcctttaggctttaagtagctccaaacagtttttttgttacttgcaagcaatcgtttttctcaatggctsaagatgccttttgcatataaaaccatattcatttggaattcatcaataaattagtattaattagaattatataactatttattgtgttagatctatacagatttagttaacagatttagtatgtgtgtgtgtatatatatatatatatatatatatatat

SEQ ID NO: 246603 - DNA, 551 bp, Homo sapiens
aattatataactatttattgtgttagatctatacagatttagttaacagatttagtatgtgtgtgtgtatatatatatatatatatatatatatatacacattcatacctgccatatgcatgtaagaaagccaatctccctaatgtaagacacaaaatacatttaattttaatagatagttatataattgtatataagtagactttaccatatttggaatctagtctatttatatttattcatatagaatataatgatttaatacctgtttattaccccaaataacataaattcagggttaggttaactttgttacagcatttttcaatgattataatagaatccttagaaagcagagttagtgattctcttcattttgttggatgactgttttaaactccacgttaatcattctcatttccaatatctcaaataatatttactaaaaaaactcatattctttagaaaatcagcctgatttagtacacygacactaacatcacaattttgtattctgttagaatatgtcaccaacttgatctgcgaacaaa

SEQ ID NO: 246604 - DNA, 500 bp, Homo sapiens
aaaccaaacaacctattgatatcaggtttagagacttaagacacagaatttcttgtcaaatggctttaattcataaagacataaacttttaagatgagaaaacatactttaagcaaaattaaagagaaaaaagcattcctctttataaagtccctaacattaatggatttgcatacccaatggataaggccatcatttcttaagtmtaccttctctgaacttcaatccatactctgccattttctagcggtatgaccttaggccttatgacaatgtagctgcttccctaaatgatggcagagtaacactgtgcccttgcaatttgattttcccttctgagtttaagtgtcattgtctattaaaatgtcatgactaatcctacgtacccaggagctctattatgtgtagtagaaatgatatacgtaaagcaactgagacaaagatagcgttattacatttgaaatgtaaatacatattttattactatttgtatttcaata

SEQ ID NO: 246605 - DNA, 542 bp, Homo sapiens
aatctgaaaataaaaaagaaaagaattgcacaataatttagggtattgtccaaaccaacccaattatgattctgtccgggatatcgaaaacataacttttttgcttagttaaaaaatgtggtctttgtaccttaacattttttttctttgaccctctactatacttgaccttctactttacttagtccatgtaaycctcatcagctttctccctcattctttccaactaggcactattcattattgttaaataaattaaagaaataatattgcctgagttatttacaaatatatattacatcatctcaatgtttctggttgttagtcaacattttgttttaccttgtattgcttccatttttatcagacaccttttgtccaattaagctactatattgttaactatttcagaagactccttcactttactgagtgctttcatcttttcctctgtatttctaaatttcctatcttttggcctttctagtctgtcctcagtttgctttaattattgctgtaattttgatgttcacttctttgta

SEQ ID NO: 246606 - DNA, 542 bp, Homo sapiens
aatctgaaaataaaaaagaaaagaattgcacaataatttagggtattgtccaaaccaacccaattatgattctgtccgggatatcgaaaacataacttttttgcttagttaaaaaatgtggtctttgtaccttaacattttttttctttgaccctctactatacttgaccttctactttacttagtccatgtaatcctcatcagctttctccctcattctttccaactaggcactattcattattgytaaataaattaaagaaataatattgcctgagttatttacaaatatatattacatcatctcaatgtttctggttgttagtcaacattttgttttaccttgtattgcttccatttttatcagacaccttttgtccaattaagctactatattgttaactatttcagaagactccttcactttactgagtgctttcatcttttcctctgtatttctaaatttcctatcttttggcctttctagtctgtcctcagtttgctttaattattgctgtaattttgatgttcacttctttgta

SEQ ID NO: 246607 - DNA, 438 bp, Homo sapiens
gagctatgttgagcctagagaatgaattttattgtccagaagagtttttataaaacttgaaagatccattctgttcctttaaaatgtggtggaacttaccaktagggccacatagacctcattttctttgtggaaataattttaaccagttctttatttgctataaaattattcacattttcttttattagttctagtaagatgtagtgttctagtaatttgtctgctctgtgtaaatgtttttaaatgttgataattattgatagttttcccttaacatattttgaatttcattaatctactctctatgtagttatgctcacattttctttgttatcttatttttaccagaaatttttctactttgtttctgaaaagaacgacatttggttctgttgagattcttctactgttttgggcggttgcctgtttttatta

SEQ ID NO: 246608 - DNA, 522 bp, Homo sapiens
gatatggtttggctctgtgtccccacccaaatctcaacttgaattgtactcccataattcccacatgttgtaggaggaatctggtgggagataattgaatcatggatactgttctcttggtagtaaataagtctcacaagatctggtggttttatcaggggcttctgcttttgcatcttcctcattatctctttgcccgctcgcatccatgtaagacaggacttgctcctacttgycttcctccatgatagtgaggcttccccagccatgtggaactgtaagtccacttaaacctctttctttttaaattgcctagtcttgggtatatctttatcaggagtgtgaaaacgaactaatacaaagcaattcatatattgagcccttactatgggctacgcactctgcacttcatttgcatgaagcttattatataattatttaattattatttcttttggatagaaaaagatatggagattcagatatataaaataatttttccaaggtcacaagtcagagagt

SEQ ID NO: 246609 - DNA, 560 bp, Homo sapiens
ccgcatgctttctgaaattttgaaattgctttgtagaattagtgctacaatttcattgaatatattccatgtaatttacatatggagtcattttttcaatgtccttaatttaaaattgttttaaattcaaataagaaagttgaaatatagtttaaaaatgagatatttggtgaagtaaaatgataaaatatatgtaaatcatgtagccatttccaaaaattgatcttttctaattgttaaaaaagattaagaaaaaatgcttacaggatatgacctctatttggacattactaattgaaatgaaatgtttgtatgtcatttggaagagctatttgcataatgcaccttttatttcaacttgttttgcatttttcagtcatttttctttctcttacctcttaggtcttcttatacatcctgacatacatttacttgagctataaagttacacaacatgaggataaayatagaaaattagtcagctatatctatttgggtttggtcaggtgttttatttatttttgttctcatcacataactattgatccccccctcaaaaa

SEQ ID NO: 246610 - DNA, 560 bp, Homo sapiens
ccgcatgctttctgaaattttgaaattgctttgtagaattagtgctacaatttcattgaatatattccatgtaatttacatatggagtcattttttcaatgtccttaatttaaaattgttttaaattcaaataagaaagttgaaatatagtttaaaaatgagatatttggtgaagtaaaatgataaaatatatgtaaatcatgtagccatttccaaaaattgatcttttctaattgttaaaaaagattaagaaaaaatgcttacaggatatgacctctatttggacattactaattgaaatgaaatgtttgtatgtcatttggaagagctatttgcataatgcaccttttatttcaacttgttttgcatttttcagtcatttttctttctcttacctcttaggtcttcttatacatcctgacatacatttacttgagctataaagttacacaacatgaggataaacrtagaaaattagtcagctatatctatttgggtttggtcaggtgttttatttatttttgttctcatcacataactattgatccccccctcaaaaa

SEQ ID NO: 246611 - DNA, 612 bp, Homo sapiens
ggaatactaacaacagactatttggtaggaacgcgagttacctatttttgtaatgatggatatcgattgtcatccaaagaactcactacagctgtatgccaatcagatggaacatggagcaatcataacaagacccctcgctgtgttggtatgtgtgtcaagggaatttcatcacttgtttttctcttggtattttatatacctgaaattttatgtattttagaattataaaaaccaatccctaaactgaaatgtgatgtctaagtcagaaataaaagttaagtaagctatcttgtacaatgaagtactagaagacagtacaaggwcttttccatcatttttgaaaacctcagaatatttatgtcaaaaaaggcacttttattttatacaatgatgttttattttgtaaaaagtcatcctttagtcaacatgtgttttcagtacatggccccttgagaaaatttttaaagactgtgttaataaaattatattttgacatatttcactctgattttataaggataaataatgttgcaaaaattatccataactttaaacttttgttgatattcttctgtttacttacacttagaagagttcctattgctgtca

SEQ ID NO: 246612 - DNA, 419 bp, Homo sapiens
agaattcttaaccagttaggcctataatttttacatgagttagggkccaagataagttaacaaaaatatacttcaagtccctaaataagagaaggttattgaagatatctgtactagttttgatgcctgctataacaaattatttcacatttagaggcttaaaacaaaatgcatgtattttcttacaattatgtaaatcataaatctgggcttcactggcctaaaattatggtataaggaaacctgcatccctttctggaggctgtagaggagaattcattttctggtttatcctggctcctagaggctggttgcttttctgggctcatggtttcttcctccatcttcaatgctggaaacattgggcagaggctttctcaagctaccatctttctaactttcttctgctttctttttct

SEQ ID NO: 246613 - DNA, 419 bp, Homo sapiens
agaattcttaaccagttaggcctataatttttacatgagttagggtccaagataagttaacaaaaatatacttcaagtccctaaataagagaaggttattgaagatatctgtactagttttgatgcctgctataacaaattatttcacatttagaggcttaaaacaaaatgcatgtattttcttacaattatgtaaatcataaatctgggcttcactggcctaaaattatggtataaggaaacctgcatccctttctggaggctgtagaggagaattcattttctggtttatcctggctcctagaggctggttgcttttctgggctcatggtttcttcctccatcttcaatgctggaaacattgggcagaggctttctcaagctaccatctytctaactttcttctgctttctttttct

SEQ ID NO: 246614 - DNA, 534 bp, Homo sapiens
agtgcaacgagccttttaaggctctttaaaattactttcattaaaattgctcctcacttttgagaagactaaggataaaaggaaaagaaaaatagcaaaataaaaaataagaataaaagactaaaaagcagacaacatataaaagaaagactattaagaaaagcagtgatgagagggttacggagaagagaacacagtaaaatgtgtgaaagtggttaaaatacaacacgactatcttcagcaaactacaactcttaaatgtgaagtgttgaaaaattaaatgatctccaagggacagggcagaagatgtatccaaaagctttaagttcaaagacattatttaattaacaaaaawatttgagattcccaggcaaggtggctgaataggaacagttcaggtctacagctcccagcgagaccaatgcagaaggcaggtgatttctgcatttccaactgaggtacccagttcatgtcattgggactggttagacggtgggtgcagcccatggagggtgaacagaaccagggtgggta

SEQ ID NO: 246615 - DNA, 534 bp, Homo sapiens
agtgcaacgagccttttaaggctctttaaaattactttcattaaaattgctcctcacttttgagaagactaaggataaaaggaaaagaaaaatagcaaaataaaaaataagaataaaagactaaaaagcagacaacatataaaagaaagactattaagaaaagcagtgatgagagggttacggagaagagaacacagtaaaatgtgtgaaagtggttaaaatacaacacgactatcttcagcaaactacaactcttaaatgtgaagtgttgaaaaattaaatgatctccaagggacagggcagaagatgtatccaaaagctttaagttcaaagacattatttaattaacaaaaatatttgagattcccaggcaaggtggctgaataggaacagttcaggtctacagctcccagcgagaccaatgcagaargcaggtgatttctgcatttccaactgaggtacccagttcatgtcattgggactggttagacggtgggtgcagcccatggagggtgaacagaaccagggtgggta

SEQ ID NO: 246616 - DNA, 468 bp, Homo sapiens
tttgactgtaattttcctttacctacccaaatcctataaaacagccccaccccatctcccttcgctgactctcttttctgactcagcccgcctgcayccaggtgaaataaacagccatgttgctcacacaaagcctgtttggtggtctcttcacagggaagtgcatgaaactcacctgtgtgcttccccttctgcaaggagctgagagctgcgggctgagtagcaagatattcctgttgggagacctatgatggggtcagggaaaatttcctgtttcggaaggagagagaggtcttggtcaactaccagatgcttgccatccttaccacatttccacagattttattaggtagatataaatgatatctataattagatattatctaattatctataactatctaattatctataattagatattagataatatctaattatagatatttataatatctgtatattata

SEQ ID NO: 246617 - DNA, 530 bp, Homo sapiens
atagtctcagtatcaggtctgatatgtttcctcttgactttgaggccaatgaaaaaaaggacaagttctctgctacccacacagacaaaatacaacaatgaaacagggacaaaataaccacaggaaacaatcctgtttgtaaaatgtctggccgatagcagacttacaaacatactttaaacgctcccttttcctgatgatggggaatagtttaggccctaattttgtacccccattcccactaagaaacccttagtgttctctgtgatagatacctgtgtggtatctgacctgtgtcttttacagtattctttgataacaaagaatacttctcggagttaagcagattttgaagcatgtaacttgccaacatgtggtgggagacccaaaggtcattttcagtcttaagcgttcacaatttgttttaaacaaggctgatggttttttttgtagtagtaatttccaaatgacttaggaaatttctggasatgagaacgtaatcaatttggtatcagtcatttccatgttgc

SEQ ID NO: 246618 - DNA, 590 bp, Homo sapiens
ttcatagtagccttgaatgatcttttgtatttctgtggtattggttgtaatatctcctctttcatttctaattgagattatttggattttctctctttttcttcgttaatcttgctaatggtgtatctattttgtctatcttttgaaagaacagactttttatttatctttcgtattgctttttttwaaatttcatttagttctgctctgatctttgttatttcttttcttctgctgtgtttgggtttggtttgttcttgtttctctagttccttgacgtgtgaccttagattgcctatttgtgctctttcaggctttttgatgtaggtatttaatgctataaaccttcctcttagcactgcttttgctgtatcccagaggttctgataggttttgtcactagtataattcagttcaaataattttttaatttcaatcatgatttcattgttgacctaacaatcatttggagcagattacttaattttcatgtatttgcatggttttgagtgttcctttctgagttgatttttaattttcttccactgtagtttgagagagtacttgatatgatttcagttttcttaagt

SEQ ID NO: 246619 - DNA, 603 bp, Homo sapiens
attttattctccagtgtttaacataattcttggtaaatatcaggcatacaaataattattgttgaataaatgagtaaagagacaaaagcttagaaaagaggagagaatcttgtaataattttccatccaagaaactatattaatcartttcatcaaggatacattaaataaatttataagttggcagtgagattcagtatgtatttctgtgcatttaagcattcttttaaaaatgataaacactatccttaggatatttaagatagttaatgataattgcttaataatatatctagtgttcaagtttatttatttaattatttgttactgttggttgtttaaaacaagagggtcattcaattttatttttaaagcttttttttcagagacatagagttgtactttggtagatacattctttctttactacaaaaatgtatgcagaaatataacttaattaatttcttggcttataaagtttcagctcttagtctcattattttacccccattttctctctttttaccatctggttgtttttaagattttttttgtctttagttttcaacagttttactaaaacttgtataagtgtgcattctg

SEQ ID NO: 246620 - DNA, 565 bp, Homo sapiens
gcaaaactgtgggtcgattaaatcttttttttttttttgtaaattacccagtcttgggcggttctttatagcagtgtaaaaactaatacagacactatttccatcccatgttgctgcaaatgacatgatttcattatttttatggttaaatagtattccattgtgtatatatatactacattttcttcattcattcatggacacttaggttgatttcatatctttrctcttgcgaacagtgctacaataaacatgcaagtagtgcaagtatgcctttgatatattaatttcttttcctttgagtagactcaaagtagtggggttgctggatcaaatggtaattctatttttagatttttgagaaatcttcatactattttccattgtagctgtactagtttacattcccaccaaacagtgagtaagagttacctttcctttgtatccaaaccatgagttattttttgtctttttaataatagccatcctgactggggtagaatatttcattgtggttttgatttgcctttcttctatgattagtgatgtttagcatttcttatat

SEQ ID NO: 246621 - DNA, 565 bp, Homo sapiens
gcaaaactgtgggtcgattaaatcttttttttttttttgtaaattacccagtcttgggcggttctttatagcagtgtaaaaactaatacagacactatttccatcccatgttgctgcaaatgacatgatttcattatttttatggttaaatagtattccattgtgtatatatatactacattttcttcattcattcatggacacttaggttgatttcatatctttgctcttgcgaacagtgctacaataaacatgcaagtagtgcaagtatgcctttgatatattaatttcttttcctttgagtagactcaaagtagtggggttgctggatcaaatggtaattctatttttagatttttgagaaatcttcatactattttccattgtagctgtactagtttacattcccaccaaacagtgagtaagagttacctttcctttgtatccaaaccatkagttattttttgtctttttaataatagccatcctgactggggtagaatatttcattgtggttttgatttgcctttcttctatgattagtgatgtttagcatttcttatat

SEQ ID NO: 246622 - DNA, 572 bp, Homo sapiens
aaagaaaatgtatgaaaataattggattaagggaagtgccacagaaagggaaaaatttgacattaagcaatctaattaacagtagaaagcatttttaaaaaatacttggtatatgagacaatggaaaacctcttcatttacaaattccactgtaaatataaaagtacatgcaaaagttcaagcatattaaactaatggcaaattatatcttgaaaaattggaaagttttataaaattttgtagctataaaactaaactcttatattttgatagcagcttaagaaatctatatactaccacaatatttattttgaggtaataatatttgtaacayaatcttcattgtcttaaataataatataattatatgtgaactaattctgtgtattattacaataacagatttattaacaattttataataaatgattttttcttctataatgataggaatagccttttctaagcatataaacattgccaatcatcctcatccaaagtttttactgttgttttactcttaaacagccatccaaaaaatcctgcaaccagtagcaaattatattacacat

SEQ ID NO: 246623 - DNA, 576 bp, Homo sapiens
attgaatgattttgctaattatttgagttagaaattattggaaacaaacattgtagactattacagacagggggcaataaagatcttaaatatgacgactattacaaaaaatggaagatgagagccagcgtatatttcaaatattgamtaacacatgacaactgatatgcaaataattcagagggagaaatcaacatttttaagacttgtgaaatggaagatttttggtgtgattaagtcaaggagaaaagtcagaggaaaatgggcaggtaatagtggatgaggagaacatctaaatcagtggggttcttaacattgtctgcacatcatctgtgacatttttaaaaccactagtgactcgattgcacccactgaaattctcatgtaatgtgtctagagtgtgtcatgggcataggtattaaaaaaaaaactctctaggaaactcttttattaagctaggaaagttctgatctagattctgtccacttaccaaagaaattcacaagccagtaacatccactttatctggaaacttgatagaaatccagatttttagtctctatcgcagaatacctg

SEQ ID NO: 246624 - DNA, 576 bp, Homo sapiens
attgaatgattttgctaattatttgagttagaaattattggaaacaaacattgtagactattacagacagggggcaataaagatcttaaatatgacgactattacaaaaaatggaagatgagagccagcgtatatttcaaatattgactaacacatgacaactgatatgcaaataattcagagggagaaatcaacatttttaagacttgtgaaatggaagatttttggtgtgattaagtcaaggagaaaagtcagaggaaaatgggcaggtaatagtggatgaggagaacatctaaatcagtggggttcttaacattgtctgcacatcatctgtgacatttttaaaaccactagtgactcgattgcacccactgaaattctcatgtaatgtgtctagagtgtgtcatgggcataggtattaaaaaaaaaactctctaggaaactcttttattaagctaggaaagttctgatctagattctgtccacttaccaaagaaattcacaagccagtaacatccactttatctggaaacttratagaaatccagatttttagtctctatcgcagaatacctg

SEQ ID NO: 246625 - DNA, 610 bp, Homo sapiens
tgaataacgactgaggtcattgttttatatatataatattatgtaacayatttgatatctatctatacatctatatctatatctatatatatttcaggagggttactctcagttgacttatttccattttcccctccaaaccaaccagcctaccactgagcttgtaatctgaatcttctctttaattgcttttcattgaagcctccagtgtttcttagggtacctgtaggcttgactttctccatgctgtattgcaaatgacaacacaaattcactctctgatagtttttgaggccagaaattcaaaatcactttcactgggccaaagccaggactgtactgtttctggaggccctagaggataatatgctttcctgtccctttcagcttctagagcagctctttttagctcatagtcccttcttccatctttaaattcagtgctgtaggatcctctctttttcactctgcttctttcacataatattttctctgtgtcaaattggctttactcttatcagaaacttgtgagtgtatatttaaggcccatctagacaattcagataatcttctcatctaaagacctcaacctattcacatcttcaaagtc

SEQ ID NO: 246626 - DNA, 610 bp, Homo sapiens
tgaataacgactgaggtcattgttttatatatataatattatgtaacacatttgatatctatctatacatctatatctatatctatatatatttcaggagggttactctcagttgacttatttccattttcccctccaaaccaaccagcctaccactgagcttgtaatctgaatcttctctttaattgcttttcattgaagcctccagtgtttcttagggtacctgtaggcttgactttctccatgctgtattgcaaatgacaacacaaattcactctctgatagtttttgaggccagaaattcaaaatcactttcactgggccaaagccaggactgtactgtttctggaggccctagaggataatatgctttcctgtccctttcagcttctagagcagctcyttttagctcatagtcccttcttccatctttaaattcagtgctgtaggatcctctctttttcactctgcttctttcacataatattttctctgtgtcaaattggctttactcttatcagaaacttgtgagtgtatatttaaggcccatctagacaattcagataatcttctcatctaaagacctcaacctattcacatcttcaaagtc

SEQ ID NO: 246627 - DNA, 639 bp, Homo sapiens
tattattgatatgttaggcttttttcctatcatattgttcattgttttggagttgtagtatgtattttttggtcctttcatttttatcttattgattgttattgtggtttggtagacttctgtagtagtaccattagtgtcctttctttttctcctttgtgtgattactttatcagtgtgttttatacttttgtatttttttcattatggcacatatcatcctttcacttccaggtttaggactcccttgagcatttcttgtagggccagtctagcgttaacaaattccttctgcatttgcttgtccagaaagactttatttctcctttgtttatgaaggataattttgctggatctagtattctttgctagctgggatttttgttttgattttaatgtcagcactttgaatatatcctctcatacttttctggcctataaagtttctgcagaaaaattcactgttagtttgataggttttcattatgggtgattagacatttttctcttgcccttgttaggatacactatttatctttggctttaggcagtgtgactatcatgtgtcatggagaaggcctttgcactgcatattcctgaagattgctgagactcctstatctgaatttctaaatcttt

SEQ ID NO: 246628 - DNA, 548 bp, Homo sapiens
tgactccctgtattttgcagagcaggcaatacctatccagtgcagacagtgctgtagatcccttacttgtagagtttccaggcttgctgctaatacaagaagtattattataatcctgtagatgagcaaacgtaaacacagagtagttrggttgcttacacagctcatcaggtgcaaacctaaggtgaaatcatgttctcacttcaaaggcagctctttttcccaggttatccagttatccgcattaaagtccacaatgttgcaagtcctgcatgaattggcttcaactcttgttttttcttccaactttaatttcattcattgacttcatattttctgtagtttattgaaacttatgacaacccttaatcaaggcttcagaatttcttcctccattactctattatcattacttgatttaccttttgctgtccctcttcatgatccctaaatttcggaatccttcccattaggagcattttaaatactacttcctccaggaaggagtgactgttttccttctgagaagtaattagtaattcttattg

SEQ ID NO: 246629 - DNA, 548 bp, Homo sapiens
tgactccctgtattttgcagagcaggcaatacctatccagtgcagacagtgctgtagatcccttacttgtagagtttccaggcttgctgctaatacaagaagtattattataatcctgtagatgagcaaacgtaaacacagagtagttgggttgcttacacagctcatcaggtgcaaayctaaggtgaaatcatgttctcacttcaaaggcagctctttttcccaggttatccagttatccgcattaaagtccacaatgttgcaagtcctgcatgaattggcttcaactcttgttttttcttccaactttaatttcattcattgacttcatattttctgtagtttattgaaacttatgacaacccttaatcaaggcttcagaatttcttcctccattactctattatcattacttgatttaccttttgctgtccctcttcatgatccctaaatttcggaatccttcccattaggagcattttaaatactacttcctccaggaaggagtgactgttttccttctgagaagtaattagtaattcttattg

SEQ ID NO: 246630 - DNA, 621 bp, Homo sapiens
cagtttccaattctatatcttacccaagtagctcaagccagtggccagagataactcagatccatctcttctgcctascctagtagactgggctctccctttctggcccctttctttagaggaaactctgaggcatttgcccacaaacttaaagtgacccaagctctgttccctcatatatacctctagttgccacttctctctgtttctgcttgacccttcatttctgccttgtgcgactcaggaaggaagtctgccctcctgactcatgcccgccttgcccaggatctgtaagtaaaaaagtctttggagttattttctattgtgacagtgtattgaatttgtaccttccatctgccccaagggagaataaaaggttggactcacagtgcccgagcaatggtcagcctggcataaactagacatgggccaaaggagccacaagggcatctcccagtataagcggttatctcatgtgagggatcccctggttactggttggacaactagtcaccaggtcaaagaagtaccctataaaaatacccatgtccagctccccttcattttccattaggacagggttgctagccactctggtcctggaacccttatttagcttgg

SEQ ID NO: 246631 - DNA, 621 bp, Homo sapiens
cagtttccaattctatatcttacccaagtagctcaagccagtggccagagataactcagatccatctcttctgcctaccctagtagactgggctctccctttctggcccctttctttagaggaaactctgaggcatttgcccacaarcttaaagtgacccaagctctgttccctcatatatacctctagttgccacttctctctgtttctgcttgacccttcatttctgccttgtgcgactcaggaaggaagtctgccctcctgactcatgcccgccttgcccaggatctgtaagtaaaaaagtctttggagttattttctattgtgacagtgtattgaatttgtaccttccatctgccccaagggagaataaaaggttggactcacagtgcccgagcaatggtcagcctggcataaactagacatgggccaaaggagccacaagggcatctcccagtataagcggttatctcatgtgagggatcccctggttactggttggacaactagtcaccaggtcaaagaagtaccctataaaaatacccatgtccagctccccttcattttccattaggacagggttgctagccactctggtcctggaacccttatttagcttgg

SEQ ID NO: 246632 - DNA, 615 bp, Homo sapiens
aacaatggcatacacatttttctcaagtaaacatggaacattttccagaataggccatatgtgaggcctgaaattatgtcttaatagatgaaaatgtagatatgatattttatgaccacagtgagatgaagttagaagtcaataacagaaaaaatggaaaattcacaaattattaaaaatgaaacaacatattttaaaacaattaatgaaataaagaagaaattacaagggtaattagaaaattcttggagacaaacgaaaacaaaaacagaatatatcaaaatttatggatgcactaaaaccagtgctaagggggaattctgtggctataaatggtaacattaaaaaacaagacagatcccaagtcaataacctaacttaacaatttaaggaattagaaaaagragagcaaactaaatccaaagcaagctggagaaagaaaaaatcagagattagagcaaatattttaaaaatggagaatagaaaatcaatttaaagattaatgaaacaaaaaggtaattttttaaaaagaccaagaaaattgataaaattttagctagacgtacaaagaaaaaaacaaaatcctattaataacatcagaaaagaaagtggaga

SEQ ID NO: 246633 - DNA, 575 bp, Homo sapiens
tggtaaggagattgaatcaacaatcaaagattttcaggcaaagtcctagatgtgatagtttcactgatgattctaccaaacatttaaagaattaaaccagtccatctcaaacttttctaaaaattgaataggaggtaatacttccaaactcattctataaggccaacattatcttaataccagtcagatgaaattactacaagaaaactacagatcaattttccttatgagcatttacctaaaatttctcaacmaaaaaaacagaaaatcaaattcagcagtatattgaaagttttatacacaatgagcaagtagaatttattcctggaatgcaaggataattcaacatacaaaaattgatcaatgtaatatacaatattaatggaataaagaaaaaaacacataattatttcaattgacacagaaaaagctttcaagaaaattcaacatcctttcatgataaaaattctcaacaaaataagaatagactgaaatatctcaacataattaaaggcatatgttaaaaacctgcagtaaacatcacaacagtaaaagactaaaagtttttcccccaa

SEQ ID NO: 246634 - DNA, 608 bp, Homo sapiens
tgtggagaattgagaacccttatgccctgttggtaggaatgccaattgtcaattggtatagctactattgaataaaagggtaggacagttcctcaaaaattaaaaataaaattaccatataatccagctaaactactactgagtatatattttaaaaaactgataaaaaggtcttgagatatttatacacccatgttcatagcagcagtattcacaacagctaaaatgtagaagcaactcaagtgtccactgagagatgaatggataagcaaaatgtgagatacatacgatgaaatattactcaagcttaaaagtgaagaaaattatgacatatgctatataacgtgaataaaacttgaggacattatactaaatgaaatcagccggtcacaaacaggcaaataagacaaattccacttatgtgaggtacttagagtgggcaaaactacggaggcagaaaatagaatggtagtttccagaggttgaggaggggggaaattgggagtcatttttaaatgagcataaacttttarttttacaatatgaaaagagttatgaagactgatgatggtgacggctgcacaacattttgaatatattaactccac

SEQ ID NO: 246635 - DNA, 507 bp, Homo sapiens
cttccatatatacatacacatatatacgtaaattatatataatgaaacaactatatatattgggatatacttatatatatattaaaatggaacagaatatttactagtatcccttaatcactgactatgctaagttctttaagtatattataaagctgatcacactaacttatgcagaacatattactacttacgttttatatagatgagsaaacagatttgagaggagttaaataacttgatcaatacctcaaagcccataagtacgaaaacacattcaagtgaaaggccctgcttttccaagttggtaataaaccttagcctattttgtaaacatcccctaagaataacagttctgaatttcaaactgttctggttatctatctatctgtatggatgaagagctttcactaaaatagggtaacaagaattttttgaaaacaaactgaggtaagtgaaacaaaattttaacactagcgatagactaactttgaataaattaactca

SEQ ID NO: 246636 - DNA, 507 bp, Homo sapiens
cttccatatatacatacacatatatacgtaaattatatataatgaaacaactatatatattgggatatacttatatatatattaaaatggaacagaatatttactagtatcccttaatcactgactatgctaagttctttaagtatattataaagctgatcacactaacttatgcagaacatattactacttacgttttatatagatgagcaaacagatttgagaggagttaaataacttgatcaatacctcaaagcycataagtacgaaaacacattcaagtgaaaggccctgcttttccaagttggtaataaaccttagcctattttgtaaacatcccctaagaataacagttctgaatttcaaactgttctggttatctatctatctgtatggatgaagagctttcactaaaatagggtaacaagaattttttgaaaacaaactgaggtaagtgaaacaaaattttaacactagcgatagactaactttgaataaattaactca

SEQ ID NO: 246637 - DNA, 507 bp, Homo sapiens
cttccatatatacatacacatatatacgtaaattatatataatgaaacaactatatatattgggatatacttatatatatattaaaatggaacagaatatttactagtatcccttaatcactgactatgctaagttctttaagtatattataaagctgatcacactaacttatgcagaacatattactacttacgttttatatagatgagcaaacagatttgagaggagttaaataacttgatcaatacctcaaagcccataagtacgaaaacacattcaagtgaaaggccctgcttttccaagttggtaataaaccttagcctattttgtaaacatcccctaagaataacagttctgaatttcaaactgttctggttatctatctatctgtatggatgaagagctttcactaaaatagggtaacaagaattttttgaaaacaaactgaggtaagtgaaacaaaattttaacactagcratagactaactttgaataaattaactca

SEQ ID NO: 246638 - DNA, 619 bp, Homo sapiens
ttagcttcagcagcagagagctgagggcaggatgagaaaagttaaaagtcttgcttctccagggaacaaagctcttggctaggagctggggagaatggaagcccagtgttcttggctgtagctatctggggtggagtctctgccttgctgagttggggtgatggaggagtcctggggcaactgaaggcatctgccaaggccactccttggtgttgctagaaagcccccagactgaacccagttcccaactgcccaccagtcaaggcatcagttaagacctccagacttttctctggttatctttcctttcttctttcatggtttgaaatagctcctatctctacttttataattttaatgatttttatataggctgcacaaatgttattaagtagaatcagcatttggctcagcaatcagatatacaattcagaactacatgatttccatytgttcttagagatgtcatccccaccccaacacccacagccatgggtgcaggctgcccacagtagctcctctcctcattccctcccctccagactggggcacctgggcatattcaccgagtgcatgtgcagtgcccaacagggtgggaatgagctgcacacatcgcccc

SEQ ID NO: 246639 - DNA, 450 bp, Homo sapiens
gagaatggaagaggagacactttcaggtgcgcataagggagggcttacacagagctagaaccaagcctctcaattataccaatgtatccatgatagaccagggaatggatgagaatcctactgattttctggaacggctaagaggggccttggtaaagcacatgtctctatctcctgatttagtcgagggacaattaatcctaaaggataaatttattactcaggcagcccctgatattgagaggaagctgcagaaacaggtcctgggacccaayagtactttagacaacctcctgaaagtggccacctcggtcgtttataatagagacagggaggcccaggagagagagaggagacagagggaagagacacaggctttaatggccaacatgcaagcccaaaaactccagaatccctgaggtgccgctgtaaatgctacagatgtggcaa

SEQ ID NO: 246640 - DNA, 555 bp, Homo sapiens
agactcttggattcattacacccaagtgaaggcctggaaagctgatggagccacctctgtcaacccagaagagcacccaaagtaccaaggtaaagagatcagggacttcaagctaaaaattacaaaagatatgtgttaataattaacctcctaaggatattctctttatattcttgcytacgcttgctgttcttacctttgttctgttctataccatggagtacaatattgttttcagaatgattatttctgtaatctttggcattaggttctctcctttttaactcctttttttataatatacatatttgatccatgcatactaaaccctataaaacttgtttattctcacctagagaccatgaaactccaaatagtcaggcaccagagcctcagatgatggctcccttttgccagggatgcttaggtagacctctgggaggaatccaaccatcattttcccaaaaacaatgccccctgttagcaggaagtaactaagaatggccattgtccataatctaatagtagttagatgtgcctcttcagagggagaat

SEQ ID NO: 246641 - DNA, 491 bp, Homo sapiens
aaactcaaaaataagaaatgaacaattcaattaaaaaattagccaaagactctgaaagacacctcgtcaaagaagatacacagatggcaactagcctatgaaaagatgctccgcatcttatgtcatcagggaaatgcaaattaaaactatgagataccactatgtgcctgttggaatggccaaaatccagaacagtgatagcaccaaatactggtgaggatggagtcaatagggactctccttcattgctattgggaatataaagtgtccaggcactgtgggagacagtctggcagtttcttagaaaactaagcataccattaccatacaacaatcarttgtactccttggtatttaccaaaaaaagctgaaaacttatgtctgtcccaaaacctgcacacagatgtttataccagcttcattcataattgccaaaacttggaagcaatccgggtgtctgtcagtagcgaatggataaataaaccatggta

SEQ ID NO: 246642 - DNA, 543 bp, Homo sapiens
cccctcttaaaacaactttcttatacaccatgcaacatttttactgatttaaagcttaatgagcrttggcaagaaatatattaaaacactgtcaccatcacctaatataacatgatatgagattagaattagagtcattccaggttgttaagtaaacaaaaagcatccaaatacctaaagagttacagcgctcaatctgattggaaaccggctgcaatgatgcaaacctagagtcaggcctgcagctcttcagtttcacaaacagcgccttcttcagggcacaggtgaaataccgagtgcctctgaaggttccatccgtacagcctgcacactcatcttcctgaaaaagaaatgcttcaatatgcattataccgtgccttacagagatagtatacaaagaactaaggtttctaagacctgtttctagtataccctttctcaccactccctcttcgcacctgtactgagaacctcatcaagaaaaaggagttgagtaatcagtgcttcagcccacagctactgatttaagaagtgacttcctta

SEQ ID NO: 246643 - DNA, 653 bp, Homo sapiens
ctttgttaggctttgaaggtagcctggcaggactggagagccaactggatggccggtggtgacagttctgcaggtgacactagggaggagctccaaagattaggaatgtgagcaggggggcactggagttggaaactgtggctaccttctgtcaaaggctgtctgagagggggtcaaatatcagctctgaagaaraagacattccatcagaattctatacagacaaaggggcacaaaccacctctaattgccctccagcaattacacaccaaatatttcttattactttgtcacaactgtgttcatggcccaaaactacttgggtcatgaagcaaagctttcaaagttaaatgaattataagtgattaccaactcagaaaaagataaatatgggatggaaagcaaggtaagataaattcagctggcaattttgtgtgattaaaacaaacctgattaaagatattaaaagatatagaagataattccaccaaacagcatgagtaaaaatgtacagagcagccctattcattctaatcaaaagctggaaacaagctattctacagaagaatagagaaacaaattatggtctattcatacaatggaatactacatagcaataaaaaaggaacaaactactgataaacagggcaaca

SEQ ID NO: 246644 - DNA, 562 bp, Homo sapiens
gaaactacacacaaatatttataaaagcattattcataatagccaaaaactggaaacaaaccagatgtccttcaacagctaaacagttaaacaaactgatacatccataatatggaatattactcaggaataaacaggaacaatccatggatatatataaaataatgtagataaatctccagagaattatgctcagtgaaaaaagagccagtctcaaaaggttacatactgtacaactccatttatgtaacattcttgaaatgactgaattacagaaatcgasagcagatgagtggttgtcagaggttaaggatggggcaggaggaagagggaatttgtgcggcagtaaaagggcaagataagagatctttgtgggatgggaatgttctgcttcttgattgtatcagggtcaacattctggttgtgatgttgcacacgtcttgttttacaacatgttaatgttaccgctgggaaaaattggctaaagggcacacagggtccctctctctgcatgtgaatctataataatctgaaatgctgtaaagcatatatctgcaaaagg

SEQ ID NO: 246645 - DNA, 546 bp, Homo sapiens
tgttccatttatagagcacaggcagagtagatttagcataattcttaaggattttgggattttcagaatcctggcttcaacttaaagtcaccaactgcattaacccctaacaaaagagtcagcctatcctttgaagctttgaagccaggcattgactactcatctcagctatgaaagtcttagatggtatcttcttccaatagaaggctgttttgcctacactgaaaatcttttatttaatgtagccactttcatcaattaacttagctagatcttctgataacttgcagcagtttctatatcagcacttgctgcttcatmttgcacttttctgttatggtgatgacatctttccttaaagtttatgaaccaacctgtgcgagcttccaacttttcttctgcagctttcttacctctctcagcctttcagaattgaagagagttagggccttgctctggattaggctttggcttaagggaatgtgctggtttgatcttctatccagataactaaacctttctccatatcagcaataaggctgtttt

SEQ ID NO: 246646 - DNA, 501 bp, Homo sapiens
ttcctgacttctatcaactgattgtcatgccaatgagtctgagacaaagttttttcttctctcagacatcaatgaatttctgtcattatatactgtaatatttataacagtttggggaacattatttcacctgggataagtgctatcaggcctgattgggtgataggttgcttctctaaattttagagctatgtaaagagcataataatgagctttccttttcttatttctgtactttataaattgaagtgtattcagggactkgacatttgaccaattcaacttctagaaaattagatattcacaatgctctgttgtgtaaccatcaccgtcaaccgaaaataaaattggggaggataattttttggactttgatataacttaagaaccttaaaacttgagcttaatctcaaagggaaaatatgatttaattttgaatgttaattacttttgagaggcagtatagcataattccttttgagaggcagaattttatgctaa

SEQ ID NO: 246647 - DNA, 445 bp, Homo sapiens
tttttcttctctcagacatcaatgaatttctgtcattatatactgtaatatttataacagtttggggaacattatttcacctgggataagtgctatcaggcctgattgggtgataggttgcttctctaaattttagagctatgtaaagagcataataatgagctttccttttcttatttctgtactttataaattgaagtgtattcagggactggacatttgaccaattcaacttctagaaaattagatattcacaatgctctgttgtgtaaccatcaccktcaaccgaaaataaaattggggaggataattttttggactttgatataacttaagaaccttaaaacttgagcttaatctcaaagggaaaatatgatttaattttgaatgttaattacttttgagaggcagtatagcataattccttttgagaggcagaatttta

SEQ ID NO: 246648 - DNA, 622 bp, Homo sapiens
aaacaccacctgtttcccaaaaacctatggaaaattaaatttaaaaaagaagtctgttataattcttatgcttccttcttccttgacatcaaaggtgctagctttctccctggcttctttttaaatttcctcactgtctttgattttctataataaatgtgatttttataggtatgttctttctttgctctgttttgtttttgtgtttttttctgtttagttctctctaaagttttttgaatctgtggtttggtgatttggtatcagtcaatttaaaaaggttttggccatttttaaattttacatttrtttctaacagctttattgaaatactatttataaagcatatcattcactcattaaaagttttcaatatgttcgcaaatatgttcaaccatcaccaaagtcattttagaacattcttaccacatcaaaaaaaataattaatgccctttacctattaccctatattcccagccctgcctgcattccccaagcgatcactaatctactttctgtctctgtagattttcctattctggacaattatgaatgaaattatataaaatttggtattttgtgactggcttctttcaattatgataagttttgggccattact

SEQ ID NO: 246649 - DNA, 636 bp, Homo sapiens
tgctagataacaaaacaactaccatgataatagcrttaatccattcataagggcagagacttcaatattcaatcaccttccaaaggcccacctctcaacaatgttacaattgcaatcaagtttccaacacatgaacttttgtggatcacattcaaactatatcatttagcccttggagcctaaaattaatgtccttccctcatgttcaggatacattcattccatcttaatagtttctaattcttaactcattccagcaccaactgaaaagtacaaagtctcatctaaaccagatatgggtaagattcaaggcacaattcatcccaaggcaaatttatccagctctgagcctataacatcaaaacaagttatctacctccaaaattcagtggtagggcaggcacaggatagacactgtcatttcaaaagagagaaatagacaagaaaagaggaataactggtcctgagaaagtccaaaaccaacaggaaaaacaacttcaagtttgtaagctggagaataatctccctgacttcatgtctagcatcctgagcatgcgaggtgggccctgggcctccaaggcactaaagggaacccattaccacagctttgttgggctcagtccaggtagcagcccc

SEQ ID NO: 246650 - DNA, 555 bp, Homo sapiens
cagtcactatagaagaatagaatactaatttccatatctaccaggtagcaaaaaaagccagtctaatcaaatttaaagtgaacaaccctttgtaatttttcacttttcttattttactgagccacctcttgtcttctccctcattctacctttagaacacccagtcacccctgcatcaatcagaatgaaacttacctttttttctactgtcagtagtcactgaatgtaatacgatgtcactattttagctgtctttctgtgtttatttttgacaatccactgctttatcctgaagcccagtttgtgtggtattgaggtaaatggagaatattcattaaagatttctttcaattaacaaattgagaayaggaatcagattgaaagaaatctttttcttttatagaatagggttgaaaacttttctcctgatatgccaattaggatataagactctctttagacactatcatttttatagacagaggtcaatgtttcaagttcttaaaggaaataatcatgttcattatttgaatcttcataagattttggcaatga

SEQ ID NO: 246651 - DNA, 624 bp, Homo sapiens
caagttcttaaaggaaataatcatgttcattatttgaatcttcataagattttggcaatgacatctctgaaggattacatacattttacttccttagaggaatttttatggttacaccctagctgtcattgccctcctgcaaatggttcactgatcattccctgtgtttcattttctgctgtttgaaaccaatcacaaagaggtttctgttttcaggtgatactgctttctactttccatccccaactgttttttgtagacatctatttctttcatatctaccagttttaccagttttgacatgtattagagacaggaattaatattattaccatccaaacatatttcaatagttatgtcacacagtgtactatgrcaatgattcttttacaaatggctgcatagacgcataacaaaataaacatctagtacatttggaatagacccattctttttgcttagaatcagaaaaattttgagaaatttctatttttattcaggtaaaaaatagttaatgaatttcttttgcagatgagtcatttagtggagaacttctcttgacacattcaaatatattgacaatcaaatttgagtaattctgtgagagtgaggatgtttgtgttg

SEQ ID NO: 246652 - DNA, 607 bp, Homo sapiens
tactgaatcctcaacaagtagcattgtgcctgatatggtttggctgtgtccccacccaaatctcatcttgaattcccaagtgctgtgggagggacccagtgagaggtaactgaatcatgggggcacatctttcccatggtgttctcatgatggtaggtgggtctcacgagatctaataattccataaagaggagaaatgtctccagggcmtgtcagaggtctttacggcagcccctaccatgacaggcccgaagtctaggaggaaaaggtagttgtgtgggctgggcccagggtccccatgctgtgtgcagcctggggacttggtgccccacatcccagccactccagccatgtatgaaaggggccaatgtagaggtccagccatggcttcagaaggtgcaagtctcaagccttggcagcttccatgtggtgttgagtctgcaagtccacaaacgtcaagagtttggaaatttctgcctagatttccgaagatgtatggaaaaacctggatttccaggcagaagtttgctgcagggacagtgctctcatggagaacctcttctagggcagtgtggaaggtaaatgtgggggctctgacattaggcaa

SEQ ID NO: 246653 - DNA, 607 bp, Homo sapiens
tactgaatcctcaacaagtagcattgtgcctgatatggtttggctgtgtccccacccaaatctcatcttgaattcccaagtgctgtgggagggacccagtgagaggtaactgaatcatgggggcacatctttcccatggtgttctcatgatggtaggtgggtctcacgagatctaataattccataaagaggagaaatgtctccagggcatgtcagaggtctttacggcagcccctaccatgacaggcccgaagtctaggaggaaaaggtagttgtgtgggctgggcccagggtccccatgctgtgtgcagcctggggacttgrtgccccacatcccagccactccagccatgtatgaaaggggccaatgtagaggtccagccatggcttcagaaggtgcaagtctcaagccttggcagcttccatgtggtgttgagtctgcaagtccacaaacgtcaagagtttggaaatttctgcctagatttccgaagatgtatggaaaaacctggatttccaggcagaagtttgctgcagggacagtgctctcatggagaacctcttctagggcagtgtggaaggtaaatgtgggggctctgacattaggcaa

SEQ ID NO: 246654 - DNA, 548 bp, Homo sapiens
ggggccagcggtggcaagatatggtttggctatgtccccacccaaatctcatcctaaatacccgtgtgttgtgggagagacctggtgggaggtaactggatcatggaggcaggtctttcccatagtgctcttgtagtggtgggtgggtttcatgagatccgatggtattrtaaaggggcagtttccctacacaagttctctttttgctagctgccatccatgtaagacatgacttgctcctccttgctttctgccatgatcatgaggcttccccagtgacacagaactataagtctaattaatcttctttttttttttttggtaaattacctagtcttgggtgtgtctttatcagcaacatggaaatggactaatacagtacctaatatgcaatttcttaaatgagtagctgactgaaggaatgcattgatggttgaatttcaaggtatgcatatatttaataaatgtttattatcaggtgataaatatttggttatcatttttggattaatttagactaggatttaccaatcccaatcctattaaca

SEQ ID NO: 246655 - DNA, 587 bp, Homo sapiens
ctgaaaggaaaagagatactgaatgaacagcatattctctgggtatgggattgccttccttgaccacagagctttagagatcaccactacccaaaggtttattgagtgtatattccaccgacacacaaccctgaaaaatatcacataagagcaaaggacacattacatcaaatgaattgtgatgacatacayaggatcttggaactcacttgtcctattacataacatgccatccagaagtttccaatcagctagaatgatggaaaggcttttgaagagtaaactgacatgtcatcttggaaacgattccatcagtagcttggaagtcatcttcaaaagtgcagtttacagcttaatcaatgaccattatatggtgttttatctctaacaggcaaaaacacatggtcccaggaacaaaataatgttactagaagtaatatttttaccttaattctcagtgaaccatttaggtaatttgtgtttgccatacctggaattctagaatttgcacatctagagttcttgttcccagagaaaatactactaccaccagacacagcaataatcccattatattgtaaattttg

SEQ ID NO: 246656 - DNA, 599 bp, Homo sapiens
ttgccctcactttctatctcatgttcacttcttttttcccagctataagccttgctaagtaacaccccaaggcccatcaatgagtattaggtcaaccagacaacagtttcttataaatatcactggctccctctttcttagctcactttagccgcaggctattttggggatctcagatggattgtgttcgtgattcttctgatattgcaatccttgtttctgatctctctaccaactttaccttattacgtatctcatagtggttctgtgattaaactctgactaaattaaactcctattgtaatgattgattctggcaagaattataaatgaatgtcaagtttttaacttaaggggccatttcctccttcctcccatagtaactaaatctcaaataatagatttcttactggctaatgctggccatcagggaagtatctatttagcctggttacattaacgtaacwtactatcattaatattagaaaagaaaacattcagtgccatgaaatatgatgtggtgtgtgtttgtgtgatgtataacatatatgtatatacacatatgtacacatataattgtactatacacaatttagtat

SEQ ID NO: 246657 - DNA, 599 bp, Homo sapiens
ttgccctcactttctatctcatgttcacttcttttttcccagctataagccttgctaagtaacaccccaaggcccatcaatgagtattaggtcaaccagacaacagtttcttataaatatcactggctccctctttcttagctcactttagccgcaggctattttggggatctcagatggattgtgttcgtgattcttctgatattgcaatccttgtttctgatctctctaccaactttaccttattacgtatctcatagtggttctgtgattaaactctgactaaattaaactcctattgtaatgattgattctggcaagaattataaatgaatgtcaagtttttaacttaaggggccatttcctccttcctcccatagtaactaaatctcaaataatagatttcttactggctaatgctggccatcagggaagtatctatttagcctggttacattaacgtaacatactatcattaatattagaaaagaaaacatkcagtgccatgaaatatgatgtggtgtgtgtttgtgtgatgtataacatatatgtatatacacatatgtacacatataattgtactatacacaatttagtat

SEQ ID NO: 246658 - DNA, 584 bp, Homo sapiens
aatattaaaaaagctaaaaggtgaattatattatactgaaactacaactatgttttcaatgatatgactgaatcagattttataagccaatttcagtgaaaagaaagagctctttccgagaagtgtgtttaatatttaacacaaaatgaaattaaatatttatttgttttttcttgaaacatttatttatttaagcatgctttggtaaatttcctcaattcatttttactaaagaaatattctctctatagtatcgtttgtaaaggcaggaaattaatgggttttcattttgttgtagagaaatggcactttaatagcgttactattttaatgtactgctatggttcaaatgagtgtatttcatgttttagtacttagaatgtgaatcattaaagagcttatttgttacacttttgtgacatatgttgaatttgtttttttctggttaagaacacaaaacatatatcttttaaatttttctattacttccattgttattyattaaatgagtcccattgtaatttagttttattttatattactttatgttatatttatatcatttcattttaatttgagagttc

SEQ ID NO: 246659 - DNA, 499 bp, Homo sapiens
catctgttttttttgtgtggctaacaaggtaaggattatatttgaatttttaaataatttttaaataattttaaaaattcaaaaaattcaaaaaatagttacatgtagtaatgtcaaaagtaaacaaaattaaaacttcagtgttcataaattaaatcttaccaaaacacagcaattctaattcatttacttgttattcatgatgcttttgtgctgcagtggcagagttgggtagtacaacagagaccatatggctccaaaactttaaataattaccytctgtccttttatagataaaggttgctaaccctttctctagagtaataaaagatttagctgcatgaccacccagctaaagagtaactttcccaggcttctttgaggcagatagggcattgtgacagagttctgacagcgaatgtggaagcagacattatttgggcaacgtcaatatagtgctgtgtacgccaacagttatgttctccattccttctttttc

SEQ ID NO: 246660 - DNA, 563 bp, Homo sapiens
atctgttttttttgtgtggctaacaaggtaaggattatatttgaatttttaaataatttttaaataattttaaaaattcaaaaaattcaaaaaatagttacatgtagtaatgtcaaaagtaaacaaaattaaaacttcagtgttcataaattaaatcttaccaaaacacagcaattctaattcatttacttgttattcatgatgcttttgtgctgcagtggcagagttgggtagtacaacagagaccatatggctccaaaactttaaataattaccctctgtccttttatagataaaggttgctaaccctttctctagagtaataaaagatttagctgcatgaccacccagctaaagagtaactttcccaggcttctttgaggcagatagggcattgtgacagagttctgacagcgaatgtggaagcagacattatttgggcaacgtcaatatagtgctgtgtaygccaacagttatgttctccattccttctttttcactagctggcatggcacaataaggaaataaacttgtatttttgtttaaggtattgtcattttggt

SEQ ID NO: 246661 - DNA, 544 bp, Homo sapiens
gagtaaagcagattgccctccataatatgggtgagcctcatgcctcattcaatcagttaaaggaagtccttactagagcaaagactgactttcccaaggaagaatgtgagccaaatccttaaaatctctctctctctgtacacacacacacacacacacacacaacctgttggttatttttctccagagaaccctgactaatacaagggggtaggagggaaacactgggaggttgcaatttggtgggggcaaagccaattttaaatagagatattaaatatatataattaatatgtaataatattttataataatataatatataattacayattatatgctataacatattataatatataatacataaatataattatttctatatctataattcttttcacatgggctcctatgttgcttagggtaaaatgcagttcctagtcacagacagaattatagcacactgagcctcaaactcctggcctcaagtgatcctctagcctcagcctcccaagtagctgggacaacaggcttgtgccac

SEQ ID NO: 246662 - DNA, 656 bp, Homo sapiens
agattaaagatgtcattgacatcttatgacagcactcacaggaagaagggtcactgttgtagccrtctgtgaaaaagaatactcaaaatattgttttatgtttataaattgcccttgattaagccaaaaatgtatattaactctaaagaataaatatttctgagttaaggaagtgttcttaataaacaagcataccaatgagatgctatttttaagtaaatacaaattcttctctttttcactttattttgcatgacattacattagctagcctgagttatccagctgacacaagttatatgacgttgtgattagggttttttttttttgagatagagtcttcctctgtcgcccaggctggagtacagcggcacaatctcggctcactgcaacctccccttcctgggtccaagcgattccactgcctcagcctcctgagtagctgggattacaggcatgcgccaccacaccaggctaatttttgtatttttagtagaggcagggtttcaccatattggccaggcttgtcttgaactcctgacctcaagtgatccacctgcctgagcctcccaaattgctgggattccaggcatgagccaccgtgcccagcttgattaggatttttatagcaaaagtaatatggattgaaatatttt

SEQ ID NO: 246663 - DNA, 513 bp, Homo sapiens
caccatattggccaggcttgtcttgaactcctgacctcaagtgatccacctgcctgagcctcccaaattgctgggattccaggcatgagccaccgtgcccagcttgattaggatttttatagcaaaagtaatatggattgaaatattttaagtttttgacattcaaaatagtattagctctcaatgtaacagaatttaaagccagtttcactaagagaagacatgttataaaatctgtatcatataaaagccaatctagagagttcagagctgctattatatttgggatatatcatctcaatttatgatggctaggctatacatgtttctgccaagggaagaagggttatrtgatttaaaggatatgaaaggcctgatgctaggcccttcttgacctataaagcaaggaaattatggaagagtgagtggccattatttacagtattggttttactcctactcattttctacagtctttggaagaagaggagctattcgaaatctgtaagaaga

SEQ ID NO: 246664 - DNA, 531 bp, Homo sapiens
tgacattgaaattagtggcagaaacccctaaataaactaaagggaggattgtggcttctcgaggaagctatccatatggtcacttccagcataaacaatgtaataaaaatataccatcaggaagtaggctctagaaatgtgatactattgcaaaattagtcatttgtccatggtatttacatagtgtatacagaacccatgatgagggactaaaatgcaccgaaaacattaatagactagcataggtctggagcagaaggaaaggatttagtgattgatttctacctactggcaaataatctaggtagaatatttgcaccacagctggtaatacatattagggagcaaagcagtccagagactccacaagagagctgcatagcttactaaagatgaacaacataattccctgttaaccagagaacacaaaaacacctccaatataggttccatcttgggaaacraaacagaagaggagtaattataaagaggtaccactgtcttaaaaatattgaattatcccaaatttta

SEQ ID NO: 246665 - DNA, 564 bp, Homo sapiens
ttaatgggtgcagcacaacaacatggcacatgtatacctatgtaactaacctgcacgttgtgcacatgtaccctagaacttaaaatataataaaaataaataaataaggaataatttcaatttaacaaatatacattttaacctttattacatcaatgaacagtttatatcagcttgaagaaaaatataattcactctaataaatatgttccatttctcaacaatgactattgtgttagagctaaactataaagcacaaacgtaatttaaattatttcacacctcctcatttgtaaaaatttctacttttatttatcttttctaattgatcttttttttttgctcgttcttgagaggacacagtagaaaatgaaaaaacagcagggartaaagttttgatagtatcattacacaggagggttttctccttatagaagttctcttactgttatcagtgttaaaacgcctttcattatgtgtgtgtctttgaaaattatattaataatttttaaaagatccaaagcttcatttgggactggacacaaaggggtggataattagttg

SEQ ID NO: 246666 - DNA, 564 bp, Homo sapiens
ttaatgggtgcagcacaacaacatggcacatgtatacctatgtaactaacctgcacgttgtgcacatgtaccctagaacttaaaatataataaaaataaataaataaggaataatttcaatttaacaaatatacattttaacctttattacatcaatgaacagtttatatcagcttgaagaaaaatataattcactctaataaatatgttccatttctcaacaatgactattgtgttagagctaaactataaagcacaaacgtaatttaaattatttcacacctcctcatttgtaaaaatttctacttttatttatcttttctaattgatcttttttttttgctcgttcttgagaggacacagtagaaaatgaaaaaacagcagggagtaaarttttgatagtatcattacacaggagggttttctccttatagaagttctcttactgttatcagtgttaaaacgcctttcattatgtgtgtgtctttgaaaattatattaataatttttaaaagatccaaagcttcatttgggactggacacaaaggggtggataattagttg

SEQ ID NO: 246667 - DNA, 564 bp, Homo sapiens
ttaatgggtgcagcacaacaacatggcacatgtatacctatgtaactaacctgcacgttgtgcacatgtaccctagaacttaaaatataataaaaataaataaataaggaataatttcaatttaacaaatatacattttaacctttattacatcaatgaacagtttatatcagcttgaagaaaaatataattcactctaataaatatgttccatttctcaacaatgactattgtgttagagctaaactataaagcacaaacgtaatttaaattatttcacacctcctcatttgtaaaaatttctacttttatttatcttttctaattgatcttttttttttgctcgttcttgagaggacacagtagaaaatgaaaaaacagcagggagtaaagttttgatagtatcattacacaggagggttttctcmttatagaagttctcttactgttatcagtgttaaaacgcctttcattatgtgtgtgtctttgaaaattatattaataatttttaaaagatccaaagcttcatttgggactggacacaaaggggtggataattagttg

SEQ ID NO: 246668 - DNA, 317 bp, Homo sapiens
catgaataactgctcggtatcttggctattttcttccctgtaaaagcaaaaacaaaaataaaatgacaataacaacaggcatatactgtttaaaattctayccaccaacaatattttatttcactagtgttttgcagaatcatacctaaatatgaaaatagcactaaactaggaactttcatgtgattgcagggtgctataaagtatgtctttttttcttcttcttcctcattcagccagtcatagtgaatcctccatgaggtcagagattgaggttgagagggagagtaggcaatgtggcccttccttaaaaactg

SEQ ID NO: 246669 - DNA, 601 bp, Homo sapiens
cattgcatacatgtgcatccaatgatcatgacagcaacaggcagttttactaaggtaggcccactgccagcacgcatgggaccccctgtgggagccaattttggttagaggacaccctcctaaccaaaggtgattgctgaatattcctggatggcattctagcatacttttattaaaccttctcttctttctcctttcactcggggtcagtgttccactgtgstcagatggctctctcagactcctttggctgtgtccctctcatctgtcacacggtattttctctaataaaatatttccctgtttaattccctcttgatagttatcaatgtgttgaacattagttcgaaattcaccctaatctctggatttatgaaaatgaatctgagccctttcaatatctttcctctgacagctggcatcacaatatgctttgcaatggggggcacaggaaaggcattccagggggaaaaaagactttttcttcctaattccagtgtgctcatttgtgcaggcttctgtttacagtttcctccagtaccagtgtccttcagcactcagcttttcacattcctagcttctgaggtgctcagtggctcgc

SEQ ID NO: 246670 - DNA, 439 bp, Homo sapiens
gcggagcaactgcctgcatttggctggatatggttgggatagatagtaatcgtgggccaaaaatgtcaaggtttggaaccagaaataaacttaccttattaataaatctgacacttatgaagtttgtggttttggactataaaatggaagacttcagttgaggttttgtaataattaggtaggtctcttgagcattataaataatgaatgtaatatacatagttatttctataggtatgttgacagttataataacatatttaaataagaatatagtagatattaaacatgttaaaatagtatggttcaattaataaatgtatcacaaactgacttctgtgatgkatacattttatttttaaatgttcatatagcatacgaaataaaataatcatgtgcttaggccacgaaaaatctcaaaaatattacctagatttgt

SEQ ID NO: 246671 - DNA, 598 bp, Homo sapiens
ctgagaccgcaccgttgcactccgtcctatgcatagtttattagtccattttcacactgctataaagaaccacctgagactgggtaatttataaagaaaagaagattaattaactcacagttccgcatggctggggaggcctcaggaagctcacagtcacgtagtgggcaaaggagaagcaaggyaggccttacatggtggcaggagagacagagccaggggaacatacttttgaaccatcagatctcgtgagaactcactcaccatcacgagaacaggaaaactgccctcatgatcctatatatatgtacacacattcacacacatatatgtgtgtatatatttatatgacattatataagtatacatacacatacataagacattatatataatgtctactatttcaccgtttcagcaaagtttgtaccacatcacatttgtgatctccatcatatacattaacaacttaattttattcatgtttctttatgattcaattaaatttaagtacctaaaatatttttgagataccaggcttaaactgccacatatatatgactaagaaaaatacttttatattttgcatgtatataat

SEQ ID NO: 246672 - DNA, 626 bp, Homo sapiens
cttcccccaatgcccatgcccatatttacagttttgcttcccatggtttcaattacccatggtcaaataagttctgaaaatattatctagaaaattccataaataaataatatgtaagttttaaatcacagacctttctgagtagcatgttaaaatctagcactcttctctcaggccccatcccacctgagatgtgaataatctctttgttcagcatatccatgctgtgtatgccaactgcctgttagtcacttagtagacactttggttattacattaactgatagtatcacagtgcttatattcaggtaacccttattttactcaattatgattccaaagcacaagagtagtgatgctggcaattcggatatgccaaggaaaacgaaggggggaaaaggtgaaaggggtagaacattacaataagatattttgagagagaaagagagactttatcataagcatgcacatatagagaaaacacatagatacgcatatctatgtttgggatatgtatatagartttggtactattcgtggtttcaagcatccactgagggtcttgaaatgtatgctgcatggataagaggtaactattgaaatatacataatattatgtatgagct

SEQ ID NO: 246673 - DNA, 498 bp, Homo sapiens
ttttgctaaattcattttcactgtgatatcatttttgcagatttttacagattgtctacacatgcaatgatgccatctgcaaataagcatgtttatttctccttgtcatttctgtttttcttatattaatacttcttactcgagttcactgactagaatttctaacaaratgttagataaaactgacgagacaaatttcttgtcttttttattaccttagtttcaaagaactcacccattcacagttaagtattattttagaggtagaattttatacacaatcatcatcattttaaaggaactaactacaatttcatatcagctcaatttttttatgtttatgatgagcgcatgttgaattttgtgagatctattgttcatgattgtaacaatattttacattaaattaatggagatacagatgttgtattatcttttcatctcggataaaatttacttgtccctgatgcattattacttttatatcttactggataa

SEQ ID NO: 246674 - DNA, 498 bp, Homo sapiens
ttttgctaaattcattttcactgtgatatcatttttgcagatttttacagattgtctacacatgcaatgatgccatctgcaaataagcatgtttatttctccttgtcatttctgtttttcttatattaatacttcttactcgagttcactgactagaatttctaacaaaatgttagataaaactgacgagacaaatttcttgtcttttttattaccttagtttcaaagaactcacccattcacagttaagtattattttagaggtagaattttatacayaatcatcatcattttaaaggaactaactacaatttcatatcagctcaatttttttatgtttatgatgagcgcatgttgaattttgtgagatctattgttcatgattgtaacaatattttacattaaattaatggagatacagatgttgtattatcttttcatctcggataaaatttacttgtccctgatgcattattacttttatatcttactggataa

SEQ ID NO: 246675 - DNA, 498 bp, Homo sapiens
ttttgctaaattcattttcactgtgatatcatttttgcagatttttacagattgtctacacatgcaatgatgccatctgcaaataagcatgtttatttctccttgtcatttctgtttttcttatattaatacttcttactcgagttcactgactagaatttctaacaaaatgttagataaaactgacgagacaaatttcttgtcttttttattaccttagtttcaaagaactcacccattcacagttaagtattattttagaggtagaattttatacacmatcatcatcattttaaaggaactaactacaatttcatatcagctcaatttttttatgtttatgatgagcgcatgttgaattttgtgagatctattgttcatgattgtaacaatattttacattaaattaatggagatacagatgttgtattatcttttcatctcggataaaatttacttgtccctgatgcattattacttttatatcttactggataa

SEQ ID NO: 246676 - DNA, 498 bp, Homo sapiens
ttttgctaaattcattttcactgtgatatcatttttgcagatttttacagattgtctacacatgcaatgatgccatctgcaaataagcatgtttatttctccttgtcatttctgtttttcttatattaatacttcttactcgagttcactgactagaatttctaacaaaatgttagataaaactgacgagacaaatttcttgtcttttttattaccttagtttcaaagaactcacccattcacagttaagtattattttagaggtagaattttatacacaatcatcatcattttaaaggaactaactacaatttcatatcagctcaatttttttatgtttatgatgagcgcatgttgaattttgtragatctattgttcatgattgtaacaatattttacattaaattaatggagatacagatgttgtattatcttttcatctcggataaaatttacttgtccctgatgcattattacttttatatcttactggataa

SEQ ID NO: 246677 - DNA, 591 bp, Homo sapiens
aggtctcacaaacttaacaatgaagaattataagttcgctttaaaccacaggctagaaactaatgtcccatgggccaaatctgtttttgtaaataaaattttgctgaaacattgccatacccattactcaggaactgtctatggcagctttcatgccacaacagaaaatggagtcgtcgtagcagcggtttcaatacctatcatctggcctgtaaaagaatatgtttccctgtaccayttcttgggtgttttactgctgtcacagttcattcctgcagttattacaaaatatattagactgggaaacttatagacagcatacatttcttgcttacagtcatggagtctggaagtccaatatcatagtgctgggaaggttagtgtctggtgaggactgagtctctgcttctaaaatggggccttgagtgctatttccaaattctatgacctcacagtgaggaggagcagtggggcaaaagggattagctagttcttcctggcccttttataaggtccttgatcctattcatgaggatattgccctcatgactaattacctcccaaaggccctacctcttgatactgttggat

SEQ ID NO: 246678 - DNA, 591 bp, Homo sapiens
aggtctcacaaacttaacaatgaagaattataagttcgctttaaaccacaggctagaaactaatgtcccatgggccaaatctgtttttgtaaataaaattttgctgaaacattgccatacccattactcaggaactgtctatggcagctttcatgccacaacagaaaatggagtcgtcgtagcagcggtttcaatacctatcatctggcctgtaaaagaatatgtttccctgtaccatttcttgggtgttttactgctgtcacagttcattcctgcagttattacaaaatatattagactgggaaacttatagacagcatacatttcttgcttacagtcatggagtctggaagtccaatatcatagtgctgggaaggttagtgtctgrtgaggactgagtctctgcttctaaaatggggccttgagtgctatttccaaattctatgacctcacagtgaggaggagcagtggggcaaaagggattagctagttcttcctggcccttttataaggtccttgatcctattcatgaggatattgccctcatgactaattacctcccaaaggccctacctcttgatactgttggat

SEQ ID NO: 246679 - DNA, 620 bp, Homo sapiens
catgttgacatattccatctgaatattatgatgacctttaaaggaatgtactcctaggcaatattcatacatatctattttatcctttgataaatgcacatacacttgtgggatagcctttgagatatttgtttaagcaccacttagaaatcagaatttcctacaagtaaaaacaaacagaatagttrtaaccatctttcacataattttttctcgagtaagtttaatatatcttggacaagtttgggcacagtaatgtttttctcacaaatgtctgcaaaaaaaaagatattaactatttttcatgaactgtagttggaaagtaaactacttatcaaaatatacattaactaaaaatatgtttatgaaaacattattgggaagatattgctagtagaacttttgtcatcccagaaacattataaaacatttgttttatattgaaactatatatttggtaaatacatgtttgctttattgtatttgcatttattgatattaaaatatatctattgacaaagtagcatgagatttcaagatatgcagaatcttatatcagctcatactgctttaacatatgttaaataaggaataactagtaaatatcattgaagtatatt

SEQ ID NO: 246680 - DNA, 566 bp, Homo sapiens
atgttagccaggctgatctcaaactcctgaacttgtgatccacctgcctctgcctcccaaagtgctgggattgcagacatgagccaccacgtccagcctgatatacttttcttttgtcatgtaaacatgttttactttacttttgaacagatttataacacatcttttgaatctttgtttttgtttacccaaacatctaggcctgcttgtaatcagtaattaggtcatgttgaccatactattttcctagtatggctaaatgattttttttctgtttcttttgatatctagtaatttttrgtttaaaattgaacattgcacacaaattattgggatgtttctggaattttgtttttgttattatgtgaatttttgttgttgttgttctagtgggtaacttgcctggtttcaacctatagaatctgtcttcactacgtaatattcagctgttgatctgttgataattcttcttaggtttcgtttgctttttttttctacctcccatttgctgctatctatcttggtcccctagaaaatctcccctttgtctgtgtagttagtgatga

SEQ ID NO: 246681 - DNA, 566 bp, Homo sapiens
atgttagccaggctgatctcaaactcctgaacttgtgatccacctgcctctgcctcccaaagtgctgggattgcagacatgagccaccacgtccagcctgatatacttttcttttgtcatgtaaacatgttttactttacttttgaacagatttataacacatcttttgaatctttgtttttgtttacccaaacatctaggcctgcttgtaatcagtaattaggtcatgttgaccatactattttcctagtatggctaaatgattttttttctgtttcttttgatatctagtaatttttggtttaaaattgaacattgcayacaaattattgggatgtttctggaattttgtttttgttattatgtgaatttttgttgttgttgttctagtgggtaacttgcctggtttcaacctatagaatctgtcttcactacgtaatattcagctgttgatctgttgataattcttcttaggtttcgtttgctttttttttctacctcccatttgctgctatctatcttggtcccctagaaaatctcccctttgtctgtgtagttagtgatga

SEQ ID NO: 246682 - DNA, 591 bp, Homo sapiens
agccatataaactaacactaacataatctcatattacagataaaagaaacggtggctaaatggttttataatttccagagatagcacagttactatgttacagggttgcaattttaattsagttcagctacattcagaaccagtctttaatactctgccttagtgctgaatatctaaaaaatactaattgtgggctggcgccgtggctcatgccggtaatcccagcactatgggaggctgaggtgagtgatacagggtcaagagatcaagaccatcctggccaacatggtgaaaccccgtctctactaaaaatatgaaaattagctgggcatggtggcgggtgcctgtagtcccagctactcaggaggctgaggcaggagaatcacttgaacccaggaggtggaggttacaatgatccaagattgcgccactgcactccagcctggcgacagagcaagactctgtcaaaacaaaacaaaacaaaaaacaaacaaaaaacaaaaaaaccattaattgtattgatcacttaatttttaatcagtattcatttaatgcattgtttagaccaatatattctaagattaaaacagt

SEQ ID NO: 246683 - DNA, 591 bp, Homo sapiens
agccatataaactaacactaacataatctcatattacagataaaagaaacggtggctaaatggttttataatttccagagatagcacagttactatgttacagggttgcaattttaattcagttcagctacattcagaaccagtctttaatactctgccttagtgctgaatatctaaaaaatactaattgtgggctggcgccgtggctcatgccggtaatcccagcactatgggaggctgaggtgagtgatacagggtcaagagatcaagaccatcctggccaacatggtgaaaccccgtctctactaaaaatatgaaaattagctgggcatggtggcgggtgcctgtagtcccagctactcaggaggctgaggcaggagaatcacttgaacccaggaggtggaggttacaatgatccaagattgygccactgcactccagcctggcgacagagcaagactctgtcaaaacaaaacaaaacaaaaaacaaacaaaaaacaaaaaaaccattaattgtattgatcacttaatttttaatcagtattcatttaatgcattgtttagaccaatatattctaagattaaaacagt

SEQ ID NO: 246684 - DNA, 566 bp, Homo sapiens
agaattctacaaaatttaaaggctactacaataggagtactcaatttgggtattatcagaaatgctgtagaatcaattgatcttcagaagacagctgaaccaagatcttctgaacaagtagttgcccctgaatagcagagagttctgcctaagatatcataccaagacctaggggtaattcatggttttgttgttgttgttttgagacagggtctcactttgttacccaggctggagtgcagtggcaggatcttggctcactgcagtcttagactcccaggctcaggcaatcctcccacctcaggctcccgagtagctgaaattataggcatgcaccgccactcctagctaattttttgtacttttggtagggatgggggttttgccatgttgcccaggctggtctcaaattcctgagctcaagtgatctgcctgcctcggcctcccaaagtgctggrattacagtagtgagccactgcacctggccatgttttattttttatctgctttttatcatcattctcctcattttatatagtttcatgatcatgatccattcacaaatg

SEQ ID NO: 246685 - DNA, 504 bp, Homo sapiens
ggccgcggggtcacgggaaactgccggaggctattcagggcccagggcccggcggggaggcttcagcgggcctgcattttcttaggcatccgctccaggcgggttcaagttytcaaccagaccttcggcgatccagcgcctagggaacgtcaatgcgggtgacttctcccgctgtgcagggcggtgacccgggttggcgcgcccagttccccgccagagtcggccggggacttccctgataaatgcgacaccctcttgcccctgcgccccccgaccgcgcgcccggccccgcgtgtcccccacgccccacaaccctgcacgccctacccggccgcgcatcccctccggaccgtgcgtcgccgccctcaccattgcgcccccagctgtgtgtcccttgcgaccgggccccccgaccgggcgtcaccgcctgcgactctgagagccctgcgcgtagagaccgtgcggccatctcgcctcgaggcgaggccctcctgcctggtcctc

SEQ ID NO: 246686 - DNA, 582 bp, Homo sapiens
attactgcacgtgtcttttggtgaacaaatgtagcatttttgttgaatatgtttctaaaagtgcaattgctaattcatgatgtatggtcagcataagtagatattgccaraaattttccaaagtgattgtatctcacaaacttttaaaattaaaactgatatgagacattagtataaatttaaaaaggattcgattaggtatatggagggtttatattcctaataataccaaactgctggcttctgaaaactgtgactcttaggtctttttatactaattgtgctaatgcttttttttttttttttgagtcagagttttgctcttgttgcccaggctggagggcaatcctgcgatcttggctaactgcagcctccaccttctgggttcaagtgattctcctgcctcagcctccatggtagctgagattacaggcatgcaccaccacgcctggctaattttgtatttttagcagagacagagtttcactatgttgatcaggctggtctcaaactccagatttcaagtgatccacacgcctccgtctcccaaagtgctgggattacaggtgtgaaccactgcgc

SEQ ID NO: 246687 - DNA, 603 bp, Homo sapiens
aatagctaaaaatggcaaagtgtagtctatgtcaagcctatgttgtttttatagtttttaaatcagatctcccaaatcttgacagagggaaagtaacacatttgggtaagtggatatggctggtagagttgtgatataactaaagggaattagggcttggaagatagaagttcctgggatgcttctctgcagggctcttgttggctaggttgtctcatactcagatgccacagaggggcaggagattctaaagagaatggacacagatgtgtgtatgaaatgcmtgaaaaccagaactcttcaattgatagggaatagtagaacatttgggattgtcacctgctagaactctgtttatgatttggcttggggaggttcccctccaagttctcattcctaaaatctagtgatatgtctatgtatttttgagcttgtgaagtttaagcaatgtttgaattgctgttactagggaaaagtttaatccaaatcaacccagtttacaaagagtactttgactttcattgtccttgtcttctaacacaggagtgtcagaaatgtggctccaggctataaacatttttagctatttatgtataaacattt

SEQ ID NO: 246688 - DNA, 603 bp, Homo sapiens
aatagctaaaaatggcaaagtgtagtctatgtcaagcctatgttgtttttatagtttttaaatcagatctcccaaatcttgacagagggaaagtaacacatttgggtaagtggatatggctggtagagttgtgatataactaaagggaattagggcttggaagatagaagttcctgggatgcttctctgcagggctcttgttggctaggttgtctcatactcagatgccacagaggggcaggagattctaaagagaatggacacagatgtgtgtatgaaatgcatgaaaaccagaactcttcaattgatagggaatagtagaacatttgggattgtcacctgctagaactctgtttatgatttggcttggggaggttcccctccaagttctcattcctaaaatctagtgatatgtctatgtatttttgagcttgtgaagtttaagcaatgtttgaattgctgttactagggaaaagtttaatccaaatcaacccagtttacaaagagtactttgactttcattgtccttgtcttcyaacacaggagtgtcagaaatgtggctccaggctataaacatttttagctatttatgtataaacattt

SEQ ID NO: 246689 - DNA, 479 bp, Homo sapiens
atattggacgctgattcagagcatacacggccttctggagaactttgccccaaccctggatgatggggaacatggtaagaccagtgaattccgtgagcatgagcccactgttgcaattctttagccgtaaagtgagtgccttggtcagaggcaatgctgtgtggaataccatgttggtgtataaggcattctgtgagcccacggatggatggtagtmttggtagaagcactgcgtgcaggataggcaaatccatatgcagagtaagtatctattccaatgagggcaaacctctgccctttccatgatggaagaggtccaatataatcaacctgccaccaggtagctggctggtcacccccgaggaacggtgccatgtcgagggcttagtattggtctctgctgctggcaaatggggccctcagcagcggccgtagccaggtcagtcttggtgagtggaagtccatgttgctgagcccat

SEQ ID NO: 246690 - DNA, 539 bp, Homo sapiens
  misc_feature (1)...(539): n = A,T,C or G
acctggtggggcacaatggntcatgtctgcaatcccaatgttttgggaggctgaggcaggtggattgcttgaggctgggagtctgaggtttcagtgagctataatcacacccactgcactcagcctgagagagtgagatgctgtctctaaaaaataaaatttcattacaaccccagctactaccccaaaaaagtagagcccaaacatttactttatatgtcacataaatatatgaataacatgattaaaactcatgtataccactttgggaggccgaggcaggcagatcacgaggtcaagagatcgagaccatcctggccaacatggtgaaaccctgtctctattaaaaatacaaaaattagctgggcgtggtggcacccacctgtagtcccagctactcrggagactgaggcaggagaattgcttgaactcggcaggcagacgttgcagtgagccaagattgcgccactgcactccaacctggcgacagagcgagactctgtctgaaaaaaacaaacaaaaaaacccctcacgtatac

SEQ ID NO: 246691 - DNA, 644 bp, Homo sapiens
agctgacccttctcatagatgcaatgtgataaactgtgtcaatgctctctaaaaattgtaaaaggtttacattacaatagagtttatctacaaaatccctatgacattagtgtttacctgtgtcttagattaaatgaataaaaggttatcttcttatctgccatagtttctaaaataaaccgagtccccagttttaaactttttaaataaaattctttcataatttgagagctacaacataartgcttttcaactacttaccttcttccagcttaaaaaaagattgtgaaagggactgaacatcttccttaggaattttataagccaaaatagaagatactacttaccttcttccagcttaaaaaaagattgtgaaagggactgaacatcttccttaggaattttataagccaaaatagaagaaaaactggaaaaaaagataaaatatggaaaaaaattaaaaattactactattatgttctaaagctaaagttcaacatgtttaaaattcaaaattaaattcaataacttattttggtatttagttggatgaaaattgtttaaaataataacattttcatgcaaaacaactctcattactactaagaatgttaaaaaaatttaaatactactgaatattgaaa

SEQ ID NO: 246692 - DNA, 644 bp, Homo sapiens
agctgacccttctcatagatgcaatgtgataaactgtgtcaatgctctctaaaaattgtaaaaggtttacattacaatagagtttatctacaaaatccctatgacattagtgtttacctgtgtcttagattaaatgaataaaaggttatcttcttatctgccatagtttctaaaataaaccgagtccccagttttaaactttttaaataaaattctttcataatttgagagctacaacataagtgyttttcaactacttaccttcttccagcttaaaaaaagattgtgaaagggactgaacatcttccttaggaattttataagccaaaatagaagatactacttaccttcttccagcttaaaaaaagattgtgaaagggactgaacatcttccttaggaattttataagccaaaatagaagaaaaactggaaaaaaagataaaatatggaaaaaaattaaaaattactactattatgttctaaagctaaagttcaacatgtttaaaattcaaaattaaattcaataacttattttggtatttagttggatgaaaattgtttaaaataataacattttcatgcaaaacaactctcattactactaagaatgttaaaaaaatttaaatactactgaatattgaaa

SEQ ID NO: 246693 - DNA, 400 bp, Homo sapiens
atgctggcaaaccttaaattcccttatttacgaacagtgtggacagtacagagggaatggtgtaccctagtttgaagctatgatattctaaacagaggtacttgactcagaaacagagcagctacgtttgccaggacttagacttctatgaatctatgaatgtgggctggctcacgatcactgctgtgaaggcracattttttgcagaccacctaggcacaggtaggatagtctgcctggtcatctatgatacctgcaagcaacatagttggtagttttatgtggcttagatgttctgaattatctggggatcatgaatttccagtcaagccaggggccatcaccagcatcctggagaacacaaaagatgtttcacccaagagcattggttcttttcact

SEQ ID NO: 246694 - DNA, 528 bp, Homo sapiens
tgagcctggatgggaattgtaagctagaaggatagtgattcagacacaaaaatcaaagacagctttgaggctctgaatctgggagacttggaagaggaaggagtttagaagaaaagggatgggggtggtgccatggtgatcacatgcaccatgaagggggtgcatatgattacagcaggatagatacatttccaggaaggtgatgtctgggacatcgtgagtttgagatgtcaaaacagtcggggaaaatggccagcaagcatttggtgatgcatcactagaatttggaagatgtgccaagtcatttgcttgggctgctcttacgggttacagattgagtattgaggtgatacttgaggccatgcaaatagaagaaagccaagagaaaataaagagaaacgaatgtgacttagaacttcgttgttattcagactgtgyataagtattacttaatttgttctaaaataacttataacttatataagttgcttataactgtcttgaaagtgcaaaaggagccaggcgcag

SEQ ID NO: 246695 - DNA, 578 bp, Homo sapiens
atcacatttaattatattttgtgttgtattgttcttgaaagtgtctggaagacttcaagaagaattttatgtctgctagattttcagcaccttgtggcagaaaccatgttgtgtcatttaaagaaaaaatatgcttcatggtttcttgcagagttctggacacatagctagtcttcaattaaataggagattaggataattcagttctgtatcaacaggttaaagcagttattaagcagcatgaaatacaggtaaaaacaactctttcaaccttttgaaaactttaatgtctatcactttgtatgcaaaaaacaawtttttttttcataacttagataacccaagacaacctggccttttgctatgcaggcctatgtcatctagtgaagagttgagtccaccagcagttcttcattgaggcaaaagaagaaaacaaacaaaaacaacaacaaataaatccgacttttagcaaaccatctcaaaatattgcaacatacaagaacatcaaagaaacaaacaaaaataataataataataatgcttccttggctgacatggaaatgtttactagtcactag

SEQ ID NO: 246696 - DNA, 501 bp, Homo sapiens
agaacaatatcactaaaatgagtaagaagggcaatttcagtctaccctaacaactttccccaagttagcacagctcagtaccagaagagcatgccctagctcacaactcctcctttgagtgaaagagaagggtagagtgtgcatctaacattttggcttttcagagggctgcccagtgggctggtttctgtcttgtctcattgagagcactggttgaacaaacataatttcaatgcctggtgactgctgagaaaaaagaagygtgtgtggtgggggagggagtggtagattgctgtagccatcatggcttactgtgatcagaagaaagttctcaacttgaggctatccccttgggaaagggggagagaaatgaagcatgggtccagcattctggctttttgtagagctattctagggattgttattcatctctcttgtcaggtatctgtctacatttcagggtactgactgagaatctgcataatctgaatacctggtggg

SEQ ID NO: 246697 - DNA, 565 bp, Homo sapiens
atcaattcatcaggaagatacaacaattataaatatatatgcacccaacattggaccaccaaaatatatgaagtaaacattgacagaactgaaaggagaaatagtaacacaattattgttgtcttcaatacccctattttattattcttctccagcaacccataacattccctagcacagattgcatgttaggtcactaaataatttttagtacattcaagaagattgaaatcataccaaatgtatgttgcgaccgcaatggaatgaaactagaaatkaatggcagacagaaaactgaaatatttacaaatatgtgacccactaaacagtcaatgggtcaaagtagtaatcaaaagggaaattacaaaatatcttgggacaaatgaaaatgaaaatgcaacatatcaaaacttatgggatgcaacaaaacagtactaagatgaatatttataatgataaatgcccaaattaaaagaagatctcacgggggagatttaatattacatatctaagagctagaaaaaggagaacaaactaaggccaaagttagcagaaggaaggaaat

SEQ ID NO: 246698 - DNA, 520 bp, Homo sapiens
aattctgttttcttgcagtaggtgtatcggctatgcgtcaatatttctggttgccctctctttctgagtacctgaaaaaattgcatttttcaaccccttgggctttagatagattatatgacttgctttggccagaaaatgtgaatgagagggatgtgtgtgatacatggatggaagcatttaagagccagagcatgatctttacttcccttcttttcctggtgttgcaattatgaaggtgstttcatggtgaaaaagcagaaagcctgaataaaaaactatggagaatggaggactgtcctaggcatctctaggagcttttgcatgagcaagaaaaacaattttattgtgccaggccactgagattttaggattgtttgttaccacagcataacttaacctattctgactaaatccatcattttatagatggggcaatttaagtgtgaatttgtgtgacatggaacttcaatgtattaagagctcaatatatctttggactggactggttgaaggcatc

SEQ ID NO: 246699 - DNA, 607 bp, Homo sapiens
ctgtctttcatgaccttgtcacttttcatacaatgtgccttactgtgggttttctcaatgtttccccatcatcagccacatgactcttaaatgagatttttcaaagagaaggtttggaggaagttctyatttttcttagagcatgtgatattaacagggtctagggtagaaagttatgaaaaccaaagcatggatagattaagccacaatataagatagaaatagggtcactcacagaattgtcttcataattaggtctgaaatagccccaaccctcaaagcactgcatggaatttagtattttgtcaagacaataggcagtgaagagacagcttctgagcatgggtacctgagcttagaatttggtatggaaatgcataactcacaaatgaagggcaatgcatatgtgcttttggttttttgcatcaccttttattatcttaagactgaaaagttaataacccagtgtgtaatcatgccattatcagtttacattgtagtaaagcccattcaaatgatgattacatatgttaatgagtctcgttataatgcactacacagtacattaccttcaataaatataattgtttatgcactttaatgaggg

SEQ ID NO: 246700 - DNA, 559 bp, Homo sapiens
gagcctttgtattttacactgctatcctgggcagcagaatacttccacaaagcatttagaatgtgggtctttggtagcaaactgtcttcaaggtcataactacaacaaaccaaatttctggcatcaagtgccatgggacatgatgaataccctgggttgaggggaggtgggatggagaatggggcaggggtttagaagttgagctgtggcccgggcaagtgttccacagagtaactcagttggctgcactaggactcaggctgagctccatgatcaggtgctcatgttatttgtgattcttagcatgctcagtacttggactctagctcaaagaatggatgtttttaaagaaagataaaagcaaccaggtgcagtggctcatgactataactccagctactagggaggccaaggcgggaagattgcttgagcccaggaattcaagaccagcstgagcaacaaagcaagatcttgtctctactaaaaataaaaaaagaaataaaataaaatttgtcaggtgtggtggtgtgcacctgtgatctcagctacccaggaggtt

SEQ ID NO: 246701 - DNA, 585 bp, Homo sapiens
tgatctcccctggtgatagcaatctgcctttcaattttgctgtcttgaatagccagctgtgagtctttatataacatttcacagtcccttaattaccgcatgacaacctcagggttgctaatcctaatactgttctgaagtgagggacttgcgacatatcagcagtttaatacaactctttctgtggttaatcatgtttggtggaaaatatagctcttcccaaacaccgtgaactgctaaccttaaaatgttcagataaacttttgcttttgccctacatcaatggagagaaatagcctcttgtgccctggctgataggtgcaycatggatgctaaatatataacaaaaagctaaataagagagaaatgtagagaaaaaagtggagaaaaactggcaggaaaagattcctcagatgatttgttgtactgctcaagcttagcatgctattcttttcttggtagaaactggatcacagatgcagctttcccaggccatgcaatgatgcaaaaggactaagtaggccttgatggtcttaatatggcagccaggactgttttattacttatgggcagatgaaagcagat

SEQ ID NO: 246702 - DNA, 586 bp, Homo sapiens
cttattgaacaacatgttacaaatatccttggcaggtctgaagttggggcatgatttcaaacgactgtaacgctctttttgttactccaaactttcttttacttcagggcataggggcataatcaccagcttcctaagtttatggcatgaagatatggatgattcaaataatactctggtttcagctgtttatcatttaaaatatcacatgacatctgtgtctctgatgacatagcaaccaccacttccccttgccctttgaaaaattccattattttgcacagtaaaaattgaactggaagtgttggtctgcccaagtaatggtgcaatgcctgatggccttcagattctagaattgaataataatgcaatgagacttgcatttatatcatgttttatatttttatggggtggacagaaggaaaaggaaattaattgatcatatattgaatgcctgacattccagacggcacccttccagacggcagggtggactctgctcttaagaaaattacacaagagggtgarttgctgtttatgggtggacaacttttttttttttttgctgcgtggtttgggccacaga

SEQ ID NO: 246703 - DNA, 572 bp, Homo sapiens
cttgcatttatatcatgttttatatttttatggggtggacagaaggaaaaggaaattaattgatcatatattgaatgcctgacattccagacggcacccttccagacggcagggtggactctgctcttaagaaaattacacaagagggtgaattgctgtttatgggtggacaacttttttttttttttgctgcgtggtttgggccacagagcttctgaggcgtgtgcatatcccaggaatgtgagatgtttggctcccaggaagcgattacctcagtggttggcagataccattagtctaaataccrtaatacctcagccttaggaacagtgagttccataaaaatcttattgcttgaaatattcagtctaaattctacaaagtgatggaaatttgtcctcaagtgacaacctccttaccacaggacgtatggactcatatacttggatttcttccatggacaatttccagctgtcctaccttttgatgatttatttcagataccttccaggctttacctaggaactccaccatgaaaagacagcaggaattctagggagttgtcatggcaa

SEQ ID NO: 246704 - DNA, 551 bp, Homo sapiens
gtttagaatgtaggctcatgaggcaaagataaaatctgctttacttaccatattatttctaggacctagcaaagtagatgygcaatgaataaatggtatcagaagacagaataatattcttaaaaagtggggaaataaacatttctgtttacccaattagagagatagtgaatggcttagttaactaaaaatatcttcttctattgccttatcttgtcttttttggggcaaagttggtaggtctccatcagtacttatggaaatttttcttagaggccaggaaaactagcagccatccactccagggataaacataggacaatgtggtgaaaaatagtctgaatgtgaagttagagcattctgctcatagctccatatccatgtgccaaggataaatcccttcactccccctgggatctcagttcccttgtttttaaaatggaaggtttggtggggtgcggtcacttatgcctgtaatcccagcactttaggaggctgaggtgggtgaatcacttgaaccaaggagttcaagaccaccctaggtaacatag

SEQ ID NO: 246705 - DNA, 370 bp, Homo sapiens
ctccctgcccctcaagtcccaaagattccaagtgtgatgtttctgggatacactggaacacgggagtgtgtaaaaaccaaagagaacaaacttattttcgggaatcaaagaaaaatttcttgaggaagcaacacttatgctgagaccagaaaatgaaaaatgaaaaggagaaaataaggtgaaaaagaagggttttgtgagagccagtgtggttgggaagagagtcgtgagcttggagaacacgtagttgtgaagggtggaggtagaaaaagaaaggcttgctgaaattacagttttcttcctggccyctaacctggtgttagagagggtcatatcttagtttggaataaaactcattcatttgttcgtt

SEQ ID NO: 246706 - DNA, 581 bp, Homo sapiens
gctttcctttggatttaatatttactctaaatgccttaatttggcttataaagccttcatgtttgctttttcagctttacttctcacatctccataattttgcaccctctgcacccaccagttgaaatctgtccagatcttcacactcacagtccttgtctttaccttcagattcctgtatctgctctaccccctgcctaaaatactgtaagccctccttctccacattctcccagactttactgagacacctttcccctagcttaattatgtcttcctttataaagctttccctgaatccactatcccaagtctaggctgtctattgctcccctgtgatcttatgacacaccctgatttataacgactgtggcatttttcacactgtttgcccactcagcctgtttccacactgtctgcyacacaagactataagctgattgaaggaagggattatgacttatgtaagattgtatgctaaagacctggcacacagtggacctcaaaagttttctgaatgaataaaggagtacatagatgacagttcatgggctcattgcaaaatgtctttgagtcccact

SEQ ID NO: 246707 - DNA, 579 bp, Homo sapiens
ttcttaacattttgggagggttgtaagaatggggagaaatactattacttaatttttcttaagtaggtttaatagactacatgcatacctcagagatattgtgggtttggttccagaccactgcaataaaactaatattgcaataaagtgagtcacatgattttttttgtttcccagtgaatataaaagttatgtttacactatagagtaatccattaagtatgcaatagcagtatgtctaaaaaacaacgtaaatactttratttaaagatactttattctaaaaaattctcagaatcatctcagccttcagtgagtcataattcttttgctggtggagggtctcgcctcaatgttgatggttgttgactgatcagggcggtcggtgctgaaagttagggtagctgtagcaatttcttaaaataaggcagcaaagaagtttgccacattgcttcacttttcctttcgtgaaagatttatctatagcatgtgattgtgtttgacagcattttacccacagtaggacttccttcaaaattggagtcaatcctcttgaatcctaccacctgctgctttatc

SEQ ID NO: 246708 - DNA, 579 bp, Homo sapiens
agagttaggactttgctctggcttaggccttgacttatgaaaaagctatagctggtttgatcttctaccccctcaaactttctccatatcagcaataaagttgtttctttttcttatcattcatgtgttcattggagtagcactttcttttcatttgtgtattcacttttaatttccttcaggaacctttcctttgcattacaacttggctaacttttggctcaagaggcctagctttcagcctatcttggctttctccatttcttcctccctaagcttaatcatttgtagcttttgacttaaagtgagagccatgcaactcttcctttcacttgaacacttcgaggccattgtaaggttatgaattggattaatttcaatattgtagtgtctcaggaggtacaagggagaggaagatacacaggggaatggctagtaggcaaagtagttggaacacgcacaacgtttattaagtttgccaycataagtttgcccaaaactattacagtaataacatcaaagatcactaatcacagatcaccataaaatacataataataatgaaaataatttgaaata

SEQ ID NO: 246709 - DNA, 600 bp, Homo sapiens
atacataataataatgaaaataatttgaaatattgcaagaattagaaaaatatgacatagagacataaagtgagaacatgccattagagaaatgatgccaatggacttacttgacacagtgttgccacaaaccttcgatttgtaaaaactgtgaagcataataatgcaaagtattcacacaataaaatgaggtatgcctgtatttggtataaggaactttcttttgtgggaatctaaatttagttataaattttattcaccctctaccccttccttcactcccctgacacccaaccctcagctttctgtattatctccacctcagaggccaacatataaagtgagactactaaagatgttagaagaactctacaaggcattgtgtttgtttattggaaatatgccctctataggacaatgcactgggtaggttaggggaatgtttacaaaaatatggtacrtctaacatacaacaggaggttatttaccattgaaatcatgctttccaaatatttttcctaggataataaattagaaaaataatagaaaagaaaagctggatattttaaataaaattatgtaacataacatacagatata

SEQ ID NO: 246710 - DNA, 584 bp, Homo sapiens
tggtctggaaggtttccggggtgaagcccgtgtgtgagaccatcatttcttagtttgcatggaaaaaaaatttgccctgactggatagagctttcttcctttttaggaatatattaaatatattactaaatactaatgataattactgcatggactctttctcatatctgtagcatttatatttaaagaagcactgctgaggcaggagcactttcccaacctgttatacagccaaggagtgttagagctgagatgtgaaccagcattgcctccaatcctcattccaatatgttcatatcctttgtactcttcccctattcttttctaaagaaggaaaagagtatctctctsaaaagtgtgctctgtttttcctggcctgctttgtaactttcccagtgttctaaaggcaaactttttcaaatataaagtgtcccaggttaaccattttgtcctgtaccaataaacaaaatgactttgaccctcagtgctaagtgcacaaatagaagaggacacaattgagatagagcatgatggtgatcctacagcctttcactctgtgtgtgtgcgtgcacgtgtgcagcgac

SEQ ID NO: 246711 - DNA, 576 bp, Homo sapiens
atggtatggtcttgatgaaagagagtcaagaagaaaaggaagaagcctggattcagcatgcttgagatagatggagaatgggaataggttctaggtcagtgattcccaatttttagtgtcaagaacattcttctgggaaagttttaaaatgctgattccagaatatcttactgacacccacagcaccatttggaaattcgaggtgggtcccagaatstatatcttttacaagtatcccaggtgattctgaggcaagcagtccatagaccagtctatgagaaacagtgctccaagctatggacccaagagaagagactgtgcaaacccagagttaaagactccatgagcagattaactggccatggaacttgctctcctggcaatatatttggacaaagagagggaaaaactgaaccaaactttgtgtctccggagattaaaagaagtaccagaagcaaatctcatccccgtcttggaggtaagaaatgggaaagaccagctagaacaactgtaatagcaaagctcagaattgaggggaaactgacctggattgtttgtaattaccatcaccttgca

SEQ ID NO: 246712 - DNA, 576 bp, Homo sapiens
atggtatggtcttgatgaaagagagtcaagaagaaaaggaagaagcctggattcagcatgcttgagatagatggagaatgggaataggttctaggtcagtgattcccaatttttagtgtcaagaacattcttctgggaaagttttaaaatgctgattccagaatatcttactgacacccacagcaccatttggaaattcgaggtgggtcccagaatctatatcttttacaagtatcccaggtgattctgaggcaagcagtccatagaccagtctatgagaaacagtgctccaagctatggacccaagagaagagactgtgcaaacccagagttaaagactccatgagcagattaactggccatggaacttgctctcctggcaatatatttggacaaagagagggaaaaactgaaccaaactttgtgtctccggagattaaaagaagtaccagaagcaaatctcatccccgtcttggaggtaagaaatgggaaagaccarctagaacaactgtaatagcaaagctcagaattgaggggaaactgacctggattgtttgtaattaccatcaccttgca

SEQ ID NO: 246713 - DNA, 618 bp, Homo sapiens
gcaacattactgtcttcatttaaactgccatgttgtatcacctggaaacttatctgaccagagtacactgctcatgcatggcacacctaagactagggttcatattgtcccactctaagtctaatgacttggacattcaactcatgaagttgtttttagaaccatacctgaggcataatcccacattttggagagtgaaacagtgtaggtaaacaactatgctactgcaggattatttggttgatggatatgcaaacagggttgataagtataatgtgggttttcctcaygctatattaagtgaaagtgctagattaagatttgtagacaagtctaaacatgtagttagaaaagggttcttaaagttccataatcaggttcatcagtgatggatactgaattacaattaattccctctttctagaataatacaatatatgcaaaactttccatgaaatttacaagtcctgttcttatgattcctgatattctaaaaagtaaacttttatgaatatgtttatgcatcttatctatctacacatacaatctacatgagcagtatgtgtgtgtgtgcgtgtgtgtgtgtgtaaaaagagagtttatgggatataatataca

SEQ ID NO: 246714 - DNA, 617 bp, Homo sapiens
tgcgccactgcactccagcctgggtgactgagcgatactctgtcaaaaaaaataaaaaataaaaataaaataaaaaaataaaaaaaaaaggagaaagaaagaaagagaaagaagtttaayggactctcagttccacatggctggggaggcctcacaatcatggtggaaggtgaagaaggagcaaacttgatcaggggagctcccctttataaaaccaccagatcttgtgaaacttattcactatcatgagagcagcacgggaaaaacccgccccatgattcaattacctcccaccaggtccttcccacaacacttggggattatgggagctgcagtatgagacaagatttgggtcaggacacagccaaaccatatcacatggctttctctttataaggacatcagtcatattagattaggtgccaactctactccatcctaaacttaccttaacttactaatgaaatctgcaaaaaccgtatttccagacaaggtcacattctgatgtactgggcgtcaggacttcacatgaatttttatgggacaaaattcaacttatgacattaagtttctactctctgtatgaatagacatttgctttctcagtctccttgaac

SEQ ID NO: 246715 - DNA, 593 bp, Homo sapiens
agctgccatagctgtcttgccaccatgaagaaggatatcaaggcaaaggctctaatagaaatatagaatatgctagggacttaagtgtagttgctaaaagaaattagaatgtcctaggttcactcttctgctgtatgagaaaaacagacacagcatttcatccttcagcccttttcatttgagtgttgaaaatattaaaaaaaaaatacatttttgaagtgagtttccttatcgccttttcctgggatgatcaacctttcttttcttctacctggcaacttagggatgcatttgttgacctgcacagtctggactccacataygagctctctttatggttctgctcctctttggtcctttgcctctgtctcaatctagagtctccattattacctgcattacattctttatctcttaattgtagagcatcccagaacctggcagaagagattcactaagaatttgctgtagctgatgtctcaacgatgtcataattggcctcttattttatttattaattatacttcaaacattttatagttgaatttgtaccatatttcccttagttaaaattcaatgaataaaatagtagt

SEQ ID NO: 246716 - DNA, 630 bp, Homo sapiens
gagcccccatcctcactgttcctgcttgctttcctcctccattcgaacagtatcaattgaaattattagtgacataaaaaacagacagggaattttaagctgctgactttgtggcattgaatagactgagctcagcagcacggcgccagaagcaatctgcaaccacctttggaatacacccccttccaatcaccgcagattataaacatcakcagctatgttgtctcccaaggttatggcaaaacttaaactattttttgttaatagtaaatgcccctcgttctcttataattagtcactgtggaattttagaaaggtcatttggttgaaatatgaggctgcaatttgtttaaaaaggaaaaaggcagaggaaattatccttccatgatgcattagcccaggtcacagttaccccaggcattccgagtctatgttgtaaacagtctagtaccatcatagccaaaatgcatgtttcatcctgagacaggcacaaactcattaaactgacattcattcatgtgaaccacacattatctcattatacctctccaataccaaaacacttgattaaaaagttaaaaaactcctccacttcactacaaatgtgggctcaggtgaggctgggcacac

SEQ ID NO: 246717 - DNA, 642 bp, Homo sapiens
cctgcctcaaccccacaagtagccaggactagaggtatgtgccatcaagcccggctaatttttgtattttttttgcggagacgaagtctcgccatgttgcccaggctggtctcgaactcctgagctcatgggatccacccactttgaccttccaacacgctgagattacagacatgagccaccgcacctggcctaagacagaaaatgaaatcgaatgaaggccacctgtgcaggatcctgatgcgagctagcattattgatttgttaattgaaaaaatatgtattgagtggccatgtttgctaatctctgcacttccaccactatgtctgtgctatctctgactcaaactcttaaaaatcatgttctacccatgatatagctaagctgagagatcattaaaaaatgcgcattgtatctgaaattaatcacttttttaaaactcagctctctctaccctcacttttttcagacacygcttctgtctcaattaaaaattgtctctctcctcactctctctgtggtccacactttcgtgtaaggctccaaatgttgcttgatcatttttctgtatctcatagtctaggagatggtggtgacacttgcagctttcctaagatttctcagcttccttagaaactcat

SEQ ID NO: 246718 - DNA, 575 bp, Homo sapiens
cctttccccttccatattctttctcaaccactcctaaatcctttatttcggcatctgatgtctgggaactacataattktgcacttaattaatagtatctgaactcaactgggaatttaatatcactgatcaattattttccttaacatatgtaaactcctttatcgtatccaccttcctaagtcactttagctaccctctatggctttcattttcagcagagaaactaatcttctgcttcactgagaaaaatctaggcaccactcatgaaaacctttacattccaaactactgatatacatatttaatgacacatatgtctattctctccaactgtcacttttctcagtggaagaagttgttactcacttactccattttagttcttgatcacatccctcctcatctttgaactgatctaatcccattaactattgttctttcagattttttctataattcctttcctccaatttcttcttagtaataagagctttactcttctttctagttttacttttccttctgaggtaggaaaaatgaggccacaactgttcctttaactttttgaattc

SEQ ID NO: 246719 - DNA, 575 bp, Homo sapiens
cctttccccttccatattctttctcaaccactcctaaatcctttatttcggcatctgatgtctgggaactacataattgtgcacttaattaatagtatctgaactcaactgggaatttaatatcactgatcaattattttccttaacatatgtaaactcctttatcgtatccaccttcctaagtcactttagctaccctctatggctttcattttcagcagagaaactaatcttctgcttcactgagaaaaatctaggcaccactcatgaaaacctttacattccaaactactgatatacatatttaatgacacatatgtctattctctccaactgtcacttttctcagtggaagaagttgttactcacttactccattttagttcttgatcacatccctcctcatctttgaactgatctaatcccattaactattgttctttcagattttttctataattcctttcctccwatttcttcttagtaataagagctttactcttctttctagttttacttttccttctgaggtaggaaaaatgaggccacaactgttcctttaactttttgaattc

SEQ ID NO: 246720 - DNA, 609 bp, Homo sapiens
ctgttcctttaactttttgaattcccatcctcttctgaatccactgcagcttggcctccagtactctgtaggaactgtggaaatgaatagaagctaacctgccagtaagttattctagcttctctggaataggaaacactattgctgagttcttgcttttccaattctttcctccttcatcactcttttctagattccttctctcctctccgaacatattttttccattatcatttacttcacttctgtctgcccctcaatttctgatgcgtactatgccttttctttgaccttcttttatattactctttaccaatttcatatatagtcttgacctttcttacactgctagattaaacctgtgatctggacaacatcgccgactctcaaatttaatgtgagtcatagatctatgttcagatttcatactgtacaagctgtattttcttgcaktgttctcacctataactaccacgtagcagctatatgaacttagggacatatttaacaaatggggtggtgtctgtgcctcagtttccgtgtgaacaaaataggaattatgatggcatttaagcaactgaaaaaagtacctaacatagaatccaccta

SEQ ID NO: 246721 - DNA, 609 bp, Homo sapiens
ctgttcctttaactttttgaattcccatcctcttctgaatccactgcagcttggcctccagtactctgtaggaactgtggaaatgaatagaagctaacctgccagtaagttattctagcttctctggaataggaaacactattgctgagttcttgcttttccaattctttcctccttcatcactcttttctagattccttctctcctctccgaacatattttttccattatcatttacttcacttctgtctgcccctcaatttctgatgcgtactatgccttttctttgaccttcttttatattactctttaccaatttcatatatagtcttgacctttcttacactgctagattaaacctgtgatctggacaacatcgccgactctcaaatttaatgtgagtcatagatctatgttcagatttcatactgtacaagctgtattttcttgcattgttctcacctataactaccacgtagcagctatatgaactyagggacatatttaacaaatggggtggtgtctgtgcctcagtttccgtgtgaacaaaataggaattatgatggcatttaagcaactgaaaaaagtacctaacatagaatccaccta

SEQ ID NO: 246722 - DNA, 631 bp, Homo sapiens
gaaaatagcagaaccagaaacgggaggtgtctgatacccagtacaatgttagttacattaccagagactctgtaatgagccctggggcagctaataaaaggaagaaacatgcattttgattttactggtttaggtaaaccaagagaaaggcagagcaatggcgaaagtgtaatcaaagacatttaatcaattgctgagtgattcactattaactctttcctcaaagggtaggaccattagaatatttgtgctaaatttttaagataattcatcaacatgtcaggagaagccctgtacttcttgtccatgaggagattttattcttacccaggaactttggaacacagaggaaagcatgaaagtccaggagcaaagtaaggtctgtggcatgacaaaatcagatgttcatatttatacaagaaaatatttacaaagctccaatagagggcagatgttcayaggctgtgccttttcagatatgtacattgatttagagatcaaaagtacacgtccatacttaggggaatttccaagtagttggccaaaaaaataggacaggttttgaattgttttattatgcttaaggatatagaagtcattggatggaggtctaagacaaatgaaacataat

SEQ ID NO: 246723 - DNA, 540 bp, Homo sapiens
aagaaaaaaacatgatacaattattctgcatgtagccaaaaacatactaatcttatcttagaatctggcttacaagatttaaacatttgggactatagtattctggattgtgtctttcaggtccataatcagctctggccaagagttgcccatgcttttaatgcagctaacgaaaccttagattcagaagcctagtgattcaacataagtccactcccacttggtgagtggattcatgaatcctccaccaggctggaggattaagagtgaaggagtaaaggtagtttcctctgcttccactgacaggctcatttgagtacagataggcatcaacttgaaggcatattcaaaagaagccaagctgagatgcaggttggtrggtcacaagtttataggatcattatggtaagacctgaagtgatattgcaggacaaagtgaatagaaacaggacataaccataggcagaaacttatttggaaatacactagcataacctcaggaagttaagtaaaatgttcatatatatcaggtatctctta

SEQ ID NO: 246724 - DNA, 562 bp, Homo sapiens
ggtccttcccggctgcaacctgccctcatggagccacaacactgcaacatcaagatgactttgataccctttcttgacatgctgcccagcaaatcttcatctcaacctttttctatatgaaaaacctggagctgctagagtattcccaacttyttatatgaatttcctttcattttctcccctatatggcaagataaggtataatgatacttcagaaaaaaaaaaaaagaatctattctgggtctctctttgaaaagatacaggtaataccttgtatcccttccagataaagacccccctcctctcttcattactggatatagacagaatgaatattattttctgcaggcaaacagaacaaaccatgaattgagtttcctacagataaccctaaaaccaagcctttgaaggacactcaaccattgctgtggtgttttaatcttttgttgaacaatgtacattgaaagtgatagacttaatcactgcttagagagccagagcaaattagaagacaaacagagaatatgcaagtggcagtgtgttgaaatgaatttattctagg

SEQ ID NO: 246725 - DNA, 562 bp, Homo sapiens
ggtccttcccggctgcaacctgccctcatggagccacaacactgcaacatcaagatgactttgataccctttcttgacatgctgcccagcaaatcttcatctcaacctttttctatatgaaaaacctggagctgctagagtattcccaacttcttatatgaatttcctttcattttctcccctwtatggcaagataaggtataatgatacttcagaaaaaaaaaaaaagaatctattctgggtctctctttgaaaagatacaggtaataccttgtatcccttccagataaagacccccctcctctcttcattactggatatagacagaatgaatattattttctgcaggcaaacagaacaaaccatgaattgagtttcctacagataaccctaaaaccaagcctttgaaggacactcaaccattgctgtggtgttttaatcttttgttgaacaatgtacattgaaagtgatagacttaatcactgcttagagagccagagcaaattagaagacaaacagagaatatgcaagtggcagtgtgttgaaatgaatttattctagg

SEQ ID NO: 246726 - DNA, 562 bp, Homo sapiens
ggtccttcccggctgcaacctgccctcatggagccacaacactgcaacatcaagatgactttgataccctttcttgacatgctgcccagcaaatcttcatctcaacctttttctatatgaaaaacctggagctgctagagtattcccaacttcttatatgaatttcctttcattttctcccctatatggcaagataaggtataatgatacttcagaaaaaaaaamaaagaatctattctgggtctctctttgaaaagatacaggtaataccttgtatcccttccagataaagacccccctcctctcttcattactggatatagacagaatgaatattattttctgcaggcaaacagaacaaaccatgaattgagtttcctacagataaccctaaaaccaagcctttgaaggacactcaaccattgctgtggtgttttaatcttttgttgaacaatgtacattgaaagtgatagacttaatcactgcttagagagccagagcaaattagaagacaaacagagaatatgcaagtggcagtgtgttgaaatgaatttattctagg

SEQ ID NO: 246727 - DNA, 596 bp, Homo sapiens
tagatccacgaatcaactcctcatatgcccataataaaaagaagaaacagggcacagtgattccttataaaagcaggttgggggtggggagggaactttttcagaaagttctatagactgaatgctcttcctctctgaattcatatgctgaagccctaactcccagtataaccctatcagagatgggtctttagaaagtaattatggtttaatgagatcataagggtgggccctaatccaataggattaaagtcattatgagaaaaggaagatcgctttctctttcctttctctcccttatatgaggacatagttagaaggaggctgctatgtgaaagctcycacaagaaactgaatcaactagcacctagatctgggacttctatattacttagggttctccagagagacagaccagtaggatagatatagatacaaatatatatatatataaaaagatgtagctataaatctatgagaggtgattttttagcagaattggttcacaagattatggaggctaagtccaacaataggttgcctgcaagctgaagaacgagggaagctggtagcatggccccatccaagtccaaaag

SEQ ID NO: 246728 - DNA, 574 bp, Homo sapiens
atgtctcccaacattgacaaatgttccctttctgaagataaggggcagcattgctcccagttgagatccactgctatagactttacaaatacaacaattaaacactaatcttattactcatcccccctcaccctatgactcttacatattcattctctgttatagttaatgagttcactgattcaccaaatctctaagacgtgaaacctcagagtcatataacactactttcttctttctaagtcttatcccttcagaagccctattggtcctccattagctgtcactytattcttccacttctttctacctgcatttccactacttcagttcaatttgttggctttttcctagatgctttcaacaggctttgtcttaatttttctacctctctctgtctctttagtttattattctcttactggcaaacttacactcttgataattcaaatttcatgaaatcatgcagatttcaaacaaaaacaacaaattttaaaagcaattgaagatgaagtttattgactgataatttccattaaaaaatcaccaaattaatttcatgataacacaagcc

SEQ ID NO: 246729 - DNA, 552 bp, Homo sapiens
caacagactacctaacttcaaaatatagtaaaatctatagtaatcaaaatagcatggtactggyttaaaaacagactacagaccaatggaagagaatagagagcccagaaataaacccatgtgtttttgttcaattgattttagacaaaggagccaagaacacacaatagagacagaaaagactcttcagtcaatggtgttgagaaaactggatattcatatcctagtaaatccttataattttatgttgcattgtcttgtattataaatgtaagatggactttctcacatcaaaagtaaggcttatttacctttaatggtttccagctcttcacctcccagttcctcaaggaggtagaccaagatatttgctgtaagcaactgtctactggtgacccaatccctatggatcggccatataagagtgacttcactcaccccattgaacccttcgcttcacatagattgcacggatatgctgcagtgatgatacctctgtcaggatgactccagagaattcatgcctgcttgctccaaactcaacaattagaa

SEQ ID NO: 246730 - DNA, 566 bp, Homo sapiens
aaaacaaacaattcttatagaaccaaacaacagcaatgataacaataacaacaaaaaactcaaatagccaaagcagtttttatcaagaagaacaaatcttggaggcaacagactacctaacttcaaaatatagtaaaatctatagtaatcaaaatagcatggtactggcttaaaaacagactacagaccaatggaagagaatagagagcccagaaataaacccatgtgtttttgttcaattgattttagacaaaggagccaagaacacacaakagagacagaaaagactcttcagtcaatggtgttgagaaaactggatattcatatcctagtaaatccttataattttatgttgcattgtcttgtattataaatgtaagatggactttctcacatcaaaagtaaggcttatttacctttaatggtttccagctcttcacctcccagttcctcaaggaggtagaccaagatatttgctgtaagcaactgtctactggtgacccaatccctatggatcggccatataagagtgacttcactcaccccattgaacccttcgcttcaca

SEQ ID NO: 246731 - DNA, 552 bp, Homo sapiens
caacagactacctaacttcaaaatatagtaaaatctatagtaatcaaaatagcatggtactggcttaaaaacagactacagaccaatggaagagaatagagagcccagaaataaacccatgtgtttttgttcaattgattttagacaaaggagccaagaacacacaatagagacagaaaagactcttcagtcaatggtgttgagaaaactggatattcatatcctagtaaatccttataattttatgttgcattgtcttgtattataaatgtaagatggactttctcacatcaaaagtaaggcttatttacctttaatggtttccagctcttcacctcccagttcctcaaggaggtagaccaagatatttgctgtaagcaactgtctactggtgacccaatccctatggatcggccatataagagtgacttcactcaccccattgaacccttcgctycacatagattgcacggatatgctgcagtgatgatacctctgtcaggatgactccagagaattcatgcctgcttgctccaaactcaacaattagaa

SEQ ID NO: 246732 - DNA, 552 bp, Homo sapiens
caacagactacctaacttcaaaatatagtaaaatctatagtaatcaaaatagcatggtactggcttaaaaacagactacagaccaatggaagagaatagagagcccagaaataaacccatgtgtttttgttcaattgattttagacaaaggagccaagaacacacaatagagacagaaaagactcttcagtcaatggtgttgagaaaactggatattcatatcctagtaaatccttataattttatgttgcattgtcttgtattataaatgtaagatggactttctcacatcaaaagtaaggcttatttacctttaatggtttccagctcttcacctcccagttcctcaaggaggtagaccaagatatttgctgtaagcaactgtctactggtgacccaatccctatggatcggccatataagagtgacttcactcaccccattgaacccttcgcttcacatagaktgcacggatatgctgcagtgatgatacctctgtcaggatgactccagagaattcatgcctgcttgctccaaactcaacaattagaa

SEQ ID NO: 246733 - DNA, 584 bp, Homo sapiens
tcttgatattcatgaaatgatcttctctattaggagaggatgctgaaagaattaattacctgggcatatctttgagtctcttggagctatataaacaaaaggaagtagtaataattgaagagagcagaaagaaatgaattccagggctgaagtcaacaaaccaaataaacatgtcagctggagcccaaatccagacatgcaataatgagaacagcagcaattttcctctgcagtcctggttcacacagtgtaaacccaataagcacgaagaggcagaacttcaagacccagagctaaagtgcaaacagcagcagctttgcaagttggggagtttgcaagttgaaatatctggccagcagctcttcaaaactaccaccaatctgaggaatgtgtcgcagctgggctgagctattcggaatagctcttggtattttagaawccctaaggagattgaagtctcccgcaggcactgcagtcattattattcctggtgggaatataggagtcatattatacagatatttacattatatttgtaaaatcaaataaacgaaaaacaggccctgagaaaataaataagtttt

SEQ ID NO: 246734 - DNA, 578 bp, Homo sapiens
gtaggagtttcagaagggacagggttaggagacaatctctgtaggatggagaggaggaaaacacaaatctggagaaggcgttggagggaagatcaggaaggctctatagggcctgggtgccagtcattgttctacttagttgttacatgactttaggaagtcactgatgctcttgtagcttcaattttgtcacttgtaaagtaayaaaactaactgtttctatccttcaggatagttatgaggatattcaatgagtttgctctttattggcatatggtaagtattcagtcaatggtgtgcatgatgatttctatttgtgttgatgcaacagcttgagcaaacacttctgggatgttcaacttccctttctggaggttaagataacttatgtttaccttcatttcccttaatttcagtggttcagtgccttctactctactgttttttggccattacagcacccagttctttgtttgcagcctgactctaatcaggaaagcaccaaacaatagtgaaagggtcccaatcagtagagaggaattttaggggtaggggaggaaataagggcaaaaccaaag

SEQ ID NO: 246735 - DNA, 574 bp, Homo sapiens
gggcctgggtgccagtcattgttctacttagttgttacatgactttaggaagtcactgatgctcttgtagcttcaattttgtcacttgtaaagtaacaaaactaactgtttctatccttcaggatagttatgaggatattcaatgagtttgctctttattggcatatggtaagtattcagtcaatggtgtgcatgatgatttctatttgtgttgatgcaacagcttgagcaaacacttctgggatgttcaacttccctttctggaggttaagataacttatgtttaccttcatttcccttaatttcagtggttcagtgccttctactctactgttttttggccattacagcacccagttctttgtttgcagcctgactctaatcaggaaagcaccaaacaatagtgaaarggtcccaatcagtagagaggaattttaggggtaggggaggaaataagggcaaaaccaaagcagagattacaaattcaaactaaaacatggatgcttgagattttagagaaaagatcatttgatttctggaagtcatatgcattaaaaactaaccacttgtacaa

SEQ ID NO: 246736 - DNA, 574 bp, Homo sapiens
gggcctgggtgccagtcattgttctacttagttgttacatgactttaggaagtcactgatgctcttgtagcttcaattttgtcacttgtaaagtaacaaaactaactgtttctatccttcaggatagttatgaggatattcaatgagtttgctctttattggcatatggtaagtattcagtcaatggtgtgcatgatgatttctatttgtgttgatgcaacagcttgagcaaacacttctgggatgttcaacttccctttctggaggttaagataacttatgtttaccttcatttcccttaatttcagtggttcagtgccttctactctactgttttttggccattacagcacccagttctttgtttgcagcctgactctaatcaggaaagcaccaaacaatagtgaaagggtcccaatcagtagagaggawttttaggggtaggggaggaaataagggcaaaaccaaagcagagattacaaattcaaactaaaacatggatgcttgagattttagagaaaagatcatttgatttctggaagtcatatgcattaaaaactaaccacttgtacaa

SEQ ID NO: 246737 - DNA, 564 bp, Homo sapiens
ggacacacatgttttagcatcttctaactactcttgtactccgtaatcactgcattcctgaatgtgaactgccatccatataccaccagtagggtccacaagtcagagaccatgggcagagtgagaagagtaatcccacsgagttagaaatgctccttcctcctctagcacatctttgaaagtctgtatagaaacaaccattgtgtgtcagaaacaagataaaattatggattaaaaaagtccttagaagccctgggagaagacaactgcagccacccctaagactgcctgacatgtgacatggagcctgtatagcagttgggggacccgggtgccagccgcagcagcacactgggtaaaggatgcctatggtcacattgccacacccaggtgctgtagactggaggcaacatggagatcagaatatggataggccagaatcacacacgggtctacacacacggctcaagtttggctgggaattcatagcccagggtcttgacttggcctgaatctgacatgattgtggtttcccccaaatcagcatggaagcactgtttttgt

SEQ ID NO: 246738 - DNA, 564 bp, Homo sapiens
ggacacacatgttttagcatcttctaactactcttgtactccgtaatcactgcattcctgaatgtgaactgccatccatataccaccagtagggtccacaagtcagagaccatgggcagagtgagaagagtaatcccacggagttagaaatgctccttcctcctctagcacatctttgaaagtctgtatagaaacaaccattgtgtgtcagaaacaagataaaattatggattaaaaaagtccttagaagccctgggagaagacaactgcagccacccctaagactgcctgacatgtgacatggagcctgtatagcagttgggggacccgggtgccagccgcagcagcacactgggtaaaggatgcctatggtcacattgccacacccagrtgctgtagactggaggcaacatggagatcagaatatggataggccagaatcacacacgggtctacacacacggctcaagtttggctgggaattcatagcccagggtcttgacttggcctgaatctgacatgattgtggtttcccccaaatcagcatggaagcactgtttttgt

SEQ ID NO: 246739 - DNA, 622 bp, Homo sapiens
ggaagcactgtttttgtggtccattctcacgcaatcttgtgaaagaaatcacaggccagagacccagagcgatatgcttggcaacctgcctttctggaatctggtcctgtctcagggataaacccagagatgtcagtgtttgagctcctcagggcatctggtcaacccaatgtgtaggggagaggtttggagagtgcccagagaaagtccaaaatccaggactgaggtccatgtgtgtcctgttgcagactctgggcaccccattcacatggcactgctggctctggctggccccaagcacctgaggggtcattaagtgtggggcccygcccagttgcctatatctaagggtagttctgttggcccactacagaattctgtgtctcaatgatacatggattatttatgtgtgatagtgaagttgatcagagaatcctaagaggatgcatgaatttttctttgtttccaattctccaaaaagagagggttaaaaaaaatctgatttttatatacaacaaccacccagttttccacctttgaaattgaattttataaagccaatgcaacctcagctttttgaatagcaactccttatttatgtcatatagaaaataaaaaccac

SEQ ID NO: 246740 - DNA, 622 bp, Homo sapiens
ggaagcactgtttttgtggtccattctcacgcaatcttgtgaaagaaatcacaggccagagacccagagcgatatgcttggcaacctgcctttctggaatctggtcctgtctcagggataaacccagagatgtcagtgtttgagctcctcagggcatctggtcaacccaatgtgtaggggagaggtttggagagtgcccagagaaagtccaaaatccaggactgaggtccatgtgtgtcctgttgcagactctgggcaccccattcacatggcactgctggctctggctggccccaagcacctgaggggtcattaagtgtggggccctgcccagttgcctatatctaagggtagttctgttggcccactacagaattctgtgtctcaatgatacatggattatttatgtgtgatagtgaagttgatcagagaatcctaagaggatgcatgaatttttctttgtttccaattctccaaaaagagagggttaaaaaaaatctgatttttatatacaacaaccacmcagttttccacctttgaaattgaattttataaagccaatgcaacctcagctttttgaatagcaactccttatttatgtcatatagaaaataaaaaccac

SEQ ID NO: 246741 - DNA, 531 bp, Homo sapiens
attcattcctgtaaaagctaccctccctaatttagacagcttgaagaaactttgatagctttccaagcagtttctctatagagacacaaatgacatattttttttcttcttcctgcctatttctgttttttaacagggacaaatgattaaaagcaaagcaatatcaacacggagaactgaaaacccaaagacaagaagaagmagcattaattatctttattaaaagggtttatgagttagataatccatacagaagtaatttttaattggaattattgttatcattctggagctacaggagtagcagcattgctgaataagtgaattataattctaaataaaccaactgggtcagatggacaggtgcagctgaccgttaatttcatcctcagggagggggaaagacaaggaattagagaagaaaaaaaaaagaataaacaataaaggattgtaggacttttagtccctaggacaaaaaactccctgactacttaattttccagaccaatagaggatgtgctaagacttgag

SEQ ID NO: 246742 - DNA, 556 bp, Homo sapiens
ggggcctagttttacccttctacatatggcaatccaatattcctagcatcatttattgaaaaggatgttctttccccactgtatattcttgttgactttttcaaagatcagttggctgtaaaactgtgagctttatttctgggttctctattctgttccattgatctatgtgtccttttttcttaatgccagtgtcatgttttagttactatagacttggagtattattcaaagtcaggcaatctaatgcctccatttttcttctttttgcttargattgctttgaatttgggctcttttttgttccatatgaactttagaattgttttctctaattctgtgaaaaatgatgttggcattttgatagtaattgtatttaacctatagattgctttgggaagtgtggttattttaataatattaattcttctagtccatgagcatgatttctttacatcaagagtgaaaagctatctccttcatgtctatttattctaatctagaaacaatatatctttttaattaagatgttatcaatgatatgttattaattgtt

SEQ ID NO: 246743 - DNA, 604 bp, Homo sapiens
ccttttttcttaatgccagtgtcatgttttagttactatagacttggagtattattcaaagtcaggcaatctaatgcctccatttttcttctttttgcttaggattgctttgaatttgggctcttttttgttccatatgaactttaraattgttttctctaattctgtgaaaaatgatgttggcattttgatagtaattgtatttaacctatagattgctttgggaagtgtggttattttaataatattaattcttctagtccatgagcatgatttctttacatcaagagtgaaaagctatctccttcatgtctatttattctaatctagaaacaatatatctttttaattaagatgttatcaatgatatgttattaattgttgccaacattaaaaaatagaataacagaatcttaaccatcagagagaaaagcagtttctttgaaattcctctaatacgtcatatgaacaaaagcattaagagtaaatatatttttcatcattgcttcaaggctaagccatacaaaatagattagctgtcaatgaagagagctaaagcaggtaatgcagtttcccaaaagagttctcagaattaaattatctg

SEQ ID NO: 246744 - DNA, 479 bp, Homo sapiens
ttctgatgcacaaaggcaaggtgtcaagctgaggcagtgcttgcccagtaacactaggtggcagcagtgggtttttagccaatgcactctcctttttccaatgggcagaagttaccatgattaagaatcaatgaattgatgaataactagatttggattacatataaagacatggaattcagtgtatctctttttaaacacatgaaatattacaaatgctatcagagtgtgaggaagcaaacttgtcatacaagggaatatcaggaatgatatgagtatagtccatgacmattgaatataacatacataaaattgaaagccttccttttgcagaaaataaactattcctttagaagaaggaatagtttcacaaaagacttgcatttaaaacactagcagttgctacccatggagagtgcttagccatttgtaatttgtaagggagtgacttgtcaaaatatgattgatatttgaaaggt

SEQ ID NO: 246745 - DNA, 455 bp, Homo sapiens
tttagttctagctttgcctctaacttgtcaccttgartcagtaattcaacaaacctagatgtcgagtgttccttttgaaatatgtaaagggtgtatgtttttttagataatttgtaaactctcatatgatcaacagattctaatttatttgtataatcatcagttggtatatgtatttggcttataatgtgaagaacctgtgtatgtgtgtgtgtgtgtgtgtgtgtgcatgtgtgtgctgttttaaattcacagccaaagcaatatacccataagtattgcttcttgtgcagggctacactgtgtatttattaatgtattttacaaatagtccttgagaacattgtgcaagtctctgtgtaatattgtagtcaggaggaaaaagagacaataacaagcaattttgttacaaccagagagaattatttgcatttttatcatgatttcctttaccc

SEQ ID NO: 246746 - DNA, 606 bp, Homo sapiens
acaacagttccggctctgtttcagtcccccctagaaacaagatgtccttcaattctttagcacggcgaatcacatggcttagtggtctaaaaccccgggcaggctgtttccccaggtccctcaactgccctgcaagtgaggcatgcgcagataagattccagctaccccagctttcctgagccttgygctacctgcttgcgaagaatcctaggcttctgctttcccttgctgcctatctgtaagtagtaaccctgcttcatgtgacttgctgtgagtgggtgtccctctcaccaaactcagataagatgataaccaggacacagtgagcctgctccacatggttcaatgtacacatgaatttcctagttgtcttccctaagaggacctaaagatggaatccaacagcagtgagcacgccagattacttagtgtcttaatcatggttttttaacaccattttccaataaaaggaaccaaggatcagtggaggattggttgattccagagctggggttaagatgagcaggcaacatcgtgtggtaccagaaacaggaagttattaaaaaaaaaaaaaaaagatggggcttgcagaaagaacagagctg

SEQ ID NO: 246747 - DNA, 596 bp, Homo sapiens
tattgcttcttgtgcagggctacactgtgtatttattaatgtattttacaaatagtccttgagaacattgtgcaagtctctgtgtaatattgtagtcaggaggaaaaagagacaataacaagcaattttgttacaaccagagagaattatttgcatttttatcatgatttcctttaccctcatttacagaatgcaaattgagcacctttaagtgaaatctaccacagggagcaatgtcctgaagtcattacaccttggctcaggtgccagtgatcaaacagacctgattctgccaaaatggagaaccgtcctttaggcccagagagccatggcaggtgatatttaaactattcagcatttatcacacagcttggactccatgtcattcctggaaaccatggttcccaatgtggcaactttcaggctttcctayactaccaatttttcttcagggaaatggcaccactgttaaagggaatcatggttataacatatcatgaaattaggaatggtaggactgggaaagtttcatgcctgagcacaactaacatgcattgagcatctgccatgttccaagctctgctctacatacttta

SEQ ID NO: 246748 - DNA, 597 bp, Homo sapiens
cctttccaatgatagaattgatactcagagatttaaaactggctgaaaatcccagaagtgttacttgttagtaactttctgcagaatataatgtagaaacttgcagttattacatagttctttctttttatccaaacttaacccccatattagagatagtagcctatgaggcataaacatgccaggattcataagattaacaaccagagattgtatggatttcttttcaaaaagtctttcaatcacactagggacttgactcatgacttttaaacttcttcttttatatgccacaaaagattctagggcacaatctaaaagcagtgttttattacttctttgccatcaaagatcaagaaatatcactgggcttttcattctctaagttgatatggcatgtaaactagctgtaatgatgtcatggacagcccagtwgtccacccctcacctctgcccgcagaccttaggctagcagttcctgggaaatagtccccaccctaaaagtcatcagaccccagttcccagagaagagagggttgagctaatatcaggccctttctctcaatttatgtttcatagtaattaacctgctccttg

SEQ ID NO: 246749 - DNA, 625 bp, Homo sapiens
taaaatacaaggttatcataagttcatatggctagcacacttttagtgagaatgcgaaacagtcsagctgctatggaaaacattacacggaactactcaaaaaattaaaaatagaaatattaaaagatcccacaatcccgcttctgggtatttattcagaagaatgggaagcaggatcttgagaagatgatagcactcccatgttctctgcagtaccagtcacaatagccaagatgtggaaacaacctaaatgttgatctacagatgaatgaatccagaaaatgtggcatggacatacaataaaatcagccttaaaaaataagaaaattctgtaatatgcaacaacatggatgaactttgaggatattgtgctaagtgaaataaaccagtcacagaaagaaaactacagcatgattccacttatatgaagtatttaaaatagtcaaattcatgggatcaaaggttgaaatggtggttaccaggagatggaggaaatggggagttactaatcaacaggaatcgcttcagttaagatgaatgagttgttaagatctgctgtacaattttgtacctatagtccatggttgctgattatgtactgtacacttaaatttgttagaaaggt

SEQ ID NO: 246750 - DNA, 625 bp, Homo sapiens
taaaatacaaggttatcataagttcatatggctagcacacttttagtgagaatgcgaaacagtccagctgctatggaaaacaytacacggaactactcaaaaaattaaaaatagaaatattaaaagatcccacaatcccgcttctgggtatttattcagaagaatgggaagcaggatcttgagaagatgatagcactcccatgttctctgcagtaccagtcacaatagccaagatgtggaaacaacctaaatgttgatctacagatgaatgaatccagaaaatgtggcatggacatacaataaaatcagccttaaaaaataagaaaattctgtaatatgcaacaacatggatgaactttgaggatattgtgctaagtgaaataaaccagtcacagaaagaaaactacagcatgattccacttatatgaagtatttaaaatagtcaaattcatgggatcaaaggttgaaatggtggttaccaggagatggaggaaatggggagttactaatcaacaggaatcgcttcagttaagatgaatgagttgttaagatctgctgtacaattttgtacctatagtccatggttgctgattatgtactgtacacttaaatttgttagaaaggt

SEQ ID NO: 246751 - DNA, 659 bp, Homo sapiens
taaacaaaataaaagaaagagagagagagagccttatcattccaaaatgctatcatcatagtctgaataatagatctaataaagaaagattttaaaagtcaaaaaaaagttgatatgagatgaatttacaagttttaggtgtatgtgataaaatctgtgtatttggatgagtatgtggttcctgggtgggagctatctggaaagttggatcaattgtcaagtttatactttttataattatccttgattaaatagggataggcagagaggaagaaagtaaagaaggaagagagggagagaagaagaaaaggagagagkaagggagggaggaaagagacactctaatgagggatgggagtgaataaatgtataaccataggaaattttaagtataatcacccttagaatttgttagattatcattacttgatttccttaatacattagtcaaactgtgtagcaagacacacatccacactcacactaattcgtaatcactttgagtggatcctttcggctttgacaaatttatgagtcttcacatttttatcaggtttctctgctcattatgcgaatggaaaccactcttctacctgtcccagtgcagaggcagccttatcctactagctctctagacaagcatgaacatgtctgagcct

SEQ ID NO: 246752 - DNA, 537 bp, Homo sapiens
taacatttgccagctgctattcttttgtaatgcatatgggtgagtgttcgggtgcaaacataatgtatcatccaaactattaagtaatgaccctcggacaaccaacataaaccagtctatcacaggcaaaccggacrctgtgtgtggctactcaagctagggatcactatgtaagaaaattcatgtgccaacatgaactttaatataaaaataaggaagcagggagaggcacacaggtgggcagtataaagcaataccttatgttttattttttaattgatttctgccattttaggctttatgaaatgatcattattcctatttcagtttcaggaatgaacaccaggatttcatacttccggtttcctctggctttgccctccttacatactcacacaccccatgacatggaataaattgcatgaatctgataccatagctttctaagccctaaaaaaatgtgcaactctgaccagcagttattgactgggtcaagggagacaattgttccaatacatccattcaagagtatggtgt

SEQ ID NO: 246753 - DNA, 537 bp, Homo sapiens
taacatttgccagctgctattcttttgtaatgcatatgggtgagtgttcgggtgcaaacataatgtatcatccaaactattaagtaatgaccctcggacaaccaacataaaccagtctatcacaggcaaaccggacgctgtgtgtggctactcaagctagggatcactatgtaagaaaattcatgtgccaacatgaactttaatataaaaataaggaagcagggagaggcacacaggtgggcagtataaagcaataccttatgttttattttttaattgatttctgccattttaggctttatgaaatgatcattattcctatttcagtttcaggaatgaacaccaggatttcatacttccggtttcctctggctttgccctycttacatactcacacaccccatgacatggaataaattgcatgaatctgataccatagctttctaagccctaaaaaaatgtgcaactctgaccagcagttattgactgggtcaagggagacaattgttccaatacatccattcaagagtatggtgt

SEQ ID NO: 246754 - DNA, 517 bp, Homo sapiens
aattagaatactacacttaaaacagacaatgtgattccatatgtgattaacataaatgttgtttttgcttagctttagctgttaaatcagctaacaagctggaggtactaatgttctctgagattccagttattgtttagttccttctagaatggaactttggctctgagggacagagtcagaacagaagagacacaatgagagaaagggtggagtggttctagagtagagtttgcatccttcataaytgtatattgtgccatcattggacgagatgagcagagtggctaatggaaaaagaaaagcaagattaatttgaataacagttattttccctgactatgcccagactcacacaaagaagctcaaattaaagttttatctttgtactttttccacttgcttgagagctcatgttttatgttactaataaacaatcaccagctgaggatttctcagatgtctactgccccttagccacagtcaagcactcaatatcttggaagcagttgacctt

SEQ ID NO: 246755 - DNA, 559 bp, Homo sapiens
cacagagcacagagtattcatcatcatttttttttttttttttttttgtgacaaagtctggctgtgttgcccaggctggagtgcattggtgcgatctcagctcaccaaactctccacttcccaggttcaagcaattctcctgccttagcctcctgagtagctgggactacaggtgcacaccaccatgcctggctaatttttgtatttttagtagagacagggtttcactatgttggccaggctggtcttgaactcctgacctcatgatccgtctgccttggcctcccamagtactggcattattcttttttagtttgtttgttttcttagagatagggtctagctctgttgcccaggctggagttgcagtggtgcgatcgtggcttagtgcagcctcaaattccagagctcaagtgatcctctcacctcagcctcttagtagctgggactacaggcactcgccaccacacctggattatttatttgtttatatttttgtaaagactggagtctccctatgttacctagtctggtctcaaactcctgggctcaggtaatc

SEQ ID NO: 246756 - DNA, 482 bp, Homo sapiens
cagggggaacatcttatagtgccagaaggtaagaaagtgctaaaaaagaaaaaagaaaaaaccacaaatgccaaaaggacacaggagccaactgaagagttcccartaggcaaagaggaaaaaatttaatcaataaaacaaataacataatactgcgttataaccaaaaatataaaataaatattcataactgtgtatgtattcattatatgaatataaataattgaataagtaaatacataggagagaattaaaaaatgtcccttgcagaagaattccaaataatttatgtagatactctgaccgaaaggagaggaagcataattccccatttcttagctgtgggttacacatagtgactttcttctaaagagtacagtataaaaagcacgggaagagagagtaactttacagtagaggaacctaccaaacactacctcacccaggtgatcaagttgacatcatcaacaataagttatgtt

SEQ ID NO: 246757 - DNA, 523 bp, Homo sapiens
gtgtatgtattcattatatgaatataaataattgaataagtaaatacataggagagaattaaaaaatgtcccttgcagaagaattccaaataatttatgtagatactctgaccgaaaggagaggaagcataattccccatttcttagctgtgggttacacatagtgactttcttctaaagagtacagtataaaaagcamgggaagagagagtaactttacagtagaggaacctaccaaacactacctcacccaggtgatcaagttgacatcatcaacaataagttatgttagtagcacgtactcttttttttttttttttttttttttgagatagtgtctggttctgttccccaggctacaatgcagtgacatgatcttgactcactgcaacctcttcttcccaagctcaaaccattctccgacctcagcttcctgagtagcagggactgcaggcacatgccaccatgcctggctaatttttgtattttttgtagagatgaggggtctcactcatttgcccag

SEQ ID NO: 246758 - DNA, 523 bp, Homo sapiens
gtgtatgtattcattatatgaatataaataattgaataagtaaatacataggagagaattaaaaaatgtcccttgcagaagaattccaaataatttatgtagatactctgaccgaaaggagaggaagcataattccccatttcttagctgtgggttacacatagtgactttcttctaaagagtacagtataaaaagcacgggaagagagagtaactttacagtagaggaacctaccaaacactacctcacccaggtgatcaagttgacatcatcaacaataagttatgttagtagcacgtactcttttttttttttttttttttttytgagatagtgtctggttctgttccccaggctacaatgcagtgacatgatcttgactcactgcaacctcttcttcccaagctcaaaccattctccgacctcagcttcctgagtagcagggactgcaggcacatgccaccatgcctggctaatttttgtattttttgtagagatgaggggtctcactcatttgcccag

SEQ ID NO: 246759 - DNA, 435 bp, Homo sapiens
gacattttacatgagggggatcaagatcctgaagcatttcttcaaagaattgtaataggagatgaaacatggctttaccggtacaatcctgaagacaaaccacaatctaagcaatggctaccaagaggtgggagtggcccagtcaaaacaaaagctgacacatcaagagcaaaggtcatggcagcagtgtttygggatgctcaagcatcttgctgttgactatttgggcggccaaagaatgaaaacatctgcttatttatgagagtgctttgaggaagccaaagcttgagctgaaaaacgcccaggaaatcttcaccagagagtccctctccaccacgacaatgctcctgcttatttatctcatcaaagataacagtgcaggagtttcaataggaaatcattagacatctaccttacagtcctcatttggcatct

SEQ ID NO: 246760 - DNA, 616 bp, Homo sapiens
gatcagctttacatgtcactgaaagatgcattcaaaataatcaagagctttaagtgtaatgcaaacgcaagtgtcattggaatgacaatgatctcagcatgctatctctgtgggatatctatagtcatttcctcctaagtacacatgcatccgttccagggtcttgaatgatacaaagtcagtgcttcctcaggtaagcaaatgtttccacartgtttccgtttctatagaattgtcatgctggggatttgtggaatttaaaagagaaattttatttgaacaggaaaacaacttgtgtggctgggaggataggggaaggaaaggcccctagtgtgggagactttaccttttcttctgagaagaggaggagtggggggggtgtgttggcggagatgcagaatctttctccccaagccctgtcatccaatactctcacttacaaggcacttagccatcacttctctctgctgatggctctcctcccgccatttaaaaatattcattcacttccatttttccaaactcttagctcttgctatactttctcattctttcccgactgcttttttttccttcacttttaaagaaaaaatattcatgacaattgctaaagatg

SEQ ID NO: 246761 - DNA, 454 bp, Homo sapiens
tcatgacaattgctaaagatgggttaagcggactccattcgktaggggcaagggggctattacaacggagttctgaggtaagggagagcgcttgggcttaattcagaaaacagcaaggccaaatggagatttatagccaaggagtagggttggggaatcagaggctaaaaaattactaagaggaaacatcaaggctaggggaattcctgctagacccaccacttaggattcttgctgaaggcaggccagagagtaacatatcgaggtcagggaatgaggaatttaaacagatatcaaggatgggaaatttttactaaacgaattcagcaggattcttgctgaaacaggactaaaccagccaagtacagagccaaaggtcagggccttgagggcctagggaagcccaaatagagttaggtcgaggagagcttctgctgtcacctaagataagatg

SEQ ID NO: 246762 - DNA, 550 bp, Homo sapiens
ccttgctgctattaaaattatcaccagggagttcaaggactagggagtcatttgaaatggccttggaaaatgtgttgaaagaattgcctcaaaccgttgtccctggtgcttgttctttgtccctgtgctctaatatacagtacatgataaaatatatcctgtatatttayaatgtgtccagaaaacgccaaagtgcttaaggctctgacattgttttcattagagattgatactttagggaatgcaaatgccaacttttcaaatttcctataggtggaaactccaaatgatgccagcttttaaaaacgttttgtactttgtgaagctctagagcagctgtgtgtgactagaatgaagaaagacgcttgtataaaatgccagcaaaacaaccccacctgctaacaggaatgctggcggtcataatagccaagacctgggaacttgattattcattcagctaacctcatcttttgtcagcctcaccagtggtaggtagtaaatctgagaaagataatttagactgaaatattagtggcctttcaagttgcaa

SEQ ID NO: 246763 - DNA, 595 bp, Homo sapiens
tcttttcttatttccttctatctcctccaaacttttctattctcaagtgaaacaaaaaggcatttttaaagcaaaaatggaatcatattataaaaacaaaagccctcttttttggactctccattttrcttagaatataatgaaaacacctggctttggtctataaatccatgcatgcatgcctcgaaccctgtctctctctccaacctcatcttgttccagtgtctctctcattcattttggtttatcccatctcaagagttttacttactctttttctctgcatagatagcttttgcttcctttactccttctgtctttgggtctcagggtccacatggcctatttggaaacatccctaaaatggcctctgcttttctccctctaaactccttgtttgttctcttcctagcacttattagacttgaacattttttgtctatcttttaacttgttttgtggctgcctcccccagaaacaattagctctgtaaagattagcacctatctgtttaatttgtgatagtatttctcatatctagaaaattgtctaatacatggtagatacttgatgaatatgttttgaatgaatgaat

SEQ ID NO: 246764 - DNA, 602 bp, Homo sapiens
cctgtgagtcttcagtgaggtgtactcttctctctctgtgaatctcagtgtgtgtgtaaatcagggaaaggtccaactccatcagtgcaccccatatcaccacgtggaagaggagcagctgctaaagacagtcacrtgatccattacctgggttaattaagtggaggtaaatcccaaagccagaggtggccacaagaacataatccctctctgattttacagtcatttctgaatcatgcccaacttggagaaaatttaagacaaggaaatcccttctgctaactatagaaaaggtgcaaaagagctgctggcaagcagagagaaagccatctctagagctttctcagtaattgagtccagcaatgttcagagggagtagagcgcaaagctgaacttccttagacacataggtaagaaagagatcactgcaggaaggaagattaacgaatttctgcaaaaagcagttgaagttctgatagaagcaataaaccattttaatagagactggtatgggatgtaggcaagaagaaggacacagccacagggtaacgaaagcagagaatgcaagcaggactcggatggagacaagtgcattagataca

SEQ ID NO: 246765 - DNA, 393 bp, Homo sapiens
gccgggcacggtggctcgggaggctgaggcaggagaattgcttgaacacctgaggtggaggttgcagtgagctgagatcacgccattgcactccagcctgggcaacaagagcaaaactccatytaaaaaaaaaaaaaaaaaaaaaaaagatgtgattcaataatagccctacatttttctaagaaacatttttttcttctcaggtaatgaaatgataataacaacaaaaaacagagaactcttgacaaaaagggaccaactcagtgttccacagtaactcatatgtgtgtatatatgtgtgtgtgtgtgtgtgtgtgtgtgtgtgtgtacttattatggttcttagtgatgttcttctcttctgtcaccatggaaattgacatcaaattattt

SEQ ID NO: 246766 - DNA, 621 bp, Homo sapiens
agacaggggcccatggtgtttttactactttatcctagaatgcctggatactgtaaacttttgcattgcataatgtcattaatagctatacatttcacctggttccataaagctaagatatcaagaacactttgaaattgttaaagagaacagcagatttcwtttgtatgttgctctaaagtttgctaatacattattcttctactgtaaaatgaaattatcagaaataagatccatagctaagatacagtggagaaggaacccaaatgttatttcctcatttccagtatgctttggactacatcatgactgtcttagtttccctagaaattcgtcaattcattcagtttacacatataccagaatgcttactatgtgttaggcactgcactaagtgttgagacaatggtgagaaataaccaaatacactgcttgctgtcagggaacacaactaacagtgaacaaataacttatgtaccaacattcaatctcctatgaaagaaattatgtgtttcatggagggcatgtaatgactgggaatggggaagtgtgagtctgacacagtcataggcgtcaggggagaaattcctggttctaagatctgaagaatatatacaaatt

SEQ ID NO: 246767 - DNA, 621 bp, Homo sapiens
agacaggggcccatggtgtttttactactttatcctagaatgcctggatactgtaaacttttgcattgcataatgtcattaatagctatacatttcacctggttccataaagctaagatatcaagaacactttgaaattgttaaagagaacagcagatttcatttgtatgttgctctaaagtttgctaatacattattcttctactgtaaaatgaaattatcagaawtaagatccatagctaagatacagtggagaaggaacccaaatgttatttcctcatttccagtatgctttggactacatcatgactgtcttagtttccctagaaattcgtcaattcattcagtttacacatataccagaatgcttactatgtgttaggcactgcactaagtgttgagacaatggtgagaaataaccaaatacactgcttgctgtcagggaacacaactaacagtgaacaaataacttatgtaccaacattcaatctcctatgaaagaaattatgtgtttcatggagggcatgtaatgactgggaatggggaagtgtgagtctgacacagtcataggcgtcaggggagaaattcctggttctaagatctgaagaatatatacaaatt

SEQ ID NO: 246768 - DNA, 621 bp, Homo sapiens
agacaggggcccatggtgtttttactactttatcctagaatgcctggatactgtaaacttttgcattgcataatgtcattaatagctatacatttcacctggttccataaagctaagatatcaagaacactttgaaattgttaaagagaacagcagatttcatttgtatgttgctctaaagtttgctaatacattattcttctactgtaaaatgaaattatcagaaataagatccatagctaagatacagtggagaaggaacccaaatgttatttcctcatttccagtatgctttggactacatcatgactgtcttagtttccctagaaattcgtcaattcattcagtttacacatataccagaatgcttactatgtgttaggcactgcactaagtgttgagacaatggtgagaaataaccaaatacactgcttgctgtcagggaacacaactaacagtgaacaaataacttatgtaccaacattcaatctcctatgaaagaaattatgtgtttcatggagrgcatgtaatgactgggaatggggaagtgtgagtctgacacagtcataggcgtcaggggagaaattcctggttctaagatctgaagaatatatacaaatt

SEQ ID NO: 246769 - DNA, 610 bp, Homo sapiens
ggtggttctgattggtcacctctccaagaatataaaggtttgattgacaagacttgggttacgtgccttctcttggagctaaggtagtattcacttccttgaaagtacaccaaactgggaggagtgggtagacctcaacagaaaatatcaaaagagcaaatggatactgcacaaaggggaataaaaacattatccatcctcctcaccacagttatgtcacctcctcctcatggaagtatggtgtttccaaagcttagtcctcaatgtactatcttgggctcttctatctcatttgaggactcattcactttcagtcctcaagtgctgatttttggctagactcccaagtttagatctatagtctgccttgcagttctgagttcatcrtttgtttatggatatttaataatccactgtcaaattggagtctggaaactgggataacataaaccctggaggtatagaacaaacatttcacagagtacttctgtatagcgagttttatgagcactaattgatagattatcaaattccagttgtgcttttcccaaaagtaggtctgcctgagaaggggcttatattcatactagtcttgtcaccattgcagcaa

SEQ ID NO: 246770 - DNA, 593 bp, Homo sapiens
atatagctatagttatagctatgacatattygaaagtatttccagccttttcttacatactatcatggaatagcagttagttattcttatttgtctttgaagacggtgctggtttttattcaacctagtcataaactgaatctgaaaaataaaactgttttagactaaaaaatcccgaagcccaactattctttaaagcattgtgctgatagcctcagttcatacaggtctactggctattagaaacatatggatatcacctgggagaggttgcctgctacccacttgactatacttctttcagcacccttagttccaccattaagttataagagaaataaaataatggtgcaatgcatactctgaggtggcttcagtaaaatgtgagaattaaatgagagccaagaccattccgaagtaagtaaagctagatgcctgactcacatcagaatcaacataaatttaacatgaatttgatatttaaatataaaaaaatgaaattgcaaaattattttctaaaataaattgtgggtgcttatttacgtgattctgggtggaaagagcattgtgaatacacaaaaaagggagaaacc

SEQ ID NO: 246771 - DNA, 488 bp, Homo sapiens
taaatgtttgcatgttccatgacatgatctttccaggtccatgaatttttcctaaggaaatatacatagttatgcatcaaaatagaaatataaatcaaaaacactgttgataatgctgcaaaattagaatcaaacaaattaagtaaaagtaagttttggcacattaattggatgatacttaattactagtttttatttctttaaagttatttggtacatattattgcaagacaktttttaaaaatactgacaaatatatgtaaccctaatatcaggcctgtgatgcaaggcagttactataattatcctcattttacaggcgaggccaatttacaactttacaactttatactttcaacaggccatttcacaattgaggcccagagcagtaactgacaagttcaaggtcatacagccagtgaatggtggaatttgtccacctgaccatgcaatattctttaaactggctaccttctagtaatattaat

SEQ ID NO: 246772 - DNA, 658 bp, Homo sapiens
caggcctgtgatgcaaggcagttactataattatcctcattttacaggcgaggccaatttacaactttacaactttatactttcaacaggccatttcacaattgaggcccagagcagtaactgacaagttcaaggtcatacagccagtgaatggtggaatttgtccacctgaccatgcaatattctttaaactggctaccttctagtaatattaatgaaaacaagctagcatgttttcattcctagawttacagtgtccaagttaggccagcagtatttgatataatcacatttcttccaaattttgctttccttctgatcaagagctgaatttctatgagggcagagagaaaacaaaatcagccttggaaacattccaccttaaaagccattgtggaggatgcaaagaacctattttacatcattctgcacagtgcttattcagtataaatgtcttctctgaatggctttctgctgtatgcttatgaaacagtccatttcagtacactcatatatacacttcctttccccaccccccatcttatcttatgctgtgagccaaagagttagagcagcggcagacagttttgtacattcttggacaatgagttctagtgtaaattctctcatccataaccattctaaaatgctattcaga

SEQ ID NO: 246773 - DNA, 499 bp, Homo sapiens
tgttgttctaattttgttgtcctcagagtgccacatgtaaacagcatcggctatggtttacttgaaagtaaaactcaaggtaactttggtcttttgactgggtatgcagaacttcacgctgaaaggaaagtgtggttgattgataaaacctctagatgtttcatttttttgtaaaagctaatctttagatagatttctcagtgaaggtaacagcttgccttgacaacttggtgaacatagtattttcatttcacacaaaatatatggcaggcattaattttcagtgtcagatcaattcattgaccacaactatcaagagcacaaagagactggacaattaattcctttttgacatgaaattactatatawtagaactgcagccttcaatctttctccaaccaaatgtctaatactgtgctttctgaggtcattgaaagcacaatgcataaaacctttgaccaaaactcttttcatgtttctatacttgtttgctgactg

SEQ ID NO: 246774 - DNA, 531 bp, Homo sapiens
tcaaagcctcccaattatgcctaagattttaagcataacttcagagctgaaatggatatgtaaacaattgtttcatctttactacaaaaatacctggcttaaaaatgaatgtttaggcatccaaattggaaagaaaaaggtaaaattatcttttctcagatgacattatcttatatgtagaaaactctaaaaatatcatcataaaacctataagaactaataaataaattcagcaaagttataggctacaaaagcaacacacaaaatgcaactgcatttctatacagtaacaataaaaaatccaaaaggaaaattaagaaaacaatagcatcactgtttacaatagcatcaaaagaataaaatacttayggataaacttaaccaaggggacaaaaaacttgtacactgtttacttgctaaaataatcataatgtggtactggcataaacacagatataaagaccaatggaataaaataaagagtctagaaataaacacacatatatatggtcaaataatttctaacaaggg

SEQ ID NO: 246775 - DNA, 563 bp, Homo sapiens
aatgttccaaagttgattgtggtgatggctatatatatactgtatacagtttaaagtggattgtatagtatgtaaattatatctcgataaaacttttaaaaatggcttaaatctttttcaaaagcccaaagggctttgttaaaaggactttctccctaggtaatattaagtcctccagagaagagatagggaatgaatttggactttcagcagctgagaaaacttcagcttctgctgcttctccagtaataaaataaattaagtcaaatttggagtagagatatttcagctgctttgtagggttttttttttttttttcttttcagggtgtatcatgcttactatgagtcaatagagaggtgcttatatgtgatatcttgcaaccaaattagctctttggagaccacactagcckctgacttttctgagtttccccaatatctcaaaaagttgatgctgttactaagcatttcaaggacattgagttttgtttatatccacaaattctggttgagttagagtgtctttaggaaatgaactctgactgatgccacttctatcat

SEQ ID NO: 246776 - DNA, 554 bp, Homo sapiens
atacatatatcagtggtaattgtctgacgagatttcttatggcatttttagaaaaagtatgagtctgtggtggttctacgggtaagcagagaggcattttattgtgttatttacagaccacaaaaaatcttatctttccctaaacatctcccctacaaccctaccatagtgccagatgtccctaccactacagtcacctgctttgtcaaagcactgttcagaacatctatattttatgcagacttattccttagggaatagggcacgtttatctgtaaccaaactgaacatgtttcagaatttaattgacaggttatttaactacctcctgagtgagggtagagtttagaaattagggaaaggtaaagaaratgggtatgttttgaagtggaagaagagagacaagacaagaaaatatttaaattatgaaatacagggtaataaaagttggtcatgataactgtattcaggctgtaggaaggttgtttggattttgtataaagaacaagatcataagataggactgggaaatgagtgccatatgaccatgtagt

SEQ ID NO: 246777 - DNA, 577 bp, Homo sapiens
gttctgcaggcttgaatgccttgtgctattccatgttttttcctatgataaccgcctgaaggctgcttcactctggaaagcagcctcactttctgagccactctggcctctacatgttgcttgtctattgctttcacgggcaaggtcaagagaaaggtacaatttaatactgcctgcgtaattcccttttcttgtagaatctttttcaattattctgttttaattgtgagactgtttattaatttccaggagttacaatgttttgagtcattttaaaataatagatttccaaacttttctttgatcagatggaaaaaaatatctgttatgaaaaattggttaaagtttccgttatacacaagtatctaattatttcttataaytgttttattgatacataaaaacatatattctctatttaatgtatgttatagttctatatttaatttgtttaattgagcctatcaattgaattattttatttctttatgttaatgacttattgttttcttttttctactgaattttaaaatttataaaccatatttgttaagatccagaggtaccttatatgctt

SEQ ID NO: 246778 - DNA, 583 bp, Homo sapiens
tttacagaagggtgattccggatgaagcacaaagcctttcactcttgctttctccagcctcctaccctttcgtcattcagagtatgagctgcagacagctttttaaattatacagacagatttttcattttaaagaaactaactggaaaaagaaaatttgtggtaatgattatggttttctagggccttctgaatatatagagtttatcaacagtaagcttaaatttctctttcctctgccctaacaaagaaaacaataattctctaagcaggtaaacctgttctctctctctctctttctctctctgtatctttatctatatcatgtatatctttatctatatatgattgaacactacagaacctctctgcttatgtcatgcagggatgaaaarttctgctcctgatcataatattacttgagaatgtcatttgatgataccagaagttcataaaacattaagataatgattcctaatattacttgtcagtaaaatatggaaatcatttcttgttacccatttgtactaattttatcttacacatatttagtcagcagcaaagccttccaggggtgattgtt

SEQ ID NO: 246779 - DNA, 584 bp, Homo sapiens
tattcagtgataaaaaggaatgaactaccaatacatgctacaacacggatacacctccaaaccattatactaagtgaaaaaggccaggccccaaaggccatatattatatggttcaatctatatgaatatccagaatggataattttatagaaacagaatgcagattgatggttgycaggggctagggaaaggggacaattgggaggaagtgcttactggataagggctcttactttggagtgacggaaatgttttggaaatagagagaggtggtgatagcaaaatatttattgtactaggtgcccctgaactgttcattttaatatggctaattttgtattatatgaaattcaccttaataagttattcctgaggaaaaaaaatagctaagaattcttatctgggaagacaaagtaaagggttaataaagacaagtcctcatatgcagtaggttttataagaataaccaactcatctcctcttctacagagttgcctaagtaagaaaagataatttatagtggaaggaatatggaccatgttcattcctaccaactagattgtgacctccctcagaatgggga

SEQ ID NO: 246780 - DNA, 635 bp, Homo sapiens
cattgtgacctgtttttcatagataattttgacatgtatttttggagttttgaaaacatcatttttagggaatatgatttaaaatatttttaaagtagtaattattagaaattatctaaactattagcttcttctaatttgaagataatgttacatctccaaggatactgcagaaaggagcttgggtaccatgtgaaccagcatgcctgtaagtttcctatcaactccaagttgtgttggtacttccrttctgttcaaatggttatcagcacctgaaatgaatatgctctagattagtcttcctttttatatatagaatacacttataaaatagatggattactttaacagtttgtagctgtgaagagagcgaaaccaacctgcacaatggagactgaaacataacttgagacccaaagtgtactcttagctataaaatgtaatataaatgtaaattatttgttgtggttcaagaccttatactcttacttctggtgccttttatgaattcccaccatggtataggactatactttttctaatagaacaacaaaagacattttatgaaaggatggcattgaagtttatcgtgacatctacctaccttacagaagcacatgtagaggggtttgtgt

SEQ ID NO: 246781 - DNA, 513 bp, Homo sapiens
tacttgtatacagagagtttacatatgtcatttaatgtgatcctctaggaatgatggccccattagatagtaggcataggttctcatgggaatgatgaccctgttcgatgagtaggcagatattaacatcctcacattagaattcaggaaaggaagacactgagatttggaggtataatagctagagtggtttctgtctgttacagtgagaccctatttgccacttttagtcagtttcctgttacttgcagctcaattaacactggtggaaacagtcacatacagggtaaatactggagctagaacttaaatccagcccatctaacaataaattcaaagctctttcaattatcgcatgygtagaaagttggtaagaactagagttcagtttctggaagatgactgtctacttttttatttcatctttctttactcttcactttgtctcctaaagtagctccccagcaggtatcttcatctctcttcccgttcttgcctctaaacacaggtctg

SEQ ID NO: 246782 - DNA, 665 bp, Homo sapiens
gtactggttattctctgtgcaaaataaactgggatcagaaagcatattaagccataaaacaaggcctgaccttgtatgattctctacccaatgagctaaccagccagggcagagttgggaaggctacaggattgtaggccattaacatccccgaagagccaggctgatctcttgtattattctcaggcatgagcagagagtgtatgcaatagccagttccatatgttactataatggttcacttgctttctaaatgaatgcagcctccttaccagctgtggactcttagtgtttgtaaaggtttaaagatgccccagtaggaagtagaatgacattgaataaagatgttgaaaaaaagaatgcaaccaaagatgacgagatagtatatattaaagttagtttagccagagcccagcacataataagctttcaataaatgttaactccagttgaggttattactattattcttgtgccatcgtcgtttaactcaaattattactgatmatcagtggcatattgactatggatgtgaagcatagaaagttcaagacatttaacttgattttctagaaaacagcagtttaaacaatctacttttttcaagcctaacttcttaccctatttgtgcatattatagtatatggtccttaacttatggacat

SEQ ID NO: 246783 - DNA, 581 bp, Homo sapiens
aatggcagtgaatgcacagaccctgtacaatcctaaaacttagtaattctgtcagtgtcagggctaagtaattctagatgattgcagtcctcgaagcccagctgcccacgtacttaaagctcgtgggagagattgatatgtccccrgagagtctgccttgcactgggccttcttcacctcttcgagtctcccatgcgaggctcagcagtgactcatcatgatcactggagtggtagggggctcagaccctcaactcccaattgtgttctggacttacaactcttaatgcctttggccaagttgtctaacttatctttagtttcaccagctgtgaaacacaaataatgtgtacttccagacctgccgcataatcagtgataacacaaaaaagtttttattgtgtcagaaccaatctcttctaattttaattattactttgtggcttctaattttaataatcatttctttgtaatcctagcctatgtgaatcgttttgtgagatgaatacaaccaagtggggtcagtgtcaaaaggctgccaagtgtcactgctgcttgggttgcagtattgtctgcaactag

SEQ ID NO: 246784 - DNA, 592 bp, Homo sapiens
atttaggtccttgccttggtgtgttttcctcagtgctcccaaccatagaaaagcaggacaagtttacagttgctattcrtctaagtctgatgcttctttcccataagttgttttgggaattaagcatcttgctgaaagtgaatgtgccattttgaaaatcttagcaaattacattttcagaattttatagggcctttttttccctttcgctacctttgttccaaatcatgcttttgaaacaatctttctcccaaagcatttctattaataatacttttcagttctccctcttataactcattgtgataaattacctcctccctccatgatgttaatgttctggaggcctctgagagttctcctcatggtggaagtccactacagagctgctgagagcagagcctttagcctgatgttccaggagctcttgctactgccccatccatccgtccgtccgtccatccatccatccatccatccatccatccatccatccatgaatgattgctgctctatcatgcctcatagctggccctggggagtggttttagctacacttgaattccaccttttcctcataaagtggtatgga

SEQ ID NO: 246785 - DNA, 592 bp, Homo sapiens
atttaggtccttgccttggtgtgttttcctcagtgctcccaaccatagaaaagcaggacaagtttacagttgctattcatctaagtctgatgcttctttcccataagttgttttgggaattaagcatcttgctgaaagtgaatgtgccattttgaaaatcttagcaaattacattttcagaattttatarggcctttttttccctttcgctacctttgttccaaatcatgcttttgaaacaatctttctcccaaagcatttctattaataatacttttcagttctccctcttataactcattgtgataaattacctcctccctccatgatgttaatgttctggaggcctctgagagttctcctcatggtggaagtccactacagagctgctgagagcagagcctttagcctgatgttccaggagctcttgctactgccccatccatccgtccgtccgtccatccatccatccatccatccatccatccatccatccatgaatgattgctgctctatcatgcctcatagctggccctggggagtggttttagctacacttgaattccaccttttcctcataaagtggtatgga

SEQ ID NO: 246786 - DNA, 584 bp, Homo sapiens
gcaaatcaaaaccacaatgcgataccaccttacatctgcaagaatggccataatagaaaaataatagatgtgggtgtggatgtggtgaaaagggaacttttacactgctggtgggaatgtaaactagtacaaccaccatggaaaacagtgtagagattccttaaagaactaaaagtagaagtaccttttgatccagcaatcccactactgggtatctgcccagaggaaaaaaagtcattatacgaaaaagatacttgcacatgcatgtttgtagcagcacaattygcaattgcaaaaatacagaaaccagcccaaatgcctatcaatcaatgaggggataaagaattttgtgtgtgtgtgtgtgtgtgtgtgtgtgtgtgtgtgtgtgtgtgtctgtgtgtgtgtgtgatggaatactactcagccataaaaaggaacgaattaatggcatttgcagcaaccttcatgaaacttgagactattattgtaagtgaagtaactcaggaatggaaaaccaaacattgtgtgaagttcttactcaaaaatgggagctaagctatgaggatgcagaggcataagaatga

SEQ ID NO: 246787 - DNA, 584 bp, Homo sapiens
gcaaatcaaaaccacaatgcgataccaccttacatctgcaagaatggccataatagaaaaataatagatgtgggtgtggatgtggtgaaaagggaacttttacactgctggtgggaatgtaaactagtacaaccaccatggaaaacagtgtagagattccttaaagaactaaaagtagaagtaccttttgatccagcaatcccactactgggtatctgcccagaggaaaaaaagtcattatacgaaaaagatacttgcacatgcatgtttgtagcagcacaattcgcaattgcaaaaatacagaaaccagcccaaatgcctatcaatcaatgaggggataaagaattktgtgtgtgtgtgtgtgtgtgtgtgtgtgtgtgtgtgtgtgtgtgtctgtgtgtgtgtgtgatggaatactactcagccataaaaaggaacgaattaatggcatttgcagcaaccttcatgaaacttgagactattattgtaagtgaagtaactcaggaatggaaaaccaaacattgtgtgaagttcttactcaaaaatgggagctaagctatgaggatgcagaggcataagaatga

SEQ ID NO: 246788 - DNA, 584 bp, Homo sapiens
gcaaatcaaaaccacaatgcgataccaccttacatctgcaagaatggccataatagaaaaataatagatgtgggtgtggatgtggtgaaaagggaacttttacactgctggtgggaatgtaaactagtacaaccaccatggaaaacagtgtagagattccttaaagaactaaaagtagaagtaccttttgatccagcaatcccactactgggtatctgcccagaggaaaaaaagtcattatacgaaaaagatacttgcacatgcatgtttgtagcagcacaattcgcaattgcaaaaatacagaaaccagcccaaatgcctatcaatcaatgaggggataaagaattttgtgtgtgtgtgtgtgtgtgtgtgtgtgtgtgtgtgtgtgtgtgtctgtgtgtgtgtgtgatggaatactactcagccataaaaaggaaygaattaatggcatttgcagcaaccttcatgaaacttgagactattattgtaagtgaagtaactcaggaatggaaaaccaaacattgtgtgaagttcttactcaaaaatgggagctaagctatgaggatgcagaggcataagaatga

SEQ ID NO: 246789 - DNA, 582 bp, Homo sapiens
aacattttttgagcacagactttgtgttagtactgttacctgttgtaggaaatttgttctaagtcctggctgcatcatgttacttagggaactttgaaagaggctctttactcctacactccatccctggtgattctcatactatagggtaaggcttgggacctgggaagtgtttgtttgtttgtttgttttaaaaaagctctcatagtaatactagtgttctgtcatgcttcaagataaagagattgtcctttcactagactggatatatcatattcttccttttctttgattaatatctttgtctctgtttttttaaattttttgtttctattcacaagaaaaaaatagaaattgggagacttgagtagcttattttcaagtttaaggaatgggaaggcacttcaatatagattatcttatttcactyaataattttgtaaagtaaatgttattatttcccttttttccattgagcattgaaggtttttaaaacttacagaaagccacaaaacgagttaatgttagaatatggcttggaatccagaggtgtgtaactccagagctcatattcttttccct

SEQ ID NO: 246790 - DNA, 448 bp, Homo sapiens
ttggtttctaatgcctccttgggaaaatggctgattctaggtctggggcaggaaatatacaagatgaacctggagcattttgtagtgctggaaaataggaaagtacttaaaaaaacctaaacacacgcacttgacaggggtatgccaaaggggcacacgtcaacttaaagagctcccaacagccaaaactgaaaactatttggggacaaaaaattataacccagagtataaaataaatatccatgaattcatgctgttataaattattaaatagaggagatgaggcaaatctgtgcagaaaaattccaaattattagacttcatcttagccaaaaggccaagaagcagtaaaactccaaattatttatgtagctactcctccctctaggaggtggaatataagtctgcrctccttaagcatggtctgcacatagtgacttcttacaaa

SEQ ID NO: 246791 - DNA, 654 bp, Homo sapiens
atgtagcatttccaattttagagataaatcctttccaatcacttacttttacatgtagggggcaataactaagagattagcttgtagcttttagcgtatgtatcctgcacactattcctctcagatttgctgcagttgctcccatttaatatatttggtcccatggtcccattgttccaatacgtaattcctacctgtcacaccatacatattttatacataaatacatctatctatctatctatctatctatctatctatctatctatctatcaaataaagtttggcctttgcaaatatggtaacagctatgttaatttttatcctggagaagtaagatgagggatgctgatttcaaaggagtggaagatgctggaaggatgcatgctgtcytcaaaatctaaccagggctctgagcaaattccctaaagatcacatatcctaatgtgttctgctctatgcatcctcctttgctacgtggtttaccatgatccagggaaaactcatccattaaaggaggaacacaccaatttcttttctttggaagttaaaataaataattgcaggcattatttagttaatctttgcctcttctgagactgttgagtcacaaacttgcttcaactctaactttcagataatgtcgcttctccc

SEQ ID NO: 246792 - DNA, 558 bp, Homo sapiens
caggggttcaagaccggcctgggaaacataacaagaccgaccacatctctacaaaaaaygtttttaaaaattttttttaattagctgggcatggaggtgcatgtctgtagtcctagctacttgggagactgaagtgagaggatcacttgagcccaggaattcgaggttgcagtgagccagtgagctaagattgcaccactgcactcctggtgggcaacatatagcatgaccctgtctctaaaaaatatataaataaatccttttccatattgatattgatattataaagtaggagaaatacatgaaaggatcttgtggcagacagaataatagcctgcaaagatatccacatcttaatgccggaacctgtgaatatgttacatggcaaggaagaattaagattccagttggaattaaggttactaaacaactgactttaaaatagggagattatctggaatgatccagttggataatcacaagcagccttacacgtgaaaagggaggcggaaaagttagcgttggagggggacctggacagacccagccaaccactgc

SEQ ID NO: 246793 - DNA, 558 bp, Homo sapiens
caggggttcaagaccggcctgggaaacataacaagaccgaccacatctctacaaaaaacgtttttaaaaattttttttaattagctgggcatggaggtgcatgtctgtagwcctagctacttgggagactgaagtgagaggatcacttgagcccaggaattcgaggttgcagtgagccagtgagctaagattgcaccactgcactcctggtgggcaacatatagcatgaccctgtctctaaaaaatatataaataaatccttttccatattgatattgatattataaagtaggagaaatacatgaaaggatcttgtggcagacagaataatagcctgcaaagatatccacatcttaatgccggaacctgtgaatatgttacatggcaaggaagaattaagattccagttggaattaaggttactaaacaactgactttaaaatagggagattatctggaatgatccagttggataatcacaagcagccttacacgtgaaaagggaggcggaaaagttagcgttggagggggacctggacagacccagccaaccactgc

SEQ ID NO: 246794 - DNA, 628 bp, Homo sapiens
aatctcagcttttttgtatcctggcactcaccaagaggaactttttggcactgagttaytggaacagcttaaggatgccgcctaaacccagaagttggcgactgctgcagaccttccctcagagagcagctgaaaattattcctattaagtaggaggaaggaggtgaggtggcagctgctgggagatgttggggaaggtgagcaccccaatttgaaagtagaagacaaggcaaagaagtctcatttcccagcttggattcccaatcacagaaaaatattttttgattcttcctgttactttttaacttggcaattgaatacttctaacatctgactgtcaggctacctggaaatattagcagaaagtttatatccatttccctctaatatatgcttgaattaatgtagcaccagtctttcgtgctcccagaacacagtgaaatagatttacaaatatgtggcatggaaaatcagttaaaaacaaatagcacttactatcagttaaaaatgaatttagctagatgtttttatcagtgtggcaggaagttatttatgaacactattgttaggtacaccagaacttgctctgccagttcttgttttcagcactaggggatcaaaagtcatc

SEQ ID NO: 246795 - DNA, 569 bp, Homo sapiens
acaaccactctgtaaaacagtttgatggtttgtctaaaacctgaatatgcaactactatatgacccaagaattgtactcctgggaatttgtcttagagaaatgaagcgtatgttcactcagaaacctttataggaatggttacagcagctttgtttataatcgccccaaattgcgcacaaccaggatatccttcaaggaatgaatggttaaactgtagtacatccatggaatacttctcagcaacagsctggatgaatttccagagaactatgctgaatgaagaaagccagtcccaaaaggttacatactgtgtgattccattcatgtaaaatgacagagttacagaaatggagaacagattggtgattgcgaggggtaaagaaagtggtggggttgggagggaagtgggtgtggctataaaagggcaacatgagggacccatgcaatgatggaaatgtttgtatcttgactaccagtgtcaatatcctctttgtgatattgttctacagttttttgaaatgttaccacggtgggtggggggggaaaactgggtataaggtgcatgaga

SEQ ID NO: 246796 - DNA, 569 bp, Homo sapiens
acaaccactctgtaaaacagtttgatggtttgtctaaaacctgaatatgcaactactatatgacccaagaattgtactcctgggaatttgtcttagagaaatgaagcgtatgttcactcagaaacctttataggaatggttacagcagctttgtttataatcgccccaaattgcgcacaaccaggatatccttcaaggaatgaatggttaaactgtagtacatccatggaatacttctcagcaacagcctggatgaatttccagagaactatgctgaatgaagaaagccagtcccaaaaggttacatactgtgtgattccattcatgtaaaatgacagagttacagaaatggagaacagattggtgattgcgaggggtaaagaaagtggtggggttgggagggaagtgggtgtggctataaaagggcaacatgagggacccatgcaatgatggaaatgtttgtatcttgactaccartgtcaatatcctctttgtgatattgttctacagttttttgaaatgttaccacggtgggtggggggggaaaactgggtataaggtgcatgaga

SEQ ID NO: 246797 - DNA, 542 bp, Homo sapiens
aggttgtggtttagggatggggagtgtggggatgggctgtgggaagggaggcatacagaaatgtataaggaggcatgagtcctaacaaactattcctgggttctggctagaggtatttttgtgacgatcacactgaccccggtggggtgggcatggggggagcatggcctgttaatggctagaagtttgggttttctttctgctcctgaaggctgaggctgcaaacccagaacacacacttactgagtggggatctcactgcactttttgccttctcaattctccttgagaartgcagccccacctttatttcttgagtgttctagaagaggtggaaaacagcctggactgtagtgggggtcagcccagcatcagtgtggtagtgagcaggggtggacttcgggagcaagagcagcgtttgccgcggggcttgcactcccagcagctcacccgtctctgtcctgaccctccctactgggcacgcagggtctctgtagcacttggccgaggcctagatacccagggtttcccactggaaagtc

SEQ ID NO: 246798 - DNA, 538 bp, Homo sapiens
gactggggctgctgcgtttctttcagagatgccctgcccagagaggaggaagctagagaggcagtctggctacagtggctttgctgagctgcggttcaaacttccccatggctttgtttacactgtgaagggaaaactgcctactcaagcctcagcaatggtggacgcccckcccctgaccaagctcaagcgtcccaggtggacttcaggctgctgttctggcaatgagaatttcaagccagtggatcttagcttgctaggctctctgggggtgggatccgctgagctagaccacttggctccctggcttcagccccctttccagggtagtgaaagattctgtctcgctggtgttccaggcaccactggggtatgaaaaaactcccgcagctagctaggtgtctgtctaaatagccacccagtttttgtgcttgaaacccagggccctggtggtgtaggcacccaagggaatctcctggtttgcgggctgtgaagaccatgggaaaagcatagtatctgagccggaacgcactgttcc

SEQ ID NO: 246799 - DNA, 586 bp, Homo sapiens
ccatttttaaataatcaatatttcatattgacattgaatactatgtaaattataataaaaagatgggattgttcttgaaagttttttttttwaaggttttgttttgtctttttggccttttttttttttttttttttttttgagatagagtcttgctctgtcacccaggctggagtgcagtggcctgatcacaactcactggagccttcagctcctaggctcaggagatcctctcacctcagcctcccaagtagctaggactacaggcacatgcctccacacccaactaatatttaaatagtttgttgaaatgaggtcttgctctgttgcccaggctgatctcaaacacctgggctcaagcaagcctcccgcctcagcctcccaacgtgttgggattacaggcgtgagccactgtgcctggcctgtcttgtttttaaaaatgttttgaacaccactgcccctggcccccagaggctgatgtacaagaacatgaaaaagcattcaaacttcaggattcttgccctaactttgcacatgtgataacccagatgatggactcacttcatctgggctgtcatctccaacc

SEQ ID NO: 246800 - DNA, 450 bp, Homo sapiens
cctctatttttttttttttttttttttttttttttgagagggagtctcactctgtcacccaggcgggaatgtartggtaccatcttggctcattgcaacccccacctcccaggttcaagcaattctcctgcctcagcctcctgagtagctgggattacaggtgccagccaccaagccgggctaatttttctatttttagtatagacagggttttaccatgttggccaggctggtctcaaactcctgacctcaggtgatctgcccgcctcggcctcccaaagtgctgggccaagcatctaacactcagtacttgttacaagttccaaaatgctatgggattgtatctctcagcaacttaacacttgaattttaggtttaatagaaaattactataacaaagttttgaaactcttatagacagcagcctggtgtgaagaagagtgtagaaat

SEQ ID NO: 246801 - DNA, 585 bp, Homo sapiens
catactaatgctagaagcacattaactactaaggaagatgtatgtttctacagtcatattagacattttgtaagtttcaggaacagatagaatataaaatatttcagtcactgccaagccagattagatttgattcaatgcaggtgaaacatcacagcaaaattcaaactgccaatctcccaagctatatgcaaagattctcaaggagtcctaaatatatagaacttgagaatatttacttggtctacctctcaccttcaaatacatgacagctgctaggcaacaccttctcaggcacaaagatgtccaaaaatgagaacctcatctcccaggagacwctttaaatgtatgcttacgtggaaggggagggttactgagaagcacaggcagagaccattgcatagagagcacaggagtaatcagaggataaaaaatgcatcagacatcttttccaggcattcagtataaaaaaaatgaagagaacctaacataagttaagtacctactatgttccaggcaatgcactgagtactttatgtttatttaccctttaaagctcaaaatgaattaataaggtcaatatta

SEQ ID NO: 246802 - DNA, 527 bp, Homo sapiens
ctttgaaaatatatttattttccctaaaataaactcttctaaactctattcccagggttctaggagaatatgaaaaattgtgcttttatccatttcatagttttctctagtaagattatagacaaatttatggtccgtactgctatttgtccatttttaattctatttgtgtyctgaatttcatgtcctttttgtttctttccttctcagccacttttaattaattatcttagtttatttaatgttgctaaaagctgacttaaattctttctgaaacaatgtgcaggtacaaataagtaagcaaatagatgaataaattactaagttccttcatgatattaactatttcagtcacctctcctctcggccttcccttttaccaaaagataggcctaatatattttttgtttgtcatcatccaattcctgtatttccttgaacagttcattttagttgctaaagtgaagaatagagttttgaaggataatttgggggtgaaagactcacacagacagctgttacaggtg

SEQ ID NO: 246803 - DNA, 527 bp, Homo sapiens
ctttgaaaatatatttattttccctaaaataaactcttctaaactctattcccagggttctaggagaatatgaaaaattgtgcttttatccatttcatagttttctctagtaagattatagacaaatttatggtccgtactgctatttgtccatttttaattctatttgtgtcctgaatttcatgtcctttttgtttctttccttctcagccacttttaattaattatcttagtttatttaatgttgctaaaagctgacttaaattctttctgaaacaatgtgcaggtacaaataagtaagcaaatagatgaataaattactaagttccttcatgatattaactatttcagtcacctctcctctcggccttcccttttaccaaaagataggcctaatatattttttgtttgtcatcatccaaytcctgtatttccttgaacagttcattttagttgctaaagtgaagaatagagttttgaaggataatttgggggtgaaagactcacacagacagctgttacaggtg

SEQ ID NO: 246804 - DNA, 541 bp, Homo sapiens
agcaaatagatgaataaattactaagttccttcatgatattaactatttcagtcacctctcctctcggccttcccttttaccaaaagataggcctaatatattttttgtttgtcatcatccaattcctgtatttccttgaacagttcattttagttgctaaagtgaagwatagagttttgaaggataatttgggggtgaaagactcacacagacagctgttacaggtgagggaaatgaatggaaaggtgagatttttaaggtcatataatggtggtctaggaatccccattgtaatgtctgataaatgcaaatcaataactttagttattttaaaattgcttttattgctgccctgggttcctctgattgtacggtgctctgagcacactgtattataaatcacatggatcatgtctttctaagcagattatatggacttagttgaaaatatgacacctaatgggcaggggggatatcagtgagagtcctcctaacataacttgcatggagaatttagaaagacaaaggagagaaccaaag

SEQ ID NO: 246805 - DNA, 521 bp, Homo sapiens
ggggtgggatgacggagataagagtaatggtagggtagatgyacctgatagcaataatgtacccatatccttcgaatgcacccgtgtggcagatgaacctaaatgtgtgttctgagctaggtggaatgtctgccaccaaggggctgcaaagtcatatttggagtttgaaggccaagccaaagatttattctttatctatgatgaacatctgagtctccagcctgtcccgtggaacatgggccagactgtacaggggattgaggccctgaattttgggttaaatggaggttgccaggtggaggttgttagcagggagggtattaaatgaaaatgctacataaatagcatggtgtttgcaagccgctgcggttttcctgtccagcccactgtcaccggactctctcccctatatgtgagcccctgataaaatcccatgtctcatttgctggctctgagtctcttcttcggcctcttgaacgtggcgccttccctattgggattaataggatttgccacggcat

SEQ ID NO: 246806 - DNA, 620 bp, Homo sapiens
acattatcctcattcaacaaattgttattgatcttttttaccattaataaataaaattttaaaaattaattttgacattttctttacctcctttattgtaaatttcctttttgcatgttttatcaaccacaaatatattattacagtagtacattacagaaaagaagaaatgacaaatacatcaatatacatatattgccttcatcctaagacatagattttcttcatactttatcagctctaaaattggatgacacaatatrttacatatatacggcttagacagaattaaacttatttaaataaagacagaaagacgagtgtgtagcagtcttaaaagatccttccctggtgtgttgttgacatcatcatagactcagagcccttgagattggtagaatggatttattaatttgtcatcagcctgaaggttctgactgaaatttgccttaagcgttaatgaaatagctggggatttgagtgcccatagtcctcggagtttataaaatatcagtagagtgtaggtgtgaagaagaaaattggtaatctttacctaatatctacttagcttgtcaaatatttgctcagtatctgtagtcaaaccctctttaagacagagg

SEQ ID NO: 246807 - DNA, 584 bp, Homo sapiens
gatactagtataactttctgcccaaaatgactaaaagtcacttgaaatatggttactcttactagtacatggtagtgataaagagatcaggctttggagtcagatgggcgagtacaaatcccttgtaaatgggtcatcttgtgcaagttattgaatcgctcaaagcctcagtttcaatgatgataccacactgacagaattgttttgaaaaattaaataacattcatggagttcttagcatcaagcttggaactgataggcattattatgtataaactctattaaaatatattgcattcactggttagtattaaggtaactaataatgtttacttgtctatgttaatctataagacttcatattaatccaaatggggaaaagtaggtaatcatgattttcctggtctcatcatactgacctctagaaatgtacttctggagtgtcccatgggtggcaataacaatagcattcaggcaaatgcttagtaacattggcagtgaccgtcttaatctttctatttgcattcaayactaatttacaggctttaatccaatgactaaaaaattaaggcctgatgtcatta

SEQ ID NO: 246808 - DNA, 621 bp, Homo sapiens
tatcattaacaatgtttagtaagagtccatgtgtgaccctccatcagacactaaagaattaatctttctaaaaagatatgctctacaacaggggtccccaacccccgggccacagacctctaccagttggtggcctgttaggaactgggctgtacagcaggaggtgagtggcgggatagtgtgcattaccacctgagctccacctatcgtcatatcagcagcagcattagattctcataggagcatgaaccctattgtgaactgcacatttgagggatttatgttgtgtgttccttatgagaatctaatgcctgatgatctgaggtggaacagtttcatcctaaaaccatactccccctccccacggtccatgtccatggaaaaattgtcttccaggaaactggtccctggtgcyaaaaagattgcggactgctgctctataacaagtaagttcaaaaacgatgattgttaacttcagcagtggtttctttcaatttttagggttttataatataaaatttgcctctcatgatgaacacagtgggcattcctaaagttatagaggcacagaaaaaagcacagtgaactgagaccagaaatgtggctcctccccacagcttt

SEQ ID NO: 246809 - DNA, 602 bp, Homo sapiens
actgccttgtccaatggttatgatgctgtagtaagttaaaatgtgaaagtgcttagaatagtgcctggcccacagctaacactcaatgaacttcaacgtttgttgttagtgctatgatggacactgagtctgcaacagcaataataacacctacaatagcaataataataacaccaatattggcctagtgctagatgaggacttggagaccatctaaactggtctggtgcctgggtgcccactctgactcatcaggagggaatgcctggagtattggcttgggttgctttgctatttcatctgggcttagtgagaatggtgctgcaaccgattagcaatgcctgcagtgggcaaggaagggaagagttagggaagccatgctattgattagccattcctgatgctggtccaagccctctccttgtacagatgaggaaactcagagaaggaagagggcagctcagaggaagctcagagaaggactaaggcttgctcaaggccacacaggcagtcagagacaagactcctgagcctgcctctgcagttccttgctgggccctggtctatgtcayttaatcctgcggagaagagtcattatttct

SEQ ID NO: 246810 - DNA, 584 bp, Homo sapiens
aactttaccatagaagtctaaaatgatgtaactttctcaataagagagcattctagcctcagttaagtaatgttggttttctttctcccctctctgtctgatcatcttaatggtccttcttttcatgacaagaaaacagctgaatttcaccagtaagatatgggtttggcgcgccagctggatgtgataacacaataacccaaattactgtttatatggtgctttatatttggctaggtgctttcatgtactctatcatgtcatttggccctcaaaactactttgtgaagtgggaggagcagagattagaattgcaatttacaaatgaagaaataggattacagacattgcccagagacactgggagagctaaactctaagcccagggccttagattcctccttcagtgttttttcwgggttcttctgactagaatccaatagaccactcactctctaacaagcgtaaggcagcaaagtttcttcctcttagcccacctctgcccaacaggcttcaatgacttcctgtgatttgtaagatacaatccaaactacttctcccagcaaggaaagctttctgcagtc

SEQ ID NO: 246811 - DNA, 579 bp, Homo sapiens
gttttttcagggttcttctgactagaatccaatagaccactcactctctaacaagcgtaaggcagcaaagtttcttcctcttagcccacctctgcccaamaggcttcaatgacttcctgtgatttgtaagatacaatccaaactacttctcccagcaaggaaagctttctgcagtcttatctttctagtcttatttttggatagtaatcccttccaactcagagtcatgcacccaggtacataaaccttcagatatcagctttcttgggcatgccttggacttccacaccagcagtcattatagcaaataaagaatttaataaacacagagctagcttagcagtaaacaggagtttattactcaaatcagcctccccagtagctcagaggctagggtttttaaggataatttggcacgcagggggatgctgattggttggggatgaaattgcagaggtgtggaaaatggtcctcctgcgcggagtctgcctctggttggggaccacaagactggttgagtcatgagtcaaggtccaggtggagttggttacgagaacacaaaagtctgcaaaacacctc

SEQ ID NO: 246812 - DNA, 562 bp, Homo sapiens
ctttattcatgagtattgcagtagtggggagagatcaggctcaaatttgagtacaacaaggacaagtggggatttatagccaaggaacaggatgagggtgtcagtggattggaaattactaagaggagagacatcaggggtaggggattcttgctaaactggcctaacaagattcttgctaattgcaggaaagtgagggttgagaaacttgatatcaagtgtgatgccatatcaagggtgggaagtaatttagcagsattcttaccaaaactcggctgggcaggccaaagacaagccaggggtcaaggtcaaggcctaggtgaaaagagagctcagaggagcttgactaaagttgggtcacagggagtctttgtaagtggctcctcttgtggtttaaaacggctgctggcacctccttagtccatgcgttctttaatcaaagccagcagcaaaaccaggaataactttgtccttaattcccaggaaaaagtccaaagaatcacttatatcagatcagcttattcacgtgtgatcctctggaccaggaggttggctgtgctgg

SEQ ID NO: 246813 - DNA, 626 bp, Homo sapiens
agattctaaaaccctagtggagaataggataacagatggaataacttcaatacctgaatgactgcctggagcagagcctcccttcaacttccacctccaattgaattttacccaagcaagagatctctgtgatgtcaagctgctgagctgttggtttttctctgttaagcaaattgtactaccttaacttgtgcaagggatgacgtgaagagggatagagagaatgtttgctggtgtggcaactaataagctaatgtctaccatgattacctccraacagctcttaggcatatagcaataatagtcaagtgacacctattacctacattcccagctgtgtcaccagaggtcttttcacattacaaaatccagaaccatttaacctagagtctgcatggtttatgtaatgtacctaacacggcactctgctcatgtgacttagagcattggcatgcagagaattcaggacctggagttgattttccaatgcttggaggtcatattcttatcaatgtgattttaagctatgaactgaaaaatcaaaaaccaatcatgtaatatgtggctacaaaaatgtcagtgtgggcccacagttaagagctggtaggaaacacagcctgttgtca

SEQ ID NO: 246814 - DNA, 626 bp, Homo sapiens
agattctaaaaccctagtggagaataggataacagatggaataacttcaatacctgaatgactgcctggagcagagcctcccttcaacttccacctccaattgaattttacccaagcaagagatctctgtgatgtcaagctgctgagctgttggtttttctctgttaagcaaattgtactaccttaacttgtgcaagggatgacgtgaagagggatagagagaatgtttgctggtgtggcaactaataagctaatgtctaccatgattacctccgaacagctcttaggcatatagcaataatagtcaagtgacacctattacctacattcccagctgtgtcaccagaggtcttttcacattacaaaatccrgaaccatttaacctagagtctgcatggtttatgtaatgtacctaacacggcactctgctcatgtgacttagagcattggcatgcagagaattcaggacctggagttgattttccaatgcttggaggtcatattcttatcaatgtgattttaagctatgaactgaaaaatcaaaaaccaatcatgtaatatgtggctacaaaaatgtcagtgtgggcccacagttaagagctggtaggaaacacagcctgttgtca

SEQ ID NO: 246815 - DNA, 541 bp, Homo sapiens
ctaatggaggtgaaagaaaggatgtgtgaggtgttaaagttattaaaaggggatgttgttyataagttcatgaaggtgaaaaagcgtgacctttttctctacatatttaataattcattcaccatttcattcaattcagcaaataatgattaaacaccgactgcataccaaagagtgtggaaatattgagaaagcagggttaaataagcctaccctattgcagtgtgtagattcacacaaacagaaaatggacaatgcaagtttagttttatagagatgtgcaagttatcctagaagagacaaactctagccacagggtgtaactagtgaaggcttttctgagaaaatgatacctccccaccaccatcatcaccaactccaaggtcattattatatttcttatgagctggacagtaaatatctaaagagagaggaaaagtgaaaactttgtggtatgcagcctctgaaagagcccccaatgagcctggtctcctgttactgtataatcctctgccctcgggtgaggcgtgaatctagtgat

SEQ ID NO: 246816 - DNA, 587 bp, Homo sapiens
aacatgcagagttgcatacttcaatgtcagactgacatccccatcatacttcatcatccacacttaggttctagagacaagggctagtgatgagggggagaaaccgaaaagaatcaataggctcaagccagtggaatgctgcccatggttgttgttgagttagacaccgcttacctgctctgacttttgggtttcatgttcaggtgactgcggaagccagagcagtgagtagcatcactaacggaatgaatgtagatggacaagaagacctcataggttagatgattgcacaatgttccctttgggggagtacagggaaagtataagagcaagggtaatctaagagtgaggagagtcatcaatagattatttgatcaacatatatgatggataccaagagccgtcagaaagagttggtattatcacaaaggactagaagtctatttgctstaataaccaaaatgtctagggatatcctaaccctgctttatccagcacatcctgcccgcacatcatctgggtaccattcaaccctctggttccacccacatccttaaaacgttaaaaatacatatatttttatgtaa

SEQ ID NO: 246817 - DNA, 527 bp, Homo sapiens
atctgggtaccattcaaccctctggttccacccacatccttaaaacgttaaaaatacatatatttttatgtaactgcctcttttgctgcatattacagtttcatgcttattactgagaaacttggagcaggaaagctggagaccaatttgattgctttaccaaatattgccacttgttgctcttcagaagcagtaggtttgtggtaataactgtaggaaacatctcaggactctagctcattcttgatccgtgactcaccacattgctttccatgtgtgaagaactcagtactttttctttttttttttttttccatgtaatatcttttttttctgtgttttattttatttattattattatactttaagttttagggtacatgtgcacaatgtgcaggctagttacatatgtacatatgtgccatgctggtgtgctgcacccattaactcgwcatttagcattaggtatatctcctaaagctatccctccccactccccccaccccacaacagtccccagagtgtg

SEQ ID NO: 246818 - DNA, 587 bp, Homo sapiens
ccatctatgaaaaacccacagttaaatcatacacgctgataaaatctttcccctaaaatcagcaccagtacagggaatctactctcacttctattcaacgttgtactggaagttttagtcagggcaattaggcaagaaaaaagaaacaaaagacatctagattggaatggaagaagtaaaaccatctctctttgcaaatgacataatttgatatatagaaaaccataaagaatttgccaaaaatctattagagctaatatatgagttgcacaagtttgcaagaaacaagattaatgtataaagttaattgtatttctatacactagaaatgaataatctgaaaatgaaactaagaaaacaattccaggccagtcacggtggttcacacctgtaatctcagcactttgggaggctgaggtggaaggattgcttgagaccaggagttcgagactagcctagacaacatagtcagaccccrtctcaacaaaaaatagaaaaatttgccagatgtgatggtgcatgcctgtagtctcagctattccaggggctgaggtggaaggatcttgtgagcccatgagtttgaggct

SEQ ID NO: 246819 - DNA, 562 bp, Homo sapiens
accactacctcacatcatatatagaaaataaattggccaggcatggtggctcacacctgtaatcccagcactatgggaagccgaggcggtggatcacgaggtcaggagttcaggaccaacctagacaacatagtgaaaccccgtttctactaaaaatacaaaaaaattagctgrgcgtggtggtgggcacctgtaatcccagctaactcgttggctgaggcaagagaattgcttgaacccaggaggcagaggttgtagccagcggagatcatgccactgcattacagcctgggcaacagtgcaagagtccatctcaaaaagaaaaacaaaaaagaaaataaatcaaaaaggaatcaaagacctaaatttaatatctaaaataataaagatgaaaacataggtttaaatctttgtaaccttaaattaggcaatagtttcttagatatgacaccaaaagcacaagcaaccaaagaaaaaaatagatatgttagacttcaacaaaatttaaaacttttgtgcatcaaaggacacaatcaagaaagtgaagagataatacacacaa

SEQ ID NO: 246820 - DNA, 417 bp, Homo sapiens
ttatttaggtttgtttgctttcatgatccaaggcagagttgaagtattgcaacagaagaagtatggcctgcaaagcctaaattatttactgtttctttacagaataaggtaactaaccactgagccacaytattactagattttctgagtccacactacttcttctccttgttttctttgttttattgataaaacaaacaaacaaaacacatagacagtaaaccaaatacactctttcaacttgtataaactctcataaacctgctgggtgatacataactaaataagaatattttgataaaacaatggcagtaaaccaaggcaactgcttcatctgtgcctcagtcaaagaaatgatgatcttttccaatgcaggacaaagaaaagcccaggtgataaatttttcgataacctgca

SEQ ID NO: 246821 - DNA, 531 bp, Homo sapiens
gtattcaatgaatggctggtctcgtctgaagggaccaaggtagcttcccctgtgtctgatgctttggacagggctctccagcatgcaggtctcagagtatcctgaattcttacgtggcaattgattttccaggaaaaagagtcccaacaagtttggcttcacattcatcctctaaagaaacatttcctacttggatggagcaccttatagatggaacatcagacccaatacatatggaaaaaattaagataatctagcccaaataagttggaaaacattgccttctctagttccctcttggatagtgaaaatgcacatgagcatattaaaggtcttaaaagtcaagagcacaatttaacctgctgcctcaaacacttcctaaccrgttttggcctatcagtataaaaattatttgacacttggaaataaggcaaaaatgttgtgatatggtttggctctgtgtccctacccaagtctcatgtctaattgtaatcccccagtgttggaggtggggcctggtaggaggtgatt

SEQ ID NO: 246822 - DNA, 453 bp, Homo sapiens
gtatgcacacacatgcacacagggaccaaagcaggagcccgtcttgcctggttccaagattggtactgggcagaagatttaagtgatggctgagaatrgggctggcacctggtaaagattcagtaagctgctgttatatttcatgtcagtttcactatggtatctggctgcggaaggtccaactatcctctgagcctaagacctactaacagatgacaaagaatacactttatttgagttggagagaaaataaagccactttatctcttcaaagagagttcgggggggtgacgggatgacaagacagacccagtgatacaggaggcctccacttcccagcggccatagtattccagattcataaggtcaaactttacagccctgttactgccacagttgatcatccctatcagaaatatgctacctatttcatctctgctttaaatgcaaaaa

SEQ ID NO: 246823 - DNA, 611 bp, Homo sapiens
tgttgattcctcaaaagaataaacaattaaccatacgatccagcaattcaactcttgatctatacccaaggggattggaaacatatgttcatacaaaaatgtatacatgatgttcacagaacatcatggagcattatttatgaaaaacaaaatgtggaacccacccagatgcccatcaactgatgaaagggtacataaatatggtatagacatgcaacggaatattattcagccataaaaatgaagcttgatatatgctatagtggataaacattgaaaatatgctaagcaaaagaagtcracacaaaatgtcacatatcatgtcatataattctatttgtttgaaaagtcaagaaatagaaaatccatagagacagaaagtgaattactgcttgccaggagttgcagggaggagagtgggagtgactgcaaacaggtgtggagtttcattttggggcggtaaaaatgttctggacctagatagcagtgacgtggcacaatctcgtgaatatactaaaaaccactggattgcatacttaaaaatggtaaattttatggtttgtgaattatatttcaattaaaattaataaatgtatgaaaacaatgaatca

SEQ ID NO: 246824 - DNA, 571 bp, Homo sapiens
tttaggccttgtgccacacgcaggggatgcccagatgactaagctatggtacctgttctccagacattcgtwggttgtggaggaatagtgtggggagggcccggatagaaatatacacaaaatataggaggcatggaacaggaagaggagaccagctatgctcaagacatcaaggaagactttacagagcaggaaatccttctctttggtcctaaaagataaagagaagctcactaggtgcagagggaggacgttccaggcagggggcacagcatgtacaaaggatgtaaaggcaggaatgccagttgaactgattcaattatttttttataccagtatgggtttgtggatatttattttattctatgggttataatctgtgggttactatctttatttattttgtgactcagattgttccagctctgcctatttagagtttcttcacattggcttttgcgttctttggaaaggcctctatcatattttgagaactttcttgctttctggcatgacaagatgctcctggctcatctcggattttccctgccccagtgctgaaatcaaccac

SEQ ID NO: 246825 - DNA, 571 bp, Homo sapiens
tttaggccttgtgccacacgcaggggatgcccagatgactaagctatggtacctgttctccagacattcgttggttgtggaggaatagtgtggggagggcccggatagaaatatacacaaaatataggaggcatggaacaggaagaggagaccagctatgctcaagacatcaaggaagactttacagagcaggaaatccttctctttggtcctaaaagataaagagaagctcactaggtgcagagggaggacgttccaggcagggggcacagcatgtacaaasgatgtaaaggcaggaatgccagttgaactgattcaattatttttttataccagtatgggtttgtggatatttattttattctatgggttataatctgtgggttactatctttatttattttgtgactcagattgttccagctctgcctatttagagtttcttcacattggcttttgcgttctttggaaaggcctctatcatattttgagaactttcttgctttctggcatgacaagatgctcctggctcatctcggattttccctgccccagtgctgaaatcaaccac

SEQ ID NO: 246826 - DNA, 583 bp, Homo sapiens
gtactgttagcaaatggtaggacctggatttgaacctgaagggtctgccccagcaattgtgtctttataatataaataccactgctatgtatctagtacactacccatgggcttgtagattgttcattttttgctctccccaactaagaacatcgtctttcttgtctccttgtgctgtatacctaatgaatctctttaacatgtacaacaacaaatggaactgttgygctgtggtacatacttaacttcgatggctgtttccagattgctgtctaatgtgaagcaaattccatcagcaatgtttaagagttcccatttctgcatatatttcccagcacttgacactggcagacttcacaaactgctattttaaaaaatgtgcatttcctttattactaaggttgctgaatttcttttcatgagttcatgggccttttgaattttctcttctgtgaattgccagaacgtctttcatgatttgtctattgagctgtttcttttatcttaatatttcatatatcatctatcggtgtgatatttattgaaaatatattatctttgtcttcagcttgtcttttaactt

SEQ ID NO: 246827 - DNA, 633 bp, Homo sapiens
ggaacaggagccattgtgtcatgctgtaatgccatagtgttagtgtccttaatcaccttgttagaatattacttcaaatgtaagtttgaaatatatgcaaaaaccatcaataaactccaaatgattcatttacagaaaacaatgacagggagacggcaccttgtcatctcttagagagcgcttctagctgcactcttatctggtttgtgtattcaggcaatgagatagcatttcaatactaatctgagaaaatcataattagacatgtaaatggattggagaaaaaaatagaatagtgcattttaagatacacgtaattatttttctatcttccctccccaaagaagggtagataatcaaaatttatctatgccacaagaaaaattgctcttttctttcttctgtgttagcttgtgttcttrtacatatccacagcattgcctcttgtcattttgtggtaattaatctcttaattatctgtctttttcacttgactctgaaggcagagaccatatctgatgcacctagtgcccctagttttggttcaacgcctttaaggccccttgcacaaggatgactaatgtgtagcatgcatgcctgctctaccttcccacagtcgtggaagatattgct

SEQ ID NO: 246828 - DNA, 556 bp, Homo sapiens
aatggaaaaacatagcagaggcccccaaatcaacatctgttctctgctgaatgctgattcagagaagaactcataaaaaaaaaaaaaaagaaaagacatggacaagtggtccctgttgggaaaatctatctttgaattgttttcatctggagctaaatgaggagctccaagttttcttcagtagtaacgcctggagatgtgagattaaggggtgtcagagactatagcaaaactactgtaagtaaaaccrtgaataaaaccatcatgcagagggggctggaaagcttcctggctctcataatctctggtgtccagtcatttcagaggctcgaatggacctccattctttccgttggtttgattgcatgagttaagcaagtgcttcttttggtgaaactggtttgagccctaaccaactgatagtacagttttaaaaccatagaaaattaagaacataattatataatgttctcagcattcacattgctttaaaattttacctatctggcttacaagacctgtcaccagcaaagctcggggatgccttcacaccacc

SEQ ID NO: 246829 - DNA, 594 bp, Homo sapiens
atcaatctgtatgtataagtattttatctgaatgtgtgtgtgcatatgcacatatacacataatatatacagaataaatatacttttcaggctaaggttttaaaatttgaaatctggacttttctatagcttttttcttcatggattctttatggattgtcaaatatcctaacatcatttattttttgagcccatcatccaccccactgattggaatgctactccagttataagccaggtttcttcttagtgtgtgtgattttcccattcttgccaacgttgtgacattggtttatgataaactacaaagtactcatgtttttcttctctgcttattaagaaagatattctaaaaaygaaataggatcacacttctcaggctgtattatgacatgcatttttacttaaagacatgtctggaatttatttccaggtgttcgaagacatcatttttaatgcctgcagggtattcctttaatttagaaatatcataatttacttaacaatctcctaatgatgagactttaggttgtttctaaaattacaatacacatcatatatatgtatatatgtatatatgtatctttatattta

SEQ ID NO: 246830 - DNA, 549 bp, Homo sapiens
atatacttttcaggctaaggttttaaaatttgaaatctggacttttctatagcttttttcttcatggattctttatggattgtcaaatatcctaacatcatttattttttgagcccatcatccaccccactgattggaatgctactccagttataagccaggtttcttcttagtgtgtgtgattttcccattcttgccaacgttgtgacattggtttatgataaactacaaagtactcatgtttttcttctctgcttattaagaaagatattctaaaaacgaaataggatcacacttctcaggctgtattatgacatgcatttttacttaaagacatgtctggaatttatttccaggtgttcgaagacatcatttttaatgcctgcagggtattcctttaatttagaaatatcataatttrcttaacaatctcctaatgatgagactttaggttgtttctaaaattacaatacacatcatatatatgtatatatgtatatatgtatctttatatttatcagtttttcataatttatttagggcaaatta

SEQ ID NO: 246831 - DNA, 491 bp, Homo sapiens
aaatatatggtcttttttcaatctacactctgataaccaaaaatccaaaccagctcatgtcaagcaggagaagagggtgggtgtgaatgagccttcagaagggaagtctctggggccggaggagcaatgtcctctttagggtagatgtcccccactaatgcacacagcctctagagccagattacctgggtttgagtctcagccatgacatttaccagctgggtgaccccaggccaggcacgtcccctttttgtcttcagttaccttgcctgtaaaataagggataatgtggccatgacctcatagggttgttgtgaagtgaaatgagataatcctcrtaaatccctaagcactgcacctggcacaaacgtacacttcataaatgtatgcagtcatgactaccaaatgaggcttctcaacggggactcagagacttggttggtgaggttgggatgcaaggaagcttcccgataggaagagacaggctggga

SEQ ID NO: 246832 - DNA, 520 bp, Homo sapiens
acaattcaccctcctgctaattcttcttttagcttccaaaatcagccagttggcacaagacactaaaacatacctagtcccagcttgacctcgttaaagaaatcctctataagtacaactcctaaagcaagtsatgctcccaagcaggtttggagtgacagtagttctataagctcctccaagaaataagggttcttgttccagtaagtagagaaatgctgcaacaataaccctttcttggagaatcacaatgcacactattctgttaaagcatctgcaacaacagaaaaatgtattcaattgtgtttaacacaatgatgcccaaatatatttggccataaaattctaaaacatgtatttgtattttaaatatatcttttaatttacacctatgtaataactatgtctatatctatagagaaatggatatatatatcctgaagaaatggtttctaataaaacacacataacagaatactggtcttgattagattgtgttggttgtattgaaggtgagctt

SEQ ID NO: 246833 - DNA, 520 bp, Homo sapiens
acaattcaccctcctgctaattcttcttttagcttccaaaatcagccagttggcacaagacactaaaacatacctagtcccagcttgacctcgttaaagaaatcctctataagtacaactcctaaagcaagtcatgctcccaagcaggtttggagtgacagtagttctataagctcctccaagaaataagggttcttgttccagtaagtagagaaatgctgcaacaataaccctttcttggagaatcacaatgcacactattctgttaaagcatctgcaacaacagaaaaatgtattcaattgtgtttaacacaatgatgcccaaatatatttggccataaaattctaaaacatgtatttgtattttaaatatatcttttaatttacacctatgtaataactatgtctatatctatagagaaatggatatatataycctgaagaaatggtttctaataaaacacacataacagaatactggtcttgattagattgtgttggttgtattgaaggtgagctt

SEQ ID NO: 246834 - DNA, 581 bp, Homo sapiens
gtagagaatagaagagtggttaccagatgctggggagagtaacaggaaggggaatatggagagattggtctatgtgtacaaagttacagttagagacgaggaataagctctgatgttctatcacacaggagggtagctatggttgacaattttgtattatacattccaaaatagctagaagagaggattttgaatatttccaccacagagaatgataaaatgtgtgaggtggtagctatactaaataccctgatttaattattacacaatgtatgcatgtatcaaagcattaccctgtgccccataaatatgtacaattattatgtcaattaaaataagtaaagttttaaaggcagaaattggtagaatgaatattttaaaattaacaaagcatatatgtacctaacaacaaaggctcaaaatacataaagcaaagtctgacaggtttgaagggacacacacaattcaactgtaatagttagacmcttcaatccctcactttgaataacaagtagaactagacagatcatcaaggaaatagaaaatttgaacaacactattagccaactagaactaacaga

SEQ ID NO: 246835 - DNA, 545 bp, Homo sapiens
gtttgaagggacacacacaattcaactgtaatagttagacccttcaatccctcactttgaataacaagtagaactagacagatcatcaaggaaatagaaaatttgaacaacactattagccaactagaactaacagacatctagagaggactgcagccaacaacagcagaatacacattcttctcaaatgcatataaaacgttttccaggctagaccataagttaggatgaccataaaacaagtgtcaatatgtttaaaagggttgaggtcaaagtatgtgttacagccccaatgaaattaaattagaaggccaggcgtggtggctcatgcctgtaatcccagcactttgggaggccgaggcgggcagatcacaaggtcaggagatcaaaaccatcctggctaacacagtgaaaccccgtctctactaaaaatacaaaaaattagctgggcgtggtggcaggtgcctatagtcccagctactygggaggctgagacaggagaatggtgtgaacctgggaggcagagcttgcagtgagccgagatc

SEQ ID NO: 246836 - DNA, 486 bp, Homo sapiens
cagccaacattggcagagattaaataattagcatttcaaagtgttcrttttcattttcctctttgccagggtgagaaccactacaggacaaaaatgagctccttttttccagtctcagcccaggagggatcttcacagagaaagcaagcccagcccatccccacagctggctccctggtgcccattctgaaaggctggacccatcctgacctgtccctgccccaaggactgcctggtgagggatggcttaccaacactgtgactcagtccttccaacatgcccaacaggtcaattctgggatattccttacaggaattaatgagagcacattgccggtaatgttggcattagtagattacatttaaatttaaaaattccttttatggggtttaagaatagagacaagacacccatgcaataaagaaaggaggagactttgcctggtctaatggagaagctggagctgcattgttgggtacagtggc

SEQ ID NO: 246837 - DNA, 486 bp, Homo sapiens
cagccaacattggcagagattaaataattagcatttcaaagtgttcgttttcattttcctctttgccagggtgagaaccactacaggacaaaaatgagctccttttttccagtctcagcccaggagggatcttcacagagaaagcaagcccagcccatccccacagctggctccctggtgcccattctgaaaggctggacccatcctgacctgtycctgccccaaggactgcctggtgagggatggcttaccaacactgtgactcagtccttccaacatgcccaacaggtcaattctgggatattccttacaggaattaatgagagcacattgccggtaatgttggcattagtagattacatttaaatttaaaaattccttttatggggtttaagaatagagacaagacacccatgcaataaagaaaggaggagactttgcctggtctaatggagaagctggagctgcattgttgggtacagtggc

SEQ ID NO: 246838 - DNA, 594 bp, Homo sapiens
agtaaggcttctgatcaacagtatgctaacatttttggacagtagttaagtttgggcagagtcaaaagttataggcagattcttgattgtgtggggtattggcatccctaatctctgcactgttcaagggtaaactgcattagctgaaataaagcatattcttaaaatgaactccacctgtttctttctgcttttgtaaatgtaggtactctaaaggcctttcccatttctctaaatctttctccctcattcatcaccttattttacttgtcaccatctgaaatcctgttcttcatgtatctgtttgctcttaggtttctgtttctccttctgaaatataaggtccctgaaggcaggggytctgtctgcctatctaactggctgctttacttccagtatgcagggccaggcacaagttatacactcaataagagttttttagattgcatgaaggagggaaaggagcttaggtagaagttcctattctaaagcacctctgggcaccaagtagaatggaccattttattgcttgcacttgaggccaccatatgcaaaaacctttcactgaccctatggcattttagggcacttata

SEQ ID NO: 246839 - DNA, 560 bp, Homo sapiens
tttagtacattgctgcatttgatatgcaaatatattatttaacattttcacattcaagagcttgaatgagattggctttcaggatattttttggtgttacacttactcagttttggtatcatggttatggataacttacagaatgaattgagataaattctatggaaacttcatctgaaatatttcatataattaggtattttctgtttattcaggattcggtataactggtccccaaatcttcataatgttgtgcctatttggagtgtaattattgaycattatttcaatttcttccaaaattaattcattcagaatttctgtccgtacttgagtacatcgaggtaattttccaagaaaataatttatttttatctaactttaaaaatctatttgataaaattatcaattttttcctatactaaaaaaatcttttccatatctataatttaggcatgtttctgattctgaatgttatttattttgctgtttctcttatttcttcactgtaattactggagatctgtacattttattggtatttttaaaaagctttcatt

SEQ ID NO: 246840 - DNA, 538 bp, Homo sapiens
agataagataatgtctagtaatttaaccacaagtccctccctttaactcctaatctttgcatcggagtctcactctgtcacccaggctagagtgcagtggtgctatcttggcttactgcaatctctgcctcccaggttcargcaattctcctgccacagcctcctgagtagctaggattacaggcatgcaccaccatgcctggctaatttttgtatttttagtagagacaaggttccaccatgttggccaggctggtctcgaactcctgacctccagtgatctgcctgtctcagtctcctaaagtgctgtgattacaaggcatgagccaccacgcctggcctgcatcactttatttttaactcatctcttgtatacaacttatagttaatttgtttgcttaaccaaatctgaggcttattttaacaactgaatttgtctcatttgttttatatgagtaatagacatatttggttttattgtatcctcatttgtgttgctttaaatctttcttggtgctcattccctacatgggttatc

SEQ ID NO: 246841 - DNA, 605 bp, Homo sapiens
agaaacccaccggtggcctgcggttcccatttctgaagaaaaaacatgccagaaagtctctccccttctatgagccacacagggttgccattattcataggactgactcctgcaatccacagtaaaccggtctagagaagcacttggactgccagggcttatgacaatttcttacttcaattaaaatgcctatggattttatgccgaaaggggaatgttttaaacttgaattattagcttycaatgaccatccaaaccaatgtaaaatatttaatgctccacttcatttgttttgtttaaaactgatcttgtgcttgaaaattttggctgctgtgctcattactgttcagccacaaagaatgcaaaaacaagagcagtttttattttgatgagcggcagccattatatcctaagtgttcatcttcaccacaagccatcatttgttgaggccctaatacatacatattctttcaagttgctttacatatattgatccactcagtctagtctaacagcatgcatttactgagcgccttctaagtgccatgcatcaacctgggcattagaaataaaaagtgaggagcaagtccaaggtaatggcccca

SEQ ID NO: 246842 - DNA, 573 bp, Homo sapiens
acgggcaagccactacaaaactttcaccttcagtgcttgaatcgtttcataactcgccttgttatctggtgaagggcgaagccaaactcacagaacttaaagtcgatgctatttctaaagtgtgtggcattgttcmtcagcagccctggcttctagctttccattcctaaacttgctgctcagaaacagctaggtattttggtctgtggatagttatgcatttttctgtctagctgttgtctgcccagccattgttcaaacccaagtgcccttaggggctaggcatacaatgtaaatgaggatggttggcctccatgaagcctcagtgtcagggatgcaccagccgtggagactgtggcccactggagccctgaggccccaccccgaaggacagccaccaatcagttgattgttcctgtgtgtaattttggattcagtgttgtcagctcttccagttttttcaggaaaagtctgtaatctagatttttaatattggcagtcagttcatagtattcacgaacagacaaaataaaacatctgaagattgtgtgtcttgtacacaatccaaattct

SEQ ID NO: 246843 - DNA, 551 bp, Homo sapiens
ggcagggttctgagattctattgctacaaaagaaagcactccaaagcttcttgatgtgaagtggcaacagtcatttgttttgatcacaaatctgaaattaggacaaggctcagcagggacaccttttccctactccttgcagccacagctggagcagatgcctggggctagaggattccctacttagatggcccctgacatgctgcagatcactcagagggracccccttccaagatgtcctccacatgactgacaaggtagtgctggctgtcagctgtgagttcagtcagggctgttggttccactccacctgtgctcctccactgtgctagttgggctctcccacagcatggcagctgagacctaaggtcaggtcctccaaaacaggacatggaagttgccagtctcttaaaacctggatctggaaactggcacagcatcacttctttcagattctattggtcgagcaggcacagaacttgctcagattcaaggcgatgcagcaaaagagaccacagctctcaatgggtagtgccaaagggtttgcagc

SEQ ID NO: 246844 - DNA, 461 bp, Homo sapiens
tacattaatgtacacaagtgtgtatgtatgcatgcatacacacatacacactcacatatattctcatgtactatatattcttcaccatatctataacatttttccctgttcatccaygcaatatctaaaaatgaaaatttgtcattgtcaaaaagcatttattaactgaaactcatgacagagatttgagtgagtggagttatgggtgatttttctcatgtttctaaaatttagataatgaattatgttgcttgtacaatttgtaaaagttaagctaacatatttatatacttattcatgtatgaaaatttgtcattgtcagaaaacacttattaactaaaactcatgacagagatttgagttagtgcagtgatgggtgatttctcatttttctaaaatttagataatgaattatgttgcttgtataatttgttaaagttaagctaacatatttatatact

SEQ ID NO: 246845 - DNA, 587 bp, Homo sapiens
gattccatttcagcttctgcctgatatctcttgaacttcacatctaaaggggtagccatgattcttttgaaccaacaatttctttaagaaattatgtccatattttcgtttgatgttcaagcaactttgattaatatatcctttaacataaataccaaatatcgactaatatgttaaaaagcacattgttttaaaaaatcattctagattagtgattctcaactgggagttattttgattcccaggggacatttagtaatatctggagaaatttttggttgtcataactcataactagagattcgggaggttggctactagcacctactgggtagaggccagggacacactgctcaatattttataatgcacgggacagctccccatcacaaagaattatctggctcaaaatgtcaatagcgttgagatttagaaaccgtgttctagactctggaggrtcatagatattatgatttccagctacttaaatttatcccaaccaagattgatgttctttactgatttctggacataattatcagactgggggaagaaagaagaataaaaatgagaataaggaagagaga

SEQ ID NO: 246846 - DNA, 514 bp, Homo sapiens
ccccagtgttttctattagtagttttatagtttgagatttaagtatttcatccatttcgatttaatttttatatatggcaagagttggggtctagttttttcttagcaccatttattgaagagactatcatttccccaatgtatgttcttggcacctttattgaaaattagttcactgtagtagtaaagatttatttctgagttctttattttgttccactagcctatatgtctgtttttataccagtrtcatgctttttggttactacagctttgtagtatgatttgaagtcaggtattatgattcctctggtttcattctttttgcttaggatagctttggctattctgggtcttttgtggttccatataaatttcagaattgtttttttctatttctgtgaagaacatcgttggtattttgatggagtttacattgaatctgtagattgctttgggcagtatggacattttaacaatactgattctgccaatacgtgaacatggaatatct

SEQ ID NO: 246847 - DNA, 516 bp, Homo sapiens
attcataaagtcttaggaaatgtcacatctgtaactattcctctctctctctctcactcaacaaaaagagcctcgactgatctcattagaacactgagatgaactagcctgtggtgagtagctcagaggtttggtttgcccagggcctgacctccacaccagccttcctctccctcgtgatagcaacaatttcaagttttaaaggattgagcagcctagcttttttccttacatttaaaacacacctggtttctaggaacagtcttcagtgtttcatcctttacttgattatctcagaaatgttggaggccttgaagatcctggatgtcttttctctgctccttgacaattccatgtgaattttaaggtttcttttctctttttttttttctctttcatcttatccctgcttctctttttcccaaactctcaaataagtggggttttccctttctcagttcttaatatgtctccataaacatcttrccccagtgagtacacacacatgcacaaaca

SEQ ID NO: 246848 - DNA, 603 bp, Homo sapiens
ttaggtttaacatttatggagcacctttcctttgcaggcttcttggctgaggattcaaggatgaattagaagtgaccctatataggaagctcatggtgtggtgagacacacacagctatctctatacattggcaaggtacacacaagactccaaagcatctcaggggacggaacaattcattccgcagtgcagtgggagttcaggggccaggctgaaaaggcggtccagcaatgtatcaaagaagtgataacaagttctctgggtcttaaaggatgattcagwgttctcaagaaggagctcagggggaggagcattccctgtccatgctagagatacagcacttgcaaaggcccagagaccaggaagcacaggtgctcttgcagattagaaagtcagctattgggccctgaggagcagaattcagagtggggcaatttgtggcattcatttttggccactccactttaggataaacatcctacaccaggcaaactttggcttactagagtacctctcaagcaatatgctgaagctaagtagatttctgtggtgtttgacttcccaaagaactcaaagcacttaatcaataaagaacaccatcc

SEQ ID NO: 246849 - DNA, 623 bp, Homo sapiens
ccgctctattttacacatgggctaactcacagtccaaagaggtgatgaagatggctgcccaagaccacatacaagaggtgacaatttaaaaattccatactctccaagtttatgcttttgagtcaaacagtagattggccagagtcacttctctcacgtgcaaacaccagaaaaactgctttatctgccaatatcaccattaaatattatgtccctcaaattcttcatgaaattcatggcaacctgtctgagttagcttatcccaaaggtctttatttttgtttggtttgattttccgaggccctatctgaacaaaggttgtaaatcaaaaggaaaaggcttggatggacttcctgaacattttgtaggatgcttgtcctttcaatgttctgtatttcttggccttagcatctccaacactaggttcattgtatyacacaacagtgtcaacaaatgctatgcactaaaggaaaaaagcaatggacctatcatctgctttctatcccatgtaacttcctaatcaatctttccctgtgataacctggggactgagaatacatttaaagcaacactgaatcctgtgaacattgccctttctccaaaggcatttttttttttaatca

SEQ ID NO: 246850 - DNA, 601 bp, Homo sapiens
gccttgggtaaagtggccatgcttcgtcagccagctcaagaagagaggctaaggttgggggtcaagatgaagggaaaactaagaaacagcctaagacaagcaaagggtgaagtgtcagggaggaaacaaagtaagacagaaaaaggaaaaagaaagagagaggtaaacagtagtgaccctggcaaaaaaaaaaaaaaaacaaaaaacaaacaggcgacaggcagcaggggaggagttgttgagaaacggcatggcttgtgtccacaccayagccctgctgttagagaactcatcccacagaatggggccattcagtgtgacagaacaggactgccagccacagtgcagggacagcaggagcaagagcactgagatgctcctgaaccattatcacagaaggagaggaaaactgcattaatgactgaactaactttaggtcttttcaaaacaaatatagtcatcaagctaaatattcccaagtctccagaacacacatgggtatgcacaaacatgtgtgcacaaacacacacacacacacacacacacacacctctttgctggcaacaagataagcaagtattagccagcattattgggacag

SEQ ID NO: 246851 - DNA, 589 bp, Homo sapiens
ttaattctaaaaacattacagaaccaactggattcccttttgtaccaattgggagcagatttggagccacagctggtcatcatggtataggagaaataacaagttttagatcaaaaggatctgggttcacaatcctgacttagccactcygctggatgcatcatcttgggcaagttcctaaagttttgagtccaattttttaatccttaaagtggtttgatcacttctaagctcaagtgtgattatacaacaataaacatcacaagcctagcttggaaatcacatagaggcccttagcaattgttatcccactttccctagaccagtgttaccaaactttaacatgcatgagagctcgttaaaacagtttggtgagctgccccatgctcagagtttctgattcagtgtgtctggggtggaacctgagaatctgcacttctaacaagttcacttgggtaaggctgatgctgatgctgctggcccagggatcacgctttgagaaccaccactctcaagccagacaaaggtgtcatgcagacattgaaatagaaatcactggctagaaatctctaacctagaatggtgatgc

SEQ ID NO: 246852 - DNA, 589 bp, Homo sapiens
ttaattctaaaaacattacagaaccaactggattcccttttgtaccaattgggagcagatttggagccacagctggtcatcatggtataggagaaataacaagttttagatcaaaaggatctgggttcacaatcctgacttagccactccgctggatgcatcatcttgggcaagttcctaaagttttgagtccarttttttaatccttaaagtggtttgatcacttctaagctcaagtgtgattatacaacaataaacatcacaagcctagcttggaaatcacatagaggcccttagcaattgttatcccactttccctagaccagtgttaccaaactttaacatgcatgagagctcgttaaaacagtttggtgagctgccccatgctcagagtttctgattcagtgtgtctggggtggaacctgagaatctgcacttctaacaagttcacttgggtaaggctgatgctgatgctgctggcccagggatcacgctttgagaaccaccactctcaagccagacaaaggtgtcatgcagacattgaaatagaaatcactggctagaaatctctaacctagaatggtgatgc

SEQ ID NO: 246853 - DNA, 589 bp, Homo sapiens
ttaattctaaaaacattacagaaccaactggattcccttttgtaccaattgggagcagatttggagccacagctggtcatcatggtataggagaaataacaagttttagatcaaaaggatctgggttcacaatcctgacttagccactccgctggatgcatcatcttgggcaagttcctaaagttttgagtccaattttttaatccttaaagtggtttgatcacttctaagctcaagtgtgattatacaacaataaacatcacaagcctagcttggraatcacatagaggcccttagcaattgttatcccactttccctagaccagtgttaccaaactttaacatgcatgagagctcgttaaaacagtttggtgagctgccccatgctcagagtttctgattcagtgtgtctggggtggaacctgagaatctgcacttctaacaagttcacttgggtaaggctgatgctgatgctgctggcccagggatcacgctttgagaaccaccactctcaagccagacaaaggtgtcatgcagacattgaaatagaaatcactggctagaaatctctaacctagaatggtgatgc

SEQ ID NO: 246854 - DNA, 596 bp, Homo sapiens
aaggctcctctctctccaagtcccagagcaaggctaattttctttagagtctaagaagttatttcagaataacttggcaaaaggaagagtttttaaagcctgatagtaatccattttatttaccaatattgaagaaaattgtaaaagatggggatgaaataagtaaagttgctcacacctgagaaatgtttgatttttgaagactaacgtttaggwttccctgccaatgcaaatcaaaaaccaatcaaagctgtttttctaccagagatacctagagtgcttccactgtttttttgcctcctctcctgcacccagcagatgcactatgaatttcttataaaaattgatttgtatttcctcttttaaccaaggtttcttttgttaatctgtatacttttccaagaggccacgtagtttgtggtagaattcaaataggaaaaatacttaacatcccctccatctgtccttctactcattcctaaaaatagaagtcaacttttcagactaagatttttaaataaaaaatttgggaaattggtcaattacatatgctctggtagagatagctaataaccccctggataaagcacccagac

SEQ ID NO: 246855 - DNA, 577 bp, Homo sapiens
tatactgatatagtacatgcagcagaacatttaaaaaaaaaaaaaaacttacccaaggaattcaaatcctatcacaaatgcctttttcttttactttaaaaacaaagtaaaaaaataaaacttgagtacaaaggkggccaggcttggctgacagggttgataatactgggatttaacaacatggttgttcacaacctataaacctacttctattagttttataattataaaacgattacccccaaactctatagaagtataacctgttggaggctctggcttcacatttgcattatctgaggggattttttaaaaaaataatgatacctggggtcctacccttagaaattctgacataatttgtctgagatggggtctaggcatcagtgctggttaaaagcaccccagttgattctaatgtgcagccagtgctggaagccattattcttggcaactctctattgagattcagccacttctctgtccccatcacatagctgtaacttgcctccagtcaaataaaacttcagataaaatctcttactgccgaatttctttctcttttattctaactggt

SEQ ID NO: 246856 - DNA, 563 bp, Homo sapiens
taggccttccccataggacctcaacttctaaaatttcctttgaacctccaccaagctccacaaatttcctacctctgccttatgttttagagtctcttctgagctccaggacaactgcttctaagacatctcctcctggacatcaaactcaacatgttcctgccatgctatcctcttccagtgtctgtctatgttcataaatgtcaccaccacccactcatctccacagtcaaatgttcaccaagaactttgtaccctaaatatgttgtgaattcttccacttctttccatttccactatccccagtgcaaagactattctctttggatactataacagctcccagctgatccctcaagatccatgctctgcmcagtagccagagtaatcttttaaaaacgtatatcagaccacagcactttcctatataaaacccatcagtgactcctcagggtcctcataataaagatccatgtacttaacagggccttcaagatcctgtgtgacaaaaccccctaccctctacagtcaaatcaataatcacaagtatgcaactatagcta

SEQ ID NO: 246857 - DNA, 539 bp, Homo sapiens
tggctttttagtttaattcaacttgttttcctaccaaaatatagattctatgatcctttatttctaattcttttaaaattgtatatataagagcctaactgtatcttactctatatatgctcttctgcagtcgtggcaattcctgtctatctcttaatttaccttaagtaagaataacacaggaataaaatccctgtatatgttaacatattttctaaaaatatattaatggctttctttacaacatgactgkaaaatatacaattttctataaatattcaagtatgtgttgggatggaaggggcttttaaaagcacatattattggtagaaaaagagaaaagttaaaactcacctaaatcaactcccctcacctaacatatgaagaaagtaatatttaaagtggtgaagtgactggtccaatgtacacatctgaccttggcaggcccacagagtttgcacatgccctgcctcctacggaaagaataatggcatgtggcactggccacttcaagatgcagctctcctggtagtgtgttg

SEQ ID NO: 246858 - DNA, 596 bp, Homo sapiens
ttgaaagaacatgaattcaactatattaattatgacatatagtcacagttcaattacttccaacacagtataaattttttataaaggcagaaaaataaaaatggtcaacatcctattaaagactctgtattctcaaagatggtcatgctacctgatatagtttgactctgtgtccccacccaaatctcatgttgaattgtaatccccagtgttgagggaggaacttgttgggaggtgattggatcatggggtagatttcccccttgctgttctcataatagtgagttctcatgagatycggttgttggaaagtatgtggcacttccccctttgtgctgtctcgctctctctctcctgctccaccatggtaagatgtgcttgcttcctcttagccttctgccatgatcgtaagtttcctgaggcctcccagcaatgcttcctgtacaacctatggaactgtgagtcaattaaacttctttcctcataaattacccagtctcaggtagttctttatagtagtgtgagaatggtctaatacattacccatacatgccatatgtgtgtataagcagtggtcatgttctcagaagaacaag

SEQ ID NO: 246859 - DNA, 595 bp, Homo sapiens
gattttccctgtgtcctcgattcttcatctgcctgaggcccaccttcttggagaagggacagcacagaaaagattacatgtcattttttaaggccaagtaaggcctagtagttcaaattaaaacccagattttcagcatagcttttctgaaataagtgttcctgtgagaatcactagctcctacattgttgccttgaccctcataggcttatgagtgaggaagtcctctgggatgtggcgctgtccagaagcggattcaaaactaatgtaagaaatagctttgacctttagagagcttgaaatctagtgggcagacacagcagtctattagaaagcaattacaatttaatcctcaccattctggcgyaacctctatcaggaaaggtgagaaatctccatacggattggaaagataaggggaaaataaggaggaaaggctagcttgagttagactttgaatgatgaggaaggggatttgaaggatgaggagggaaggaattagggtaaaggaagataactgtcattgaagagaaagtcataaaaattattacagttattacagtttctttggcaggcagagaaggaaggaaaagtt

SEQ ID NO: 246860 - DNA, 595 bp, Homo sapiens
gattttccctgtgtcctcgattcttcatctgcctgaggcccaccttcttggagaagggacagcacagaaaagattacatgtcattttttaaggccaagtaaggcctagtagttcaaattaaaacccagattttcagcatagcttttctgaaataagtgttcctgtgagaatcactagctcctacattgttgccttgaccctcataggcttatgagtgaggaagtcctctgggatgtggcgctgtccagaagcggattcaaaactaatgtaagaaatagctttgacctttagagagcttgaaatctagtgggcagacacagcagtctattagaaagcaattacaatttaatcctcaccattctggcgcaacctctatcaggaaaggtgagaaatctccatayggattggaaagataaggggaaaataaggaggaaaggctagcttgagttagactttgaatgatgaggaaggggatttgaaggatgaggagggaaggaattagggtaaaggaagataactgtcattgaagagaaagtcataaaaattattacagttattacagtttctttggcaggcagagaaggaaggaaaagtt

SEQ ID NO: 246861 - DNA, 586 bp, Homo sapiens
acttcactgctctgcaccagtttttctttttctgggtttagaaggggagttgtgactacaatactttaaaaaacaaaactacctttattgtggcaagagaaaacattacaatggaaacaaattacatataaatagttgttttctcggtagcttgttgttctttttgtcttttgtaaatttytttggtggtcttaagtcctgatttggccttgactacagtacaggagcccatggacctagaccagagaccacggaccctgaaaatacccactgaatctacaccgagattgaatgcacaacacagtttgcaacttgtaaggcttgtattttatacagtagttgaaaccgataaattcgttgtaaatcatttgggaaggttaaaaaatttaattaaaaataaaatgaaaggcaggaagattgacatttgtagtgcctaacgcccctgaattttatttccatctttaagaaaagaaaaccaaaagccaaaccgactctggcagcgcggggagacttcccagccgttttcttgggcagctaggacagcacctgggccgtgccagaaatgccagttgctatggtcctgatg

SEQ ID NO: 246862 - DNA, 557 bp, Homo sapiens
tacttgtgaagtgggagtaataatactaccctccttgggctgctgtgagagttaattggtataatgtgtgcaaagtacctaaggcacatgctcaataaatcttagtgggtttcagtttccttataatttatcagttaaattttctgaagaagaaacatccttttttttcccctcctgtttaatgtttttatccagtttcctttttaaaagtatttacatgtctacggyaagcattttgtatgtcttctcaataaattatgccctcagaatgaagggaagtcatatctaaaatttgggcacattaaaactgtccataccaagccaaactaggcagtaaatttgttctgaaaacttgagcatcttcctttgccctttatttggagtcggggtgagggggatgtgtaaataaaatgattgagatttcaacttttccccacagattttggcattgtatagccacacagccctaatttagttttgcatactctctagttatcattaggcaataatccctcctgaatgaaaatttgacttttagtggattgagtttgtaagtc

SEQ ID NO: 246863 - DNA, 564 bp, Homo sapiens
tgttcgacgccaccatattctctctaaagtccattcgtcaatttctgcacttcaaaatatagacaaatagtctactaataaagtggcaagcctcccacactaaggatagtaccagctatttcctgtaaaatggaattctcatgctggacttcagggtaatatctttgcagattcctagcagktgacgagttgctcacaatgggctctgtgctcagtgcttggctgagagggatacttcaaattaataattgggctcctacgaaaatcctctcctgaggtgcagaagatggatataaatgagatgaaatggttgtgctgtggaaatctcactcaaatgttgcatggcattcttttgtgtctcctgctctctctttaggctgctgttggcagatcagctagttgggatttcactgaaccttaacccgtgtataggtggtagaatatcatgttcagtccaagagaatcctgacattttcatttgggcccagctaggaagaattcaagggctttcacttatgaagagctactttgtgctttcttccctttttgggaggttaactataa

SEQ ID NO: 246864 - DNA, 564 bp, Homo sapiens
tgttcgacgccaccatattctctctaaagtccattcgtcaatttctgcacttcaaaatatagacaaatagtctactaataaagtggcaagcctcccacactaaggatagtaccagctatttcctgtaaaatggaattctcatgctggacttcagggtaatatctttgcagattcctagcaggtgacgagttgctcacaatgggctctgtgctcagtgcttggctgagagggatacttcaaattaataattgggctcctacgaaaatcctctcctgaggtgcagaagatggatataaatgagatgaaatggttgtgctgtggaaatctcactcaaatgttgcatggcattcttttgtgtctcctgctctctctttaggctgctgttggcagatcagctarttgggatttcactgaaccttaacccgtgtataggtggtagaatatcatgttcagtccaagagaatcctgacattttcatttgggcccagctaggaagaattcaagggctttcacttatgaagagctactttgtgctttcttccctttttgggaggttaactataa

SEQ ID NO: 246865 - DNA, 564 bp, Homo sapiens
tgttcgacgccaccatattctctctaaagtccattcgtcaatttctgcacttcaaaatatagacaaatagtctactaataaagtggcaagcctcccacactaaggatagtaccagctatttcctgtaaaatggaattctcatgctggacttcagggtaatatctttgcagattcctagcaggtgacgagttgctcacaatgggctctgtgctcagtgcttggctgagagggatacttcaaattaataattgggctcctacgaaaatcctctcctgaggtgcagaagatggatataaatgagatgaaatggttgtgctgtggaaatctcactcaaatgttgcatggcattcttttgtgtctcctgctctctctttaggctgctgttggcagatcagctagttrggatttcactgaaccttaacccgtgtataggtggtagaatatcatgttcagtccaagagaatcctgacattttcatttgggcccagctaggaagaattcaagggctttcacttatgaagagctactttgtgctttcttccctttttgggaggttaactataa

SEQ ID NO: 246866 - DNA, 578 bp, Homo sapiens
atgtgacccctttcaaagcaatcatctcttcttccttatcagcattttttttttttttttttttgagatggagcttttttcttgtcacccaggctggagtgcaatggcatggtcttggctcagtgcaacctccacctcctgggttcaagcaattctcctgcctcagcctcccaagtagctgggattayaggtgcctgccaccacgcctggctaatttttttgtatttttagtagagatggggtttcactatgttggccaggctggtcttgaactcttgacctcaggtgatctacccgccttggcctcccaaagtgctgggattacaggcatgagccactgcacccagccccctaccagcatttctatgtgataagcagccccccagactgttgaagatggcttttcacagacatgaaattcactagtccttccaagcatggctcctttctggagagtttggggttttgggaagccttgagagtctccagggttttgtgggttggataactcaatatcttccaggaggcggaaaggttaagacaccaaattcatgttgctacacaattaaacatcaata

SEQ ID NO: 246867 - DNA, 609 bp, Homo sapiens
tatatcattgagtatttctgtcatttattgttaaacattcaagttgcttttaaattttcaatttgtaagtaacattatgaagaaatmctttctgtctaaaatgttttgataattttatattattttcttagattaagttcacagaagtcaggttatgggccaaaggggatataaattttttataaagtaaaatgcattgttaaatattaaaagtaaaaatattacttaatcaatgctggcaatctaagaaagcagggttcaagaagactcaagggagtccagcataagtctaagtatctaagtcacctttggcagagggaaaacaaaaatactttggtttctctagtcacctttctgacccaaagcaccattcattacaggcattttctttcttgcatttgcaactttttggctttaaaagaaaaagataattttccagagctaaagcataacacttacaagcttaataattataaataaaattttactgattcttaaacacttataagggaatgtggttcattaatttcgggacatgaaattggttatacaagtaaaggtagaaatgctgccctgagcattgggtgactgtcttatagaacatgggca

SEQ ID NO: 246868 - DNA, 590 bp, Homo sapiens
ctatactcattacctaggtgacaaagtaacctgtacaccaaacccccacaatgcacaatttacccacacactaaacctgcacatgtactccctgaacctaaacctaaaagttggaaagaaaacaatacaaaaacaaaacaaaaaaagcttcaaygcctgaaacaaacaatatactttggtagagtcccaccatccactgctttcctgaagggtcctgaaaagcactgtttgcaaaccatggggtacactagacctctctcattttactgattaggaaaggaaattacttggccaagagttatttaatgatggaactggggctcaacctacattctcaaatctctttttggccaaaaatctttccatcatattacattattctatttaaatgctagatttgaaagagttctggtgatgcttcctaatttgtgtttcctttacagttctgaaatgttgagagatatttgcaaatctgaggctggggagtatctgagaagctggagggaaaagttaaataacctctacctatcaccctgacccctagcacttccaagcaaagctgtttatataagaacattttaaaatgagtt

SEQ ID NO: 246869 - DNA, 589 bp, Homo sapiens
cttcctatttcactcaatggcagccttatccactgagttaagcctttttcttctttatctcatgcccgatgtataatccgtcaaagtgttttgttggccattcttccaaaatatatcatgaatccagtcacctctctccatttcttaccactccaatacaatcaccatgattcctcacttggacagtctcctctcttccacacctgtctcatggcatccattttctgtacagcggcgtgggtagtcttttaaaagcctagatgagatcagwtcatgtccaatagcttcctattattcttagaatatatttaaactttttcctgggtctgcatgacctgactcttgcctactcctccaacctcatctcagatcactcctaccacccactcccagtttgccccagcatagagggcccctggatggtccaaaatcactccgtactcagacaaaactcaaaccctttagctcagcttgttctacctaaaattcttgcaccccagaccttcttttggccagctccttcttatctcagctcaacagtcacttcctctccctgaccactcactctaaagtagccaccacctaacac

SEQ ID NO: 246870 - DNA, 621 bp, Homo sapiens
agctgtctctaaatccagtttaattaatgtgcagcctttgtctactccaaagtgtctgaataaatcctcaaaaccaaattcgtattttaaaatacgagttgcccaatatgatgtgagttagcatacaagcagattaagatggtgtttccattttgaatgaatataattcaagatttacaaatcttaaactagatttttcttacacaaatttggtctttcttttagctataacagagaattagtgacctggtttcaaaagaaaaaggacaatttttaaaaatacttcctaaatctcattagttgtattaatctcttaaactgaaaaagactattttgargctatctctggaattagcacttctacaatactgccataacatattgatatgaatattactcaaaatcgataagaaattccatttctatgcatgttatgaataacacagattattctgaaagaagaataacatacgtaatattattacatatgttacagatactgttaggtgtctagcctacaaccatttctcccttttctcctttcttacagaaccttggctgagtacaagtatatgctgtccttccgaggccttctgcagcagggaagattggccctgcccc

SEQ ID NO: 246871 - DNA, 621 bp, Homo sapiens
agctgtctctaaatccagtttaattaatgtgcagcctttgtctactccaaagtgtctgaataaatcctcaaaaccaaattcgtattttaaaatacgagttgcccaatatgatgtgagttagcatacaagcagattaagatggtgtttccattttgaatgaatataattcaagatttacaaatcttaaactagatttttcttacacaaatttggtctttcttttagctataacagagaattagtgacctggtttcaaaagaaaaaggacaatttttaaaaatacttcctaaatctcattagttgtattaatctcttaaactgaaaaagactattttgaagctatctctggaattagcacttctacaatactgccataacatattgataygaatattactcaaaatcgataagaaattccatttctatgcatgttatgaataacacagattattctgaaagaagaataacatacgtaatattattacatatgttacagatactgttaggtgtctagcctacaaccatttctcccttttctcctttcttacagaaccttggctgagtacaagtatatgctgtccttccgaggccttctgcagcagggaagattggccctgcccc

SEQ ID NO: 246872 - DNA, 608 bp, Homo sapiens
ccttctctctctctgttctgattgaactaaggtagcctattcagatccccacatgctcagcaaccccatatactggagggaaccagcagaggatggggagaggaattccagtaatgagggaacatatgcagagatacagaagcatgacagatggtggcacattctggaaactacaagtggttggataagaatggaatatagtatttgtgaggggayggagagagaggaggcggtaagaggtcaggctgaagaagcaagcaagaaaaaaacgatgaaggaaagactttgtagactttgctaaattatttagatcttatatagaaagctatggaaagccttaaaagtatgttcagggggccatagcatgatcaaatttcagttttggaaatatcactatggctgaaaaatagaaaattaggttatcaggaagggtacaatatatgcaaggaatatcgaaggcctgaatcccatgttcctattgccccacccttaccgctttacccctaggacttcactgccataaccagtcttccagatgccagcacctgcattgcatcacctgagagctatctcctactgctggagcccactttgttggctgtggcagg

SEQ ID NO: 246873 - DNA, 608 bp, Homo sapiens
ccttctctctctctgttctgattgaactaaggtagcctattcagatccccacatgctcagcaaccccatatactggagggaaccagcagaggatggggagaggaattccagtaatgagggaacatatgcagagatacagaagcatgacagatggtggcacattctggaaactacaagtggttggataagaatggaatatagtatttgtgaggggatggagagagaggaggcggtaagaggtcaggctgaagaagcaagcaagaaaaaaacgatgaaggaaagactttgtagactttgctaaattatttagatcttatatagaaagctatggaaagccttaaaagtatgttcagggggccatagcatgatcaaatttcagttttggaaatawcactatggctgaaaaatagaaaattaggttatcaggaagggtacaatatatgcaaggaatatcgaaggcctgaatcccatgttcctattgccccacccttaccgctttacccctaggacttcactgccataaccagtcttccagatgccagcacctgcattgcatcacctgagagctatctcctactgctggagcccactttgttggctgtggcagg

SEQ ID NO: 246874 - DNA, 566 bp, Homo sapiens
atagcaccattgcactccagcctgggagacgggagtgaaaccctgtctcaaaaaacaaaaaaggattgaggcatagtattcctatataaaagtgaacaaatcttaagtgtacatcttgattattttctcataggtatataactatgtaatcaccaccaaaatcaagttataaaacatttccagcaycccaaagtttctcttgtagcctttctgaaccaatcaccccttactccagagaaaattcctattctgatttctctttttttttttttttttttggtgggggagacagagtctggctctaccacacaggctggagtacagtggcgggatctcggctcactgcaacctccacctcctgggtgccagcgattctcatatctgagcctcctgaggagctgagattacaggtgcctgccaccacatccgggttaatttttgtatttttagtagagacagtgtttcaccatgttggccgggctggtctcgaactcttgacctcagatggtccaccaggctcgccctcccaaaatgctgggattacaggcataagccaccacgcccag

SEQ ID NO: 246875 - DNA, 452 bp, Homo sapiens
tcatataataaaatttgattgacagttttaatgtgtggaagagrtttagatgtgactttagcattaataagcttttaagctttacatagtacaagccaaacatacgtttagaaaaatggatccaaaccatgaaagtctccctaagtattaccaagaaaaattgtctccaaaattactcttagtcgctgtgaatgttcatttttacatctttcatatttatttattaaacttttgtgaggtgttatttatatacagtaagatgcacacattataagtgcacagtttaagttttgacaaatgtgtatattcatgtaaccacttatccaatcaatcagcccagaaaattcccttttgctttttaggggtcaaacctcctcaccccaccctcagcctcataccaagcagccagtatatcactatagattagttaggctagttcttttatgtaatag

SEQ ID NO: 246876 - DNA, 425 bp, Homo sapiens
taacaatattgtatctggattccattatggcattaacatgtctttaatgatatatttatggacttgataagtaaggtggaaaaataggaactaaaatgataaattcatctattgaggcaacagggatctaacctgggccatttttttgtcaactatgtaagaaaaaaataagcccaggtttcatttaagttaaccctcatagaaattagagcatttaataaacaaattcagggaaatgatactgattttaaaattaaaatagtaaagagaaaaactaattccaccagcaaacaacaacaacaamaaaaaaaccatgattttgaaaattttagattggaaactagcaagagagttattggggatatttatagaaaccagaatgaaaaccctaactacttttgtttgtttgcatacctagtcatctc

SEQ ID NO: 246877 - DNA, 608 bp, Homo sapiens
tcgaattgcaggcatatttttactttgttaaatctggctatttgcccttcaaaaagacagtgtcaattcacaatctctcagcattgtgtgagtgcttgtttttctataatattacctaatcctgattattatcacgtttaaaaagatctttcacaatgaaataatggaagaaaagtgatagttcattgtggtttcaattagtatttctttcttttttttttttcttgaaacggagtctcgctctgtgtcccaggctggagggcagtggtgcaatctcggctcactgcaacctctgcctcttggrttcaagtgattctcctgcctcagcctcccaagtagctgggattacgggcaggagtctcgctctgtctcccaggctggagtgcagtggtgcagtctcggctcactgcaacctctgcctctcgggttcaagtgattctcctgcctcagactcccaagtagctgggattacaggcacccgctaccatgcctggcttttttttttttttttttttttagtaagagacgtgctttcactgtattggccaggctggtctcaaactcctgacctcaggtaatctgtgctctttggcctcccaaagtgctgg

SEQ ID NO: 246878 - DNA, 582 bp, Homo sapiens
aagtagcacaacatatttcaaatgtcgaaagaaaacagctgttaaccctgaatacaatattcagtgaaaatatcctctaggaatgaaggggaaatcagatgagggaaaatgaagagatttaccctaaaagaatgactaaaagaagttctrcagactgaacgaaaataataaaccttggaacatagtaggggagaaaaaacacagtaagcaaaaatatggggtaaatacaagagacattccttttcttgagttttctaaattatgtttgatagctgaggcaaaaattgtaacaatgtctggtgtggttctgcatgtatgtagagaaagtatttaagacaatcatgttgtaagtagggagagtaaaaggacttaacctggtgaagtaacaacagtagaatgtgatgttataatgatatataatgaaatgcctagagtaaccactaaaaaagctgtacaaagagctatactcaaaaacactataaataaatcaaacgaaaaattttaaatgtccctgtaagccatagaaaggaaaagaaaacagagaaatgaaaaacggaaaggacaaacagaaaataaaaaata

SEQ ID NO: 246879 - DNA, 582 bp, Homo sapiens
aagtagcacaacatatttcaaatgtcgaaagaaaacagctgttaaccctgaatacaatattcagtgaaaatatcctctaggaatgaaggggaaatcagatgagggaaaatgaagagatttaccctaaaagaatgactaaaagaagttctacagactgaacgaaaataataaaccttggaacatagtaggggagaaaaaacacagtaagcaaaaatatggggtaaatacaagagacattccttttcttgagttttctaaattatgtttgatagctgaggcaaaaattgtaacaatgtctggtgtggttctgcatgtatgtagagaaagtatttaagacaatcatgttgtaagtagggagagtaaaaggacttaacctggtgaagtaacaacagtagaatstgatgttataatgatatataatgaaatgcctagagtaaccactaaaaaagctgtacaaagagctatactcaaaaacactataaataaatcaaacgaaaaattttaaatgtccctgtaagccatagaaaggaaaagaaaacagagaaatgaaaaacggaaaggacaaacagaaaataaaaaata

SEQ ID NO: 246880 - DNA, 640 bp, Homo sapiens
agggggttaactcagctgggcagctccttttgcccctttactttccttctttgtttatacatgggacctccaatataatagctggaactatggcagccattttttcagcatgaggataaaggcctttctttaagcctacagtcaaagaactagaatgagccaagatttctgctgaccatcccagctgtaggctgcttatctttagatttctgcttatatgagagaaaaaatgccatctcttgttttcgccattattttttagtccatgttacagccaaacacaacatctattgtaacagccaaacacaatatctcattgacacagatgtgtacaagttgaaaggtagatactgatcacctctattgttaatctgaggagtgcctcaacacataaaacatacagatgctagaggagcttaacagatgtcttttgaatgaaatggacagagtggaggaagggagcattatcagcagagaaaatggaatgagcagagaggtctgtatatggccaaggcatatacggaaaatggggagtagaataattggattcctawtgggaaagattactgaggtctgagttaagctggttgggttgggacccacatggaaatgtgaaaggaaagcagattaacctatcatt

SEQ ID NO: 246881 - DNA, 525 bp, Homo sapiens
cattttaggggaaaaaatcaaccctaggatatatcctgcatgtgtctattaaacattctttttaactttagcagctgggcagttcactctctcaatatttcacaaccatttccatgcagatggctctatagtctgggatggttgcctccatccttccttagccctatctcagatggtcagcactgcaaaaagtacaagtttctggccccagaggcaggtgaatctccatactaagagattcagaatcattaaaagctcagccataacttcagccctgagtcatatcagagacacaaagtgatgcctgtggaagcctggagacagccaaaagttagggagtgttgacaaggaagagaaaggagtagaagactggataaaattgtgraggaagtagggaaagataggaagcagaaggaaagggagaaaataaaggagaaagggaagagaaggggaggggaaggtaagaggagaggggaagggaggagggaaggggaggaaagaaacaagacaggaattacaggataa

SEQ ID NO: 246882 - DNA, 330 bp, Homo sapiens
agaaccagcataggagaaactggtttttctcctgaccaaaagaagagtccttagaaagggcttcttaggaaggaaggcttaggagtaaaaaaaaaaaaaaaaaaagtgggaggggtccagggtcctcagagggacattagaaagcacgaagtgtaaaggggctggttgagaacacacacacatgccccacgcccatggcacgacttggytttgtggggacttggcttccttgtgtgcagagtgggggactgattggggcagtgagagagggaaatgctatcaacatatggaggcaaggaaggagacctttgtgtgcttacaaccacagac

SEQ ID NO: 246883 - DNA, 581 bp, Homo sapiens
cttctgaattcatagttttaacctagaccttaaaccataaactcaagacttgaatacccagatacttcaatactgcacatttaataggcatctccaagtttaataagtacaaacttattaaacttctctgcaaaccctatttcacctgtaacttttcccatgttaggtaatgacaacctcattcatctagttgcttaggacaaaaatcttgaagtcatccttgactcatctctttccattatacggtatgtccagttggttctactttctaatttttctccaatctgaccccttctcaccacctcctctattgccatcctagattatttgcagtaccctcctaactgtcttacttgcttcattcttgccccaaacaaaagctggagtggccttattaawacctatgtcaaaggatatatttctcctatactgaaaccctgaaatggtttgggtgtgtgtccccgcccaaatctcaggtcaaattgtaatccccagtgttggatgtggggcctggtgggaagtggttggatcataggggcagatttcccccttggtgctgttcttataacagtgagtgagtt

SEQ ID NO: 246884 - DNA, 581 bp, Homo sapiens
cttctgaattcatagttttaacctagaccttaaaccataaactcaagacttgaatacccagatacttcaatactgcacatttaataggcatctccaagtttaataagtacaaacttattaaacttctctgcaaaccctatttcacctgtaacttttcccatgttaggtaatgacaacctcattcatctagttgcttaggacaaaaatcttgaagtcatccttgactcatctctttccattatacggtatgtccagttggttctactttctaatttttctccaatctgaccccttctcaccacctcctctattgccatcctagattatttgcagtaccctcctaactgtcttacttgcttcattcttgccccaaacaaaagctggagtggccttattaaaacctatgtcaaaggatatatttctcctatactgaaaccctgaaatggtttgggtgtgtgtccccgcccaaatctcaggtcaaattgtaatccccagtgttggatgtgrggcctggtgggaagtggttggatcataggggcagatttcccccttggtgctgttcttataacagtgagtgagtt

SEQ ID NO: 246885 - DNA, 577 bp, Homo sapiens
atgttgactcattcagtctttcacaataactctggaattaggaactattactggtgccatttttccatttgcgaaaactgagatttagagagataagatcacacaagttggcaagtgactcagccaggacccagtctggatctgacttcaaagtggaagttcttaaccttaacactaccagcctggcccartcccttccttttattttattttattttatttatttaaatctgtttgagacagagcctcgctctgttgcccaggctggagtgcagtggtgcaatctcggctcactgcaagctccgcctccctgattcacgccattctcctgcctcagcctcccgagtagctgggactacaggtgcccgccaccacgcccagctaattttttgtatttttagtagagacagggtttcaccatattggtcaggctggtcttgaactcctgacctcaggtgatcctccctcctcatcctcccaaaatgctgggattacaggcatgagccaccgcacctggcctaaaatttcagttctactaattcacatcccattagaaaagcaaaaagtctttgtccaa

SEQ ID NO: 246886 - DNA, 577 bp, Homo sapiens
atgttgactcattcagtctttcacaataactctggaattaggaactattactggtgccatttttccatttgcgaaaactgagatttagagagataagatcacacaagttggcaagtgactcagccaggacccagtctggatctgacttcaaagtggaagttcttaaccttaacactaccagcctggcccaatcccttccttttattttattttattttatttatttaaatctgtttgagacagagcctcgctctgttgcccaggctggagtgcagtggtgcaatctcggctcactgcaagctccrcctccctgattcacgccattctcctgcctcagcctcccgagtagctgggactacaggtgcccgccaccacgcccagctaattttttgtatttttagtagagacagggtttcaccatattggtcaggctggtcttgaactcctgacctcaggtgatcctccctcctcatcctcccaaaatgctgggattacaggcatgagccaccgcacctggcctaaaatttcagttctactaattcacatcccattagaaaagcaaaaagtctttgtccaa

SEQ ID NO: 246887 - DNA, 649 bp, Homo sapiens
cctccgcctcccgggttcaagtgattctccagcctcagcctccctagtagctgggattacaggcatgtgtcaccacacccagctaattttttgtatttttagaagagacggggtttcgccatgttggccaggctggtctcgaactcctggcttcaggtgatccggccgcctcaaaacctgaattattttgtcctaaatgttctgaaaatgagaaatgtccctgttccatggcctttgaccgtttgaagtatcccaggatatttttatctttattctttggtcagttacaagctagtctcaatcttagtattttttaaagaaaaaattactttgtactttaaaaatatatcacatgactgcagttgtggatatatgaatctatacatgtgttaaactgcrcagaactaaacacacacacacgcaccctctctctgtcattctctgtcttgccctccttctctctccagaattaaacccacttctacaaagttatagtttactcagcttaaaacattgaaatagtaagttgttttttactatttggccccatgttctcataaaagatcaatcttaaatttcatattaggccaaggaaatctgactcttttttatccctggctcctctggctctgtgactgtgagttgattg

SEQ ID NO: 246888 - DNA, 633 bp, Homo sapiens
cttatagatagctagactgtaattattttaatattccaagcagcctttctgatgtttattccacaccacatcaacatttcgaatagcattttatgcacttagaaccaaacttattttctctttattaagagactcagggatgttgggataaagggacagagcctcttatttcacactcccgcctcctatgtttagaccttctttgaggggaggacaatagaatgagctgatgggcataaagctgcatagatacattatgggtctagtatagtggaagggttctgtgttgagagtcaggtctggttctaactcatattcataatggaaaaaaaaattctctatgggcmtggtttgcctgatccagctttgtgcagattaaataaattaaaaattgaaagtggttgagtaatttaactaaattgaatacattatgagacatggtaaaaaaataaatagaaagtacatgaccactaaaactgcagttggcttaaataaacctcttcattctcataagtaataaagaaaatgctaattaagacatactattttttaatatattgaaaaagtaaattagtttaaatattaccaagcgtaattttaaattaataataccaagatgcctagggtgcagtg

SEQ ID NO: 246889 - DNA, 589 bp, Homo sapiens
gacactctaaccctctgggcccaagtcacctttctatcaggggagggaggctgtgctctcactggcttcttgttagaagttctgcctgccctacagcctgcactgagggctctcatcactgcttctgagatcttaatgggggtcaacgaagatgtgggcttctctgagtttagaccatccatctgccaaggaaaaccaagccctgagactgatagagatgagagaagagaatggtaatgtccccaagacagagcaggcaggaagtttgaagcctctgagggatacaggaaaatctaacctcaaagagaagaaggtaagaacaagacaacctctgtcctcctgacatagggatcttgctgaaaaaataaatctcattgctgagctgagttaggcattggtaattcatctcaaggagatgaattttgatagggcagggatgatggaacaaactgcaatcacattgaacagaaataagggccatcatctagatatgctggactgcatgccctgggaaatgcagggaggtgyctgacatctgggggcaacaggcagaatctggcagaactttctggaagaggtagattgtgag

SEQ ID NO: 246890 - DNA, 637 bp, Homo sapiens
ctctgtgtgttctctgacctgagggaaggggaaggcagagctggcgcacaagccagcatgcatctggctgaactgactgttctcactttgagattaygttaagtgtgtttcagggttcacactacctacatggaagcggcatcttctattcctttgagtttgtaatgatcccaatttggtgtacatctctgaagtcctttcctcagaggtagccagccctgatatttatctgtttttctaccacatccgtctcccctactgtcagccagaagaggaaaaaatgaggctgccatgccatttgcttctctccagatttggtgatagtattgaaaattctcagaattttgactcataacaacataatgatcctaggggcatgggcaagttttgaagttgagcccctgtgcaactcttcactgtgctccagaattacatttctttccttgaccccaggtttttgatggttttttgtatgatgtctaccttaccacccgatattgttctgttggtgcatttttgctagcttttactcttctttactcattttatttggtgttgggagaggaacattcaatctactatctaatcttgagaagtctatttgacttctttataacatttaacaaggatcttctgc

SEQ ID NO: 246891 - DNA, 576 bp, Homo sapiens
ttctggcatcactgcaccaccagggctaagtcctttctttgaagctagcgtattgaaagtttctcactgtgaagccagatgtccaagcagagatttcatgtcaagaagaaatgttgtaaaatttttgcttgcaggcatagaaaagagattttacagcattgatgcttctctcccttggctactgactggagttcacaagacaaggtcagctgccagtaggacatctagcaatctggtctgtgttaccagaagggcttggttgggggcggggggtgggggttgtagaatatttcataagattgggcaattcttactgtcctaaaagcttacaggaatcaatttcccaaggaataaaattacaaacctcattgtggtgttttagtagcattgagaaacaggaagaaatctcgatgcctagcatcaaatggcattgtttgggacctgttcattacttaattcctgtctcccytgtatgcacgtccgtagggcacaaggaaagtggcattttctttgtgccctcctgaattagaattaataatgctaagaatagaaatgtattttccatcccacctaaga

SEQ ID NO: 246892 - DNA, 455 bp, Homo sapiens
attctttttaacaattgtcacaattattgcacaattgattttctgtctctatagcatcttcttctttaaggctgtctgtgactccatagatttgttggttacccttgatgatgactgaggtggtttaaagataagcagtgctatccactgaaagctttaagtttattgattttggttctcctaataaccatgctactcctggatagatcactgggcattgtgggaggcaaatcaactcttwgggaatacaaatgatactagttgtaacggtataacaggcggaaggagctaaggagcttccagagtcgtctaatattacccgaaagctacttatactaaagggaccaagttttattctttaaaaacccagagacctaggaaggaatcagcagaatgctaagttcatctatagagaaaaatcaaggacttttttggtgtcttttctgctttggcct

SEQ ID NO: 246893 - DNA, 574 bp, Homo sapiens
tgggtggggacacaaagtctaaccatatcagggggccacagaaagtgctgcaaaggcacagatagataaaagtgggacatcaggtgggcagggctgttttgaggataggggctccggaaagcaaaggccttacagagtgattcaattcaacaagcgctggtggatgccatgaagatgacagatcgggtccttaccctaaggggcataatgtctagtaggaaattctctttggttttcctgcctttaaattctcctggctctgctcttcctgcccattccttttcaatcctctttgcatcctcctctatcttctctggtcccttggctgtgaccctgcctaccaatctgctcatggccctcttatatccctctatgctcttctttgtcaatattatccacacattctgggcttctgctatatctgcatcaagacgactctgacatgcttaaagtcctagggctctttcttgacttctggattcagattttcatttaaatgcctccaaatgaatgtyctcctgctagcatctaggatgcaacatctaaaaaaatgatagtgtcattgtccactata

SEQ ID NO: 246894 - DNA, 602 bp, Homo sapiens
caccgcgcccagcctgaatttttgcttttaaatgcatcttcacatttaccctcttctttctaccccttttgacaatatccagctcaagccttccgtatttctcttgtgaccagtgatgtgaattttaggccataacctctgaattggtctcctttcatttcttgttcatcttccctgctggactaatctttgtaaaatataacctcagtcatctagcactccccagcaaagaaaaagtcccccattgctgacaactgctttctaacgaatgactgaactgctcagcattccatccagaattggctgctggtcctgacacacaacacagcgctcaataaagartagacactcagtaacaaatgatccctcttccctttttttaatggatgaaatgaacaaaacgaactttctggtcttgttttcctcttcactgatatcataccttctggccaagatgttactcaatgtcccttgaacactcggcatgttctgctcttcactctgccctctaattagaatgtccttcctctctgttaatgcccaggccagatgttcccttctccgctataaacaactataatcacacacgttgcatctctatg

SEQ ID NO: 246895 - DNA, 602 bp, Homo sapiens
caccgcgcccagcctgaatttttgcttttaaatgcatcttcacatttaccctcttctttctaccccttttgacaatatccagctcaagccttccgtatttctcttgtgaccagtgatgtgaattttaggccataacctctgaattggtctcctttcatttcttgttcatcttccctgctggactaatctttgtaaaatataacctcagtcatctagcactccccagcaaagaaaaagtcccccattgctgacaactgctttctaacgaatgactgaactgctcagcattccatccagaattggctgctggtcctgacacacaacacagcgctcaataaagaatagacactcagtaacaaatgatccctcttccctttttttaatggatgaaatgaacaaaacgaactttctggtcttgttttcctcttcactgatatcataccttctggccaagatgttactcaatgtcccttgaacactcggcatgttctgctcttcactctgccctctaaytagaatgtccttcctctctgttaatgcccaggccagatgttcccttctccgctataaacaactataatcacacacgttgcatctctatg

SEQ ID NO: 246896 - DNA, 628 bp, Homo sapiens
aaaacatcacgtttttgtaaagctgacttagraaatttattttctgattctattagtgttatttctcttgaatctgcccaaggagaaagttaaccctttgtgccccacaatgagcacatcttccctggggactctgtgtgctgatctgtccgcttgaggggacagaagggagagttggtggcaccaaggcatgtggtggacagcaaagatgccacccatcaagacctgatgagaagcagcttttggtttttaattaaaaacataacttttacaatgcctcattcatttcttgtttttatagaatcaaaacatagacatttttcttaaatgaaaaccagaaaccatttaaacatttttaaagcaagcaagttaaaaaaagcagcttaggattgtcttttgtaattctgccagtttcaattttgattccttaatgcaaccagtatcaggataacaatatttgcttgaaaagaaagagaagatagtcctcaggggctgtttcaaacacattttagttgttcgattggctgatgtgaggctagctactgttattgaagttgctttgatgaacagtgaaaaatacattcataatgtaacaatctcaacattttagatatccttagtaaactca

SEQ ID NO: 246897 - DNA, 526 bp, Homo sapiens
cattcataatgtaacaatctcaacattttagatatccttagtaaactcatatttagcagatcctaaaaagtgtctrtgacaatagttctaattttttttttttttttttttttttgagatggtgtcttgctctgtcgcccaggctggagtgcaatggcacaatctcggctcactgcaacctccacctcccaggttcaagcgattctcctgcctcagcctcccaagtagctgggattataggcgcccgccaccacgcctggctaatttttgtatttttagtagagacaggatttcaccatgttggacaggctggtctcaaactcctaacctcaggtgatcggctttccaaagtgctggtattacaggcatgagccactgtgcccagcctaattctaattatttttgactacttgtgttagtgtcacagatttaaagggggacataggtcaaatttagataaaagattaagttaaatatggatgaatagtatttgttaaatatctattatttgttatgcagtttaatt

SEQ ID NO: 246898 - DNA, 432 bp, Homo sapiens
tctgcccatggaaagtcaatggcatttgctcctctaccaggaagcaggaatacaatgtctgtttgcctgccatccttgataagtttactttctctatcattgctatccagttttttttttttatttgctagatatgtaacttgaaaattgtcatggaaggagcaaaagtttggagttcagataaacctggatctgaatactcttctactactgtgtgatcttggatctactgctgtgtgatcttggatgagttaatcactctggattttggcatgctattcacaaaatgcagatgataatactgatcttacatggttattgtgaaaattaaatgaaccagtatgtgtaacatttaytgtacagtgtctgtcatcttgtcagcatttgataaggtatagttattattaattttttttttttttttttttttga

SEQ ID NO: 246899 - DNA, 602 bp, Homo sapiens
aggcaatgtgtaaacttgttttttttttgagacggagttttgttcttgtcacccaggctggagtgcaatggtgcgatctcggctcactgcaacctctgcctcccgggttcaagtaattcccctgcctcagcctcccaagtaactgggattacaggcacctgccaccacacccagttaatttttgtatttttagtagagacagggtttcaccatgttggccaggctagtctcgaactcctaacttcaggtgatccacccacctcggcctcccaaagtgctgagattacaggtgtgagccactgcacctggctgcacacacttcttgacctagagaaagtaaacaagagagtcaaatagtaaaggagagggtacctgttcctgtgactcyaattctttgtgttgtaattttttctctgcacatcgcacctgattagaacggttttctaattcatcttgtaaaacctgaaacggtataaaataaagatatcattaataattagcacacttggaaaaatagttctacaccatgaactggcactaaaaaggcctcagatctctagtttattactcttgttccaaagcattcaggcaaacaatatcag

SEQ ID NO: 246900 - DNA, 550 bp, Homo sapiens
caaacaaacaaaagatgagataaatacagagaaaactatatcaaggcataacataataaaattgcaaagaaaagaaataaatataaaatcttataagmagccagagaaaacagatacattaaaaagacaggaatcaatgaagatttctcatctgaaaagtcagagaacaatacaatgaatctttaaagtgctgaaattaaaaaaaaaatctgttaatctagaaatgcatatccagtgaaactatccttccaaactgaaagtgaaaagcacacatattcaaagaaaaattggagagaatttgtcaccagtagatgtgcactacaaaaaaggttgaaataagtcgttcaggcagatggacctgatactaaatggaaacctggatgaaaccaagggaacaaatagtactggacataaaaaaagtgtgtaaatataaattactttttcttctcacgttaaaatttctttaaaagacaattgaatatttaaagcaataataacaaattgcgaggtttataatacttgcagaaacatagaatatgaatgtggaaat

SEQ ID NO: 246901 - DNA, 550 bp, Homo sapiens
caaacaaacaaaagatgagataaatacagagaaaactatatcaaggcataacataataaaattgcaaagaaaagaaataaatataaaatcttataagcagccagagaaaacagatacattaaaaagacaggaatcaatgaagatttctcatctgaaaagtcagagaacaatacaatgaatctttaaagtgctgaaattaaaaaaaaaatctgttaatctagaaatgcatatccagtgaaactatccttccaaactgaaagtgaaaagcacacatattcaaagaaaaattggagagaatttgtcaccagtagatgtgcactacaaaaaaggttgaaataagtcgttcaggcagatggacctgatactaaatggaaacctggatgaaaccaagggaacaaatagtactggacataaaaaaagtgtgtaaatataaattactttttmttctcacgttaaaatttctttaaaagacaattgaatatttaaagcaataataacaaattgcgaggtttataatacttgcagaaacatagaatatgaatgtggaaat

SEQ ID NO: 246902 - DNA, 584 bp, Homo sapiens
cctaacaatatcaataactatgttaaatataagtagcctaaaaattccaactaatcggcaaagcttatcactgtgttttttaaaaaaagtttaactacatggtgctttcacgataaatgcttaaaaatcttttaaaaaaggttaagattaaaaggatgacaaaagatgtaccatgcaaacagtaatcataagaaaagtggagtcaacatatgaatatcaaacaaagtggattccagaacaaagaagctgctctgtatctctgtagagatacagaggggcatttcacaatgataaaaattgaattcatgaaaatgatctaacaatcctaaatatgtatgtacctaattttaagggcttcaaaatacatgaaacaaaacctgacagaaatgaaaggataaataggcaaattcacaaatgacaactgaagataattcaaaactcctttcacaggaattgataggacaagtagaccgtattartgaggatatagataattcaaaaactgctatcaacctatttgaccattaatcaagatagaccatattctgggccataaaataaatttcagtaaattaaaaaggatt

SEQ ID NO: 246903 - DNA, 584 bp, Homo sapiens
cctaacaatatcaataactatgttaaatataagtagcctaaaaattccaactaatcggcaaagcttatcactgtgttttttaaaaaaagtttaactacatggtgctttcacgataaatgcttaaaaatcttttaaaaaaggttaagattaaaaggatgacaaaagatgtaccatgcaaacagtaatcataagaaaagtggagtcaacatatgaatatcaaacaaagtggattccagaacaaagaagctgctctgtatctctgtagagatacagaggggcatttcacaatgataaaaattgaattcatgaaaatgatctaacaatcctaaatatgtatgtacctaattttaagggcttcaaaatacatgaaacaaaacctgacagaaatgaaaggataaataggcaaattcacaaatgacaactgaagataattcaaaactcctttcacaggaattgataggacaagtagaccgtattaatgaggatatagataattcaaaaactgctatcaacctayttgaccattaatcaagatagaccatattctgggccataaaataaatttcagtaaattaaaaaggatt

SEQ ID NO: 246904 - DNA, 635 bp, Homo sapiens
acaggaatcttttgtctgttctgttcactgatatatcccaagaccaacacacaacacaaccaataactgctgaatgaatggaggaatgaatgaatgttttctaatatggattaatggggcttttccagatcacttttttgctttgcagtytctgtccctctgccataatcctaccaatataccatgactagttcatatgctaacattgttttctttgcttatttcccttagaagtgatttactttttgccctttagtatttagagtcctggtaacatgcatggctgttctatagtcttttgaaaatgtgtcttctttctgaataggttattaacacagctcgtggctttggcatcattgttcagcccttagtagttgcttgaaaaatactgtttaatgaattaattaaaaaaagaaggctgtatgggctgaattggtgagatttttatagcttttagataaaaagatggctatttctttatctccacttagcatattaaaggtaaggcagagggagaggtggaagtgaaaaagtttctaagtatagaaaaatatgatttactatactttttattttttgttatttcttctaagtggagataaaagagaatttggggtaaaatgaaaattggacat

SEQ ID NO: 246905 - DNA, 635 bp, Homo sapiens
acaggaatcttttgtctgttctgttcactgatatatcccaagaccaacacacaacacaaccaataactgctgaatgaatggaggaatgaatgaatgttttctaatatggattaatggggcttttccagatcacttttttgctttgcagtctctgtccctctgccataatcctaccaatataccatgactagttcatatgctaacattgttttctttgcttatttcccttagaagtgatttactttttgccctttagtatttagagtcctggtaacatgcatggctgttctatagtcttttgaaaatgkgtcttctttctgaataggttattaacacagctcgtggctttggcatcattgttcagcccttagtagttgcttgaaaaatactgtttaatgaattaattaaaaaaagaaggctgtatgggctgaattggtgagatttttatagcttttagataaaaagatggctatttctttatctccacttagcatattaaaggtaaggcagagggagaggtggaagtgaaaaagtttctaagtatagaaaaatatgatttactatactttttattttttgttatttcttctaagtggagataaaagagaatttggggtaaaatgaaaattggacat

SEQ ID NO: 246906 - DNA, 578 bp, Homo sapiens
catttctcaaaagaagacatacaagtggccaacaaacatatgaaaaaaaatgccccatattactaatcagagaaatccacatcaaaaccacaatgagataccatctcacaccagtcagaatggctattactaaaaagtcaaaaaacatgttggtgaggctgcagagaaaagagaatgcttatacactgttggtgggaatggaaagtaattcagacactgtggaaagcagtttggagatttctcaaagaactaaaaatggaactaccatttgacccagcaatcccattactgggtatacaaccaaaagaaagtaattcattctaccaaaaagacacatgtacatgagtgctcactgcagcactattcacaatagcaaaaccatggaatcaacctaggtgcccatcaatggtgtattgcataaagaaaatgtggtacatatataccatggaatactatgcagccacaaaaagggcraaatcatgtcctttgcagcaacatggatacagctggaggccattagcccaagcaaataccacatgttctcacttataagtgggagctaaacattgggtactcat

SEQ ID NO: 246907 - DNA, 576 bp, Homo sapiens
gaggtactgctacatacccagtagaatggcaatagtaataataataatgatgatgatgagaataacaagtgttgatgagaatgtgtcaaaatttgaactctcctagattgttgacaaaaatgtaaaatgtttcagctgttgtagaaaacagtttggaagtttttcaaaaagttaggcatagaattcttatgtgacccagcaattaccacccaggtaaatactccaaagaactgaaaacaggtactcaaacaaatacttgtacacaatttatcataacacttctattcacaatagctaaaaggtggaaacaattcaaatgtacatcaaccaataaatggataagaaaattgttgtataaaaataaataaaataaaatgacttagagtgtatctagttttccagaatcatctacatcaaggctgaattacttygccacttcattttaatataatattcaaaatgtttgaaagcaataagtatgatgcccatacaaaacatgtcttatttccccgttcagttgacaaaaataaggtgtccagttggctctgttgctttatagttgaatttcccatcacc

SEQ ID NO: 246908 - DNA, 475 bp, Homo sapiens
tctcaatagagaggggagctggagaggagatgggaagggcaggtcgtcttccctggagttaagtcatcttttccccaaagtcaggccatctcctcctcttccaactgagtctggggtctttataggcacaggaaggggggtggatgctgattggtttgtgtgtatrcaagaaaggttaaagtgaagcctccactcaaaggtgggcatgacagtgtagaaaacctattagaaaaggataggtatatgtaaaataggtgaagggtggggcccaatcagaggaaagcatgccaaacaggaagatgatttctcaatccgttccgaggatttaacctgtagcttggctttcaggctttcaactgtcttcagcttggaggtggggtttcactggagatccacccctatctgcccaggaatttggctgcctgctgtcactatcaccttgagctcatcaaaggcattcttcattgttgtttat

SEQ ID NO: 246909 - DNA, 589 bp, Homo sapiens
ttttgccaatctattatattttttagtgtcactactagaatatttaaaattttgacctacatatttctgttgtacaaccctgttgtctctatctggaccataatatttcaaagtcactgaatgcctatttatgaaataaataatggccatataattgatttaaagaagaaagtagccgggcgtggtggctcattcctgtaatcccagcactttgggaggccgagggggtggatcacccaagatcaggagttcaagaccagcctggccaacakggcgagaccctgtctctactaaaaatacaaaagttagttgggcgtggtgacaggcgcctgtaatcccagctacttgggaggctgaggcaggagaatcacttgaacccaggaggtggaggttgtggtgagccaagattgtgccattgcactccagcttgggtgacaagagtgaaactccgtctcaaaaaaaaaaaaaaaaaaagaataaataaaatacgtttatgttgtacattataattctttttgtttgtttgtttgtttgtttgttttgagacagagtcttgctctgtcgcccaggctggagtacagtgtggcgt

SEQ ID NO: 246910 - DNA, 614 bp, Homo sapiens
ttcagtgcttagacctggaaaggtcaacgtccatcctggagatccagtcacaaccacaggaccacagaagggcagagctgggagggcctgtggaggtcactccatccacccaccccactcccagaaccgtacaggctgggcagtccaggccaattcaagcattcccttctggttctatcaagaaagtctaggaggggagtggagagctgcagaggggaaggagggaggggatcagaaggaggaggaggaggagcaggaggaggaagtagaggtgaaagaggaggagagtggtagrctgacagaaatttttgctcttcctggcaccctgctcctacccctggacctaactgagccttcccaggtgctatgcactgaatgtctgtatcctgcatgatgggattagtgcccttataagaataaacataagcaagcatgccttctctctctctctgccatgtgaggatatagcaaggaggcgtccttacgagaaaccaagaaaagagtcctcatccagtcccaaccatactggcagcctgatcgcagacttcccagcctctagaactatgaggaataaattactgtctaagctacctggcaattcattataatttgtt

SEQ ID NO: 246911 - DNA, 555 bp, Homo sapiens
tgcctgttccataaaataagcaaacaactgccaggtgagagcgacaggtggagaaggctttagacttcccatctgatgatgaaattcttagaatggaggggacaatgttagagtaagacaaaaggatccctgaaatcggaagaaaacgaaacatagtactatctaaatatatgaatatgctatcgatgacgctgtcagaacaggcaaggttgagaagttgagatgggtcacagacaaaattagagatttccacattcttgaagaaggtgaattgtaacacagtccaactgtgcagctgggaatccaacaggctaaggaaaaaggacaccaaaacgaagaagacaccgaggcgaggattcatgatgactgggtagtgtggggagtgacagayggctacaaatcggtcataggccatcacaatcaggagcatgatcttctatgcatgcaaaaagggcaaagaaagacatctgtgtcaggcagcttgcataagagatgactgctatgcgactgcatgtccacaatcatcttgggaactgtggccgaggtgaaagcgat

SEQ ID NO: 246912 - DNA, 616 bp, Homo sapiens
ggtgtatatgtaccacattttctttatccagtctgtcactgataaatgggcatttagttgattccatgtctttgctattgtgaacagtgctgcaatgaacatttgtgtacatgtgtctttatggtagaatgctttacattcctctgggtctacaaccagtaatgggattgctgggttgaattgtagttttagctctttgaggaatcgccatactgctttccacaatggctgaagtaatttacactcctaccaacattgtataagccttcccttttctccacaacctcaccagcacgtgttttttctttttttttactttttagtmatagccattctgactggtgtgaaattgtatctcatggtggttttgactcgcatttctctaatgatcagtgatattgagctttttttcatatgcttgttggccgtatgtatgtcttccttttgagaggtgtctgttcatgtcctttgcccactttttaatggggttgtttttctcttgtaaatttaagttccttatagatgcttgatatcagacctttgtcatatgcatagtatgcaaatatttcctccctttctgtaggttgtctgtttactctgttgatagtttcttttg

SEQ ID NO: 246913 - DNA, 535 bp, Homo sapiens
tgaaattaatattccaaaaggaagtctgtggttgtttttagtggccttctgaaaaatgtggaatagcttatgaccccacctaaagtttgccacaaatgcataagtacctgttacaaatatctaaatggaagaaagctatacatttttctcatttcactgagaactggctgagtattatgaggccaaatcatacattaaataatcagtcctggcaatgaggtctttgataaagtgatgatgctctttcctggctaacctctagtgcctaacaggttctgtgtaactctgttctagtagcctgacattttctacttgttgaaacataccagtggctgggygcagtggctcacgcctgtaatcccagctactggggaggctgaggaaggaaaatctcttgaacctgagagggagcgagggagggagataccagaacacagaatttgatgggtgagggaaagatgagcttcatggtacccaaaaggccaaaagaagtgtctaagagatgtttgatcatactcttaagatgtggacactg

SEQ ID NO: 246914 - DNA, 535 bp, Homo sapiens
tgaaattaatattccaaaaggaagtctgtggttgtttttagtggccttctgaaaaatgtggaatagcttatgaccccacctaaagtttgccacaaatgcataagtacctgttacaaatatctaaatggaagaaagctatacatttttctcatttcactgagaactggctgagtattatgaggccaaatcatacattaaataatcagtcctggcaatgaggtctttgataaagtgatgatgctctttcctggctaacctctagtgcctaacaggttctgtgtaactctgttctagtagcctgacattttctacttgttgaaacataccagtggctgggtgcagtggctcaygcctgtaatcccagctactggggaggctgaggaaggaaaatctcttgaacctgagagggagcgagggagggagataccagaacacagaatttgatgggtgagggaaagatgagcttcatggtacccaaaaggccaaaagaagtgtctaagagatgtttgatcatactcttaagatgtggacactg

SEQ ID NO: 246915 - DNA, 558 bp, Homo sapiens
aagtaaataaaaatttgaaatcagttaaggaactcttgcaaggaatcactgtgtgtgtgtgtgtgtgtgtatgtgtgtgtgtgcacgtgcatgcatgcgtgtgtgtgtgtgtgtgtggtatatacatgtacatacagatatatacacacgtagatacatgcatatttagaagtaagggaataaacaaacattgarttcaagaatattgtcataaaagggcattgcctcctccctcacaaaacaaggtgcactaagcttctcaagccctcacttcagtgggctgatggaaatatagccaaagtattttaccatgttttgtaagatctcttggtttagcaaatacattcaaagaaatttttccaccaaacgtgccacaagaattgtgttttcatttctcctgtgcaagtacagaatggagagaaagtaggcaatcagggagagatgcaaagagtctagcaaattatttctagcataatcacacatttaacttcagactcagccttgttttataattccaaaaaaaaaaaaaatgaaggtcaaagaatactgctttaccag

SEQ ID NO: 246916 - DNA, 593 bp, Homo sapiens
aattgagtccttgatcctatgtccttttgagaattatcaccgactggcataagtgattagattagataaatatattgaatgtgtttgtggaagatgagaggggatgctaaacaggaagtatagcaggaagactggcagtttctgcttttgtcttagtatctttgagagatagtgctgtttcctgctaagtaattttgcgtgttacagagtatttaaacactcatatgcatggtgttcgagttcacaaagggagtgtggaatgaccctcttcaaaccatcctatcacactggttttcttttttctaaaccacagttacttttgcaccaamctaatactaagctttcctctttgtagacaaacaagaggtggttagaaatgttttagacaaatctatttgatttgaagtaggtatttttgagtgcacaggttaaattcctgcacagctgcaagtatactacatgactttgtaacaggacattcagttacagctcctaggtcctgtggtctgtataaaaaagagctgtacccataggcctttcagaagtgcctcctagagtagtgtttacaaagacttaattttaaatgtaattct

SEQ ID NO: 246917 - DNA, 590 bp, Homo sapiens
aaccctttttatatctttctttagacatgataaaagaaagaaattctagatgtataacatacagcctatatttttttcagacagccccaatttcaaatacagtcaagttaagatggttcagcctagctttttaactttacagtggttcaaaagcaatacacgttcagtagaaactgtactttgagtgctggtacactcatttcgtttttcacatttagtgcagtattcaataaattacatgagatagtcaacactttatcataaaactggctttgtgctagataattttggccaactatagtctaatgtaagtgttttgagcatgtttaagataggccaggctaaactatgatgtccagaaggttaggtgtatttaaatgcatttttgacttaatagtattttcaatttaccatgggtttatgtggatgtagcctcattgaaaggatgaggagcatctgcactctgttctatgatctctaaaccactgyacgttttaaaagtctgtgtcagcatcaaaattatccataaccccaaaccctaaagctactcagtggtcttctgttagatcatatgtgctcatttttattct

SEQ ID NO: 246918 - DNA, 638 bp, Homo sapiens
agaaatactcaaatttctgcaaatgtaattacatagttccgcagcctaccractacacactcctgggagatgggagaaacatgcatttgctctcaaaagccttcattttacctggcatgctaaaaaggaccttggtaaccaagggttaagtctgcgtgcatgcaaaaatacatgaaaggcgaatttataaaatgaagcgtggaggttaagtgtgggggttaaactaacacaatgaactgtgaacacaaagaaaaatgtttctttaatttttaaaatgttttcacttctcataataaactgaacttgcagttgcatgcaaacaacattatttcataccctgaagacaccacaatttaaagcttgtggaactcaaattgattctagaagcaatgttataactacagaggcgctttggcaattgtgatcttctgaagggcatcaaatcacacctctggtagcacatctgaaagtaaacacttgcacacatgcacacacacaaggtaggaggcatttaaaacagggtcaacgtcgcatttatttcctgtttcaaaggcagttactgattttctcacaggctaatagaagccatattaattgccatggtaagttcagatttgaaagtaataaataggcacata

SEQ ID NO: 246919 - DNA, 592 bp, Homo sapiens
tgttagcttatcctccatttcatttctaaaacctgctcctaatcctcaaatactctcttcttaaacacatctttgctaaattcattgattgtgttagtaaaatgtatattgagcagttgttctgcaagtgcactggagcaggaatattgttagtgccttcactccaagaccagaagaagtttgataacctggctgtcaattatcacctgccttctcatttgttcttacttttatgttgaccattagttttcaagtctgttacagtattttaaaaaaattttcaccggttttaagagattttgaccrattttcatgctattgtttatgcaatataaaatgcaagccaagtctattaaattttgttttgttatgcttctttttagaattcttgagactttgttggtattacaaatgttatgtttgcaaaggaaagtttctaatcctttgtcactgataaaagtatacaactgatttttttttatctccagtccattttttaaaggaaatttctagcattaagaataagttaatcctacaaacactaatttaaagcatttgccatgttcataaactaccttctcctaggcatgtc

SEQ ID NO: 246920 - DNA, 603 bp, Homo sapiens
ctggagtgcagtggcgcgatctcagctcactgcaacctctgcctcctggggtcaagtgattctccagyctcagcctcctgagtagctgggattacgggtgcgtgccaccacgcctggttaatttttgtacttttagtagagacggggtttcaacacgttggccgggctggtcttgagctgctgacctcaagtgatccacctgcctaggcctcccaaagtgctgggactacaggcgtgagtcactgtgccgtgttcccttctttctaaaggccgactctcttcactgtttctattcttgtcacccccacttctggagcactgaggggaacacaacattgacttgcagtttcggaaccctgggtgggagcagtgggggaggaggcagtggagagaattttgcttcatgagatggtggagggttaatccggccgccctccctgctccagaccccaccctggaccagcagttctttgccacggttggctgggctaagtcaaacctccctttctcattccagtggcaagcatgacggaatagaaatgcattcccttgatcaggaatcccttccaagtctttcagggtgtgttggagttctcgcaatga

SEQ ID NO: 246921 - DNA, 595 bp, Homo sapiens
gttaatgctggaaataaagagaaagtaaagtaaatggtgattcatatctgggaaattgaactctggagaaagaggagaacaaaatactgggttgtggcccctacccagtaccagaatgggtcccctggaaaatcaatgcggtcatgagaagaagtgacctatgaaactgtgggtgtgaatgcttcatccagggcagaaattacttgctgatgagggctaagcatcagtggaagtttggagagcattctacaattgtgtgtagactgccagtaagcttgttggacatgatataatgatatacctcagtgtccctggatgggagtttgtgagggtctcgggacatgctcccatgaatgtgaagagtcttctgaatccacagtgagtgaatgctctgtaagccagaggatggcaaaaggctctgctttataggagctggaagttgctaattgttaggcaattgtggtaatccttttagtttaggcagtcttgcaggatgtgcattcacagagacttgcgctggtctcctgcaactcacctttgctcgagtacagtgtttggsgtctgtcagtttccatggaattaatgaattaagcaa

SEQ ID NO: 246922 - DNA, 402 bp, Homo sapiens
ggttttatgtgttctaatcacaaaaatataagtatgtgagataatgcatatgttaaatagcttaatttagccattccacaatgtatgcatatatcaaaatacaaatacattttgtataccataaatatatacaatatttacttgtcacttaaaataaattaataaaagattaggaagaaaaaacacaaaatcacaccaaataataaacaaaggtgggaagaaaattctaagatgtttatgaaataaagggtgactaaatcaatgatgctcaraatatttttgtcactatcttccattatcttgtcattatattgttttgtcattatcttccattatcttgcatgattgctctggtctgtagattctgaatggcctggcatgcttctgaattatgtgggaata

SEQ ID NO: 246923 - DNA, 604 bp, Homo sapiens
ccatgggcaaacccctgctttcttgaaagaggacatctttcaggccagaaatttctctttgctactcaacagaatggtctttccttttatttcttcccattggccctggctctatcctaagaggccacagatcaaatgtagttggtcttccctatgccaacccttcatttgtataaagatgaaatgaatatgaagctagttacttctcttggaactgtctgggtcaccttctgaaattccttcagttcttgtctgtctcaaagtgcagtgcctggatggcatcctcgtttataggagcagagccaagtgcagcctcccacatcccaccctttggaattccttaatggatccttacaggactttgcagcaatatatagtttttrtttttgtttttgcacttcagtgggatttacatttaattttatcatctgtctcattgggtgctctctttctttagatttaaaaggcctgtgagcaattgggacaaggcaaatattttaccatcaaataattcaagattttttctcacacctaacacttgtgagatgacttatcacttaaatcctgagagtcatcatcagattttccctttgtcctctattcc

SEQ ID NO: 246924 - DNA, 499 bp, Homo sapiens
tttatttgggtaatgtggatatttgtaacatttatttaaataaatttctcatggataaacacttaggatatgtaaatggtgaactttatcggaaactgccactttttctaaagtggttgtaccattttatatttttgtgcagagacagacaagagttcatgttgctccctttccttgccaacatttggttttatcagtcttatccattttcaccattctagcagcctgacatgatatcacattgtggtcattgatttgtaactccctggcaactgatgataaacacactagtttgtgttgtttttgatcattcatatcgcttcttttgtgaaatgtctgttccatcattttgcctacatttacattttgttgggttgtytgtctttctattattgagttgcatgagtcattacgcattttggatttgagtctgatatacgttttgccaaatacttggggtttgcctaattataatgatgcctttgaagagcatcagttt

SEQ ID NO: 246925 - DNA, 470 bp, Homo sapiens
gagaggtagaaaggaggtttaggtaaaccatggagaatggaagaaaagtgcctcttaggggctacagggatactccagggtcctgtttcctgtttttatctttattttttccttttcacattkaaacattcttttaacaaaatgtatgtatttatttcaacaaacaggaaaaatggactagttacaaatggcaagcacaatttgttttctctggcttttacatattttttaatttaacaaatattcatcaagcatgtattatgggtcacagagtgatgcgtattccagttaacaggaagaaacaggtcatgaggattttaggaaaagataagagggtgcccatggtacttgtttttgtgattttgattctcttcagagaataactgaatgtacttggatgcatgatccacttatttagtcaaagaggctcccatggaaacactgatacttcctagagcccatcctgtttg

SEQ ID NO: 246926 - DNA, 489 bp, Homo sapiens
atacaaaaaataatgcttcaaattatactttggacacgatgtccacttttttggctcaacaaacaaacccaaaattgttttttagctttctgctctggcattcacaaagttttgcctaaaacccttgaggatttgctggaaaagatttatttatatgcattctgaagagcatgccaaaatcctgctgcttcacgtttttcacgactcttctaaattaaaaagcgaatgcgcgtgggagggtaaaatgttggtttagttatagtgcacagtaaatgtgtttatttccargaagagatgagtaaaggtgatgtgacaagaggagtgctcagtcaaatgaattctgcctggacagagctgtggtttattttactctttacaaagtcactctctctatttaatggaaagtcatatgcacataaaagtctatcagtttggggactgcattgtattgacattacactaagctctattagttaactaaaaacagcc

SEQ ID NO: 246927 - DNA, 569 bp, Homo sapiens
tatttaaacctcagccccttcggagtctttttctaacctcttctccaaccaacactgaggtcagacttctggttacacggctttctgtgtttttcccgtagtgcttatcacatttagagtttaaygattatttatttaaaccaaatttctcttctagacttgccttatataaaaagggaccctgtttgtccctttattcattattcattcattattattgtattgccaatatttagaaagagttcagtttcagtacagttaatatttgttaaatgactgaataaacccatttgttaaacaaatcatgtttttattgaaggtaaagcatgcaaaatgtataggaagcaatgtgaaatgcagaatcagtacagttaagttaatacaaaattcaagtcctgtgtataagcggtagcctaacagaagtcatgctacaaaactgcccgtctgtgtaagtgcaaaatgttggggagaaccagagctgactggtcacacggattaggattctctcttattggtgagttgacttggcctagcttcattaaaaagagcatttctaggcttgagtgtgt

SEQ ID NO: 246928 - DNA, 566 bp, Homo sapiens
aagactattattctcctcttatggaatttatagcccaaagatgtaaaaaaaaaagtcttatttttaaaaattggcttatttatttcttatttactcactggattatttttatccatctggaatttattttgttccatcatgtgccaataacctatgtcaggttttttaaacactattttccgaacactttttgctaactatggctatttgcatacacatttctttctcataatttgtaactctcccttttaggtgaaaaaaccattagataaatgagaggttttgacagagagagtttccttttattgttctcccctgccccctacaatttcttagctctttgttgctatttatttttattataaattttagaatgattctgtcacgtgccataacaatctccattgggattgtgtctgcattcgcattggtcttttaaattaactrggaaaatattcatctttactgtattcagccctcccatcaatgatcatgacatatttctataaaattcttaatatcacccaggaaatatctgtggtttcccattgaaaattctgtatggt

SEQ ID NO: 246929 - DNA, 616 bp, Homo sapiens
gctttgctcttcttaatgcaatttttcagctactcaacatatttgttcttgagcaatttagacaccagttcatgtttgtaaagaaaatattcccaggaaaagtctctggagaagtatctagtgtgtgaccgttttatgataaaacggggcaggtggtcatcaagscttcatgcattactgccctgccacctttgcaatctcgctggatgccactggccatgttggtaagcgggctactcctctgcttaaaaatgaggacgaactccccagcttcttggccgagccgataaagctagcaacaataaaaagaaacaatgcataatgttcattatactgctgtgtggggagtttgtttaagacttgggccctaaatggtttttaatcccaggatgcactgattgcgatgatgggagagaggcggcccagccgtcagttataaaatcattgcaaatatgagcagaataaaaaatggtgaaagggatcttgttacagattctgtttattccatgaggatttgaggaaagcaaataggcagtgattctgtttggaacttgttcctgaaagattaccttttatgtaggtaagtcaaaaggttaaagaagtaaacagaatttaa

SEQ ID NO: 246930 - DNA, 481 bp, Homo sapiens
ggcttttatagtcctgttcgttcagtcctaatccatcaaagtacacttcatgctttacagcactaaaggaaaggcgaaataaagagatgctttgattaaaagtcgagagagtaattaaataccaattcagccttctgcatattaagtttatatcagaaagcaaggtcatgaatttaagagcaatgagattctatataatatcygcataacaaagtagcagagctttattaaagatcaagtctctttttaagaagttttaaattattgtgacatttcaggataataaattgataaatggctaaaaacaaaaaaaagcaagaagagacactaagttcagtcaagtgaaatatctgagatccaggcctctctgataaaaagtttaaaatatgcatagtgtgtatataacttatctgtttaataaattataaatttgaatcttatttaaaactccccaaactacttactactgttttaatttcag

SEQ ID NO: 246931 - DNA, 557 bp, Homo sapiens
tcttgaatgaacccagttacactgggggatatagggaatcttcaggtccctgttcccgctagacttaacatggtcctcagaggggagcttggtgtggtctctggaacagtgcttgattttagtgctgtagtgccaggatgagggtcttcttgttaagcagaggtttctgagttttgaatgggtcatcctggaatcttgagaagggccaggaacaagagaagcacaacattaggttgtccctggatttgctttacaaagtgggtgtcccagctatggataggctaagactgaatagtcatacagtgcagtaggcacattgaggacatcattatcattcccttttatccatttattgattagatasttaaaactttcaatgttatcttgaagttatccagtgattcagtgatattttatgttggaggaaggaaaatgtcagagggtttctaatttattttttattttattttgttattattattattttttaaatttagagacaagagtctcactctgtcactcaggatggaacgtggtggcatgatcatagctcactg

SEQ ID NO: 246932 - DNA, 436 bp, Homo sapiens
aatctcttaccagagtttgggaagaccttccacaagctgtagagctaatgtcactcagtggacaatgcaggtctggcctcaggaatgggtcaactggcttccatccctctccatgctccacaccgggtcagagcctcatcaactgtaaaaccagaacatgtcatgcctcgactctctaggtgctactttttgacacagtcagattcgtcctccccagatagctacttctgctgttagattgagctagataattctggagcttctggaggaggctcgttctgggtagtgtagtggcccaaataaagcaccatgaatggggacagagtccggaagagccttggcgtctaggcagctgcaaggttgttatttctsagatcctcaaattttacaaagggtcagaaggtcagacagcaaagacaggaaaagctcccttcat

SEQ ID NO: 246933 - DNA, 590 bp, Homo sapiens
attgtgcccctgaactcatagtatccctaagttcataacatcacggagctcgtagttgtccaaaatcatagcacccctagactcatagcacccttcagctggtacttctaaactcattgtacccctaaactcatagcactcctgaatacatagcacccctgagctcaagatacccctaaattcagcattcctgatctctttgtactgctgatgtcatagcacctctgcactcataacacttctgagttcacagcacccctgaactcrtagtgatctactctgccctgtcctgcctgaattaccaattaaagaaggcctcagtcatgaattatttaaatatctaatcaatggcagaaaatgtcagttttatgactaagccgatgttaatggtctgtacaaacaacagtgttctatttttatgtgagaaaagacttcaacactttttattgttattgttttatataaaaaaagtgtccatgtggatgatcatattcatagaaaagcttagatatgggactcagaaaagtttgacccaggatctaacattgattcaaggttaaattttaggtgtattactaagctggtctaag

SEQ ID NO: 246934 - DNA, 590 bp, Homo sapiens
attgtgcccctgaactcatagtatccctaagttcataacatcacggagctcgtagttgtccaaaatcatagcacccctagactcatagcacccttcagctggtacttctaaactcattgtacccctaaactcatagcactcctgaatacatagcacccctgagctcaagatacccctaaattcagcattcctgatctctttgtactgctgatgtcatagcacctctgcactcataacacttctgagttcacagcacccctgaactcatagtgatctactctgccctgtcctgcctgaattaccaattaaagaaggcctcagtcatgaattatttaaatatctaawcaatggcagaaaatgtcagttttatgactaagccgatgttaatggtctgtacaaacaacagtgttctatttttatgtgagaaaagacttcaacactttttattgttattgttttatataaaaaaagtgtccatgtggatgatcatattcatagaaaagcttagatatgggactcagaaaagtttgacccaggatctaacattgattcaaggttaaattttaggtgtattactaagctggtctaag

SEQ ID NO: 246935 - DNA, 590 bp, Homo sapiens
attgtgcccctgaactcatagtatccctaagttcataacatcacggagctcgtagttgtccaaaatcatagcacccctagactcatagcacccttcagctggtacttctaaactcattgtacccctaaactcatagcactcctgaatacatagcacccctgagctcaagatacccctaaattcagcattcctgatctctttgtactgctgatgtcatagcacctctgcactcataacacttctgagttcacagcacccctgaactcatagtgatctactctgccctgtcctgcctgaattaccaattaaagaaggcctcagtcatgaattatttaaatatctaatcaatggcagaaaatgtcakttttatgactaagccgatgttaatggtctgtacaaacaacagtgttctatttttatgtgagaaaagacttcaacactttttattgttattgttttatataaaaaaagtgtccatgtggatgatcatattcatagaaaagcttagatatgggactcagaaaagtttgacccaggatctaacattgattcaaggttaaattttaggtgtattactaagctggtctaag

SEQ ID NO: 246936 - DNA, 590 bp, Homo sapiens
attgtgcccctgaactcatagtatccctaagttcataacatcacggagctcgtagttgtccaaaatcatagcacccctagactcatagcacccttcagctggtacttctaaactcattgtacccctaaactcatagcactcctgaatacatagcacccctgagctcaagatacccctaaattcagcattcctgatctctttgtactgctgatgtcatagcacctctgcactcataacacttctgagttcacagcacccctgaactcatagtgatctactctgccctgtcctgcctgaattaccaattaaagaaggcctcagtcatgaattatttaaatatctaatcaatggcagaaaatgtcagttttatgactaagccgatgttaatggtctrtacaaacaacagtgttctatttttatgtgagaaaagacttcaacactttttattgttattgttttatataaaaaaagtgtccatgtggatgatcatattcatagaaaagcttagatatgggactcagaaaagtttgacccaggatctaacattgattcaaggttaaattttaggtgtattactaagctggtctaag

SEQ ID NO: 246937 - DNA, 525 bp, Homo sapiens
gaggcacagcaaggatgtggctcacagttcaaccccaccctcagagggcagagcgcggacgggatttggagccctgagacaatagttgagtccctggcacactcacagaaccgcattctcacccccctgggctgtgacccagcctagcagtggcgggagagggagcgagtgggactggagtattggtcctcagcacatggctcccagcctagacgggagaagggagtcggttgactcatttccttttattgctcaaatgtgacataaaatttcactaaaggtcacaccatagcacagcttatttcctctcttttgccagaagttccttataaaatttcctcactctatcttgtcacagcccccrcacccatgacatcttcatggtctcttagtatggttttacttttcatacaaatcggatccaaggggagggaagcatgtcaaaatgccactgtgggtcttttgttgcatgaaaatgtacatgttgcgttgaattaatgcacttttaaactagacctagctact

SEQ ID NO: 246938 - DNA, 585 bp, Homo sapiens
actgttagaagtaaatatgcagacaaattcagaatactccaatattgtaatcatggtgtataaatcacctatctctttagtatgaggactaaaagacaaaatggttaaaaatcataataactrtaataaattgttaaaagatagacaaaacaaaaagatataaactgtgacagcaaaattcaaagtgcagagggaaatgaagttgccatacatggtttgctttttatttattttctttgagatcacagttaagtttttatcagtttaaaataatgtttataactataggatgtttactgtaaagctcatgataaccacaaaggaaaaacctataatagataggctaaaaattaaaagcaagaatcaaaacacactactagagaaaatcatttaaccacaaaggaagacagtgagaagaagaaacaatgaaatgacaaggatacatacaaaaaagaaactgcagccaacatccttgaagaacatagatgcaaacatcctcaacaaaatactaggagacaaaattcaacaacacattaaaaatattctttgttatgatctagtgggatttatctcagggatgcaagg

SEQ ID NO: 246939 - DNA, 585 bp, Homo sapiens
actgttagaagtaaatatgcagacaaattcagaatactccaatattgtaatcatggtgtataaatcacctatctctttagtatgaggactaaaagacaaaatggttaaaaatcataataactgtaataaattgttaaaagatagacaaaacaaaaagatataaactgtgacagcaaaattcaaagtgcagagggaaatgaagttgccatacatggtttgctttttatttattttctttgagatcacagttaagtttttatcagtttaaaataatgtttataactataggatgtttactgtaaagctcatgataaccacaaaggaaaaacctataatagataggctaaaaattaaaagcaagaatcaaaacacactactagagaaaatcatttaaccacaaaggaagacagtgagaaraagaaacaatgaaatgacaaggatacatacaaaaaagaaactgcagccaacatccttgaagaacatagatgcaaacatcctcaacaaaatactaggagacaaaattcaacaacacattaaaaatattctttgttatgatctagtgggatttatctcagggatgcaagg

SEQ ID NO: 246940 - DNA, 577 bp, Homo sapiens
gggcggatcacctgaggtctggaattcgagaccagcctgaccaatatggagaaaccccatctctactaaaaatacaaaaaaaaaaaaaatagctaggagtggtggtgcatgcctgtaatcccagctactcgggaggctgaggcaggagaattgcttgaacctgggaggcggaggttgcagggagctgagatcacgccattgcactccagcctgcacaagagcaaaaatccatctcaaaaaaaaaaaaattagccaggcatgatagtccacasctgtagtttcagctacttgagaggctgtgcaggaggaaggcttgagccaaataagttgaggctgaagtgacctgtgatcacgccactgcattccagcctgggtgaaaaagcaagaccctgtcttcagaaagaaacacataccttaaatatgagagaacctcccagcttctccaaggagagtggaactattgaggtaaaggatgacaacataattcctaaattatgcaacctttagccataagccataatgcagagtaactcaacctctagtttatgccaaagtagtgtggctacaattattcttg

SEQ ID NO: 246941 - DNA, 628 bp, Homo sapiens
gcacgtacagaaagaaaatgacaagcccaggtcatttaacctttagcccaagccrtgggcgaaaaactggaaagcctccctgccagccctagaagaatcttatatttctttttgccatagtgctcacattgctgaaaattaaacacaaaatttaatttgtgttggttgctcaattacaacagttgaactcacaatctttccaagtttcttatgtagaagccagggcatggactggggggaaataggctcctgaaacagaatgggaacatctggttggatggattgtcagatgaaactaacatccgagtctcaattactagtagaattggcttgccctccagtgtctcaggaacctaggcttgtttgcttgaaaactctctgataacctcacctggggcagatactttgaaagcaggtgactattatcttcacgaccctccataaccaccccgtgctcctcctagcctcataactaggctcaatctcaggggtacaggtataccttacggcccagaaagaaataagttgcacactaaaaggattacaagcctttgctaatgtatatacttagaaacctgagaagcatttgtgggagcagtttctagggatgccaacctggggatggagg

SEQ ID NO: 246942 - DNA, 628 bp, Homo sapiens
gcacgtacagaaagaaaatgacaagcccaggtcatttaacctttagcccaagccgtgggckaaaaactggaaagcctccctgccagccctagaagaatcttatatttctttttgccatagtgctcacattgctgaaaattaaacacaaaatttaatttgtgttggttgctcaattacaacagttgaactcacaatctttccaagtttcttatgtagaagccagggcatggactggggggaaataggctcctgaaacagaatgggaacatctggttggatggattgtcagatgaaactaacatccgagtctcaattactagtagaattggcttgccctccagtgtctcaggaacctaggcttgtttgcttgaaaactctctgataacctcacctggggcagatactttgaaagcaggtgactattatcttcacgaccctccataaccaccccgtgctcctcctagcctcataactaggctcaatctcaggggtacaggtataccttacggcccagaaagaaataagttgcacactaaaaggattacaagcctttgctaatgtatatacttagaaacctgagaagcatttgtgggagcagtttctagggatgccaacctggggatggagg

SEQ ID NO: 246943 - DNA, 573 bp, Homo sapiens
acagtgctcacaagacagtaggctgagcaatagggggtcctggaagctgatgccattcctagggtggtgcctggtgggtaagggcaagtttgtggaggaggaaagagagagagagagaaagaaagagagagaaactgaattggtgtttgaattcaatagggcagataaaagtaagaagaccaggtacaagaatgtagagtagaaaacaaagacacttgaatctgtgctgacattagtgacttgcttgatcaatgagttgtgaaagtaacactctggaacttctagggtgaggtcccatttgagtccagtcaacccacgaaacatgagccatcataataaactgctgtttgcagtctttaagaatgggcatagtttgtcatgcagcaaytgataatccaaacagactccattatgcaatagtcctttattgtacttattactttctggcctggacccgtaggttgtgagcctgggaactcccaccttagagttctgtaattgctagagattgatgtcacacacctatctcaaccagcacttacccatcaggagtgttcgtagtgcacacacaca

SEQ ID NO: 246944 - DNA, 634 bp, Homo sapiens
ataaatgctattagtgttaggtggaacggcttacatttttatccagtggctaattttctctccatagagtctcaggaaaagctatctttatggagccagatggaaaatgtaaattatgcttctgttttctctcttgctcccaaagctatgatttatgtttgttcattgtttgtgttaatatttgcacatcttttcaaataaactttgaaacattttacataggcacatawgagtctataatttaaaaaaaaaatgaaattaggaaaaagagcaaaaaagatgaaaccagatagcaaattgtattttggacagatagatgcagcagtatctcccatattctagaagctcttcgacaacatgacctcgcacatactcctcccatgaagaagtgaggtctttgtccctgtttcctagttgagtaagcttttggcaaccaagagactgtggcagatgttaaaagacaattcagcttgtgacttgtctagtgaaatacctgcacttggagccctgagttgctatgtaagaaaactatcctgaggcagccatgctgtaaggaagcccaagacacagggagaaaccacatgtaagtatttcagtcagcagtcctggtcttattccctctctaagtactggt

SEQ ID NO: 246945 - DNA, 634 bp, Homo sapiens
ataaatgctattagtgttaggtggaacggcttacatttttatccagtggctaattttctctccatagagtctcaggaaaagctatctttatggagccagatggaaaatgtaaattatgcttctgttttctctcttgctcccaaagctatgatttatgtttgttcattgtttgtgttaatatttgcacatcttttcaaataaactttgaaacattttacataggcacatatgagtctataatttaaaaaaaaaatgaaattaggaaaaagagcaaaaaagatgaaaccagatagcaaattgtattttggacagatagatgcagcagtatctcccatattctagaagctcttcgacaacatgacctcgcacatactcctcccatgaagaagtgaggtctttgtccctgtttcctagttgagtaagcttktggcaaccaagagactgtggcagatgttaaaagacaattcagcttgtgacttgtctagtgaaatacctgcacttggagccctgagttgctatgtaagaaaactatcctgaggcagccatgctgtaaggaagcccaagacacagggagaaaccacatgtaagtatttcagtcagcagtcctggtcttattccctctctaagtactggt

SEQ ID NO: 246946 - DNA, 604 bp, Homo sapiens
tggtcttattccctctctaagtactggttatgcaaatgaaagaatcttcaggttatttcagccgccagcaatagagtcacctctagccttccagtattcccagttgagggccccagatatcatgaagcagattcaaatcattcccactgtgtgctttttttggaattccagacccacagagtctggaagcttaataaaatggatgttgttttgctcaactaaatttacagtaatttgttctgcagcagtaataactggaacatgtagtaatggtaattcacagacttgcttaacatcaagatgttcagtgttcacctgtgaaggaattggattcctttgatgttctaaaaggcttcagtgaaaacaactatcctgtagcagcagaatcacagaatcactgtgatcactgtgctgttttagaagtgaaaaagcaagctgtctgactccagatgtgtcactaaaaagacacttgacttggaaaacaataacacctgcataatgctctactttccatttcccaaacytccttctccatttataatttcatttattcttcccaagaaccctgggaagtagagcaagtgttcatctctctggacctcag

SEQ ID NO: 246947 - DNA, 573 bp, Homo sapiens
ctctactgtcagttactctgagggtaacaaaacttctcttgtaatggtcttgcctattaaccaagaaaggtacatgtttttgctctctatatgtggcccacagtgtttgaagtcctgcacaggccctaacaactagagatttttgagtctgaaatgtttgaggtctggaaaaaaattagctttaatatatacaagaaaactgtgaaattgaatttaataaatatgtaaataaatgtctacaaaatctaacattatgcaaactttttaaataagcatatttaattttatttaaaaattgacacttaattttagaaacaacttattggttagatttttctcattgtatgagtatgaacacatactcaggaattcttgcaatgattgttgctaaattgtaaacagtagtaagttacattataggaagccaaattatttaaaagcaaaaatattagaagttctttcaaacaattattaacagaatgtgatatttaatgtaagacatgatgctttttaatycgtctcataatatataaggataactgtaaaatggagagttgcctaggtttatgagtg

SEQ ID NO: 246948 - DNA, 632 bp, Homo sapiens
tcaaatattttgaagcagtgataaataactagttccaatcccaagagaatgggtgtgagtttttggaattcattagtcatcatagacttctcaggtggatgtgtttaaagcaataaggcaatgatgaatgacgtcagtcgagtcattagtggggcaggcttttctctggtggtttctggtgccaagttaataaatggaaagtgaaactcattgaggtaactagaagccagactggcaactgagatgattctttactgaatttgcttaaccaggaaggaaggaaaggtaccagtatgaaaggatactgaagaagtgaggaactgtagccatcacrtctctattgagtagcagagtagaaatgtgaaaggctgagtgtacatgtgtggatgtattatttcacaaatcaagaggaaggtgggcagtgagacttcacatgaacatctcaagctcagaagctagtgtgggatagatgcatggttgcaccctcctcatcttaagatcctaggtgaatttcagcagccttccccaacctcggggcgccagtgttgtcatgcttagcagaagcccagccaatttgaaagaacgcagatataggaggaaagagattcaatctccactagagaagcacttat

SEQ ID NO: 246949 - DNA, 646 bp, Homo sapiens
atgattactgcatgaggagaatgaatgatgtgagctccatgacgaagagagagttgccctagaatagagagagtttctgggccacagaacagagaggaaagtctgctagagcttgtggtctccctgagtttaggaaatggtactggaagtcggaggtttgggggaactgaggcaactagaggttacagactaaagaagaggaagctgcaaagacagagaactctagaaacttaaaaaaggtttatcctttagtaaccagctggctactttaccagtacatgagcgtgagaagaaagtaaccgaagctgagaaaagaaccactcaaaatgaagasagtagttcctgtccccccagttaaaatggaatgcctcataattcataaggcatgagctagagtactaaaaaggattgccttattattaggagaaaatcagcttaacagcaagacatgagaggatcaaactgttttctagtaacttacctatgtcttaagagaaatctcaaaaacagtcatatggacaacaacaacaacaaaaaatactcagcatccaaaagggaaaatttacagtgcttggcacccaatcagtttactagacccgcaaagaggcaggaagatatgacccactatggggagaaaagttaatca

SEQ ID NO: 246950 - DNA, 646 bp, Homo sapiens
gctctgttttgacacagccactgctaggccaaacctcttaacactattttcaaattgtaatgtggatgttaacccaaatgattaactccaacatagaaaaagcaacaagaattaggatctccaattttgctgatagctcctctagtagattacatagaaaaatagttatttttgtgtcttcacttctgactaagatggagtaacagctacaccctccctccgtcctgaaacaaccaagtaaaaacacaatatatgaaacamtggtttgcaagacactgaacgtcaggcaacaaaggacaataatacttgagagatgggaaacaaatgaagtgatccttatgactgacccagcatctcaccttaagagcatttccaggacatagtacagggagaggaaacctggaagaagctggtggattcactgagttgaggagagaaagctgagcaatcaaagcagttggagtccatgaggaacagagtaccagggaagacagagctacacaaaatgcccagcccagaaatttagagaggttttctgaataccaaccatcacaaaaagccagcacggctttgaaaaggaatgaagttggaagactaaaattacttaatttcaagtctaataataaaactctagtcagcaagacag

SEQ ID NO: 246951 - DNA, 646 bp, Homo sapiens
gctctgttttgacacagccactgctaggccaaacctcttaacactattttcaaattgtaatgtggatgttaacccaaatgattaactccaacatagaaaaagcaacaagaattaggatctccaattttgctgatagctcctctagtagattacatagaaaaatagttatttttgtgtcttcacttctgactaagatggagtaacagctacaccctccctccgtcctgaaacaaccaagtaaaaacacaatatatgaaacaatggtttgcaagacactgaacgtcaggcaacaaaggacaataatacttgagagatgggaaacaaatgaagtgatccttatgactgacccagcatctcaccttaagagmatttccaggacatagtacagggagaggaaacctggaagaagctggtggattcactgagttgaggagagaaagctgagcaatcaaagcagttggagtccatgaggaacagagtaccagggaagacagagctacacaaaatgcccagcccagaaatttagagaggttttctgaataccaaccatcacaaaaagccagcacggctttgaaaaggaatgaagttggaagactaaaattacttaatttcaagtctaataataaaactctagtcagcaagacag

SEQ ID NO: 246952 - DNA, 597 bp, Homo sapiens
cctcagcagaattttgaagaacaagaatgactatggccaggagttgattccaactaatgatcagtgtccaagattcaagagtccagagaacaaacagattgaggtcttcaatcaaatgctcatatctgcttctgtaagggctaagccctgcttgccaattctaaaataattgcagcaggtgtaatgaagtttttctgggcttgaagcttatgcaaattttgarattctctttaatgcaaaaatatgtttctttaaaaaatgttacaaaaaaaaaatgaccatataacacatagctgaggtttctctcagggccttggaaggggcccatgaaggttggggacattgaagtttaagctttctcagtggctttggctgctggctgtgagtctggggatcacataattttgcagtttgtgagacctttactaatgtctatcttgtcacctagaaagaaactctagtagagagaattttttttattattttattatcacataggcgtcattcctttgtgttttaagattctaggctgacctttatttttgccttctgacggaaacatttttctcagattggggacataatattcagagtcca

SEQ ID NO: 246953 - DNA, 597 bp, Homo sapiens
cctcagcagaattttgaagaacaagaatgactatggccaggagttgattccaactaatgatcagtgtccaagattcaagagtccagagaacaaacagattgaggtcttcaatcaaatgctcatatctgcttctgtaagggctaagccctgcttgccaattctaaaataattgcagcaggtgtaatgaagtttttctgggcttgaagcttatgcaaattttgagattctctttaatgcaaaaatatgtttctttaaaaaatgttacaaaaaaaaaatgaccatataacacatagctgaggtttctctcagggccttggaaggggcccatgaaggttggggacattgaagtttaagctttctcagtggctttggctgctggctgtgagtctggggatcacatamttttgcagtttgtgagacctttactaatgtctatcttgtcacctagaaagaaactctagtagagagaattttttttattattttattatcacataggcgtcattcctttgtgttttaagattctaggctgacctttatttttgccttctgacggaaacatttttctcagattggggacataatattcagagtcca

SEQ ID NO: 246954 - DNA, 469 bp, Homo sapiens
gtctgtggtactttgttatggcagccctagcaaattaatacaaagaggttgcagcgttctgagatacagtgtgttccattgttgcccttggagagtgtctccaatgctcaatgattaaacttgattgttcccaggtttttccagcttccatttgcacaactcaactgggtcattcctgcagatggaaatctcrtccatcaccatttgattctccttttctttctagagattccaggagatccttgcagtgttaagcagatcaattcattgtctaatttgaagaaatgaccccttatctgtgggccagaaaataaaaagatggtaaaatttgcttctgaaactgtccaactcctcaatgaaaaacaaaaactctctttttggagctgtctcaaattctacgtggcaatggttaaataataaataattcccttcagaccagatggcaatttgatgctttagaggcaaactg

SEQ ID NO: 246955 - DNA, 619 bp, Homo sapiens
aatccgcatttcaaggtatttctccccaaataatttctttaagtatagtgttattcatgcagcagagtaatttctcttgtcagctttactgaggtataatttacatacaataaaatgcatgaatttcaagtatactattcaatgagatttgacaaatatatgcagttttgaaaccatcataattgacagggtaatctttgcagataatgatttatgattttcctgctttccgttttccaaaatgagtagtgggctctagggtcctggcttggagaggtttgtggctgtaygaagggcaaacatgggctgtaagataagcctgtctgtgactttgcttttcagcatccccaggcatgaaggagcttatgctaggtgtcctggtggggaaaaaaggaagtgcctcagagggtgacgagaatgcagatggcgatgaagaggatggtgatgacgatgattaaatgtgaggtcccagtctcagggcttttacatgtattagctcatttaatcctcataacatcctatgaggtagcttctattttgtttcccattttatggatgagaatactgaagcactttggaccataagtggcagagcaagggtttgaacctgtagtctgct

SEQ ID NO: 246956 - DNA, 482 bp, Homo sapiens
ggattctctcataccactcagaaggaacccagcttgctgaaccattgatcttggacccctagcctccagaactgtgagaaaataaatttctgttttagccatccagtttgtggtgctttttaatggcagtcctagcaaactaatatgggggctgaaggtggtaggaggaaagtgagtttggccataaggggtagtaagatcctcatggtgcaggaactgttctgaatcttggctgcatcaatgtcgatgtcctggatgggatattgtactatagttttgcaaacattgtggtaaactgggtaaatggtacaggatctctctgtattatttcttacaactgcatctgaatctacaattaactcaaaaaatttaaaaatatatatttgacatcctggaaaaatatatgtttgaaawtgtactcttctatttaacataaaaaagtttatttatttttggagaatatgtattttcccaaaatgtat

SEQ ID NO: 246957 - DNA, 567 bp, Homo sapiens
atgtttgaaaatgtactcttctatttaacataaaaaagtttakttatttttggagaatatgtattttcccaaaatgtatggggcgaatatactagccatgttgctggaagaccacagcctcaacttcaacatgggtctaggaagctggcaggcagagactagttgagagaagccctgtggggaggaagggtaataataatctcaaagtagaggcttgtattggggagaggaaatatttaaaattggagcaaaggtgtaatcagtattgattttctccttgtggctgtttccccagaagagacttggtgccctagggcatttcctgtccgtgtccacccttgccccatcctgctcctccctcccaccatgtttaaaggttgtcttcattttcagccaagcagtctctggagctctccaccaatatggagatgacctgcttggtcatctgcaaataaagagccaaatgaagttagatgggggagagggtttgtgtgtgaggtttgagaccaagaaggggtatggggagaggatgtgaaactgtatccttttatcctattcaacaagttc

SEQ ID NO: 246958 - DNA, 567 bp, Homo sapiens
atgtttgaaaatgtactcttctatttaacataaaaaagtttatttatttttggagaatatgtattttcccaaaatgtwtggggcgaatatactagccatgttgctggaagaccacagcctcaacttcaacatgggtctaggaagctggcaggcagagactagttgagagaagccctgtggggaggaagggtaataataatctcaaagtagaggcttgtattggggagaggaaatatttaaaattggagcaaaggtgtaatcagtattgattttctccttgtggctgtttccccagaagagacttggtgccctagggcatttcctgtccgtgtccacccttgccccatcctgctcctccctcccaccatgtttaaaggttgtcttcattttcagccaagcagtctctggagctctccaccaatatggagatgacctgcttggtcatctgcaaataaagagccaaatgaagttagatgggggagagggtttgtgtgtgaggtttgagaccaagaaggggtatggggagaggatgtgaaactgtatccttttatcctattcaacaagttc

SEQ ID NO: 246959 - DNA, 503 bp, Homo sapiens
ttaacattctgcaatattgtggctaagtatttcccaaaattgaagaacaagaagtacgataattatgttaaaaaataaatgcttgtttgaaaatttcttagttatgttttgttaattgtctatacacacacatttatgaggcatcattaagttctttctttactgatcactaggtctgtaactgtctaagcctgggtttctcagaaaggaaagcctgcatctacaacttgtgttccattctttgattgggatatgcaccatttaactggagaagcaggagttgatgagggtaggagaaaggataatataagggtacaatactcagttaattgctgattgtcttcaagtataaggaattcttcagtctggtgyaatcatctttcaggtgcccataaaaaatcctgcatcttggaactgtgctctcagctttttattcatctgctcccatccctcattgttcaaatatttgttttatgcgtattagcctctcccacacttctggg

SEQ ID NO: 246960 - DNA, 493 bp, Homo sapiens
accatttgcccaggacactgataaattctttattagcaaaaatgaaatacattgaaactggatttcagtcttttgcaaaaggcagaatccttttgtgaagtaaatagtggcccttaatttatctgcttgctaagtttgtttttctactttcmgtgctcatgaattgggaatacacctgcaattttaggcaccaattactgtgttggataattctctacccaagggagctgatttcctgggagaagaaccctgcttctgtgtgggtacttaagttagcaaaacaggaagaagccagttagtaaaaatttcgtgtcttgaaaggcaaaataatgtaataaacaaagtaagggtattagagtcagatggacctgagctcctgagtttgcactctgatttataactgatatgatgctggactctgaacctcagtctccccttggtaaaatgaacataatctctatttcacagggttcttgttagaattagatacgtt

SEQ ID NO: 246961 - DNA, 543 bp, Homo sapiens
taacaggaaattgtcatggcaggcaaattgattaccatttgcccaggacactgataaattctttattagcaaaaatgaaatacattgaaactggatttcagtcttttgcaaaaggcagaatccttttgtgaagtaaatagtggcccttaatttatctgcttgctaagtttgtttttctactttcagtgctcatgaattgggaatacacctgcaattttaggcaccaattactrtgttggataattctctacccaagggagctgatttcctgggagaagaaccctgcttctgtgtgggtacttaagttagcaaaacaggaagaagccagttagtaaaaatttcgtgtcttgaaaggcaaaataatgtaataaacaaagtaagggtattagagtcagatggacctgagctcctgagtttgcactctgatttataactgatatgatgctggactctgaacctcagtctccccttggtaaaatgaacataatctctatttcacagggttcttgttagaattagatacgttgacatatgtagcatgcc

SEQ ID NO: 246962 - DNA, 575 bp, Homo sapiens
atggaaatgcctggctgtccaggcagaagtgtgctgcaggggtggatccytcatggagcacctctgctagggcagtgtaaaagggaaatgtggggtgggaacccccacacacagtccccactggggcactacctagtggagctgtgagaaaaggaccatagtcctccagaccttagaatgctagatccttcagcagcttgcattgtgcacctggagaagctgcagatgctcaatgccaacccatgagagcagctgggaggggggctgtaccctgcaaagccacaaggggagagctgcttaaggccacaggagcccacatcagcatgacctggatatgaaaacatggagtcaaagcaggtcattttggaactttaagatttgactgcaccactggattttggacttgcatggggcctatggccccctcattttagccaatttctcccatttggaatgggtgtaactacccaatgtctgtacccccattatatcaaggaaataattaacttgcttttgattttataggctcataggcacaagggacttgccttgtctcagatgaaactttggacttg

SEQ ID NO: 246963 - DNA, 575 bp, Homo sapiens
atggaaatgcctggctgtccaggcagaagtgtgctgcaggggtggatccttcatggagcacctctgctagggcagtgtaaaagggaaatgtggggtgggaacccccacacacagtccccactggggcactacctagtggagctgtgagaaaaggaccatagtcctccagaccttagaatgctagatccttcagcagcttgcattgtgcacctggagaagctgcagatgctcaatgccaacccatgagagcagctgggaggggggctgtaccctgcaaagccacaaggggagagctgcttaaggccacaggagcccacatcagcatgacctggatatgaaaacatggagtcaaagcaggtcattttggarctttaagatttgactgcaccactggattttggacttgcatggggcctatggccccctcattttagccaatttctcccatttggaatgggtgtaactacccaatgtctgtacccccattatatcaaggaaataattaacttgcttttgattttataggctcataggcacaagggacttgccttgtctcagatgaaactttggacttg

SEQ ID NO: 246964 - DNA, 585 bp, Homo sapiens
gatctccaggaactgaaatttcagtggaagtagtagtcagtctaacatgataagggcagcctgttaagggctacaacataggcttcaacatcaactgtgtgactgaaacacacgagtgacactcaaagtgatggtagatgaagtcgaagaggctggcaggagcccartcacgtaagacatgtgttcttccaacacaccaagctttttcctactttacagccacaatgtttgctcttctctcttcctggaacacaccactgcctcccagactttcatgtggctggctcaggcctcctgccccgtgtcagttccttaggaatgacttccctgaccactaattcaaaagtagcctcccatcctcacctcctatctatgattcactttattatttttttttttttacttcagagaactttctaaaactgctttacatataaacataaatagattgtaacttgtcttttgttggtcttccacattatatattctgggagtcaaggatcttgagtagctggttcactgctataactccagaatctaagagagcacctaccaatagtaaattctgagtaaatggtttctgaa

SEQ ID NO: 246965 - DNA, 585 bp, Homo sapiens
gatctccaggaactgaaatttcagtggaagtagtagtcagtctaacatgataagggcagcctgttaagggctacaacataggcttcaacatcaactgtgtgactgaaacacacgagtgacactcaaagtgatggtagatgaagtcgaagaggctggcaggagcccaatcacgtaagacatgtgttcttccaacacaccaagctttttcctactttacagccacaatgtttgctcttctctcttcctggaacacaccactgcctcccagactttcatgtggctggctcaggcctcctgcccmgtgtcagttccttaggaatgacttccctgaccactaattcaaaagtagcctcccatcctcacctcctatctatgattcactttattatttttttttttttacttcagagaactttctaaaactgctttacatataaacataaatagattgtaacttgtcttttgttggtcttccacattatatattctgggagtcaaggatcttgagtagctggttcactgctataactccagaatctaagagagcacctaccaatagtaaattctgagtaaatggtttctgaa

SEQ ID NO: 246966 - DNA, 301 bp, Homo sapiens
gaacacattaacagctcttaatgtgctgttctcaggacagccctgctcacagctccttttcatcaaacttccagagaagaaatgacaagtcatgaaggatgccagaacgtgagraggagagagagagtgtcttttgtatgctgaaaaatttcacagctaccaattaaatgtgcttcgacctaagcaaatggactccaggactggagtggaatcgtgcagccagcatggcagctgatggtctcaattaggcttaggttctgcagagccggaattggaacagggaacccctacacgaggcagc

SEQ ID NO: 246967 - DNA, 301 bp, Homo sapiens
gaacacattaacagctcttaatgtgctgttctcaggacagccctgctcacagctccttttcatcaaacttccagagaagaaatgacaagtcatgaaggatgccagaacgtgaggaggagagagagagtgtcttttgtatgctgaaaaatttcacagctwccaattaaatgtgcttcgacctaagcaaatggactccaggactggagtggaatcgtgcagccagcatggcagctgatggtctcaattaggcttaggttctgcagagccggaattggaacagggaacccctacacgaggcagc

SEQ ID NO: 246968 - DNA, 603 bp, Homo sapiens
agccaatgagtgcatgagttggtcaggagtggacccagcaccacgaccatctagctgtatgaccttggaaaagatactttgcctttctgagtctcactttgctcatctattaaaatgctgacttgattaaatcattttaagatcttctctagatctaaaaccaaataaattttctgctccgctgttggaatcagagctaccttatacttttaactcaaaccccaaagcaaaatcacactcaagattttttttaaayccatttcttatctacattaaggaaactgtcagatgcttaagaaaagaaatcacccattgatttatttcttaccttctaagcagctattccttttagcaagaataaaagtgaaacaagccaaggggtggaaacaaaagggcattttaaatctctaaattgaaacagaaaaggaggaaaggtttaaaggtagcataataacagcttttctgttttcccactaagtgctttttatctaaaaggttcactcagaatgctaacaacagagcttcagaaatgcatcaaatgaaaccattgccatgtccaatagcattaatcttctctgtggttcaggaagaattaaaaataac

SEQ ID NO: 246969 - DNA, 610 bp, Homo sapiens
aagatgtgtcaggtttgatttaatttgaaatgaaatggatttggtagacatgaaatcactgcgtagaaacttacatgtcgtattaaactactttaaatgaatcagaaaaggaaggaaagccatagggaagaaaattcaaggtatggtttcatagaagcaaagaaaatttccaggaggcgaaggggttaattgaactgagttcagaagattcttaaagcactcaaagcctaagtggtatgtaataaatggggacacatggacaattagaggcttcatatagaagatagatttgtctttagcttttgttgtcactttggttagtgatgataactttttttagtggtcaaagatggattgagagagccatttkgatttgtctagaaggttagttacctttgaaagtacacatttatggggacaaactacagagtacaagaagttaacaagtaaatgggtatttagaaaatggaggcaacagatcacttattttcaatatttggcattgaatggaagaatagaaataggatgatttggtttacatttgtgttaaggtagggaagattggtctgctgatgctcaaagtcagaagagaagcaggcaattgcaaagg

SEQ ID NO: 246970 - DNA, 566 bp, Homo sapiens
atagttcacactttctggcaaattgctttttaaccttccaatgaatatgatgcatacattttccatggcattaagtatttttctaaaaatgattttgagtggctgaataatttgtaatggtttagcaaccattgtaatgttgctaaagttccatataaaagtaaggttattactgagatctggaaaaatctgaatcaaggtgattaaaatatcttcatatttttatcgcatatattactgtaataattgaatttaaagtagaagcatagtaataaaaaattagaataggtaagacatatagcatttacattgtgccaagcactgttctgaatacttaacatatgttatcacattgatccatcacaaccatccttttatttggatatgatttttttccttcaatytgcatggttggaaactgagatacagagaagttaagtaataaaccccaagtcacacagccagtaaatggccatactggattcaaaccctatttgactccattatttctggtcttaacaactttcactttacttaaaagcatattaatacattgtaatatttaa

SEQ ID NO: 246971 - DNA, 566 bp, Homo sapiens
atagttcacactttctggcaaattgctttttaaccttccaatgaatatgatgcatacattttccatggcattaagtatttttctaaaaatgattttgagtggctgaataatttgtaatggtttagcaaccattgtaatgttgctaaagttccatataaaagtaaggttattactgagatctggaaaaatctgaatcaaggtgattaaaatatcttcatatttttatcgcatatattactgtaataattgaatttaaagtagaagcatagtaataaaaaattagaataggtaagacatatagcatttacattgtgccaagcactgttctgaatacttaacatatgttatcacattgatccatcacaaccatccttttatttggatatgatttttttccttcaatctgcatggttggaaactgagatacagagaagttaagtaataaaccccaagtcacacagccagtaaatggccrtactggattcaaaccctatttgactccattatttctggtcttaacaactttcactttacttaaaagcatattaatacattgtaatatttaa

SEQ ID NO: 246972 - DNA, 586 bp, Homo sapiens
ttttgtttttgttttgtagacatggggtttcaccacagtgcccaggctggacttgaactcctgggctcaagtgatcctcccacctcagcctccaaaagtgctgggattatagacatgagccacaatggagtggtgtttaaaagatagttagatgggtgccatgtagaaggccttggatgctgataaggtttggctgtgtccccacccaaaatctcatcttgaattatagttctcataatccccacctgtcgtgagagggaccaagtggagatatttgaatcacaggggcagtttccaccatcctgttctggtgatattgagttagttctcacgagatctcacaagccccttttataaggggcttccccctttgcttggctgtcattttctctctcctgccaccatgtgaagaaggacatawttgctttccccttctgccataattgtaagtttcttgaggcctccccagctctccgaaactgtgagtcaactaaacctctttcctttatacattacccagttttgggaagttctttatagcaatgtgagaacaaactaatacagtaaattggtaccaaagagagtg

SEQ ID NO: 246973 - DNA, 576 bp, Homo sapiens
gtccacacctgagggctcactgctcttcaccacagatgcactcccctactgagtcctgagacctgagtgcaccccatagagtaggactcagatgaggggatgcaaatctccaccagctccaccctcctctgggttcaaaagccgagaatggggcctcgctcagtgactcctgtsccccactatggacacgttttgctccacactcctgctgctgaccaccccttcctgtgagtgttgtggtcagggacttcctcagaagtgaaacatcagttctctcctttgtgggcttcatcttcttatgtcttctccacaggggtcttgtcccaggtcaccttgaaggagtctggtcctgcgctggtgaaacccacagagaccctcacgctgacctgcactctctctgggttctcactcagcacttctggaatgggtatgagctggatccgtcagcccccagggaaggccctggagtggcttgctcacatttttttgaatgacaaaaaatcctacagcacgtctctgaagaacaggctcatcatctccaaggacacctccaaaagccaggtggtccttaccatg

SEQ ID NO: 246974 - DNA, 542 bp, Homo sapiens
gggagggtaggagttgggagcatgatgaaaaatcacctaatgggtacaatgtacgttacttgggtgttgggtacactaaagccaataccactgtaatatttctgtgtaacaaaggtgcacccatagcccttaaatttatacaaataaagataaaagcaattacaattgaaaatataaaattattaagcattgggagatayacctaatgctagatgacaagatggtgcagcgcaccagcatggcacatgtatacatatgtaactaacctgcacaatgcgcacatgtaccctaaaacttaaagtataataataaaaataaataaataaataaataaaaaatagttgaccaaagatcttgaaaattaaagtttaaatcatgatcaataaatgaaattaatatcagttgaacttcatttaacttaaaatccttttgtactcaagtgattttaagagaatgaatgtcaagttttagatgagaagatttgcaaatcatatcaccacctgtgtaattatagtaagaaacttcaaaactcaacagtgaat

SEQ ID NO: 246975 - DNA, 542 bp, Homo sapiens
gggagggtaggagttgggagcatgatgaaaaatcacctaatgggtacaatgtacgttacttgggtgttgggtacactaaagccaataccactgtaatatttctgtgtaacaaaggtgcacccatagcccttaaatttatacaaataaagataaaagcaattacaattgaaaatataaaattattaagcattgggagatacacctaatgctagatgacaagatggtgcagcgcaccagcatggcacatrtatacatatgtaactaacctgcacaatgcgcacatgtaccctaaaacttaaagtataataataaaaataaataaataaataaataaaaaatagttgaccaaagatcttgaaaattaaagtttaaatcatgatcaataaatgaaattaatatcagttgaacttcatttaacttaaaatccttttgtactcaagtgattttaagagaatgaatgtcaagttttagatgagaagatttgcaaatcatatcaccacctgtgtaattatagtaagaaacttcaaaactcaacagtgaat

SEQ ID NO: 246976 - DNA, 439 bp, Homo sapiens
taatattaataatcatattgattagcccaaaytaaaaataaataggcgattctcagtacatggtaaaatatatttgttaaaaggcaatattcatgtctttaaagattttaaatgctacaaagagtctgatattctatatgcaaacgtgtatgtccattagaagaagagaggcctgattttcatatgttactacatagagatagagaagtggatagattaatttgcatatgcatagagaaagcataaaatagaatttactatcatattaaaggaattttaattcaacaataaaataattcaaaggtaaaattttaaatatttttaacaggtacattattagtattagataatatttataataattgtgaaaatattcagcgctaaaataagatacaatgtctaaacatcagtattaaaactagtataaatatttgcttgt

SEQ ID NO: 246977 - DNA, 489 bp, Homo sapiens
tcttgtgagacttattcactatcagaagaacagcatgggaaagacctgcccccgtgattcaattacctcccacctgttccctcccacaacatgtgggaaatcaagatgagatttggctggggacacagctaaaccctcttctcagctaccctcttctctctggatctgtgagtaataaacctacttctgtgatttcccatgtttggttctgtggcctccatgtgtctgagctgacctacactggaacctaactctcytcctggccagggtctctgagagtggctcttgtcagaaatacacaggacacaagtcaggcaacagtcactaggcatctcctagtctcaacagatgttctgtgagagggaggcctggccgtgggatgcacacctggccactgctggggtaaggaagtgtcctgtgaaaggcacatgttaagcatccacaaccccctgaccagaaccccagaaaggcagggctccaattgacagt

SEQ ID NO: 246978 - DNA, 489 bp, Homo sapiens
tcttgtgagacttattcactatcagaagaacagcatgggaaagacctgcccccgtgattcaattacctcccacctgttccctcccacaacatgtgggaaatcaagatgagatttggctggggacacagctaaaccctcttctcagctaccctcttctctctggatctgtgagtaataaacctacttctgtgatttcccatgtttggttctgtggcctccatgtgtctgagctgacctacactggaacctaactctcttcctggccagggtctctgagagtggctcttgtcagaaatacacaggacacaagtcaggcaacagtcactaggcatctcctagtctcaacagatgttctgtgagagggaggcctggycgtgggatgcacacctggccactgctggggtaaggaagtgtcctgtgaaaggcacatgttaagcatccacaaccccctgaccagaaccccagaaaggcagggctccaattgacagt

SEQ ID NO: 246979 - DNA, 470 bp, Homo sapiens
gccctaactggaggaaaagaaaacaatgtaaaaagttcaatttatcttactatttyaatgatccagtaaagacattctatgcctgtacaccacatattttcttcaattgtggatttattttagatagaattttaggtctggctttcactttagcctggtccctacctcaagcataaggtaaagattttccatgcgttcttttctcgtactactacctgccagtgtggggtcatgtcctagtctatcttgagggaatccccctgttcattattgtcagagtgagactgttaagtcttgatttccctggacaacttcactgcatgacttttaatatgattttttaatataccctttactggaaaataaattctatagttatctgagtaagagatatggtcaggaagaggcattgcctcattcagcttttctctttggtgaactcgcatatgttctcctcacccgccagtcac

SEQ ID NO: 246980 - DNA, 533 bp, Homo sapiens
ggctcttgtcagaaatacacaggacacaagtcaggcaacagtcactaggcatctcctagtctcaacagatgttctgtgagagggaggcctggccgtgggatgcacacctggccactgctggggtaaggaagtgtcctgtgaaaggcacatgttaagcatccacaaccccctgaccagaaccccagaaaggcagggctccaattgacagtcactctccagagacaaacctcaagccctaactggaggaaaagaaaacaatgtaaaaagttcaatttatcttactattttaatgatccagtaaagacattctatgcctgtacaccacatattttcttcaattgtggatttattttagatagaattttaggtctggctttcactttagcctggtccctacctcaagcataaggtaaagattttccatgcgttcttttctcgtactactacctgccagtgtggggtcatgtcctagtctatcttgagggaatccccctgttmattattgtcagagtgagactgttaagtcttgattt

SEQ ID NO: 246981 - DNA, 522 bp, Homo sapiens
attcctatgtcaaagtcctcagataaacagagcactgaggtggcagtggggacaggcctagctcaccttcacgttgtgatcctgaatgttattgtctgcaatgrcttgcagaaatgcctgagaatggtcccccagggcccatctgtgggagcagtcgcgatttgctggcaggtgtgcccactgggagctgcagtggtcctcatctttctcctcgttgtagctgtagtggatctggctggtctgcagcctccagagaagatggatgactgaagccattctagaaaatgcacacgcaaacatgaaagagaaactcaagtgcacaactcaaaataaatactaaaaaaaaaaaaaagatgctcaactgaacactcaatttaaaaggtaaaatacagcatcattcatatgaaagagctccacctaacatgtttacacaggttgacttgtaattcctctatctacgtgaatacactttctggtgattccacacacctcaggcatggcatcagaactcaggattgtagt

SEQ ID NO: 246982 - DNA, 522 bp, Homo sapiens
attcctatgtcaaagtcctcagataaacagagcactgaggtggcagtggggacaggcctagctcaccttcacgttgtgatcctgaatgttattgtctgcaatggcttgcagaaatgcctgagaatggtcccccagggcccatctgtgggagcagtcgcgatttgctggcaggtgtgcccactgggagctgcagtggtcctcatctttctcctcgttgtagctgtagtggatctggctggtctgcagcctccagagaagatggatgactgaagccattctagaaaatgcacacgcaaacatgaaagagaaactcaagtgcacaactcaaaataaatactaaaaaaaaaaaaaagatgctcaactgaacactcaatttaaaaggtaaaatacagcatcattcatatgaaagagctccacctaacatgtttacacaggttgacttgtaattcctctatctacgtgaatacactttctggtgattccacacacctcaggcayggcatcagaactcaggattgtagt

SEQ ID NO: 246983 - DNA, 566 bp, Homo sapiens
ggtaggctatgtattcctagagcacttataaaggaatgaaaaggagaaaatatttaacaaacacacaatctttaatgaaggatagatccttggagacgggagggccgatggactggaaaggagacctgtgcatggtgcaaggcatgggatcagccagtgcaaatgttaattacaactgcttatggtcacttgagggagcggcacatacacacaaaattaggatgtgcaccactacagatctctattaacgatctgtgttatcaaatactgctccaaatccaagcaatcaaagcggggatgcacttactgttcttttactggacatttagatttttagagcactcaggagcattccccaacccaccacattcrttcttctgaaacactaatccaatgccaactctctctggccccctttctttaagcacaggacagcccctccttactgctccaagataagcctctgatcctcctgtggctcggacccacctgccagggctcatggcaccctctgctctggagctcgccagccctgccctccttgtcaatttaaacaaagcccatct

SEQ ID NO: 246984 - DNA, 596 bp, Homo sapiens
ctggccatctcctacttttttaaagagagagtcttgctctgtcacccmggctggagtgccgtggtatgatcatgactcactgcaacctcaacctcccaggcttaagcgatcctcctacctcaggctcctgagtatctgggactacaagtacatgccaccatgcctggctaatttttgtgttttttgtagagatggggttttgccgtgttgcccaggctggtctcaaactcttgacctcaagcaatccacatgcctcaacctcccaaagtgctgggattacaggcatgaaccactgtgcctggccctctcccactcttaatggcacttacagttcaaaaaaaataatctgctaatcagcaaaaagcaaagattttcttactggcacattcaatctcgacaggagacagcggtgtgctcattgctaaataggaagtgtgtaatccgagaagcaggcccagattcctctctgtgtctatcagaggtgaagagagacttcccggatctggtatggtgacaacttcttggtcaggctggaaaaataaacttcatcatcaatctgaggaaacagaattaattaaaaacataaaaccaaaagg

SEQ ID NO: 246985 - DNA, 643 bp, Homo sapiens
cacataaacccacatgccctataaagctggcagcaaccgtacacgcagaaaaactaaagcacagatacatgatttggctagaatattccttaggaatcagtttccaaagtgactgtacaccatgcttcagaaagtataatgaattgttacatgcataaagaacccactgggcaacaaaactatgacaagtattcgatgacaagtattagtggactgtgaccacacaggtagaggaaatgaaatttattctaacaaaaatcaaactctgaaaaaagcaagagttcaacttttccagtcacagaagatatttacagcaaagttaattctccccttcataaaatgytttaagccctgccctaatggcatttaatacattttattacttgtggatagctggaaagctaatcccagtatataaattctatgtgttcgtgaatacataggaaggacatatttctattgtaaagaattacacttctacatagttcttcccaaaaaatacatacctcaagataataagccattccaaatttctacataagaccaaagtttaacctcttttcttgtggaacactgtctatatttctcacaaattgatcatttaaaaaacaatctttcaagaccagtacatcacagatcctaa

SEQ ID NO: 246986 - DNA, 523 bp, Homo sapiens
tctccccttcataaaatgctttaagccctgccctaatggcatttaatacattttattacttgtggatagctggaaagctaatcccagtatataaattctatgtgttcgtgaatacataggaaggacatatttctattgtaaagaattacacttctacatagttcttcccaaaaaatacatacctcaakataataagccattccaaatttctacataagaccaaagtttaacctcttttcttgtggaacactgtctatatttctcacaaattgatcatttaaaaaacaatctttcaagaccagtacatcacagatcctaacacgaataaatgtaaattcatttatgacaaaacttctaaaggatctttatattatccctaatgccccccaaaagacccagatatcagtacttctagatccaaatattcctatcacaaacacacagagggtgtcccctgccatcctctgcatcactcaaggcatacagcctcacctccaaatattggccaacacaaaatgcgtgc

SEQ ID NO: 246987 - DNA, 505 bp, Homo sapiens
gtagcaacactgtggcaattagcccaagtgttcaccaattagaaactcactggagaatgatcattaaagacatatctacacactgaagactaagctgctttataaaaacaaagagcgacactctgataaagtactccagtatatatggytagtaaaaaaaaaacaagcaacacaagtaatgcaacatgctaccactagcatactcattccagagaacaaggaggttacagaggagactgaaaagccagagagagcaggtaggaaaatgggtggaaggggtgggcaggggaagtgacagtgtgtctctgcctaggtttgatttttgaaccatgtgactgtattcctctttttttttttaatgactgtaaaacaaaataaacactcttcatactagaaataaaatgttagaaaaatctggattcaaaactaggattactgttatacactggcaaagttcactaacattcccaaaggcagttttctcattgacataatgagatacaac

SEQ ID NO: 246988 - DNA, 576 bp, Homo sapiens
agatacaacagcgtgcatgaggtcctcagtgggcctgcaccctacaggtgctccacacatgcaaatcactactattaccattactattacataacagatataatatataattatactgtcactactataaccagcattacatactaagacagcccacgttcagagtataaagaaggctgtggaaccctctgtagaaggtgggagggcctggggctgtggmtaaaggggagctctctggggctgtgccacctgaacctggaacctgggcccccaggttgggtccccaggcctgtgcgcctcagcttgctcatcattcactctcaacacggataacaccttcaactgcaaacacgtttaaaaaccacaggccagctccccctaccaataccagaaaaagcaagtctccacacgggcccaggatgagaacctacaagtggtactagctacaaaacccatggagaacacggttcttgcacacacaccttatgagacgtcggacagctacacggcagaggcatctacagggtgtagccagatcttctaaatgggccatgacaacaaccgccgtttgttgca

SEQ ID NO: 246989 - DNA, 568 bp, Homo sapiens
cagcttagaatgaaaggcacagacgctataaaacaagggcaaaatgacagaataatgaagagaaggaggtgacaattacatgggacaacctagggaaggaaacactacccttcagcctaaaatttagtcctaagcctcttgttctttagggccaaaaggaaaaccagaattcaaataggtgtcgttagttaataaaatagtatctgcatatgtcagcagctattttttggtaactctaaactcttaagcaaaatatataagtctttaagcaacagacaatggacaatacaataaaaataatcttcaatagtaatttcaaaacttttaaagatgtaagtacaaatgaccttttcttacaggatgcttttgaaagstgcccgcatgatggtattttaaattacatgatgttacattgcctccatgatggtattttattgggacctggttatatgacttggtgaagaatgtaacctttgagaacttagaagagtgaatggttaatatttctctgaatttttttgtttttaattgacattttattttatccctcatagacaatatatgttct

SEQ ID NO: 246990 - DNA, 568 bp, Homo sapiens
cagcttagaatgaaaggcacagacgctataaaacaagggcaaaatgacagaataatgaagagaaggaggtgacaattacatgggacaacctagggaaggaaacactacccttcagcctaaaatttagtcctaagcctcttgttctttagggccaaaaggaaaaccagaattcaaataggtgtcgttagttaataaaatagtatctgcatatgtcagcagctattttttggtaactctaaactcttaagcaaaatatataagtctttaagcaacagacaatggacaatacaataaaaataatcttcaatagtaatttcaaaacttttaaagatgtaagtacaaatgaccttttcttacaggatgcttttgaaagckgcccgcatgatggtattttaaattacatgatgttacattgcctccatgatggtattttattgggacctggttatatgacttggtgaagaatgtaacctttgagaacttagaagagtgaatggttaatatttctctgaatttttttgtttttaattgacattttattttatccctcatagacaatatatgttct

SEQ ID NO: 246991 - DNA, 569 bp, Homo sapiens
catttattttccaggatgcacttatcattgttgtaattaagtattaattgtgcaatcatttgcttaatgctcataacttccttcttgactgtacatttgttgaggtcaagtagtatgtctgtttaaatcattccctagttccagggcttggcaaattccttggaccagatgagctcaatrcatatttgttatgtgagtgaatatatgactgatactaaagtaacttaaaaaataatttataccaatgatttatctctctcagagttggtccttataaatgctatatgaatcactccaaaacagtaccgactctcgtaacaaatcccatgaatgtgtaatttcattttaatgctgaattggcccaattttaaacagcatctggatgatcctttgtaatggagtcccatctaagttcctattaaaaaagaaagaaaaaaaaatcagtaaaacaaagcaaacaatgtaaacttaaaacaacactaattagtaaaactgacacccaatatgcagactaatctagaaggaatttttactaactataagaacaattaagttaaactggcccatcc

SEQ ID NO: 246992 - DNA, 569 bp, Homo sapiens
catttattttccaggatgcacttatcattgttgtaattaagtattaattgtgcaatcatttgcttaatgctcataacttccttcttgactgtacatttgttgaggtcaagtagtatgtctgtttaaatcattccctagttccagggcttggcaaattccttggaccagatgagctcaatacatatttgttatgtgagtgaatatatgactgatactaaagtaacttaaaaaataatttataccaatgatttatctctctcwgagttggtccttataaatgctatatgaatcactccaaaacagtaccgactctcgtaacaaatcccatgaatgtgtaatttcattttaatgctgaattggcccaattttaaacagcatctggatgatcctttgtaatggagtcccatctaagttcctattaaaaaagaaagaaaaaaaaatcagtaaaacaaagcaaacaatgtaaacttaaaacaacactaattagtaaaactgacacccaatatgcagactaatctagaaggaatttttactaactataagaacaattaagttaaactggcccatcc

SEQ ID NO: 246993 - DNA, 511 bp, Homo sapiens
ttcagcacctgaccctatacccgccggttattcctaggttatattagcaatgcaataaagagtaatattaaaagctaatgattaataatgtttataataatgattgataattgcccatgatcatctctatatctaatttgtattatgactattctattctaacaattttctttattatactgaaacagtttgtttcagtctcttgccttggcaccttggtgacctttcgcccacactaatggtcatataatatagtttagatgtctcctccaaatctcatattgaattttaatccctaatgttacaggtggggcatggtggtagatggttgaatcatggggatagatttctcatggctctgtgctgtccttgtcatagtgagtactcacgagatstggtggtttaaaagtgaagcatatccctccctgatctttcctgtttcaactcctaccatgtgagattcctgcagctctttcatttttcatcatgattataagctactttagatgtt

SEQ ID NO: 246994 - DNA, 352 bp, Homo sapiens
ccctcacctgcctcaacagcctctgcccctgcccacacacccttgtgcactccccctgagtccctgctcacctctgcctacccagccatcccaggatggtgtgggctcaagctctgggggtaactgaagagccactttaagaaggcacagtctagaagtgagcagcattgagtcactgttgtctcccagtcctgggaacatcctgtgccacagtttgctgagctgtcttaatcaccagtgggtccccatctcccacycctggaatcccagaggacagctcagagttgtgattggtgcctcttcccagcgtctctctacacagctcccggctgtgcttcagcatcctccaccg

SEQ ID NO: 246995 - DNA, 512 bp, Homo sapiens
aatgtcaagacacaacaaccagtattttactattatggcgttaggtgtaagtttttcaytgatgctctttagcagatttaggaagtttgcttgtacccttcctttccagggagattgtgaatgaatattggattggtcaaatgctccctgtgtctgttgaaaggctctttctgttaatttcctttatcctattactttgtgtaaggcactgattgattatcggatagatcaatattgcatctgtaaaataattccatttggtcatggtgtacattcattttgatatattcttgattcatttcacttttttgagaatttctctgtgtgtattcatcagggaaattcatccatacacatatttacttctgatgcttttgtctgcctttagtatcagggtaatactggcctcacagaacaaattgggaagtgttcccaataactgtcccgtattttctggaaggccttgtaaagagttggcattaattcttcattaaatgtttagtagaatttac

SEQ ID NO: 246996 - DNA, 512 bp, Homo sapiens
aatgtcaagacacaacaaccagtattttactattatggcgttaggtgtaagtttttcattgatgctctttagcagatttaggaagtttgcttgtacccttcctttccagggagattgtgaatgaatattggattggtcaaatgctccctgtgtctgttgaaaggctctttctgttaatttcctttatcctattactttgtgtaaggcactgattgattatcggatagatcaatattgcatctgtaaaataattccatttggtcatggtgtacattcattttgatatattcttgattcatttcrcttttttgagaatttctctgtgtgtattcatcagggaaattcatccatacacatatttacttctgatgcttttgtctgcctttagtatcagggtaatactggcctcacagaacaaattgggaagtgttcccaataactgtcccgtattttctggaaggccttgtaaagagttggcattaattcttcattaaatgtttagtagaatttac

SEQ ID NO: 246997 - DNA, 609 bp, Homo sapiens
caaccacaccagtcatctgcatgatcttctacaagtcccagagtttcaggaaaaggcacaatcttttcggaatgcagatccacaagaggagggccctccgtggtctgaatcaccactcagtgagaaagaatttcaggctctgcttaacaggctgcagagctcaccaggggatcagctttagcaggcaggcatccttctcagcactgccatccaggactctttcccttggacacaaacagcaaaatgccaggaagacgggaccaggaacacagtgtggtcagaagcaagactgatgcaagaagcaaccacttggaaatccaaagggagcattttggccctctcctgtgggcagccctcaactttggtgctcacttyctaacctcagtgacggtttctgagcttcatcctgcctctggagtccacatgggctccaggtggtgaacagtttcactgaatcctgatgcagcaaagcagcattctcatgacaaacaggacctcttcactttgatcataagctcctgggccatctggacaatgcacaaactggaaacccagcacggggaggaaagtagctctaagggggacacattcccacttctttcccttcta

SEQ ID NO: 246998 - DNA, 609 bp, Homo sapiens
caaccacaccagtcatctgcatgatcttctacaagtcccagagtttcaggaaaaggcacaatcttttcggaatgcagatccacaagaggagggccctccgtggtctgaatcaccactcagtgagaaagaatttcaggctctgcttaacaggctgcagagctcaccaggggatcagctttagcaggcaggcatccttctcagcactgccatccaggactctttcccttggacacaaacagcaaaatgccaggaagacgggaccaggaacacagtgtggtcagaagcaagactgatgcaagaagcaaccacttggaaatccaaagggagcattttggccctctcctgtgggcagccctcaactttggtgctcacttcctaacctcagtgacggtttctgagcttcatcctgcctctggagtccacatgggctccaggyggtgaacagtttcactgaatcctgatgcagcaaagcagcattctcatgacaaacaggacctcttcactttgatcataagctcctgggccatctggacaatgcacaaactggaaacccagcacggggaggaaagtagctctaagggggacacattcccacttctttcccttcta

SEQ ID NO: 246999 - DNA, 609 bp, Homo sapiens
caaccacaccagtcatctgcatgatcttctacaagtcccagagtttcaggaaaaggcacaatcttttcggaatgcagatccacaagaggagggccctccgtggtctgaatcaccactcagtgagaaagaatttcaggctctgcttaacaggctgcagagctcaccaggggatcagctttagcaggcaggcatccttctcagcactgccatccaggactctttcccttggacacaaacagcaaaatgccaggaagacgggaccaggaacacagtgtggtcagaagcaagactgatgcaagaagcaaccacttggaaatccaaagggagcattttggccctctcctgtgggcagccctcaactttggtgctcacttcctaacctcagtgacggtttctgagcttcatcctgcctctggagtccacatgggctccaggtggtgaacagtttcactgaatcctgatgcagcaaagcagcattctcatgacaaacaggacctcttcactttgatcataagctcctgggccatctggacaatgcacaaactggaaacccagcamggggaggaaagtagctctaagggggacacattcccacttctttcccttcta

SEQ ID NO: 247000 - DNA, 626 bp, Homo sapiens
tgcaggtggatatgtagaaaatgagggcatgctataacatctcatcacatgaggttgtgaccaggagtttttaatcctagctctgagagctgcaaatgggaattggaagtttttccactaagcatctatcaatgactgattgtgcaagcttatcttcatcatgctgaggagtcttcactgagaattttcctattgaacaaataaacatagagatagtgacaagtaggccaggcatagaggctcacgccagtaatcccagcattttgtgagaccaaggtgggcaaatcagttgaggccaggagttcgagaccagcctgggcaacatgtcaaaaccccgtctccactaaaaacacaaaaaacagctgggcatggttactcatgctggtaattccagmtattcgggtggctgaagcctgagaatcttctgaacccaggaggcagaggctgcagtgtgttgatattttgccactgtactccagcttgggcaacagagcaagactctgtctcaaaaaaaaaaaaaaaagaagcaagtgagtaagagagagaaaactataaaatcactgaacaaagtgtaaagatgttaattttcccacaacgttagaaattttgtgtatatttacatgcat

SEQ ID NO: 247001 - DNA, 494 bp, Homo sapiens
tgtatcactttacaatattttaactgtaataaaacacaacaaaatttaccagtctatacatttgtaattgcataatttattagtggtacayatatccacattgttatgcaacaggcttctagagcttttccattgcaaaactaaaactcaatacccatatacgtcaactgcccattttaccctctcctgagcccttaacattttactttccatttctgtgagttggactacttaagatatctcataagtggaatcacacaatcactgtcactttgtttcctggcacatttcacttaacatcatgccctaaaggtttattgtcattgcagcatgtgataagatttccttttaaaatcatatttcattgtatgtatatatcatatttacttatttatctgtcaagggacattcaagtagcttctaccttttggatttttagaataattctgtcataaacatgggtatgtaaatgtttctttcaggtcccgctttgc

SEQ ID NO: 247002 - DNA, 616 bp, Homo sapiens
gtttcttgtaggccctactgtctctcagggcaccacctctcttatcctttaaacaggagtgatattggcagagaaggggcattcactcctatctggcagaaaaggaggattcaggccctttaacytccctaaggtcagaaaagtcagagccctcagagatgcacttgcaatgtggcagccactgggcacaggggctactgagcaactgtattgtgcccagcatgaactaagatatgctggggagaaatacaagaaaatatttaaatatttagttacatatacatatgtgcataaaaatatataatgctgggttaaagaaacatatgtctatgtgtgtgtacgtatatatgtacacatatatatgtttctttaattatttcattctgattatatgttaaaatattttggatatattgagctatgttgttaacatcaatttcactcatttttctttttctttatgctgctactagtaaattctaattgtcacatgtggctcacattttacttctattgcacattggtgcaatagaggattgcctaatttcaaagctcagtttgcctcaaaagccaagaggccagaaagattgtaaaatctaaaaattaaaaataattg

SEQ ID NO: 247003 - DNA, 616 bp, Homo sapiens
gtttcttgtaggccctactgtctctcagggcaccacctctcttatcctttaaacaggagtgatattggcagagaaggggcattcactcctatctggcagaaaaggaggattcaggccctttaacttccctaaggtcagaaaagtcagagccctcagagatgcacttgcaatgtggcagccactgggcacaggggctactgagcaactgtattgtgcccagcatgaactaagatatgctggggagaaatacaagaaaatatttaaatatttagtwacatatacatatgtgcataaaaatatataatgctgggttaaagaaacatatgtctatgtgtgtgtacgtatatatgtacacatatatatgtttctttaattatttcattctgattatatgttaaaatattttggatatattgagctatgttgttaacatcaatttcactcatttttctttttctttatgctgctactagtaaattctaattgtcacatgtggctcacattttacttctattgcacattggtgcaatagaggattgcctaatttcaaagctcagtttgcctcaaaagccaagaggccagaaagattgtaaaatctaaaaattaaaaataattg

SEQ ID NO: 247004 - DNA, 616 bp, Homo sapiens
gtttcttgtaggccctactgtctctcagggcaccacctctcttatcctttaaacaggagtgatattggcagagaaggggcattcactcctatctggcagaaaaggaggattcaggccctttaacttccctaaggtcagaaaagtcagagccctcagagatgcacttgcaatgtggcagccactgggcacaggggctactgagcaactgtattgtgcccagcatgaactaagatatgctggggagaaatacaagaaaatatttaaatatttagttacatatacawatgtgcataaaaatatataatgctgggttaaagaaacatatgtctatgtgtgtgtacgtatatatgtacacatatatatgtttctttaattatttcattctgattatatgttaaaatattttggatatattgagctatgttgttaacatcaatttcactcatttttctttttctttatgctgctactagtaaattctaattgtcacatgtggctcacattttacttctattgcacattggtgcaatagaggattgcctaatttcaaagctcagtttgcctcaaaagccaagaggccagaaagattgtaaaatctaaaaattaaaaataattg

SEQ ID NO: 247005 - DNA, 616 bp, Homo sapiens
gtttcttgtaggccctactgtctctcagggcaccacctctcttatcctttaaacaggagtgatattggcagagaaggggcattcactcctatctggcagaaaaggaggattcaggccctttaacttccctaaggtcagaaaagtcagagccctcagagatgcacttgcaatgtggcagccactgggcacaggggctactgagcaactgtattgtgcccagcatgaactaagatatgctggggagaaatacaagaaaatatttaaatatttagttacatatacatatgtgcataaaaatatataatgctgggttaaagaaacatatgtctatgtgtgtgtacgtatatatgtacacatatatatgtttctttaattatttcattctgattatatgttaaaatattttggatatwttgagctatgttgttaacatcaatttcactcatttttctttttctttatgctgctactagtaaattctaattgtcacatgtggctcacattttacttctattgcacattggtgcaatagaggattgcctaatttcaaagctcagtttgcctcaaaagccaagaggccagaaagattgtaaaatctaaaaattaaaaataattg

SEQ ID NO: 247006 - DNA, 469 bp, Homo sapiens
atttattatgatcaagttggatttattcctgggatgcaataatattttaatatgtggaaatcaataaatgccatactccttatttacacaacaaaaagattaaaaatcatgacttttttatgcatgcctaaaattattttgacaaaatttaaaatccattccaaataaaatctataacaaattaggtatagaaagaatatacctcaaaataaagagatatgttctttataagctataggacaatcccatggttaacattattgtcaatggtgaaattttggaattrtttttaagatttattataagaaaaagatgcccactctcactacttctttcaacaccgtattggaaatcctgctcagaatctaagacaagagaaaaaagagcatttaaataagaaacaacaagttcttctattcatggagattaacgctcaggtttttgcagattagatttaacagcatgaaat

SEQ ID NO: 247007 - DNA, 658 bp, Homo sapiens
agaaacaacaagttcttctattcatggagattaacgctcaggtttttgcagattagatttaacagcatgaaatctggtaccatccaggaatcaaaggatataggactttagggcatcaattattaagaggctataggaaagcagaaatgctcctggatgtttccattgtccacacacaaaatttcaacagaccagccccaggaagtaaaggcacattcctgactactgttagttgatgagcttttcaccaaaagcagagatgtgagacctggcaggtttcraagacccctcaagtgctccataccttgaaattcacttccacaaagctagaacaccatctgttcctgagggatcaggttatcgtctgtttcttttaggcactggccagtcaggctttagtggacacgaagccacagatttttagtgtaaaatgcctaatctatcataatctttaggtagatatttggaggcctgcacacttaaatgggttggtgaaatgtcataccagacacatggctgggaattgggtttttctcctccgctcttagcagcacctttgtaacccagtgattacccccctcatggctccacggccacatccgcaaaaagggtactggtgaacgtgacattttcacgaagccacagcccatggtcactc

SEQ ID NO: 247008 - DNA, 650 bp, Homo sapiens
ctgccatttgccttttcaaaaccatttcctctgttctctaggctgtcacaaatcctctgcaccccaggagygccgcttggacccccgggctcgctgcgtggtccatatctaggtcgggcctctcacggagactttcccaccagtgtaataaagaggagaaaacgtcacagcggaagggcctgaccctgctgcatccactaaggaaacagctacggggatgggaccctggaagctgctgtgggagcctcatccaccgcttctctgaccccacccaggctgcttcccaggcctcagggtcttagtgtggacctccgggccgtgattaatgcaggtcagcaggaccagagcgccccttggtccctcccaacacatgagggtagtttgtgtggtgaggtcagggatagtgtctgcgcttctaccctgaatagggctcccttggaaaatactttaatatctctttttaaatacccccttggaccacttttaatagttttctgatagaactaaacagtgatcattctcttaattcatgtttccattaagtttttcaggttaagtactgcacgactactcgcttctgaaactgatagacactgcctcagctccgtgcagggcagacgcacaagagcagaatctccgtgggacatctc

SEQ ID NO: 247009 - DNA, 613 bp, Homo sapiens
tcatttatgagaatattttcctttgccctcatgagcgtgtttataatagctgccttcaaattcttgtctgccgtttacatcttggacatcttggagatggctactgcctgctttttatcttgtgtatttattacattttcacgtgtcttcacgcatcycttgaattggaaattgtgccctggagactgtatacaagactggattaaaaagactggattctgttttgtccctgtgaagagtgttgtttttaaaagatggtgttaaatgggctggattctatcttcaatacttatctctcctatggaagtcatagccaatatatgcattcagtttttatatacacatatttcatgtatgtattgtatatagaaatgtttctataatgatatataataatttacccaggattcatcatttttctgtgtgagagtgttagttcagttagctacttcatcattagtggaagccagaacctcagttttgatttttgagtgtaatataaaaaattacacagtatggatacttttacatcaatttttaatgcaatattatatttgtgatatttatgctgttacagatatctacagtttgttcatttaaaaaagtccttttt

SEQ ID NO: 247010 - DNA, 571 bp, Homo sapiens
gaagggcaggattctgacaggtcctgggtggaagatgacaaagggaacttgtgggggtgtgaaggggtagggacaatttctagggcctttcttttaaggggtcctaccctcccctccaatcccatgtagccccaacctgttctcaagagttggatataaacagtccctcctctaggagtttatcattgattctattcccctaatcaaaccctccattgggatgggkctcctgcttctctgtgtatcaaaccttcccaataaatctaagatgcagaggatggagccaaggagtgtcttcctcagggtggtgtctgactttcacatccccaccctccctcaaagcgacagcgccagctgctcaccttcttcctttattagtgttgattatatgttcttaggaggtagacagccaagattcatgagaaaggcttcctgacacaggactagacctcatcccttatacttcctatgctgcaccaccaccagggccaccagggtcagagcatgtgcataaaacaggacttagacctgcatcaggttctgggctccacagaagggacactgaggctca

SEQ ID NO: 247011 - DNA, 397 bp, Homo sapiens
atgagcaccaattctcagctaactgcacaagacctctcctttgaactctcaccaacctatttctccttgacccccgtacccaagtctctcactcagagcatccaaggacctttcacctccttgcccaaaatctttccctcctctttccacagctgacctccaaagaygctaagcacttcttagttacctctatggtgtgattttaataaatcacaaagtcagatcgtccccaccctcactcttcgtctaatctactctgagcctagctctcccaggccctttctctagtctctctaatgaaggcattccaagcattgtggccacaggagggcagggctggaggaggaagacaccctggtctcttgatgtggagaactccagctgggagggaggagcc

SEQ ID NO: 247012 - DNA, 547 bp, Homo sapiens
catttccttgcgtacttagatgtctttgaatgacaaagatttatttttctctgaaaattattattgtgcacttttgcatattagtaagaasaaaatttgccaaagagaatttgaattttttgtgagtctactaaaggcaccaccattctgggaccacattatattaattcttggcctaaaggtgtttggacgtatgtttggacagcacatttaaacaatttttaaattaattgctgtaaatcattaatgattttctttaaatctgtccaatctcaagtcatttttatttgccatttccagggaatgtgaaatgagactaatttacctctgattcttctttagactgaggatataaattttggtgctagctttagggaagagctcctgtgtgatgccctatcttgggaaacactatgtatttctttactgtcctatgtgatgtatgacagtaggaatctgtacacattcattttgctacatgtccgtagggcaaaatcagtttcagtgtttaggtgtattttgtctgctccctgcattcccatagttt

SEQ ID NO: 247013 - DNA, 617 bp, Homo sapiens
gctgagattcagaaggacctaaacagatctttggctcagatgggttgcttcagccttgtgtccttggccatcttcccttgccttccgaagggccctgccagcctcactgtaccaagccctgaccctagcggtctctccgtggggaccacatctcacccaccctccattgccagggctcctgctcagctcttctcactttcccaggacaagcctggcttcacagacacatctagatccagcgcttttctcttcgtggtgttcaaagaaagagtattattttttctctaamttgacctataacctacttattttgaagatatccaggctgcaggagatctctacccatctacccagaaggcatcagcccttgcttcagtaccttctcattccactctgtcactaaatgtttatgacctcaagaaaatttgaagaagcataagcaagtgcaattccattggtaccagggctgtaagggtggggccagatgggtgaacctcactggggataaatagaaattgtgtacaagatggacatttcaaggttggtttcaagaaacacagggaaagctaactttcataggtgacagtatgcacaagttaagcttcctaacagccaca

SEQ ID NO: 247014 - DNA, 617 bp, Homo sapiens
gctgagattcagaaggacctaaacagatctttggctcagatgggttgcttcagccttgtgtccttggccatcttcccttgccttccgaagggccctgccagcctcactgtaccaagccctgaccctagcggtctctccgtggggaccacatctcacccaccctccattgccagggctcctgctcagctcttctcactttcccaggacaagcctggcttcacagacacatctagatccagcgcttttctcttcgtggtgttcaaagaaagagtattattttttctctaacttgacctataacctacttattttgaagatatccaggctgcaggagatctctacccatctacccagaaggcatcagcccttgcttcagtaccttctcattccactctgtcactaaatgtttatgacctcaagaaaatttgaagaagcataagcaagtgcaattccattggtaccagggctgtaagggyggggccagatgggtgaacctcactggggataaatagaaattgtgtacaagatggacatttcaaggttggtttcaagaaacacagggaaagctaactttcataggtgacagtatgcacaagttaagcttcctaacagccaca

SEQ ID NO: 247015 - DNA, 617 bp, Homo sapiens
gctgagattcagaaggacctaaacagatctttggctcagatgggttgcttcagccttgtgtccttggccatcttcccttgccttccgaagggccctgccagcctcactgtaccaagccctgaccctagcggtctctccgtggggaccacatctcacccaccctccattgccagggctcctgctcagctcttctcactttcccaggacaagcctggcttcacagacacatctagatccagcgcttttctcttcgtggtgttcaaagaaagagtattattttttctctaacttgacctataacctacttattttgaagatatccaggctgcaggagatctctacccatctacccagaaggcatcagcccttgcttcagtaccttctcattccactctgtcactaaatgtttatgacctcaagaaaatttgaagaagcataagcaagtgcaattccattggtaccagggctgtaagggtggggccagatgggtgaacctcactggggataaatagaaattgtgtacaagatggacatttcaaggttggtttcaagaaacrcagggaaagctaactttcataggtgacagtatgcacaagttaagcttcctaacagccaca

SEQ ID NO: 247016 - DNA, 656 bp, Homo sapiens
aagaaaatttgaagaagcataagcaagtgcaattccattggtaccagggctgtaagggtggggccagatgggtgaacctcactggggataaatagaaattgtgtacaagatggacatttcaaggttggtttcaagaaacacagggaaarctaactttcataggtgacagtatgcacaagttaagcttcctaacagccacaagttcacaggttcttctatctaaatgtggcaatgtgtgacgatgtctgaatggccataatacacatacatagagtaatttatagcattcatttttgtattagaaattgtgcatttcagccacaagttttttgtacatgatggatagtcccacattgcttgaagattggaagagagagcactttatgaaatgtccttttggacacattttcattgacgtttctatgtcccaagaggcaatgagacaagtcatgataaactggtcgtgtcttctggggttacacctgaacttcttggtgtcaggaccgaggaaatcaaggacacagatatgccaaaggtgaggttagagcaaaagtttaatgggtgagaaaaagagaacagctctctgctgcagagagggatccagaaaaaaagagttgccattctgcagtgaaatacaagtgtttttatagatgagc

SEQ ID NO: 247017 - DNA, 656 bp, Homo sapiens
aagaaaatttgaagaagcataagcaagtgcaattccattggtaccagggctgtaagggtggggccagatgggtgaacctcactggggataaatagaaattgtgtacaagatggacatttcaaggttggtttcaagaaacacagggaaagctaactttcataggtgacagtatgcacaagttaagcttcctaacagccacaagttcacaggttcttctatctaaatgtggcaatgtgtgacgatgtctgaatggccataatacacatacatagagtaatttatagcattcatttttgtattagaaattgtgcatttcagccacaagttttttrtacatgatggatagtcccacattgcttgaagattggaagagagagcactttatgaaatgtccttttggacacattttcattgacgtttctatgtcccaagaggcaatgagacaagtcatgataaactggtcgtgtcttctggggttacacctgaacttcttggtgtcaggaccgaggaaatcaaggacacagatatgccaaaggtgaggttagagcaaaagtttaatgggtgagaaaaagagaacagctctctgctgcagagagggatccagaaaaaaagagttgccattctgcagtgaaatacaagtgtttttatagatgagc

SEQ ID NO: 247018 - DNA, 656 bp, Homo sapiens
aagaaaatttgaagaagcataagcaagtgcaattccattggtaccagggctgtaagggtggggccagatgggtgaacctcactggggataaatagaaattgtgtacaagatggacatttcaaggttggtttcaagaaacacagggaaagctaactttcataggtgacagtatgcacaagttaagcttcctaacagccacaagttcacaggttcttctatctaaatgtggcaatgtgtgacgatgtctgaatggccataatacacatacatagagtaatttatagcattcatttttgtattagaaattgtgcatttcagccacaagttttttgtacatgatggatagtcccacattgcttgaagattggaagagagagcactttatgaaatgtccttttggacacattttcattgacgtttctatgtcccaagaggcaatgagacaagtcatgataaactggtcgtgtcttctggggttacacctgaacttcttggtgtcaggaccgaggaaaycaaggacacagatatgccaaaggtgaggttagagcaaaagtttaatgggtgagaaaaagagaacagctctctgctgcagagagggatccagaaaaaaagagttgccattctgcagtgaaatacaagtgtttttatagatgagc

SEQ ID NO: 247019 - DNA, 549 bp, Homo sapiens
cctgaacttcttggtgtcaggaccgaggaaatcaaggacacagatatgccaaaggtgaggttagagcaaaagtttaatgggtgagaaaaagagaacagctctctgctgcagagagggatccagaaaaaaagagttgccattctgcagtgaaatacaagtgtttttatagatgagctagtgggagggggtatgttatccacatagggcatgaaaaastggttaggaccaggtgtgtcatctgcttagagcatgaatctctggcagctcacaccccaaccttttattatgcaggcagattctcagcctgagctactccaagttgcttatctcttttctactgtgcatatgctacaaagaggggtggggccccccatgttggatatgtctggcccaaggtggtcatttctacccatgcagctgcaggcatccctgcccacacaagcttccagcttccttttgtatgattgcagcccaattttccaggctgctctttgttaaagagaagtgaattcctgggttgctttctgttagaagggatgttctgttgag

SEQ ID NO: 247020 - DNA, 590 bp, Homo sapiens
ccctttagtcagctttagtgtgagttgcacatctattataatattggcttcatgcactactgaatataacaagaagggaaaatgtgtatcttttaaaaatctagatgacaaatggactttccacagattctttgtgtgttcctgatttagaayttgttcattccactgtagtttgttttcattgaaatcaccaactgatgaggaagcctaggctggcaagcaggacacggtggattatttgcaggaaagatgtttttgtggggaccctaaagggtcaggcactgcagcccacaggaaagcctcagccatgattctctgtggcgctgctctggtggggtaaggcagccatgcaaagctctgattccctgtcctgaagggtgacattggccgggcaagccccagccttcaggaaaaaaggacagacaagggagtgcttcacgttccggccttgttccggccttgtcatgagctccaccggcagcctgcagtggggcacagcttctaggtgcctggtcagctctggtccttcaggaggtgaaaatgacttttctcctggattctctgccctgttggctgggcctgggaaggac

SEQ ID NO: 247021 - DNA, 590 bp, Homo sapiens
ccctttagtcagctttagtgtgagttgcacatctattataatattggcttcatgcactactgaatataacaagaagggaaaatgtgtatcttttaaaaatctagatgacaaatggactttccacagattctttgtgtgttcctgatttagaatttgttcattccactgtagtttgttttcattgaaatcaccaactgatgaggaagcctaggctggcaagcaggacacggtggattatttgcaggaaagatgtttttgtggggaccctaaagggtcaggcactgcagcccacaggaaagcctcagccatgattctctgtggcgctgcyctggtggggtaaggcagccatgcaaagctctgattccctgtcctgaagggtgacattggccgggcaagccccagccttcaggaaaaaaggacagacaagggagtgcttcacgttccggccttgttccggccttgtcatgagctccaccggcagcctgcagtggggcacagcttctaggtgcctggtcagctctggtccttcaggaggtgaaaatgacttttctcctggattctctgccctgttggctgggcctgggaaggac

SEQ ID NO: 247022 - DNA, 550 bp, Homo sapiens
ccggcagcctgcagtggggcacagcttctaggtgcctggtcagctctggtccttcaggaggtgaaaatgacttttctcctggattctctgccctgttggctgggcctgggaaggactcaaggtctgcatggcagtttctgagtctccagcacccagctgtctcattgtgatgatgacagggagaatggccagaagtaccggggtggggaaaacgaagagccagcaggagaaggcgagcttccagaagccccaccacaaatgcttagtgcctgggtaggcacrgggatcgctgggttttgcctgggagcaagtccataggccctgctggagattgccaagataaccaccccctgccagaggtcaccagggattgcctgaaaaccttcggaaatgatgcatgcccctattgctcaaaaactggaagaagctgcagcctcagcaggttatccaggccactgagtggggcagcgggcctacactgagtggactcctgcattggcagtaggcagctctcctgacccatccaccagctgtctgcttccagtgagca

SEQ ID NO: 247023 - DNA, 550 bp, Homo sapiens
ccggcagcctgcagtggggcacagcttctaggtgcctggtcagctctggtccttcaggaggtgaaaatgacttttctcctggattctctgccctgttggctgggcctgggaaggactcaaggtctgcatggcagtttctgagtctccagcacccagctgtctcattgtgatgatgacagggagaatggccagaagtaccggggtggggaaaacgaagagccagcaggagaaggcgagcttccagaagccccaccacaaatgcttagtgcctgggtaggcacggggatcgctgggttttgcctgggagcaagtccataggccctgctggagattgccaagataaccaccccctgccagaggtcaccagggattgcctgaaaaccttcggaaatgrtgcatgcccctattgctcaaaaactggaagaagctgcagcctcagcaggttatccaggccactgagtggggcagcgggcctacactgagtggactcctgcattggcagtaggcagctctcctgacccatccaccagctgtctgcttccagtgagca

SEQ ID NO: 247024 - DNA, 556 bp, Homo sapiens
agaagttaagcttcctaacagccatgagtttacagcttcctctttctgaatttggcagtgtttttgatgtccaaattgccacgatgtcyacacatatttacaatagtttatattattcattttgtattactaattgtgcactttggccaacagtgtttcatacatcatggttggtttccaacctcgcttgaaaattggaagtgacagccctttatggaatgttgcttttgacactcttccatttaaggctctgtgtccccacagtgctacgaagacaaatagtcatcactcttccattttgagggggccagggtaagcagatgcaatttgagaatacaaagtaccttggaaacagaatcatctttcaatcagttttagtgtgaatttcatttacattagaatagtctgttcatgcactcataagatttcagggagggacaattgtcacctttgaagaatcaaagtgaccaatgggcttccctcagtattttgtttatttgtttctggaacttagtcatgccattgtagatcgtttcttttggaatcactgggtgat

SEQ ID NO: 247025 - DNA, 556 bp, Homo sapiens
agaagttaagcttcctaacagccatgagtttacagcttcctctttctgaatttggcagtgtttttgatgtccaaattgccacgatgtccacacatatttacaatagtttatattattcattttgtattactaattgtgcactttggccaacagtgtttcatacatcatggttggtttccaacctcgcttgaaaattggaagtgacagccctttatggaatgttgcttttgacactcttccatttaaggctctgtgtccccacagtgytacgaagacaaatagtcatcactcttccattttgagggggccagggtaagcagatgcaatttgagaatacaaagtaccttggaaacagaatcatctttcaatcagttttagtgtgaatttcatttacattagaatagtctgttcatgcactcataagatttcagggagggacaattgtcacctttgaagaatcaaagtgaccaatgggcttccctcagtattttgtttatttgtttctggaacttagtcatgccattgtagatcgtttcttttggaatcactgggtgat

SEQ ID NO: 247026 - DNA, 263 bp, Homo sapiens
cactcttccattttgagggggccagggtaagcagrtgcaatttgagaatacaaagtaccttggaaacagaatcatctttcaatcagttttagtgtgaatttcatttacattagaatagtctgttcatgcactcataagatttcagggagggacaattgtcacctttgaagaatcaaagtgaccaatgggcttccctcagtattttgtttatttgtttctggaacttagtcatgccattgtagatcgtttcttttggaatcact

SEQ ID NO: 247027 - DNA, 263 bp, Homo sapiens
cactcttccattttgagggggccagggtaagcagatgcaatttgagaatacaaagtaccttggaaacagaatcatctttcaatcagttttagtgtgaatttcatttacattagaatagtctgttcatgcactcataagatttcagggagggacaattgtcacctttgaagaatcaaagtgaccaaygggcttccctcagtattttgtttatttgtttctggaacttagtcatgccattgtagatcgtttcttttggaatcact

SEQ ID NO: 247028 - DNA, 265 bp, Homo sapiens
ggcacccgtgggagctcagcccttgcygcctcaaccctttttggattcttttctccccagactgtcccagagttcaggtcttctcgtctcttgtctgtccagtgaaggtacaagggtggaaaggtgagggtgtggagtcaggagctttgttccactgctgggcatagtgagaagtcaaaagagaggttatgatctcgttgtgcttgaaggggagaggccaaagcctaagacattctgcctttttaggggaattacctttcaaggc

SEQ ID NO: 247029 - DNA, 265 bp, Homo sapiens
ggcacccgtgggagctcagcccttgctgcctcaaccctttttggattcttttctccccagactgtcccagagttcaggtcttctcgtctcttgtctgyccagtgaaggtacaagggtggaaaggtgagggtgtggagtcaggagctttgttccactgctgggcatagtgagaagtcaaaagagaggttatgatctcgttgtgcttgaaggggagaggccaaagcctaagacattctgcctttttaggggaattacctttcaaggc

SEQ ID NO: 247030 - DNA, 430 bp, Homo sapiens
cagcccttgctgcctcaaccctttttggattcttttctccccagactgtcccagagttcaggtcttctcgtctcttgtctgtccagtgaaggtacaagggtggaaaggtgagggtgtggagtcaggagctttgttccactgctgggcatagtgagaagtcaaaagagaggttatgatctcrttgtgcttgaaggggagaggccaaagcctaagacattctgcctttttaggggaattacctttcaaggcttatttggtcttcactagcctttacatctgaggatgaaggagttgaggctctgttacatggatgtctaaagagatcataactctcacattgaatgacacagagactgatagctctagcacagtacctaggtaatgtgactctcttttgctacgtgtgcccttcctacataaggaaatgtga

SEQ ID NO: 247031 - DNA, 491 bp, Homo sapiens
tttgtagtctctatcccagtaccacactgttttgagtaacatgactgtgagtaacttttgacgttaggaaatttctcattatgaaattagagctytgaacatttttttctcttttttttgcgatcgttttgactattcttggttccttgagatttcacttgaattttagaatgttagtttctgtttccatttaaaaaaagttattgggcttttgattgggattgcactgcatttatagataattttaggagaaattgccacattagtacttttaagagagtttccaagatggcttactggatgcagccaggaagtgttgctcccaaagagaaagaccacaattttgactacatcaacatagtttgaatagatatttggagagaaaatgcatagtgtggatggagaaaaggtgcgttttctaagactgaagagcaaggaagctggggtgcccttatggggtgcctgaacgctatgactgctttttggccctg

SEQ ID NO: 247032 - DNA, 491 bp, Homo sapiens
tttgtagtctctatcccagtaccacactgttttgagtaacatgactgtgagtaacttttgacgttaggaaatttctcattatgaaattagagctttgaacatttttwtctcttttttttgcgatcgttttgactattcttggttccttgagatttcacttgaattttagaatgttagtttctgtttccatttaaaaaaagttattgggcttttgattgggattgcactgcatttatagataattttaggagaaattgccacattagtacttttaagagagtttccaagatggcttactggatgcagccaggaagtgttgctcccaaagagaaagaccacaattttgactacatcaacatagtttgaatagatatttggagagaaaatgcatagtgtggatggagaaaaggtgcgttttctaagactgaagagcaaggaagctggggtgcccttatggggtgcctgaacgctatgactgctttttggccctg

SEQ ID NO: 247033 - DNA, 538 bp, Homo sapiens
accacaattttgactacatcaacatagtttgaatagatatttggagagaaaatgcatagtgtggatggagaaaaggtgcgttttctaagactgaagagcaaggaagctggggtgcccttatggggtgcctgaacgctatgactgctttttggccctgagtggcatctggggaagaagtgagtaaagggactgggaggctgctcactctcgctgcagaccactgggatcctggctgcaggaarctccacacccccatggacatgtgagttggcaaggagctctccctggagagtagatggagatggagctgtagcaggcacagagccaggactttttatcatgggtcagatctggtggagctcaaccataaagtcccacctccgtggctgcctatctctctcagaggctttggccccagctaaactgcagggagaaagcaaggcctgcttacccgcaggattgggacatgtctatcctgtaggcatgcctgtccaccagcctcttacatggcccctgcctggcttcctgggagaagcat

SEQ ID NO: 247034 - DNA, 538 bp, Homo sapiens
accacaattttgactacatcaacatagtttgaatagatatttggagagaaaatgcatagtgtggatggagaaaaggtgcgttttctaagactgaagagcaaggaagctggggtgcccttatggggtgcctgaacgctatgactgctttttggccctgagtggcatctggggaagaagtgagtaaagggactgggaggctgctcactctcgctgcagaccactgggatcctggctgcaggaagctccacacccccatggacatgtgagttggcaaggagmtctccctggagagtagatggagatggagctgtagcaggcacagagccaggactttttatcatgggtcagatctggtggagctcaaccataaagtcccacctccgtggctgcctatctctctcagaggctttggccccagctaaactgcagggagaaagcaaggcctgcttacccgcaggattgggacatgtctatcctgtaggcatgcctgtccaccagcctcttacatggcccctgcctggcttcctgggagaagcat

SEQ ID NO: 247035 - DNA, 538 bp, Homo sapiens
accacaattttgactacatcaacatagtttgaatagatatttggagagaaaatgcatagtgtggatggagaaaaggtgcgttttctaagactgaagagcaaggaagctggggtgcccttatggggtgcctgaacgctatgactgctttttggccctgagtggcatctggggaagaagtgagtaaagggactgggaggctgctcactctcgctgcagaccactgggatcctggctgcaggaagctccacacccccatggacatgtgagttggcaaggagctctccctggagagtagatggagatggagctgtagcaggcacagagccaggactttttakcatgggtcagatctggtggagctcaaccataaagtcccacctccgtggctgcctatctctctcagaggctttggccccagctaaactgcagggagaaagcaaggcctgcttacccgcaggattgggacatgtctatcctgtaggcatgcctgtccaccagcctcttacatggcccctgcctggcttcctgggagaagcat

SEQ ID NO: 247036 - DNA, 538 bp, Homo sapiens
accacaattttgactacatcaacatagtttgaatagatatttggagagaaaatgcatagtgtggatggagaaaaggtgcgttttctaagactgaagagcaaggaagctggggtgcccttatggggtgcctgaacgctatgactgctttttggccctgagtggcatctggggaagaagtgagtaaagggactgggaggctgctcactctcgctgcagaccactgggatcctggctgcaggaagctccacacccccatggacatgtgagttggcaaggagctctccctggagagtagatggagatggagctgtagcaggcacagagccaggactttttatcatgggtcrgatctggtggagctcaaccataaagtcccacctccgtggctgcctatctctctcagaggctttggccccagctaaactgcagggagaaagcaaggcctgcttacccgcaggattgggacatgtctatcctgtaggcatgcctgtccaccagcctcttacatggcccctgcctggcttcctgggagaagcat

SEQ ID NO: 247037 - DNA, 536 bp, Homo sapiens
aacatagttgcaaataaagaagatacacaaaggaactgcatggtaaagaacctatctacatcccactgctctcaagtgctatctactggatcgcagtagagattacaccaccaaaaatcactttactaattcttcccctgtgaaaccaagagcaagaattcaacaacaaagacactgtacagagtcctagtcctctgaaaaccttcaaaaaaagaaagccaatagactatactcaatttataccccaattagaggtataccagttctctcagatgagaaagaattggctcaaaatctctggcaatgcaaaaagccagagtgtctccttcaagagagcccactagtgccccagtgatggtttttaacagtctgaattgtctaaaatgacagacatggaaaaaagagcagggaaactcatttarattgagaagaaagttgaaacttaacccaaggaagccaagcaatccggttaaatgattcaaaacctgaaagataaaatagcaatcttaaaaaatatctaaactaaaaaattcttg

SEQ ID NO: 247038 - DNA, 416 bp, Homo sapiens
attagtcagttctcacattgctataaagaaatacttgacactgggtaatttataatgaaaagaagtttggttggctcacarttctgcaggctgcagcggaagcatgcagcatcagcttggcttatggggagccctcaggaaactaacaaccatggcagaaggaagaggggggcaaggcatcttacatggaagaacaggagcaacacagagagcgaggaggtgctacccattcttaaacagccagatctcatgagaacgttatcgcgagacagcacaaggggctggtgttaaaccattcacaaggatctatccccattatccaatcacctctcagcaggccccacctccaacattgaagattacagttccacatgtgattggggcagaatcacagatccaaaccatattgctatttc

SEQ ID NO: 247039 - DNA, 416 bp, Homo sapiens
attagtcagttctcacattgctataaagaaatacttgacactgggtaatttataatgaaaagaagtttggttggctcacagttctgcaggctgcagcggaagcatgcagcatcagcttggcttatggggagccctcaggaaactaacaaccatggmagaaggaagaggggggcaaggcatcttacatggaagaacaggagcaacacagagagcgaggaggtgctacccattcttaaacagccagatctcatgagaacgttatcgcgagacagcacaaggggctggtgttaaaccattcacaaggatctatccccattatccaatcacctctcagcaggccccacctccaacattgaagattacagttccacatgtgattggggcagaatcacagatccaaaccatattgctatttc

SEQ ID NO: 247040 - DNA, 461 bp, Homo sapiens
aaaagggtggagcgtattctaccatgcaaacgaaacaaaaacaagcagcagtcactattcttatattagataaaacaaatttaatccaaaaaaaaaaaacactaagagggacaagaagagcattttgataaagggtgcaatctaacaagaagccttaactatcttaaatatatatgtgattaccactggagcatccaaattcataaaatgacttcttctttgcctaccaatgaaaagaagaataacaagggcatattgataaaggayaaaatcctgtgagaagccttaaatatcttaaatatatatacacttaatattggagcacccagatttacaaaatgactttttctttccccacaaaaaggcttagacaacatcacaatagtagtaagagtcttcaacaccctacttccagcattagacatatcactgaggccaaaaaaaaaaaaaaaaaaaactaa

SEQ ID NO: 247041 - DNA, 461 bp, Homo sapiens
aaaagggtggagcgtattctaccatgcaaacgaaacaaaaacaagcagcagtcactattcttatattagataaaacaaatttaatccaaaaaaaaaaaacactaagagggacaagaagagcattttgataaagggtgcaatctaacaagaagccttaactatcttaaatatatatgtgattaccactggagcatccaaattcataaaatgacttcttctttgcctaccaatgaaaagaagaataacaagggcatattgataaaggacaaaatcctgtgagaagccttaaatatcttaaatatatatacacttaatattggagcacccagatttacaaaatgactttttctttccccacaaaaaggcttagacaacatcacaatagtagtaagagtcttcaacaccctacttmcagcattagacatatcactgaggccaaaaaaaaaaaaaaaaaaaactaa

SEQ ID NO: 247042 - DNA, 509 bp, Homo sapiens
aacaagcaatggggaaaggactccctagtcaatacattctgggataactggcttgccataggcagaagattgaacctagacctttaccttgcaacatgccccaaaattaaatttaaatggattaaaaatttaagtgtaagacctcaaactataaaaattctggaagataacctaggaaatayttttttgacatcagccttggcaagtcgtttttggctaagtccccaaaagcaattgcaaccaaaacaaaaatagacaagtaggacttaatttgactaaatagcttctgcacagcaaaataaactatcaacaggggaaagaggcatcctccagaatgggaggagatattcacaaactatgagtctaacaaaagcctaatatccagactctatagggaactcaaatcaacaagccaaaaaaaaaaaaccattaaaaaataaaaaatgggcaaatgagatgaacagatatgcctgaacagaagatatacaagtggccaacaaacatgaaaa

SEQ ID NO: 247043 - DNA, 463 bp, Homo sapiens
caatggggaaaggactccctagtcaatacattctgggataactggcttgccataggcagaagattgaacctagacctttaccttgcaacatgccccaaaattaaatttaaatggattaaaaatttaagtgtaagacctcaaactataaaaattctggaagataacctaggaaatacttttttgacatcagccttggcaagtcgtttttggctaagtccccaaaagcaattgcaaccaaaacaaaaatagacaagtaggacttaatttgactaaatagcttctgcacagcaaaataaactatcaacaggggaaagaggcatcctccagaatgggaggagatattcacaaactatgagtctaacaaaagcctaatatccagactcyatagggaactcaaatcaacaagccaaaaaaaaaaaaccattaaaaaataaaaaatgggcaaatgagatgaacagatatg

SEQ ID NO: 247044 - DNA, 512 bp, Homo sapiens
acagaagatactgatccatttatttgtacctttgatttcttacagcagcattttgaaagtttttattgtacaaatagtttgtcatcctggttaaattgattccagagcattttattctttttaatactgttgttcatggtattgttttcttaatttccttttcagattaatcattattggtgtgcatcaatgcaactgagttttgtaagttaattttgtatcctgcaacattacttaatttgtttaaactgttttgaggtgtttttctgtttgtacaatcttcagaattgtgtgcatacatgattactgtgaacagagatatttctattttattctttttaacataygcatttttgtctttattttatttttgttattgcttaagctaaagttttatatactctgttgagtggaagtggtaaaaaagaggaactatttttagttcctgatattaagggaaaacattttttgtatttcactgttgattatgttgtgtgtttgtaccatgaatg

SEQ ID NO: 247045 - DNA, 660 bp, Homo sapiens
tgttgagtggaagtggtaaaaaagaggaactatttttagttcctgatattaagggaaaacattttttgtatttcactgttgattatgttgtgtgtttgtaccatgaatgagtaatatcttgtagaatgctttttctgtgtaaattgagatattgtggtgtttaacagtactaatgcggtatattatgattatttgtttatttatttattatttatttatttttagagacaggatattatgatgttgtttagactgctcttgaactcctggactgaagtgaacctatcaccttagcatcctgggtaactgggattacaggcacaagccactgtgcctggctacatttattgatatttatatgttaaagcatctttgcacttcagtaataactctcaattagtcttggtagataaccctcttattattctgctaaatatattttgctaatatttattttatagwttttatattatttataaagaacatttttcttcaactttcttttcttgtagtgcttttgttcattttttatgtcactgtaattttggcctacctcatagaataaatttggaagtgtttctgcatcttcaggtttttgcaagagtttgaggataattggtaattaattcttaaaatgtttgatagattcagcagcataac

SEQ ID NO: 247046 - DNA, 369 bp, Homo sapiens
aagtctggctctggtaaaatctcagttggttaggcttttgatacatagtttatattgaagataggaatgttaaaaagaaaattttctgggaatagttaaaaatggctacatttcccttcctcctactggaatcaagaagcattttttctatcatcttccctgtaaaagccatgtcatgtttctgaaagtaaagttcataaatttgtataccctgaaaatgttaattctcaaacttttagccattcatcaayaatggtttgttttcttacaactgtatttgttcccataggggtttcttgtggtttactaaccaagtaagttataattctctggatgtgtgtgtccttctgtccaatttgggatggtgat

SEQ ID NO: 247047 - DNA, 554 bp, Homo sapiens
ttttcttacaactgtatttgttcccataggggtttcttgtggtttactaaccaagtaagttataattctctggatgtgtgtgtccttctgtccaatttgggatggtgatttgccctgtgaacttatttttctgatagatgttaggagaattgctggcctatgtttccctttttactttcgctgatgcgaatgtcaccttctacgtccttacttgccaggctgaccaaaaggaactatcttcaytttttgatggttgtctctatttttaatcctaaaccgtgtgtgtgtgtgtgtgtgtgtgtgtgtgtgtgtgtgtgtgtgtgtataaaataatacagtaagaggaaacctgggtggtcccttttctggtaccagcagcagattgaaaccattcaaacccctgtccatgggaataaattctcaccctagcatgccacctaccctcaataaaaatccaggcctggctccttttcttgcacattcaagccatgtcagatcaccttgaaaggccttcctacttacctcacaaatgtaatttatgtgagtagtaattt

SEQ ID NO: 247048 - DNA, 568 bp, Homo sapiens
gtggttattaaaggagcactgagttgggagtgagacctggaggcccacacccttggttaagacataataccaccttgagtctggcctgttgactgagggtgagccactccatcctcatctgattgtggggtcttgacctcaaggggttgcctgaaggaagaagcacatgggtttgctttcctagctctgtccagtaccttagggaccctgaggactggagagattcttggagagccatctggtgtatatcatgggtgggccttttttgaaggtcagtctgcccagtgggctggctcagccccaatgaactgtcttgaatctttggagttgtctgggtacttttaagggcttctcatccttgcaccaaaagatcccctggaaattaggtgggaaaacyttaacttttgtggggccttgtgtttgtcttaaaagttcatgcacatggccagatgtggtggctcacacctgttatcctgtcctggatcccttgagtcaaggagtttgagactaacctggacaatatagtgagaccctgtctctacaaaaaataaaatattagccaggggtg

SEQ ID NO: 247049 - DNA, 518 bp, Homo sapiens
gtgggaggagcacttgagcctgcactgagctgtgatctcaccagtgtactccagcctgggccacagagcaagaccctgactcaaaaaaaaaaaaccaacaagaaaaatacttgaagattkttgcattctgtcccactacccattggttgtcatgtgaagataatgtcagaaattctttacaattgcttccagaaggagtagccttttgatctagtgcacaggtgtcttttggcttctcagggtcacattggaagaagaatgctcctgggccacatataaaatacactaatgctaacgatagctgatgagcttaaaaaaaaaaaaaggtttgtgcataattttcatgatacccaccaccacagataggtggaaaagtccttgtagtcaaagggttggacgcggctgacctagtgtcttgtcatccgttttggcttcctccctgattccagaatgcaggtatagatgtagagacgtgctctcaggacagctgttgagataaaaaattctttgtcatttat

SEQ ID NO: 247050 - DNA, 518 bp, Homo sapiens
gtgggaggagcacttgagcctgcactgagctgtgatctcaccagtgtactccagcctgggccacagagcaagaccctgactcaaaaaaaaaaaaccaacaagaaaaatacttgaagatttttgcattctgtcccactacccattggttgtcatgtgaagataatgtcagaaattctttacaattgcttccagaaggagtagccttttgatctagtgcacaggtgtcttttggcttctcagggtcacattggaagaagaatgctcctgggccacatataaaatacactaatgctaacgatagctgatgagcttaaaaaaaaaaaaaggtttgtgcataattttcatgrtacccaccaccacagataggtggaaaagtccttgtagtcaaagggttggacgcggctgacctagtgtcttgtcatccgttttggcttcctccctgattccagaatgcaggtatagatgtagagacgtgctctcaggacagctgttgagataaaaaattctttgtcatttat

SEQ ID NO: 247051 - DNA, 518 bp, Homo sapiens
gtgggaggagcacttgagcctgcactgagctgtgatctcaccagtgtactccagcctgggccacagagcaagaccctgactcaaaaaaaaaaaaccaacaagaaaaatacttgaagatttttgcattctgtcccactacccattggttgtcatgtgaagataatgtcagaaattctttacaattgcttccagaaggagtagccttttgatctagtgcacaggtgtcttttggcttctcagggtcacattggaagaagaatgctcctgggccacatataaaatacactaatgctaacgatagctgatgagcttaaaaaaaaaaaaaggtttgtgcataattttcatgayacccaccaccacagataggtggaaaagtccttgtagtcaaagggttggacgcggctgacctagtgtcttgtcatccgttttggcttcctccctgattccagaatgcaggtatagatgtagagacgtgctctcaggacagctgttgagataaaaaattctttgtcatttat

SEQ ID NO: 247052 - DNA, 518 bp, Homo sapiens
gtgggaggagcacttgagcctgcactgagctgtgatctcaccagtgtactccagcctgggccacagagcaagaccctgactcaaaaaaaaaaaaccaacaagaaaaatacttgaagatttttgcattctgtcccactacccattggttgtcatgtgaagataatgtcagaaattctttacaattgcttccagaaggagtagccttttgatctagtgcacaggtgtcttttggcttctcagggtcacattggaagaagaatgctcctgggccacatataaaatacactaatgctaacgatagctgatgagcttaaaaaaaaaaaaaggtttgtgcataattttcatgatacccaccaccacagataggtggaaaagtccttgtagtcaaagggttggacgcggctgacctagtgtcttgtcatccgttttggcttyctccctgattccagaatgcaggtatagatgtagagacgtgctctcaggacagctgttgagataaaaaattctttgtcatttat

SEQ ID NO: 247053 - DNA, 539 bp, Homo sapiens
aaaaaggggaaattgtaatgcaaaatgtggactatgccagctatgattgggaaaaataatttttcctacagcattatctgtagacttgtattagcagcatactggtcataagcgttttgctttcctcaaacatgatgaggtaagctactttaaagtgtggtagggctgtcttccacgtggctcctggtggtgttgagtcccaatttagccaattaatttgggtttagttttgatgtggataagggagaccagcttcattcatggtgcacacacagttttgccaataagggaaaaaaaaagcaacctgaatgttcctactcattagatkctatctggagagctcctaccccacccccaccaaggcccagacccttaaaaagactcagtgcagcctttctgtatctcatactgtattctgcaagatgctcctgtgaaagaaagttgtgctgcatcagccgtctccctcctgaagatccctgcggatgaggatttgtgttttaaaggttctgagaagtcctgcaatgacagtcctcaaacgt

SEQ ID NO: 247054 - DNA, 594 bp, Homo sapiens
aacttaatttaaaatccatcaagtactaaactcagagctaaatgtgaaggactgaaataccaacttgcccaccatgttaggtttatgagagctcaatgcagaaatgcctctgaagtgggaaaatctataatttcyccgaagaagcactgtctgtgctctggaggtcagaaactttctagactcatgtcttcattagggcagatcgagaagccttttagaaattaaattttggacatgcccatgtgtcctctgagcctgtcctttctgtcagaagtcacgcagagacccaaatgtcaaaaagggacacactcttttgttgatgcacaagattgtggcattccaatctctttctgaaaatacattattggattctttgcagccaaattcttaagaaaagtttggtattggagactaatattccatgaagaattacctgaagcatgaggaaatcatccctttagatcagtggattttttgctttaatttttaaattgacacatcattgtacatatttatagggtatagggtgatattttgattagatcagtgttttatatagcatgttatgtaaagcttctgagaagagtcagggag

SEQ ID NO: 247055 - DNA, 447 bp, Homo sapiens
gaaatgccgtttcttcatgcttgaacaactaaaaattgactaaagtgcttctcttcaaactttctggaacattttttatctaaattctaagagcaatcacrataggttttaaccacaattgtgagaatattctaaatgttagggtggaaaaaaatttaaaataattttatagtaatttttttatcatggtgacagtgtgctaaatttttttaagtgaaatattactgtagacatttaagtcaagattctaagaaactgttgtaaagtccaaaattttgtttcatatacaatgctattatatatatatttgcatataaaattaatatatgtgagccatgtttcaaatgcttgagagattattatatcaaagattcttgattatataaaatgccaattacttataggcacacatgctttaaataattacaaaggcagttgtggttgatt

SEQ ID NO: 247056 - DNA, 308 bp, Homo sapiens
tattccattactatgctctatrgtgtatacaatttctgttctttgtcatgttattaactaaattatttattgggtccagtaacgtattccataaatattgtacacataaaaattgtgttatttttattcctgtatgctcagctgcccaataacagtctgaggattaacatatttgttaaatgcacaaatacattctttcacaaatattagtttaataattttatattaaactccctctatacttacaatatgaattagataattcagaataaacattccattggaaaaagctacacaatttgttataa

SEQ ID NO: 247057 - DNA, 628 bp, Homo sapiens
aattacaggaccaaattaagaatggtatgaaagcctgtttgtgacgcttatgtttgggttatctctttatttgagtgactataaatctcaaaagagaactaaagggagaaataaccatatctactaacatggtaagggtacttaaacatctcttagtaattgagaaaattgaaagaaaagaaaaaggagaaagggagaaagagaaacagtgaaagggataatgaaggagagaaagaagaagagaaaggaagaggaagaaaagtaaaaaggaggagggggaaggaggaaggaagaaaggtgaaaagaaagaatggtaaactttttaacaacawaatttatccttctagaatatgaatgttggtctatttgatgatgtcccacagattcattagtctctgctcattggttattttttattctttctgtttctgagagtcagtattttccattttcttctcttcaagttcatggcttcttctgtgtgtgcaaatatactcttaaatccctctggtgatttttaaatttttatcattgtagttttccactccagaatttctgttatctctttgctgatattcctactttttaatattttttctgattcctttatttctttatgttttccttt

SEQ ID NO: 247058 - DNA, 519 bp, Homo sapiens
aaaggaggagggggaaggaggaaggaagaaaggtgaaaagaaagaatggtaaactttttaacaacataatttatccttctagaatatgaatkttggtctatttgatgatgtcccacagattcattagtctctgctcattggttattttttattctttctgtttctgagagtcagtattttccattttcttctcttcaagttcatggcttcttctgtgtgtgcaaatatactcttaaatccctctggtgatttttaaatttttatcattgtagttttccactccagaatttctgttatctctttgctgatattcctactttttaatattttttctgattcctttatttctttatgttttccttttgacatttgagtataatgaagagagttgttttaaagtctttgtctggtaagtttgatgtctgggtttccttagggatattttctgtcaatttattttggtcctttgaatgagccacactttcccattctttgtatgccttgtaacgtttttgaaaa

SEQ ID NO: 247059 - DNA, 460 bp, Homo sapiens
ttaggtatcccccagaccagtcagaacagacacataataatttgtggttaagatcttctcttgttcctttggaccatggaccaggcttcctcactgggaacgtgggcttctgacacttcagaactgccaatttgctggggcaaaggcaagttaaaaatgtmgtaaagttttccagttgtctttttcttgagtctgctttcacttggatgttgtaatcttttgaccattttccagagttttggcgaagtttattcggacagtttctcttagttgtgtgatgtttctgtggggaaatgaaagattgcagctttctccactgccattttgctgatgctcctcttttgtcaatttttgcttcatgttattatgctttgttattagttcatgtattagttttctagggctgccataaccaagtaacacaaactgggtgccttgaacaacatacatttagagtctt

SEQ ID NO: 247060 - DNA, 216 bp, Homo sapiens
cgtgccacctgtccacactccttggctctgccatcatgctgaagatcgctttaaagggactggcttccctccccccaaaatgaaaagagcacaaactgagaaactgaatgtgggagacagcagtggattatgctgttctcagggstcacctcaggtttggaagcattctttcaaattaacccatctcaggccatctgcagagaggaaaggtggtac

SEQ ID NO: 247061 - DNA, 508 bp, Homo sapiens
tgaatttaataacatcttgatatattccatgattgcggttttatttggtaaatctttaaatgcacaccatttaacgataataaatgaatcttggaaaccttgtaggtaagggtaaatattaggatgcatccagttacatttacacacacatacaygcatacagactgattcacgtgtgtatatatatatatgactttaccaattgatgttaactaatatttataagagccagctggattgatatatattgttgaacctgaaaaatatttattatatacatgtttaaaatacacacagaaataaattgcaattgcactaagtatttgaaactggactaaaatataagctggggaacaattttgtgatcattacaaattcttacactgaataaatatttttatttttacaatattaatatgtttgatacctgtgtacattttttacaatgtgttattttatttttgtcatagagtcatgtcatgcataataacattttagtcaaagatgg

SEQ ID NO: 247062 - DNA, 508 bp, Homo sapiens
tgaatttaataacatcttgatatattccatgattgcggttttatttggtaaatctttaaatgcacaccatttaacgataataaatgaatcttggaaaccttgtaggtaagggtaaatattaggatgcatccagttacatttacacacacatacatgcatacagactgaktcacgtgtgtatatatatatatgactttaccaattgatgttaactaatatttataagagccagctggattgatatatattgttgaacctgaaaaatatttattatatacatgtttaaaatacacacagaaataaattgcaattgcactaagtatttgaaactggactaaaatataagctggggaacaattttgtgatcattacaaattcttacactgaataaatatttttatttttacaatattaatatgtttgatacctgtgtacattttttacaatgtgttattttatttttgtcatagagtcatgtcatgcataataacattttagtcaaagatgg

SEQ ID NO: 247063 - DNA, 508 bp, Homo sapiens
tgaatttaataacatcttgatatattccatgattgcggttttatttggtaaatctttaaatgcacaccatttaacgataataaatgaatcttggaaaccttgtaggtaagggtaaatattaggatgcatccagttacatttacacacacatacatgcatacagactgattcacgtgtgtatatatatatatgactttaccaattgatgttaactaatatttataagagccagctggattgatatatattgttgaacctgaaaaatatttattatatacatgtttaaaatacacacagaaataaattgcaattgcactaagtatttgaaactggactaaaatataagctggggaacaattttgtgatcattacaaattcttacactgaataaatatttttatttttacaataytaatatgtttgatacctgtgtacattttttacaatgtgttattttatttttgtcatagagtcatgtcatgcataataacattttagtcaaagatgg

SEQ ID NO: 247064 - DNA, 488 bp, Homo sapiens
cttaaaaaatactaacaaatcagatctagcaacatataaaagaattatacactatgacaaagtgaaatttatacaagtaatcccaggttggtttaacagcccaaaatccattaaggtaatacaycttatccatagaataagaaacgagaattgcatgatcacgtcgatagattcggaaaagacatttaacagaatccaaatgctttaatgactaaaaataaaaataaaaactcaatgaaccaggaatagagaactttctacacctgatacatggcacctgtgaaaagccaacagcaagcatgcaacttaatgctaaaagatgctttcccgctatggtcagagatatatactttgataggatatatactttgacctcttctagtcaacactgtactaaagattttatgcagggcaaatcggcaactaaaaaaataagagtcacccatactgaacaggaagaaataaaactttatttgaaaataacattc

SEQ ID NO: 247065 - DNA, 488 bp, Homo sapiens
cttaaaaaatactaacaaatcagatctagcaacatataaaagaattatacactatgacaaagtgaaatttatacaagtaatcccaggttggtttaacagcccaaaatccattaaggtaatacatcttatccatagaataagaaacgagaattgcatgatcaygtcgatagattcggaaaagacatttaacagaatccaaatgctttaatgactaaaaataaaaataaaaactcaatgaaccaggaatagagaactttctacacctgatacatggcacctgtgaaaagccaacagcaagcatgcaacttaatgctaaaagatgctttcccgctatggtcagagatatatactttgataggatatatactttgacctcttctagtcaacactgtactaaagattttatgcagggcaaatcggcaactaaaaaaataagagtcacccatactgaacaggaagaaataaaactttatttgaaaataacattc

SEQ ID NO: 247066 - DNA, 488 bp, Homo sapiens
cttaaaaaatactaacaaatcagatctagcaacatataaaagaattatacactatgacaaagtgaaatttatacaagtaatcccaggttggtttaacagcccaaaatccattaaggtaatacatcttatccatagaataagaaacgagaattgcatgatcacgtcgatagattcggaaaagacatttaacagaatccaaatgctttaatgactaaaaataaaaataaaaactcaatgaaccaggaatagagaactttctacacctgatacatggcacctgtgaaaagccaacagcaagcatgcaacttaatgstaaaagatgctttcccgctatggtcagagatatatactttgataggatatatactttgacctcttctagtcaacactgtactaaagattttatgcagggcaaatcggcaactaaaaaaataagagtcacccatactgaacaggaagaaataaaactttatttgaaaataacattc

SEQ ID NO: 247067 - DNA, 582 bp, Homo sapiens
ttggtatagcaaaatgttgaaccaagggaaaagagacatgaattaatgaagtcttaagatatcaagaatttgaaagaaaaggcaggtcatctttgaaggttagtgacatagcattcatcttctgttgtcacctttcctgtcattccctgtatgcctgatggacaggtttcactcaagttcagagaacagcatgcaaaattagctaycaattaatctttaggaagtgagctgcatttctagccagactgagcttacgttttagcaggaagcatttttgggaaatgtttatgttagagttggcccttcttgacaaggtgagacataaatgtctactttatagacatgaattaagatgggaagatatttgggggaatcatttactcaaacgctaaataataaaggtacacaaagggcaaattatactagatttctttcccacttgttttctatgtctcatgcaattcaccttgattcccttcagtttctgtttaatgtagaaagtggcattttcattattttaagcttctagcacaatgaaagaatttctctttttcatgaacaggatcatacatgaaaaggagg

SEQ ID NO: 247068 - DNA, 556 bp, Homo sapiens
aagtgagctgcatttctagccagactgagcttacgttttagcaggaagcatttttgggaaatgtttatgttagagttggcccttcttgacaaggtgagacataaatgtctackttatagacatgaattaagatgggaagatatttgggggaatcatttactcaaacgctaaataataaaggtacacaaagggcaaattatactagatttctttcccacttgttttctatgtctcatgcaattcaccttgattcccttcagtttctgtttaatgtagaaagtggcattttcattattttaagcttctagcacaatgaaagaatttctctttttcatgaacaggatcatacatgaaaaggaggaagagtgtcctatatcatatttattgttcaacaaaacactgctccacggcttaaattcagtttaagaaagagaatttgttgaacatctaacacatacataaaaggcagtaaagacacatgagaagagggcaggatattgaagtatacagacttcaatgctgagttttatatcttagggagttactccaccttaca

SEQ ID NO: 247069 - DNA, 571 bp, Homo sapiens
ctccaccttacagaggctcaatttcccctgatttaggaaggcgatgctaatgggtattgcataggtgtaagtataaaaatgttgtattgaagagaatcccacaagcttggtataaggcmgaaaataaattgatgtgacatgaataagtagtttattacatttgtatgctacctgcggactagaggaagcaagaaacacagccactatgcttgattagcattatagggatggtacaatgattgttgccagaagctggggggaggaagaaatggggaagtattgtttaatgggtatagagtttcagttttacaagatgaaacgaattatggagatggatggtagggatggctgcacaatgttatgactatatttagtaccactgaactgtacacttaaaatggttaaccgagtacattttatgttatgtgtattttaccacaataaaaaaataaaataccttaggaacattttcatgaaaaagcccacataaaattcattttaatgcacgtgtttatgcatagctttctatttttctcttttccctttacattcctaattctaatcagagaag

SEQ ID NO: 247070 - DNA, 571 bp, Homo sapiens
ctccaccttacagaggctcaatttcccctgatttaggaaggcgatgctaatgggtattgcataggtgtaagtataaaaatgttgtattgaagagaatcccacaagcttggtataaggcagaaaataaattgatgtgacatgaataagtagtttattacatttgtatgctacctgcrgactagaggaagcaagaaacacagccactatgcttgattagcattatagggatggtacaatgattgttgccagaagctggggggaggaagaaatggggaagtattgtttaatgggtatagagtttcagttttacaagatgaaacgaattatggagatggatggtagggatggctgcacaatgttatgactatatttagtaccactgaactgtacacttaaaatggttaaccgagtacattttatgttatgtgtattttaccacaataaaaaaataaaataccttaggaacattttcatgaaaaagcccacataaaattcattttaatgcacgtgtttatgcatagctttctatttttctcttttccctttacattcctaattctaatcagagaag

SEQ ID NO: 247071 - DNA, 571 bp, Homo sapiens
ctccaccttacagaggctcaatttcccctgatttaggaaggcgatgctaatgggtattgcataggtgtaagtataaaaatgttgtattgaagagaatcccacaagcttggtataaggcagaaaataaattgatgtgacatgaataagtagtttattacatttgtatgctacctgcggactagaggaagcaagaaacacagccactatgcttgattagcattatagggatggtacaatgattgttgccagaagctggrgggaggaagaaatggggaagtattgtttaatgggtatagagtttcagttttacaagatgaaacgaattatggagatggatggtagggatggctgcacaatgttatgactatatttagtaccactgaactgtacacttaaaatggttaaccgagtacattttatgttatgtgtattttaccacaataaaaaaataaaataccttaggaacattttcatgaaaaagcccacataaaattcattttaatgcacgtgtttatgcatagctttctatttttctcttttccctttacattcctaattctaatcagagaag

SEQ ID NO: 247072 - DNA, 283 bp, Homo sapiens
gctctccaagaatcccttcagtcctcagggtccctaacgtactggacagagctaggaaagcaaacccatttgcttcttcctgcaggaaacccyttgaggttaagaccccacaatcacatgaggatggagtggctcaccctcagtcaacaggccagactcaaggtggtataatgtcttaaccacgggtgcgggcctccaggtctgactcccaactcagttcttctttaataaccacactttgttaattttccttaacaggggttcctggcaagtcatttctccc

SEQ ID NO: 247073 - DNA, 234 bp, Homo sapiens
cctccaggtctgactcccaactcagttcttctttaataaccacactttgttaattttccttaacaggggttcctggcaagtcatttctccctcaggccttcggtttcctcacctacaagatgagagggctggaccagatggaaattcagggggtaaggggatgtcctcrcgcagcccacccccacccccacgggaccctggagcctccatcccagttcccaccacacacccgct

SEQ ID NO: 247074 - DNA, 631 bp, Homo sapiens
agataggagagagtgtgaacaaatgcaggaaaatgatctcatctaccagagtgtccttaaatattttaacataataaattcagtattgtttttgtttgattgaatgaagctttgcatggacacagtacagyacaaaagtactatttgaactctttctccacattcataaaattgctagtttcttctaccatgattatatttttatgatccatttttgtgtacagatctgaaaactttatactagaatttattagctgaggaaaggaacatccactgacatcatcatatacaaatatttctcaacattttaatgcttgtggtattgttaatgtttctgtggaaaaaaaatcacagaagtgatttctaagtcagttattgatttattctaatgaattataaaaatcagactaaattactaatagagaaattacatttgaaatactagtctgagctacagatgagatggatttttgtgctcatcatttgtactctagctatgtttgttgagattgggttattaaaacataattataacattatcagcagaaaagcctgttgtgctataattaaatcatctaaacaatcatttttgtggtcttaatatcctggatttctcaattcattgtagtag

SEQ ID NO: 247075 - DNA, 483 bp, Homo sapiens
cccaactgaccacttgactgtgtttaacctgataaacagactcttaacaagaacaatattttaaaarctggattgttcctcctacttctcagcatgcatcagccactctctttccccatcctatctcctgccaaatggtctctaaatatctgttccacttggagacactattggatgttgttgtaaatgactttaatgaatattcactctacctgctttcatattaattcagttttcctaggatggtctctatgggatcaagcaaaaggacttagtggaatatctctatctgactccataaagtaaagaatgtggtgagtttaacagagtgccccttcctttactaaatgtgaatgatgtttcagtataggaggccagagtgaaaagtcctaacgtatgtttgtttgggcagccaacaattggtcacattgtacatttcttgttacaaaggagcctcatggtagtataaatgagggtcgggaa

SEQ ID NO: 247076 - DNA, 609 bp, Homo sapiens
ggattgttcctcctacttctcagcatgcatcagccactctctttccccatcctatctcctgccaaatggtctctaaatatctgttccacttggagacactattggatgttgttgtaaatgactttaatgaatattcactctacctgctttcatattaattcagttttcctaggatggtctctatgggatcaagcaaaaggacttagtggaatatctctatctgactccataaagtaaagaatgtggtgagtttaacagagtgccccttcctttactaaatgtgaatgatgtttcagtataggaggccagagtgaaaagtcctaacgtatgtttgtttgggcagccaacaattggtcacattgtacatttcwtgttacaaaggagcctcatggtagtataaatgagggtcgggaaaagacacttaactgctcagggctttaaaatggagccagagcaagaattgtagaagttgacaatatcaggaaggaaacctctgtaagcaggcacgcaggggaactccagaaatctcttctttgcccctacaactctggactttcagaaatacacaccccatcctcctgtattaatacaaaattcatgttcacaaca

SEQ ID NO: 247077 - DNA, 410 bp, Homo sapiens
caaatacaattaataaaatgttttatccattcataggtttttgcagtacaatttttttttttatgattccattgtcttatagtctccactaatagttttggtgtgaatttatactctaaaggaaaggtgacagccttatacaatctcagagcttaagtactatccacatgctagtgcttacaaacatacactttcagttgtgtggtctccctgagttctgcacatccctcttgggtatctaataagcatctcacagttaacaacaccactgatttctaatcaatcccagggaccctccrccaggcctgctcctctctcagagttccttttctcacttagtgacactatcatcccaccaaaccttgctatcatctttcttctgtctcccaaatttccaatccattaacaaa

SEQ ID NO: 247078 - DNA, 410 bp, Homo sapiens
caaatacaattaataaaatgttttatccattcataggtttttgcagtacaatttttttttttatgattccattgtcttatagtctccactaatagttttggtgtgaatttatactctaaaggaaaggtgacagccttatacaatctcagagcttaagtactatccacatgctagtgcttacaaacatacactttcagttgtgtggtctccctgagttctgcacatccctcttgggtatctaataagcatctcacagttaacaacaccactgatttctaatcaatcccagggaccctccaccaggcctgctcctctctcagagttccttttctcacttagtgacactatcatcccaccaaacctygctatcatctttcttctgtctcccaaatttccaatccattaacaaa

SEQ ID NO: 247079 - DNA, 543 bp, Homo sapiens
agcatctcacagttaacaacaccactgatttctaatcaatcccagggaccctccaccaggcctgctcctctctcagagttccttttctcacttagtgacactatcatcccaccaaaccttgctatcatctttcttctgtctcccaaatttccaatccattaacaaatcccaataaccctgcttccaatatttgtctaaatctatgcacttctcagcttatccacttttattattctagttccaattatgtggtcttctgtctgtattactttcttttttcattctttcatgcagggaccatttttcatagtgaartcctcataaaacatagattaaattgtatcagcttctgcttacagtttttatttatttattaaatttgtgatgtatttgtatttatttatttattttgagacagagtcttgctctgtcacccaggctggagtgcagtggcacgatcttggctcactgcaagctctgactcctgggttcaagcgattcttcttcctcagcctcccgagtagctgggattacaggcatgtg

SEQ ID NO: 247080 - DNA, 562 bp, Homo sapiens
catgtattaaaaacagcaatacacattcacttgatgaaaaatattattgaagataagacagaagtatttcataaacaaccattaggtagattataagataacatacgaaaggtgatattgtaaatcaatattagaaacacatattcttcatctatgacctaacttgtattgaaatgctgcaaaaaccttagagcaacattcagagaattacctgaaagataactctggcatcttccatggccttayatgtgttttctttaatggtcacagtgattcccatgttcaaagttattcactgaggacaacgcatgtcctgagattctcatcattgaaaggccgaggctgaggcttgcttttcacatatacagattgtccaacattaaattacagctgcatattgactgcatacaaaaatcattaaactaaatctttccaaaagtcctgatgtaaataatgtgctacaatattttaggtaggattatctgataggattaacaaatttatcaagtataacagaaagtaaccacttattatttattattggctataccaaaaaatatag

SEQ ID NO: 247081 - DNA, 562 bp, Homo sapiens
catgtattaaaaacagcaatacacattcacttgatgaaaaatattattgaagataagacagaagtatttcataaacaaccattaggtagattataagataacatacgaaaggtgatattgtaaatcaatattagaaacacatattcttcatctatgacctaacttgtattgaaatgctgcaaaaaccttagagcaacattcagagaattacctgaaagataactctggcatcttccatggccttatatgtgttttctttaatggtcacagtgattcccatgttcaaagttattcactgaggacaacgcatgtcctgagattctcatcattgaaaggccgaggctgaggcttgcttttcacatatacagattgtccaacattaaattacmgctgcatattgactgcatacaaaaatcattaaactaaatctttccaaaagtcctgatgtaaataatgtgctacaatattttaggtaggattatctgataggattaacaaatttatcaagtataacagaaagtaaccacttattatttattattggctataccaaaaaatatag

SEQ ID NO: 247082 - DNA, 537 bp, Homo sapiens
aaagagttaacatatatctcactttgttaccagttcttgctgaagtatmcgtatgtctgtacccctatggtctgggtcagcttattttaggcagtcccaatcttatgttttaaatattaggctactatatgtgtgtgtgtgtgtatttatatagaatacatatatagactatatatagaattatatatagaatatatagagagaatatgtagagaatacatagagaatatatagagagaatacatagagaatatatatagaatatatagagaataaatatatagaatatatagagaatatatatatatagaatatatatagagaatatataggatacacatagagagaatacatatataggatatatagagtatatatatatattccatatatatatacacacacattatatatatttcctaattaagtccttcaagaaataagtgattaaactttttaataatgatagtatcaattggacatgataaaaaataatattattaataaactctttgatttttaaaataaccttgaacc

SEQ ID NO: 247083 - DNA, 537 bp, Homo sapiens
aaagagttaacatatatctcactttgttaccagttcttgctgaagtatacgtatgtctgtacccctatggtctgggtcagcttattttaggcagtcccaatcttatgttttaaatattaggctactatatrtgtgtgtgtgtgtatttatatagaatacatatatagactatatatagaattatatatagaatatatagagagaatatgtagagaatacatagagaatatatagagagaatacatagagaatatatatagaatatatagagaataaatatatagaatatatagagaatatatatatatagaatatatatagagaatatataggatacacatagagagaatacatatataggatatatagagtatatatatatattccatatatatatacacacacattatatatatttcctaattaagtccttcaagaaataagtgattaaactttttaataatgatagtatcaattggacatgataaaaaataatattattaataaactctttgatttttaaaataaccttgaacc

SEQ ID NO: 247084 - DNA, 537 bp, Homo sapiens
aaagagttaacatatatctcactttgttaccagttcttgctgaagtatacgtatgtctgtacccctatggtctgggtcagcttattttaggcagtcccaatcttatgttttaaatattaggctactatatgtgtgtgtgtgtgtatttatatagaatacatatatagactatatatagaattatatatagaatatatagagagaatatgtagagaatacatagagaatatatagagagaakacatagagaatatatatagaatatatagagaataaatatatagaatatatagagaatatatatatatagaatatatatagagaatatataggatacacatagagagaatacatatataggatatatagagtatatatatatattccatatatatatacacacacattatatatatttcctaattaagtccttcaagaaataagtgattaaactttttaataatgatagtatcaattggacatgataaaaaataatattattaataaactctttgatttttaaaataaccttgaacc

SEQ ID NO: 247085 - DNA, 537 bp, Homo sapiens
aaagagttaacatatatctcactttgttaccagttcttgctgaagtatacgtatgtctgtacccctatggtctgggtcagcttattttaggcagtcccaatcttatgttttaaatattaggctactatatgtgtgtgtgtgtgtatttatatagaatacatatatagactatatatagaattatatatagaatatatagagagaatatgtagagaatacatagagaatatatagagagaatacatagagaatatatatagaatatatagagaataaatatatagaatatatagagaatatatatatatagaatatatatagagaatatataggatacacatagagagaatayatatataggatatatagagtatatatatatattccatatatatatacacacacattatatatatttcctaattaagtccttcaagaaataagtgattaaactttttaataatgatagtatcaattggacatgataaaaaataatattattaataaactctttgatttttaaaataaccttgaacc

SEQ ID NO: 247086 - DNA, 579 bp, Homo sapiens
accatggcacgtgtatacctatgtaacaaaactgcaagttctgcacatgtaacccagagcttaaagtataatttaaataaataaataataaataaataaataaactcatagacctcaaagtatgggaagcctaactgcctayggccacttgctgcttcactctaaaatctgtttctgcatctgcccctcagtcaatgactgagggccacaaggtggctaatgcacatccctctttaggagacacagggcttctctgaggaccagtcttggctcaggattcctgaagccttttcgtacccttccttagactgcacattacgctccaatgcttccactcaaccttcctttcctctttccttcattctaggtcagacttgcctcatagttgagagctcttccaggcttactcagcttcctctccattttctctcacagggatttcccttaataaaatcctcttgtgtataactcgttttcaacatctacctcttggaggacctggactaacccaccatataatatctgtattataattacttccattctacaggttgagaatctgggatctggagaagttaa

SEQ ID NO: 247087 - DNA, 579 bp, Homo sapiens
accatggcacgtgtatacctatgtaacaaaactgcaagttctgcacatgtaacccagagcttaaagtataatttaaataaataaataataaataaataaataaactcatagacctcaaagtatgggaagcctaactgcctatggccacttgctgcttcactctaaaatctgtttctgcatctgcccctcagtcaatgactgagggccacaaggtggctaatgcacatccctctttaggagacacagggcttctctgaggaccagtcttggctcaggattcctgaagccttttcrtacccttccttagactgcacattacgctccaatgcttccactcaaccttcctttcctctttccttcattctaggtcagacttgcctcatagttgagagctcttccaggcttactcagcttcctctccattttctctcacagggatttcccttaataaaatcctcttgtgtataactcgttttcaacatctacctcttggaggacctggactaacccaccatataatatctgtattataattacttccattctacaggttgagaatctgggatctggagaagttaa

SEQ ID NO: 247088 - DNA, 577 bp, Homo sapiens
  misc_feature (1)...(577): n = A,T,C or G
nnnnnnnnnnaattcatgagagtctgctatatgacacagatcagggagagcagaacacttggtaggtgaccaggtcttgggggccgagcccttrtgaatgtgattagtgcctttataaaagaagctcaatggggttcttgtgtgccttccactatgtgaggacatagaaagaaggcaacatctatgaaccatgaaatgggctctcatcaacactgaattggtgagcatcttgacctgagatgttacagcctcaagaaatgtgaaaaaagaaatatctgttgttttttagtcacccggtttatgttattttgttataagagtcctaatagagcaagatattccacttaatatgtaggggaaggcaacaaaaactgccacacttaggatcctcctgatgctgggagtatgaaaacaggaaaaacaaaacaaaactgctcttgaaggtgaaggaggaatatcactgagctcaccaacacagccaggaaaagaacggaagtgtgagaaggctacattcctgagaccctgagaaaaagtacctgcataagactgagatgaaattacctactctagttatgat

SEQ ID NO: 247089 - DNA, 594 bp, Homo sapiens
gacctgagatgttacagcctcaagaaatgtgaaaaaagaaatatctgttgttttttagtcacccrgtttatgttattttgttataagagtcctaatagagcaagatattccacttaatatgtaggggaaggcaacaaaaactgccacacttaggatcctcctgatgctgggagtatgaaaacaggaaaaacaaaacaaaactgctcttgaaggtgaaggaggaatatcactgagctcaccaacacagccaggaaaagaacggaagtgtgagaaggctacattcctgagaccctgagaaaaagtacctgcataagactgagatgaaattacctactctagttatgattgaaatcccaaaaagaaaagagggaaaaataatggagcaaaagaaatatttttcaaaataactgccaaaaatattctaaaagaagtgacagaaaatcaaacttcaaatataggaaactcagagaatgtcaaatagaacaaaaagaaataagaatcgcatcttgaaaaatctttaaaaaatcaagtctaaattttatatcttgctccaaatatatagagatataaagaggttatcatcaagatatggag

SEQ ID NO: 247090 - DNA, 577 bp, Homo sapiens
  misc_feature (1)...(577): n = A,T,C or G
nnnnnnnnnnaattcatgagagtctgctatatgacacagatcagggagagcagaacacttggtaggtgaccaggtcttgggggccgagcccttatgaatgtgattagtgcctttataaaagaagctcaatggggttcttgtgtgccttccactatgtgaggacatagaaagaaggcaacatctatgaaccatgaaatgggctctcatcaacactgaattggtgagcatcttgacctgagatgttacagcctcaagaaatgtgaaaaaagaaatatctgttgttttttagtcacccggtttatgttattttgttataagagtcctaatagascaagatattccacttaatatgtaggggaaggcaacaaaaactgccacacttaggatcctcctgatgctgggagtatgaaaacaggaaaaacaaaacaaaactgctcttgaaggtgaaggaggaatatcactgagctcaccaacacagccaggaaaagaacggaagtgtgagaaggctacattcctgagaccctgagaaaaagtacctgcataagactgagatgaaattacctactctagttatgat

SEQ ID NO: 247091 - DNA, 577 bp, Homo sapiens
  misc_feature (1)...(577): n = A,T,C or G
nnnnnnnnnnaattcatgagagtctgctatatgacacagatcagggagagcagaacacttggtaggtgaccaggtcttgggggccgagcccttatgaatgtgattagtgcctttataaaagaagctcaatggggttcttgtgtgccttccactatgtgaggacatagaaagaaggcaacatctatgaaccatgaaatgggctctcatcaacactgaattggtgagcatcttgacctgagatgttacagcctcaagaaatgtgaaaaaagaaatatctgttgttttttagtcacccggtttatgttattttgttataagagtcctaatagagcaagatattccacttaatatgtaggggaaggcaacaaaaactgccacacttagratcctcctgatgctgggagtatgaaaacaggaaaaacaaaacaaaactgctcttgaaggtgaaggaggaatatcactgagctcaccaacacagccaggaaaagaacggaagtgtgagaaggctacattcctgagaccctgagaaaaagtacctgcataagactgagatgaaattacctactctagttatgat

SEQ ID NO: 247092 - DNA, 577 bp, Homo sapiens
  misc_feature (1)...(577): n = A,T,C or G
nnnnnnnnnnaattcatgagagtctgctatatgacacagatcagggagagcagaacacttggtaggtgaccaggtcttgggggccgagcccttatgaatgtgattagtgcctttataaaagaagctcaatggggttcttgtgtgccttccactatgtgaggacatagaaagaaggcaacatctatgaaccatgaaatgggctctcatcaacactgaattggtgagcatcttgacctgagatgttacagcctcaagaaatgtgaaaaaagaaatatctgttgttttttagtcacccggtttatgttattttgttataagagtcctaatagagcaagatattccacttaatatgtaggggaaggcaacaaaaactgccacacttaggatmctcctgatgctgggagtatgaaaacaggaaaaacaaaacaaaactgctcttgaaggtgaaggaggaatatcactgagctcaccaacacagccaggaaaagaacggaagtgtgagaaggctacattcctgagaccctgagaaaaagtacctgcataagactgagatgaaattacctactctagttatgat

SEQ ID NO: 247093 - DNA, 369 bp, Homo sapiens
tgagctttgccaatttgtaatctccttgtggaaaaacaggggaaaacacatctcagcctaataagatttatctactaaagagtctagacttgatccatttgtccttgtaattcaaaagctaattcaaatactgatttgatgtattgtgtgaacaaccattgctgattatcatcgcatacctggcattctcttgtatctgatatctaaaagatttggtaattcctggactttctcttttcaaacgcagtacggtttaatttgagtcttagaacagttgtctttgagaaattcttccctctactgcmtctgtgaatgggcatagcatggttgcatacatactgtcactccatagaacatttgttaaattaa

SEQ ID NO: 247094 - DNA, 520 bp, Homo sapiens
gacttgatccatttgtccttgtaattcaaaagctaattcaaatactgatttgatgtattgtgtgaacaaccattgctgattatcatcgcatacctggcattctcttgtatctgatatctaaaagatttggtaattcctggactttctcttttcaaacgcagtacggtttaatttgagtcttagaacagttgtctttgagaaattcttccctctactgcctctgtgaatgggcatagcatggttgcatacatactgtcactccatagaacatttgttaaattaaagccaaagtttaaagcaagagctttaacttactggttttactaatggtttcctccccaatagccacaacaatattgataccctcacaccttttaacataaagcttggtgttgtctrtttttcagatgctgtcatctatatgatctcagtattttaaaaatcagcttccagcccatatggtggttcatgcttgtaataccagcagttgaagagcctgaaatgagaggattccttgagc

SEQ ID NO: 247095 - DNA, 303 bp, Homo sapiens
gaaatcacagaagtaggtttattactcacagatccagagagaagagggtagctgagaagagggtttagctgtgtccccagccaaatctcatcttgaattcccacatgttgtgggagggaacagctgggaggtaattgaatcacgagggcaggtctttcccatgctgttcttctgatagtgaataagtctcacaagatctgatgkttttataaaggcgagtttcctgcacaagctctcttgtcttgtctgctgccaggtgagatgtgcctttcagcttgtgccatgattgtgaggcctacccag

SEQ ID NO: 247096 - DNA, 303 bp, Homo sapiens
gaaatcacagaagtaggtttattactcacagatccagagagaagagggtagctgagaagagggtttagctgtgtccccagccaaatctcatcttgaattcccacatgttgtgggagggaacagctgggaggtaattgaatcacgagggcaggtctttcccatgctgttcttctgatagtgaataagtctcacaagatctgatgtttttataaaggsgagtttcctgcacaagctctcttgtcttgtctgctgccaggtgagatgtgcctttcagcttgtgccatgattgtgaggcctacccag

SEQ ID NO: 247097 - DNA, 565 bp, Homo sapiens
aataagttttccacggggcactagtcggtggggtgagtgccagcaggcacacttcttgactcctgctgcaatcgagcaggtcactctggcgtgtgggggctgtccatgtgcactgtgaggtctgtggggtgagtcaggtaggttgtatccaacgsttccatagctggtagtcaccaggaggaggcaactgtgtagggtcaatatctgggccagccacactgaggaactgtgagggttagaactggaaattgtcaagggaatccgaacccagctaccatatgagagagttcaacttatgttcaatgtgaatgccatggcaatattaaaaggtacgaattcgctacatacgtgcttgaggtaaataggagaaacctagaatttatgtaaacagtgagaagattggatgcgttttatgtcacatattttaatactagcagcttattatatatgtcaatccatcaggcattcagaagtatagcttatgaaaattttttgcaccatcagacaaaagacaagggtagaagacatttgtaaccctataaacactagtaaattaaaaacagaa

SEQ ID NO: 247098 - DNA, 565 bp, Homo sapiens
aataagttttccacggggcactagtcggtggggtgagtgccagcaggcacacttcttgactcctgctgcaatcgagcaggtcactctggcgtgtgggggctgtccatgtgcactgtgaggtctgtggggtgagtcaggtaggttgtatccaacgcttccatagctggtagtcaccaggaggaggcaactgtgtagggtcaatatctgggccagccacactgaggaactgtgagggttagaactggaaattgtcaagggaatccgaacccagctaccatatgagagagttcaacttatgttcaatgtgaatgccatggcaatattaaaaggtacgaattcgctacatacgtgcttgaggtaaataggagaaacctagaatttatgtaaacagtgagaagattggatgcgttttatgtcacatattttaatactagcmgcttattatatatgtcaatccatcaggcattcagaagtatagcttatgaaaattttttgcaccatcagacaaaagacaagggtagaagacatttgtaaccctataaacactagtaaattaaaaacagaa

SEQ ID NO: 247099 - DNA, 565 bp, Homo sapiens
aataagttttccacggggcactagtcggtggggtgagtgccagcaggcacacttcttgactcctgctgcaatcgagcaggtcactctggcgtgtgggggctgtccatgtgcactgtgaggtctgtggggtgagtcaggtaggttgtatccaacgcttccatagctggtagtcaccaggaggaggcaactgtgtagggtcaatatctgggccagccacactgaggaactgtgagggttagaactggaaattgtcaagggaatccgaacccagctaccatatgagagagttcaacttatgttcaatgtgaatgccatggcaatattaaaaggtacgaattcgctacatacgtgcttgaggtaaataggagaaacctagaatttatgtaaacagtgagaagattggatgcgttttatgtcacatattttaatactagcagyttattatatatgtcaatccatcaggcattcagaagtatagcttatgaaaattttttgcaccatcagacaaaagacaagggtagaagacatttgtaaccctataaacactagtaaattaaaaacagaa

SEQ ID NO: 247100 - DNA, 569 bp, Homo sapiens
taatattttctttaaaggatgttttatacaactttatgtaaaatgtttcagtatcttcacrttatttccctgtccttttgttttgctcttatatggtgttcttgagtcttttctctggcttttcaaacctggtaagactaagacactaaaggaactttgcccgtggttttgtaatgccttccaaagcacatcttaagctctggtgcatacaggggtctcctttgagctctgtgcttttgagatcccatatacctaaattccagtactccaaatcagtactgctcagttttagtgactaagtttaaaaaggtattttaatagcaagttagtttagtgcactcttgcttctttcttgactgcttgtatacatgtatattcctttaaatgaatcttggaatttatttaaaaattttaaattatactaatgaaactgtacattgttgtgaattcataagtgaatttggaaagaatttgtctttatgatactaaatcttttttacccaagaatcatatgtgtctttatatttattccagtctatatttatatcactgagtaaatatatagaaat

SEQ ID NO: 247101 - DNA, 353 bp, Homo sapiens
gcagttctgtcctgctcctctttgagctgtgtgttcatctaggctgcttgctgttgccacagtagctataaattaaccaataacgccacaccagacactataatccacrccccaaaatagtgtaacagtgtatagccagtcactaataaatgttatttccataagccaatgagaatttgtgacaaacctctttgcatcatcccacttctggacccttttttgcctttaagaaactgcttgttgcaaagctccaaagggagttcatatccaaggatacttgggtctgtttcttccaggcagctgtcctcattgtggctcaagtaaactctttgaattatgttttgtgcttcagc

SEQ ID NO: 247102 - DNA, 353 bp, Homo sapiens
gcagttctgtcctgctcctctttgagctgtgtgttcatctaggctgcttgctgttgccacagtagctataaattaaccaataacgccacaccagacactataatccacaccccaaaatagtgtaacagtgtatagccagtcactaataaatgttatttccataagccaatgagaatttgtgacaaacctctttgcaycatcccacttctggacccttttttgcctttaagaaactgcttgttgcaaagctccaaagggagttcatatccaaggatacttgggtctgtttcttccaggcagctgtcctcattgtggctcaagtaaactctttgaattatgttttgtgcttcagc

SEQ ID NO: 247103 - DNA, 353 bp, Homo sapiens
gcagttctgtcctgctcctctttgagctgtgtgttcatctaggctgcttgctgttgccacagtagctataaattaaccaataacgccacaccagacactataatccacaccccaaaatagtgtaacagtgtatagccagtcactaataaatgttatttccataagccaatgagaatttgtgacaaacctctttgcatcatcccacttctggacccktttttgcctttaagaaactgcttgttgcaaagctccaaagggagttcatatccaaggatacttgggtctgtttcttccaggcagctgtcctcattgtggctcaagtaaactctttgaattatgttttgtgcttcagc

SEQ ID NO: 247104 - DNA, 429 bp, Homo sapiens
ctttaagaaactgcttgttgcaaagctccaaagggagttcatatccaaggatacttkggtctgtttcttccaggcagctgtcctcattgtggctcaagtaaactctttgaattatgttttgtgcttcagccccttccacttagattaacaacatggatttgtgtcaccatatacagcaattaaaatgtttacacttttcccctcgagggcactgatgtgttttcctgagcacttggaatagctacgtagtgtttcctgtctagattatggtttctgaaccttggtgctacttacctttaggaccagaggattctttgttgtgggaggctgccctagcaatgctaggtgtttcatttgacctctaaatttcacacctccaccagtcttgacatgcccacaataaccctagacattgacaaatgtctcctg

SEQ ID NO: 247105 - DNA, 429 bp, Homo sapiens
ctttaagaaactgcttgttgcaaagctccaaagggagttcatatccaaggatacttgggtctgtttcttccaggcagctgtcctcattgtggctcaagtaaactctttgaattatgttttgtgcttcagccccttccacttagattaacaacatggatttgtgtcaccatatacagcaattaaaatgtttacacttttcccctcgagggcactgatgtgttttcctgagcacttggaatagctacrtagtgtttcctgtctagattatggtttctgaaccttggtgctacttacctttaggaccagaggattctttgttgtgggaggctgccctagcaatgctaggtgtttcatttgacctctaaatttcacacctccaccagtcttgacatgcccacaataaccctagacattgacaaatgtctcctg

SEQ ID NO: 247106 - DNA, 429 bp, Homo sapiens
ctttaagaaactgcttgttgcaaagctccaaagggagttcatatccaaggatacttgggtctgtttcttccaggcagctgtcctcattgtggctcaagtaaactctttgaattatgttttgtgcttcagccccttccacttagattaacaacatggatttgtgtcaccatatacagcaattaaaatgtttacacttttcccctcgagggcactgatgtgttttcctgagcacttggaatagctacgtagtgtttcctgtctagattatggtttctgaaccttggtgctacttacctttaggaccagaggattctttgttgtgggaggctgccctagcaatgctaggkgtttcatttgacctctaaatttcacacctccaccagtcttgacatgcccacaataaccctagacattgacaaatgtctcctg

SEQ ID NO: 247107 - DNA, 429 bp, Homo sapiens
ctttaagaaactgcttgttgcaaagctccaaagggagttcatatccaaggatacttgggtctgtttcttccaggcagctgtcctcattgtggctcaagtaaactctttgaattatgttttgtgcttcagccccttccacttagattaacaacatggatttgtgtcaccatatacagcaattaaaatgtttacacttttcccctcgagggcactgatgtgttttcctgagcacttggaatagctacgtagtgtttcctgtctagattatggtttctgaaccttggtgctacttacctttaggaccagaggattctttgttgtgggaggctgccctagcaatgctaggtgtttcatttgacytctaaatttcacacctccaccagtcttgacatgcccacaataaccctagacattgacaaatgtctcctg

SEQ ID NO: 247108 - DNA, 373 bp, Homo sapiens
tctctggctggtcagagctaacgtgtcttcctgtcatgtgatgccagggaaatgttcttcttccaactccctggtagagtcctttgctgagctccttagaatttcatcctatgtacatttggcttagggacttgggagaatccttaggctgattcttggttcctttttctgtaaacgttctcttctactacacattccagctgcttaaccttttttgatttttatstggttcctcagtgcaatgacaatgtctgctgtctctgggattcctctctactgctgtcacggagaatctgggaataaagcaggactcattctggctccttctcttctcttgccgagcacagtcctgtgctgcctgatgttcagtact

SEQ ID NO: 247109 - DNA, 516 bp, Homo sapiens
ctacacattccagctgcttaaccttttttgatttttatctggttcctcagtgcaatgacaatgtctgctstctctgggattcctctctactgctgtcacggagaatctgggaataaagcaggactcattctggctccttctcttctcttgccgagcacagtcctgtgctgcctgatgttcagtacttcaaaaaaatgtttcatatattttgtccagtttactattctttaactctaaaagtgtaactccagtcccagttacagcatcatgttctgtaactctactccttcttgcttcattctgccattgtctggtatgatctcccgtttcccttctgtaatcaggccaagagcataatataatactagttataactgcacaggttgccttcgttgtgtaaaaaaatccctgagacttaactgtgtccaacttttaaaatgtgaatataagtacaactaaagttatattttggttaatatttgcattgcatgcttttccattatttactttcaacat

SEQ ID NO: 247110 - DNA, 516 bp, Homo sapiens
ctacacattccagctgcttaaccttttttgatttttatctggttcctcagtgcaatgacaatgtctgctgtctctgggattcctctctactgctgtcacggagaatctgggaataaagcaggactcattctggctcyttctcttctcttgccgagcacagtcctgtgctgcctgatgttcagtacttcaaaaaaatgtttcatatattttgtccagtttactattctttaactctaaaagtgtaactccagtcccagttacagcatcatgttctgtaactctactccttcttgcttcattctgccattgtctggtatgatctcccgtttcccttctgtaatcaggccaagagcataatataatactagttataactgcacaggttgccttcgttgtgtaaaaaaatccctgagacttaactgtgtccaacttttaaaatgtgaatataagtacaactaaagttatattttggttaatatttgcattgcatgcttttccattatttactttcaacat

SEQ ID NO: 247111 - DNA, 516 bp, Homo sapiens
ctacacattccagctgcttaaccttttttgatttttatctggttcctcagtgcaatgacaatgtctgctgtctctgggattcctctctactgctgtcacggagaatctgggaataaagcaggactcattctggctccttctcttctcttgccgagcacagtcctgtgctgcctgatgttcagtacttcaaaaaawtgtttcatatattttgtccagtttactattctttaactctaaaagtgtaactccagtcccagttacagcatcatgttctgtaactctactccttcttgcttcattctgccattgtctggtatgatctcccgtttcccttctgtaatcaggccaagagcataatataatactagttataactgcacaggttgccttcgttgtgtaaaaaaatccctgagacttaactgtgtccaacttttaaaatgtgaatataagtacaactaaagttatattttggttaatatttgcattgcatgcttttccattatttactttcaacat

SEQ ID NO: 247112 - DNA, 516 bp, Homo sapiens
ctacacattccagctgcttaaccttttttgatttttatctggttcctcagtgcaatgacaatgtctgctgtctctgggattcctctctactgctgtcacggagaatctgggaataaagcaggactcattctggctccttctcttctcttgccgagcacagtcctgtgctgcctgatgttcagtacttcaaaaaaatgtttcatatattttgtccagtttactattctttaactctaaaagtgtaactccagtcccagttacagcatcatgttctgtaactctactccttcttgcttcattctgccattgtctggtatgatctcccrtttcccttctgtaatcaggccaagagcataatataatactagttataactgcacaggttgccttcgttgtgtaaaaaaatccctgagacttaactgtgtccaacttttaaaatgtgaatataagtacaactaaagttatattttggttaatatttgcattgcatgcttttccattatttactttcaacat

SEQ ID NO: 247113 - DNA, 581 bp, Homo sapiens
ggtaaaatgagtgtgtctggcctttgttctactgaaaggaggaaaacgggtcacctggttgggtcagctcatacttctaatgatctcaaagcacttaggcacttcagttaaacatctcactttacagaatcaggcagagagaagagcaagactcctatttaactttattccccatgcctcatcacaagtatgtagcaaatgtttctaaaattatttgagctataatcatataggcttttgccttcatttataaaagaaagacaaaaacccaaaactagatgctttgtcactgtcaccaaggacctaacgaaaaggcacatggtggaaggagggagagtggtaacctaggtttaggtctaaggggactcttgcttgctgtcagcacctggtacaaataccargatagggtttttggggccacattttccatttgagggagttcctactcacctccactgatctgtggaacactgaaatagcaggagtcactaatttgcctgcttttggatgttgctgaattcagcatcgtcttgaaaagttcttgccgaatcatacattcagatgaaagatgttttagatat

SEQ ID NO: 247114 - DNA, 587 bp, Homo sapiens
agacttgtaaggaacaagataatctcattgttcctcctgctacttaaaataaaggtaatattgattttatagtagcagttcaggtcctaaggcatgayattgattaagtgtctgatgagaatttgtagggtagtctcccagacctgcagctacagggcatctccccactgggccaggcctctgtgctgacctccactgttataagtggtgtttttcttaggaatccttagccctgtttagtctacgcactgtccagaagcatttatttaacctgatggatggctcaatccaacccatcaccttaatctgaccttaaagatgggaacctaatgtttttgttcttagtaaatgtgaagactaattttgacactgtttagaattattttcttattagtagcagtagatttcatgaattttctgctgtgaaatttcctattaaaatactataatctaatgttaaatgacgagttaatgggtgcagcacaccagcatggcacatgtatacatatgtaactaacctgcacgttgtgcacatgtaccctaaaacttaaagtataataaaaaaaataaaaaataaataaaatact

SEQ ID NO: 247115 - DNA, 587 bp, Homo sapiens
agacttgtaaggaacaagataatctcattgttcctcctgctacttaaaataaaggtaatattgattttatagtagcagttcaggtcctaaggcatgatattgattaagtgtctgatgagaatttgtagggtagtctcccagacctgcagctacagggcatctccccactgggccaggcctctgtgctgacctccactgttataagtggtgtttttcttaggaatccttagccctgtttagtctacgcactgtccagaagcatttatttaacctgatggatggctcaatccaacccatcaccttaatctgaccttaaagatgggaacctaatgtttttgttcttagtaaatgtgaagactaattttgacactgtttagaattattttcttattagtagcagtagatttcatgaattttctgctgtgaaatttcctattaaaatactataatctaatgttaaatgacgagttaatgggtgcagcacacmagcatggcacatgtatacatatgtaactaacctgcacgttgtgcacatgtaccctaaaacttaaagtataataaaaaaaataaaaaataaataaaatact

SEQ ID NO: 247116 - DNA, 410 bp, Homo sapiens
cgtcagtggaagaaagaatagctttggtctcagaaaaatttggacaaaagctttaccaggtagtgtcatattgaacaagatattatacttctctaagctttagtttctttttttaaaatagttttattgagatctaattcatgtaccatacaattcactcattttaaatatctaattctcctttgagcaaaagctgcaaaacgaagaaaaaagaaagtatataattcaatgtattttagtacgttcagagatgtgcaaccatcaccacaaactaattttagagcattttcatagccttaaaagcagccctgtacccattagcaatcaatctccattaatttttttttctgraaaaaaaaagtgagtgtcagaatgagagtctactatgtaatagtcctgtaataaggaat

SEQ ID NO: 247117 - DNA, 630 bp, Homo sapiens
aaaatgaacactgtaagataaaagacagtaatgcaatgtcactacgattctgaaaaaaaatattatttcctaacaaggttttcatactggaagaacctacatataccaaggtggaataaagatgattgaagacatttaaggtcttaaaaatttacctcctaagcatctttctgaagaaaacattgtaggacatrctccaccaaaataagaaaacagtcaggaaagagcaaggccaggatgcaggaacgtgaggagttcacaaaagagagaagtaaaggaatccgctggattacaatgaagaggtcacagaaagggatccccatgcatcaggcatagaacaccagattggagcagacaagaagactctggaagacagtgctccaagaaaatgaaatggacagaatatctgatggttctgaagctcttaagaggagatgtggtagatagcaagggatttaattagtcataactacatagaaaactatacaaatacacaaaaagcaagactaccattaatgcaagaaaaaagttgaaaagaaaaggataacagatcacaggttttggaaggcattctcatgtatatatatgataactataaaggctgaatagtgatataatcaaaattacagt

SEQ ID NO: 247118 - DNA, 630 bp, Homo sapiens
aaaatgaacactgtaagataaaagacagtaatgcaatgtcactacgattctgaaaaaaaatattatttcctaacaaggttttcatactggaagaacctacatataccaaggtggaataaagatgattgaagacatttaaggtcttaaaaatttacctcctaagcatctttctgaagaaaacattgtaggacatgctccaccaaaataagaaaacagtcaggaaagagcaaggccaggatgcaggaacgtgaggagtycacaaaagagagaagtaaaggaatccgctggattacaatgaagaggtcacagaaagggatccccatgcatcaggcatagaacaccagattggagcagacaagaagactctggaagacagtgctccaagaaaatgaaatggacagaatatctgatggttctgaagctcttaagaggagatgtggtagatagcaagggatttaattagtcataactacatagaaaactatacaaatacacaaaaagcaagactaccattaatgcaagaaaaaagttgaaaagaaaaggataacagatcacaggttttggaaggcattctcatgtatatatatgataactataaaggctgaatagtgatataatcaaaattacagt

SEQ ID NO: 247119 - DNA, 577 bp, Homo sapiens
attcagtgcaaaggccttggggcaggagtgagcttggtttattccaggaagagtaaagtgccagaataggaagaaaagtgtgagggggggtggggagtgggcaggggcaggaaatgaggtgagggaagcagttaggaacccaagcatgtagagctttgtgggtgcatgtcaggtcctaggctgatgggaagctattcaagggctttgagcaagaaagtgtaatgagctgatttatgttttcaaagatcattccggatgctgtgttaaactagaccaggggaaggaggcagaaccagtcaggaggctgttgcaacagagatgatggcagtttyggccacggtgtaagaagcagaggtggtgagaagcagtcagatttttcatacattttagaacagaagggattttctgaagccttcacagaacatgtagtgtttaagtaaagtctttaagagtagatgctcaccagacagaaaagggaagagagtactagtgggcacaaaggcaaggaaggataagaaggcacagcagagtcagggtggaaccaagaactccctatgacgagagtttatgattgggc

SEQ ID NO: 247120 - DNA, 599 bp, Homo sapiens
gagccattggacactttacatttaagatttaaaacaactacttatactttgttctaacaaataatattaagcaaacaaattttaaatgaacagccaattttttaaagaaaaaaggaagacaatttgctctactaattcaacatgtttcacaagcagaaaatgggaaaagccttgaatttggagtcagaagacctggctcagagcactagtttcacctagcaaccaagtggccttgggcaagtcacgatttacctacaagtctcagtttctaaatctctaaaatatggatgacactagtaactccctcacaggcaatggttatggtttcaatagagtaagagcttctttggtgcagtgattctatttcagccaaaattataatcccaacktatggcaaataataggtgctcaacaaatcttcacagaataaatgaaatactttaaaaataaacctgaaagatgagaaagacatcatgcacaacaccatgaggtgacatttgtttctttgcactgtgtagactaaagcagaagggtcgccctctttgtgcttatctttaatatattatccacatcatatgcagactcaagcatgaaaactt

SEQ ID NO: 247121 - DNA, 604 bp, Homo sapiens
cctgtgaaagatacaggtctaaacctctttggaatgggagggttacaaggtatggccagctgttatttattacagttatgaactttgatcactgactacttttaatttaaagtatttcttatactcatacaaaccaaaccatttaagtaactatatagtccttgattggactaaacaaaaagatggagagtttagaacacatatggtattttactacatgcatcagttatcaacagctcatagaaaatgtacagtcccccctctgttctgataaagaattaacataaatcatctttttaaaattcctcacatcagtagaaactacatagagagtatcaagcctccaaactgaattgcctggtttaaattacattcagtrttaaaacatttctttgtgtttaaattttatatgggaggaaaggccgtattttaagtgttttgccttttaagtggaatatctcacatgatagtgacttttttatcgaattaatatggattaaaggttttctttatccttttatcacttagtagttgctgtagagctaaaaagcactttcaaattgagaaagaaaagcactactttaaagaacaatttagaacagag

SEQ ID NO: 247122 - DNA, 479 bp, Homo sapiens
attaagttacagagcacatcttccataaaactttatagtcacttactagtacgtggtttggatggttttcccagcagatatgaacttctacaaggatactgcaagcctgcttaatggaacgaaattttgatggcttgcaattagtctayaaaataaacactttggaatgatttcatataaaatatttaaaacctaaggtattttcaaaataataacaggagaaattgggtcttttctatcaccatgtggatttcttttgcaatttgataaacagactgcaaatcagaaatgaattttaataattattcaattttaaatctattaaaggctttcaacacaaacttaattttaaatatgctggtattctctccaccttgacctaccattgtgacacaaagctatttcaacactttcaaaatgttaatgttgtgactggccttgcatttatctcatctcctagaaattttaattttgcttct

SEQ ID NO: 247123 - DNA, 512 bp, Homo sapiens
ttatctaatcacaaaggaagatagcaagagagaaagaaatagccagaaagaacatacaaaacaaccagaaaacaatgaaaaaaatggcagtggtaagtccttacctaccgataattatcttaaatgtactcaatcaagagatgcagagtagctaaatggattaaaaagcaggtcccaactattatatatgctgcctatgagactcacttcacctttaagtgccaaaatagagcagggatagctaaacataccagataaaattttgacttgttaaaaactgcaagaagggacaaagaaaatcactatataataatgaaggggtcaattttgccagaggatatttaaatttctacacacccaacatcagagcacctaaatgtataaagtaaatgttaatagatctgaaaggagagacaaactgcaataaaatagtaggggacttcttaatactccaygttcaacaataggcaggtcatctggagagaaaattattaaggaaacattggaactga

SEQ ID NO: 247124 - DNA, 599 bp, Homo sapiens
ttatatcacaccacatcacctttctaaaataccaaacattctgaaatgctgaaacacatgtgtttccagggttatggataagggaaagcagtgcttcctttccaaacgtggcttcaagatcagtcctgggcagcccctagccgtcactattctatgtcgtacaagttattacccctctggagaagctaagagctgatcacagtggtgaagacargaaaaccgtaaaatgcagactaaactccaaacaaactaaatcaacacaacaatagcccttctcccatcagcaatgaccaaggtgaccatgtttggtattttctatttaagaaaggagaatgtatgtaatactttttaaaaataattgtcatctttccatcacaaaaatctgtgcttaaagaagtttaacctggcattattggggaaaaccaacagcccaaaagatttcctcagattttttggcaactgacatattctgacttataggtataagaaacatgactacatgtgaaaaaaaacatgccagtcaaatggtcaagatatgacagtctttagcattcatgagaaaacatgattgcttctggctgcaatatgtagagactgat

SEQ ID NO: 247125 - DNA, 590 bp, Homo sapiens
ggggaacatcacacactggggcatgttgtggggtgggggggaggggggaaggaacrcattaggagatatacccaatgtaaatgacgagttaatgggtgcaacacaccaacatgacacatgtatacatatgtaaccaacgtgcacgttgtgcacatatgccctagaacttaaagtataataaacaaaaaaggaaaaaaaaaaaacacagaaaagactaggtgatgccaatctctcctcaaattctctagatcccagctccccttagagactctgattcattgaatatctccttccttttaaactctccctctctactatctcctttccatttgtaatataaagtgttcaagcttgtgatattaaacataaaaagccaaggaatgaacaaatcatgcaccatccctgattacacattttcttccaaccactaccatctccctcctgcccttcacaataacacttcttagaataaatgctggaagcacatttatgtctttctgacgtccaaagaacaagtcttatctccttcaaactctacatgcccttttagttacttctaaattctcttttcttttagccaagtttcttga

SEQ ID NO: 247126 - DNA, 590 bp, Homo sapiens
ggggaacatcacacactggggcatgttgtggggtgggggggaggggggaaggaacacattaggagatatacccaatgtaaatgacgagttaatgggtgcaacacaccaacatgacacatgtatacatatgtaaccaacgtgcacgttgtgcacatatgccctagaacttaaagtataataaacaaaaaaggaaaaaaaaaaaacacagaaaagactaggtgatgccaatctctcctcaaattctctagatcccagctccccttagagactctgattcattgaatatctccttccttttaaactctccctctctactatctcctttccatttgtaatataaagtgttcaagcttgtgatattaaacataaaaagccaaggaatgaacaaatcatgcaccatccctgattacacattttcttccaaccactaccatctccctcctgcccttcacaataacacttcttagaataaatgctggaagcacatttatgtctttctgacrtccaaagaacaagtcttatctccttcaaactctacatgcccttttagttacttctaaattctcttttcttttagccaagtttcttga

SEQ ID NO: 247127 - DNA, 585 bp, Homo sapiens
ctgatgcaaggagcagctctgcttctgtgccgctgcctgtatagaccctgcagctgctttcatgggctgacattgagtgcctgcagcttttccaggtacacagggcaagttggtggatctaccaatctggggtctggaggatggtggcccttttctcacagttctactaggcagtgcccagtagggactctgtgcaggggctcaaacctgacacttttcctccacattgcccaagtagaggttctccacaagggcaccgtccctatagcaaacttctgcctggacatccaggcatttctatacattctctgaaatctaggttgaggtccccaacctcaactcttcccttctgtgcacctgcaggcccaacaccatgtggaagccaccaaggcttgggtttstaccctctgaagcaatggcctgagctgtacttggccccttttaggcacagttggagttggagcagctgtgatgcagggtgtcatgtcccaaggctgcacagagcagtggggccctgggcctagtccatgaaatcatttttacctcctagatatccaagcctgtgatggaaggggctaccacaaa

SEQ ID NO: 247128 - DNA, 622 bp, Homo sapiens
tatgttaacattttgtttcaacatttccccaagatagattacttccttggttccagaaacctcatctttctcacctgccactcagacaagcctcagtgaatgctggttcagaggatactgtacagactggagaatcatgcatggaaggtaaaactcactgcaaatactccagagtgagttacagtccattactggataaatctagaacccaaccagggctattcatctttcccacacgtaagtgactagaccctgctccaatgatactggcattacctctagacagttctctaacatgatttgcaataataataggacctcgttgactatgtgtacacttatttacttccttcttagcttctaacccaaggactcctttttgtttttttttattaaaagtatgactcacrcttgggacttaatagaaagcaccagatctttgccttttatcttttattgctctcccggactgtgacttgaattcattctttgaatgattcaatctatcaccataggaaggttcttacatatcactctcttgccctgggactaggacttacattctctggatgttaagctcagtgtatgagttttctagggccaccataacaaagtaccacag

SEQ ID NO: 247129 - DNA, 622 bp, Homo sapiens
tatgttaacattttgtttcaacatttccccaagatagattacttccttggttccagaaacctcatctttctcacctgccactcagacaagcctcagtgaatgctggttcagaggatactgtacagactggagaatcatgcatggaaggtaaaactcactgcaaatactccagagtgagttacagtccattactggataaatctagaacccaaccagggctattcatctttcccacacgtaagtgactagaccctgctccaatgatactggcattacctctagacagttctctaacatgatttgcaataataataggacctcgttgactatgtgtacacttatttacttccttcttagcttctaacccaaggactcctttttgtttttttttattaaaagtatgactcacgcttgggacttaatagaaagcaccagatctttgccttttatcttttattgctctcccrgactgtgacttgaattcattctttgaatgattcaatctatcaccataggaaggttcttacatatcactctcttgccctgggactaggacttacattctctggatgttaagctcagtgtatgagttttctagggccaccataacaaagtaccacag

SEQ ID NO: 247130 - DNA, 561 bp, Homo sapiens
cgttcctttccctactaaattcagtcttttgagatcagaataaagttgctgtcaccttctgtagagaaagagttacactgagccctcccaggatttcagctgagggtgattctacctaatcacttatctaagataaagttcatgagacagaagaatcaaccttcagactcattttgagctcctactgcctatgaaggagatctttaatagttgttaaaactttcagatttaataccatcagactctttcagactaactttgagattgctcacagttaaatggtagagaagtaatgatcataatctgttttgctgacttggtggcttcagaaagtcaatggaatctgaaccctttataggaaaccaaattattactaggttgttttgcaaccacttcaatatgaaagtaaaaaggttagaaacctgtgatgtgttgttttgagttttacttcccacacagaactgaaaaaccaagaacatggaataagataaaaatccacatccccaagggtatattactatttttkgatgtgtttaggaattctattcttaagtgcccagc

SEQ ID NO: 247131 - DNA, 561 bp, Homo sapiens
cagcataaatctggtcttcagacctgtttttgttgcatctctgtgtgtgcaaacacacatacattcacataaattcacacacactcacatacgttcatataaatccattaaaagtagtttggaaaagcataaaatgatggagaaacttgtccagattaaaatataccaaaaagatataaaaatcaagtgtaatacataactcttggttggaytctggtttgcacaaaaaaagttgataagataattttggtacaactggagaaatttcaatatgggcaattaaatgttatgaaattattatttttcataggggatgccaatagtattatggttaaactagagaatgttcgtattcttaggaggtgcatgctgagatctgtgagaatgaattgtcatttgcacaacttgtattcaagtggcttaggaaataatttatatacacacgtaatgtggcaacacattaacaatttggtgtaaatctagatgaaagggatatagatgtgtgctgtgttattgtttaagcttttctgtagattttaatttttaaaaatgataaaatat

SEQ ID NO: 247132 - DNA, 591 bp, Homo sapiens
tcattctctgcagtgttaagagagtgactataaaagaagaaaccaggggagaaatcagccattgtccagacttaaataaaatgacagtggaaactagtaactcacctgaactgtgtccatttccagaattagttgaaactctaaactcctttaagtctgaccaaggcgggtgagttgggggtacatcctttgatattcacttttgacatttatgtctgccttaacttagggatatgatttgacttactgtatgaaagtcaaataatgattaatagctacctttattgtgggattaacatattccaggcaaggtgcagagaatttatatagattgtctagtttaatcctcataatattgctaargtgatgattatgcccattttatatataagggcaatcaggtttagagaggtaaagtgagctgcctaaaaggcagaagaggtcctgaaacttcagtctgtataatagtccagatccacttcgttaaatacacccagtgattctaaaagctggcttcacaagagaataacctgagggtaattttacaaaatgctgacagccaggcccgtgtggttcaattaaatcacagta

SEQ ID NO: 247133 - DNA, 535 bp, Homo sapiens
gagcttatccagaataccaaaacaaagattaaggagcatagatggaaagatgattaagcctaaaggaaagccgagagggtatcagggtgaggcttcatgtttgtttacttctttcctccaacagctaggctttaaaccacttctccttgtcacatggtcacacgtgaaaacctctttgtgtgtgagaacatgctgggtatttctgcacatgccagtgtgcctttttggccacctgacttgctcatggagacttatgtgtaagtggatcactctaaagggggcatcaccaagtttgattcaacatatgcaaatcagtaagtgtgattcgctacacaaatagaactaaaaacaaaaccacatgttcatttcaatggatgcagaaaaggtttctaataaaattcatcatccctycatgttaaaaaccttcaacaaactatgcattgaaggaacatacttcaaaataataagcggcttctatggccagcccacagccaacgtcatactaaatgggcaaaagctggaagaattccttttg

SEQ ID NO: 247134 - DNA, 535 bp, Homo sapiens
gagcttatccagaataccaaaacaaagattaaggagcatagatggaaagatgattaagcctaaaggaaagccgagagggtatcagggtgaggcttcatgtttgtttacttctttcctccaacagctaggctttaaaccacttctccttgtcacatggtcacacgtgaaaacctctttgtgtgtgagaacatgctgggtatttctgcacatgccagtgtgcctttttggccacctgacttgctcatggagacttatgtgtaagtggatcactctaaagggggcatcaccaagtttgattcaacatatgcaaatcagtaagtgtgattcgctacacaaatagaactaaaaacaaaaccacatgttcatttcaatggatgcagaaaaggtttctaataaaattcatcatccctccatgttaaaaaccttcaacaaactatgcattgaaggaacatacttcaaaataataagcggcwtctatggccagcccacagccaacgtcatactaaatgggcaaaagctggaagaattccttttg

SEQ ID NO: 247135 - DNA, 472 bp, Homo sapiens
tgtttgcaaactatgcacctgacaaaggtctaayatcaagaatctacaaggaatttaaacaacttaacaagccaaaatcaatgccattaaaaagtgggcaaaggacatgaacaggcacttctaaaaagaagacattcatgcagccaacaagcatatgaaaaaatgctcaacaatactaagcatcagagaaatgaaatcaagaccgcaatgagataccatctcacaccagtcaaaatgtctgttattaaaaagtcaaaaaataacagatgctggcaagattgagaagaaaagggaacatttacacagtgctggtggatatgtaaattagttcagccaatgtggaaagcaatgtggcaatttctcaaagaacttaaaacagaagtatcattcgattcagcaattccattattgggtatatacccaagggaatataaatcattctaccacaaagacacatgcatgtgtatgttta

SEQ ID NO: 247136 - DNA, 472 bp, Homo sapiens
tgtttgcaaactatgcacctgacaaaggtctaatatcaagaatctacaaggaatttaaacaacttaacaagccaaaatcaatgccattaaaaagtgggcaaaggacatgaacaggcacttctaaaaagaagacattcatgcagccaacaagcatatgaaaaaatgctcaacaatactaagcatcagagaaatgaaatcaagaccgcaatgagataccatctcacaccagtcaaaatgtctgttattaaaaagtcaaaaaataacagatgctggcaagattgagaagaaaagggaacatttacacagtgctggtggatrtgtaaattagttcagccaatgtggaaagcaatgtggcaatttctcaaagaacttaaaacagaagtatcattcgattcagcaattccattattgggtatatacccaagggaatataaatcattctaccacaaagacacatgcatgtgtatgttta

SEQ ID NO: 247137 - DNA, 528 bp, Homo sapiens
tactaacaacacaaaaattagctgggcatggtggcacgcacctgcagtcccagctacttgggaggctgaggcaggagaatcgcttgaaccrgggaggtggaagctgcagtgagttgagactgtgccattgcactccagcctgggcaacagagccagactctgtctcacaataaatagataaataaataaataaataatacaagttattaaccttattttttaatagaatcttattataacctttgctgataggattattagactggtgattcagagaaatataaatacatgggatcttgatttcaatgggggcatttggccaagtttcctatgagatctttgagactataagagagaatggtgggcagattcatggtgcaatcaaggaggctcacagctagatgaggggaatgcatcttagaaggagcctttgtgaactggtccaaattcacccacgcaacagcagcatccacctgcccctgatcttgagccggtaaaaaccagaccctctgatgttgtggggccttc

SEQ ID NO: 247138 - DNA, 489 bp, Homo sapiens
tttaaaaatggcctttggtttgtckacatttgtattaatgtatcggtaatttataatttatacccagctacttccacagaatgtatgaagcaggtaacctgtttattcatgatttggataaaggcagagggagcttcttataaaaggatgacatcaatccccgagtgacagaatttggatgtaaaatagaccttggcaagccaaatcaaacaagatgaagtgcaacagtgacaaccaccaggtccagcacttcagtccaaaccacagccccccaacaaaaaaaaacccatctatataataacagggtggagaatttgctttgaaatagcatgtgtgttcaagatttaaagcttagatgataatgtcaatcagaagttcaatgtgattgtcaaaaaaaagcaatgcaacctctcttaggctacaactgtaaacatagaatattcagaatgaagaaaaatgttttcctggtatgttctacgtgggacagat

SEQ ID NO: 247139 - DNA, 489 bp, Homo sapiens
tttaaaaatggcctttggtttgtcgacatttgtattaatgtatcggtaatttataatttatacccagctacttccacagaatgtatgaagcaggtaacctgtttattcatgatttggataaaggcagagggagctkcttataaaaggatgacatcaatccccgagtgacagaatttggatgtaaaatagaccttggcaagccaaatcaaacaagatgaagtgcaacagtgacaaccaccaggtccagcacttcagtccaaaccacagccccccaacaaaaaaaaacccatctatataataacagggtggagaatttgctttgaaatagcatgtgtgttcaagatttaaagcttagatgataatgtcaatcagaagttcaatgtgattgtcaaaaaaaagcaatgcaacctctcttaggctacaactgtaaacatagaatattcagaatgaagaaaaatgttttcctggtatgttctacgtgggacagat

SEQ ID NO: 247140 - DNA, 489 bp, Homo sapiens
tttaaaaatggcctttggtttgtcgacatttgtattaatgtatcggtaatttataatttatacccagctacttccacagaatgtatgaagcaggtaacctgtttattcatgatttggataaaggcagagggagcttcttataaaaggatgacatcaatccccgagtgacagaatttggatgtaaaatagaccttggcaagccaaatcaaacaagatgaagtgcaacagtgacaaccaccaggtccagcacttcagtccaaaccacagccccccaacaaaaaaaaacccatctatataataacagggtggagaatttgctttgaaatagcatgtgtgttcaagatttaaagcttagatgataatrtcaatcagaagttcaatgtgattgtcaaaaaaaagcaatgcaacctctcttaggctacaactgtaaacatagaatattcagaatgaagaaaaatgttttcctggtatgttctacgtgggacagat

SEQ ID NO: 247141 - DNA, 446 bp, Homo sapiens
gtgagaatgatctcatttaattctcacagccttgtgaggtagatgttattgtttccatcttacagaagccatgcagcttgtaaagatggagctagaatttttaacccagtctttctgactctagagtcaaatcactgtgctagtgtagatggagaaaggagattctggggctcaaaaaacaatgcctcctaatgagggtcccaacagcagcttcagaagcaaaaccttttctgtcaccttctcctgccttcatccctctcagtcccattctccccccaggctagccatagaaactagaatttctcttccccaacatgggacatagaagccagaatccctttttcctaaagccagtcataaaacctaaaaaatcactctaactttccctccaccttatctatgtraaaaccagccataaagaaattatctgacctaacttgtttgat

SEQ ID NO: 247142 - DNA, 575 bp, Homo sapiens
atctcccatgatcatgtattggaaggtgtaatattattaagatggcaataccactcaaactgatctatagattgaacaaaatctctattgaaatcctagctggctttttttgcaaaaatgtaaaagctgattctaaaatccatatgcaaatgcaagtaacccagaataaccaaacaatctttaagaaacaaggacaaagttggagaacacacccttctcagtttcaaacctactacaaagttacaataccaagacagtttggtaatagcataagactaaatatagcataagtctagatatataaataaatggaatagcattaagagtccataaataaacccttagtttctggtaaactgatttaccagcacaccaggaaaatgcaatggaaaaatgaatattcttttcaagaaatgatgcctggacaactggatatacacatgcaaaagtatgaagttcagtccctccctcacatcacatacagtcatgtgccacagaataatggtgcagtcaacaacagaccatatatgcaatggtggtcacataacattataayggagttgaaaaattcctat

SEQ ID NO: 247143 - DNA, 510 bp, Homo sapiens
aatttcctgacagagagctagagtcaaagcataacacagtggctgcactgtgctgaggaggcagaggtcatagtttgtggcagctaaaaaggctagaatctgcagggtggattatcagagacacatgtgcaaagagggccccrtgagtccaagatgaggtcctctatgaattcatggctgagggctgagttatacatgctcagggaaagacttccaagattttctagacagcacccattacagtgttaaaggtaaaacgcagttactagaggttgagcactggtggggaaagagaagtgctggagctgattggagttccagtcctgccagagtagaacagccttctttaaatgttaaaacatctgtggcatcaatctgagattccagaaatgcccctctgtaggagtaagatctgtaccccaaaataagacctactatagtctcaccctaataaagactacattcaaactacaacaaaatcctcaagggaacagtttaaagattgagtct

SEQ ID NO: 247144 - DNA, 660 bp, Homo sapiens
tctcaggattgttagggttggaacgaaggtttgagaggtggcacaagcaaagtacctagtaaggtgtctagcacacagtaagctctcctatataatatttatcattatcaatttttactggatttgagtagtgtaaaatatgcttaggttaaacaagtagactgaatctaattcaatctttcctcaatggttcagagagcactaaagtgcttcagcagatcatttgagacatggtgtctccagttcattagccagagtggcagatagcagggtgccctgggtgtctgagctcaaacccccgcttccacaatggaaggtggagagaaaaaaactagctcatgttttggccacatggcagtcttccaaactgaattgttatttgggttaggattacaagattagtagagaggagcacacagtcaatgaaataatacattttgactccagaaaagagactgatacagcagcrcatgaaatttcaaatgggcaagactgtaaaactcatcacagaggctaaagtctgactaaaggcaaatgaataattatcaacgataatgtacacaggcagaggaatgcctggtggggagcctgtggcacccgtggtaagtccggttttatttaacatcttagttaatgatctggaaaagagacaaacaaaaa

SEQ ID NO: 247145 - DNA, 662 bp, Homo sapiens
caagcaaacctcagctaggtaagagagttattagagaaatctcagaagattctggttgctacagagacgtctcaaacagagtttccaatctttccaactcctaggccctcccacatcctccagaccctctgagatcaaaggcagaaactttcctctccctcttcctgcctcttctctccagggytgctacaggtttccaggacccttaatctgaacacgcaaccagagggaccacagggcctcctggaatcctttaagtgtgaaagctgccgtggcattcggcaatcagctcaaagccaccgacataaggtgcttcaactgtgagggactctatggcctcatgatcaatataacatctacactgccattagcctctacaggagggtgtcaggtaccatgtggtggacatagcatcgttaacaaacgatttcatttacatacatgttctagtattacagaggaagatcacaaaccacgatgccaagaagttgcattcaatatagtgtatattgatgggccatgagacagagatggatacagcctaaagggaatcagcaaaatactcacttttagatatgtaccaggctgtactgtgtttgcagtacagaagcctgcaagaaccaaaccaatcaaatttatgtttattatgaactttatgcacg

SEQ ID NO: 247146 - DNA, 662 bp, Homo sapiens
caagcaaacctcagctaggtaagagagttattagagaaatctcagaagattctggttgctacagagacgtctcaaacagagtttccaatctttccaactcctaggccctcccacatcctccagaccctctgagatcaaaggcagaaactttcctctccctcttcctgcctcttctctccagggttgctacaggtttccaggacccttaatctgaacackcaaccagagggaccacagggcctcctggaatcctttaagtgtgaaagctgccgtggcattcggcaatcagctcaaagccaccgacataaggtgcttcaactgtgagggactctatggcctcatgatcaatataacatctacactgccattagcctctacaggagggtgtcaggtaccatgtggtggacatagcatcgttaacaaacgatttcatttacatacatgttctagtattacagaggaagatcacaaaccacgatgccaagaagttgcattcaatatagtgtatattgatgggccatgagacagagatggatacagcctaaagggaatcagcaaaatactcacttttagatatgtaccaggctgtactgtgtttgcagtacagaagcctgcaagaaccaaaccaatcaaatttatgtttattatgaactttatgcacg

SEQ ID NO: 247147 - DNA, 597 bp, Homo sapiens
agatcacaatgaacaatgaagaaataaacaaaaggagtgctgagatgcctcagattcctgcacgacagtaaatgccctttgctctctgagcctactctcatgcctctgactcatgctttgggcacaattccttaaaaagrgtttccacttcaagcttatggagaaaaataagttttaggtaaaatattactttggtaaagcagttcaaccaagggccagaattttaatacctccagaatccctatcagaaataaattcaacatggaatgacaggcctagccacctacaacatagaaaaaagctaagtttgaccagggaagagaaaaatgaaggacaaaatctccaatccagaagtggtgcttctagagataaaaatttcttacacctcccactcccttgtgaacattccaagaagagcaaggccaagagagagtagtgatatggcctgccagataaaatacaggacacccaattgaatttgaacttcaatgataaatatcaaatatttttagtataagtatgcaaatattacaatatttgaaacatacttctactaaaaaattattgtttatttgaaattcaaatttaattgagtgt

SEQ ID NO: 247148 - DNA, 593 bp, Homo sapiens
ggtcattggcattccagttctgtagggctgcataacaaaccaccccaaaacttggtagcataaaataacaaccagtgtattacgctcacaaattctgagggttaggagtttgggtagggcacagctgtgattgtttgattcatttccatgacttttggagcctcagttgagaagacccaagcatctgggaagtgactccagggatgcatgctagaatcatctgaaacktctcaacttacatggctgacacctgggctcagccaggaccactgaccagagtacctacacatgacctgtctgtgtggcttctcacagcatggcagcagggatgtccaaaggacaaatgaaccgagggaaccagatagacgctgcatggccttttctgacctggcctcagaagtcacgtagagccatgctcttcatactcaattagtcaatgcaattatgaagctgcccagatacaaggggagggggctggactctccacaccatgatgtgcagtaatgaccaggtcacattgcagaggagaatgtgggatgggagagattgttgtagttacctttggaaaataatctacaccaatttgcttattc

SEQ ID NO: 247149 - DNA, 512 bp, Homo sapiens
gactgtcagcattattgttctattatcctgtgccacacacakagaccacatgcattattgtccctaaattgcacacatttaatgcatttaagattttggggcctactatatttggtaggtaagtcactgcacaaacatatccatccacacacaagtctaatatgcacaggtgtgtggggggtgtgtggatttggatacatatccaatacactaatctcgaatccaaagtacaaactgctatggcatctgtgtgaccagactacggcccctagaaggtgggaggattagttaagaatgtcggccattttcacagagaacaattagctatgggaaaaagaatgagcgtcctcacctgagcttcaggcttctgagactctcttctcccttcctgtaaccatgtagtgcttttattcagccattgtttttaagtcccccctcttaaaaagaaacaagatctgatttcctaagaaattctatgtggttgaagccctgagtgggtctatataaagatt

SEQ ID NO: 247150 - DNA, 588 bp, Homo sapiens
ccctcctctccttgtccatctgtatgtatgaaagcattgcacatggagctgcctttctcacccatacctcttttctattttgaagtcaaattaagagttcatcctcctacttggagtggaagcagatggagaatgagttcaggtgtctctaaggtgagcacacaccagataacctcagtcatttgtagacgtggtgagaacatggttcaaagtgggatcccaccctctcactctgattacaccatggttacaaagtagcatttcagcagtaaaactcaaaagaatgaaacctagagaagggggatagtgaatttggattacatctatcctttctggacaatgaagaactatcatctactgtcatgttgagcgacaaagatctttcacctcttccccacatccctttggtattttggattatcaaagaattgttgttttaaaatgccagaaaaaaaawttgtgtgtgtgttggggtggtggtaatacttttaggaaaaataatgatgctaatgattctgctacatgtttttggagatctttatcccaacctgatccctgcatttagacgccttcagagttcagggacat

SEQ ID NO: 247151 - DNA, 588 bp, Homo sapiens
ccctcctctccttgtccatctgtatgtatgaaagcattgcacatggagctgcctttctcacccatacctcttttctattttgaagtcaaattaagagttcatcctcctacttggagtggaagcagatggagaatgagttcaggtgtctctaaggtgagcacacaccagataacctcagtcatttgtagacgtggtgagaacatggttcaaagtgggatcccaccctctcactctgattacaccatggttacaaagtagcatttcagcagtaaaactcaaaagaatgaaacctagagaagggggatagtgaatttggattacatctatcctttctggacaatgaagaactatcatctactgtcatgttgagcgacaaagatctttcacctcttccccacatccctttggtattttggattatcaaagaattgttgttttaaaatgccagaaaaaaaaattgtgtgtgtgttggggtggtgrtaatacttttaggaaaaataatgatgctaatgattctgctacatgtttttggagatctttatcccaacctgatccctgcatttagacgccttcagagttcagggacat

SEQ ID NO: 247152 - DNA, 522 bp, Homo sapiens
tccaaaaagatccacttgagggactcgaagagatagataaaakgaggaatccctaccccaggtgaggaaaaaataaaatagaatttgccctaccttggtttgtagaagccaaacctctagacggacagattaagggagtgagcatgttgggaatgtccagtcccttcttctcgcttgcatatccacataagaaagacgaaggataaatgaacggaagataatttaaaatccaatttagcgtaaattttgttttaatcttgtgtcttgaagagatgcaaattcaaaaaaaaaaagatttaattcaaaggtaattcagggtatggagagcagctcacaatgcagaatccagagtaattattccgtgtgcatgtgaggttagtggctggaatagatttttaacgcttcttctggcaattacggtttttggtttttggagcgttagtggaggaggctctgtgtggagaagctgggggccggctccgtccctcggtggagcatggtcattcccaaagcgtccccttc

SEQ ID NO: 247153 - DNA, 599 bp, Homo sapiens
ggttccatatgagttttaggatggctttttttctaattctgtgaagaatgatgccggtattttgacgggaatttggcagtatggtcattttcacatggattgattctacccatctatgagcatgaggtgtgtttccatttatttgtgtcatctgtgatttctttcagcagtgttttgtagttttccttgtagaggtctttcacccccttgcttaggtatattcctaaggttttgtttttgtttctgtttttttgcagctwttgttaaaggcgttgagttcttgatttgattctcagcttggtggtttttagtgtatagaagagctactgacttttgtacattaatcctgtatccagaaacgttgctgaattcatagatgactttcatttcattgaggtatttcccttatatgccgattttgctgagagtttaatcataaagtgatgctggattttgtcgaatgctttttctttgtctattgagacgatcatgtgatttttgtttttaattctgtttatgtggtgtatcacattaattgacttgcatatgttaaaccatccctgcacccctggtatgaaacccacttgatcatggtgaat

SEQ ID NO: 247154 - DNA, 599 bp, Homo sapiens
ggttccatatgagttttaggatggctttttttctaattctgtgaagaatgatgccggtattttgacgggaatttggcagtatggtcattttcacatggattgattctacccatctatgagcatgaggtgtgtttccatttatttgtgtcatctgtgatttctttcagcagtgttttgtagttttccttgtagaggtctttcacccccttgcttaggtatattcctaaggttttgtttttgtttctgtttttttgcagcttttgttaaaggsgttgagttcttgatttgattctcagcttggtggtttttagtgtatagaagagctactgacttttgtacattaatcctgtatccagaaacgttgctgaattcatagatgactttcatttcattgaggtatttcccttatatgccgattttgctgagagtttaatcataaagtgatgctggattttgtcgaatgctttttctttgtctattgagacgatcatgtgatttttgtttttaattctgtttatgtggtgtatcacattaattgacttgcatatgttaaaccatccctgcacccctggtatgaaacccacttgatcatggtgaat

SEQ ID NO: 247155 - DNA, 483 bp, Homo sapiens
tattcaacttttatcttgctttttatatcttccacaaaggaaaatgatcttcaaactgcaaagggtaaggcaaacatggtttaagataaaactgaaaccctatatgggaaaagaaatagttaaaaagtagtcagtcacttaaacatacacatcaggtactgtcccaggacaatgacaataacttaacaacaatggctagtgtttactgasttcttaagagatgccaggcattgtgctaaatacttaataagcattaactaatttagtccccacaacaatattatgtagtatgtattatgatttttcccattttatggatgaataactaaaatattaagaaacatgttcaaattcccagttagtaagtatagagctaggtcctgaattcagtgtgtctagcacataagtcttgcttttatagatacttaaataacctgaagatttgttcaagaatcattatcaataatccttaagaaattatgc

SEQ ID NO: 247156 - DNA, 391 bp, Homo sapiens
tccaatccctgcaatatctgaattccaaaatatcctgctatatcacgataagggtacttaattctaaatgtattttaatttatctttaacatattatatttatgattactgtaggccagtggtttgggttgtaaacttaagacacagcttctgtcttctgagaattaataatctacttggaaamtacctacttattttcataatatttatttataaataaatagaaatataaatacattaaataggataaaatatactaggcattgttaagcacatacacaccaaaacctctcttggttataatctataagaacaaaatagatgtaggttttagtagtttcaaatataccttcttatcctattgcacttactatttgagtttcttattata

SEQ ID NO: 247157 - DNA, 512 bp, Homo sapiens
aatattccaatccctgcaatatctgaattccaaaatatcctgctatatcacgataagggtacttaattctaaatgtattttaatttatctttaacatattatatttatgattactgtaggccagtggtttgggttgtaaacttaagacacagcttctgtcttctgagaattaataatctacttggaaaatacctacttattttcataatatttatttataaataaatagaaatataaatacattaaataggataaaatatactaggcattgttaagcacatacacaccaaaacctctcttggttataatctataagaacaaaatagatgtaggttttagtagtttcaaatataccttcttatcctattgcacttactatttgagtttcttattatatcaatrtgttactttttaataaattaatcaccctcttttagaggcagaagaattaaggtgattattatacttaacatacggcaatacgggatccatttcatggatcagaattgcgg

SEQ ID NO: 247158 - DNA, 467 bp, Homo sapiens
gctactagtcagttttgagctaatcaaaagagaatattcgaatggttgcaatctaatcacaggggcccttcaaaatgagagcctctttctccggctggtgttggaagagaagttcaagagatttgaaggagagaatgcctcattgcaccactggtggcttgaatatagggggtatgtgagaaggactagaaagtgactttttttattaattgctattaagagaacacacttagatatcgttttctaaaataaatcagccaaataatacatgacaatgtgaacatcttgtgtcatgggatatttcttccttggcctcactatrttttcctgcgtaagtcatttataacccatgctacttgacatagtaatttatttactttgaattaatggtctcaattcttcagattatttactcacctcatatgacctcattctttgctaagaatgtcctcgtattttgttcattc

SEQ ID NO: 247159 - DNA, 563 bp, Homo sapiens
gggattcctgggcccaaagacatgrcacacaagtagcagagcctcccgatctgaaggcggggacactaagaatttctgtggtcacaggaataggctggtggccaatgaccagatggtcatccctgatgctcaggctctaatgcccaaatcctttgcactattcaggggtaggatcccacaggcagcctcagcaatggccaatattgaatttctagacagcccggtggataggggctctgcaacagatttacattagtttaaagaaaacatagaatgtgatatttcttgttgcttacagaatgaatttacacctgcaagagttatgtcaggatgtatataaagtttaggaaagaataaaacaaaatagaaactaagcccatatttatacaataagccaaccagggcatctaaaactgcacagaagcaggacagagtttaaattaaaaggtcttggagtacaaaacaatttatttgaatgtaaaaggcaaaagtgagtcaggtctcttgacctattccaacaatacactaatcttttccataaatgataataactgtagttctac

SEQ ID NO: 247160 - DNA, 631 bp, Homo sapiens
ctgtgtgaccttttgtattcctgagacagaatggggagtgaaatctccctgtttttccattaacacaaattaaggacattttcagaaaaattttctggcaggtagctaagttctagaaggatcactggaagaaaaaagaggtctggcattgagaaaaataagaggaaccagaaaagaggcagattccagagaaaaagcacaagaacataattagttcagtttagggtaatacgagcacttgaaagtcctctccacccctactcccaccccawccccagccaagtaatgtgctttttctaagccctgacttctgaaccactaaaaaaataaaacagtaaagcaaataggaaattaaaacatccccattatttaaaataagattgatattatagaacacagtgtatacctgcaggccagtggattcgctcaggttgagccccgaattagactgctgcttgtcctccccaccctgggaggactgggtgccctttacctcccatggtagtgcaaggactttcccactaagcctcctgaagttcaagaggaaccaagaccacattctctccaagagcagctcgccaatcagggagttttctcctctccaaagtggagagggaatacaaagaggctg

SEQ ID NO: 247161 - DNA, 631 bp, Homo sapiens
ctgtgtgaccttttgtattcctgagacagaatggggagtgaaatctccctgtttttccattaacacaaattaaggacattttcagaaaaattttctggcaggtagctaagttctagaaggatcactggaagaaaaaagaggtctggcattgagaaaaataagaggaaccagaaaagaggcagattccagagaaaaagcacaagaacataattagttcagtttagggtaatacgagcacttgaaagtcctctccacccctactcccaccccaaccccagccaagtaatgtgctttttctaagcccygacttctgaaccactaaaaaaataaaacagtaaagcaaataggaaattaaaacatccccattatttaaaataagattgatattatagaacacagtgtatacctgcaggccagtggattcgctcaggttgagccccgaattagactgctgcttgtcctccccaccctgggaggactgggtgccctttacctcccatggtagtgcaaggactttcccactaagcctcctgaagttcaagaggaaccaagaccacattctctccaagagcagctcgccaatcagggagttttctcctctccaaagtggagagggaatacaaagaggctg

SEQ ID NO: 247162 - DNA, 631 bp, Homo sapiens
ctgtgtgaccttttgtattcctgagacagaatggggagtgaaatctccctgtttttccattaacacaaattaaggacattttcagaaaaattttctggcaggtagctaagttctagaaggatcactggaagaaaaaagaggtctggcattgagaaaaataagaggaaccagaaaagaggcagattccagagaaaaagcacaagaacataattagttcagtttagggtaatacgagcacttgaaagtcctctccacccctactcccaccccaaccccagccaagtaatgtgctttttctaagccctgacttctgaaccactaaaaaaataaaacagtaaagcaaataggaaattaaaacatccccattatttaaaataagrttgatattatagaacacagtgtatacctgcaggccagtggattcgctcaggttgagccccgaattagactgctgcttgtcctccccaccctgggaggactgggtgccctttacctcccatggtagtgcaaggactttcccactaagcctcctgaagttcaagaggaaccaagaccacattctctccaagagcagctcgccaatcagggagttttctcctctccaaagtggagagggaatacaaagaggctg

SEQ ID NO: 247163 - DNA, 631 bp, Homo sapiens
ctgtgtgaccttttgtattcctgagacagaatggggagtgaaatctccctgtttttccattaacacaaattaaggacattttcagaaaaattttctggcaggtagctaagttctagaaggatcactggaagaaaaaagaggtctggcattgagaaaaataagaggaaccagaaaagaggcagattccagagaaaaagcacaagaacataattagttcagtttagggtaatacgagcacttgaaagtcctctccacccctactcccaccccaaccccagccaagtaatgtgctttttctaagccctgacttctgaaccactaaaaaaataaaacagtaaagcaaataggaaattaaaacatccccattatttaaaataagattgayattatagaacacagtgtatacctgcaggccagtggattcgctcaggttgagccccgaattagactgctgcttgtcctccccaccctgggaggactgggtgccctttacctcccatggtagtgcaaggactttcccactaagcctcctgaagttcaagaggaaccaagaccacattctctccaagagcagctcgccaatcagggagttttctcctctccaaagtggagagggaatacaaagaggctg

SEQ ID NO: 247164 - DNA, 605 bp, Homo sapiens
gacttctgaaccactaaaaaaataaaacagtaaagcaaataggaaattaaaacatccccattatttaaaataagattgatattatagaacacagtgtatacctgcaggccagtggattcgctcaggttgagccccgaattagactgctgcttgtcctccccaccctgggaggactgggtgccctttacctcccatggtagtgcaaggactttcccactaagcctcctgaagttcaagaggaaccaagaccacatkctctccaagagcagctcgccaatcagggagttttctcctctccaaagtggagagggaatacaaagaggctgaaagtgttgtactaatgcacatgacttcccatagaagaaaacatcaggagtgaagaagatgtgttctctcccaatggacatgttgaacataaggtcctaaagacaagccagtggagccatcccacaagtgactgtagagggatgagggggtgttcaggagtgaggtctgggctgggatatgccctggttattggcagcggacacatagtgatggaaaccaagaactgagatgcacttcctcagaaaggggatgtagaatgtgaggaaagggggagtggg

SEQ ID NO: 247165 - DNA, 599 bp, Homo sapiens
ctgggccatgtagaaatagatgacaatagaattttcttaggtatatagaaaagaatgagcaagaccataaaaaaaaacagcaagtagttcacgtagtcaggcaaatcgagccatctgcagctcatatttgaaaccccacaaagtcaagcatagaaattaaccacaacctttattgtttattataaaaggttcttttttctcagcttgagttaagactccatatctggttcacaagtatcaatttatgaacaaatagacaagagtggtataaaatgtactaattcaaacatgcttagcacatacagaattgactcatggtaacrtattaaaagttagttaaatctagtcattagaataatgaaaagtgtgaaacaatataataataaatttgttctttaactcatgataaattcacataaagcttccaatcacgtgcttacgaaataacctttaggtatcatgttggactatggtcaacaactagaatatacaagaaatacactctatgtcatagttaattttgcatatcatttaaataatcaaaaaaacattaatatggggtaaagcaacttttagctatgaaaggataagacaactgt

SEQ ID NO: 247166 - DNA, 599 bp, Homo sapiens
ctgggccatgtagaaatagatgacaatagaattttcttaggtatatagaaaagaatgagcaagaccataaaaaaaaacagcaagtagttcacgtagtcaggcaaatcgagccatctgcagctcatatttgaaaccccacaaagtcaagcatagaaattaaccacaacctttattgtttattataaaaggttcttttttctcagcttgagttaagactccatatctggttcacaagtatcaatttatgaacaaatagacaagagtggtataaaatgtactaattcaaacatgcttagcacatacagaattgactcatggtaacgtattaaaagttagttaaatctagtcattagaataatgaaaagtgtgaaacaatataataataaatttgttctttaactcrtgataaattcacataaagcttccaatcacgtgcttacgaaataacctttaggtatcatgttggactatggtcaacaactagaatatacaagaaatacactctatgtcatagttaattttgcatatcatttaaataatcaaaaaaacattaatatggggtaaagcaacttttagctatgaaaggataagacaactgt

SEQ ID NO: 247167 - DNA, 624 bp, Homo sapiens
ctgtgcccaggaatcctggaagagtatagtttccttccagctgcaagatgttaggaaagaatttatggatattacatttgagtagcactttgaatgggtagatctgggccatgtagaaatagatgacaatagaattttcttaggtatatagaaaagaatgagcaagaccataaaaaaaaacagcaagtagttcacgtagtcaggcaaatcgagccatctgcagctcatatttgaaaccccacaaagtcaagcatagaaattaaccacaacctttattgtttattataaaaggttcttttttctcagcttgagttaagactccatatctggttcacaagtatcaatttatgaacaaatagacaagagtggtataaaatgtactaattcaaacatgcttagcacatacagaattgactcatggtaacgtattaaaagttagttaaatctagtcattagaataatgaaaagtgtgaaacaatataataataaatttgttctttaactcatgataaattcacataaagcttccaatcaygtgcttacgaaataacctttaggtatcatgttggactatggtcaacaactagaatatacaagaaatacactctatgtcatagttaattt

SEQ ID NO: 247168 - DNA, 569 bp, Homo sapiens
tctcgctgtgttgcccaagttgaccttgaactcctgggctcaagtgatccttctacctcagcctccgagtagctgggactacaagcatgcaccattgtgcccagcttgagttcagtttttgtttgtttgtttgtttttttgagatagagtcttgctctgttgcccgggctggagtgcagtggcacgatctcagttcaatgcaaccttgcctcccaagttcagtgattctcctgcctcagcctcctacgtakctgggattactggcacatgccaccatgcctgtctaatttttgtatttttagtagagattgggtttcgccatgttggccaggctgacctcaaatgacctacccacctcatcctcccagagtgctgggattattataggcgtgagccaccacgcccggcctagttttcgtttaaacaaatttgtttcgtaatcgagtagtattcaacataaaaataggttgctgtgatattatgtttcattttaatattttaaaattttgaatgttattgttagtttccctaagcctcttaggaaaacatggtagaccagggggaatatt

SEQ ID NO: 247169 - DNA, 569 bp, Homo sapiens
tccttccacatcattctctgtgctcccataaacatgtacaaatacacgagtttatttatgtgaacatagagaaagttccactataaatatatgtatcctttgcttcttccttcttcacaggatcttgtgacttttagatgacagtcatcacttaaaatagatgatgtgcttttactaacccaaagggagtgaggccctgactgccccagttttagggtgggaagggtgagacagctgagagagcctggggcctgaagcttttgaatcaagatggttctaggtaaaaatgtctccatgtctggcccaagaccagcatcatggcagtcccaccctcaagggcttgagcttgtctttggaaaatggccctgcagatgtagttattcagcagtcctggtgatctcctccatcagcaggtgggtgaagatataattctgataatttcttttgctcctgattaaaggagttgggtgcaggtcagagtctcctttcatctgcctgcyagcctcatccctcacatctcccctgcctcctgccagcttcatccagaggtctgcatatttaatgcaggg

SEQ ID NO: 247170 - DNA, 424 bp, Homo sapiens
gtgtgctaactccagagggcctgcttayatatgaaatggttttgctggagtgttctagctttgaaaacttgctctcttggccctttttaataagtgctcattgctctctaaatattcccccatccccatgctgacatgagtaattgaagctctcagggaatgggaccagctctgagaaggagaagagcgttctcagactcgattgcagacagtgggctgccattccttagagtctctcagaaaacctgtctttagcgcacatggtctcactctttaaattatcactctcatgcatgatgctgagatgatttagcttcacttcaagtttagaatggaaaatcatacttgttatggagatgtatttcctgttatgaaaaggaactggatggctggaggtagatggtggtgatggttgcacaaaagt

SEQ ID NO: 247171 - DNA, 571 bp, Homo sapiens
acaattaacaaaactgtagacacaacatcaacaaacctaaaaataattatgtgtcatgaatgaaaccagaaaaaagaataaatacttcatgatctcatttawaagaaaattctagataaggcacaaactaagctacagttaatatgtagtttccaggggattcgttatcagtagtgcagagagaagaggattataacagacatgaggtaatgtgttgggtgatagatatgttcattatcatagctatagagatggtttgaaatatatgtacatgaaaaatgtatcaaactgtatacttgcaacatgagttttattgcatgtcaattatactgcaataaggcgtttaaaaaagggttctacataaaaatacaaatccacttattttagaaaaccagaagttttggcaaccgtatgctgattctgccatctccagcctgattccttgggagaggttaaccttccacagtggtggcaaaagtcagcaggcaatgaaggctatttccacctgagtcaccagaaagaatggctaggtcataagccacatggctggactctatctacctccctgtaa

SEQ ID NO: 247172 - DNA, 571 bp, Homo sapiens
acaattaacaaaactgtagacacaacatcaacaaacctaaaaataattatgtgtcatgaatgaaaccagaaaaaagaataaatacttcatgatctcatttataagaaaattctagataaggcacaaactaagctacagttaatatgtagtttccaggggattcgttatcagtagtgcagagagaagaggattataacagacatgaggtaatgtgttgggtgatagatatgttcattatcatagctatagagatggtttgaaatatatgtacatgaaaaatgtatcaaactgtatacttgcaacatgagttttattgcatgtcaattatactgcaataargcgtttaaaaaagggttctacataaaaatacaaatccacttattttagaaaaccagaagttttggcaaccgtatgctgattctgccatctccagcctgattccttgggagaggttaaccttccacagtggtggcaaaagtcagcaggcaatgaaggctatttccacctgagtcaccagaaagaatggctaggtcataagccacatggctggactctatctacctccctgtaa

SEQ ID NO: 247173 - DNA, 612 bp, Homo sapiens
acctgccttgggagacctgacccgacttgcttagaagttacctcctcaacctctattccatgcccacactcctctgcaaatggttttagctagtccttggatgttggtgacattaggtgtctccagtctcaggaaaaacaaactgcaacagaggcactggtgtcagggatgtttaagggtatgtatacctcacataacacattaaatgcaggccaacagtgaagagtaatgcccagatggggtcgtgcctgtaccgtcaggcacccaggactcctggacctgctccacttaggcaactccgtgggatctgaaagatgcaagtcttcgggkggaaagacagtgctggagaatagccatcccctgcccagggcagccctgcaaggccacaattacaaagttctcgtgcatcacatggcagtgcaggagtctctgagcctcatcaaggagtctccactcctcctcctccttcacccccacaatctgttctccactctgaattctgggaggttctgttatgttaataaatgagttagatcacttccctcatctttggatttggggcttcccaaatccaaagccccacaactcagaatagaggcccaaatgctcacc

SEQ ID NO: 247174 - DNA, 612 bp, Homo sapiens
acctgccttgggagacctgacccgacttgcttagaagttacctcctcaacctctattccatgcccacactcctctgcaaatggttttagctagtccttggatgttggtgacattaggtgtctccagtctcaggaaaaacaaactgcaacagaggcactggtgtcagggatgtttaagggtatgtatacctcacataacacattaaatgcaggccaacagtgaagagtaatgcccagatggggtcgtgcctgtaccgtcaggcacccaggactcctggacctgctccacttaggcaactccgtgggatctgaaagatgcaagtcttcggggggaaagacagtgctggagaatagccatcccctgcccagggcarccctgcaaggccacaattacaaagttctcgtgcatcacatggcagtgcaggagtctctgagcctcatcaaggagtctccactcctcctcctccttcacccccacaatctgttctccactctgaattctgggaggttctgttatgttaataaatgagttagatcacttccctcatctttggatttggggcttcccaaatccaaagccccacaactcagaatagaggcccaaatgctcacc

SEQ ID NO: 247175 - DNA, 612 bp, Homo sapiens
acctgccttgggagacctgacccgacttgcttagaagttacctcctcaacctctattccatgcccacactcctctgcaaatggttttagctagtccttggatgttggtgacattaggtgtctccagtctcaggaaaaacaaactgcaacagaggcactggtgtcagggatgtttaagggtatgtatacctcacataacacattaaatgcaggccaacagtgaagagtaatgcccagatggggtcgtgcctgtaccgtcaggcacccaggactcctggacctgctccacttaggcaactccgtgggatctgaaagatgcaagtcttcggggggaaagacagtgctggagaatagccatcccctgcccagggcagccctgcaaggccacaattacaaagttctcrtgcatcacatggcagtgcaggagtctctgagcctcatcaaggagtctccactcctcctcctccttcacccccacaatctgttctccactctgaattctgggaggttctgttatgttaataaatgagttagatcacttccctcatctttggatttggggcttcccaaatccaaagccccacaactcagaatagaggcccaaatgctcacc

SEQ ID NO: 247176 - DNA, 612 bp, Homo sapiens
acctgccttgggagacctgacccgacttgcttagaagttacctcctcaacctctattccatgcccacactcctctgcaaatggttttagctagtccttggatgttggtgacattaggtgtctccagtctcaggaaaaacaaactgcaacagaggcactggtgtcagggatgtttaagggtatgtatacctcacataacacattaaatgcaggccaacagtgaagagtaatgcccagatggggtcgtgcctgtaccgtcaggcacccaggactcctggacctgctccacttaggcaactccgtgggatctgaaagatgcaagtcttcggggggaaagacagtgctggagaatagccatcccctgcccagggcagccctgcaaggccacaattacaaagttctcgtgcatcacatggcagtgcaggagtctctgagcctcatcaaggagtctccactcctcctcctccttcacccccacaatctgttctccactctgarttctgggaggttctgttatgttaataaatgagttagatcacttccctcatctttggatttggggcttcccaaatccaaagccccacaactcagaatagaggcccaaatgctcacc

SEQ ID NO: 247177 - DNA, 519 bp, Homo sapiens
ctttaaattacttctctctttctcttttcaaaggtctccttgcatgtccaagtttggggccttattcagggttctctgtattggctacatgctaatgcaggccagagaaacggggagggtttttttctgttccctttggcagaaagagccatttccatttagaatttgagctcaaaagaagacttaaaatgtagctttgaggaaataggaattaatagaaaatcatgggtgtaatctgtagaagatggcctgggttgctatgatatgtggtaagaatagaggtactatgtgtaactaattgaatatattgtgctttgtttagaaggttaagttttaacatggcgtttttcaaacttgggttttaaasttttagtggggctgctgggagggagggagtactgctaagtacttgggacttctgtcctatttccacttcagccagaacaatcagtcctattttcatttcagccagaacaaatttgttttacataagctttcattgaagaaaaggttccatgg

SEQ ID NO: 247178 - DNA, 550 bp, Homo sapiens
ctgggcacatgcccgttccctgctcttgccaactcaaaccctacctcacccacccactgatcagaacagagttgggcagtcccagccaggaggttmtttttcctattgcatgctttagggaatgattttcaaactggataagtttctattacgataaaattaaaaaagagaaattcacttaagactgtattatgcatggaacatagaaagaaaacaaaactggatttttgtaatcagcatgaaattaagatctaaaagacaaggaagaggtgaggactaagaagaatatagtactattatgactacaagtttacaaaaatattatcaagtcatattatactgctattattcactggagtaatttaccattgacttcaaagtgcagatctgttggtagaatgaaaagggcaagataaagggcagacctgattcatttaggtgagattgagactaaaatttacagaggtgagaaaattgtctttaagaagatactgaccgactgtgttgtgatggtagaggttgcttttttatacaaaatattttcaagaaa

SEQ ID NO: 247179 - DNA, 550 bp, Homo sapiens
ctgggcacatgcccgttccctgctcttgccaactcaaaccctacctcacccacccactgatcagaacagagttgggcagtcccagccaggaggttctttttcctattgcatgctttagggaatgattttcaaactggataagtttctattacgataaaattaaaaaagagaaattcacttaagactgtattatgcatggaacatagaaagaaaacaaaactggatttttgtaatcagcatgaaattaagatctaaaagacaaggaagargtgaggactaagaagaatatagtactattatgactacaagtttacaaaaatattatcaagtcatattatactgctattattcactggagtaatttaccattgacttcaaagtgcagatctgttggtagaatgaaaagggcaagataaagggcagacctgattcatttaggtgagattgagactaaaatttacagaggtgagaaaattgtctttaagaagatactgaccgactgtgttgtgatggtagaggttgcttttttatacaaaatattttcaagaaa

SEQ ID NO: 247180 - DNA, 627 bp, Homo sapiens
atcttatcattatgtaatgttcctctttgaccaattgaatgtctttgatcctaaatttcatkttatctgatactaacatcaccactactactttatttttcttccatccctttattttctacgctttttactgtttaactataagtatatgcttgtatataagatattttgttttataaatttactttgaccatcttttctcttggtattataactgatattctcaattttattcctaccaattttattttatgctttttctttattagagtttttattactttcccttctttttcttttttctcatttttttgttagttgaacaagtggctgctattgaactaatggaagaattacacaagaaaattaactgaaaaaggaaaaaaaaactcttgaggagatacagttagagcatttaaaaagtttctgggagtaaaagaaactgtgcaaatttaaatatttaaaatacattgactactgaaaggtggattggttatgtggaaaatcgaattagtggtttggaagatgaaggaaccagaacagctcacaacacaggagaaaaatgtaaagacccacaatatcccataattctttcctgcataccacttaggaatatgcctttcctcc

SEQ ID NO: 247181 - DNA, 627 bp, Homo sapiens
atcttatcattatgtaatgttcctctttgaccaattgaatgtctttgatcctaaatttcattttatctgatactaacatcaccactactactttatttttcttccatccctttattttctacgctttttactgtttaactataagtatatgcttgtatataagayattttgttttataaatttactttgaccatcttttctcttggtattataactgatattctcaattttattcctaccaattttattttatgctttttctttattagagtttttattactttcccttctttttcttttttctcatttttttgttagttgaacaagtggctgctattgaactaatggaagaattacacaagaaaattaactgaaaaaggaaaaaaaaactcttgaggagatacagttagagcatttaaaaagtttctgggagtaaaagaaactgtgcaaatttaaatatttaaaatacattgactactgaaaggtggattggttatgtggaaaatcgaattagtggtttggaagatgaaggaaccagaacagctcacaacacaggagaaaaatgtaaagacccacaatatcccataattctttcctgcataccacttaggaatatgcctttcctcc

SEQ ID NO: 247182 - DNA, 628 bp, Homo sapiens
tttcttagactgtctcataatcagtggcttctcccagccccacccccaggctggaggtatggatgtatggatattacctggattcctagacagaggctaatggtttagctggaaggrcagggactttgaaagaataagattaccaggcatggtggcttacgcctgcaatgccagcactttaggaggccgaggcgggcacatcacatgaggccaggagtttgagaccagcctggccaagatggcaaaaccccatctctattaaaaatacaaaaatgggccaggtgtggtggtgcatgtctgtaattccagctactcctggggctgaggcacaagaattgcttgaacctgggaggtggggttgtagtgagctgagatcgcaccactgcactccagcctgggcaacagagaatccatctcaataaataaataaataaaatatgtaggaaagatgacagggccataaaaacctaagccattcttgaagaagaacaagaggggaagatttgccctagtagatatgaaaataaaggctgccctaccagctatcaagacaaagctacagtaataaaaaaaatagtatggtattggtgcaagagtagactgatgaaatagaagaaaaagcccagaa

SEQ ID NO: 247183 - DNA, 560 bp, Homo sapiens
aggttttgaggtgatttgttatacagcaataggtaactgaaacacagaaattcttctcctaggtgtacactctaaaaaaactccctcccatgggcacaatgacacaggcatatatatttttactgaagcatcgactgtgatcgcaaaaattagaaacaagcaaatgtccatcaataggaacatgggtaaataaattgtggaattgtcatgtgatggaatactatgtagctcttaaaattaattaatcagagctacatagtcagcaagtgtagagctcaataacaaaatattgcatgaaaaaatgagagtgcacatgataccttttatgaaaamgttaaactcatgcaaaacaatgccatgtgttgtttatgggtgcacgcatacatttaaagtacaaacgtgcagaatgagaaacaacaaattcaggataccagtctcctgtggagcgggcaggaggatgggggtgaatgacactagggagggcttatggagagctttaagtgtgtctgtgaggttatgttccttctatttaagatatgaaataaatatggtaaagtgcc

SEQ ID NO: 247184 - DNA, 588 bp, Homo sapiens
gtcttgctataagtgcaaataaaaatctaactggacattattgcattggctgttgttgttctggtagatgttccacttgcctgtgaaascgggaaccctcattgggtgagaaacctcacagtaatatgacttatagtcatggaaatatatagggaaaatgtatacataataaagttatattgatatatgtgtatgtgtatatatagacagagatatagtcaattctcgttattcacagattccatattttcaaatttgcctacctgctagaatttatttacaaccctcgaatcgatgcttgcggcactttcacagtcattcgtggacatgtgaagagaggcaaaatatttgagtcacgcgccacagacattaccagctgagtttgaacaaggtgacaccatcttctcatctcagctttcatactgcaagcaagtgaccttttcacagtcaatttagtgacacgatttctgcatttttgtgccttttgctggtgacccccaagcctggtgctgaagtgctgtctagcattcctgagcacaggaagacactgacgttccttacaaagaaaaatgcatgagtgagatctgc

SEQ ID NO: 247185 - DNA, 372 bp, Homo sapiens
agttttattttatatatatatataccacttacccgatttgaaattggagagatgttccttgggctggttggtctgaggacctgaggtggtaggyggatctccccacggagtgagggcaaggacaggggactggtctcccaaaggagtcctcctatcccaggtcttcggcaccaaatgtcacacgcgtccgtgtgaagagtccaccaaacaggctttgtgtgagcaacaaggctgtttatttcacctgggtgcaggtgggctgagtccgaaaaagaagtcagcaaaggatggtgggattatcattagttcttataggtttgggataggtgtacaaagtacattctcaagggcagggagaatattacaaagtac

SEQ ID NO: 247186 - DNA, 372 bp, Homo sapiens
agttttattttatatatatatataccacttacccgatttgaaattggagagatgttccttgggctggttggtctgaggacctgaggtggtaggcggatctccccacggagtgagggyaaggacaggggactggtctcccaaaggagtcctcctatcccaggtcttcggcaccaaatgtcacacgcgtccgtgtgaagagtccaccaaacaggctttgtgtgagcaacaaggctgtttatttcacctgggtgcaggtgggctgagtccgaaaaagaagtcagcaaaggatggtgggattatcattagttcttataggtttgggataggtgtacaaagtacattctcaagggcagggagaatattacaaagtac

SEQ ID NO: 247187 - DNA, 372 bp, Homo sapiens
agttttattttatatatatatataccacttacccgatttgaaattggagagatgttccttgggctggttggtctgaggacctgaggtggtaggcggatctccccacggagtgagggcraggacaggggactggtctcccaaaggagtcctcctatcccaggtcttcggcaccaaatgtcacacgcgtccgtgtgaagagtccaccaaacaggctttgtgtgagcaacaaggctgtttatttcacctgggtgcaggtgggctgagtccgaaaaagaagtcagcaaaggatggtgggattatcattagttcttataggtttgggataggtgtacaaagtacattctcaagggcagggagaatattacaaagtac

SEQ ID NO: 247188 - DNA, 589 bp, Homo sapiens
ataatatcctattccaaatcctgaatccctcagcgattaaggaggtaaatgtgaaacacaaattgaggtctgtaagaagatatagatacacatatggccacagaaaaaattttaagttgtgtaaagctttttgattcctcttccactcagtgaactattgagtgtgggggatggggagttgggaacaactattgtgtcccctcagcagctctcacaccctgagtgtcatggagttggcatcttgttgagctgagtgtgattctaacattaaaagacagatcacagctgggtkcagtggctcacacctttaatcccagtactttaggaggctgaggtgggtggatcacctgaggtcaggcactcaagactagcctgaccaatatgatgaaactctgtggggataggaccccaaatctggccataaactggcaccaaaactggccgtaaacaaaatctctgcagcactgtgacatgttcgtgatgaccacgatgcctacgctgaaggttgtgggtttaccagaatgagggcaaggaacacctggcccacccagggcagaaaaccacttaaggcattcctaagccacaaata

SEQ ID NO: 247189 - DNA, 617 bp, Homo sapiens
tggaaaaattattgtccctctcacgaaggcacaaatacagcaagcttttataaatagtcttacttggcaaacacatttagctgactttgtgggtattctcaataatcattttcctaaaacaaaatttttatttcaatttttgaaattaactaattggattctccctaaaataactaaatttaaacaaattgaaggtgctgagaatatttttacagatgggtctagtaatggtaaagcttcttattctgggtcaaaatgtaaagttttccagacaccctatacctcagttcaaaaagtggagcttgtagctgtaattgaggtgttgactgcttttgatatgcctattaatgtgatttctgattcttcatacatggttcattccacacaattaattgaaaatgctcggttatgatttcatacagatgaacaactgatgactttatttacccaattgcaaacagcagttaggaatggaatgcacctgttttacatcacttacattagggctcatacacctcttccaggacctttaactgcrgggaatcaaatggctgatcacctagttgctattacaataactaatgctagacactttcacaatttaacccatgttaatg

SEQ ID NO: 247190 - DNA, 517 bp, Homo sapiens
gggcagctggcagaggaggtggtgcctgcccccagcggtgctcagtcatgggttcatggtgctagagaatttctgtgtagggtaatgggttggtttggagaaagattctttgattccgatcaccctagggagtccatatccagtctctggaatatcctcccttccagtctttatctggatactgagttatgggtgggggtgaggatggtggttatgggtgggttggacttgcagattagccaagtgcagaccaaaatagccaaccattaactcggcaggaccagcctcctgaggactgaagtttccaggaaggtcctgggtagaatgtgacccagcctcccatctctgagacatttcctgagaaaccayttgctctcccaatcaaacctgctcccattattaataatctgaagctctttaataggaggcagcctgaggctgtgggcagagaatcagcttcagagtcaaagcggtggatgtaagtttgagttttgccatttattagctgtatgaactt

SEQ ID NO: 247191 - DNA, 590 bp, Homo sapiens
ggaaaggaaagatcccttattgtggtcaagtaacaaagaacagaagtcataaatagaaagcagtgaagtcggtggggcttggcgaactgcaaaatccctgcctgtttccccagattccaccttcagccaatgctgctagaaaatctgttcattctgggcctctccctgagttagaatccactgactccccatcacctggctttcctaccctctgttctgacagcaacctcctccccacaggacactggaatccctgctgtggatctcctgggcccagcaycacaagaagctcttaccacgggaacacacagtccctgtgccaagcatattcatgcaagagctgaaaagaaaacagccaagctcttcctgacccgacttttcctgcagggatgctgtggactgaggaagagtctccctaccctagctcaagcaaaaagccctgggactttcaaagaatcttagtgacagaaggaattttgaggtttcactgaagcttctcattttccaggtaatgccagtgacttgccccaagccacgctgccggtctgggtgagaactctggtctgtggtttccagctcatgctccatcc

SEQ ID NO: 247192 - DNA, 590 bp, Homo sapiens
ggaaaggaaagatcccttattgtggtcaagtaacaaagaacagaagtcataaatagaaagcagtgaagtcggtggggcttggcgaactgcaaaatccctgcctgtttccccagattccaccttcagccaatgctgctagaaaatctgttcattctgggcctctccctgagttagaatccactgactccccatcacctggctttcctaccctctgttctgacagcaacctcctccccacaggacactggaatccctgctgtggatctcctgggcccagcatcacaagaagctcttaccacgggaacacacagtccctgtgccaagcatattcatgcaagagctgaaaagaaaacagccaagctcttcctgacccgacttttcctgsagggatgctgtggactgaggaagagtctccctaccctagctcaagcaaaaagccctgggactttcaaagaatcttagtgacagaaggaattttgaggtttcactgaagcttctcattttccaggtaatgccagtgacttgccccaagccacgctgccggtctgggtgagaactctggtctgtggtttccagctcatgctccatcc

SEQ ID NO: 247193 - DNA, 568 bp, Homo sapiens
ctgctatatctgttaaaaattaattgtatttgttcatttggattttatctcttatgttttagagagccagcataaacacacagaacttttattctcatcaatgtcctctttttttttttttttctttttktaagagatgaagtcttgctttgtcaccctggctggagtacagtgcacaaccatagttcactgaagtcttggacttctgggctcaagtgatccttctacctcagcctcttgaggagctgggactataggtgtgaggcaccacacccagctaaagtgagaccccatcttttttctttaaaagtaccactccaggggctcccaggagcaagatctagggttgcacacaaggccccactctgcactcattcctcgcctcagcctcccaagtagctgggattacagatgggagccacggagcccagcgtcaatgtcctttataagtcagcattacaagttattgattgatatcattcataatctcttggtcagaacttgccacatcagtactggcaattaggataacttcctatatgaatgaggctattccatgccttctttt

SEQ ID NO: 247194 - DNA, 568 bp, Homo sapiens
ctgctatatctgttaaaaattaattgtatttgttcatttggattttatctcttatgttttagagagccagcataaacacacagaacttttattctcatcaatgtcctctttttttttttttttctttttgtaagagatgaagtcttgctttgtcaccctggctggagtacagtgcacaaccatagttcactgaagtcttggacttctgggctcaagtgatccttctacctcagcctcttgaggagctgggactataggtgtgaggcaccacacccagctaaagtgagaccccatcttttttctttaaaagtaccactccaggggctcccaggagcaagatctagggttgcacacaaggccccactctgcactcattcctcgcctcagcctcccaagtagctgggattacagatgggagccackgagcccagcgtcaatgtcctttataagtcagcattacaagttattgattgatatcattcataatctcttggtcagaacttgccacatcagtactggcaattaggataacttcctatatgaatgaggctattccatgccttctttt

SEQ ID NO: 247195 - DNA, 321 bp, Homo sapiens
ttggcccaacccgggtacatatccccttctccctctctgatttaaagcagatcaaggtagacctggggaagttttcagatgatcctgataggtacatagatgtcctacagggtctagggsaaaccttcaatctcacttggagagatgtcatgctattgttagatcaaaccctggtctttaatgaaagaatgcagctttagctgcagcccaagggtttggagctacctggtatcttagtcaagtaaatgatagaatgacagccaaagaaagggacaaattccctactggtcagcaagccaaccccagtatggatccccactg

SEQ ID NO: 247196 - DNA, 321 bp, Homo sapiens
ttggcccaacccgggtacatatccccttctccctctctgatttaaagcagatcaaggtagacctggggaagttttcagatgatcctgataggtacatagatgtcctacagggtctagggcaaaccttcaatctcacttggagagatgtcatgctattgttagatcaaaccctggtctttaatgaaagaatgcagctttagctgcagcccaagggtttggagctacctggtatcttagtcaagtaaatgatagaatgacagcyaaagaaagggacaaattccctactggtcagcaagccaaccccagtatggatccccactg

SEQ ID NO: 247197 - DNA, 321 bp, Homo sapiens
ttggcccaacccgggtacatatccccttctccctctctgatttaaagcagatcaaggtagacctggggaagttttcagatgatcctgataggtacatagatgtcctacagggtctagggcaaaccttcaatctcacttggagagatgtcatgctattgttagatcaaaccctggtctttaatgaaagaatgcagctttagctgcagcccaagggtttggagctacctggtatcttagtcaagtaaatgatagaatgacagccraagaaagggacaaattccctactggtcagcaagccaaccccagtatggatccccactg

SEQ ID NO: 247198 - DNA, 573 bp, Homo sapiens
gcaatctaggtagcaaacaaatatgaaaggccaatgactcagctaccctggggttgcagtcctggttgggggaaagcaaggcaccagcagactagccagaaatttaacaaggagatgttaaaaatgagatagacatagagaaccttgataggctctccatacgtcccaaacttattggaaagctgcacacacgtgtagaagaggccggagagaactagagctattcacacattcctggatgactgcaagactgtgcacacakgtagaaaaggcctgaaagggctcaaaagaaataagagctagggaagatttgaaagcctaaactttgaatgctttcttagtccatcttttacttataacaaaatacccgaaaccggataatttataagaaacaaaatttattttttacagttacagaggctgagaagtccaagatcaagggaccacatccagtgagagccttcttgctggtgggactgatatggtttgactgttttgtcccctatacatctcgtttcatgtgacctctgatgttggaggtgggcctagtaggaggtgtttgggtcatagggg

SEQ ID NO: 247199 - DNA, 607 bp, Homo sapiens
acttggaacatcaacgttcctgcagacaaaatgaggtgcctgtctgatctgcatagctggaacactgagtcaggagtgtgtctgggaggtggactgcttccctgcgccttgcgggggagctgatgtggctcccaatctaccccctgataagacctcagtgtgtttcactgagagctccacctatcacctatgtcaagattgggacttcagcccgccattgggtactgcatttacctactacaataaccacaaccagtttctaccagagatgtctcccctactggcctgaagcctaaaatattcaacccagtaaataaaatacagggaaaataaacaaatataagtgcacaacacaggagaacaaggtaagcttcaagatacctctgcaattccaaccccattggagacagtgagcacaatgctactacaaccattatctgagaaagccatcaaacaaagactttctataaccaaggaattaatagtcttcacctctgaaagcaycaagagtcgaaataggctacaataaagtcacatccttaagggagaaaagataaataaaaaaaaccaacaattgaataaaaaataaattcaagactaattagaa

SEQ ID NO: 247200 - DNA, 584 bp, Homo sapiens
tagttgaattatcaacaaaattatccgacaatgatgcaggctgagtattacattaataagcaaactctccaatagtattttgctcccttcgatagagcatgtgcaacacatgagataataaattctttacatttataaataagtttctctaaagmaatttaacctaattctaatttaagatcttatttcctactctatcaaacatcacattaagtctgaaatagctaagtactaggtcaggtttcccaaaaggactattgcttatttcctttcacttagacacatagcagacacttaagatagtcttgaagaatatccaacttggctggcttgttctgcttactgaccattatacatataccattatttctcaaccctttaaacatcttctgccttcctatcctccattatactgttatgttcctgggttgaaaaaaccactatgtagtctacacatccacaagccaagaaaaaaagtagggtgtaattatttaatctagattccacagtttactataattaactgtatccttagtaggcaattcacagtctatactgcacaacagtgaaatcattaagaaatg

SEQ ID NO: 247201 - DNA, 519 bp, Homo sapiens
gcagacacttaagatagtcttgaagaatatccaacttggctggcttgttctgcttactgaccattatacatataccattatttctcaaccctttaaacatcttctgccttcctatcctccattatactgttatgttcctgggttgaaaaaaccactatgtagtctacacatccacaagccaagaaaaaaagtagggtgtaattatttaatctagattccacagtttactataattaacwgtatccttagtaggcaattcacagtctatactgcacaacagtgaaatcattaagaaatgaattctaagcattcgagaattatatatttggctaataaaaatatggggtgggtttctcaggtgaccagaaaagtactgtaacttcctgttaatgaaaaattcacacaaagtagaaaagtatcctcaggggattgcctccaggatacctccttctcccagaggaaaatcctcagatgctcaagtcccttataaaatgtggtgtcatatttgcatgtaaccta

SEQ ID NO: 247202 - DNA, 622 bp, Homo sapiens
gcactatacttgtgtcttagtctgcctgtgctgctataacagaatatctgagactgggtagcttataaacaacagaaattcatttctcacagttctggagggtgtgaaggccaagatccaagatgccagcatttaatgaagtttgctagctgcttccaaaatggtgccttgaatgcggcatcctccagaggggaggaatgctgtgtcgttacatgacagaagatggaaggatgaaaaaggaccacactttctctgtcaagtccttttataatagcattaatcaatgtatgaggctacagamcccatgaactaaacacctcccgaaaggccacacctccttaacactacaaattttggggtacatattcagattgtaacattccacctctgacccccccaaatttatgtctttcttacatgtaaaatacattcattccatcccattgcccctagagtcttaatttgttccagtaacaattcaaagctaaagtacagggtcccatctaaatcagatatggatgagactcaaagtaagagtcatcctggggcaaactgctctccagctgtgagcctgtgaaatcaaacaaattatatacttccaaaatacaatggtggaacagcc

SEQ ID NO: 247203 - DNA, 466 bp, Homo sapiens
gaggaccacagtttaataccatataaaattattaaaagagtaaaaaattgatgaattaatgtgcagaatgacatccctatacataatgaaagtgtgccagagtatgtgctcacaaaataaaaactattaccattacccaacacttcaaartgagctctaaaaattaagaaaattgggttggctttagctcaagcagttacttcctcatgccagactttttattcatctaaaaattaagagattatagatagaacagcaaaatttagaatttgaaaactcagatgagatgatttgataaaaggaagatctgaaaaaaaagatgatgaattaaagaattagaaatgaaaagagaaactttcagaagtggaagattaaactaaatgggcaaataagtcttcaagagaaataagtctacaagaaaaccaagaggggagaagaaaaaaaaaacatttttttaataaggaaa

SEQ ID NO: 247204 - DNA, 567 bp, Homo sapiens
gccagactttttattcatctaaaaattaagagattatagatagaacagcaaaatttagaatttgaaaactcagatgagatgatttgataaaaggaagatctgaaaaaaaagatgatgaattaaagaattagaaatgaaaagagaaactttcagaagtggaagattaaactaaatgggcaaataagtcttcaagagaaataagtytacaagaaaaccaagaggggagaagaaaaaaaaaacatttttttaataaggaaagatttaaaaggtttgagaaaaagtgatagatatagaagacatgcaaacaagattcaacataagtataataggagtacctaacaagaaaaataatgaaaaaaataaatgttaaaaagctataatgcaacaaaaagtgttgttcaataaaagaagacttaaaactgtatacggaaaagttactccatttacatgggaaaatcaacccagctggccagcaatgagaaatgttctagtaaaattgttggattttaaaggggagaagaaaaaaaaaaaaaaacctttggacaatcagagagaaaaagaccaagt

SEQ ID NO: 247205 - DNA, 549 bp, Homo sapiens
taaaactgtatacggaaaagttactccatttacatgggaaaatcaacccagctggccagcaatgagaaatrttctagtaaaattgttggattttaaaggggagaagaaaaaaaaaaaaaaacctttggacaatcagagagaaaaagaccaagtcatttataagggaaatgataccagactgacatcagacttttcaaaagcaacactaggccagaggacaatgatttcagatactcaagtgttaatatagtttgaatgttctccctgcccaaatctcatgtagaaatgtaacccctagtgttggaggtggagcctgatgggaggtgattggatcatggtgggcagagttctcatgaatggtttagcaccatccccccttggtaccatatagtgagtgagtgctcacgagatctggttgtttataagtatatagcactgtctccctctctctgttcctcctgctctggccatgtgaagatacctgctctagctttgccttccaccatgaataaaagctccctgaggcctgtccagaagcagatgctgcca

SEQ ID NO: 247206 - DNA, 567 bp, Homo sapiens
gccagactttttattcatctaaaaattaagagattatagatagaacagcaaaatttagaatttgaaaactcagatgagatgatttgataaaaggaagatctgaaaaaaaagatgatgaattaaagaattagaaatgaaaagagaaactttcagaagtggaagattaaactaaatgggcaaataagtcttcaagagaaataagtctacaagaaaaccaagaggggagaagaaaaaaaaaacatttttttaataaggaaagatttaaaaggtttgagaaaaagtgatagatatagaagacatgcaaacaagattcaacataagtataataggagtacctaacaagaaaaataatgaaaaaaataaatgttaaaaagctataatgcaacaaaaagtgttgttcaataaaagaagacttaaaactgtatacggaaaagttactccatttacatgggaaaatcaacccagctggccagcaatgagaaatgttctagtaaaaytgttggattttaaaggggagaagaaaaaaaaaaaaaaacctttggacaatcagagagaaaaagaccaagt

SEQ ID NO: 247207 - DNA, 623 bp, Homo sapiens
tcatgggtattaaaattgaagaaaccttttccagcattttttctattttctttaaagtaacaacctatggacttccccatctgacattttcgagtgatcccactgtgtgaatgaaggactacttcagggtttgagggcaaagctgaaatcttagcaacttaccagtgagcaaaggtagaacccagagcccatctctccttttccaggctgctgagtaaagtctggctcaatcaacctatcaatgaagcagtgcttacaacattctccaagaccacccaaaacccaaactggaaatgaatcatgactaatctgactcattttggctcacacagtgcccttccaatttgtatttacctttaccacccaggacctgaccttggacatgtgtaccaggatgtaaggcaataaacctattcacaattccaaaagggcctggtcctctatgaagatttcctgaaggctacttactttctctactcattaaaatttttgcttaacttcaaatttctgaaatataccatatgtraaaaatttaaatgttaatctgtgcctactgtactacttgaacagagaaaattaactgataaactgtaaatacaaaatgtcaaaattaattcttctga

SEQ ID NO: 247208 - DNA, 648 bp, Homo sapiens
ccatctcttttggttctatttttgacttgttatgatatacattacttagatgaggactatgttttaaaatatattaaataggccatagtattttaaaaccaatttataaaattcatttccataagtttctcattttattttttttaaattatctcatgacaataatacaattattcatcacttcaattcttaggcactaccagttaaataacagagttccaaytgatctattgttaaaaagactagtaaatgacctttttattccaattaacaaatcatctgccaaatctatgaatcttaatattcagatctattcacttcaattcatacaatttatctgcaaatagttgttgggcttttgattctaaatataattagctgataattttgcttggctgaattacttttctggagggcctgcaaaggctctcagtcgcattatctagcaataatgaatctgataggtgaaattttttactgtaatgaggatgagacacagttgtgacacctgagtctactaataacagaagactgctaattatcgacagcacttttttgtgtgatgcaaggagaaaaaaaatccctcattattaaaaaataaaaagttacaattataagtgacaccggaggagagtaaataaaatggag

SEQ ID NO: 247209 - DNA, 540 bp, Homo sapiens
catatcatcttggtgaaagccttgcccttctgcccagtggcccccttcccccaaccaccagaggcaaaggagtgcttgaaactgtggaaactttaaacattgtggattctaagaagtaaagcctttagtagtaaaagatttaccaacaaataaagtgtttctgaaaaaggttgcgttgctctagttctagcaaygtgctcactctgcagctgtgggatctctgggtgccatcttgttttcctgccactctccctattccctggcagaccctgtccccttggaatgcccacagaattttgatcatagctaaattacatcatttatcacattacttgttgtcagcttatgcgtttatctctaccactggattgcaagctacttgaagttcttaataagaacagcggcagcaataatacagtgcttcttgtgtgccaggcaccccaccaagtgctttacacatattaactcatttagacctcacacgtccctcacaatatcttggtatcttcatctctcacaactcattaaacattctatggt

SEQ ID NO: 247210 - DNA, 593 bp, Homo sapiens
aacatcatcacaaaacaatgtgataaggcaacagagggacagagaaagcacagaggagggagggatcatttccataggaaagtttcatggraggcttgcaagaggatgtgaaaattacattgatttttaaagaacgaggaggaattttttaggtagcccaagtgggacaggacatagctggtcctggagaacatgtgtaaaggcacggagaaaggaaactgcatggtgttttgggaggaactataattagtaatgtttggtcagatcatgaggttttggtgggggtgggtaagatggaggtggtaagatagaagattctagaggaagtcaaggcaaggaccagattttgaagtgttttgcatgcggagctgaagagcttgaatttagcaccagcaatagggtgtcagtaaagagttttataagagagatgtgatcagatttgcattttagaaaaatcactttggcaggtttgtgaatgatggaccagaaatgtgtgatggtggagacttggaagccaattaggaggcagtagtccaggtgagaaataatgccccgaacaagggcaaatggcattaggaatggaggggagcaag

SEQ ID NO: 247211 - DNA, 594 bp, Homo sapiens
agctctcttcaataagataaaggcagataagttttaaataagcttctagaattaatcaacatagaatatgggatctttacaaaattaatcaatggaaatcaggttacttattaaagtgacttactttatgccgagacaattctactgagatattaggcctacttctatgtctgacttttagatgtgttcatttcagatctgctgctaccactctatccaaactactatagtttctgacctagactattaccccagccttccaaccagactctctgtactctactattgcaatattgcacaactctagaaggcaaaattcacattatattctctttagtgtgccctttgggtgtyattcattatataactgaatagaactcaatacaagataaggggagtaggatgcctctagagttatgcaacagaggccctgtcctgtgtctgtaaatgtgcagcataataagagcaatcttctggctgacagtactgagaaattattatttctgcactataatatctagatttactattttagtaagaaattagtttacctgagtcaaaaacatcaatttagtggaggaaatagatatgtga

SEQ ID NO: 247212 - DNA, 607 bp, Homo sapiens
taattttgacagctattagaaatttaattgtttctcccttctaggaattttgttatgtccacaatataaggcataagatggtggtggtgaatgaagatagctgggagatagatacttgatactgtagtcagttgcattaatacattgtcttgtgcccttgtttattttgcaagcyatacataaatacagtctttacttgataccactcataatggtataaagacagaaaaacatataggcatcaggatctctcctttagtataaatgtgtaataatatttgtttttatatagcctagaatgaaatggacaagaaaagtctgggccaaattctgatgtaggtgttgtcttaaacaatctcccacctcctcctttgaccttctgtcctcctacttcagcaccctcagcttttcttctttggttcggtgccctcatacattttcctgccatctctcttgtgtgaggtaccctacctgataccccaaatctttagggtctccattgttcactggttagccttagaaacagatctaccctaataagtatcttaacacatgtatttattttctaaaaagaatttcacgccaattgctgacaaacttagaccaa

SEQ ID NO: 247213 - DNA, 561 bp, Homo sapiens
tgagcaataggattatatatgttttctattttttcttttcatttatttgctatattttccaaatttccaacaaggaacatgtgttacttttatgatttaagaaaattattatttaaaagtatgcactttttaaaaagaaaattattagtattaagttaacaggtttagtttctaactctgaagatgaacctttttaaagcaggctatggggctcaacagtataaacaagaagcctatatattaaaaagtacattttgtttgttggggataaattatcttgacagtttctttatrtcttctctcctatgaaaacagacattgccactctgtgttacaagggtaaaatatgaattgaaagagaattactaaaacataatacctgtagctctttagacaaatgcatatgttgataccatcattgcaacataactactgtttatgtgtcctgtgaggattaccaggaagtgtgtaaagtatgtaaagaaccacagagaaactattttgtaaatacaaattatgattctcttagcatcacttttatttatatgtgttgcagtataa

SEQ ID NO: 247214 - DNA, 561 bp, Homo sapiens
tgagcaataggattatatatgttttctattttttcttttcatttatttgctatattttccaaatttccaacaaggaacatgtgttacttttatgatttaagaaaattattatttaaaagtatgcactttttaaaaagaaaattattagtattaagttaacaggtttagtttctaactctgaagatgaacctttttaaagcaggctatggggctcaacagtataaacaagaagcctatatattaaaaagtacattttgtttgttggggataaattatcttgacagtttctttatatcttctctcctatgaaaacagacattgccactckgtgttacaagggtaaaatatgaattgaaagagaattactaaaacataatacctgtagctctttagacaaatgcatatgttgataccatcattgcaacataactactgtttatgtgtcctgtgaggattaccaggaagtgtgtaaagtatgtaaagaaccacagagaaactattttgtaaatacaaattatgattctcttagcatcacttttatttatatgtgttgcagtataa

SEQ ID NO: 247215 - DNA, 570 bp, Homo sapiens
agctggaagagattaattaaaatagggaagaaacacttaagatctaccctcttggcaaatttcaagtatacaataccgtatcgttaactttagtcattaactttagtcgttaaagttatcgttaactttgatgttgtacattagggtctctagaaagtattcgtcttgcataactgaaaccttgtacctcttgaccaacatctgcccacttcccattgcccctagcccctggcaaccactattctactctctcctatgagtttgactattttagagttcatatataattgagattatacagtttttaatttacaatgtatgcttatatcaagttatacatctttaatatatgcaattttaaattgtcaattacacttcaacagagttggamaaaataaaaataagaaagacattgttattattagtaaaaagtaatacatttgtcatattccaaaaaataaaaaacagggaggtcaagtcatgaatggctacgtcagatgggctgggccttgactgcgttcgccacagaattggaaatttaagataaaggtgcactaaaacttaaggaca

SEQ ID NO: 247216 - DNA, 452 bp, Homo sapiens
ttattttagatctgggttttttaattttgtcatctggtcaattcttaattgtctgaattgtggtggaaagggagggctgtgctgcttacaatagaacccacagaattcagtgcctaaaaggtaaagaacacaattttatgggacaggatagaaaattatgcactggggatttascatcctcctaagcctaaaagcagctttctattttcagtgcaaatatagttgctaatattaataattaagaaaaatatatttgaaccaacatgtggtatgtcaacattactaagtaagctgtaaagaaaaatagacacagaccctaggactgaatgtgaaagcaacatttggatactggattctataacaagcaaattcatagggctcctgttttccacatagcagggtaaatgcatgacaaatgtgtaaagagtaaaaggtttatggtgtaatgttgc

SEQ ID NO: 247217 - DNA, 611 bp, Homo sapiens
actttggaaatggcatagttcaaatcctttattttatgtatgaacacaaggaactctagagaagttacatgacttctttcaagttatgtgactctttaatggtaaatcatgggcacctgagcctcattctctgtccaacactctctagacayataattacattgtcttctttggagtgggagtagaaaccaagggagggcatagactaggaagacccaaagaacaatttgggtagttgtgttttcattttatcttttgttcctatgtacttttatttgtaaaagattattttttgcattaaggatacatattctcaatttagatatgaagttttaacagattagaaaaaaagaagggagtttgagtaaaagtagatcaaatgacttaccagtttaatttagatcaagttcaaaccatttgtctgaaatagattgtcaaacaatagccattgggccaaatgtgacctgccacctattttagtaaataaaactttattggaacacatccatgcctgtttgtttatatataatctgtgactgctttcacactgcagtggcaaaattaaatagcaacagagaagctattgttcccaaaggctaaaatactgactg

SEQ ID NO: 247218 - DNA, 619 bp, Homo sapiens
taggtaatgttctgtctgactctgktaatttcctttgcttcaaagtttactttatctgagattaatgaagccactcctgctttctcttgattaatgtttaggatatctttttccattcttttactttcaacctgcatatattattatattcgaagtgagtttcttgttgacaacatacagttggatcatgttcttttaccttttagctaatttttatcttttaattgatgaacgaagaccatttatatttactatagccaactgacctgttagggcttatgtctgccattttgttttcttgttttatatttgtttcctttgtttatctttcttctgttttcttttttgtgccttcctgtgagcttcctgaacacattttgaaattctatttttatttatccatagtgttttttagtgtatctcttcatatagttttttttagtggttgttctattacaatgcatatacataacttactatagtctgttagtgttgacattttaccagtttgagtaaagtgtagaaatgttactttccttccagtctatttcttctctcctgttaatatttgacttaaatattttcaccatatacattgagaaccaatgagacaatatta

SEQ ID NO: 247219 - DNA, 545 bp, Homo sapiens
ggcagtccttaatcaagaagatctgctaaaagaatatcataaatgaggaccttcttcctagcaagtatcattgctttatttgacaggatgtccagttaccagattagacctggtaatctgcttttccacaagagtgtccctgccccacctctctactcctctatccctcttaagcaaatgaatggatagagatcagctggtataacaaccatacttagtcaagcttatttattttcaaaatctaatatagctaaatgacaamttatatatcatgagagattctacatatcattgaatgaagaagtgagcattattgattatttaatgaccagctcttctttgtttttatccttgaaatggtattttctattgaatttagattgatcattttgccattaagcttattctaaccattaatattatagtaccttaatgtgaccatacatttagctgagaaaaaaaatgaactcagaggaataggaaggttatgttggaaattctgttgaattctactgaaaacatattgtcttcaaacttctgaactc

SEQ ID NO: 247220 - DNA, 545 bp, Homo sapiens
ggcagtccttaatcaagaagatctgctaaaagaatatcataaatgaggaccttcttcctagcaagtatcattgctttatttgacaggatgtccagttaccagattagacctggtaatctgcttttccacaagagtgtccctgccccacctctctactcctctatccctcttaagcaaatgaatggatagagatcagctggtataacaaccatacttagtcaagcttatttattttcaaaatctaatatagctaaatgacaacttatatatcatgagagattctacatatcattgaatgaagaagtgagcattattgattatttaatgaccagctcttctttgtttttatccttgaaatggtattttcyattgaatttagattgatcattttgccattaagcttattctaaccattaatattatagtaccttaatgtgaccatacatttagctgagaaaaaaaatgaactcagaggaataggaaggttatgttggaaattctgttgaattctactgaaaacatattgtcttcaaacttctgaactc

SEQ ID NO: 247221 - DNA, 626 bp, Homo sapiens
aaacaccaaatacctaaaaccagcaatagctatccttgcaagcagacccttttgaagttaacaacctcaaaccaactttgttaaatccctctcaaatttttagagtaggttgatactatgaagagatggatcatgtagttcagtaggtgtgtgttgaattaattagatagtgcctgtgggaaaatataagtttcaaaatagttacttttaagtgaacttccataatataatcctattcatgagtttggattgcctgtagttagtgaamaatactgttactttaaaaggaggctgaacctctaaatggtagtcatagtctttatttggcataataggaaattgagtaatttttcaaaaaggtagctcattatctgtagcatctattactataagttagctattatttgtcctctttgttgcctatgctaaatttccttctctatacaggttaatctttgaaataaaagttttgtaggaataaattgttatttttaactttattcagatttgtagaaaaatgctacatcgccacatgcttatatttcgactgcctaacttacagatgttagatggaagtcctgtgaattcagatgatagggcaaaagctgaatttcacctcgctgaac

SEQ ID NO: 247222 - DNA, 622 bp, Homo sapiens
ctgaaataaaattaagaaacaatttatctgacaactgtccaaatttgaagagtccatgcatttcatacatcatttggcagcagtatcacacctattgtctagagatgatctcaattctattattttcttaatcaaaagtgaaactggaggtgatttttctggataaactagtcattttcttctttaaaaatagatgtggggactggctttgtctttttagttacagataaacaaaaacaaaaaactctttgtaattatcaaatcttaaacattaaaactatatattaaatccaacaagattttagtaaaaaaccttttatgtacttttagaaatgaataatgcagaatgtcgggaaaaccaaattaaaagattcttttttaaaattaaagaacctaggattcaytttgaatccaaagattacatcaggcattcaatttctgatctcagaaatgggatacggagacagtaactcaagaatttgtattctgaaaataaccaccttataaatttaaatattttaaaggcaatcatgtgtatacacacatttaaactcaattttaatgctaacttttcaaaatcaagtatttaactggaatatattttatagtcagtaaatggtag

SEQ ID NO: 247223 - DNA, 555 bp, Homo sapiens
ttctaattcaaatgctattttctcctcacaaagccatctctgatcccctttcctgtgaattactatagcattttaacagtgtatcttttctggggctcaccattttttgcttgtacaaaaataattatctattgagtgcatactgtggaaaacatgttctgctaaacattttaaataataatctataactttcctaatagtgtaagaaaggcaggtaatttcatcccaatgtaataatcgayaaaactgtttgatttcaaagtctgttctctttccactatgtcaaactatcacttcggtttaaatcatactgctacttaattatttaaacttgttaatataaagttatatacccaactttgttctataaaggccttgaggaacctaagtatgtcctgaaatatacaaatatcattccttctatccaaaaatgatctcaggtggctttaaaaaagatactacaaaggggaaaatcataatgaaaaaggaaaatcataatcaatgaaaaaggaagaagtgaatatgctaaccataaatgttaattaacatggttgc

SEQ ID NO: 247224 - DNA, 190 bp, Homo sapiens
ttttctttataaattacccattctcaggcagttctttatagtagtgtgagaatgaactmatacacctgtctcaaagaaacaaaaaatccccacaatacttacgagaaaaaggaaggttagaagcacagcacttaaaatcgttgtcagtgacacatgaaaaaaagatgggaaactaataaaaacagtaacg

SEQ ID NO: 247225 - DNA, 556 bp, Homo sapiens
aaccattgtgattttaacagctttaactggaatgtttaacaagaaagttaactaagtaaaaatactatctaaactgatgttaatgttttctaatcaatgaaattggcaaaccacatataattgctaaaatcttcccatatgaaaaaatctccagtgaaatgctatttttccatgttttgttaatttacatgtgttgttattattttggctatttgatttttttcaggtgcttttgaatgttatttaaaatttttttggtcttgtaaagagtttctatgatttatttttaaatcctcacgtggtgtatcagcctttgttttatatttctagcaattaaatgtttaaattcaaaaccaaaaataaatgagaattaactaarcagtcttattcatatttgaattattattttttttaatggatacagcatctcgctgtgtcactcaagctggagtgcagtggtacagtcagggctcactgcagcctcaatatccctggctcaagcaatcatcccaccttagcctcccaggtagttaggactacaggcaatgccaccaca

SEQ ID NO: 247226 - DNA, 649 bp, Homo sapiens
aaaatgttctcctttgaaagtaaaggacattaggggagtgaacaggcagagctgtattttatcaaactccatattacctatagaaataattatgttttgaatgtcttcacaagtagcatagttaattgattacctcttaccacactgtccttcataaaatctttatcacattgtgaattaatgaaccagtgcatagtaagtatrttgtacccacagaattagaagttcaagatttagatatttcattattaaattgtttggtttgttattagaccattattgaatggctttgaagattggagacaaatcttttgtattttgtttgcttatgtattacttagtttgaaatagaattttaggaatacagtgtttacctttctgaatctcttgttcctttaagacgtaatatttttaaaaaattacctgtgattacattcttattatactcttttccattttcttattttttattcctatttctttatgttctgattcctgcagaacctgcaccaaataaagcaaattcaatctctgagggagttaaatgagcgactgctgactgagaatagggccttgacaagagtggtagccaagcgctcagggttctataggcaactgcagtctgtgaacctataatttttagtttcat

SEQ ID NO: 247227 - DNA, 649 bp, Homo sapiens
aaaatgttctcctttgaaagtaaaggacattaggggagtgaacaggcagagctgtattttatcaaactccatattacctatagaaataattatgttttgaatgtcttcacaagtagcatagttaattgattacctcttaccacactgtccttcataaaatctttatcacattgtgaattaatgaaccagtgcatagtaagtatattgtacccayagaattagaagttcaagatttagatatttcattattaaattgtttggtttgttattagaccattattgaatggctttgaagattggagacaaatcttttgtattttgtttgcttatgtattacttagtttgaaatagaattttaggaatacagtgtttacctttctgaatctcttgttcctttaagacgtaatatttttaaaaaattacctgtgattacattcttattatactcttttccattttcttattttttattcctatttctttatgttctgattcctgcagaacctgcaccaaataaagcaaattcaatctctgagggagttaaatgagcgactgctgactgagaatagggccttgacaagagtggtagccaagcgctcagggttctataggcaactgcagtctgtgaacctataatttttagtttcat

SEQ ID NO: 247228 - DNA, 556 bp, Homo sapiens
agcatggtgccagcatatgctgggtttctggtgggggcctcagggcgctcttactcatggcagaaggtgacggggatacagcatgtcacatggtgagagtggaagtaagagagagaagggggaggtctcagactcttaactggatctcacatgatttaactgagcaagaactcacctatgaccaggcaaagatgctaagccattcatgagggatcctaccccaagatccaatcccctcccaccagtctccacctccaacattgggaatcacgtttcaacatgatatttagagaggacaaacatccaaaccatatccatgtttaaccctgtaacagtcctatgagaggagcattagtattacttttcttggactgatcagagcagtgagacatagagagattaagtagcttgtcctgtgttacacagctaatacatgataaagccaaatatttcagcacatttgtgtgattccagagcccatctttagattatacataaaaggaatcaattttctgggcaataaaatacacagaatrcaaacaccacagtttctgta

SEQ ID NO: 247229 - DNA, 609 bp, Homo sapiens
tgggtgatagttacactaaaagctcaaacttcgccactgctcaatatatccgtgtattaaaactgcactcataccccttaaatttatagaaataaaaaattacttaaaatacataaataaaaaataaaatttaaaaatccaagtataaagtggacaaaataaattttaccagagcgaatatacagatatcaaaaagcatatacaaagatgtttaacatcattagatattagggaattcaaattaaaaccacaatgcataatactacacacctatgagaatgactaaaatttttttaaaatttaaaaaattagtgaaaacaccaaattctggtgaggatgcaaaaaaaaactatcactcctacattgccaktgggaatacaaaatgatacacctactctggaaaatagtttcttttagaactaaacatgtgaaggtaccaagaacatacattgggaaagaacaataaatggtgcttggaaactggatatttatatgaagaaggagaaaattaaacccctatctcatattatatacaaaaatcaaatctaaattgaatagaaacttaaatgtaagacctgaaactatgaacctactataagataacattag

SEQ ID NO: 247230 - DNA, 480 bp, Homo sapiens
agtgcccctccaccttgatgtaaacaggagcccagagaggaagcatgcattaaccaggcagaacaatataaatcaggttactgttcattaagagagaaagcagtgcgaaaaggaatgattctgatttgacacaaacccacttcttaaggagataagcasattaacttgaaaatgaaaggtaaattaagatttcgatgaaaataaaaatcttcccaagatttcacacaagagctagtgtttagtttactgtttgttaggtaatatttcatttgctcccatcccaatttccctcccttaaccaatacaaatggaattgtatgtggtgtacattattgtgattgagaagaaacaaagattaaaattaggaactttggtttttttatggaggtagacctttgtatttaatagatttaaaatactgaaccaataatttttgacatctgacatagtcttgtcaacttcgatatccttatcaataat

SEQ ID NO: 247231 - DNA, 480 bp, Homo sapiens
agtgcccctccaccttgatgtaaacaggagcccagagaggaagcatgcattaaccaggcagaacaatataaatcaggttactgttcattaagagagaaagcagtgcgaaaaggaatgattctgatttgacacaaacccacttcttaaggagataagcacattaacttgaaaatgaaaggtaaattaagatttcgatgaaaataaaaatcttcccaagatttcacacaagagytagtgtttagtttactgtttgttaggtaatatttcatttgctcccatcccaatttccctcccttaaccaatacaaatggaattgtatgtggtgtacattattgtgattgagaagaaacaaagattaaaattaggaactttggtttttttatggaggtagacctttgtatttaatagatttaaaatactgaaccaataatttttgacatctgacatagtcttgtcaacttcgatatccttatcaataat

SEQ ID NO: 247232 - DNA, 517 bp, Homo sapiens
ttttatttatttatttatttttggtattagtgttatgcatggcttactgtataaagatagctttgttgccagtaaattaaaggacttgtttctttactgttgcataaaaaatgttttatttgtatgattattcctccttgtttcagatgagtgaagaatggtttgctttgggaatattttcttagttcttcaaggacatgatgtggaagtcwtgacttgagtaacttcaatagcactaacaacaggaattgaaaaaaacttagaattttaaagctgagaaagaggtagagatttttctctgtcttgggtatgacatatatgttattcagtatggtagcaattgagcaattgaatgtggctagtgtgaagaattaagtgttttttattttaattaatatttaaatagcaccatgtgactgctagctactattggacagtgcagcctcaaactattaaaatttaacattaagtatattaatgttataaactttcaaaaccttaagatagaaatctaaca

SEQ ID NO: 247233 - DNA, 592 bp, Homo sapiens
tatgaaccatttgctaatccactggttctggaaaggctgatcagaatcacctggggcagggagagtttccaactggygctcacatatgtttcccagtgagaacagctgcaccctatggtgctcaaggtaggagtcgtgtgccaggacaccaccccacagacgtcctggtctggacaagtgtcaacaaactgatgaggtatagcaggagctagaaatccatatagagggtttgtgataaagccaaagaaaagagcatctggaaaagttccttcgggaagaaaaaatagaagaatcctaaagactggggcaaggggagcataactcaaggccagaaaagggagaggctttgtgggtgggagggtgcaagggggcagggcccaggacaggctgacctactcccaggaaggatgctgggggtgggaggatgtggcagggcttgggacagggagggggcacctgggcagaatctctgtccaccacacttggaacaggcaggcagcagctgtgctaggcagagcacttgaccaggagatttaagacgcagttctggctgtgtagcctcagacaagtcacatcaactgtctgtgacttg

SEQ ID NO: 247234 - DNA, 592 bp, Homo sapiens
tatgaaccatttgctaatccactggttctggaaaggctgatcagaatcacctggggcagggagagtttccaactggcgctcacatatgtttcccagtgagaacagctgcaccctatggtgctcaaggtaggagtcgtgtgccaggacaccaccccacagacgtcctggtctggacaagtgtcaacaaactgatgaggtatagcaggagctagaaatccatatagagggtttgtgataaagccaaagaaaagagcatctggaaaagttccttcgggaagaaaaaatagaagaatcctaaagactggggcaaggggagcataactcaaggccagaaaagggagaggctttgtgggtgggagggtgcaagggggcagggcccaggacaggctgacctactcccaggaaggatrctgggggtgggaggatgtggcagggcttgggacagggagggggcacctgggcagaatctctgtccaccacacttggaacaggcaggcagcagctgtgctaggcagagcacttgaccaggagatttaagacgcagttctggctgtgtagcctcagacaagtcacatcaactgtctgtgacttg

SEQ ID NO: 247235 - DNA, 571 bp, Homo sapiens
ctgcttttctggatgacattgggagaagaccttaacttctcagggccacaaactctgtgtgtgtttaataatataccttttcatttctgggacactttcccttcaaaatctgcatggagctgaaataacacaagaggcacttttaagaaggtgctgggaaactagatgactagcgctgcacaggtgaggatactgaggcagggtgagttagcttagtagcctagcatggcgtcatcgtctacaccagtcaggctggttctggcttcaaccacattcttgtttagcaggaaactgaaatttataatcctgaggtccattccaggttgtgaatggcaagacttgtttaagagacaatttctctccctgctgcttttttttttttttttttttttttttyccttaggatggttctaaagaagaagtatacttattcgctggttaggaaactccatatgcactattggtgacaaaagagttactgagatccactttcggtggttgtaaaagtgtttttgttattatattttcttgatagtagtataatattttatttgccataaaaatatagctt

SEQ ID NO: 247236 - DNA, 445 bp, Homo sapiens
atactctaccacatattttgggtagtgatgtattctgctcaagaagacatcatgatatacctagcctggatttttatccctgcttaagtaaaagcttgttaacacctccttcaaatctccctttgcctcacccagtactacttctccttctctgatctactttattctttgcatctactttattatttcttttccagatcctgatagtgactcagttcttgatacttggcccctctgtcccaatgggtatgcctaggtgtayatacatacacatgtatatatgcacacacatcttttctctcaaatttattgagaaagtattttgtgtttttatttatatgttttttaatatttttgagctaattctacatttacatacaattgtaagaaataatatgaaaagatctcgtgtatcctttccctgatttctcccaatgatacattt

SEQ ID NO: 247237 - DNA, 592 bp, Homo sapiens
gcgaattacgtttgaacatcttttcatgtgcttatctgccacctctatttcttctttagtaaaatgtctgtgtctttgcagattttctaattgaattgtttatttttttacttgggggttttgagagttctttatgtattctcagtaacagttatttgtcagatatgaggtgtgcaaatatttttaccaagtctgctttatagcttcttcacagggtttttttaaagaagaaaaatgtttaattttgataagattcaattgatcaaatttttcttttatgggttctgcttttggtktcaaggctagaattcattgcctagcccaagacctcaaagatttctctcatttttccctaaaacttttatagttttaaattttacatatatatctgtaatccattttattttatttatttttttattatactttaagttctgggatacatgtgcagaacgtacaggtatgttacataggtgtacatgtgccatggtagtttgctgcaccatttttattttattttattatgctgtaccatattattttattttgtttattttgagacagagtcttgctctgtcacacaggctggcgt

SEQ ID NO: 247238 - DNA, 553 bp, Homo sapiens
tcacgaaataagaatggcatcgattccaaatattataaagagaacacaaaaaagaaagcattaacctggtctcatatatagatgtaattgtaaaaataataaataaaatctaacaccacatcataaaacatcttatgactaagaaagatttatttcggaaatgcaaggatgtttcagtaacaggaaatccaccagtataatttactatagttgtaaatctaaggaaaaaagtcatattatctccaaagaaaaaaatgcatttaatgaaatttaccacccgttcctgatttaaaaccaaaatcaacaaaataggaattaatgaatccttgcytaatataaccatctctctctctcatgtatagacctgtgtgtatatgtgtagcatctgtacaaatatgcgtgtatgtgtacatatctatatctgtgtatgtgtgtctccaaataccagtatcagtgaagaaacacaaagtattcacattaagattgggaacaaggcaagaatggccagtatcttactatcatttaatattgtgttggatgtatcagccaatga

SEQ ID NO: 247239 - DNA, 619 bp, Homo sapiens
gttgtgctgagtttatatgtgcttgctaaaaaccatgtcaaggtgctggagtgctttctcaagaaaattgaagaggcagaatttacagacataggtgacctggaggttcatgctgcatgcatcctaattaagtaaagcagtcactgaaattgctttctgtcatctggataagaagcaattacagtcacacttcaggttgctgtttccatgagggaataaggtattgtatttagctgactcttccaatcaattgagggttaataaattaatgcccatacttgtcaaaatgtagcatgacaaaggagaaatctcttaaatgcttagaagatagagactttaaaactccaatctgtaatcttccatttccagatcataaagttagggctgatgatartgtttcttttcttactacaactgaaaaaaaaatcccaaaattaaaaaaaaaaaaaaaaaaaaagcctatgtttgcatcaccaagttgagtttcatatggtgtacagtaaattcagttacactagatttctttatataacatcctctacttgtctctatttaataatttgtaccatatattttatggccttcactagaatgataagttcttcaagggtagtaactg

SEQ ID NO: 247240 - DNA, 611 bp, Homo sapiens
taaagcaggaacagtttaataatattaattacttttcactgtggtgaaataagttaatgcacctatagttctgagaatatgcccttacacatgagaagcattcgatatgtttttgctgttttgaaacataatgctacaagttgtaaataaaarcaaattagctcatgggttttaaggaaaatcagtctaaagtaggctatacatttaactatctgaagttaacatcaggaagttttacaaaatgttggctgtgccactaggaatgtgtccatattagtagtagtggtcactcataaagagttgctaaatggggtgggcatggtgattcacacctgtaatcccagcacttttggagcccaaggtgggtggatcacttgaggtcaggagttcaaggccagcctggccaacatggtgaagccccatctctactaaaaaaatgcaaaattagatgggcatggtggcacgctcctgtagtcccagctactcaggaggctgaggcaggagaatcgcttgaaccagggaggtggacgttgcagttagccgagattgcaccattgcattccattctgggcaacaaaacgagactctgtctcaaaaaaaaaaaaaggatt

SEQ ID NO: 247241 - DNA, 464 bp, Homo sapiens
tttttttttcaaaattggaagttaacctatgtggtttcctgaagctggctctgccttctgctccayggcagggaagtatacacattgatacgtatgcccagagaaattttcccccttcagtatttttccctttctgcctccagaccatcttactctccaggggaacctcaccagcttattcagcatccagggctctccagcaaaatataaatcactgctcttttcaaaacctgccattaaacacgtgcatcagctaaattcctgctgactctgcttttgttgtgcattctatctaataaaccctcagcctctttggatgtcagaaacaaagaaatggcatacagtttatttatccctgctgatcaactggaaacatgaagctggcctgggatggtcacctctaaaactcttttccttgtttcctgcagggcatgttctccatctttctttgtatttgcacagat

SEQ ID NO: 247242 - DNA, 464 bp, Homo sapiens
tttttttttcaaaattggaagttaacctatgtggtttcctgaagctggctctgccttctgctccacggcagggaagtatacacattgatacgtatgcccagagaaattttcccccttcagtatttttccctttctgcctccagaccatcttactctccaggggaacctcaccagcttaytcagcatccagggctctccagcaaaatataaatcactgctcttttcaaaacctgccattaaacacgtgcatcagctaaattcctgctgactctgcttttgttgtgcattctatctaataaaccctcagcctctttggatgtcagaaacaaagaaatggcatacagtttatttatccctgctgatcaactggaaacatgaagctggcctgggatggtcacctctaaaactcttttccttgtttcctgcagggcatgttctccatctttctttgtatttgcacagat

SEQ ID NO: 247243 - DNA, 589 bp, Homo sapiens
ttcaggttgatggagagtaaagtcttctttttctaattggcctggttctctgttgttatttcattgcagtgcaarctttctatgcaattcagctgttcctcttcccttgcagaagctgaaaactgtgcctctgcctaaggaaagaatctaacctgccacttcactactcataggaagagatgggaaatgtgatgaatatttttcagggtgatgctaacttaatattctaggcagagctaggagtaggttaggatgagtgaggcaccatttcatgtactttgcactgagaattagtgcctcttgaaatttacactctcggcacttcacatgcctttctctagtcctggccctgatttgagaagatgagaattatgcctgagcattttatttgcttatgaaactaccgaatttcctgctgcttatgatctcaatagccattgactccaaagtctctgattcttgaaaatttttgaacaccattgcttgtctcttcgtggcctcaaaaacttttatatatctctggtgactgggaaattaaagccagaccctcatccctcagcaagaactttttaacccaatcttacttttc

SEQ ID NO: 247244 - DNA, 589 bp, Homo sapiens
ttcaggttgatggagagtaaagtcttctttttctaattggcctggttctctgttgttatttcattgcagtgcaagctttctatgcaattcagctgttcctcttcccttgcagaagctgaaaactgtgcctctgcctaaggaaagaatctaayctgccacttcactactcataggaagagatgggaaatgtgatgaatatttttcagggtgatgctaacttaatattctaggcagagctaggagtaggttaggatgagtgaggcaccatttcatgtactttgcactgagaattagtgcctcttgaaatttacactctcggcacttcacatgcctttctctagtcctggccctgatttgagaagatgagaattatgcctgagcattttatttgcttatgaaactaccgaatttcctgctgcttatgatctcaatagccattgactccaaagtctctgattcttgaaaatttttgaacaccattgcttgtctcttcgtggcctcaaaaacttttatatatctctggtgactgggaaattaaagccagaccctcatccctcagcaagaactttttaacccaatcttacttttc

SEQ ID NO: 247245 - DNA, 589 bp, Homo sapiens
ttcaggttgatggagagtaaagtcttctttttctaattggcctggttctctgttgttatttcattgcagtgcaagctttctatgcaattcagctgttcctcttcccttgcagaagctgaaaactgtgcctctgcctaaggaaagaatctaacctgccacttcactactcataggaagagatgggaaatgtgatgaatatttttcagggtgatgctaacttaatattctaggcagagctaggagtaggttaggatgagtgaggcaccatttcatgtactttgcactgagaattagtgcctcttgaaatttacactctcggcacttcacatgcctttctctagtcctggccctgatttgagaagatgagaattatgcctgagcattttatttscttatgaaactaccgaatttcctgctgcttatgatctcaatagccattgactccaaagtctctgattcttgaaaatttttgaacaccattgcttgtctcttcgtggcctcaaaaacttttatatatctctggtgactgggaaattaaagccagaccctcatccctcagcaagaactttttaacccaatcttacttttc

SEQ ID NO: 247246 - DNA, 589 bp, Homo sapiens
ttcaggttgatggagagtaaagtcttctttttctaattggcctggttctctgttgttatttcattgcagtgcaagctttctatgcaattcagctgttcctcttcccttgcagaagctgaaaactgtgcctctgcctaaggaaagaatctaacctgccacttcactactcataggaagagatgggaaatgtgatgaatatttttcagggtgatgctaacttaatattctaggcagagctaggagtaggttaggatgagtgaggcaccatttcatgtactttgcactgagaattagtgcctcttgaaatttacactctcggcacttcacatgcctttctctagtcctggccctgatttgagaagatgagaattatgcctgagcattttatttgcttatgaaactaccgaatttcctgctgcttatgatctcaatagccattgactccaaagtctctgattcttgaaaatttttgracaccattgcttgtctcttcgtggcctcaaaaacttttatatatctctggtgactgggaaattaaagccagaccctcatccctcagcaagaactttttaacccaatcttacttttc

SEQ ID NO: 247247 - DNA, 543 bp, Homo sapiens
taagaaatctggcccaagagaatttagagaacaaagcttacagaaattgcagtggatttgttccacaacctggtgcagagctaaaagcaaagtaaagayatgtttctctgctcttgaacagtcctctctgtttcaatcagcagcagagagctgtatagctgaatttcttgttgcagcatgcatcattcatgacctgatggagtagacaaagtacataacaatcgatgcagaaaccctgccgcatgaaaaagttcaccggtaggttatagacttctccgattttgttttctgctgatcaaggatatttcctcctcccatttcagaaacaaattactgatacattttgataatgacactttgaccagatatttctcctttgatttatatgctgattggggtgatgagagttttggcaactgttctagtgaaatagaatttcatggtcgatactcattaaaataaaaactaagcagaatgataacttggcatattaaagtattagactggtggctttaaacctactttttcttgctcagaacagat

SEQ ID NO: 247248 - DNA, 543 bp, Homo sapiens
taagaaatctggcccaagagaatttagagaacaaagcttacagaaattgcagtggatttgttccacaacctggtgcagagctaaaagcaaagtaaagacatgtttctctgctcttgaacagtcctctctgtttcaatcagcagcagagagctgtatagctgaatttcttgttgcagcatgcatcattcatgacctgatggagtagacaaagtacataacaatcgatgcagaaaccctgccgcatgaaaaagttcaccrgtaggttatagacttctccgattttgttttctgctgatcaaggatatttcctcctcccatttcagaaacaaattactgatacattttgataatgacactttgaccagatatttctcctttgatttatatgctgattggggtgatgagagttttggcaactgttctagtgaaatagaatttcatggtcgatactcattaaaataaaaactaagcagaatgataacttggcatattaaagtattagactggtggctttaaacctactttttcttgctcagaacagat

SEQ ID NO: 247249 - DNA, 543 bp, Homo sapiens
taagaaatctggcccaagagaatttagagaacaaagcttacagaaattgcagtggatttgttccacaacctggtgcagagctaaaagcaaagtaaagacatgtttctctgctcttgaacagtcctctctgtttcaatcagcagcagagagctgtatagctgaatttcttgttgcagcatgcatcattcatgacctgatggagtagacaaagtacataacaatcgatgcagaaaccctgccgcatgaaaaagttcaccggtaggttatagacttctccgattttgttttctgctgatcaaggatatttcctcctcccatttcagaaacaaattactgatacattttgataatgacactttgaccagatatttctcctttgatttatatgctgattggggtgatgagagttttggcaactgttctagtgaaatagaatttcatggtcratactcattaaaataaaaactaagcagaatgataacttggcatattaaagtattagactggtggctttaaacctactttttcttgctcagaacagat

SEQ ID NO: 247250 - DNA, 623 bp, Homo sapiens
aaacgttttctggctcaatgtaggcacaataagtcaatgttaaatgaattagtgaaagacaataatatatataatatatttacattatgatttaaactatcataaactatggttctgaaaaaagttatctttttataatcaatgaggatagtatcacctaagtcaaaaatgggggaaagataaactgtaaagaagatattaaaactgccaaaagtacttggcacttgacgacagtgagaagttctcaactttgagtgcacggaagctttataaaatattgatggctgaacccacccctagagattctggtttaattggtctgaggtatagygtgagtggaatgatttctaaagctcccacatgcagtcgtgatgcagtgtcctcccatgcacagtgattctcagttcatggacccaacattgctatgagatatctttcagttgcaaaggttttgtgatgatttctggaattgaatagtgaagagatgacagggtcttcatctgaaacttcagtgtttgcaggatcacctaatacttccattcctatgagcgtacatctttcagtaagccttgattttttttctagctcctcctgccacacccaaaaccaaattttactaaggc

SEQ ID NO: 247251 - DNA, 623 bp, Homo sapiens
aaacgttttctggctcaatgtaggcacaataagtcaatgttaaatgaattagtgaaagacaataatatatataatatatttacattatgatttaaactatcataaactatggttctgaaaaaagttatctttttataatcaatgaggatagtatcacctaagtcaaaaatgggggaaagataaactgtaaagaagatattaaaactgccaaaagtacttggcacttgacgacagtgagaagttctcaactttgagtgcacggaagctttataaaatattgatggctgaacccacccctagagattctggtttaattggtctgaggtatagtgtgagtggaatgatttctaaagctcccacatgcagtcgtgatgcagtgtcctcccatgcacagtgattctcagttcatggacccaacattgctatgagatatctttcagttgcaaaggttttgtgatgatttctggaattgaatagtgaagagatgacagggtcttcatytgaaacttcagtgtttgcaggatcacctaatacttccattcctatgagcgtacatctttcagtaagccttgattttttttctagctcctcctgccacacccaaaaccaaattttactaaggc

SEQ ID NO: 247252 - DNA, 452 bp, Homo sapiens
atagtaacatacgtaaatccttagttatcttttctttaattgaacttgggagcatagcttcttcacctgttaaccttaaatcaccgctaaaaattacagtttgaatttcctgacaaatgaggcaactgtcctaatcataataataacttttgttcaaaataccaacagwgcttttcttactaattaatggtagattcacccaatcaaacagcaatcgccactttccctgacatcatttctgattgcaagttgcaaggcctttataaaaatagaatctctagatctcactgtgtctatctctcctggctgggttacttcctacctaaatcttgctggagtgtgtgtgtttgtgtgtctgttttgtctgtgtgagtgcgtatatcctggagagtgggaatagatggtgaatacaatgaggagtgtacacaacggaaacctaacgtggagtgcag

SEQ ID NO: 247253 - DNA, 532 bp, Homo sapiens
aatgaggattttaataattatacttaaggrtatttataattaagtatctttaattaatttataattatctttaattataatattttatgtatatttcagtaatatgtattatatttaagtatatgtaataataaaatatagataatatgtgcccaaagacatttctttatgtacaaatagtatgcattttctggcttatgcaggctaaactattctaacatctttaacgttttctgataatggtgaatgtttagattttgaattatttttgttgctgaatacaaatattctagcttttttcaaaattatgaagttcagagctagatacaatttttagtaagaacctacacacccatgtatggaaatgaagatacaatattttattgttgttcttatgtgctatatttgtatcagagtatccgagtgtcatactaattcacattttgtcactgttttaaatgttatctcttgtacttccaaccaccaatggtagattttaacctaaatcttatgttaaatgttataaaagaaa

SEQ ID NO: 247254 - DNA, 571 bp, Homo sapiens
accttgttgatagttctatcatttataatgtacatattcaatgaggattttaataattatacttaaggatatttataattaagtatctttaattaatttataattatctttaattataatattttatgtatatttmagtaatatgtattatatttaagtatatgtaataataaaatatagataatatgtgcccaaagacatttctttatgtacaaatagtatgcattttctggcttatgcaggctaaactattctaacatctttaacgttttctgataatggtgaatgtttagattttgaattatttttgttgctgaatacaaatattctagcttttttcaaaattatgaagttcagagctagatacaatttttagtaagaacctacacacccatgtatggaaatgaagatacaatattttattgttgttcttatgtgctatatttgtatcagagtatccgagtgtcatactaattcacattttgtcactgttttaaatgttatctcttgtacttccaaccaccaatggtagattttaacctaaatcttatgttaaatgttataaaagaaa

SEQ ID NO: 247255 - DNA, 532 bp, Homo sapiens
aatgaggattttaataattatacttaaggatatttataattaagtatctttaattaatttataattatctttaattataatattttatgtatatttcagtaatatgtattatatttaagtatatgkaataataaaatatagataatatgtgcccaaagacatttctttatgtacaaatagtatgcattttctggcttatgcaggctaaactattctaacatctttaacgttttctgataatggtgaatgtttagattttgaattatttttgttgctgaatacaaatattctagcttttttcaaaattatgaagttcagagctagatacaatttttagtaagaacctacacacccatgtatggaaatgaagatacaatattttattgttgttcttatgtgctatatttgtatcagagtatccgagtgtcatactaattcacattttgtcactgttttaaatgttatctcttgtacttccaaccaccaatggtagattttaacctaaatcttatgttaaatgttataaaagaaa

SEQ ID NO: 247256 - DNA, 571 bp, Homo sapiens
accttgttgatagttctatcatttataatgtacatattcaatgaggattttaataattatacttaaggatatttataattaagtatctttaattaatttataattatctttaattataatattttatgtatatttcagtaatatgtattatatttaagtatatgtaataataaaatatagataatatgtgcccaaagacatttctttatgtacaaatagtatgcattttctggcttatgcaggctaaactattctaacatctttaacgttttctgataatggtgaatgtttagattttgaattatttttgttgctgaatacaaatattctagcttttttcaaaattatgaagttcagagctagatacaatttttagtaagaacctacacacccatgtatggaaatgaagatacaatattttattgttgttcttatgtgctatatttgtatcagagtatccgagtgtcatactaattcacattttgtcactgttttaaatgttatctcttgtacttccaaccaccaatggtagattttaacctaaatyttatgttaaatgttataaaagaaa

SEQ ID NO: 247257 - DNA, 522 bp, Homo sapiens
gctgtgatttttttctatgagttctattaattattacgaaaaggttactgaaatctctggctgtaattgtggatttgtatacttttcttgcagttctttttgttttttgaggtttttttttgtttgcttcatgtattgtgatgcatttttrttaagcgcatgaatgtttaaaattgctatgcactcttgatcattgacttctttattattttgagattactcttttcaactttgataattcttttgaaatctaccattatagccactccagccttcttttcattagtcttaccatgatatatcatttttcatccttttacttttagtctatttggttctttatatttaaaatgtgagtttgtgtagcattcggttgagtcatgcctttcttaatccaatatgacaatctagtaattggatattgagaccatttatatttcataagatttgtgatgaggtaggcttaagtttactatctctctatttgttttctatttgtccattctgttattggcttatttt

SEQ ID NO: 247258 - DNA, 609 bp, Homo sapiens
aaatacaataaactataaagtataataaaatcctttttctgtttcatttcacccaatattttttatcccagtttctattcccttagcatctgattttattaaacactatttttygccaccctagtctttctcaaactccattctcttcacttagaaaccactttactgaatttgagaatacttgatgctcagttaggacaaaatgaaatagcattaacatcagtctccttggctaccaagggaaggccaaagtgtgtcaccatggggtcaccagcactttaactttagaactcagtgtgtcattgcatctagaagggatcaagctctggggatctggctcctattaatcaaatcattaagaacttgatatagaaaccagcaagtcaattatcaacatactaagaggaaaagatctactaatgttatgggatctttggggtgttgctttcctggccagaaatatctgcggacaatggcgccttggcccgagttcttgtcctgtgtccaggaagaatgaggcagacaagtggagggtgagcaagatgaagaggagctttattgagtgttagaaaagctcagaggagacccatagtggatagctcctctcta

SEQ ID NO: 247259 - DNA, 609 bp, Homo sapiens
aaatacaataaactataaagtataataaaatcctttttctgtttcatttcacccaatattttttatcccagtttctattcccttagcatctgattttattaaacactatttttcgccaccctagtctttctcaaactccattctcttcacttagaaaccactttactgaatttgagaatacttgatgctcagttaggacaaaatgaaatagcattaacatcagtctccttggctacmaagggaaggccaaagtgtgtcaccatggggtcaccagcactttaactttagaactcagtgtgtcattgcatctagaagggatcaagctctggggatctggctcctattaatcaaatcattaagaacttgatatagaaaccagcaagtcaattatcaacatactaagaggaaaagatctactaatgttatgggatctttggggtgttgctttcctggccagaaatatctgcggacaatggcgccttggcccgagttcttgtcctgtgtccaggaagaatgaggcagacaagtggagggtgagcaagatgaagaggagctttattgagtgttagaaaagctcagaggagacccatagtggatagctcctctcta

SEQ ID NO: 247260 - DNA, 625 bp, Homo sapiens
aaaaaccatctttgtgttacatttgcccctaccctaaggatggatctagacattcacttcaaattttagtgtagacttaggattcggtatactgctttaggctgcaggaacatcctgagttagatacccatataatttctgtgaagaactcatagcaaactttttcaaaaatgaattcactatgcaatatttacaaatgtttaattcttgcattaactaccgcttctaggaaaagtacagattataattttaataaacataccattggttagattccctgagatttacagtacatcaaaccagatgctgtctttttcccctctgcagtccctaaattccaatcacccttaatgcagttgtattacaattttagttttaagaagtgtacaaaatatacaaggaaaggcaaatgaagatgaaaccacccattcctcactactaaacccctaatttttggaatatatgttgatttctctcattaaggctacatttttcaggaatctcccagaactcgacccaccacctaccatcttacatcargttgtaaaccaaaaacatagagatgtgtaagaggcagatgtggtggcagaggtgaggctgtagacatcaggaacaggtcagtaca

SEQ ID NO: 247261 - DNA, 536 bp, Homo sapiens
aggcatttttgttcacctcacttcagacatcagttttccccttgcttcagacatcaggtttagaccttggaaaatgaatctaacaacattttcctggttctgagtaggatgagccagaaagtagtgagcctatagaaagacatccaaatgttaactgcccctggtacctcatagaaatttccaactcaatgtatccaaaatgaattttactatctctcttcttcatcttgcttctactgcagtgttccctttcttggctaattgtcccgacaatccatctccgaaagacatagggtttgtccccatctgctctaccctccacgttaatcactcccaaccagtagattattcatatataygtgaataattcttctacagaaattcaatcaaattgtcaccactgctgttatgattagctatgataacataatatgtctccaatgtatctttctaggcctatatttctacccctgcttgactgtgtcactccacttctctgcctatcctctgtagtccatgttcaagaaacttcttac

SEQ ID NO: 247262 - DNA, 536 bp, Homo sapiens
aggcatttttgttcacctcacttcagacatcagttttccccttgcttcagacatcaggtttagaccttggaaaatgaatctaacaacattttcctggttctgagtaggatgagccagaaagtagtgagcctatagaaagacatccaaatgttaactgcccctggtacctcatagaaatttccaactcaatgtatccaaaatgaattttactatctctcttcttcatcttgcttctactgcagtgttccctttcttggctaattgtcccgacaatccatctccgaaagacatagggtttgtccccatctgctctaccctccacgttaatcactcccaaccagtagattattcatatatatgtgaataattcttcyacagaaattcaatcaaattgtcaccactgctgttatgattagctatgataacataatatgtctccaatgtatctttctaggcctatatttctacccctgcttgactgtgtcactccacttctctgcctatcctctgtagtccatgttcaagaaacttcttac

SEQ ID NO: 247263 - DNA, 542 bp, Homo sapiens
tttcattgttatggaaaccattccatggaaggcagcctgtgggtcaacgggaagagtactagcatgaggccctagagtcctgcaatctggttagagctttgacagtaactgtgtgacttttgctttcttgtaatcttatccacttaatctctttgagcctctattttctcaagtgaagaatgatgaattgaaccagatccatagttgtcaatattttaaaaatcacagtcgtttttgttcaaacaaaatctttcttggaacttaacgtaagcaaaacaagtaatggctaagattctgctgcttaaacagggtgggtgttcttccacttcttccaactcactccatctttactcatccgtctttctcataccccagcttcctgtggtagcctcttgaggaatcggggatctcaaggaactctcatgaaccaaatactagactagttcactgaatcgctaaaattcttcttgttctaaaagcctgattttaggaattagtgttaatgttaggatrgactataccttcgtaaaatagaatacagc

SEQ ID NO: 247264 - DNA, 559 bp, Homo sapiens
attcctctcccaggctatgtctctaggagataggtattcctaatcattctgtttgggtcaagacattttattccttccctaccttttactacttgttcctatgcaacattacaaaccagcaaagtatgaactgacctggatataggagatggccctagagctgyagacagaattaaaaatcgtatcttttttttttttttttgtaaagcaccccgacatctttgggaaccgttcactctagggaatctttttatccattatttgcaaatagcagaccatcagccagttacaaagacttttgatagaggtggtgggcatcttttactttcacccaaccagtataccaatatgcttcatgtgatagtatacatatccttgtcttttgaagagctagccattcttattacaatgtcattttgatggcactgtcagtccaactgtactgcattcattctggccagtgagtggatggccatgtgaaccaggctgggacagtgagatgttttcctatgaacgtgagtattgaatggaatgacacaagaatggaacatggtcactg

SEQ ID NO: 247265 - DNA, 559 bp, Homo sapiens
attcctctcccaggctatgtctctaggagataggtattcctaatcattctgtttgggtcaagacattttattccttccctaccttttactacttgttcctatgcaacattacaaaccagcaaagtatgaactgacctggatataggagatggccctagagctgtagacagaattaaaaatcgtatcttttttttttttttttgtaaagcaccccgacatctttgggaaccgtwcactctagggaatctttttatccattatttgcaaatagcagaccatcagccagttacaaagacttttgatagaggtggtgggcatcttttactttcacccaaccagtataccaatatgcttcatgtgatagtatacatatccttgtcttttgaagagctagccattcttattacaatgtcattttgatggcactgtcagtccaactgtactgcattcattctggccagtgagtggatggccatgtgaaccaggctgggacagtgagatgttttcctatgaacgtgagtattgaatggaatgacacaagaatggaacatggtcactg

SEQ ID NO: 247266 - DNA, 531 bp, Homo sapiens
gggtttaaaaataacaaggaattgtatttgaagagctgtgcttaaagaactacacttgagaaaccacattcatacttggacctgatttagatgacgagattatggacttgaagctgatattgcaatggaatgagaattttgaagtctttgggggcagtgagtacattttgcatttgagaggtaaataaatcattgggcaccagaggatacactgtggtgggcagcctataaggtggctcctwgtgatccttgccttctggtattcacatcgttttgtaataccttcttgctgagtgtgggctgggcttgttgactcacatataacaaatagaatacctgggaagtgataggacagtaattgagggattaggttataaaaggctgcagttttcatcttggaggctctctctcactctcttttgaatgacttaccctggggaagccagctgccatgctataaagcataaggcagccctgtggcaagtcccatggaaatggacttgaaaatagactttctgagacctgcccata

SEQ ID NO: 247267 - DNA, 531 bp, Homo sapiens
gggtttaaaaataacaaggaattgtatttgaagagctgtgcttaaagaactacacttgagaaaccacattcatacttggacctgatttagatgacgagattatggacttgaagctgatattgcaatggaatgagaattttgaagtctttgggggcagtgagtacattttgcatttgagaggtaaataaatcattgggcaccagaggatacactgtggtgggcagcctataaggtggctcctagtgatccttgccttctggtattcacatcgttttgtaataccttcttgctgagtgtgggctgggcttgttgactcacatataacaaatagaatacctgggaagtgataggacagtaattgagggattargttataaaaggctgcagttttcatcttggaggctctctctcactctcttttgaatgacttaccctggggaagccagctgccatgctataaagcataaggcagccctgtggcaagtcccatggaaatggacttgaaaatagactttctgagacctgcccata

SEQ ID NO: 247268 - DNA, 509 bp, Homo sapiens
aatattcatccatttctttctccatgtatattattctgacaccaatttcagggaaacagagattaaggacaggatataaatcaagcagctctacttcaataaaacaaatgtttaagatctctactttttataacttttgtttatgagaaaacaagggctcatttattcgtagtttagcttctgtgctttatattgtgaaatgaggtagaaatctaggaccttaacccaagtatgtttcaagtggagagctttatgtagtacagaattaacaaatatttatggatgatgataataatgatgttttggtgcatgatgccagaaaggacatttattgaataacactattttaaaatgccttgatatatacaatctcttttaatattrtaataattttaaaaacaaggtattactatttctgttttacatataagaaaactaactcagatcagtaaaataacttgcctaagatcacacagctggtaagaagcagaattgtaattttagttcaa

SEQ ID NO: 247269 - DNA, 548 bp, Homo sapiens
gaatctgtattttattgagaaaataacagctgtcgcagcagtgtcccctactgagttccacttccttactaggacagtgtcatatgagcmtcctttattataagggaacctgtgaaattagtgtggattttagctgcatacattgaaaccacagacaaaaaactggaattctgttaaaacagagcaatagaattagcagacagcagtatccagcacaaaaacagagacagggggaaatgagagctagagctcagttaaaaattgagaggaatttatgaagcctagaaagagatgattcattatttctcatagaaaatacattggacaactagataaaaaggatcataagggagtcatttgctcaacgacttaaatatattttctgttaacctccctattggtctgattacttgaacaccaaagagtagtatcctactggcatctaggctatctcatttactgtgaggaaagacacacttaggacacccaaacagcataaagatccaattggagtaatagtggccttctgggtgattttataagtaaga

SEQ ID NO: 247270 - DNA, 647 bp, Homo sapiens
taaaaactgttgcttttgtaccttttttaaatcagtggttcatgaatctttcactgttatgtgaagcttgagagattcagaaaaataatataactatctctctccctaaataatatgattatctctcccaaaataaattttaaaaaattgtaagccattcttttcaataattcctgagaaagaaaaaagcctaaatttatgaattctgacttcaatgctctttattaagaccacaactaactgtagtatcaccttcctctcaggccaaaatgagcaagaaagcagaagagaaattctttcttagacaacaggactttctgaccttgtggggtttctgtcaagcatatgtcaggcctacagaacataaaaatgtctggattaatctataaatcaaagtacttttatttgtatcttgggaatttgtgttcagtggggaccaaaaccttaaaatcrtgcttttctgtgaaaggagaatcctgctgctattaatgtttaagatttgtgggaggaggaatatgtattccttccactttcattgacacctggattgcttattgatcaagattggaatttacatggctgaaaagagaaagagacattggctggggtttccatccctctggcttcaaggtgcacacatgtgttat

SEQ ID NO: 247271 - DNA, 567 bp, Homo sapiens
atgtcacgcattatttaaaggctgcaaaagccatgaaagacatgaaagaacacaagcatttacaacatgaaagaacacaagcattctcatactcaagaatccttaagaaaaatgtagtcctaatccagcccactgaaagttaaatgtacttaatgtgctcattaatgggaacttcatagcttcaaatcagcctggtcccatctaccaacatctctcgcccggctttcctgcaatagtcagcacctttccctcctcccagtcttgtcccctggagtctgctctcagcatagcagagtgaccacatcaacacccaagtcagagccctccagtgcgcactggtctacaaagcccttcccamcccccaccccacgtgccctccggatccttgtgacgtgtctcctgcataccctagcagccctggcctcctcactgcccctcctgtacatcaggaaggcgactccttgagtcttggctctggccgcctcctccacctgcagtgagttaactcccttacctactctaggtcattgctcaaatgtcagcatctcaatggggccctccctgact

SEQ ID NO: 247272 - DNA, 483 bp, Homo sapiens
ttacttgataaataccatgttgaatattttagtctttccttttaggttctatcccttcactcaaaatgcggttataaataaatgtacttttcatgtgccttctgcctaaacccactttaatataactttacagtcccattatcattatagtctcaaagctagactcagcctgaaactaccctttcatttggaacccttattaaaatgccacatacagctccttcaaataaaaacaaaccctaggacctgacrctaggcttcctttgttgctactcataatggccaagttctgtgcttataatacatcttctttcattttattgctacatatccaagggttttatatgtttttcttattatatcttaattcaaaacaccatcacgctcttttccagatgaaaataaggaaaagaaattgagcaactgactgacttaaaggtcataaaactatatagtagcagagtcagcaaaagaagaaacaca

SEQ ID NO: 247273 - DNA, 397 bp, Homo sapiens
cagtctaatgagatggaacacatttagacagtaactgcccatttaccagcaataactgagcagggagcctagacttccagtcttgtgaggacgtaccaaggtacccaacacccccaccaaggctgagtaaggactgcgacttttatccctgcatggcagtagtaaggagcccatccctcacccsccagcagtgtcaggggaacctggacttccactcccacccaggagtgatgaggccctccctgctggggtcatgtcagaggaggcctagtggagattcagtgacttaaccttttcccagagataatgaggccacctttcctccctcttcccccatggtgacagtgaaagcactgtggcaagcagtaggcactcctacccctcctagccagggagg

SEQ ID NO: 247274 - DNA, 463 bp, Homo sapiens
aatgcacaaattcagactcatgaaatattcaaacacagaagtatatctagcaagaggaaaaagcaacctggcccttagtctacttctctctccagaggtgacacaggaaacaacagtttgatatcacacatccagtgctttttattaaatgaatttttatatacatacaaataaaaatatatagcttatatttttaacatacaatttttaacataaatatgtttgtattgtttatgcttacttaaaaacatgtacagtgtttttytaagacaaatcaaaggtatgcatattttaccttttgatagattttataaatttgccatacaaaaaagctttactaatttttgttcccattggttatgattgccagttcccatcttcctatgattctctctatgctggaacattattcatattttccatttttgccaatgtgttgcatgggaaatgacacgtcatgagt

SEQ ID NO: 247275 - DNA, 400 bp, Homo sapiens
ggttgggctggtcttgaaatcctgacctcaagagctctgtccacctcagcatcccaaattgcagggatcacaggcatgagacaccatgctcagctctatgactgattttcttattttttattgccctgtatgcctacaactatgtaaaaaaaaaaaaaaaactacttaagaagctcaagcccggtaagataaattcctgattagctaactcaraactcacagttgggatttggtttgcgtcttggtttttacttttttatttgaacagaaagcaaattggaggttgccagagactagaaagaaggactgtgagttggctgctaatgaatacaaggtcttctttttgggtgataaaagtgttctgggactagatagaagtggtgtttgcacaattttgtga

SEQ ID NO: 247276 - DNA, 601 bp, Homo sapiens
ggtggtttaggtgtttattggctgtggatttgtaaatgatttcttggctttatcactgaatgaacataaaacaaaagaaaagatagatcaatcgaatttcatcaaaactaaacactttggtgcatcaaaggacactgtctagttaaaaggaaaccaacagcatgggacaaaatatttgcaagtcttatgtatgttatatattccagtcacccacttggatctcttccaactgcactttccattttttcttacgctaaaactttttaaataaacatccacgtttgctgtgaaacttttctcagtctcttttgctactttattcccctcagccaaattctttcttctgaggaggcaagagttgatgttactgcagaccatgatagatttgacagcagtaacagatactttcactggtaacaggtcgaggagctggtggayagtgtggctggagtacatgcctagtatgtggtgggcctggccccaggcagttctggactgtggagggaccagaaccccattctgagagcactctgtggaatgctgaggaagaagttttgtctttttagtgaggtgaagttccttcacataatataaaattaac

SEQ ID NO: 247277 - DNA, 577 bp, Homo sapiens
attggcttggcatggtggctcacatgtgtaatcttagcactttgggaggcccacatgggtgaataattttgcagccagccaaaagcccatgggatgtgtgacttcagcattccaccagaggctatatgatcaaacagcaaactgtttatcatgaatgcatgatgtgggcaaactcatactgccctgccaacaaaaggtttgctgagggacatcactccccagccctgggctccttgaagttatctactgagaaaattaragcctattgttcaaaggatgcagttcaagcctgctgtgaaccatacagctgactgacaattacccgacaatcacccccctccttcttgctgtctctttcacctgatagacacagatgcctgtttaaacctcagcgcccttgtccattagaagcaaggttcccctgacccctccttccaaatatactcttttgtctcttgtcttttgttcccaagttttcaccctttttgttcagttcccctaggtccctgtgggttttacaagttgtgctcgaagaggtgacagtccaaacatgggagttccaggacatgaacaaaga

SEQ ID NO: 247278 - DNA, 592 bp, Homo sapiens
taggcacattgctgattgaattaaagaaaacatttctgatatggcttggctctgtgacccacccaaatctaatcctgaactgtaatcactacatgtggactgagggaagtgattggattatgggggcaktttcttccatgctgttttcgtgatagtgaattctcatgagatctgatggttttataaatggtagttttccctgcacttacacacactctctctcacttgctgccatgtacagcatacctgcttccccttccaccatgattgtaagtttcctgaggtctcacccgccgtgcagaactgtgagtcaattaaacctcctttgtttataaactacgcagtctcaagtatgtctttatagaagtgtgaaaacaaactaatacaatttcctagcctcccttggcattagggatgatccaaaaatgtccatgcaagttaagggcctccaggaaagaagttttagaggggtacagtcagccaatagggaccattttgccctccccatcttcacttcttcttgtgtcttaccaggatggcttggagttgcagtggtcacctcagatcttaaggtcactttggagatggaacc

SEQ ID NO: 247279 - DNA, 592 bp, Homo sapiens
taggcacattgctgattgaattaaagaaaacatttctgatatggcttggctctgtgacccacccaaatctaatcctgaactgtaatcactacatgtggactgagggaagtgattggattatgggggcattttcttccatgctgttttcgtgatagtgaattctcatgagatctgatggttttataaatggtagttttccctgcacttacacacactctctctcacttgctgccatgtacagcatacctgcttccccttccaccatgattgtaagtttcctgaggtctcacccgccgtgcagaactgtgagtcaattaaacctcctttgtttataaactacgcagtctcaagtatgtctttatagaagtgtgaaaacaaactaatacaatttcctagcctcccttggcattagggatgatccaaaaatgtccatgcaagttaagggcctccaggaaagaagttttagaggggtacagtyagccaatagggaccattttgccctccccatcttcacttcttcttgtgtcttaccaggatggcttggagttgcagtggtcacctcagatcttaaggtcactttggagatggaacc

SEQ ID NO: 247280 - DNA, 518 bp, Homo sapiens
cattctcttgaacttgcatgcattctgtgtttttatgcttctattatgcatatgtctgaatccatacgtgattgataacattgttttatatgttttaaatatgtgtgtaaatggtatattaatgtggtttgattttttacacagaccttggattttttcaagatcatccttcttgatgcctgcatctagctcacgggaactcactgctgtgcctgtacagtgttttcccattgctctattgatgaacatttaaattgttttccaattttcaatattgtaaataatgcaataataaacatcctcttacctgtcctattacacaccggagtaagagtttttctagggattatatttagacataaaactagttgtcatagggtatgyatatccttacttttacaaggtatttctaaattgccctctaaagagataaaaacaatttggacttcctctaggatggcagtgcccatttcccataaaaacttggcattgctgaacctttcaatttttgacagttg

SEQ ID NO: 247281 - DNA, 524 bp, Homo sapiens
aatctttttcaaaaataatatgtcctttaggctttgcagcctggatgtgtggaaaagtggaggtagctggggagttcgtcttgtccatctggacaaacaggaagaactatccttatgcagtgctggctcaccactgacccgagggagtgagaacgtggggactaaagggtgggaacaaatcagyctttgtaccttccttgctgagtgtggataccattcagttagattgaacattgaggtcagccctgatgtaatgtgagagcacttcccctggagtgagcagatggttttgccttcccagccccttaaatgtttttaacccttgctactcaggtgaccagagcatcttcatttcctgcaccaggatcagacttgggcttgagccaatgacattcatgggccagatgacccaaagctgtagtccacctgcttactgtaacacagaatgcccttttccccactaagttcttaccctttcctcagttctgttgaaataagatttctgacctgttctttagccactt

SEQ ID NO: 247282 - DNA, 616 bp, Homo sapiens
cctgcaccaggatcagacttgggcttgagccaatgacattcatgggccagatgacccaaagctgtagtccacctgcttactgtaacacagaatgcccttttccccactaagttcttaccctttcctcagttctgttgaaataagatttctgacctgttctttagccacttccatggctgaccatgaactctactcttttgaccacsagtacctgctgaaagttgctggaatccttctaagccaatatcaggactacctgtcctgccctgccctgccctcagcctctgccaatgccacttctttgctgttgtttgggcagaaccctggatttggatgttggtttggatcttagtccccagaacttacaatctgcttgtttttttcctctggggtccacaccatatccaacccaatctcatcattctgccatgctcacgttatccctgcctgctcttgctctcatgttcatacatcctcaaagagtccactctccttcaaggccatacctcatttctccttacactatagatgaaacacatgactattttccttctgattcctaagttctgagtctaggaccactttgtaatcaggtttaattccagaccacagctga

SEQ ID NO: 247283 - DNA, 616 bp, Homo sapiens
cctgcaccaggatcagacttgggcttgagccaatgacattcatgggccagatgacccaaagctgtagtccacctgcttactgtaacacagaatgcccttttccccactaagttcttaccctttcctcagttctgttgaaataagatttctgacctgttctttagccacttccatggctgaccatgaactctactcttttgaccacgagtacctgctgaaagttgctggaatccttctaagccaatatcaggactacctgtcctgccctgccctgccctcagcctctgccratgccacttctttgctgttgtttgggcagaaccctggatttggatgttggtttggatcttagtccccagaacttacaatctgcttgtttttttcctctggggtccacaccatatccaacccaatctcatcattctgccatgctcacgttatccctgcctgctcttgctctcatgttcatacatcctcaaagagtccactctccttcaaggccatacctcatttctccttacactatagatgaaacacatgactattttccttctgattcctaagttctgagtctaggaccactttgtaatcaggtttaattccagaccacagctga

SEQ ID NO: 247284 - DNA, 616 bp, Homo sapiens
cctgcaccaggatcagacttgggcttgagccaatgacattcatgggccagatgacccaaagctgtagtccacctgcttactgtaacacagaatgcccttttccccactaagttcttaccctttcctcagttctgttgaaataagatttctgacctgttctttagccacttccatggctgaccatgaactctactcttttgaccacgagtacctgctgaaagttgctggaatccttctaagccaatatcaggactacctgtcctgccctgccctgccctcagcctctgccaatgccacttctttgctgttgtttgggcagaaccctggatttggatgttggtttggatcttagtccccagaacttacaatctgcttgtttttttcctctggggtccacaccatatccaacccaatctcatcattctgccatgctcacgttatccctgcctgctcttgctctcatgttcatacatcctcaaagagtccactctccttcaaggccatacctcatttctccttacactatagatgaaacacatgmctattttccttctgattcctaagttctgagtctaggaccactttgtaatcaggtttaattccagaccacagctga

SEQ ID NO: 247285 - DNA, 593 bp, Homo sapiens
aaagaataattttcctagatatcccaactcatttgaacaatgaggaattgagactaagtctcttcaaagaytccatttattttggtaagatgccattttacatttagtgtagtaatacaattttgacttaaaaggccagggtttgagaaccaagtggccagtttgactgggctatcatgtgatcatcatggtcattatcccttggtctccttgagggtcagttctttcatctataaaatagatatgatcatagcgaatcttcttttcactatacaaggttgtcatgagaatcaaataaataaatgctaaagcactacacaagagatgttatgattttatctttggcagtagtgctaatcattataatagcagcctattaataacaatgatattacaagaaacagcaattgtggtagtgttggtaaggtacttctggaattatttatatatgtggctacttgctggaaaagccacccatgtgttgagataatgtgtattgtgctctttcttgaattatctccttgggactttacaaccctaagaggtatatcttattactgtcattacacacacgcacactcaaaaaaagaaaa

SEQ ID NO: 247286 - DNA, 593 bp, Homo sapiens
aaagaataattttcctagatatcccaactcatttgaacaatgaggaattgagactaagtctcttcaaagattccatttattttggtaagatgccattttacatttagtgtagtaatacaattttgacttaaaaggccagggtttgagaaccaagtggccagtttgactgggctatcatgtgatcatcatggtcattatcccttggtctccttgagggtcagttctttcatctrtaaaatagatatgatcatagcgaatcttcttttcactatacaaggttgtcatgagaatcaaataaataaatgctaaagcactacacaagagatgttatgattttatctttggcagtagtgctaatcattataatagcagcctattaataacaatgatattacaagaaacagcaattgtggtagtgttggtaaggtacttctggaattatttatatatgtggctacttgctggaaaagccacccatgtgttgagataatgtgtattgtgctctttcttgaattatctccttgggactttacaaccctaagaggtatatcttattactgtcattacacacacgcacactcaaaaaaagaaaa

SEQ ID NO: 247287 - DNA, 280 bp, Homo sapiens
gctattataaacagggctgcaatgaatattattgtacttaaacattggtacacgttcttctttcctaaggataaattccttgaagtaaaatagctggctttcaatgggtatgcatttttttaaagcttttggtatgttattccccaatcactttctgttaggattgtattcatttacagtcctgctggctgtagttcaggttaatttcaactactttatcttgagttgtctccatgaaaaccagttrgaaaccgaaaccaaagccccaaacaagaaaagc

SEQ ID NO: 247288 - DNA, 561 bp, Homo sapiens
tttcaaagtaccattgttttgaaataagtctgataaattcaaccaccctcaaattgttattcttatctttcaatggacacagaagtcctgaaaatgtggtgatactcatagtcttcacgaactttgaaagggaaaacaacaatttctctggttgaagtcaacataacaataggctagtttgaaaatcctgttttttttcagttgcacaaaggattgtcaataaattcaactttttaaattactaagctggataaactgaattcaatagattttttggaagcattttgtatacatagataccaccaccatttccaaattgcaacccttactgttggggaagagtaaatattttaatgaatgctatatattttaacaagctctgaactctgcggttggtttaagctaagggtgcaatttcaggcatctaaataagtaaataaatgaggaagaaaatccatatkaattgcagtaatttgcggcactttcaaattcttaattaagaaataaaataggattcattagccatgcccagtgtagatggcatacatagatcaccattat

SEQ ID NO: 247289 - DNA, 562 bp, Homo sapiens
tctgctctggttatgtgggctgtgggggtaatctcaatgtgtgcttgtttggaagaaagagcactgatgtacctggctgtgggcagagatggctggtcattgtattcctggtgagaacacaaatgtagactataggcatgtatcccttgggccttccctttcctgctgttctacctatcttagtgttgatatccaggtaggcatgaacactctgtggagacaggcaygggcaggtgtgggcagccaattgcattcagctcagcagtgagaagggtacagagtacagggcatgagcaatttgaagaggtctggaaactcaaggtgaagaaagaaaagaaagaaaataatacactgaagatctctaaaagaaattgaagaatcttgtctgggattagacattgaaaaattttggacaggtagcaaagtttttggtgttacttgtagactcaagcaaatcagaaatgagcatatacacttctcaaaacctattatatcttcatgtggaaggcataagaatagtctgagacatactttttgttttgggggcacttatgggttgctt

SEQ ID NO: 247290 - DNA, 562 bp, Homo sapiens
tctgctctggttatgtgggctgtgggggtaatctcaatgtgtgcttgtttggaagaaagagcactgatgtacctggctgtgggcagagatggctggtcattgtattcctggtgagaacacaaatgtagactataggcatgtatcccttgggccttccctttcctgctgttctacctatcttagtgttgatatccaggtaggcatgaacactctgtggagacaggcacgggcaggtgtgggcagccaattgcattcagctcagcagtgagaagggtacagagtacagggcatgagcaatttgaagaggtctggaaactcaaggtgaagaaagaaaagaaagaaaataatacactgaagatctctaaaagaaattgaagaatcttgtctgggattagacattgaaaaattttggacaggtagcaaagtttttggtgttacttgtagactcaagcaaatcagaaatgagcatatacacttctcaaaacctattatatcttcatgtggaagrcataagaatagtctgagacatactttttgttttgggggcacttatgggttgctt

SEQ ID NO: 247291 - DNA, 503 bp, Homo sapiens
atacatataataaaatagtrttcagccacaataaggaatgaaactctgacacgcgctgcaacctggattaaccttgaggacattatgctaagtgaaataagccagtcaaccccaaaaggataagtgctatatgattcattctctcattctctctccacccaaccaacttagggcacttagagcacgcaaactcacagagacagaaagtagaatggtggttgccagaagctggaagtgtagagagagaataaatagtaattgttcgatgtgtacagactatcagtttaggatgatgaaaaagttctggagataggtggtagtaatgattgcacaacaacgtacacatactttatgtcatcgaacgaacatttaaacattaaaatggtaaattatgtgttttttaccaaaataaaaaatacttagcccaaaaagaaatagtataatgacacttattggatgctaagttccatctcatttcatcctcacaacaatctcaagaagta

SEQ ID NO: 247292 - DNA, 589 bp, Homo sapiens
ttgaaactacatcgtgaaaattcaaaattgttgaagctgttgaaagtgtgagaaaaagagtgtgatgagagtagaaataatgtaaggctgacaaaaagaggacccagaatatggatacatgagttcaagaccaggttctatgaccaactagctgtgtgactttgtgtatattactttacctctctgggccttgaatttcttatcttaaaaatgagaggtgtacattgagcacaacagtcgttttattaaccaatgctctgagcctgtgaacttaacaaaatgcaatctgggattggctcagtttcttggaccgttcacataccttttaacttctgtgtgtcaaacatttgtctgagagctccagctgtccagttkcagccccccaaggagaagtagaagagccctggacttggactgacaagtcctgctttctactctgctgctagaattgagatcctagaagtcaacaaatgcatctgagtctccaggttctcattcttaaaatgtagacataatctactgcaaggagctgttatgagtactaagcaagatattttagatgagagcaagagagtgtgatgtatgtgtg

SEQ ID NO: 247293 - DNA, 610 bp, Homo sapiens
cagcatttgagtcttcccagtacagggtcttgtggatgccaggatagtctagtagacatgtgatcctaagataggatttgatggccacatagacatagcctcagtcaccaaggacttactgcctgaccctgagtcattaaatctaaccttaggggcaagagtttgtctgggattttgatttccatgtattagcaaatccttttgtacattttttgtgcaataaataaataggtaaatgagagcccaaaggcctattttgccaccacagatttgctaactgttttctactctttctgtcctcctctaaattctcctcatccttccctcactctctgtagrtgaactccatcaacttttctctttcacttcctcaaaacaattatctacctcctctgaactataaccttctcaatatggattagatagacataggtttgagtcctgaccccaacatttactaccaagggactgcaggcaggatcctttccctaactaagcctcagttttcccatgcatacagtggagaatatagtaccccctcaacatgctgttgtgaaggttaaatgcaacaaatattattttataattaatattgtattcccaacattgt

SEQ ID NO: 247294 - DNA, 610 bp, Homo sapiens
cagcatttgagtcttcccagtacagggtcttgtggatgccaggatagtctagtagacatgtgatcctaagataggatttgatggccacatagacatagcctcagtcaccaaggacttactgcctgaccctgagtcattaaatctaaccttaggggcaagagtttgtctgggattttgatttccatgtattagcaaatccttttgtacattttttgtgcaataaataaataggtaaatgagagcccaaaggcctattttgccaccacagatttgctaactgttttctactctttctgtcctcctctaaattctcctcatccttccctcactctctgtagatgaactccatcaacttttctctttcacttccycaaaacaattatctacctcctctgaactataaccttctcaatatggattagatagacataggtttgagtcctgaccccaacatttactaccaagggactgcaggcaggatcctttccctaactaagcctcagttttcccatgcatacagtggagaatatagtaccccctcaacatgctgttgtgaaggttaaatgcaacaaatattattttataattaatattgtattcccaacattgt

SEQ ID NO: 247295 - DNA, 610 bp, Homo sapiens
cagcatttgagtcttcccagtacagggtcttgtggatgccaggatagtctagtagacatgtgatcctaagataggatttgatggccacatagacatagcctcagtcaccaaggacttactgcctgaccctgagtcattaaatctaaccttaggggcaagagtttgtctgggattttgatttccatgtattagcaaatccttttgtacattttttgtgcaataaataaataggtaaatgagagcccaaaggcctattttgccaccacagatttgctaactgttttctactctttctgtcctcctctaaattctcctcatccttccctcactctctgtagatgaactccatcaacttttctctttcacttcctcaaaacaattatctacctcctctgaactataaccttctcaatatggattagatagacataggtttgagtcctgaccccaacatttactaccaagggactgcaggcaggatcctttycctaactaagcctcagttttcccatgcatacagtggagaatatagtaccccctcaacatgctgttgtgaaggttaaatgcaacaaatattattttataattaatattgtattcccaacattgt

SEQ ID NO: 247296 - DNA, 592 bp, Homo sapiens
gtttggcaccatggtaggtgttgaggattcatggaggaacacaaccaacctgtttcttgctcttatgatgctcacagtctagtgaggragaaatgccaatgaaataattacatataattagctaaataattatacactggtctctgctctgctgcactaaggaaaaacacgaaaaagagttttgcccacatttggtggagagtttggaagggaatggcaccacatccacatcagcacagtgttgggggtgagggagacacaggaatcccagtttgcaagaacccaacagagaagagaccactccagggaaagacttgacaccagttggccttttacacctggaaagtcttccctcaggctctaccctgcacagagcaatccttggagactctatgctttttttctcataagtaagaccatttccttacaggagagtaattcagcattggaaagctagttgcagtgccctgtgactggtttaactgagtgtttcccttttgcatgaattgctctggcattatttaagcccagtcataatattgtggttcaccggaagctaaaaagaggcctgtgtaggttgatcaaatcatga

SEQ ID NO: 247297 - DNA, 587 bp, Homo sapiens
gtaattcagcattggaaagctagttgcagtgccctgtgactgktttaactgagtgtttcccttttgcatgaattgctctggcattatttaagcccagtcataatattgtggttcaccggaagctaaaaagaggcctgtgtaggttgatcaaatcatgatctaatgaaaatggatggctggctcttccaaaggagtatgaatatgggccacctctgggcaacttagccctagaaccttgctatgcaaacactgtttcagagaaatcatttttcaagtttttttttttttaattttcttcatgacatctggactaaatccagcagtgttgctctgtgactttttccaacatatacagagaaccccatgtggctgtcctctaacactccattctccactacccccacctcagccaggtttgtcaacagacacttactccaagaccatagagatgagaagttgggtagtctgggtttcctttcactcctcaccagcagagctgttccagcttgttggaaatcagaacgtgtctctgggtgccagaccacatgtccacatcagcagtttagtggaaggtgaacccagtaagc

SEQ ID NO: 247298 - DNA, 621 bp, Homo sapiens
ccctcggacagccatgccctctctttttccactttggctgtctttgactgcattctacttatgccaatgttccarcctcactgctcagaaaaataacaaggtgcctttttaaaatgtagttttacataatttttcagcttgggaaatgctaagaaatggctctttcaagcacagattccaaggataagtctacatgtgccctcttgtggaggggcatgatattcaaatgatttggaaatggaataaaatccaaacgggctgccatttctctgccctcacactccccttttctccacccagtcaaaaccctaaaagaagaatgccatagccattacccaggaccgccatggatcttggcttcaggagacagggtgagagaacactcctaagtgtgggaccaccagtgcttagtgctggaagggcagtaagacaaggaggcctaggaggaatctggtctgtttggcttcagtgagagagccaagttcaacttttctctgtgtttgtgtgcatgcacacgtgcacgcatgcccatacatgtgtgtttgtgacatctacatggatggatgccagagggcaaggaggtactctggccacagaaaccaggaatgaggaagcatttta

SEQ ID NO: 247299 - DNA, 621 bp, Homo sapiens
ccctcggacagccatgccctctctttttccactttggctgtctttgactgcattctacttatgccaatgttccagcctcactgctcagaaaaataacaaggtgcctttttaaaatgtagttttacataatttttcagcttgggaaatgctaagaaatggctctttcaagcasagattccaaggataagtctacatgtgccctcttgtggaggggcatgatattcaaatgatttggaaatggaataaaatccaaacgggctgccatttctctgccctcacactccccttttctccacccagtcaaaaccctaaaagaagaatgccatagccattacccaggaccgccatggatcttggcttcaggagacagggtgagagaacactcctaagtgtgggaccaccagtgcttagtgctggaagggcagtaagacaaggaggcctaggaggaatctggtctgtttggcttcagtgagagagccaagttcaacttttctctgtgtttgtgtgcatgcacacgtgcacgcatgcccatacatgtgtgtttgtgacatctacatggatggatgccagagggcaaggaggtactctggccacagaaaccaggaatgaggaagcatttta

SEQ ID NO: 247300 - DNA, 588 bp, Homo sapiens
aatatgagataatgtaagtgaaacccctggcacacagggttcacgctcagttaaagagtgtgattattgttaatataattgttctctcattgaatatgttcagaagatcattgttatggatagaatgtttgtgccctcctcattcatatgttgaagccctaaccccatatatgatgggttttggatttggagctcttgtgaggtgattaggttaagatgtggtcattagggtggagcccctatgatgggattagtgtccttataagaagagaaaaagaccagagctctctctttccaccacataagaacacagtgagaaagtagctgtctgcaagccaggaagaaagccctcaccaaagacccaacaatgctggcacccttgtcttagacttccagccaccagaactgtgagagaaactgtcttttgtttaagtcatccaattgatgatatttgttatagctgcccaagctgaccaatacaaacatgaaaagcagatctatctatcaatactatttggagtagtatcagcrttattgaaatagcttcagctcccaaaatgtccactttaaaggacacaactcatcttc

SEQ ID NO: 247301 - DNA, 560 bp, Homo sapiens
tgtgttatcagcatacctcagcaatgagtgtatgactggcacacccacctgcttctwttctaggcaaaaagggtgccttggctttttatttttgttgatttgtatatgttgatttagaagcaaaataaaggggatttcttggttcaagcttacatcccttcccaaaatctaccatgttgcttgcagcttaaacagctaatccaacattgtgaccttagaatttctgaaaggctgctgaaagcattgtcaagaattaagatgcttatataattcatttctcaaaccatgacagtttgtacaatgaaagaaggtttattaataatatgtaaactgggagagctctaggtaaaccagaaattagcatggactttttccagaagttatcatggcctttagatgggttgttttcagtaatgaaaacacatgaaatgatttgagaaagaaatgacatgagaatcagcttctactaactgccactccacatgcagaattttagataaaacctagagctctgccttccctcaatttcaagtcctgttgctctgcgcagactcttcccc

SEQ ID NO: 247302 - DNA, 560 bp, Homo sapiens
tgtgttatcagcatacctcagcaatgagtgtatgactggcacacccacctgcttctattctaggcaaaaagggtgccttggcttyttatttttgttgatttgtatatgttgatttagaagcaaaataaaggggatttcttggttcaagcttacatcccttcccaaaatctaccatgttgcttgcagcttaaacagctaatccaacattgtgaccttagaatttctgaaaggctgctgaaagcattgtcaagaattaagatgcttatataattcatttctcaaaccatgacagtttgtacaatgaaagaaggtttattaataatatgtaaactgggagagctctaggtaaaccagaaattagcatggactttttccagaagttatcatggcctttagatgggttgttttcagtaatgaaaacacatgaaatgatttgagaaagaaatgacatgagaatcagcttctactaactgccactccacatgcagaattttagataaaacctagagctctgccttccctcaatttcaagtcctgttgctctgcgcagactcttcccc

SEQ ID NO: 247303 - DNA, 560 bp, Homo sapiens
tgtgttatcagcatacctcagcaatgagtgtatgactggcacacccacctgcttctattctaggcaaaaagggtgccttggctttttatttttgttgatttgtatatgttgatttagaagcaaaataaaggggatttcttggttcaagcttacatcccttcccaaaatctaccatgttgcttgcagcttaaacagctaatccaacattgtgaccttagaatttctgaaaggctgctgaaagcattgtcaagaattaagatgcytatataattcatttctcaaaccatgacagtttgtacaatgaaagaaggtttattaataatatgtaaactgggagagctctaggtaaaccagaaattagcatggactttttccagaagttatcatggcctttagatgggttgttttcagtaatgaaaacacatgaaatgatttgagaaagaaatgacatgagaatcagcttctactaactgccactccacatgcagaattttagataaaacctagagctctgccttccctcaatttcaagtcctgttgctctgcgcagactcttcccc

SEQ ID NO: 247304 - DNA, 476 bp, Homo sapiens
gccccggcaactgggacatttgctgagctccatctctgtagactttggcttattcgaccttgtctccacgtgctgtagaggaggataaaactctgtgctgttgtgccctcacctccctatttcaaagagactttacccttcagagagcttcccacttggccacactgggggaggttgctgtgatgtcatacaaacgtccagtgtgtcttctctgcctcaaagaaggtgtgtgactttcagcacaccacctccttgtctgggccttagttctctcaaccaagaagaaaggaaggtgagcagctggactgaaagcatataccwcctgcagcctgctattcccggggcctcgcccagttcctggtgcaccagcctgctcagaaagcacacacagaatcgggacatctccagccccctcctggcctgacattcagagactaggtttggaaactaaaagctctcatgctatggcctttctc

SEQ ID NO: 247305 - DNA, 658 bp, Homo sapiens
agcagtttctgggcccaatgccaacctccagataattgccggcagcaggagagagatggtggaggttggyagagcctgtctctgacagatagattgtccccttctcaccgtgacagcatcatggcagtgagaaggaaagccaaaatgcaggcaggcaggagagaagtagggaagggcacaaggaaaggggcagcctcagaaggagagagacagaaacagacaatggaagggacagctagagaaataataggaagacaagagatggtggtcacacaggtaccagctaaagagagaaaaaacacatacagagtgagacagaggagggtcagagagagagagaaatgcagaaagaaacggagagaagaaaacactatctctgtcacagtgtcatccccttgcaaacctctggagatatttgggggttcagtgagagaagcagtgcctccagaatcaattgcatatgtgtgcagaggggaaaataaaagaaagcacccaaacagctccatttcctcatggagctgcactgttggcagttgtggtaacaaagagggttttgtgaaagcagccaggcttgcctcccatcccaattttctatcatctctccaaggcccaggacagggcagtgaagggcatgggccagtagtccatgatggaggtg

SEQ ID NO: 247306 - DNA, 602 bp, Homo sapiens
atgggcagtgattggagatgactgagcagaaaaagagaggcagccmagcaccctgtatacccctgtgaatgaataaattaccacattcactgattcctccattcagcaaatattcttcatgtgcccactgtgtgcctggccccacctagacagatgggcacatctgttaacaaagcaggtagagaacccttctcccgtggagctcgaattctttcagggacatgtgtattttatttcttatctactgatgatgacacaatgtccatgtgggtgtgacttttggggtatctaagcagacaggaatcaacccccaaagaacccacagtgatgctgagtgtaaggacactcagtttggggtagccagggacggcacagagcatatgggacttgtgatgggagaagtcaccaacagaaagggattatattagacaggattttcttgattgcaattaacagatcaaactggctccagcagtagaaggtaatttacaggctcatatagccaagctccttaaaacccaggggtgggagctggcctcacgaataactggtattggagttctagtatcacccatccctcaatccccatttatgtttctctg

SEQ ID NO: 247307 - DNA, 602 bp, Homo sapiens
atgggcagtgattggagatgactgagcagaaaaagagaggcagcccagcaccctgtatacccctgtgaatgaataaattaccacattcactgattcctccattcagcaaatattcttcatgtgcccactgtgtgcctggccccacctagacagatgggcacatctgttaacaaagcaggtagagaacccttctcccgyggagctcgaattctttcagggacatgtgtattttatttcttatctactgatgatgacacaatgtccatgtgggtgtgacttttggggtatctaagcagacaggaatcaacccccaaagaacccacagtgatgctgagtgtaaggacactcagtttggggtagccagggacggcacagagcatatgggacttgtgatgggagaagtcaccaacagaaagggattatattagacaggattttcttgattgcaattaacagatcaaactggctccagcagtagaaggtaatttacaggctcatatagccaagctccttaaaacccaggggtgggagctggcctcacgaataactggtattggagttctagtatcacccatccctcaatccccatttatgtttctctg

SEQ ID NO: 247308 - DNA, 602 bp, Homo sapiens
atgggcagtgattggagatgactgagcagaaaaagagaggcagcccagcaccctgtatacccctgtgaatgaataaattaccacattcactgattcctccattcagcaaatattcttcatgtgcccactgtgtgcctggccccacctagacagatgggcacatctgttaacaaagcaggtagagaacccttctcccgtggagctckaattctttcagggacatgtgtattttatttcttatctactgatgatgacacaatgtccatgtgggtgtgacttttggggtatctaagcagacaggaatcaacccccaaagaacccacagtgatgctgagtgtaaggacactcagtttggggtagccagggacggcacagagcatatgggacttgtgatgggagaagtcaccaacagaaagggattatattagacaggattttcttgattgcaattaacagatcaaactggctccagcagtagaaggtaatttacaggctcatatagccaagctccttaaaacccaggggtgggagctggcctcacgaataactggtattggagttctagtatcacccatccctcaatccccatttatgtttctctg

SEQ ID NO: 247309 - DNA, 602 bp, Homo sapiens
atgggcagtgattggagatgactgagcagaaaaagagaggcagcccagcaccctgtatacccctgtgaatgaataaattaccacattcactgattcctccattcagcaaatattcttcatgtgcccactgtgtgcctggccccacctagacagatgggcacatctgttaacaaagcaggtagagaacccttctcccgtggagctcgaattctttcagggacatgtgtattttatttcttatctactgatgatgacacaatgtccatgtgggtgtgacttttggggtatctaagcagacaggaatcaacccccaawgaacccacagtgatgctgagtgtaaggacactcagtttggggtagccagggacggcacagagcatatgggacttgtgatgggagaagtcaccaacagaaagggattatattagacaggattttcttgattgcaattaacagatcaaactggctccagcagtagaaggtaatttacaggctcatatagccaagctccttaaaacccaggggtgggagctggcctcacgaataactggtattggagttctagtatcacccatccctcaatccccatttatgtttctctg

SEQ ID NO: 247310 - DNA, 593 bp, Homo sapiens
gtactcaacctgtctgatacatgcctgatattaaaactaagatttctagttttgttttgatttgcttgcttgcctttttccttccttttgttttcaactttccagtcactttattttaattgtgtcttttgctcatagcacaaaattgttctttacattgtaacttaaatggagaatctatttattttgactgatacatttttacttttatattttttaatgtcatagatgtgtttgtactcagtttagacatcacatactttctgcctctattgcctctttttatctttcactaacagttatggtttgttatattttaatttggtttgtgtgtaggttcatagagatagttgggaaggttttaacatttttcattctttattgtttatctttctgatagtttatacartatatttaatcctctgtatccttactagctattgactgtcagctctgcaagataatgacatgtgtatagttcctcttctgtagcctctcatttttctactcttaccgaattttaattaatcatgatgatgacgatgatgatgatgatgatatttctgctaatctcaaccttatactttttaata

SEQ ID NO: 247311 - DNA, 512 bp, Homo sapiens
tgttccttttcattcctttttctctaatcttgtcttcatcctttatttcattaagttgatcttcaatctctgatatcctttcttccacttgatcgattcggctattgatacttgtgtatgcttcatgaagttcttgtgctgtgtttttcagctccgtcaggtcattgatgttcttctctaaactggttattctagttagcaattcctctaaccttttttcaaggttcttggcttccttgcattgggttagaacrtgcttctttagcttggaggagtttgttattacccgccttctgaagcctacttctgtcaattcatcaaactcattctccatccagttttattcccttgctggcggggagttgtgatcctttggagaagaggagttctggtttttggagttttcagcctttttgcactggtttttcctcatcttcatggatttatctacttttggtctttgatgttggtgacctttggatggggtttttgtgtggacatcatttttgttg

SEQ ID NO: 247312 - DNA, 638 bp, Homo sapiens
tgaacttcctagttgtatatgtattttatttcaaagtgggaattttaaatgacatatttttgcactaaatataggtatatatgtatagatgttcagatataaagtgtatagttacacaaaatgatagcttattttaccattttagataagtgaaatcttgatgtaagcatggtatataacatctaaagcaaatagccattttagctaaaaatcttttaaaaatatgctattacattctgacctgttttaaacagagctatggtgaaggctgggtgaatattatgtgcactgattaccatgctgcactgtgagggcaatgaggctttcattggcccaagtattccataagcccagttgactatgttttaaaaattctcctcctttcaaatatttagcagtaaaaacycacatagatcaaacaaaatcaaacccttagatacacagtacaaaaccaggcaagcataggggagaagcatgtgtgttggggagacctcagcagctgtcctgaggttctctggggggccacagtggccttgggtagtttgagtgtctttcactttgcccactccaaggaggtaatgcagcacaggggtgaggattctgaagtgctgattctgctttcactactttctgcgtgt

SEQ ID NO: 247313 - DNA, 537 bp, Homo sapiens
gttttctaatacatcaagttcatctacaaggccagttttaagtgattttctagctctgatatggtttggctctatgtccccacccaaatctcatactgaattataattcccaatgttggagttggggccttgtgggaggtgattagatcatgggggtggtttctaatagtttagcacctttcctgtagtgttgtctcatggtggagttttcacaagatctggttgtttgaaagtgtrtagcatcttcccctttgcatgctatctctctcccgtcagtcatgtgaagatgtgcctgcttctccttcactttccactatgattgtaagtttcctgaggcctccccagaagcagaagcctgtacggcctgcagaaccatgagctgattaaacctcttttccttataaattacccagtctcagccatgtctttatagcagtgtaagaatggcctaatacaacttccatgatatcatccttggaaaaaatgtttttttccatctgctggctgattctattagtttgattaggaccaactttt

SEQ ID NO: 247314 - DNA, 537 bp, Homo sapiens
gttttctaatacatcaagttcatctacaaggccagttttaagtgattttctagctctgatatggtttggctctatgtccccacccaaatctcatactgaattataattcccaatgttggagttggggccttgtgggaggtgattagatcatgggggtggtttctaatagtttagcacctttcctgtagtgttgtctcatggtggagttttcacaagatctggttgtttgaaagtgtgtagcatcttcccctttgcatgctatckctctcccgtcagtcatgtgaagatgtgcctgcttctccttcactttccactatgattgtaagtttcctgaggcctccccagaagcagaagcctgtacggcctgcagaaccatgagctgattaaacctcttttccttataaattacccagtctcagccatgtctttatagcagtgtaagaatggcctaatacaacttccatgatatcatccttggaaaaaatgtttttttccatctgctggctgattctattagtttgattaggaccaactttt

SEQ ID NO: 247315 - DNA, 537 bp, Homo sapiens
gttttctaatacatcaagttcatctacaaggccagttttaagtgattttctagctctgatatggtttggctctatgtccccacccaaatctcatactgaattataattcccaatgttggagttggggccttgtgggaggtgattagatcatgggggtggtttctaatagtttagcacctttcctgtagtgttgtctcatggtggagttttcacaagatctggttgtttgaaagtgtgtagcatcttcccctttgcatgctatctctctcccgtcagtcatgtgaagatgtgcctgcttctccttcactttccactatgattgtaagtttcctgaggcctccccagaagcagaagcctgtacggcctgcagaaccatgagctgattaaacctcttttccttataaattacccagtctcagccatgtctttatagcagtgtaagaatggcctaatacaacttscatgatatcatccttggaaaaaatgtttttttccatctgctggctgattctattagtttgattaggaccaactttt

SEQ ID NO: 247316 - DNA, 557 bp, Homo sapiens
caagggctgaccaggaaagcagggagttacctgccaaaatgatggaaaggcatctggaagcctctctctcttttaaactgtactccaacgaatttctcttgactcttcagtatgcatcrggcaattttctgggtatggcagtgtaaaactgagaaaggactcttctccctggcctaggtatcgcccatctgactttgatttttttttctccactccttccatgctagtctggttcactcctaattcctgagctatatctgaagaggacaagaactcatttgggaccctcacctccaccatctgatggggactggaattcatctgttgcccagggatgctccatggatattggtatatagttcccaagcatttctctttctgctgaaatgtgctcctgtacatgcatctgggctcctgccttggtttacccatatagcatctttattccaatttgggcttggaatagcacctcaaactttagtctgtttgcctgggctctgcctaggttccttccctgagagctgagagcccatttttctaccttcctctttcttcag

SEQ ID NO: 247317 - DNA, 557 bp, Homo sapiens
caagggctgaccaggaaagcagggagttacctgccaaaatgatggaaaggcatctggaagcctctctctcttttaaactgtactccaacgaatttctcttgactcttcagtatgcatcaggcaattttctgggtatggcagtgtaaaactgagaaaggactcttctccctggcctaggtatcgcccatctgactttgatttttttttctccactccttccatgctagtctggttcactcctaattcctgagctatatctgaagaggacaagaactcatttgggaccctcacctccaccatctgatggggactggaattcatctgttgcccagggatgctccatggatattggtatatagttcccaagcatttctctttctgctgaaatgtgctcctgtacatgcatctgggctcctgccttggtttacccrtatagcatctttattccaatttgggcttggaatagcacctcaaactttagtctgtttgcctgggctctgcctaggttccttccctgagagctgagagcccatttttctaccttcctctttcttcag

SEQ ID NO: 247318 - DNA, 524 bp, Homo sapiens
gggcctcagttagtgtgtgagtcagagctgggaggggtacaggactggacctgacaccttcaaggtccccctgcagcctcaaagctggctgcagccttgaagctggaagcagaatctcctgctgggaggctagcagacactttgcagtaagcaggaagcggtgagcctccctccctcagaacatctttttcaagaaggtgcttctctgaagttttcagcttggccctycctccccaccctagttctgcggagagaaatccacatcagaatggacagggtgaaggcaagtggccccgtcacacatcccagtcagctacttgagaagaagatgagagaggaggcaaggctaggctttgtgaaacgtgtaggcgggtctatacacaaacatcggctcatacaaataaaccaaacctggccaaaaataacagaaaaggcaacagatgcttccaattaaaatgtcagcgtctcctgagaagctgagttctcacgtggtgtgggtgctcggggggccgaggactactgga

SEQ ID NO: 247319 - DNA, 612 bp, Homo sapiens
ccaggtcaaatcacaatgtggtgcccaagatgggattaaaacccaatgttgacaccctcctggcccctcttccccaacacactgcagctccaaggatattgatcaatgattttgacagtgatcatttctgtaatacttagaagtttgcaaagtatttcaaattcctgatcttatttaatctttacaacaatcccgcaaggcaaagaagaaattataatacccatttttatagaggagataactttggtttagagaggtgaattgcccaagatcatacagcctttaaggtgtgaaaactggatgagaatcctgggatcagcctcctgataaaatgttttattctattatagcacctctgaatgtcgagcactcaccagaaatgtatggtttaagtgtagtgtggatcagccacatgacatcatagttacattttgtaaaaacagctattttctgtgacagaggctcttcttaatttagggaccttttgagataatgtttacacatgtatatacatatgtgtgtatgtgaatatgtatcaayaaaatgacattttggggagactctaacattgccatcagagtctcaaaggagtgtgtgaccccaaaacaacca

SEQ ID NO: 247320 - DNA, 571 bp, Homo sapiens
tggctctttctgctcatctgtagggtaaccataataatagtaatagtaattaactcatagagctcttcatttcttagccattgaccgtcgcttctgtgccagatgctgtgctatatgayaggtataagttgataaataaaactaacatgaacctccctttgctatttcattgagataatgcatagtacctgggagtagatgcttaatgatacacctaggaaggaggtagttctagaatgtaatcaatggtagcttctttcccttttaaaggtatagaaagtatcattcattctttattctccaaatagaggactgaatatctactatgtgctgggtaccagggatgcggtatgaacgaggtcggcagagtctttcttcatgcagtgtgcgtgcttctgttccagaagacagtgagcaaggaaacagttgagtaaactaagcagttatagagtgtgatgcatgttatgaaggaactggagagataatggtgggaaggaaggtagggtgagaaggagaggagagggctaataaggtaagaccttaaaaatgggacagagcaggttttgcaaag

SEQ ID NO: 247321 - DNA, 550 bp, Homo sapiens
tgatcattattggtggctattcatgaaataaaggcatatctatatattcttttatgtacctcttggtttctgtgacatttaagaaaagtgttcaagactttctttgaagatggctcaagtttttatttttgctgcttcttagttggcaggaactaaaagtccaggtcactaaagattgctgatggcttgtgaggacagccctgagtgagactgaatcagttggttgacaacagactgtgacagaatgctaaggsgttaatttagagtttattggtgcagtatacctgctcagcactgatggatttcctgatttagtgtattaaagatgaaaaagtaaagttcctttctgatagaagtgtttatttctactaaactgggactagaaaagcattgatgaaagtttatatattcagagcaacattctgccttctgccttctgcttggccagctgccatctctgactgatggaaataaagtgagggctctgacatcatcttgatggtgtctggtatttgggtgtttctgtccagctccctttggctgacattac

SEQ ID NO: 247322 - DNA, 577 bp, Homo sapiens
cttcttccttgcctttctacactctacatttagtacatgacccagtggctgcccatttcccccagtaaaatccaaaggtcttacactgacatcaaggctttccatggtctgggcccattatctctgacctcatctcccacccacttcccctagcctagtctgctctagctgtgaattttctgacgatgctaagtccatgctttcctgcctagagggctttcaccagctttccctctccctggattgctccccctccactggtgctcactccaccrggacggttatattgtgggacgagtgaaggcaggtcacaagtgttttacaaagaaataaaacactttggtggggtgccgtgggtcacacctgtaatcccagcactttgggaggccgaggtgggcagatcacttaagcccaggagttctagaccagcctgggcaacatggcgagaccctgtctccacatcgtcatttgatcaatttctcattcctccttaaagtctttgctcaaaagtcaccccctcaatgaggccctggcaattctgttcaaaacctcaacttcccccaggctagtagcatct

SEQ ID NO: 247323 - DNA, 546 bp, Homo sapiens
ggaactctgcttttccatgaaattcacttcgattattgtaagacagtaatacatatttggttccacattggtctgactggcagaaagctgaacagacttcattgatattatgctgtcctcagcattatgggagtgaagattggaatcccctagcaaactcggacgtatttattttataaaaaatgtggaaaggtcaccggtatgctttgaagcaccagttaatgccctactatcatcatcactatctgcatctgatggcaaactgtaggggtgtcatcaggaagatgaggagcgaagcgctttgcctaactcagcactgaagatctaattttgtcttgcagatcatcagcaactcatgaaagtcagcaagtatacaggatcactgaaaagtttatcactggagcagagctttactcagtatttgaatgacgagagtagtgtttggtcctctcccattttcagaactaagaaagcaggcaaataccaaatttacrtatacctgcatgtcaactgggttgcaaaaggaagtacggtatagtcccaaga

SEQ ID NO: 247324 - DNA, 573 bp, Homo sapiens
tttcatttttgcacaattttacattcctgtaattgattcttgttgatatgtgtgtttacagtttcactgtatatacagtataacattgcttgaatccactatactttatcaatttctctactgccgaacatttagggawctcttgttggttggtaggctgttttgtgcttcaaatagaatttatttttttacagcaattttatgttcacagcaaaagtaggaaggcacagagagttcccatatacctctgccccctacacatgcacggcttcccccactatcagtatctttcatcaaagtgacaccgctgttacaattgatgtcaaacctacattcaggtatcactatcccccaaagactatagtttacactggggttaaccctttgtgttggatatttgatgggttttgagaaatttataatgacataaccaccactgcagtatcttacaaaatagtttcactgtactaaatataccctgtgctcacctattcatccctccctgccccttatccctggcaacctctgatctctttactgtctccagagatttgactgttccagaatgtcgta

SEQ ID NO: 247325 - DNA, 620 bp, Homo sapiens
taatagttcattctttttgttaccacatagtatccctttatcagttgatgacacttttggtcatttcatttccagttttaggctattgtgagtaaaactgccccaaacatacgagtacaagactctgggtagaaacagggacaaataactcttgggtaaataaccaygagtaggccactatgttgtattgtaaactcatgctgaattttataaggaactgacaaactgttttccaaagtgaccaccatttgcattgaaatataattttaagttctgtattacctactggaaaaaacatgtgcaactaaaatagttttatgccaaagtatcagaaagttatgctgacaaaaaatcttagcatttccttctgtaccaaatttatcaataattatttatcgattttaatgatttttctgtaaagtatctgaattttttaattatgtataagcatgcttacaaaaatgtatcctttatataaagtatgatatggtttggctgtgtccccacccaaatctcatcttaaattgtagttcccataattcccacatgtcatgggagggacccagtgggaggtaattgaatcatggtgatggttacccccatgctgctgttcttgtgat

SEQ ID NO: 247326 - DNA, 619 bp, Homo sapiens
acacaagctatcaaaacctctgaaatactgcaaaggtggtgctaagagggaagttcatagccctaaatgtctayatcaaaaatattgaaagagtacaaactgacactctaaggacacacctcaaggaactagagaaacaaaaacaaaccaaacccaaacccagcagaagaaagaaataaccaagatcagagcagaactaaatgaaattgaaagaaaagaaatacaaaagataaaacaaaaagctggttctttgaaaagataactaaaattgatagaccattggcaagatcaatgaagaaaagaagagagaaactccaaataacctcattaagaaacaaaacgggaaatattacaactgacaccactgaaatacaaaagatcattcaaggctgctatgaacatctttacacacataaactagaaaacctagaagagacagatgaattcctggaaaaatacaaccctcctagcttaaatcaggaggagttagataccctgaacagaccaataacaagcagtgagattgaaatggtaatttaaaaattaccaacaacaaaaatgtccaggaccagacagattcactgccgaattctaccagacattcaaagaagaattggta

SEQ ID NO: 247327 - DNA, 548 bp, Homo sapiens
atttggcaagtaacaacagcaacaamaacagagagctcctatctgacttcttcctctggcaaaaatttccattagtcatttgctatcttaaattgttaattgagggtttttcacataaaaccggtatttctcagcaagaataagaaataatcactgtttagatcattaaatgaagtcaaaagttgttaaaatattcttttcatcatttcgagctggagacaatttgttcacagactgcactgcacggtttgattgtgccgttcttttatccagcctcaatcggaacacgcacttggcaacgcaagcccctccgcagcaaaagaagtgttttctatccaacagctcacatttcttgctcagcctggtaaacagcttcttcccgataaaatctaagacagtcaagactcaatgcaattcctatcaaaatttcaatgatattctttgtagaaaaaggaaaaaaaaaaaacccataaaattcaaatgcaatctcaaggaaccccaaatagccaaaaaatattgaaaaagagcaaagctgaggcctcatactc

SEQ ID NO: 247328 - DNA, 548 bp, Homo sapiens
atttggcaagtaacaacagcaacaaaaacagagagctcctatctgacttcttcctctggcaaaaatttccattagtcatttgctatcttaaattgttaattgagggtttttcacataaaaccggtatttctcagcaagaataagaaataatcactgtttagatcattaaatgaagtcaaaagttgttaaaatattcttttcatcatttcgagctggagacaatttgttcacagactgcactgcacrgtttgattgtgccgttcttttatccagcctcaatcggaacacgcacttggcaacgcaagcccctccgcagcaaaagaagtgttttctatccaacagctcacatttcttgctcagcctggtaaacagcttcttcccgataaaatctaagacagtcaagactcaatgcaattcctatcaaaatttcaatgatattctttgtagaaaaaggaaaaaaaaaaaacccataaaattcaaatgcaatctcaaggaaccccaaatagccaaaaaatattgaaaaagagcaaagctgaggcctcatactc

SEQ ID NO: 247329 - DNA, 659 bp, Homo sapiens
ctgggtgcagtgatgcatgcctgtaatcccagctactcaagaggctgaggcaggagactcaattgaagccaggaggyggaggttgcagtgagctgagatagtgccactgcactccagcctaggcaacagagcgagaccctgactgaaaaaaaaaatgttgtttaaaggaaagtacaggtataatttgtaaaagacatgcactgagggaaattgagattttgctaagtgaccatcaaatctattcccaatgttcaagtgctcagactcaaaaagaggtagaaaaagagactgcaataagaaatgaatgacaaagaaatgggagactatcatcagacacaaaaatatattcataggcatatcaggcacacatgcctaccttgagggaaatgttaatgcaaattgtataagtaaatatcatattttaatggtgttaggataaaactacttttttgtgtacaataaaattcatagtaacaaatagcatcttttgaatcctacattaaggtttctgtctaccccagccctatttctcccatttctctacgaacattttatcttgcactcatatttatctagagctgcctttctcttctctgaggaaatccatccaaattgagataggcctttgttgattcatctggcaagtaattcagtgtatc

SEQ ID NO: 247330 - DNA, 597 bp, Homo sapiens
tgctaaacaaggggtggattattcatgagttttccaggaagggagtgaggaatttccagaactgagggttccttccctttttagactatataggataacttccagacattgtcatggcctttgtaaactgtcayggtgctggtgggagtgcctttagcatgctgatgcattgtaactacgtataatgagtagtgaggatgaacagaggtcacttttgtcaccatcttgattctggctggtttcatctggctttggctggcttccttaccacatcctattgtattagcagggtcttgtgacctgtgtcttgggaaactagtcctacctcaataaatagttgaaaaggtggatagtagatagaaaggcataattttcttcttgactattttaaggatttgaagtcttcagagaaacaaagaaaaagaggaaaagtcctattactgctagatacactatagtgaatgaaaaagacttttttccagtatgcctaaacagtattttgatcactgttttttttgtttgtttgtttgtttgtttgtttgccaggtttggggcaataaaatcacatgtgaaaaatcctcagagatttttaaaaag

SEQ ID NO: 247331 - DNA, 597 bp, Homo sapiens
tgctaaacaaggggtggattattcatgagttttccaggaagggagtgaggaatttccagaactgagggttccttccctttttagactatataggataacttccagacattgtcatggcctttgtaaactgtcatggtgctggtgggagtgcctttagcatgctgatgcattgtaactacgtataatgagyagtgaggatgaacagaggtcacttttgtcaccatcttgattctggctggtttcatctggctttggctggcttccttaccacatcctattgtattagcagggtcttgtgacctgtgtcttgggaaactagtcctacctcaataaatagttgaaaaggtggatagtagatagaaaggcataattttcttcttgactattttaaggatttgaagtcttcagagaaacaaagaaaaagaggaaaagtcctattactgctagatacactatagtgaatgaaaaagacttttttccagtatgcctaaacagtattttgatcactgttttttttgtttgtttgtttgtttgtttgtttgccaggtttggggcaataaaatcacatgtgaaaaatcctcagagatttttaaaaag

SEQ ID NO: 247332 - DNA, 597 bp, Homo sapiens
tgctaaacaaggggtggattattcatgagttttccaggaagggagtgaggaatttccagaactgagggttccttccctttttagactatataggataacttccagacattgtcatggcctttgtaaactgtcatggtgctggtgggagtgcctttagcatgctgatgcattgtaactacgtataatgagtagtgaggatgaacagaggtcacttttgtcaccatcttgattctggctggtttcatctggctttggctggcttccttaccacatcctattgtattagcagggtcttgtgacctgtgtcttgggaaactagtcctacctcaataaatagttgaaaaggtggatagtagatagaaaggcataattttcttcttgactattttaaggatttgaagtcttcagagaaacaaagaaaaagaggaaaagtcctattactgctagatacactatagtgaatgaaaaagacttttttccagtatgcctaaacagtattttgatcactgttttttttgtttgtttgtttgtttgtttgtttgccaggtttkgggcaataaaatcacatgtgaaaaatcctcagagatttttaaaaag

SEQ ID NO: 247333 - DNA, 483 bp, Homo sapiens
ggggttttataaaaagaatgacacaagtgttttatttaattaattaattwatttatttatttatttagagatggagtctcactttgttgcccaggctggagaacagtggtgcaatctctgctctctacaacctccatctcctgggttcaagcgattctcttgcttcagcctcccgagtagctgggattacaggtgtgcgccaccacacccagctaatttttgtatttttcataagagacggggtttctccacattggccaggctggtctcaaactcctgacctcaagtgatccacccacctcggcctcccaaagtgctgggattacaggcgtgagccaccgtgcccagccaacacaagttttttactactccacattctacagctccatttttcataaaagctggacatgtctgagtctgatctatacctctgttaataattaagtcattgtaatattttgtactttgaagacagtacataat

SEQ ID NO: 247334 - DNA, 592 bp, Homo sapiens
atctcaaaaaaaccataaatcctaaaacagtatttcaaattacttcctatatttcaagaaactttagaatttgcccagcccaacctcatgatttgaagaagataaaagatcttctcaaagttgttaaatttaaaaaacgcaacttaacaataaaaaaattaaatttatggcaatttagttctaagttgttatctataaagacagatgaaatggcaagatgcattttttaaatgctaatgccaaataaaaatgatctttctttataaaagctgatttgcatatcaaagttgatatgactcagggatgtttaaaaatcaggaggggttatttcaggtagaaatgaaactaaattgagaattgttttactctttcataacttaagcataactgagaaggtttacatgaaagaatagaaatttttaaaagaaactwtatatattttaataatttcaaactttgttgtaaacaaaaaatgaacctgaaaaactaaaatactaagcttttgtaaaataagcttctagtctaatatcaaaagtcactaaagtttctcttccctacttaatagtacactgctgaaatttaatttagaatt

SEQ ID NO: 247335 - DNA, 546 bp, Homo sapiens
ttggagtgcagtggtgtgatctcggctcactgcaacctctgcctctgggttcaagggattctcctgcctcagcctcccgagtacctgagattacaggcacccaccaccacacctggctaatttttgtatttttagttgagacagcgtttcactatattggccaggcaggtcttgaactcctgacctcaggtgatccacccgccttggcctcccaaagtgctgggattgcaggcgtgagccactgcacccagttgaagtttaatagtgtgaaaaaaatatttctcatctcactatatcttctatgggaggccagattgcagattgkctacagaaaaatcccttcaaaagaccttgttattacatagactggagctcatggggcaggtctggtccacacatccttaggctccgcttctcctggaaaacaaaaatagcctctgatccagtgttgcctctcccatcaccaaacctcagcttctatcgccaaactcatcaaataagagtgtccagtagaaaaactgggcagatgggggcacagaaggtgaa

SEQ ID NO: 247336 - DNA, 375 bp, Homo sapiens
aggaagttactaaactccgattagcccaaatatgccccagtgggtccttctggcagagtaaatgtctcrgttcagcctgaatctgggaaattgttcctacggttcagcctgaatctgggaaattgttcctaccttataaactggagtatccttcagaaatgacatttactcaaacttccttttaggcagactgcataatagcaatttttaatattaaccatttaaaaaaaaccttcagattaattaacaccaaaagaataattgggaaaatacaactcctcactttaaaaaagaaacaaccaaagtaaatactaaaaaactatatgatgttatattatctaagcttagtttactgcaaagatcaagagcacacta

SEQ ID NO: 247337 - DNA, 285 bp, Homo sapiens
ttcccctcccctgcctcaaggactccaattactcaagtttgattacttgatgttatcctagaggttaatgactgcgatgatttgaatttgttccccaaagttcacatgttgaaaacttatgcaacagtgttgagtttaatagrtaattaggtcgtgagggatctgccctcataaataaattaatatcatcatcccatgtgagtgggtttgttattgtgagagtggttttgtaataaaagtaagtttggctctctcttgctctttctctagccatgagatgcattc

SEQ ID NO: 247338 - DNA, 588 bp, Homo sapiens
agtggctgcagcttcctgggacatgtcccattcttaaagtgtgcaataagcaaaaaacatgtactattctcttgttcttcacatactgtgaaagataaacataaaagtaaattctccatctgagggaaatcctgcatatccaagctgtgtagggtggcaatcaagtatatactaagttctggttgttgctcaatgaygagcacagcatcaagcctgccagcacttacaatagaacagtgatctgtagccagaccagatcttcaggtgtttcaataaggctacaggtagttgattgatttcttttgccatctaggatgattctatatcaaggactatgaaatatgtttgctcacatcattttgaccagatcttcaggccagacgactttgtctttagtcagtctggagcaggctatggccacagaaggaaggaagcagagctgacagcctccatcgtgatatcgtatctaaggtatctagagccattacaggcctcaaggcttcctatggactcaatggctagatgggggcatgggctccggcatgggcacccttctcatttgcaaggtctgtatccaggaccctgatc

SEQ ID NO: 247339 - DNA, 547 bp, Homo sapiens
tgatcttgtaactcttcaaatccctctaggaatattgaaattcccagtttaaggaaaaytgccttcacacagtgggatatagccacagaaatgcatttatatagaatttttgctgtttattctaaagaagtaggtcaaaaccaggcaaaaactcccttccctcttccacctcccttttcagggacatttggcaggaggcatttttgattgttgtggttggggggacagtgaaggtggcatctagcaggtagaggtcagggaggctgctaaacatctttcaatccacagacagccccccataaccaagaattatcaggcccaaagtgtcaactgtgctgaggttggaaaccccgttctaaaggaagagacctctgacccttccccaattgtgcaatgatagtaataatgcacatttgacaagcacttactgtgtgtcagatgctgttcttagggttttacttgcagtacttcactgatttctcattatcaatgacaaaggaagtcttatcatcatccccattttccagatgtggaaaatgagtcccgg

SEQ ID NO: 247340 - DNA, 408 bp, Homo sapiens
aaaataaccacactactattatcagaaccaaaataaataacaatgatttgttaatatcatccaatacacagtgttcaaattttcccaaattgtcttataaatatcataattttgttttataatttgtttgaaacaggcttcaacttagatttgtcccttgaaattagttggaatgtcttttaagctcttttcatctataggagcgctctccatctttttctcttttttgtttgcaatttgttaaagaaaccagggtttccctacaggacagcatggtaagatttactggttacgtctttgtggaatagtttaacatctttattctctgcatttcctgtamattagatctaaaggccagatcagatttaggttgaaattttgggggaagaaatattttcaggtggtgct

SEQ ID NO: 247341 - DNA, 597 bp, Homo sapiens
ctgctcctcctgtttgacatacagctgcagcttctyatgcagcaccagcttttaactctggcaaagtaaatattgtcgccatcaatgactccttcattgatctcaactacatagtctacatgttccagtataattccacccatggcaagttccatggcactgtcaaggctgtgaacagaaagtgtgtcaccaatggcaatactatcaccatcttccaggagcaagatcccaccaaaatcaaatgggttgatgctggcattgattatgctgtggaatcctccagtatcttcagtgtcttggagatggctggggctcacttagagtgggtagccaaaaggatcatcatctcttacctctctgctaatgcccccatgtttttggtgggcattaaccatgagaagtggaaaaaaaaaacctcgtgatccctagcaatgcctcctgaaccaacaactgcttagcctccctggccaaggtcatccatgacaactttggcattgtagaggaggacttatgaccacagtccatgccatcattgctactcagaagactgtggatgtcccctctgggaaactgtggtgtgagggcagggctctccag

SEQ ID NO: 247342 - DNA, 560 bp, Homo sapiens
tggtaaagtaaagtaggccttggagagctcccctgaagggcatcctgggccacactgagtactargttgtctcctctgtctttaacagtgacacctgctcttcctctcttcaatgctggtgaaatgccctcaattaccacttactttgtcaacctcatttcctggtatgacaatgaatttggctacatcaacagggtgttagaccttatagtccacatggccttcaaggagtaagaactccctggaccaccagccccagtgacagcatgtgtggaggagaggggccttcagtggcagggaagtccctgccacagtcattcacctccacactgagaatctccccttgacacagttttcatgccagaaaccctgaagaatgagaggggcctagggagccccaccttgccatgtactgtaccatcataaagtccccgtactcagccaaaaataaaataaaacaaaataaaaaagtaaccacattggttagtacatgacttaaaaaagttgcttacatctctttataagataatttactgcttaaacaaaaataataacaatgt

SEQ ID NO: 247343 - DNA, 497 bp, Homo sapiens
gtttagtcttttggataaacgatgaaaaggaaaagaactttttagataaatgattaacaatgaagaaaatagctttatgcattaagttgcttattgtagttttattggtatttctaaaaaaatcaggagcataaatatccaacgataaaaattgctatattttcatagtactgatctaaatattttatatctgatatcttactgaatcctcattgtaactctatgaagcaggtattattgttagtcccattttgctgatgaagaaaactattttacgaagaggtcatgttatttttcaaggtcctagtaagtggcagagatggcatttgaacccaggcagtgtggctgtgaagcagggtctttagcctctatgctaggctgccttgcacacaaaggaataatataccaacttggtgcttcatttttcaacytttacaatggtagaaagtctatgtagcaacataaaaaatataaattaaatataaatctcactgacc

SEQ ID NO: 247344 - DNA, 552 bp, Homo sapiens
taagcacatacgaactgtgacttgtgggaaagtgatattttgattccagtgttgttctctttcagcaatctttccaagttatactttctaagcattcgtgtcaaagtctgggttcctcctaccaggaatataacaggtgcaacatgccaccttcacaattagactccgtacagtccccatcccttcagctaccataaagatcctggatttgcagtttactgatactaatcaaagaacttagagaaaaaaagtgtgactattggsagagcatggtttatttagaagggtacctacagtaaacattctaaacggagacaggggtgtgcttcctatctgacaacaatcaagacatgcaggacagccagtgcaagccagtcctcttctagcagcaggctaaactccgtgaactctgaccaccgttgctggaaagctccaggaaggggtcaggcttggcatgccagctgagagcctcaattctcagagctagacagtgaaatgggctgcttcttaagaggtctccagggaggcaagactcaaagcccagaattgcct

SEQ ID NO: 247345 - DNA, 552 bp, Homo sapiens
taagcacatacgaactgtgacttgtgggaaagtgatattttgattccagtgttgttctctttcagcaatctttccaagttatactttctaagcattcgtgtcaaagtctgggttcctcctaccaggaatataacaggtgcaacatgccaccttcacaattagactccgtacagtccccatcccttcagctaccataaagatcctggatttgcagtttactgatactaatcaaagaacttagagaaaaaaagtgtgactattggcagagcatggtttatttagaagggtacctacagtaaacattctaaacggagacaggggtgtgcttcctatctgacaacaatcaagacatgcaggacagccagtgcaagccagtcctcttctagcagcaggctaaactccgtgaactctgaccaccrttgctggaaagctccaggaaggggtcaggcttggcatgccagctgagagcctcaattctcagagctagacagtgaaatgggctgcttcttaagaggtctccagggaggcaagactcaaagcccagaattgcct

SEQ ID NO: 247346 - DNA, 587 bp, Homo sapiens
taaccacagacagagttcattgatgagaatttgaagcataatcctagagttcaaatgtactaagccttttcttattcccatatgtgttttaaataatttctcttttctaataactatatcctggatttctgtagtgtgttgggttatttagttttgtttagttattgaagtactctcatgcttctcttccaaacacttaagattaaatagatactactattcacctttcacgattggaaaattaatttatgctcagatggttcttggtacttactattgaaaggcagtagaacacagtggttaagagttgaactctaaagtcagaccccagctccaccacctaccagctgtgtgtctttaggcaaattacttaacctttctgtggctcagtttcttcatctgtaatgggttgtaatatargagtcattgcatgagaagcacttagaagagtgcctggcacaaattaaggtttctaagtgttagcattttttatcatcgctgtgtggtaggcactgttttaggtgccagacatagagcagtgactaaaacaaacaaggttattttgtcctttggctttgtgaaactca

SEQ ID NO: 247347 - DNA, 613 bp, Homo sapiens
caaactctgagttagtagggtccaatttgttgaggactttctgtgtttattcaccatgggattatatgaggacagagttgtacacacattcctaaatccctcattcctttcctctgcagtttgaatcacctcctgccctggtgtgcctaggaaagttctgacttatgctgttgtctcagtgtattatttgtgttccatttcaaaagtgtctcaagttggaaaataaattatatagttagtttatatatagcaccttttacaaacccatgtttgagratgagaacctatccgcccttctaaatacgggagattcttttatgtttggaatggaccttttctcaaccaaaacgaatccttttgctgtgaagttctgcagaaacaccttatagctgtgggagagtcaaattttacagctttgggagatgacatctttggttgcctcaacatgctaggatgtttttgacttcagcgttttggctccaaggggtcaaaccatcttggtgcagtttttatgaatctaaaccactttccgttcgttgctttttaaattaaattaaattaaattaaataagtttattttatttatttattttttaatactctgtgttagttg

SEQ ID NO: 247348 - DNA, 519 bp, Homo sapiens
cattatcccttgtctatccactagatgaccatagcatcctctccaccagttaagacaaccaaaaatgtctccagacgttgccaaatgtcccctgggaggcaaaattgcccccagatggaactactattttagagtctctccttgattatctctggcctcaggacattcactcctttaaaactggcccaagtgacaaatagaagagctagggaaatgccatgtcaaagaatgtacgggccacggtaaatgactcttggcttctttagaatgtgtgcggagcaggatagaagggataacacccctgcattttttaagggggttaaaaactggcatgtgaaagatataaaccttgactctcagtggcaaaagtaatcggtaatatataatcattaaacagaatgatagaaatgtaaaaaaaaacaaaaacaaaaacaaaaaaaaaaaaacaaaactgcttgctcaagtgtgcccaagattcattgcttctgggatacaacraaggggaaataaattcagaaa

SEQ ID NO: 247349 - DNA, 639 bp, Homo sapiens
gtttcttggactgaaccaaattccttaaaaacctgaaggcttcctgtctatttgccttccaccaattccatgagctgataatcaaagccagagtccttgtctagtcatctctgagtctgggaattccggtctctcagcaacaggcttctgtgctctgccttgccaagatagccagggctgagcacttcgccaaaattctgccatccatcttgcacctgaaaagcagccagcccacgggtgccgccccacagagatacctggcacttcgtggtgcataagcaaattgccrggatcctgcctgtgagtttccattcaaggcatgggaagagtcagttggtcagcagtgtctgaagctggggctgcagggccaagaggtggtggggttgtcgtgaaagaggtggtggggtcattgtgatggctgagcacttgaataagccacagtcccctgttgtggagcagcaacaaggccaacaggcatgagagctttttacacgctgaataaggctccagtttctgaatatctttctgggctccataaaacctagttgtgtggccagggtggtaggtttcagaagtgagagcagggtgacctctctatataggaagtcccataaaggaaccctttttcctggcctagcc

SEQ ID NO: 247350 - DNA, 560 bp, Homo sapiens
cttcaattcatttttgaagtattcctattattaatatggaaaaacttcttcatcaggaattaacatttactctctttcttttaaaataattcaaggtgatatctccaagtagatgaattcattatcatttaatataattatcagtgccagacttgtgcactaacccaacctggtggtcccactatctctcctttctatatcaatctgaaccctacccaggggctaaacccaagctagagtagtactttgtattatcctaattatcgtacttttattgttcaaatagtttatcttggtgacttaatactggtcctgaaataagagtgcctggacttgagtcctccctgtaccaccaattggctgtgctgccttgaacaaattgtttatctactctgtgcctcatttcttcatctgtaagataataataatagtattttctcaaagggatgttataagactaagataaggtaataaatgatacatgtaaaattcttacacagaaagtcaaataataataatayaaaaacaattattctaataacaatgcacattggaaggat

SEQ ID NO: 247351 - DNA, 602 bp, Homo sapiens
gttcttatagttatttattattacctgttaggtacaagtcactgtctaggtaattcttcagatattgattaatatttaatcctcatatagattaaataactttctcaagttcactgagacagcagatggcacagccatgccttgagcaggaaattctgaccctcacatccctgacatatctcctggaaatgaatatttaggccttctataaaggtataacaataggtacaaaacccaagattacttttcccaggcaaacacttggttttgcaacaggggaatttcgcacatttatcccctatctctaggaacattccagtaaacttgtagtgaaggaatatcaaggcataaacmtgatgatggagagactaggagagagaaacagaaaaacaacaacaacaacaaaactgaagatgcctgcctgttgaagttggtcaaaatctgatgagacttacccaaaactaaggagaaggatgcaacttagcctggtctacagcattgtaaatacagtgggtaggaaaagggaaagtttagattgcacatataccccataaatttgtacaaataaaaaaagaaaaaaatcaactaactcacctaagaca

SEQ ID NO: 247352 - DNA, 595 bp, Homo sapiens
gtatccactacttcccccatcaccaccatcaaggctgagattatttgtccagtatatgtttttctctagtcagtccaaaataactccatacaacttactatactatattactgttagctgtttacttatttctctccccactatacttttaagaaatttcaggacagaaattctttcttaatcattgtcttttatgratcatttatcttctttatgtctctaatacctagcaaataaatgaaataaaaaactagacattgaaaggaaaagtcatttgtagtatatatgaaagttggccaaactgattaaataggtaacaaaagaaaaaaatccaaaatgaaagattaattgatagcaaaaccgaggtagagagctattctttaggcacagaggtgtgttagtgaaacctaacaaagctgtttaaatttaggatgaaaattaagaagcaaagtacaagaaattttgaaaacaatgaagctgtctcaagaatagtgtcctactaagtataattcaatatttctgtcaaactcttcttttgtcagagtgacaaaaataatttttatgttcagagagtcagtatctgtttttttttcat

SEQ ID NO: 247353 - DNA, 605 bp, Homo sapiens
aaggttattcactgtataactgcaaaataatggaagctacctaaatatctaagcataagaaattggtaaatacagagtggtatgtacacaatggcataatatgatgctgataaaacaaaattagaaagataaaataaaaaggggacctctataattgatagggattgatttccaggtgatagtattggtaagaggaaaaagcaaagtacaagtaattatatatgtatatacacatatatatgtgtatatgtatatatatacacacacagacatatatacatacatatatgtatatatatggttataccttcatgtaaaaaagggaaaaattaaaactctacatatatctgcttatcatttcaaaaagaaacagaaagcacatcagtaaacamataaatttgttacttcaacagattggagggaaggtgatgggatggaaaacacatgagagagagagtgacccctctctgaatataactttgtattttctgactttgggaacatgttaacatggtacatattcaaaaaataaagtattgccctttaaggctcaattatagtatctgctaggtggcaacaccttttagcaacacctactggctcag

SEQ ID NO: 247354 - DNA, 522 bp, Homo sapiens
cacaatggcataatatgatgctgataaaacaaaattagaaagataaaataaaaaggggacctctataattgatagggattgatttccaggtgatagtattggtaagaggaaaaagcaaagtacaagtaattatatatgtatatacacatatatatgtgtatatgtatatatatacacacacagacatatatacatacatatatgtatatatatggttataccttcatgtaaaaaagggaaaaattaaaactctacatatatctgcttatcatttcaaaaagaaacagaaagcacatcagtaaacaaataaatttgttacttcaacagattggagggaaggtgatgggatggaaaacacatgagagagagagtgacccctctctgaatataactttgtattttctgactttgggaacmtgttaacatggtacatattcaaaaaataaagtattgccctttaaggctcaattatagtatctgctaggtggcaacaccttttagcaacacctactggctcagtgg

SEQ ID NO: 247355 - DNA, 628 bp, Homo sapiens
atgttaacatggtacatattcaaaaaataaagtattgccctttaaggctcaattatagtatctgctaggtggcaacaccttttagcaacacctactggctcagtggcaacactgataacacatttgtgtggtgtgaagtcaacgtaggaccttgctatgtccacaggaagtttctaaatgagtgaccaatatattgcactgcttctttcacagtaaaggtttggtctgggtgtcaaggggtagaaatgagaatttcttttgtgtcactatttatccactgtcaaaatttggcttcccattcwgcaactttgggttctgttggtcttgaagtattggttcccaagaaaaaacacttacacaggacacccaacagtcgctccattatgctgggagctgagactgccacatgtccaatttggctgcttgtgttactgaatcaaaaggcaaagaagggggttatttattatgtctagagtggttggtctgattattaagtggtaattgggttgaatttacacaacgaggataagaagatatatatttggaatgcaagagatgccagggaagttcttagtattccaacagtttgtgatttaagtcagaggaaaagcagaacaacccaatacca

SEQ ID NO: 247356 - DNA, 546 bp, Homo sapiens
cttttagcaacacctactggctcagtggcaacactgataacacatttgtgtggtgtgaagtcaacgtaggaccttgctatgtccacaggaagtttctaaatgagtgaccaatatattgcactgcttctttcacagtaaaggtttggtctgggtgtcaaggggtagaaatgagaatttcttttgtgtcactatttatccactgtcaaaatttggcttcccattcagcaactttgggttctgttggtcttgaagtattggttcccaagaaaaaacacttacacaggacacccaacagtcgctccattatgctgggagctgagactgccacatgtccaatttggctgcttgtgttactgaatcaaaaggcaaagaagggkgttatttattatgtctagagtggttggtctgattattaagtggtaattgggttgaatttacacaacgaggataagaagatatatatttggaatgcaagagatgccagggaagttcttagtattccaacagtttgtgatttaagtcagaggaaaagcagaacaacccaat

SEQ ID NO: 247357 - DNA, 628 bp, Homo sapiens
atgttaacatggtacatattcaaaaaataaagtattgccctttaaggctcaattatagtatctgctaggtggcaacaccttttagcaacacctactggctcagtggcaacactgataacacatttgtgtggtgtgaagtcaacgtaggaccttgctatgtccacaggaagtttctaaatgagtgaccaatatattgcactgcttctttcacagtaaaggtttggtctgggtgtcaaggggtagaaatgagaatttcttttgtgtcactatttatccactgtcaaaatttggcttcccattcagcaactttgggttctgttggtcttgaagtattggttcccaagaaaaaacacttacacaggacacccaacagtcgctccattatgctgggagctgagactgccacatgtccaatttggctgcttgtgttactgaatcaaaaggcaaagaagggggttatttattmtgtctagagtggttggtctgattattaagtggtaattgggttgaatttacacaacgaggataagaagatatatatttggaatgcaagagatgccagggaagttcttagtattccaacagtttgtgatttaagtcagaggaaaagcagaacaacccaatacca

SEQ ID NO: 247358 - DNA, 492 bp, Homo sapiens
tcaactgtgcttcaaattaaaattataatactactgaaggggaaaaggaaagcaacaattcaagttatatatgaacacaaaatttaactgtgtgctttgtcttgggccatgttgaagggaacactttttagcagattggggtattttttgaagtaggaatatgtacagatcaattttgaaacactttaggtattttataacattgtcaaatgtggattctcactgtgaaagagaaacacacaaatatggaagaaggmaggcagaaaagaaacctgcagagatggatggaaattgacaatattggtggaaacatatttgtaaaatacgtatatgcatgcatatgttcataggtatgtatgtatgggtatatgtaggtgcagctgcatatgtgtctatgtatatatatgtattatttcttaactctgtctgctaaaaggttctagaaaaaattctaaatgaacataccttacaccaaagtctttatttctagta

SEQ ID NO: 247359 - DNA, 577 bp, Homo sapiens
tgcaatccattattgactgaaatgtcattagaccatccatggctgtattatcttgaagtatctatatcagacttactggttgcaagagaaaaagttttaattatcagtgaagaaatcaacaactstttgacaaggtaattaaaattaaaatcagcaatgaagagcagatgggtatctagtatctggtagacatctccagatgtgaaagctaagaatgacacagacttacatggtgttgtgtctggaaacgcataacctgagatgaatatgaggactcatcagagaaacacgaaataacacttttaatatttttaaaagatgtttttcaaaaatattgtcaaaaaatacaaaggaagactatgtgaatgttccgtataaattgagtctaaagataaatgacaactaaccacaatatctcttcctagactggatcctgtactggagaaggtgaaatgctatttagggcactattgaatcaactggcaaaactgggatgtagatgttaaatgagttaaaagtgttatttcactgataaatttactgaatttagaattgcacttaggttatgcagagaatt

SEQ ID NO: 247360 - DNA, 597 bp, Homo sapiens
agtcttcaggggccaccacttctcaaacttgcatagaaactgctctgtttttggcctatacagacttgattccaccatctataaaacgtaatttaaaagtagtctcaaatctgaccaacttatataatttttccttgtctttgagcatggagtaaaatgtgattcagggccaggcatggtagtttatgcctgtaatccyagtactttgggaggctgaggtgtgtggatcacctgaggtcaggagttcgagaccagcatggccaacatggtgaaaccccatctctactaaaaaatacaaaaattagctaggcatggtggcaggtgctgtaattccagctactcaggaggctgaggcaggagaatcgcttgaacccaggaggcggaggttgccgtgagccaagatcaggccattgcactccagcctgggcaacagagtgagactccgtctcaaaaaaatatatatatatatccaaaagcacttccttcttctggtgatcaaccaagcaggtattgtaagaaaacagttatttgtgactatgcataaatttagacacagagtatgccagacagatgcaaacctgtgttctacaggcatta

SEQ ID NO: 247361 - DNA, 532 bp, Homo sapiens
ttctatgtcttaactgatctttcatatttttcatcatcctttctttgtgctgcattatgggtacttttttcagctctagctttcatccattgaatgtttaaytgaaaaggtatttttttcacttctacaagttaatgttttatgattcttttctacgcttgctttttttttctccttttaacaagatgtctttatggtttctgatctttcgtctcttcaataactttaaatatacgtattttatagtctttttcaaaactgctgttataccgtagcctacaggttattatgcttgttgcttctcactcatttagatacactcattgtgtgcttttaaggtttttttacattttggcctaatttttagttatttttttttaattatagagtaaatttgctttgagtttttactttcctgtaaataatccagggctttcactgacttgagagctgtttaaaaaataatcatcattttagaattttagtttccatgcccttgtataaatttgaaccctatttcggtgctggtgta

SEQ ID NO: 247362 - DNA, 597 bp, Homo sapiens
agtcttcaggggccaccacttctcaaacttgcatagaaactgctctgtttttggcctatacagacttgattccaccatctataaaacgtaatttaaaagtagtctcaaatctgaccaacttatataatttttccttgtctttgagcatggagtaaaatgtgattcagggccaggcatggtagtttatgcctgtaatcctagtactttgggaggctgaggtgtgtggatcacctgaggtcaggagttcgagaccagcatggccaacatggtgaaaccccatctctactaaaaaatacaaaaattagctaggcatggtggcaggtgctgtaattccagctactcaggaggctgaggcaggagaatcgcttgaacccaggaggcggaggttgccgtgagccaagatcaggccatygcactccagcctgggcaacagagtgagactccgtctcaaaaaaatatatatatatatccaaaagcacttccttcttctggtgatcaaccaagcaggtattgtaagaaaacagttatttgtgactatgcataaatttagacacagagtatgccagacagatgcaaacctgtgttctacaggcatta

SEQ ID NO: 247363 - DNA, 532 bp, Homo sapiens
ttctatgtcttaactgatctttcatatttttcatcatcctttctttgtgctgcattatgggtacttttttcagctctagctttcatccattgaatgtttaactgaaaaggtatttttttcacttctacaagttaatgttttatgattcttttctacgcttgctttttttttctccttttaacaagatgtctttatggtttctgatctttcgtctcttcaataactttaaatatacgtattttatagtctttttcaaaactgctgttatacygtagcctacaggttattatgcttgttgcttctcactcatttagatacactcattgtgtgcttttaaggtttttttacattttggcctaatttttagttatttttttttaattatagagtaaatttgctttgagtttttactttcctgtaaataatccagggctttcactgacttgagagctgtttaaaaaataatcatcattttagaattttagtttccatgcccttgtataaatttgaaccctatttcggtgctggtgta

SEQ ID NO: 247364 - DNA, 507 bp, Homo sapiens
gtctgtcatatttaccaccttgtacaaggcaacatttctatatatagtaaatattcaacaatatttgttgtatgaaacaaataattgcacatattgcataaatgaatgaataatggctttagtttccttttgatttggttggatacatcatacatactcttgaatccaactatgcttgcaattaacaaaaatcccaatctaatttcatatatacagttgcttaccttattctgtatataaaatatgttgaagaaatttatatgaatttttatgtctagttcctatatatgaggaaatatattatctaccrattcctggacttaatttgtgtctcagcaatttgactaaaatgattggttctgatggtcagaatttgatgccatatggattctcaatgatgctctaaacttgtgcaaaccttccttgtgccttggcccaactttggactgatcctatgcctagatcctgccaatgaactgaattctgagcataacaatggagaagctg

SEQ ID NO: 247365 - DNA, 619 bp, Homo sapiens
tacttcgcccagttacctaaaaaagaaggaaaagaaataaagcaaaacaaacctgtggctgaattttgcttttaaagaaaattgagaataccaacagaagcaagtttataaattttctattccgttaccttgttcagagtaaatatgttcttgattttaggattttaaattccactcagctataaccttatgttaataaacaggagatataaatttgattatagcttagtgttctttcatctccrtatgttactagccagctgtgtttaaagcatcacatttttgtagtagaaaaatatccaatgtctgaatttcttataaaattgggagcagtagtattaagcagaaagccagacatttggataaagaaatatgcatagtaagaaaactgatatacttctcttcaaatgcccctaatactcatgtcaagatggcagggatgatttgctctgtggaaatcctctgatcacaaatccaggctgatgcctcatgggaggtgtgttgatttgtttttacatagaataatatgcattttatggtcagttcttcattcattctgtagggaatgccagaatacatggaagtgctttttgtatggtatgaatccatctgttttcta

SEQ ID NO: 247366 - DNA, 619 bp, Homo sapiens
tacttcgcccagttacctaaaaaagaaggaaaagaaataaagcaaaacaaacctgtggctgaattttgcttttaaagaaaattgagaataccaacagaagcaagtttataaattttctattccgttaccttgttcagagtaaatatgttcttgattttaggattttaaattccactcagctataaccttatgttaataaacaggagatataaatttgattatagcttagtgttctttcatctccatatgttactagccagctgtgtttaaagcatcacatttttgtagtagaaaaatatccaatgtctgaatttcttatamaattgggagcagtagtattaagcagaaagccagacatttggataaagaaatatgcatagtaagaaaactgatatacttctcttcaaatgcccctaatactcatgtcaagatggcagggatgatttgctctgtggaaatcctctgatcacaaatccaggctgatgcctcatgggaggtgtgttgatttgtttttacatagaataatatgcattttatggtcagttcttcattcattctgtagggaatgccagaatacatggaagtgctttttgtatggtatgaatccatctgttttcta

SEQ ID NO: 247367 - DNA, 573 bp, Homo sapiens
atacaaaaatcccatttcacagctgagtaaattgatagagtaaaaatttttaccccaatttcactatgaaaaattttagaagttggatctttataaagatcagtaaggctcagaagtccacatgcagagctgctttgaagataatcctgtaaaaatccatccacttgctaaaatcaaacacaaatgtaatgaaatatgaatatgacttctaggctcattcaatctttgaatgtccagcttggtttatttaaattcctcacagtggtaattctgtgttcactgatatcaaatgacatgtgaatttccacatcattttctcactccattttctgattgacatttatattttagtctacgccagatagaccagaattagaaattaagaactcatagttcttcaaacacactattaagtattatttaacttggtagtgataggatattcccagaaaggtataagtcaaattcattttcattcaagaaataattattgcgcrcgttgttttagtatactccacctccctaatagttttacttctccattgattgttctctgaagtgtatctcttgagt

SEQ ID NO: 247368 - DNA, 630 bp, Homo sapiens
ttgtgtcaagtagcttgtgcctcccatttccatttttgtcagctactaatgctatcttgcagcagtgctgttcagtgggcccaggggagccaagtgtcagtttttccagatgrcaagctgccagtctatagcacactgctcaaagtcacagacagactgcatttctttgcagaaccaaagaacatcatttactttatgcacacctttgtacatgatcagctcacagtagttgatgaaatagccctgaaaaagacacagattgagagcgagacacaatgaccgagacaggaaaggaagagagagataaggagatgcaaagagacacaggaggatgctattttagtgaattcagcccattttctgggctattattgaacgacatacttattttgtaaaaggaaagtttttaaacattattgccaatttacaggaacttctctcctaatagctggaacaaaattctcaatttgctctaattaaaatactagttttggggaatgaatttttcccctttgatatttaaactgaacattaaaaaaagctaaatcactttaaatggtctttaaattgcattctctctatcagaattgttaactctttttgcctaaggagaaaacccaccatgtatga

SEQ ID NO: 247369 - DNA, 248 bp, Homo sapiens
tgtgtatcataatcactgctacattcttaatgaaggaacattgtttgacacaatatttattgaattaagaaatgacatgcttcagaacttgaaaaagccctkaaagaaatgatacagggatctttccatactccttgaactttcagtaataacccaaagcccaacaatttcaaaactcagtctcttgagttttgttgttttttaatatgaaaatctacattgttgtgcatggctctaaaaggattaaa

SEQ ID NO: 247370 - DNA, 619 bp, Homo sapiens
gcggcttatcagaaatccagagtttctagctcgctcacaaatgtatggaatcagatttcccttgggtaagactaagcaaattgcattgtaataccactagataataaattattaataaaagtattctcatcagataatttttratgttttaaactaaaagtggtagagccattaggttagagcacatctttagtacttgccgagtttgattggcattactgaaacagaagaatgactgtgaaaactagacagagtggtttgtttcagatttgaggataggaataaaatggcttacagagaaagctggagaagatgaaattactggagttttgctttatttagttaaatcaatgttatagtctaatcctaaaaattttttttagcaattaaaaaacaaaatataatggtagagatacacttctagactctcctggggaatatatagagctggaaatagcatcacttctacacttagatgaaaaatagttggacacactgtaagttcatgagttttttgagccaaacagaaacttgtggtcacagtgcaagaaactggcctaagatctaaggaaatacagacacctacagaaaaagatgaaatgccagaacttggaacaga

SEQ ID NO: 247371 - DNA, 586 bp, Homo sapiens
gtaaagtggtatagtgttatttgaaggtgcagataaaatgcatttactaaagatgtatattataaacatagaacaaccaataatattttttaaaaagaggtataaaaataagacactaggggagataaaacaatgaaaaatgctcaattaatccaaggaaaggaagataaaggagtgaggtgtaacaaaggacaaaagggataaattgagaatagctaccaaaatgttagattttaatccagcaatattaaaaatgtcacattaaatatgaaccaagtaaacccaccaaataaaaggcagaaattgtcagattgaatacaaaaacataacacaaatctattattcaacaagaaactcactttaatacaaagaatarcttattaatataaaggttattttcaacaaagttgcccagacaattcaatacacacaaataaaacagtgttttaaataaatcatgccaggacaactgtatatctacatgtttaagaataaagttgaatccctacctcacactatgcacaaaaattgagtcaacatggatcatagacttaagtgtcagagttaaaaccagcaaagaaaccat

SEQ ID NO: 247372 - DNA, 586 bp, Homo sapiens
gtaaagtggtatagtgttatttgaaggtgcagataaaatgcatttactaaagatgtatattataaacatagaacaaccaataatattttttaaaaagaggtataaaaataagacactaggggagataaaacaatgaaaaatgctcaattaatccaaggaaaggaagataaaggagtgaggtgtaacaaaggacaaaagggataaattgagaatagctaccaaaatgttagattttaatccagcaatattaaaaatgtcacattaaatatgaaccaagtaaacccaccaaataaaaggcagaaattgtcagattgaatacaaaaacataacacaaatctattattcaacaagaaactcactttaatacaaagaatagcttattaatataaaggttattttcaacaaagttgcccagacaattcaatacacacaaataaaacagtgttttaaataaatcatgccaggacaactgtatatctacatgyttaagaataaagttgaatccctacctcacactatgcacaaaaattgagtcaacatggatcatagacttaagtgtcagagttaaaaccagcaaagaaaccat

SEQ ID NO: 247373 - DNA, 572 bp, Homo sapiens
tgtgtaggttcaataataatctgttcttgtaacagcacaactggtaacactggttgtattaccaaggctttgcctgaaattttgtatcttccagtatgaccagataactttgaggaactaaggttgagtttgtaaagccrataaaagaacttggaaaaattggcctggtaccttgtctacacagtccccttatagggttcctagccttgcaataaataatttcactttctgacaaactcagaaatctcaggatattttggaaacctggagaagagaggaatttacccagttcgtaaaggtgttacaggcacagtctgatggtgaatcttaccttggcttcttggcctcaagagggtttttaaaagtctaatgcaaaagcctttgtaaaaatgttccatcaatgccaacttaaaaagagcttatgtgatcagtaattattcttgctgcagtcaggccaaattaataaaactaaacttattttatacacaaattggccttactgtgattatctttatcaaaatgagggtgagtggagagaaaaactattaagcacttgtataagactctaccta

SEQ ID NO: 247374 - DNA, 507 bp, Homo sapiens
tctcattttcccacaaggttagcagtagaaactagaattcctctttcccaaagcaggtcatagaaaccagaatatcttttgcccgaagccagtcataaaacataaaatattactctaaccttcccttatttttctgtgtaagaattgaccatgaagaaattactgacttacctcgtttgattgtaggtcataaggcccccattccaaaaaaggtgctgccccatacttgggaggaagaaagcctccacagagaagccaagaagaatatgaacagatmggcctcagtctattagcattagatcatatctttttgttcaattacaattctacatggctgttacttcttcattgaacttatgcataaaaatagacagttttgcctgtaactttgggctttcattctgaaggtttctgcattatgtgaaactatgaccaaataaatgtgttaacctctttggtataggtgcatcaactatgacctttatgatctggagaaagggatcaccc

SEQ ID NO: 247375 - DNA, 552 bp, Homo sapiens
gtagtcatgctaagcaacatgattcaataatcaactttgttaaaaataatgatgtactaatttgtaagacagtgctgtgtaacattgtttgaggtgagggagagggcagaaaagcagatgtttccaaggaatttgagtggtttaagcaaaaaaaaaaaaaaaaaaaaaagaagacataatatcttagtctgttttgagtctgttttgtgttgctataaaggcatgcctgaggatgggtaatttataaagaaaaactatctatttggctcacaattctgctgactcaaaggttcaagattgggaatctgggtgggggcctcaggctgcttctattcatggtggaaggtaaaggggagccagtgtgtgctgagattatgtggtgagagaggaagcaaggtgggggttccagactctttttaacaaccagttctcatggaaactaatagagtgagaacttactctccagggaaggcattcatctatgcatgagrggactgccccatgacctcccattaggccctaactccaaattagggatcaaattttaacatg

SEQ ID NO: 247376 - DNA, 602 bp, Homo sapiens
tgtaacaaataattttcaatgtaaaaatacagttgttttatttcaaatgcctcgagttaaattgacgataagtgacatcttgtctagcatggaaatgcttttgttccttttatgaaactaattttaaaacgtaatttggtataaagacttattggcaggatttaccaatttcaccagttgactgaaaaaaaaatcttataaaatcagataaaatataaatatgttgtttttcagttttctttctgtatcacattcttaagaaaattagttyaaaaatgctacaatttttgaaagtaaaaggacacctattataatacagtataaaataaaacatgtaatttttggactggtagtaattcagctaatctatgtagtctgtgagagatttataaattcaaactctcaaaatattaaaagtatgactatcattcccctagtacctcttctaataattccctaatctttctccaacattttgatggtcattccattttgacttctctatatgagtgtcagtgactaatactctggattagctcacagtatggagcattaaaactacatatcccagattcctttgtagctggtgccctgcacgtgac

SEQ ID NO: 247377 - DNA, 636 bp, Homo sapiens
aattgaatatccaaacgcataagaatgaatctagacccttatccaacaccatatataaaaataaaatcaaaatgaattaaagatttaaatctaagacctcaaactataaaactactataaggaaacactggggaaaatttccaggacattggtctgtacaaagacttcttgagccataccctgcaagtacaggcaactaaagcaaaaacggacaaatgggatcacatcaggttaaaaagcttccgcacaacaaaggatacaatcaacaaagtgaagaaacagcccacataatgggagaaatattggcaaactacccaccttataggaatcaataaccagaatatataaggagctcaaacaactctattctaaatagtctaattttgaccagattggtcaaaatatgggcaaaatatttgaatagacatttctcaaaagaagacatacaaatgaaaaacaagtacatgaaaaggttctcaacatcattgatcttcagagaaatgcaaaccakagctataatgagatatcacctcatcccagttaaaatggcttatattcaaaagtcaggcaataacaaatgctggcaaggatgtgaagaaacgggaacactagtacactgttggcaggaatgtaaat

SEQ ID NO: 247378 - DNA, 488 bp, Homo sapiens
taaacaatctgtgtctttgaattcatgagagaccattctatgactctccaggcacatgataatttgggaaagaaaaaacaaaacaaacttgaatgtggaaatatgatcacttatgacagaagagctgatgattattcagaaatatagttatccacatctttggtaagaaaggcatatcagaagttggacatccattattcttccagtaacagctgactcccagagtgacaagcagacatagatggtagattcctttgtcagtcaccagtaattccaactttgaaaacaaggccgctacatgttactttttcatttttccatcacttacactgtttctgacagaaggctgaggtaaaggtgccaatgtgggagttgaatatttagcattgaggtttcttgcctttatcctttwacactgctaatttttatttactttttttttttgcaaatatgtctgcttcctcataaagatcaagtctctgaaaata

SEQ ID NO: 247379 - DNA, 621 bp, Homo sapiens
ttctattttgatgttgtaaatgctgtttgaatacccctgcacatatagcatttcaaatgggtaaaagtgtatcttttggataaagtccaaagaatggaattattgggttgaagagtagatgcatttatacatttagtatgttgctaattctacccatagcgatagggtctcttacactgccaccagcactgctgcaactcagcaaatcagtaaaattgaatttttgccaaatagaaaggtaaaagaatcagtaaaggcttagtttgtgtttttctaattatgaacaaagttgaatattttgttaatgtttaaaggtcatattactttctattctgtaaacaatgtctttattgtgttacatagttctctatgactgtgtcgatcttttccttatctagtcatatgagctctttatgtattaagaatatggtaatttgtctcttatatgagtagtggatggttttctggattattattattttagctttgcttatgatttttttgtggtatagatttatttatttttatggagttgartttaacaatttaaaaaatattttgtgtattagaatttgaaatagtataagaaagtctccttccacttgaggtgataaaataatt

SEQ ID NO: 247380 - DNA, 520 bp, Homo sapiens
aacatatatgattatctgctactagttctgagcatatgctatgcttttgatccagcttggtttagagagtcacctaaattcctagtctgatttatatacctctcctgtgacggccctaggaatctgcaatacttctatcacaataaacttaacgttacctcttttagttttatgtccccaatatgaggctgtactgtcaaggggtagatgcttaatacataattaaaagtaaatgaattcattttatgatttataaataaaataaaataaaagtgtcataaagaaaaagtgaaagaaagttttgcctgtcaatttccccatatttacaagtgttataaaaagctactgaaagcatctactaaggcaaatctcagagtacagagatgtatagaaagtggcctctgctctccagtttttaatccartaggacaactgagacacaatccacacacagcaaaggtgcaagacattactcacagtgttgatgtgggtgttggtcctgcctgcatccctccctccc

SEQ ID NO: 247381 - DNA, 585 bp, Homo sapiens
atcctccaattattatagcaattaataatagattaaaaggatttactatctttggaaaactaaatagtatgtattacaggcttggcacagtgataagtttttttccctagtccaatttccttgttttctgacccagaaaagcttccaggaaaccttaactgtaaagaggcattctgctttctctttcagtttaaaggcagatgtttacttttgaattacaaaagattatgctatattcatatcctattcaatagttaataattttccttctattgcaaaagaaaatcaaatatgtttctacttatttctcacaaaatgaaggtaaaacttcattatcaaattgtctttctgaattgcttaatgtccaattgaagatactgttttcttagagatgacataacacttgatttctcarctgcctattgtaaaacatttattgtttcttctctgttttagattttgtaccataacctttccttggttgcctttgttacattacagttttagatacattttacaaacaaaagaatttctaggttttggtcagattgaagctttagtttctgccaataacacaaattagat

SEQ ID NO: 247382 - DNA, 559 bp, Homo sapiens
ctttggatgatgacccactttattgaggaagatctttactcaattaacttaaatgtcaatctcttctggaaacaccctcacagacacactcagaaataatgctttattagctatttgggcatcccataatccagtcaagttgacacataaaattagccatcacactaggaatataaaaatgatttaaaataatattaaaatacataaatatttttattcaaatgaatgtaaaagttatatgatttgtgtaattgaacaacactaactcaagaagaaaattttaatataacaataactattaaaatattccatcagaagcttaaaatctatcttcaacagacatatatacttacacaacaactagaaaaaaataatttaaaattttaattgtcaaaactttcaaaaagctgataatgagaaatttaatagaactctaytgaaagtagaagattgttaccaaactcattttgtggatagtataatatagaatagtgctactcaaagtagtcaatcagctatttgttactgatcagcaatgagataagtagtttgcactaga

SEQ ID NO: 247383 - DNA, 549 bp, Homo sapiens
catgccagaatgcctgacatagagtaggatcttaatgcatatttgttaagtaaactaatatgcataatgttgccactcagaatgcaataccctaatgtgaaggcctcagaaatagccacagaaaaaaagtttctctctgaacttctccctcctctctttcatccatcattctcccccaaggctagccatagaaactagaattcctcttccccaaagcaggtcatagaaaacagaacccttttccccaaagccagccacaaaacataaaatatactcatcactttctcccatttatctgtgtaagaactggctataaagaaattctctgacctagttggtttgattgaaggccctaaggtcccctcctttcagcaaaggtcctgccccatacgcagaataagcaaatgctgcacagagaggccaagaagaatctggataggccttactaagtgatatgrttaggatctgtgtctttgtccaaatctcatgttgaattataattcccaattttggaggtggggcctctgggaggtgattggatcatggagg

SEQ ID NO: 247384 - DNA, 529 bp, Homo sapiens
tgtgtggtatctaaaggtcatggcattgtcactgcacaattcttgcagaaagcaaggctgtgctgtgtgaagcaaaatgtcgcaacaaagtctgccatcattccaaatccttcatgtgataatttctgaattaaagtgttattataatgaggaaaaatgaggaaatggcaaattttcttaataaggaaaatagtaaaaccatgagcctgtgaaattaataagactttataaatgcaatatatttacaatgaaaatctcatgcaagggaaatatttaaattacatgaaatccttgcacagaacagcaatgataaatatatttggatttaatggcatgtactcatcaaatactcatatctgtgcatcatataaaacatttatatacaattacrtttgtcaccaatgcaggcggttgatagctcagtaactcattctatgtcattgattcagaacaatgatctttaaatattacctacatggtagctctgcaggggttttaaatgagtaacgttattataacttctaagtgt

SEQ ID NO: 247385 - DNA, 629 bp, Homo sapiens
cccttcatcatattttttcagtacttcatagtactttcaaaattgttgttttctttgctgacacaggtacctgctaaaggataaaaatctactttaaatatttatcctatagtcttaaatcttcccctaaagtttacccttaacagtttacgtatgaatctgtytcatgccattactaaattctctcagattgtcttttaaatttaataggcaaacttccctgattggaatacccagcctgctcgttactagctgtgtgaccttgggcaagttacttaacttttgtcaagctaagttctcatttataaatggagatgatttgtcatatgtcgttcaactattagaaagattacatgagagaatgcttggaaatcacttagcacattgcctggtacatagtactgattactcaataaatgtttgatgctaattatcattaattctgatataaatatttaaattcatttttatttaatcttctgctaaaaagtttttctttacgctaaagattaagtagttttgtctcatagttgcatgattcagttgaatgaagaaaagattttccctgaaccttttgatgagcttagttgggctcctgggtctcttgaaattgtcagtgaaatagtagg

SEQ ID NO: 247386 - DNA, 600 bp, Homo sapiens
tcatgtgtttgtcttttttttctagattataaggtatttgtgtctttgataaaaaccttttatatatctccaaagtgctaagcacatagtaggtgctcatcatatacytgttagttgaatctgtttacttgaaaattttattccttgtctacttccattaaatgcaactggaaccattaaaatacaaatacagtgaggcttattggcttgccacagctccagaagatgcagtccataccaaatgacaccccctggagttgtcaggttgttcttcatagttgaaggtgtgtggaaaaatagttagttattccccaaactcgagctctaaagctaactatcatggctgggcgtggtacctcaggcctcacgcctagcacattgggaggctgaggcaggagaatttcctgaggccaagaatttgagaccagtctgagcaagatggtgtctctacaaaaaatttaaaaaattagcctggcatggtggcacacgcctgtagtcccagctactggggaagctgaggtggaaatatcactcgagcccaggagtttgaggctgcaagtgagctatgattgtgccactgcactccagcctgtgccacag

SEQ ID NO: 247387 - DNA, 600 bp, Homo sapiens
tcatgtgtttgtcttttttttctagattataaggtatttgtgtctttgataaaaaccttttatatatctccaaagtgctaagcacatagtaggtgctcatcatatacttgttagttgaatctgtttacttgaaaatttkattccttgtctacttccattaaatgcaactggaaccattaaaatacaaatacagtgaggcttattggcttgccacagctccagaagatgcagtccataccaaatgacaccccctggagttgtcaggttgttcttcatagttgaaggtgtgtggaaaaatagttagttattccccaaactcgagctctaaagctaactatcatggctgggcgtggtacctcaggcctcacgcctagcacattgggaggctgaggcaggagaatttcctgaggccaagaatttgagaccagtctgagcaagatggtgtctctacaaaaaatttaaaaaattagcctggcatggtggcacacgcctgtagtcccagctactggggaagctgaggtggaaatatcactcgagcccaggagtttgaggctgcaagtgagctatgattgtgccactgcactccagcctgtgccacag

SEQ ID NO: 247388 - DNA, 539 bp, Homo sapiens
ccttaatattcaagggtaataaaaaatacaagtcttccaaacagttaacttactgaaaacttttttaaaatcaacatttgctaaattcagaaacagatagtaggtactttatttatatatatataaaattactgtcaattttatatatatataattttacataaaaatataattttatatgtatgtaaaattgacagtaattttttgcagaaaattcacaatccagttttttgattccacactgcacatcccaccccctcaagaccagagaacacagggtctaggctaacacatcaaaagcagctctggagacttaattccattgtggtaatacagcyttcttactctggcagaagctccataccgttcagcaacccactgaacgtagggaaggaatgggaagctcctgtgttccaaaagagttctgaactggctcttcatctgtcccttagcccctgcattctagttttattgttcttctccccccagattgactatccatgttctggtcactcctcattgttaaatgcggttaacac

SEQ ID NO: 247389 - DNA, 539 bp, Homo sapiens
ccttaatattcaagggtaataaaaaatacaagtcttccaaacagttaacttactgaaaacttttttaaaatcaacatttgctaaattcagaaacagatagtaggtactttatttatatatatataaaattactgtcaattttatatatatataattttacataaaaatataattttatatgtatgtaaaattgacagtaattttttgcagaaaattcacaatccagttttttgattccacactgcacatcccaccccctcaagaccagagaacacagggtctaggctaacacatcaaaagcagctctggagacttaattccattgtggtaatacagctttcttactctggcagaagctccataccgttcagcaacccactgaacgtagggaaggaatgggaagctcctgtgttccaaaagagttctgaactggctcttcatctgtcccttagcccctgcattctagttttattgttcttctccccccagattgactatccatgttctggtcaytcctcattgttaaatgcggttaacac

SEQ ID NO: 247390 - DNA, 580 bp, Homo sapiens
atgtaaccgctgggtcttcctgacttcctctccagtttaagaacaggaagagcagtgcacaaaaatgttctgtcgagctgaggatatcggaacttaaccggcttccacttggacagaatacatttgttccagaacactgtgtacattctgggttttccaaatatgagaaacagatggagtcattaattcaagataaataaaaaaaacaaaacaaacagcaagccattatttgctacctgttcagatatttcwcaggaagggaaaaggaacaaacaagcttttgatacaccctcggtctccagtaaccaccagtgaccaaatccaaagttctcttcatgtgacctttctagcattttagttgacaagcccctcttggaaacttcataccctggattttgtaacatggcattcttacaccttccttttttctcttagattatttctcagtcctgaatatacattatcaagtcctgacctttctcatgacatccagaaccagacctgaataccacattaacagttcacctcactacgttaaaaaatcattatcatctgcctccaaatctctttctccacccct

SEQ ID NO: 247391 - DNA, 580 bp, Homo sapiens
atgtaaccgctgggtcttcctgacttcctctccagtttaagaacaggaagagcagtgcacaaaaatgttctgtcgagctgaggatatcggaacttaaccggcttccacttggacagaatacatttgttccagaacactgtgtacattctgggttttccaaatatgagaaacagatggagtcattaattcaagataaataaaaaaaacaaaacaaacagcaagccattatttgctacctgttcagatatttctcaggaagggaaaaggaacaaacaagcttttgatayaccctcggtctccagtaaccaccagtgaccaaatccaaagttctcttcatgtgacctttctagcattttagttgacaagcccctcttggaaacttcataccctggattttgtaacatggcattcttacaccttccttttttctcttagattatttctcagtcctgaatatacattatcaagtcctgacctttctcatgacatccagaaccagacctgaataccacattaacagttcacctcactacgttaaaaaatcattatcatctgcctccaaatctctttctccacccct

SEQ ID NO: 247392 - DNA, 581 bp, Homo sapiens
attacttttctgttcccacagttgctgtcttgagtaccttgtgtctttttctgactataaccgagcctcttaaattgtctcccggtatctagtcattatcccccataatacatcacttattgtagggtagtgtcagaattattttaagatatgcgctgatcatgttgcttcttcattaaaattcattaatagctaataacaaagaggaaggcaaagttaatacatgttccttctagaagatacaggtaagcaaaatgaagaaaatatattcataaatcccaacacccaggtcatcaaatgtcatcagtttagcctgtacatattttgaaccttgggaattatgtaatacatattttgtaagctgcttatttttcttttatacatcatgagcatattcctatgcagttaactacattctacaatatatatgattttacacctatgyagtaatatcaatgtatgaattgccacaactattttaagttttatgccatccagctttttatggtgtatctttcagtacaccctgtggtttaatacaagactaagtaactgctgtctgtgttagtttatcctacaaa

SEQ ID NO: 247393 - DNA, 612 bp, Homo sapiens
tcactgtaaatcttttaatcatatcaaagtcaggtcatcctcagacactataactaagatagataaggagtactttactataccatattagtaaaggttttctagctcttattttctaatttcctctgagcatttaaaattacatccagtgataaaaacaatatttttttttcagaatttcatgctttaaaaagctgtggcttctctatagacmactgttacattagggaagtgattctagagcaaaatatactgcctcaacataagtcgttactgactggaaaatgctataggcagaattgcaaagagtggctcaaacatatagtttgcttgcagaatgtaacgtgcaaaatcacatacatgcgatgtatttacctttgctagacaatgagaattgaataattgatttgtacctggtatgttatatcctccagtgtcactttttaaccagattcactgtgcgttccaaactgtcataaaaattgattatatgtttaacaattgtttttctactacagtggagagaaaaatcccaattataaaattccacctaaaggagtttcattttgtaataacatctgattaataacttgttgcattttgcttaacata

SEQ ID NO: 247394 - DNA, 604 bp, Homo sapiens
ccaaacaccgcgtgttctcactcataagtgagagttggacagtgagaacgcatggacacacggaggggaacatcacacaccgaggcctgtcaggggatcaggggctggggagagatagcattaggagaaatacccaatgtagatgatgggttgatggatgcagcaaaccaccatggcacgtgtatacctctgtaacctgcatgttttgcacatgtatcccagaacttaaagtataatttttaaaaattatgaaaaggagtcaaatataaattccgatgttgaaaaatatgatcttaaaatgaatcagttgaaattataataatatagtaataattggaaaagtcattaggcttgacaggagaataggcagataaaacaatcagtgaacttgaagctaggtcagttgttgaaatgatccagtctgaggaggagacaaggaaacatgaacacagaccaaaasactgttagacactatcaagcatattaagtataaatacgagtcccagaagagagtggaaaggacagaaatagagtacccgaagaaataatgttcaaacttgccaaatctgaaaaaagacatgaagccaatatccaagaagttcca

SEQ ID NO: 247395 - DNA, 568 bp, Homo sapiens
agtggtgaaagagcgtgtacttattttatgaagatacaaaaacataatcaacagaagacctatgaccttaccagtaggtcaaagcagtaatttttttacaacgtaaaaggcagagcttaaatgaagtttcttaatttctcaccttcaattattttttcttatgtgtgagacaagaagaaaggaaatggttttgtatttgagcattggcaatgatgtgaaacttaccgggagaaaatcaggcctaatataaaagagaagttctaacagagctggccaatgatggagcagtatctctcgaaacagtggtctccccagtcttgtcatccaagcagaaactggattrgatgatttctaatccagtttacaatgcaatgtaaaccacacattcagatgagcagagctatgcatatgaattaacatactgtgaaaacaactcatagggcctctactaatcttgtgcatgataggattactactttttaccactatggataatcatattccactatggataatcgtatttcaagatgcctgtgtgtgtgtgtgtgtttgtgcgtgggttgggggg

SEQ ID NO: 247396 - DNA, 568 bp, Homo sapiens
agtggtgaaagagcgtgtacttattttatgaagatacaaaaacataatcaacagaagacctatgaccttaccagtaggtcaaagcagtaatttttttacaacgtaaaaggcagagcttaaatgaagtttcttaatttctcaccttcaattattttttcttatgtgtgagacaagaagaaaggaaatggttttgtatttgagcattggcaatgatgtgaaacttaccgggagaaaatcaggcctaatataaaagagaagttctaacagagctggccaatgatggagcagtatctctcgaaacagtggtctccccagtcttgtcatccaagcagaaactggattagatgatttctaatccagtttacaatgcaatgtaaaccacacattcagatgagcagagctatgcatatraattaacatactgtgaaaacaactcatagggcctctactaatcttgtgcatgataggattactactttttaccactatggataatcatattccactatggataatcgtatttcaagatgcctgtgtgtgtgtgtgtgtttgtgcgtgggttgggggg

SEQ ID NO: 247397 - DNA, 596 bp, Homo sapiens
tcatattcaaaacttagaagatattcctgtagagttgcataaaaattgacacatttgcagaccatattttgacaaagccgtaccttatgtactccrtgattgccagaattgcagttaaacttggtttggtttatatattggaaaaaattttaaaaatcatagttccttattatagaatcatatagatctgtttgattttccttattttcttctgctttaatctttctctattttacaaataacttcaaatatttttcaaattgtttagaattctctgaagtgaataaaaggtgtattgtgcaaattatgtgttcttaaaagatgtttagatatttcttaagagattaacactaatttctacttatatatttaaataaatttaatttaaatatctttgtcttttattctaaacgtactttaattggctcagattaagtatttaaattttataagcatgtttagattgtactaactgcagtgaatcttgtttaaatatccaaaatactatatgcaaaagaaacatattttattatgcatctgctttagagtaaaatcttctcaatcatactaaaaaggaaatgagaaaataaagtact

SEQ ID NO: 247398 - DNA, 543 bp, Homo sapiens
tacttttcatttatctgtagagagaacatttctatcttttggatttcttgtcccaatttagtaagtcagattatcagatgcagttgctatatacaaagttttgctgaaaaaatcataagagaaaacagatggagcattttgtatcataggttatagatttatatttactaagaataaaaatatctccatatcagtagtgttttattttttcagtatcttatttaagaaaacaatcctaagtagtctttgagagaaaactatatgaaaaaataagaaacattatattttaatatggaatataaaccatctaaaaataacttacatagggctttatatttttgcaagtaaaaattcatttttatttcatttatttttccttttgttaatgctttcaccatctaatgcaaatgtgaatgagatacttgctgtttacagaaaggtaggatgacagaaaaatacttataatacagtgagacaaatgtatgcraaggcaaaggaagtagcaagagaggaactaactccctgtctagagaattggcactg

SEQ ID NO: 247399 - DNA, 596 bp, Homo sapiens
tcatattcaaaacttagaagatattcctgtagagttgcataaaaattgacacatttgcagaccatattttgacaaagccgtaccttatgtactccgtgattgccagaattgcagttaaacttggtttggtttatatattggaaaaaattttaaaaatcatagttccttattatagaatcatatagatctgtttgattttccttattttcttctgctttaatctttctctattttacaaataacttcaaatatttttcaaattgtttagaattctctgaagtgaataaaaggtgtattgtgcaaattatgtgttcttaaaagatgtttagatatttcttaagagattaacactaatttctacttatatatttaaataaatttaatttaaatatctttgtcttttattctaaacgtactttaattggctcagattaagtatttaaattttataagcatgtttagattgtactaactgcagtgaatcttgtttaaatatccaaaatactatatgcaaaagmaacatattttattatgcatctgctttagagtaaaatcttctcaatcatactaaaaaggaaatgagaaaataaagtact

SEQ ID NO: 247400 - DNA, 624 bp, Homo sapiens
tacttcctttcacagatggcatgatatacataaagtaaaacgaagaattttttaaatgattaaaaataaattcaccagagttgcaggatacatggttaacatgcaaaatccaattgtatttctatatactagcaatgaagagtctgaaaaaggaaattaagacaatttcatttataatagaaccaaataataaaatacttttggacagatttaaccaaggaactaaaaatacaaaacattgctgaaagaagttaaaaaaagacctaaacaaatagaaatacatcaagttcatacgttgaaaaacataatactgttaagatggaaatacttctcaaaatgatctacaaattcaatttcctattataatccagtggcctttttgcaaaaataagaaagctgattcatatggaaatgcatggsgtcctgaatagccaaagcatttattgaaaaagaaccaagttgaaagactcacactttgaaaacttaatacaattctacaataatggaaacacaactaccaggtaccaaacataggcactagtgtaaggataaacatatagattaatagaatggaattgggaatccaaaaacgtacccataacctctctattgattttcaacaag

SEQ ID NO: 247401 - DNA, 550 bp, Homo sapiens
aatgcaaatcaaaatcaaaatgacatatcactctgatgtgtgacttcacacccatcagaatgtattttttttttaaaggaaaatgttggtgcagatgtgaagaaaatgaagctctcatacgttgtgggaatttaaaatgaattggccactttggaaacaaattagtagttctttaatgaattaaacggacttaccatatgacactgcagttccacttaggtatatatccaaaataagggaaaataggtgtttaaacaaaacttgcacaaatgttcatatcactattcacaattgccaacagggaagacaacccagatgttcatcagctgaggagtggataaacaaaattgatatatccatgcattagaatgttatttacccataaaaaagttatgaagtastgttacatcctgcagcatgagtgaactttgaaaacaagtgaaagatgccagatacgaaaagccacatagtatatcattccttttatatgaaatgcccagaacagaaaaactcctacacaaaaagcagatgcgtggttgccaggggttgg

SEQ ID NO: 247402 - DNA, 569 bp, Homo sapiens
cacatccgagacccaggagtcagcagggcgagtttgaggtctttcctcttgggttgtagatggctgccttctcctccctcactcttcccatggtcttcactcagtgcatgtctgtgtcttgatcttttttttataaagatgccaattatattggattagggcccatcctagtgacctcatttaatgacctctttaaagaccctctcaccaaagagtcatattctgaggtactgggggttttggacttaggcatttttgggagggactcaattcagcctctaacagagcaataatactcagttgacatttgttaaacatatttctcatgaaaataattggtcacttattcacaaccgtggcctcatttgaaaagtacttaagcaaataccacttgcttgttaatggcttactgattaagttttattttagtgaaagtgcgccttgaaggatattacctcttcattgaagctacagacgtcttacacaattaagaacaacttayagtaacatctacctctttactcagcatgagatgtgttattggtggtacaaagcattttgaagacagt

SEQ ID NO: 247403 - DNA, 540 bp, Homo sapiens
attttgttctttttggctgcatagtattccatggtgcatacataccacattttctttatctagtccgtcattgatgtggtatatatgtaccatggaatcaacctgggttgatttcatttttttgctgatgtgcatagggctgtagtaaacataagagtgcatgggtctttttggtggagtgatttatttttctttgggtgtatacccagtaagggggttgctgggccaaaggtagcactgtgttaagttttttgagaaatctcgaaactgttttccacagtagctgctctaatttacattcccgacaacagtgcataagcattcccttttccccacgacctcaccggtatgtgctttttgactctaatcatagccattctgackgaagtgagatggtatctcattgtggttttgatttgcatttctctgctgagtaatgataatgaacattttttcatatgtttactggccacttgtctgtcttttaagaaatacctgttcatatcctttttctactttttaatggggttgttttttgct

SEQ ID NO: 247404 - DNA, 540 bp, Homo sapiens
attttgttctttttggctgcatagtattccatggtgcatacataccacattttctttatctagtccgtcattgatgtggtatatatgtaccatggaatcaacctgggttgatttcatttttttgctgatgtgcatagggctgtagtaaacataagagtgcatgggtctttttggtggagtgatttatttttctttgggtgtatacccagtaagggggttgctgggccaaaggtagcactgtgttaagttttttgagaaatctcgaaactgttttccacagtagctgctctaatttacattcccgacaacagtgcataagcattcccttttccccacgacctcaccggtatgtgctttttgactctaatcatagccattctgacggragtgagatggtatctcattgtggttttgatttgcatttctctgctgagtaatgataatgaacattttttcatatgtttactggccacttgtctgtcttttaagaaatacctgttcatatcctttttctactttttaatggggttgttttttgct

SEQ ID NO: 247405 - DNA, 533 bp, Homo sapiens
ttatttacagttaattgcctgctaaagacccacgtccaaacagtcacactgcggggttaaggcttcaacatctgacttttagagggaaagaattcagttcatacctctcagtaattctaagtgaataagatagcacttcaaaacctatcagctagtggraatgtagtcatgatactagtcctgagtctcctttgtgtgctaaaatactaagaattattttcttttcagtttcttttttaggatactaatgtccaggaaaggatacttttgaactcttaagataggaagtatcttgggtcatcactgtcattgcacaaaataagcttaaatcccactctaacattttaataaaagattcctctgtttcctactagttacatgtttgtagtcctatccttggggccttctttgaggcagcattagttcttactaggctctacaccaaatggcagatgtgatatagatgataaaattctcaggccaagtctttctggatttgcctgaaagaagagatataaagaggtattatctac

SEQ ID NO: 247406 - DNA, 387 bp, Homo sapiens
accgtaatatggatctgatatcctatgtgatcacatgatcaagagcagccaagcctccagtctttacagaatgaaatyatagaaaatagcattttcaacaatggtgtttcatatcatctcaacccagccactttggaacattatttttgtttttttaattgtaggttcatttatcagccagtcttaagagacagctcacaagattgacagaggatgtcatacagatgcctaattaaggccattagcataatgaagccatgaaatcttatgaattaaaagcattctgaacattcaaatcattctaacaaaaaataaacaaaatcatacaacctgtgactgtgtcaattatatatttgtgtatgcagatatatatatatatagtcaaac

SEQ ID NO: 247407 - DNA, 564 bp, Homo sapiens
tgacagaggatgtcatacagatgcctaattaaggccattagcataatgaagccatgaaatcttatgaattaaaagcattctgaacattcaaatcattctaacaaaaaataaacaaaatcatacaacctgtgactgtgtcaattatatatttgtgtatgcagatatatatatatatagtcaaactacaattctaaatctattgcaatgaacraaatttaaaagatgtatgaaacatttgccaggagccaagaactatgaaatgcattggggctgcaataagaaacaggacagatatagaccctgctctcaatgaccttaaaagtaacaaggaaaaagaaaagcagatgacaatgaaaaacggtacggaaagaagacacccaactgatgcagggcagacacgcccctaaattggggtttaggctgtcagggttcttgactctgcccaggaaagaattaaaagtgagctggtggtggtagacagcaatgtttattgaaccagagctgctccttgcagaccagggctaactcctaggcagtgaacccagagccagaagcatgtgggct

SEQ ID NO: 247408 - DNA, 564 bp, Homo sapiens
tgacagaggatgtcatacagatgcctaattaaggccattagcataatgaagccatgaaatcttatgaattaaaagcattctgaacattcaaatcattctaacaaaaaataaacaaaatcatacaacctgtgactgtgtcaattatatatttgtgtatgcagatatatatatatatagtcaaactacaattctaaatctattgcaatgaacaaaatttaaaagatgtatgaaacatttgccaggagccaagaactatgaaatgcaytggggctgcaataagaaacaggacagatatagaccctgctctcaatgaccttaaaagtaacaaggaaaaagaaaagcagatgacaatgaaaaacggtacggaaagaagacacccaactgatgcagggcagacacgcccctaaattggggtttaggctgtcagggttcttgactctgcccaggaaagaattaaaagtgagctggtggtggtagacagcaatgtttattgaaccagagctgctccttgcagaccagggctaactcctaggcagtgaacccagagccagaagcatgtgggct

SEQ ID NO: 247409 - DNA, 562 bp, Homo sapiens
gattttgaagactctggttaggtagtagaaccagtgatatgttgatagaaaataaaagctcctcaaagcctacatttcttccacctgtgarcagtggacatttttagaacgtttccacacagatcatagcagcaatatatagctttatcagggaaaaaactaatcccataaaagggagatctgactttgggattataatacaagaataagacccttcagccccaccccctctattttcatatgtggccagaggtacatttccaattctcttcttcccacacccattaaaaataaatataccaagggaatggaagaaatgtgggtatcagattttctgacaccctgcctgcagtgtaaatttttaaaaacatctgttctgagggcagcaagggttatgagagaggcaagcagagtcttcaggtttttcattttactctttgactttagagagccagccaattttggttttgatgatgtgaaataatcaaatccaagattaagtaatacccaagaaagatgaagttttttttttttttcttttgccctgctctaggattgagaa

SEQ ID NO: 247410 - DNA, 562 bp, Homo sapiens
gattttgaagactctggttaggtagtagaaccagtgatatgttgatagaaaataaaagctcctcaaagcctacatttcttccacctgtgaacagtggacatttttagaacgtttccacacagatcatagcagcaatatatagctttatcagggaaaaaactaatcccataaaagggagatctgactttgggattataatacaagaataagacccttcagccccaccccctctattttcatatgtggccagaggtacatttccaattctcttcttcccacacccattaaaaataaatataccaagggaatggaagaaatgtgggtatcagattttctgacaccctgcctgcagtgtaaatttttaaaaayatctgttctgagggcagcaagggttatgagagaggcaagcagagtcttcaggtttttcattttactctttgactttagagagccagccaattttggttttgatgatgtgaaataatcaaatccaagattaagtaatacccaagaaagatgaagttttttttttttttcttttgccctgctctaggattgagaa

SEQ ID NO: 247411 - DNA, 488 bp, Homo sapiens
tacatttccaattctcttcttcccacacccattaaaaataaatataccaagggaatggaagaaatgtgggtatcagattttctgacaccctgcctgcagtgtaaatttttaaaaacatctgttctgagggcagcaagggttatgagagaggcaagcagagtcttcaggtttttcattttactctttgactttagagagccagccaattttggttttgatgatgtgaaataatcaaatccaagattaagtaatayccaagaaagatgaagttttttttttttttcttttgccctgctctaggattgagaatcatgtttttgtatgattggtacttagtttgacctgtgttctataatggaaactgtaaattaagaaaaatagaaatcctctgtattttatctaggatgccaaaaacacttgaaaattaatccattttcatctatagcacttatagtttcaaaggaaatgttgtatctctttttatgaaa

SEQ ID NO: 247412 - DNA, 555 bp, Homo sapiens
gaagtagggaagggtaaagggcaaattctaactttccttctatatcagagcatgtaatgatactaaaatatcattccctatctagattattatctgacagcaatataatgactaggaaaagtggagaaaaaaatattttactagttttttataatgttgcacttgacagccctatttttgttacgataggaagagtttaagtttgtacttcttttagtttgtactttttttttcaagtagtagttgtcatttagtataataactctctactgctctggggttatgttgttgttgtttttaacrgaggttggacatagaaactacccagaaagctttggaaaatacatatccttggcctcaccatagatataaatagtaagcacatctgaaccagcatacatgccacttacgttatttctgtgtgaatgtggcatttgaacagtcttcttatgtaaccagccccacactcctgtcagctccccaccagcctaacaggagatagatttgccttcagcaggcctcataatgctagaaatatagatgaaactcttgtaa

SEQ ID NO: 247413 - DNA, 578 bp, Homo sapiens
gtataggggcgtctgatttaagtagaactttgaagccagtctaccctttggactccttggaggtgttcaaagagctcactgaatgtaaattaattgtctgtttcttaggcacatccaaaagaagccaaatacaatkacaagtacctataaaagttaacaccaccaaatatgtgaccagagtagtatttaattcagttcatgtatttgggaaaaaggtgtgcaggatagatctttgatcctaagagatcgttctcaaaactctgtggcttcttattcctacaccatgcacagctgagtcagaatctccaagtgtgggttttaagaatcaggtgaatagttacccaggtaaatctgatataaccattttatgagcctgtcttagggaactaagtgataaaggatttcacaattgcctctcagttttaaatttgagttgttaaatgctttatagacatgccgtggtgcttactgtgaaatcttctgtttggagaaaatacatacatccgtgaaccggggaataacaatataaagtgtcacaagctaagtggctggcagatctgttgtatggaaataattta

SEQ ID NO: 247414 - DNA, 578 bp, Homo sapiens
gtataggggcgtctgatttaagtagaactttgaagccagtctaccctttggactccttggaggtgttcaaagagctcactgaatgtaaattaattgtctgtttcttaggcacatccaaaagaagccaaatacaatgacaagtacctataaaagttaacaccaccaaatatgtgaccagagtagtatttaattcagttcatgtatttgggaaaaaggtgtgcaggatagatctttgatcctaagagatcgttctcaaaactctgtggcttcttattcctacaccatgcacagctgagtcagaatctccaagtgtgggttttaagaatcaggtgaatagttacccaggtaaatctgatataaccattttatgagcctgtcttagggaactaagtgataaaggatttcacaattgcctctcagttttaaatttgagttgttaaatgctttatagacatgccgtggtgcttactgtgaaatcttctgtttggagaaaatacatacatccrtgaaccggggaataacaatataaagtgtcacaagctaagtggctggcagatctgttgtatggaaataattta

SEQ ID NO: 247415 - DNA, 578 bp, Homo sapiens
gtataggggcgtctgatttaagtagaactttgaagccagtctaccctttggactccttggaggtgttcaaagagctcactgaatgtaaattaattgtctgtttcttaggcacatccaaaagaagccaaatacaatgacaagtacctataaaagttaacaccaccaaatatgtgaccagagtagtatttaattcagttcatgtatttgggaaaaaggtgtgcaggatagatctttgatcctaagagatcgttctcaaaactctgtggcttcttattcctacaccatgcacagctgagtcagaatctccaagtgtgggttttaagaatcaggtgaatagttacccaggtaaatctgatataaccattttatgagcctgtcttagggaactaagtgataaaggatttcacaattgcctctcagttttaaatttgagttgttaaatgctttatagacatgccgtggtgcttactgtgaaatcttctgtttggagaaaatacatacatccgtgaaccggggaataacaatataaagtgtcacaagctaagtggmtggcagatctgttgtatggaaataattta

SEQ ID NO: 247416 - DNA, 609 bp, Homo sapiens
acccttcttgtgatcattcatacgtgaattattttgctctctcaggtttatatagtataactgttcccttcatgacatttacagtatcctcctaaaccaacaaaatacagtggacatgggagcattatgaacaaaaaaccagttttccatttaaaaagttttaatcccttttgttagtctagcacatgtatatgtgctaaagttaacttagtaataatatattttacttggagtcatctttttattccattgcattagtttccttcttaaataagctttcgttttcttctcagttattttatcaactctcttgtgaatgatgatgataactgcctgacaaacatcgaaaacaaatgtgactaaaagactgcagagatatatagcagagatttggacacaccstgagccaaattacaaaaacctgacagtacagggaaagcaaatatatatctattcaattagttaactaaagaaagagcaaatgtgatggcaaaagcaagtgtcaaagagggaacaaatagagggaacaaatgaaggagaagaagaaataattctgatagtagttgaaaggtgagatactgataaagaagagaaagaccttttcccatc

SEQ ID NO: 247417 - DNA, 645 bp, Homo sapiens
tagattgatgaaagtagtgattttggaagatttaactagaagtgaggaattggaaagtaaagattagtgataatccaagcgtgatacattaaacattcagacagaatcagttgggtcaaagtaatagaaaagtggcagtagagaataggaaatgcccgttggctttgtgatggattgtaaggtagaggtgccgaagttgaagcttaggtcattagaagaatggttgtaatattgatagatgcatagagtgctggaaagataaatttgtttgcatggagaatattgacatttatgtgtacagttttgattttagagtgttaggacattcaaatgggatatcaagtcaaaatgtagtcaaccagtagttacatcataagatgtgaaaatatasacctggctgggatgggatctttcatgtaaaagagctgttgaatttaacgatacacatcttctaaaggagagaaatataaaaagagaatagaacttcatggacaaataatgtcatgtatttttcttataattaacatacaatttaccattttggtgacctctttaattttcataaacttagatatataacttacgttgattttatttgaagttcatatatcctcagttgaacttaaatggtctatatttgtatta

SEQ ID NO: 247418 - DNA, 645 bp, Homo sapiens
tagattgatgaaagtagtgattttggaagatttaactagaagtgaggaattggaaagtaaagattagtgataatccaagcgtgatacattaaacattcagacagaatcagttgggtcaaagtaatagaaaagtggcagtagagaataggaaatgcccgttggctttgtgatggattgtaaggtagaggtgccgaagttgaagcttaggtcattagaagaatggttgtaatattgatagatgcatagagtgctggaaagataaatttgtttgcatggagaatattgacatttatgtgtacagttttgattttagagtgttaggacattcaaatgggatatcaagtcaaaatgtagtcaaccagtagttacatcataagatgtgaaaatatacacctggctgggatgggatctttcatgtaaaagagctgttgaatttaacgatacacatcttctaaaggagagaaatataaaaagagaayagaacttcatggacaaataatgtcatgtatttttcttataattaacatacaatttaccattttggtgacctctttaattttcataaacttagatatataacttacgttgattttatttgaagttcatatatcctcagttgaacttaaatggtctatatttgtatta

SEQ ID NO: 247419 - DNA, 491 bp, Homo sapiens
catggacaaataatgtcatgtatttttcttataattaacatacaatttaccattttggtgacctctttaattttcataaacttagatatataacttacgttgattttatttgaagttcatatatcctcagttgaacttaaatggtctatatttgtattactacaaatactcaaatatgtgtttactgtgaatttggacattaaaataactaaatctttactatacatcctatcagttttaatgttgttgccttttgtataaaaacacacagtaaacaagaaatcttgtygttcttccttcaaatatgtacatatatatgtatatattttttcctttaaaatatattcaggatcagatcacttcttaccacctgctccaggataagatcacttcttaccacctgctgtcaaactgctttacgtcatcagcctcttttgtctggattactgtagttaaccttccctggtctccttgcttctatgcttgcttcg

SEQ ID NO: 247420 - DNA, 578 bp, Homo sapiens
tatgcaaatcattcagacttgagttagatacagaacaatgactacagatgaggcacttagagttttctgtccttctgagtttacgttaattatatttgaacatgaaacccaaaaggctatttaattcacaataatatcacttctacacaagctttactttagtaattcctcagcactaggactggagttggaatagtctatttcagttacgttcacatacatcctgggtaagtaagtactagaagcaggccaccctcgaatgttttctttttttttttttttttcacgttacttctagtaaaagagtaagtatattccactttaggttatccagagagaaatactgtcgccagtagtatcggggaaaccccatgtatctccaacaagggaaaccaggaccttggatagaaactatatgattggggtctcgctttgttgcccaggctagtcttgaactcctaccatgtagcagtcctcccacctgggyttcccatagtgctgatattacaagcatgagccactgtgcccagcccacatatgcacttttataaaaaataaaaattatccaaaaatatcct

SEQ ID NO: 247421 - DNA, 518 bp, Homo sapiens
cttcactggtgaattccatgaaacgttcaaagaattaataccaacccttctaaacttccaaaaaactgaagaggaaataatgcttccaaactcatcttatgaggccagaatcactctgataccaaagccaaacaaagctactataagaaaagaaaactggatgggcacggtggctcatgtctgtaatccaagcacttyaggaggccagggcaggtgcattaccagaggtcaggagttccagaccaccctagccaagatggcaaaagccagtctctactaaaaaatacaaaaattagctggatgtggtggcaggtgcctataaatcccagctacttgggaggctgaggcaggataatcgcttgaactcaggaggcagaggtgacagtgagccgagatcgtgccactgcactccagcctgggcgacagagcgaggctccatctcaaaaaaagaaaaactacaaaccaatatccctgataaacatggatgcaaagtcctcagcaaaatatgagtaaactgg

SEQ ID NO: 247422 - DNA, 555 bp, Homo sapiens
tatactcatatattaaacattattcaccatcaagtgggatttacttctgggatgcaatgatggctcaacaacatgcacaaatccayaaatataattcaccatattaacagaacaaaggaaaacaataatttgattaatctcaatagatgtactaaaaccatttgacagaattcaacatcctgtcatgataaaaactctcatcaaattacttacagaaagaatgttcctcaacaaaataaaagccatgtatgacaagccaaaagctaacatctgaatggtgaaaagttcaaagctttttctctaagaaacaagaccaagatgtctactctcaccacgtgtattcaacataatcctggaagttctagccagagtaatgagtcaaaataaacaaaagatgttcaaattgaaaaggaagagcgaattgtgtctctggtaacatgatgtgataaaaaaaatactaaagactccaccaaaaaaaccattataactaataaattttgtgaagttgtaggatatatatcaatatacaaaaatcaccatttccatacactaaca

SEQ ID NO: 247423 - DNA, 510 bp, Homo sapiens
ttactgaaatcgtttataaagccttttggtagagtatttagggttytctagatacagaatcatatagtctgcaaagagagatactttgacttattcttttcctatttggatgtcttctgtttctttttcttgccttgttgctctcatgaagacttccagtactatgctgaatagtagtagagagtggacatccttgtcttgttccagttctcagggagaatggttccagcttttgcctcctgttgagtatgatgttgcctgtgggtttgtcatagatgactcttactattttgaagtatattcctttgatgtgtttgaggatttttatcatgaacagatgctggacattattgaaagctttttctgtgcctattgtgatgatatggttttgtttttaattatgtttatgtggtgtattacatttattgatttgtgtatgttgaaccaacttggcatcccagaaatgaaacctccttgattatagtgaattaaacctttgaatgtgctgtt

SEQ ID NO: 247424 - DNA, 546 bp, Homo sapiens
tatttgtctgttcagggtttcagtttcttcctgattcagtcttggaagagtgtatgtttccaggaattcatccatttactctagattttctagtttttgtgcaacaaggtattaatatagtgccgagtatcttttttatttctgtggcatcagttgtaatgtcacctttgtcatttccgattgtgcttatttggatcttttctcttttttttttttctttattagccagtagtctttcgatcttgtttatcctttcaaagaaccaacttttggtttcattgattctttatatggatttctgggcttcaatttcattcaattatgctctgattttagttatttatttttgtctgctaccttttgggctagttttttcttgtttttctgatttctctagctttgatgttagactgttgagatttttgtcttcttgatctaggtatttaacactataaacatttctcttaatattgcttttactgtatcccaaagattttggtatgttgtatctttgctgtcrtttgattcaaagaattttttgttttc

SEQ ID NO: 247425 - DNA, 519 bp, Homo sapiens
ctctagcccctggatgtaaagcagcagctgtgctgcaggagagcagactgctcctagacctccagcaaaacactcagatggggcaatggaggctgtgctgtgggcacacttctgcaagatcgttcaggcaggcaggcttaggaggggccacggggttacatggatcagatgcaccccagtcctgtggcaatggtggccctgctstcttgcagcctagcagacagcagtagctacagccactcagtacagcatggcacacctcggggcgtgaacacctttggtcacattttgctggagctgcactgcgtagtgaaacatttgggggtgcatgcaagtttgagctgtgcttctgcctattctctgagtggcttccctgccggttcagaggtctttgggggtcttgggaaacctgtagctgggatcccagaggtatgtggtgggagtgtgctgccgaaattccttcactcaccgcttcctcaggtctggttcagtacaggaggccggtcctagtgcccagcg

SEQ ID NO: 247426 - DNA, 570 bp, Homo sapiens
agtttttgttcaaagtaaatcttttttattttaaacaaatataccactgtgaaactccactcatcataagaagccaagaaaacattccagcagtgcttcctttcatcatcaaatcaatgtctctgtactctttctttagaataattgttttggtaactayggctctaattcctgccgttaagaaggtccgagaaaaaaaaaatcatgcacccagggcattttacattatctttgaagaaatgggtcatgaaaatacaaagacataaataataataccctaataaaataaaggtataaaatatgagatgccacagagaaaaacctagtaagttatataacaagtgttccaaataataaggactatttttttttttaaagaatacaggattaacaaagaagccagcatgggttctaactgttttgtgattaacttgttatgtgcttttgggcaaatcacttaacccttttgattcccagtttatctaaaaaatcaaacgtaagaagtaacgatccttcctattccaaaactcgtcagggtcaatataggagcaaacaatgctcattcttttt

SEQ ID NO: 247427 - DNA, 587 bp, Homo sapiens
tgaatacagtgctatggtttgtatgtttgtcccctccaaatctcatgttgaaatgtgatccccatttgttggaggtggggcttgagaggaggagtttggatcatgggggacttggtgccaccctcccagtaaygaatgagttctcccgctattagtttccatgatttaagagaatctggtacgtcactcctctcactcgccatttgattgctacacatgctggctccccataactttggctatgagtggaagcagcttgaggcactcaccagaagcagatgctggcgccatgcttcttgtactgcctgcagaatggtgacccaaataaaactcttttctttataaatcacctagtctcaggtattcctttataacaacccaaatggccaaagacaacaaggctgcccaaagctgttattttcaatatcactaatgaatgtttaaaaaatgttaaaaacaagacaaacttcaaattctccaactcaactgcaacccaaagtacattaaatttgaagaaaaaattcccacttagaagggttcagaaaaggaaattgaaagtatagagtagctggaatatgttatttgtt

SEQ ID NO: 247428 - DNA, 537 bp, Homo sapiens
acaacctaaaatcctgggctatgctgataaatctgctccccttttaccattcccatcctttttcctaccccgtcctttctacccatctatttgcctgagaaaatatcacttttaccagagctgattgctgcttagtgtgattgtgattgaggtgtgaatgtaattaggaaaaataagtattttaatacaaaataagagagagatcagtggaagacattaacagatctttggatattttacctgttgtactcaactgacagcatcatatagaatttcagtcacaaccactatgtaccagttatacttcctatacttggacaatgcagtaaactgtctccctgagataactgacaaatatatttctattcaaggttaattttagggcctgcaataccatgtcatataartcatcttacaagattcacactggaaaaaaatgtttaaaccttgaaatcattgtccctgactcacacacttgctggccaaccattgtcctaggaaagttcaacatccatataggtcagtgattttcaactt

SEQ ID NO: 247429 - DNA, 437 bp, Homo sapiens
tagctagtgctcaatctttcaacagaaagactaccaaaaagtaagacagattatatacagttggtttgccctaatttcagaaactaaagtcacttaattcagtcggaagaatttaaaaatatttgaatggtaagaataatatacttttccaaaatgccaagtacttgaaaaactcaaaccatgttggataaacctaaatgaaaatcaaaagtttatttttcaagggtcatttmtcaaaaattattttctaagatatgccaaagccatgttactaaatgaagttaaatggggtctacacacttcatgggcccacatataaaacttaccttgtcagatgcctcagaagccaagaggttagttgcaagggtttgtagcttatgatgggccatatttttaagagcagcaagactacgtctcgtcatagcttgttttaggtt

SEQ ID NO: 247430 - DNA, 600 bp, Homo sapiens
tatgaaggcagagagtttaatgtagtgtcaatcataatctccaaagacacaatcccaaatgccataatcytaaatgttgaaatctcgaaagatggaaattcccaaaaatcaaaggtctacaatctaaaactccaaatgacgaaaatctctagagtctaaaatccccaaaatcataatcccaaaacagtaaaatcccaaattctgaaatcctgaaagcccgattctggggaagtgatcagtgcgctttttggttgtatgcaggatagttacatcatgttagttacatcatgttaggaagtattacctttttattgtcttcacttggaaattaaatgggtttaaggaggtgtggatgggtaacagcctgacaaggggtggacttgtggacttaattttggtatcaatttaactggattaaggaacatctagaacccaacccaacccaaagcattacttagggtgtgcctgtgagagtgtttccagagacgattaatgtgagagtctgagtggactaggtggggaaggtctgccctcagtgttggcagaaaccatccaattggtcttccagggtccagggagaacaaatgcagaagggaaatt

SEQ ID NO: 247431 - DNA, 493 bp, Homo sapiens
aacttgaaaagattaataaaagtagatcaattactcttacagagaatgccagcaataaaaaattatgctttaaaggaggttaaatgaataatccctatccacttggtgtcatgagartcatatttgattttgcaaccactgatttcagttagaatgtttcacagcacattttaaaaatgtgtttaattctgtcaccataaatatacacccacatgttatcaggctagcacacatataatgtttcacataacatttaatgaggcattaataatatgtaaaatacttcttgaaactgtgcgtggtacataccaagtcttatatatttttatatatttacaaacagtactactgtactgtaaatatgttagtgttgtcagctcttttatgacccccacagcacataaaatattatcagcaacactgtaatatagagtatcagtaacaagtattaaaatgtcatagttctgatgaataaaaaaaaccaaaatatttg

SEQ ID NO: 247432 - DNA, 493 bp, Homo sapiens
aacttgaaaagattaataaaagtagatcaattactcttacagagaatgccagcaataaaaaattatgctttaaaggaggttaaatgaataatccctatccacttggtgtcatgagaatcatatttgattttgcaaccactgatttcagttagaatgtttcacagcacattttaaaaatgtgtttaattctgtcaccataaatatacacccacatgttatcaggctagcacacatataatgtttcacataacatttaatgaggcattaataatatgtaaaatacttcttgaaactgtgcktggtacataccaagtcttatatatttttatatatttacaaacagtactactgtactgtaaatatgttagtgttgtcagctcttttatgacccccacagcacataaaatattatcagcaacactgtaatatagagtatcagtaacaagtattaaaatgtcatagttctgatgaataaaaaaaaccaaaatatttg

SEQ ID NO: 247433 - DNA, 543 bp, Homo sapiens
ctacatttagataaaaattaaaagttatacagtacaagagtactacaccctcaaaaacagttttaatatttcactctaaaaatatctcttttaaatgaattccttggcacctccaaatactctattttcmagctgtttaagtgactggctatgctggacactgagtccttcaccatctctataatagttcttactgcactgtttcattgttcatttgattacctgccttcctaatacactataagctccatgaagacagggaccatgactactttgtttatcattatattctccagcctatagctgtttggcagttaataaatagctattgaattagggagggaaagaaaaagggaggaaggattgaaaacaagctgtgatacatacattgatcaggacatttacttaacattgttttaatcttttattattcaccagaagcaattctatatgcaaatatgcagtgtttataaatgaaattttgacaaatgtctcatgtataagatctattttatatattctcagtatctatcaaaaagtcta

SEQ ID NO: 247434 - DNA, 607 bp, Homo sapiens
atctatgatttcggttataaatatgtttagtgcattagctaaatggtaytgttgtgatttccaggtaaaaaaattaaccttcgaagtacagaaactcattataatgtcatcgtgttatctaataaaatcattgttgtattcacatttcctatttaacattatgttggagatattagctaatataattgtgcaactaaaatgaaacaaatgaatgtaactgtgttatcaacttggtggtatgatcccacagagagaaactatttccagtgacctttaagcacaataatttaactgttcatcttcagtggtttataccctaagaagaaaaagtaactataagcaaacaaacaaataaaatcaaacaaatacaaataaagctaggcattggggtgcatatctgaatctgagaccagcctgggcaacagagtgaatacaaacaaacaagaacatccacacattatttttggtaatcatatcatgtatggcagtgctgacagtattccaaactgttgtgtgtgtattgtgggggagagcagatgagtcattacatggatgttgtgagggaaagtaaatacagatgtaacgttaatcaaattaagtaaaactt

SEQ ID NO: 247435 - DNA, 645 bp, Homo sapiens
taatcctctcccctgagtataggttgcattttgtgactgtttttaaagaacaaaatgtagccaggaatggtggctcatgcttataatcccagcactttggggggctgaggcaggaggatcgcctgagcccaggagttcaagaccggcctgggcaacagggtgagaccccatctctacaaaaaaattctaaaattagccaggcttggtaatgcgtgcctgtagtcctagcaactcaggaggctgaggtgggaggatcctttgaggccaggagttcaaggctgtagtgaactatgattgtgccattgcactccagcctgggctacagaatgagaccacatctctttaaaaaaacaaaaaacaaaaacaagaacctgggtgataaaacatgtttgttgttttaaactaataatttttggaatgatttgttattcagaattaaatagctaatccacctaacctcagagagttgtaaggattaaaagaaataatacatggcaagctttgaaaaaagtgctagtcacagagcaagtgcccaaaacaygctatttttctattatggaaatattaaagtctggcaatgtggaagtaatatacctcttccatcattagctctgaagtgatatgagaagactttccaactgcaag

SEQ ID NO: 247436 - DNA, 539 bp, Homo sapiens
aagactattcaagcaacatttcatattaattttaaacaatgaacagagtaataataaataattckcagctttctgttaaataaaagcacttaaaagttctgataaaacacaacttggtttcctcttatctgtcctcaaaattattaaagcacttcttaaagaatactttataactcatatttcttcctgatttacacccagcttcttcacaaatgagttaaattagcacaattcctttattattaaattctagagatctgggttactgaacacctatttcacctgcaatgactcattctataatttgattaattccattctacttcatctttttccatttcaacctcgaaaagtcacctaaacatgatttaacaccaatggcattataacaagataatgtataaaacacttaaactgtataagtaaaataataatacaacaactaaaaaatgtgaacctcttatctttaaacttatttgaaaaatatttatgcctcaaattattcctattacacatgcattaaataattttgaaatgtg

SEQ ID NO: 247437 - DNA, 534 bp, Homo sapiens
aaataaaagcatgaaaaacgttttcaaaaattagtcttaaggaagaataacagtcactaagactttacttgtatgacaatctgagcccctgaaacacatgctttttgttagccatgttttatatatgtttttcaaaagacatacaaatatacattaattcataattccctgctagattttattaggtacttaagttcaaaaagatgactcaaatgcatatttcatgaagtacatgcaaaaagagaaatatcagaaaacatggagtgcagaacataaaaagaaacatcacagaacaaataaattcacaagtcctcatacactaatttctgatgatatttgtcaagcattaatggtgtttgcatttgtataagaacatctaataattatacataaggaatagaaatatgatgtgggaatcacttttgttgtgtagcaagaatgataaaaagaagccagatgagaatgtggtttaggcytggtaatggctagataagaagaacattttgtaacatcagtcattactttcagcatgcc

SEQ ID NO: 247438 - DNA, 553 bp, Homo sapiens
ttaaaacaccttataaaataatttactatttatcttgaatgagcactgagtccaatctatagtgatatcaaatggttcctattgttaattaaaaagagtttatttataccagcaagcagtacagacataggctgattttcatgctaaagtataaagcagaagagttaataatttaaaaaaaaatcagaatctcctttgaaagcagagattaaggatactaagaacaaagctaggaaatattacaaatctaacacacacacacacacacacacacacacaaacacacacacacttctatagatattaatactttgagtcttgaaatggaaaacaaaaaacacttgacaaatgttagtatgctgttttacaaaattatgtagccatattacattgcatgttctgaataattttaaatttcctaaatgtgaaaaayggtttattgcctaataatattttggcaggaaaaataaattaaatattttataattttactcttgatttagtatatttattgaataaaagtttttaaaagaatttctgaaattctgatgca

SEQ ID NO: 247439 - DNA, 512 bp, Homo sapiens
gtttttattttctttaggataaatgcccagaagtgtgactgttgggacatatggtttagtgtatgtttagtttttttggaaactgctaaacagtcttccagagtagttgtaccatcttatattcctaccagcagtgtatgagagatccaatttttccatatcctcaccagcatcggtattgtcactattttttattttcaattttctaataggtatgcagtgatatcttattgtagtcttaatttgggacatcttttcatatacctgtacttatttgtcacctggatatcctcttcagtaaaaggtcttttcatgtcttttgcccattttaaaatttgcccatttaaaatttttttatgttgagttttgagagttctttttatacattakatatggatctatatattgttagatacgtggtttgggaacattttatccccatttgtagcttgtattttcatcctcttactcttcctcaaagcaaaagtttttcattttaaagaggtccaatt

SEQ ID NO: 247440 - DNA, 512 bp, Homo sapiens
gtttttattttctttaggataaatgcccagaagtgtgactgttgggacatatggtttagtgtatgtttagtttttttggaaactgctaaacagtcttccagagtagttgtaccatcttatattcctaccagcagtgtatgagagatccaatttttccatatcctcaccagcatcggtattgtcactattttttattttcaattttctaataggtatgcagtgatatcttattgtagtcttaatttgggacatcttttcatatacctgtacttatttgtcacctggatatcctcttcagtaaaaggtcttttcatgtcttttgcccattttaaaatttgcccatttaaaatttttttatgttgagttttgagagttctttttatacattagatatggatctatatattgttagataygtggtttgggaacattttatccccatttgtagcttgtattttcatcctcttactcttcctcaaagcaaaagtttttcattttaaagaggtccaatt

SEQ ID NO: 247441 - DNA, 614 bp, Homo sapiens
ttggtaatcttataggtcttatttttctagtttcttattgtggaagctgaggtcattgatttgagaatttctttgttttgtaatatagagacatttcttcctaaacacgttcgtgctatatatttcttcctaatcacgttttrttttgattttcttcagttaaaaaacacgttctaattcctgtttgatttcttttttgatctatgggttattttgaagtgtgttatatagtttccaaatatttgaggattttccagggatctttttgctgttgatttccaatgtaattgttgttagagaatacgttctttataacttgaatctttttaaattaattgagattattttatgctccagaatatagtctatcttagtaaatgttccttgtccatttgagaagaatgagtattctatgaatgtgtcatcaagtattctgtaaatgtttattgggtcacattggttgatagtgtttttaagtctgctatattctcacttatgttctgttcacttgtatcagttattaagagagcagtattgaagtctttacctgtaattatgaatttctctgtttctccttgaagttctattcatagcccttaggcaattgctgcaaa

SEQ ID NO: 247442 - DNA, 603 bp, Homo sapiens
tcaacttgtcaacttacacatagacacagacacactcgtgcacacacacacatagagacagagagagcatgctgggattttgatgggaatttcattgagtcttacaatctaagaatagtgtatatttctccacatattaaatatatattctttaatttatctcaataatagtttataactttatgtatgggaagtcttttgtacttcctatacataaattacttcaaaatgtattaattacatgaattattttaayatgtatttattaactttctaagatatgggaattttctagctatctttttcttatgtttctggcttaaatacattatgacctgtcagtcagttgctgagaagtgtgttctaatctcccaacatgatgtggatttatcacttttcctactttcagattttgctttatgtattctgagaccacaatattatatacatgtaaatttagaattgagagttgtttatcttcctggtcaggggtcaactcctcctactgttagttagagaaaaattgtacaaaaacctgacaatctagatacaaaggcctacaggcaaggtcatctccttagaagggagagtgagtggacaaat

SEQ ID NO: 247443 - DNA, 503 bp, Homo sapiens
gaggcagtaagtccttcctttgaagggggtcatgtcttttgcagtacttacttcagaggggtttttaggactaaatgagataacacatagaaaagtttcttggtgagctctcagtaagttgttrttactagaccatatacatgttaactctaagattcatgcagtgtaaaaggcataaatttaaaaaatggaaaataaattgatcagactacttgataaaactcagccagcttaaaaaaattaggaatccttagtcaaacttgttttgttttaacatatagaaaatgtcaaagatacataaaggaaattagtataatcacctctcatgtgcttctcatctagtttccccttgacatatttttgggtagggagtaaactgggggattttggaaccaatcccagatatagtgttttacctgtaaagactatggtgtacattctctctcatttcaaaatatttttatataacccctatgttattattatacctaacagaattaaca

SEQ ID NO: 247444 - DNA, 432 bp, Homo sapiens
taaacattgcaatttttgaaagccaagataattccaaatctaattagggaaagctacattttacttmtttgtgtaagttattggtgatttatatgcagtatggaccatcctccccccagaaattattcttatattccaattgtgcattagttttagaaccattttaattttaaaaccataagaaaataattttatgtttgcctatgtccaggagctgaagaaatcagcgattactttaaaaaatatatggcaatgtcaaaataaatgccaagaatcatatttctaggaatgcaaaagtgcttctcatatactcatatattaggtttcacagtattggttgcttactatatttgtttttatttttattatatatcataattacacatttttatttgcatttgttgcttattgtagtaaaaaggtaaaaaaaaa

SEQ ID NO: 247445 - DNA, 432 bp, Homo sapiens
taaacattgcaatttttgaaagccaagataattccaaatctaattagggaaagctacattttacttctttgtgtaagttattggtgatttatatgcagtatggaccatcctccccccagaaattattcttatattccaattgtgcattagttttagaaccattttaattttaaaaccrtaagaaaataattttatgtttgcctatgtccaggagctgaagaaatcagcgattactttaaaaaatatatggcaatgtcaaaataaatgccaagaatcatatttctaggaatgcaaaagtgcttctcatatactcatatattaggtttcacagtattggttgcttactatatttgtttttatttttattatatatcataattacacatttttatttgcatttgttgcttattgtagtaaaaaggtaaaaaaaaa

SEQ ID NO: 247446 - DNA, 432 bp, Homo sapiens
taaacattgcaatttttgaaagccaagataattccaaatctaattagggaaagctacattttacttctttgtgtaagttattggtgatttatatgcagtatggaccatcctccccccagaaattattcttatattccaattgtgcattagttttagaaccattttaattttaaaaccataagmaaataattttatgtttgcctatgtccaggagctgaagaaatcagcgattactttaaaaaatatatggcaatgtcaaaataaatgccaagaatcatatttctaggaatgcaaaagtgcttctcatatactcatatattaggtttcacagtattggttgcttactatatttgtttttatttttattatatatcataattacacatttttatttgcatttgttgcttattgtagtaaaaaggtaaaaaaaaa

SEQ ID NO: 247447 - DNA, 535 bp, Homo sapiens
tgggaattactgctaatagatggggaattgtttagaaatcaactaaatgtggtgttatctactagaaatagaaatatttttggaaggaaaaaagtaacctgtgctaacatgatatttaaaagacatggatatattacagataatttgtgtagatatttgaagatttcatttgcatggaagtgctcatttgctgagggaaccagctctctattgttgatataactatttgcctatgggcaggaaagatctgcycaagtaggtcttgtggattgagtgacagaaggaattagaaaaaataatttaaaaagtaacattactactttttggtattatagtagaagagaagaatgagtgctttttactttatatttttacctgaggaactttaggagtaggagtggttttctaaatatgtataaaactgtctttactgtagggaaagtcaggaggagtttgtaaatatttgtgttgctttctctgttgtttgtctctaaatttgcctagattaacttcacatcggagtaactgccagata

SEQ ID NO: 247448 - DNA, 574 bp, Homo sapiens
ctgcctgtcaatttccacaaaaatcaaaaccatctggggattttattgggatcattttgaatctatagagggagagtgaacatcttaacaatattgtctaatcatgaatatattatatttctccatttatttattcagtctttaacatatttcaacaatatttttgagtttttgggttgaggtcttacacatctattttgaatcgaattctargttgatttgttttgtgatgctattgtaaatagtatttttcttaacttttttttttttttaaattatactttaagttttagggtacatgtgcacaacgtgcaggtttgttacatatatatacatgtgccatgttggtgtgctgcacccattaactcgtcatttaacattttattttctaaaggcttgttgctggtatatataaataaaatttaaaaaacatattgattttgtatgcactggccttgctaaattcactatttttctctatcattcagtcatttaatgactttattttaattgtggtaaaatacatataacacgcaatatactatcttaactactttaagcttaactatcttta

SEQ ID NO: 247449 - DNA, 639 bp, Homo sapiens
atatcattttcaaactgcaaacatcaaagacaaagaaaaaatcctgaaagaagccagaggggggaaattaacacatccagagagtaacaaaattaagtattacatccaaaaaccatgcaagcaagaggagagtggcatgaagtatttaaaatgttgagaggaaaaaccagcaacctagaattctgtaccttaagaaattatccttcataagtgaagaagaatactttctcagacaaacaaaatttgaaaaaaaattgttgccagtagatctgctttgcaaaaaatgttcaaagaagttatttagagagaagaaaaataatataggtcagaaacttcatctacataacaaaaggagcatgaaagaataaaataaatgaaagcaaaataaaaacttatttttcttatttttaattgttctaacagatagtttgttcaaaataataataacaatgcatttaattatatgtgcttatgtatatatcttatgtatttatttacatgaatayatatatgcttgcatgtacttatatataagtgaaatgaatgacagaaatgatacaaaggattgaagggaggaattaggattattttattgttataaggtacttatactacctgtgaagtggtatagtgttattt

SEQ ID NO: 247450 - DNA, 587 bp, Homo sapiens
agaacatagtttaactacataacattataaataaactggatataattgacttctataggctatttcatcacatgacaacagattatacattcttctcaagctcacatggaatattcaccaagatagaccacattctggrccataaaacacactttaacacatttgaaataatggaaatcatgcaatgtctgctctcagaacacagtggaattaaactagaaatcaataacggaaatgtagctgaaaaatcccaaaattattgcagattaagcaacaaacttctaaataacacaggtcaaagaagaaatctcaagagaaatttaaaaatattttgaggtaattgaaaataaaaagacaacttaaaatttatggatgcagtgaaagcggtgcttagagagaaatttatagtattgaatgcttatgttagaaaaggagaaaggtctaaaatcaataacctaagctctcattttaggaaactaggaaaaggagcacattaaatcagaggaagtagaagaaaagagataatacaaattacagcagaaatcaataaaattgaaaacaggaaacagaaaatcaacaaaaccaaa

SEQ ID NO: 247451 - DNA, 587 bp, Homo sapiens
agaacatagtttaactacataacattataaataaactggatataattgacttctataggctatttcatcacatgacaacagattatacattcttctcaagctcacatggaatattcaccaagatagaccacattctgggccataaaacacactttaacacatttgaaataatggaaatcatgcaatgtctgctctcagaacacagtggaattaaactagaaatcaataacggaaatgtagctgaaaaatcccaaaattattgcagattaagcaacaaacttctaaataacacaggtcaaagaagaaatctcaagagaaatttaaaaatattttgaggtaattgaaaataaaaagacaacttaaaatttatggatgcagtgaaagcrgtgcttagagagaaatttatagtattgaatgcttatgttagaaaaggagaaaggtctaaaatcaataacctaagctctcattttaggaaactaggaaaaggagcacattaaatcagaggaagtagaagaaaagagataatacaaattacagcagaaatcaataaaattgaaaacaggaaacagaaaatcaacaaaaccaaa

SEQ ID NO: 247452 - DNA, 606 bp, Homo sapiens
attattgtactcttctactcttattagtagtttctattaatgaagagaaggtttctttcttcctcctggagtttaaaaamtatcccagcaaactaaaggatgatctcagtctgagaagaacagttcgactatgcgatgatgcaatccctataaatattgtcctgttagacaagggctccgtggcttaagtggcctagtttaacaattaaagccaacctgcttggtcccttgtggtcataaaaccaagaacctagggattcagtacaatcccgggggactcaactttaaaggcaccttatttaacttgcttttaaaaatagtgcaccaagttttcatgtgttttacttggcagacacactgacttgggggttggtctttgtgcctggtttagcatcagtgcaacaccttttgttgatggatggagggaggaagtatgctaaaacaagacagtgatgcgtgtagaaaagcttgtgtctcattcaaagagtaatgagacatctagaggggaaaggagaggtcagaagcagggtttctgctaaagagaaaaagggctgtatctccagggctgaattcacatcatctttggaacaagtgtcaatgttagga

SEQ ID NO: 247453 - DNA, 619 bp, Homo sapiens
cttttaacttttgtttatagtggcttacagattagtgggaggtagactttaagaaagtatagtaaaaatataaattactgccttggtgctattgagtaaggatgaaaartaaatcactgagccctttcatgctaatataattcatttcatatattaatttcacttccaaatatatgcatacatatatttacaaaataaacatatagttttgactaaaagaaaattttaggctccttctcacccatcctaaggtcttttagaccacccaagcaattcacttcttgtccactctgagcatagacaaaggagtttggaggatttatttaaatgagcaagatctgaaagtgagagcaccttccaactccttctcctccatggttcatattgtagcttcaataatttgctcccagcgctgttcaaaaaccatataagcttatattcaaacaaaattaaaaatggatttcaaacttcatacctaacttgggctcctgtctctttttattttcatcgctgcttctccacattgctgaagtgattgcctctgtattccaggaggaaagagagggtaatcttggccctcttcaagcatcaacacaagcatggaaataagacaataaat

SEQ ID NO: 247454 - DNA, 632 bp, Homo sapiens
tgcaacaaataatgggagaggagaggtggagggaatgcagggcctcacagttatattaaagactttggattttattctgagtgacgtgagaagctattagaagattttgagcacaggtgacatgatctagcttctgtcttagaaataaattctatatggagaacagattgtagggcagctaaggtgaagcaggaaaactaattatgaggctatgcaatartcctgataaaatacagttgtggcttggactaaaagagaattggagatggtaagaagtggacaagttttgaatatattttgaaggtagcattgacagaatttgccaatgtattagatgttggttatgtgtgtgagagagagaggagtcaagattatttgaaactttgtgtaaaaacatagcttcatttggtggcatttcaacttgtcttcctagaaacattcaaaagcaaggtcaacaacaacaacaacagaaccttgaaaactctattcacagcaaaagtaggagagaaatttagtccataaacttcaaaatacatgtaaagactgtcccaagtagatgagatcaggcagaagccattgaggaaatgaagggaagcagcatagaaatggtgagagagcccagagatagtaga

SEQ ID NO: 247455 - DNA, 589 bp, Homo sapiens
ccagttccaggttcctaaccccactcccagatacctggcagaatcaaagatgaatctccggaggagggcaccttcttcctaattttcaagggtcaatgagcagtacagtcagaaataacaaagcgtacagggaaacaaaatgtgatgcgagaaacaacagaagcaatgaatagaataaaagaaaaccagactcacaaattctttrtgtattatgagtacagagacaaataaaaacctatgcttattgtgttcatagaaataaaagtacccttataaataccttcatggaatgggtaacaattaaaagtggcttggcagattttaagaaggttaaacagaactagaaataaaaatataaaactgaaattttaaaatgtagtggtttcccattagacagcacatatgacaaaatcaaaaagaaattagtgaataactgaatgatgaggcataagaaattattcagatgctgcacagggagacaaaaagacaaaaaatgtgacagagaggctaaaagacatggaagctggagtgagaagatctaacacgcatttaattggaaaggagaggaaagagaatggggcagaaacaa

SEQ ID NO: 247456 - DNA, 491 bp, Homo sapiens
ttctgtagtgtgatctcatttaaagaaatatatatttcattggaaaattctgggaaaatatacaccaaactatttacataaaatgatcacatatagtcaaaaatatttatgtgcatgtattaaaatcagtaggaactataccaaaatgtcaacactggctctctcgggggattactgaggcatttraatttatttttgtatacctttgtattccaaattccctacaatgagtgtatgttgatttaataaccagaagatgctaaataggattattaaattttgtctgtatattaccagtttcatgataaagatcaaactcctaatgaaagcatttctttcctgtccttactgcctgtctgtccacctttatctggcactgaccttccatatgcaccctgcatttcgtttgtatacagaacacagatactttcttattggaaataatttaaacaatgaggagcacatagagaataaaacgtggaaactcgacc

SEQ ID NO: 247457 - DNA, 493 bp, Homo sapiens
ctcggaagctgtctcactttctccctggctttgcctctccacagggctgctgaccaccagcagcacggacctctggaggccaaaacaggcctgacagtcacagatgtgtttgccatctcatctttatgtgagtggagtaaggaaagatgaaagccacagaatgagacctttctggacatgactgtacaggagcccagcctggaatgcactcagagttgatgctgaataaactaagagatgcaaataaaaaccaacaaggaacccttctttaacgtattaaatttgagggaaaattcttgtcattgacttgcattcattcaagggttggttaagtaattttcagacctaaatttgttattgatsatagcatttagagtgaattttggatatcactcagtaacttcagcttcattggtgcctagaaagttcacctgagcagatgtcacaacacaataagctgatggaaatgagaggacagatcggcatcactgga

SEQ ID NO: 247458 - DNA, 607 bp, Homo sapiens
gtatattgcaggagaactgtcatccatctgcagtgcttcccaagtaactgtctggggcttatggtgatgtatccccactgctgagatggaagggagtcctcaaatacctggcagatcaactgtgctagttatagctgtcatgtactgagcatactctcccatcctcctctttctcctttgggaacctgctcctctacttcatgtgatcttggtggggctgtccatgaaggtgacttgtgcctcctcctgcccttgcacatgggcagtgacctgcagtgggccagctgtagtattacattcctccatttacagtggctggtttagggaagggcaatttgtccaatctgggctacaaaggtgccccctgggggttcttctcctggatctactgagggaagactattctcttcatttatgttagcaagttgtaaggatgttggcctaggcccaccagaagctacctttcctgggatatggaaagagtatctrtggtaggaaagagtaacactaacatgcaaagagaagtggatacaagcagagcagagaaagagaagtggaaacagaaacacaaccagatcatttgagtacctaggtccagctttagctg

SEQ ID NO: 247459 - DNA, 561 bp, Homo sapiens
ttccaggaaaaaagcatctgcaaatgtgtggagatgagagggagcatgggaaacgaaaaggatttcaatttgagggaacatagggcatccacaggagacrtgagcattttggagacacttactatgcactgggcacttctcccgatgtgtcccacttaattttgaaaacaataatatgagggaatataactgttatctgcattttacagtggaggcaactgaaaaactgagaagtgaaatcacagcagtagtaaatcttagaagtgacgtgatccattttgaatattagaaagatccctccagcagtgagaaagggagtggatcagaggggtgtaagaccagatacttggaggcaaattaggacataattgcattagagcagatgatgtctgatgatggttcaaactaaggcagttgggcttacgtaatgtagcacagaaaaagatgtggctgacgtcacaaaaacagaaacacaggatagagtcatgtaagaggaacaggatgcagaaaatgagaactctagggacagactaagtctctggtttgcttaactgagagaaa

SEQ ID NO: 247460 - DNA, 561 bp, Homo sapiens
ttccaggaaaaaagcatctgcaaatgtgtggagatgagagggagcatgggaaacgaaaaggatttcaatttgagggaacatagggcatccacaggagacgtgagcattttggagacacttactatgcactgggcacttctcccgatgtgtcccacttaattttgaaaacaataatatgagggaatataactgttatctgcattttacagtggaggcaactgaaaaactgagaagtgaaatcacagcagtagtaaatcttagaagtgacgtgatccattttgaatattagaaagatccctccagcagtgagaaagggagtggatcagaggggtgtaagaccagatacttggaggcaaattaggacataattgcattagagcagatgatgtctgatgatggytcaaactaaggcagttgggcttacgtaatgtagcacagaaaaagatgtggctgacgtcacaaaaacagaaacacaggatagagtcatgtaagaggaacaggatgcagaaaatgagaactctagggacagactaagtctctggtttgcttaactgagagaaa

SEQ ID NO: 247461 - DNA, 561 bp, Homo sapiens
ttccaggaaaaaagcatctgcaaatgtgtggagatgagagggagcatgggaaacgaaaaggatttcaatttgagggaacatagggcatccacaggagacgtgagcattttggagacacttactatgcactgggcacttctcccgatgtgtcccacttaattttgaaaacaataatatgagggaatataactgttatctgcattttacagtggaggcaactgaaaaactgagaagtgaaatcacagcagtagtaaatcttagaagtgacgtgatccattttgaatattagaaagatccctccagcagtgagaaagggagtggatcagaggggtgtaagaccagatacttggaggcaaattaggacataattgcattagagcagatgatgtctgatgatggttcaaactaaggcagttgggcttaygtaatgtagcacagaaaaagatgtggctgacgtcacaaaaacagaaacacaggatagagtcatgtaagaggaacaggatgcagaaaatgagaactctagggacagactaagtctctggtttgcttaactgagagaaa

SEQ ID NO: 247462 - DNA, 417 bp, Homo sapiens
gttgaaaatatcatcaagctttaataaactttactcatgacttgactgcagttgtacatccaaagacaacaaatatagttcctaattaattcaccttagaatagcaactatttgtttaaaataagccatttagtgaaaattrtagataactatttgtagaatttttagtgtgtggctttgttaaaattttaactgtcataaagagactgcatttttaaaaatttgtgtttgcagatcctgtactatacttggaatttttctgaagccatcttactgttttatttgtatgttattctgtggtcttacggaaagtcattagaaaaaattagccaaatgagaaatttttgatttttttaccctttattcatatattttctctagtatatttcctgtgcccagaatttttttttttttttt

SEQ ID NO: 247463 - DNA, 564 bp, Homo sapiens
aagtttatgacagacagcagcatagcattccatttacaatctttttagaaaggtggatgataacagaagctaggacaatacaataaaatactatgtctgcaataaaaagtcagacttcactctcctgaaatgggctcatgcagatcactatatctctgtttacggggaattttaagatagtcacaaaacaaaactgscaagcatgaaggaataattcatttaacagctgttcagtaaggtcaaaaacacagaaactactgaaggttacaaaagtatatctagaactcttgggagtttagctccattacaacagagattttaaaatcatcttctagttgtacctcacctgatgttagaaggcgtattattgggtatcagattttaggagctcaagatcaattctgtcatttgacttaccaccccatgccatcatgactgaggagagagagttaataaataaaagcatagatgtctctgatgcttagttcagaaaagaaacaaacatggatcaatagggacaatctaacacaaatatcccgatttctgcccagacatcagcaatag

SEQ ID NO: 247464 - DNA, 564 bp, Homo sapiens
aagtttatgacagacagcagcatagcattccatttacaatctttttagaaaggtggatgataacagaagctaggacaatacaataaaatactatgtctgcaataaaaagtcagacttcactctcctgaaatgggctcatgcagatcactatatctctgtttacggggaattttaagatagtcacaaaacaaaactgccaagcatgaaggaataattcatttaacagctgttcagtaaggtcaaaaacacagaaactactgaaggttacaaaagtatatctagaactcttgggagtttagctccattacaacagagattttaaaatcatcttctagttgtacctcacctgatgttagaaggcgtattattgggtatcagattttaggagctcaagatcaattctgtcatttgayttaccaccccatgccatcatgactgaggagagagagttaataaataaaagcatagatgtctctgatgcttagttcagaaaagaaacaaacatggatcaatagggacaatctaacacaaatatcccgatttctgcccagacatcagcaatag

SEQ ID NO: 247465 - DNA, 573 bp, Homo sapiens
aggtacaatatgattgaagacagactcctcgagtacatgtgatgagcttgaggattgaatattttctccttgsctgaaataacatcactttgcaaatgtgagaaagtttataactgatggacacgtagataggtagcaactagttagatggatggataggaagtaaataaatatgtcgatggaaaattactttctaggtatctttatactgagcttaaatgtgtttgtaacatcttatgaaggacaatgaagccaataaatgttgggcatctttaataaatacaggaaatataagactttcaatggtcttatgtagatgagagataatatttaaacatggcaaaagttaaatgatgaagtacttaattatcattttcagacaaaaattgggctttagtcacaagagtgtgtgcaaacatgtttattgagaccaattcagaagaatcatgactattgtttgtatctatctatctatctatctatctatcctgtctctctaatctttctatcttttcatttcattgtagaaacagactatgtgccaacaatacttgggaggcttagttttctctc

SEQ ID NO: 247466 - DNA, 573 bp, Homo sapiens
aggtacaatatgattgaagacagactcctcgagtacatgtgatgagcttgaggattgaatattttctccttgcctgaaataacatcactttgcaaatgtgagaaagtttataactgatggacacgtagataggtagcaactagttagatggatggataggaagtaaataaatatgtcgatggaaaattactttctaggtatctttatactgagcttaaatgtgtttgtaacatcttatgaaggacaatgaagccaataaatgttgggcatctttaataaatacaggaaatataagactttcaatggtcttatgtagatgagagataatatttaaacatggcaaaagttaaatgatgaagtacttaattatcattttcagacaaaaattgggctttmgtcacaagagtgtgtgcaaacatgtttattgagaccaattcagaagaatcatgactattgtttgtatctatctatctatctatctatctatcctgtctctctaatctttctatcttttcatttcattgtagaaacagactatgtgccaacaatacttgggaggcttagttttctctc

SEQ ID NO: 247467 - DNA, 566 bp, Homo sapiens
gtcattttttacttagctaagatattcttgtgttggtacygtacttttttatttaaaaagagtctagttctaagttgaaactactgtactataatataaaatggtaatggtactgtttcttctaaaacatgatttactgaggtctacatgttatgaaaagttttttttaatagttgacatttttttctttctattgcagcttttctgtatgttcagagtacctttttaccccaataaaactaaaaaatacaagtatgatgttagaatgctacttttgtctgggtaagaaagaacaattgtgcatacagttattaataatctttaatcagaaaagttgactgtagtgggtaaaatcaagtcagttttattattcattaagataatcctgaaggagctacctttcatagaataaacaatagaattataatatttcagttatgatgtgaaatatgaccatatgctaaactgcttggccttttaatcagatttttctaatgatttgtgcaaatttaaacaatactattaccacctattattatcactgttatacagaatttgttgtttga

SEQ ID NO: 247468 - DNA, 564 bp, Homo sapiens
tagacctgtggtcatgtgccaaattaactaaacactggagaaaaagttttcagctgatatgtatactaggagactccaaagaccatactggtcccctgtcmagagtgaaggaatgtggaggtcaaatgataaatggagattcgctcaagttgatttcacattgggccaactgacctgtgaatccacctgggaactatttctctggcccccactggatacttggaaaggatatactttgtagtttggagaaattgatatttgttccctgtcctctgcattaagagccattatgctaagaagggccaaatgaaaatcctaaaattacaacctcctctgatccctaatatatttgaaacagtatcacaaggaaaatacatcataatgttactcattttctggcaattggtccgtaggttagatatggcaaaagtgttctttttaatccttattcataatggggctcaaaggtactttgtttttatataggagcaatagtaacatgtattcactgtccaccttcaaggttgttaactctcctgttcgccctcagaatgtagcttaaaa

SEQ ID NO: 247469 - DNA, 564 bp, Homo sapiens
tagacctgtggtcatgtgccaaattaactaaacactggagaaaaagttttcagctgatatgtatactaggagactccaaagaccatactggtcccctgtcaagagtgaaggaatgtggaggtcaaatgataaatggagattcgctcaagttgatttcacattgggccaactgacctgtgaatccacctgggaactatttctctggcccccactggatacttggaaaggatatactttgtagtttggagaaattgatatttgttccctgtcctctgcattaagagccattatgctaagaagggccaaatgaaaatcctaaaattacaacctcctctgatccctaatatatttgaaacagtatcacaaggaaaatacatcataatgttactcattttctggcaattggtccrtaggttagatatggcaaaagtgttctttttaatccttattcataatggggctcaaaggtactttgtttttatataggagcaatagtaacatgtattcactgtccaccttcaaggttgttaactctcctgttcgccctcagaatgtagcttaaaa

SEQ ID NO: 247470 - DNA, 599 bp, Homo sapiens
ttgtcaggtactggaggaccaccctactttccccagcactgttggcacctatacacaccccctagagggtgagattaggctggtgggacctatggatatgaacacaactggatatacatcctatgagtaggccaggggacctgcctgaccaacctattgcagccaytgtcaacaccagcattgtctgcctgggttccagtgggttgctccatggctgctactaccttcactcacatcacacccactgcccagagaccggagaacctgctcacatgcctggcccactgttatcactacctgctctgagcaagccacctggaggcccaagaattggccctccgagacacaccaacacttgtgccagtgtactcttccctgggtccccaggacaggcatgcttaactcacttctgccagcactggggcccccaaaaaacttcaccatggcctctactaataactcaccctaagcaactgaggaaatcacagacactactgacactgtttatagctgaagaaattacacagaggttatactactgcatgcatccaaagtgaaagccaaagtgccctatctaacaaaagacatctatacaactt

SEQ ID NO: 247471 - DNA, 599 bp, Homo sapiens
ttgtcaggtactggaggaccaccctactttccccagcactgttggcacctatacacaccccctagagggtgagattaggctggtgggacctatggatatgaacacaactggatatacatcctatgagtaggccaggggacctgcctgaccaacctattgcagccattgtcaacaccagcattgtctgcctgggttccagtgggttgctccatggctgctactaccttcactcacatcacacccactgcccagagaccggagaacctgctcacrtgcctggcccactgttatcactacctgctctgagcaagccacctggaggcccaagaattggccctccgagacacaccaacacttgtgccagtgtactcttccctgggtccccaggacaggcatgcttaactcacttctgccagcactggggcccccaaaaaacttcaccatggcctctactaataactcaccctaagcaactgaggaaatcacagacactactgacactgtttatagctgaagaaattacacagaggttatactactgcatgcatccaaagtgaaagccaaagtgccctatctaacaaaagacatctatacaactt

SEQ ID NO: 247472 - DNA, 599 bp, Homo sapiens
ttgtcaggtactggaggaccaccctactttccccagcactgttggcacctatacacaccccctagagggtgagattaggctggtgggacctatggatatgaacacaactggatatacatcctatgagtaggccaggggacctgcctgaccaacctattgcagccattgtcaacaccagcattgtctgcctgggttccagtgggttgctccatggctgctactaccttcactcacatcacacccactgcccagagaccggagaacctgctcacatgcctggcccactgttatcactacctgctctgagcaagccacctggaggcccaagaattggccctccgagacacaccaacacttgtgccagtgtactcttccctgggtccccaggacaggcatgcttaactcacttctgccagcactggggcccccaaaaaacttcaccatrgcctctactaataactcaccctaagcaactgaggaaatcacagacactactgacactgtttatagctgaagaaattacacagaggttatactactgcatgcatccaaagtgaaagccaaagtgccctatctaacaaaagacatctatacaactt

SEQ ID NO: 247473 - DNA, 629 bp, Homo sapiens
aatagcaaatatatggaatcaaactaagtgtccatcgacagatgaatgtataaacaaatgacacacacacatacacacacacacacacaaacacaaagaatattattcagacataaaaagaatgaaaccatgtgttttgcagcaacatggatggaactggaggtcattatgttaagtgaaataagccagatacagaaagacagatgccacatgttctcactcatctgtgagagctgaaaagaattgatctcatggagacagagaatagaatgacagttaccagaggctcggaagggtgtgtggttggaaggcagtgataaaaagaggttgattagtggtacaaacagagttgaatagaaaaaataagccctaatttgcaataacagagtagagtggctatagttagcaatattgtatattttaaagtagctagatgaaaggacttgaagggtcaatgacatatataartgataaatactcaaggtgatagatgctcccaaataccctgacttgatcattgattattatatattctatgcatgtaacaaatactcacatgtacttcataaatatgtaaaatattttatatcaaagaaaaacatgtaaaatatcttgtataaattaaaagg

SEQ ID NO: 247474 - DNA, 629 bp, Homo sapiens
aatagcaaatatatggaatcaaactaagtgtccatcgacagatgaatgtataaacaaatgacacacacacatacacacacacacacacaaacacaaagaatattattcagacataaaaagaatgaaaccatgtgttttgcagcaacatggatggaactggaggtcattatgttaagtgaaataagccagatacagaaagacagatgccacatgttctcactcatctgtgagagctgaaaagaattgatctcatggagacagagaatagaatgacagttaccagaggctcggaagggtgtgtggttggaaggcagtgataaaaagaggttgattagtggtacaaacagagttgaatagaaaaaataagccctaatttgcaataacagagtagagtggctatagttagcaatattgtatattttaaagtagctagatgaaaggacttgaagggtcaatgacatatataaatgataaatactcaaggtgatagatrctcccaaataccctgacttgatcattgattattatatattctatgcatgtaacaaatactcacatgtacttcataaatatgtaaaatattttatatcaaagaaaaacatgtaaaatatcttgtataaattaaaagg

SEQ ID NO: 247475 - DNA, 577 bp, Homo sapiens
ttatttgtgtgaaaaaatgaaataaatccctatttggtatcataaatagcaataagttccagatggactagtactcagtgtgaaatgcaaaacctttaaaacttttataagaaaatatcttcatgaactgtaatgaatgattccttaagtcaggaaaaaagcgaaatagaaaaaaagagagatctatttgaatatattaaaatrtttaaaagtataaactaaaaacacctgaaagtgagtaattctttcagacataagacataagtcaaatgttggaaaacaatatttatgacaaatataattggcaaaatattagtataatgaatatgtagaaatacctatgcattaataagaaaaatgcaaataattaaatgatattattttcaataaaaacacaaatagacttcccacagaagaagaaacatgaatggatctcaaatatgaaaaaaagattcccaagctcattaggaaaaagggaaagtgcaaattaaaatcacaaaatgatgccattttatatcctcctgattggcataaatcatgacaacaccaacttctcataatacacggctaatataaa

SEQ ID NO: 247476 - DNA, 577 bp, Homo sapiens
ttatttgtgtgaaaaaatgaaataaatccctatttggtatcataaatagcaataagttccagatggactagtactcagtgtgaaatgcaaaacctttaaaacttttataagaaaatatcttcatgaactgtaatgaatgattccttaagtcaggaaaaaagcgaaatagaaaaaaagagagatctatttgaatatattaaaatatttaaaaktataaactaaaaacacctgaaagtgagtaattctttcagacataagacataagtcaaatgttggaaaacaatatttatgacaaatataattggcaaaatattagtataatgaatatgtagaaatacctatgcattaataagaaaaatgcaaataattaaatgatattattttcaataaaaacacaaatagacttcccacagaagaagaaacatgaatggatctcaaatatgaaaaaaagattcccaagctcattaggaaaaagggaaagtgcaaattaaaatcacaaaatgatgccattttatatcctcctgattggcataaatcatgacaacaccaacttctcataatacacggctaatataaa

SEQ ID NO: 247477 - DNA, 577 bp, Homo sapiens
ttatttgtgtgaaaaaatgaaataaatccctatttggtatcataaatagcaataagttccagatggactagtactcagtgtgaaatgcaaaacctttaaaacttttataagaaaatatcttcatgaactgtaatgaatgattccttaagtcaggaaaaaagcgaaatagaaaaaaagagagatctatttgaatatattaaaatatttaaaagtataaactaaaaacaccygaaagtgagtaattctttcagacataagacataagtcaaatgttggaaaacaatatttatgacaaatataattggcaaaatattagtataatgaatatgtagaaatacctatgcattaataagaaaaatgcaaataattaaatgatattattttcaataaaaacacaaatagacttcccacagaagaagaaacatgaatggatctcaaatatgaaaaaaagattcccaagctcattaggaaaaagggaaagtgcaaattaaaatcacaaaatgatgccattttatatcctcctgattggcataaatcatgacaacaccaacttctcataatacacggctaatataaa

SEQ ID NO: 247478 - DNA, 577 bp, Homo sapiens
ttatttgtgtgaaaaaatgaaataaatccctatttggtatcataaatagcaataagttccagatggactagtactcagtgtgaaatgcaaaacctttaaaacttttataagaaaatatcttcatgaactgtaatgaatgattccttaagtcaggaaaaaagcgaaatagaaaaaaagagagatctatttgaatatattaaaatatttaaaagtataaactaaaaacacctgaaartgagtaattctttcagacataagacataagtcaaatgttggaaaacaatatttatgacaaatataattggcaaaatattagtataatgaatatgtagaaatacctatgcattaataagaaaaatgcaaataattaaatgatattattttcaataaaaacacaaatagacttcccacagaagaagaaacatgaatggatctcaaatatgaaaaaaagattcccaagctcattaggaaaaagggaaagtgcaaattaaaatcacaaaatgatgccattttatatcctcctgattggcataaatcatgacaacaccaacttctcataatacacggctaatataaa

SEQ ID NO: 247479 - DNA, 573 bp, Homo sapiens
actaaaactataaaggagtaagtaaggcaaagattttggtttggtaggtaggctaagataaaatgattaaagcatcgggttcaagctagagagaaactgtgggaaaaaaaaggagaccacacaaagcatgactagtttttattgatgagacattctttcaattctcccttcctcctgatttttctctttgtcttgttttcctcagataaaattcctttgttgaaatctccacattttctattccatttcctctttctttaacactctactcagtattaaaactactctcaaatatggacatactcatgtctaaatcacaaacatgtrgataatgcaaataaaactccatggaagctacacatataaattctgattcctcattgaaatacgtgccttgatgcaacagtgatgatagaacacctagccaagccaaactcattttactcttaagatggtagtctcaaaatcacacatggggaggtgagtataggcataaagctcacagaacccgaatataacaaggatgtattttagtgtggacctgagcaaattaaaaagaaatgttaatgagaa

SEQ ID NO: 247480 - DNA, 526 bp, Homo sapiens
tatttcatagactgtgttgataatttatagcttccttgagaaacattatattggcctttccttctstatttgggaggtgtctgtgtgtgtgtgtgtgtgtatcagtggctctcaatgtgagaaggagggaatgatgacttttttgccccagaggatatttggcaatgtctggagactttttttgttgatacaacttggagtaggtgtcctactggcatctagttgtggaggccagggatcctgctaaaatcctgtaatgcacaggcagcctccatagcaaagaattgtctggcctccagtgccaatagtgctaaggctgagaaaccctgctgtacatgagccctgtattcctatttctgcactcatttaatactttattgtgcagctcactctgtacacaacacctggtgcaatgaaaagcacatatttgtataaaatatattctgacccattcaaaaagctcaccgtggaatatggcatattatacaaaacagttataatttgaagttgaaaatgttaagtacaa

SEQ ID NO: 247481 - DNA, 521 bp, Homo sapiens
tatggatacagataggaggagagatcattcattytcacttggcagagataagggaaatcttcagtcacggagtgagtgacatttgaataagattttaaaggtgctagagctatggccacatcatataagtatgtgactacacaaaaatatatacactttcaaacacataaacatgcttaaaataccgagtttctttcattcgcatcacattgggaagataatacctctgcacggaatttctttccctgttatttttgttgtttaagagaaaatatgcatggagatgtcctatattatctgttacactgtcacggaatttgctactactcattggcccaagagacttttactgacgatcttgaactacattcagaagcatttgaaatccacctgaccaaaatgtgattttgcacttccttgttaaaccagatcagccacagaatgcatccctacttttaaatcagccgcagcagttccattgagacaacaaagtctacacacatgtggcctggtttatgcac

SEQ ID NO: 247482 - DNA, 530 bp, Homo sapiens
atctatgaacctttcaacattatgtcaaatgaaatgctaattgtacctttaggaatttcagagacagtgacaagaaactaaatgctctgttcctttgcatcagcaagtcgaggataattgtatatctactcttgtgaacttcgaagaaaaaaaaactragaaaaagggttttctattctttaactcaggagggtaaactccttcagccaccctccatcaatctaccttcaaataaagtgtgttaacatgttgacagtggacaaatcacacagtgctgcatttattcattttataataggtttgtcaaatgagcttcagttaaagagatttaagagtaagaaaaattttcagccagaaataaccgacttattccattcaaattgatgtaaggtttaaaggtgtacttcttaaaagcctaatctttattaaaatgcacaatttttgaagggtaagtcacaaaaataaataccaggagccccaaaagtgcttttattttccctacccttaagataaaaccctaatacatccct

SEQ ID NO: 247483 - DNA, 596 bp, Homo sapiens
tgcacatatgatttgtacaattggctatggattctatttaatttatagttataaaacagtacatctttaggggtaatgaaacaataaggaataaaatagcatgtacctgctttagaaaagcttactatataagaggratttctaggtgtatatattatgaacaattggtccagtataagaaaacagtaacattttacatacgtaatgttttccagaaatttcccaactctttctaatatgtacaattcccaaaataaatgcagagctagtagctgttctgaggaatcttcaagcaaatttttcaatactagctttgttattaatcatcccaattttgttcatgttgtattacattggggaaaaatagttgtacaatgaacaagtatactactaaacaaaatgctcatctttttcttaagagtcaaaacggaaggctaataaagaccatttaaaataaaagggcccattactcctcagttttatatgagcttacatgctttcattgtgcagagtgtgttattaatttaacatgccagattcataggtttctgcaatatcaggtttgatgtattcattatcggcactcagtacattaa

SEQ ID NO: 247484 - DNA, 596 bp, Homo sapiens
tgcacatatgatttgtacaattggctatggattctatttaatttatagttataaaacagtacatctttaggggtaatgaaacaataaggaataaaatagcatgtacctgctttagaaaagcttactatataagaggaatttctaggtgtwtatattatgaacaattggtccagtataagaaaacagtaacattttacatacgtaatgttttccagaaatttcccaactctttctaatatgtacaattcccaaaataaatgcagagctagtagctgttctgaggaatcttcaagcaaatttttcaatactagctttgttattaatcatcccaattttgttcatgttgtattacattggggaaaaatagttgtacaatgaacaagtatactactaaacaaaatgctcatctttttcttaagagtcaaaacggaaggctaataaagaccatttaaaataaaagggcccattactcctcagttttatatgagcttacatgctttcattgtgcagagtgtgttattaatttaacatgccagattcataggtttctgcaatatcaggtttgatgtattcattatcggcactcagtacattaa

SEQ ID NO: 247485 - DNA, 519 bp, Homo sapiens
gattacaggcgtgagccacagtgcctggcccagcaccagaattttacttccctctgatggataagggaactctctgctccaaagtggtatgtgccatgttacagctctatcccatacccagaaaccacaaagactggcatgctaatattttcatttaggaaaatgtttaattttgtaggaataaatgaagacatgaagttgtggatagttagcattgatttcattataaataaaattacttataaaatcattcacagaaaacaaggctttcaaactagggcatgttattagaaggaagaaacatttcactactacatgtcttaaatattaagtagactctctggactgcctaagggtacctggtatataccatttgattttattgctcctcagtgattccaaggtgactggmtcatcaggaactcataaaagaaagctgggggctggctcccctacatctaccagggttctgatggggaccccagagttccacgtgatcactcctaggtgtgacattct

SEQ ID NO: 247486 - DNA, 254 bp, Homo sapiens
accagggttctgatggggaccccagagttccacgtgatcactcctaggtgtgacattctttgggcaattacttgctcaaactcttatttgtttgtgcttgttaatgtattcaactcaatccagcaaacatttatkgagcattattatcaggctctaggggacataaagataagtaagccttgatttttgtattcacggagcagataatcatgtggattattttataaatgctattctgttgaaatgtgtgcttt

SEQ ID NO: 247487 - DNA, 511 bp, Homo sapiens
tgtaaagctggggataatagagttatatgttagaggaaattatacatgcaaacatctaggagagtctctgaacttatagatcctctgaaatgtaattgatcctraactgaacataaaatttattgaatagttaataaaaacatatcacgtgtctaaactcaactcaccctttgagcatccaggttattgttcattggcaaatatcttttgcttttctattgaaataaaaacagaaaaagaaaacctttaggaaaaacaaactcaatatgcattagagaaacatctgtatgtaccttataatcaatataattaaaataccaaatactgaaaattataataaataactgagctcagttttgggacggtctgttaataagtatatgtgtgtttatgtgttgaaagaaacatgaaaggatatacatcagtatattaatagaggttgtttctgagagatgagttttttcaactatttatgttatcgaaaacttttacaataacttgtcctagatta

SEQ ID NO: 247488 - DNA, 660 bp, Homo sapiens
tctattgataacagagagacacggaagtgagtactaggaagagtaaaagaagaacagtaagccccacctcaaaggaaatggttaaagatttttgccttaggacatataaagaaaactaaaggaacctaaaaaactgggccttttaatatattcctggagctgaactgtttgcagaaggggcttgagctgttaggggagtctctttagagagagaatttgagaaatatctttcagcatgtcaggaaagttaaacagaggttacccaaagctttgttaaatctcaagcatccaaattactttgcatttctgggatttggaggcagcagtcaacacttctgaatcttaaaactaggaaggcgttaatgtttggtttggagaccagagtagaaaaaaatatctgtgagaatacaacttcatgaaataaagcaaaataatttataagcattttaaagttctgggaaggcagaagctagactatttctcaggagcaagaaatgaaatatacagtagtctctaatattactttatttgtataaacattttastgtttgtgcaaacatttacaaagactttcatagagtcactctcagccacagtgcaataacattttttttgatcccagaagtatttgaaccacaaatgatcctaccccaagggttt

SEQ ID NO: 247489 - DNA, 568 bp, Homo sapiens
ctgtgcgcagtaaacctgcaaagcaattccaaccctgagccttagggctgcccactttgcgccctacccaaatttcatacccatgggcaacattaatgtgatttgggatggtttgctatgcagcaattgacaaccaactctgtgattgtgtttgatccctgtagccctcctcttccttctaatttgttacttcaacgaaaccagttaagattttgtgtaaagagagtgaaaatacactgagaatctacttggagtggtctcctgtgaaggaagcatgtgacatctctttctagatttttcagtgtggatttatattttctagacatgattgtgcttgcttccctgtttgattttgtgttggttttttcttttcagaagcatatcactgagttctagakagttagagggcaatatttcataatattttattttctacaccatttttcacaggctgcacttccgttatttaactaaaaggggaaaataattgctaataccaattcttctctaaaaacaatctggtaataggaataatttcctaaatgtaaagcccacacagtagataatt

SEQ ID NO: 247490 - DNA, 613 bp, Homo sapiens
ctataaacgtcactttgggaatgccaacttttaggaactcttcattttgtcttccctccctctttcactgacattttgcctcctgaccctataacaggttggccccttagcccagcctctaaaatgctgaggaatggctgactcccttaaggtcaaaacaggctctactactcaattacctctccagattcatgctttttcacaatatctgtaccaattatttctttgactttgttaatacctcagttatattttaaaaatatttaaaaagtattttcagtgagttttctctgaatatttaatgtaccatattgccaaaatacaygtctctagaacttgaactccttcatatgaatatctcatacagagatttaaaacttcatgtctaaaactacactcatccctttgctcaacaaacctgctccactacctatattatcttcatcagtgttaaccccacctacttagtcacacatgaattttagaagctattatattgctttctttccatcatactaccacattaatttttaccacttacatatcttgagcttcccacactctactttacactagcatgccactgctcttttaattcagcttccttaatatt

SEQ ID NO: 247491 - DNA, 613 bp, Homo sapiens
ctataaacgtcactttgggaatgccaacttttaggaactcttcattttgtcttccctccctctttcactgacattttgcctcctgaccctataacaggttggccccttagcccagcctctaaaatgctgaggaatggctgactcccttaaggtcaaaacaggctctactactcaattacctctccagattcatgctttttcacaatatctgtaccaattatttctttgactttgttaatacctcagttatattttaaaaatatttaaaaagtattttcagtgagttttctctgaatatttaatgtaccatattgccaaaatacacgtctctagaacttgaactccttcatatgaatatctcatacagagatttaaaacttcatgtctaaaactacactcatccctttgctcaacaaacctgctccactacctatattatcttcatcartgttaaccccacctacttagtcacacatgaattttagaagctattatattgctttctttccatcatactaccacattaatttttaccacttacatatcttgagcttcccacactctactttacactagcatgccactgctcttttaattcagcttccttaatatt

SEQ ID NO: 247492 - DNA, 494 bp, Homo sapiens
gtatccctttctccgggctctcatgacagtcttggcatagctctattttagtgcttttcagcatgtggtgaaaatttagtcatttgcctgcctccaccactagcctacaagtgcatttatattttgtacccctagcacgcagcagaagcagtggattctggtatattcaattaatatttgttaaataaatacacaaatgaktgaatgaataggctttatatttcctctgagatctaatgctgaacaaggttggaggtggttactgttgaaaaggaaaaaataaatattacatgtttatctaaaacaaaagataaatgaaaaacactaaaagtatatctttatatcccgtacatttcatttttatttaattttgtttcctacatattttcagtctttcatttaatttaatcgtgttagatttttattttaaaaagactatcagatgatagcatttgtttcttgaaaattattatctagtgtattttttccagaaa

SEQ ID NO: 247493 - DNA, 482 bp, Homo sapiens
aaaaacatataaacaccaaattagggatgatggatacctgttggaagggagggaaatgcaattagggaagaataaaccaagggcctcaattatatttgtaatattttatttcctatgttgtgtggtagttaatgcggtggttaatgaactcagatgttcattaaataaatatataatcatctttttattttgtctgaaatatgtaaaatttaataaaatacaaaggctgcttggtgatgyttgtcttagggaagaggaatacaatgaaaaatctttcaatgatatggcatatccaatattttgatgaaattaaaacaattgattttcattaagctaacaattccttttttaacaacaaaaaataatatttcattcttcacttatcatgtcccctcagttctctctgcttgggctttcatttccactactatattgaaactatctctatcaaggtcattaacttgtgtaaatttatggtcagt

SEQ ID NO: 247494 - DNA, 469 bp, Homo sapiens
tcattatggtatcatttaccagagttaattataacacattcgctaatataaaataccatagtttcaaacttcattaaactctattataattactctttattattccaatsttccaagtcctttgcttttgagggttagagtgtgtaggaagtagagtgtaaaaatattttggatattggaagatgaaatgaccttttgtattactcacttttgaactatgtttcacttttagcagtaaaaagtacaagttgccatggaaatgtatgatggttttatgtatcaaatgtgggtgtgtgttcagtggtctctacttttctggtaagaaaagagaaatatttgagttaaactgtagagaatacagaatgctcttaaacattattataaaaagatgcccaattttagtggcatgatgtagaattttacatgccttgcaggacagtcagattttgtggtacaggatcaagggata

SEQ ID NO: 247495 - DNA, 552 bp, Homo sapiens
attatatgtgaaataataaccttgctgccaaatagttttcagtgctttgctttatatgagaaacaatacatttttagttccaaaaggcaataagataatgacattcaagtgaatctcttgctgcttttactttcttactacatttttagtctcttgctcatccctctctagttttcaatatgttaagatgacaatctcttattataatttagataacatagcccttggttaattttcagtctaattttttttctctgaatatgtatgtattgaaaagtctmttctcaatttatgataacaggttttaaaaaacatttctctcatataaatcatcagctattgtgtagtgttaggagtttataatatactattttcactaatctattttagtgaattaaaagcctattcaaataaaaaaaggagccaggtaacataaaagtcaataaaaatagccaatagttgtttagcactaaccatggatcagtcattatgctaacagctttatgtgtattctctcatttgttcctttctaagcatctataaagtgagtac

SEQ ID NO: 247496 - DNA, 374 bp, Homo sapiens
gctcctgattttgaacagggcatctcatctgcctacaaatctgagtgaattaaccatggtctgttcctcccagatcagtgagyccctcaatctttttttttttttttttgagatagggtctcactgtgttgcccaggctggagtgcagtggcgtgatgatggctaacttcagcctcaacctcctgggctcaagcgatcctcccacctcagcccctggagtagcagggactgtaggtacatgcctccaaacccagctaatttttggattgtttttgtagatttggggttttagcatgttggccaggctggtctcgaactcctgtgttcaagctatccacccaccttggcctcccaaagtgctgggattacagtta

SEQ ID NO: 247497 - DNA, 602 bp, Homo sapiens
ttgcagggaggatcaggactgctgctggcatctagtgaatagaaacggggatgctataaaatatccttcaatgcttagaacagatcccacaaacaagacttatccagcctcaaatgtcaataatgtcaaggttgagaagccctgctatagagtatgaatgctagagtgagaatctttttccyatcttcccttccctcagagtgtgcaccataatgctctgcagacagtaatatattcaatatttggtaatgatcagccctgaaaactgtctaaaagagtcaacaggcagtattatgagaagaggtaaactacattttaatcatgtccatagttgagtcttctaatgcttgcccatggtttcctccttttcaggcttatgggggaattataattccccattccctttgtggttgagtatgacttgttacttccagccattatgttataggtagaggtgacttgagtcatttttgagtgagagcatttaattgctggtgggagaccctctggctccttcttcttcctgctgctgatatcagactgcatccatagtaggtgccccacaaacatggggaagatacgtaacctgagcaacagtttgt

SEQ ID NO: 247498 - DNA, 602 bp, Homo sapiens
ttgcagggaggatcaggactgctgctggcatctagtgaatagaaacggggatgctataaaatatccttcaatgcttagaacagatcccacaaacaagacttatccagcctcaaatgtcaataatgtcaaggttgagaagccctgctatagagtatgaatgctagagtgagaatctttttcctatcttcccttccctcagagtgtgcaccataatgctctgcagacagtaatatattcaatatttggtaatgatcagccctgaaaactgtctaaaagagtcaacaggcagtattatgagaagaggtaaactacattttaatcatgtccatagttgagtcttctaatgcttgcccatggtttcctccttttcaggcttatgggggaattataattccccattccctttgtggttgagtatgacttgttacttccagccattatgttataggtagaggtgacttgagtcayttttgagtgagagcatttaattgctggtgggagaccctctggctccttcttcttcctgctgctgatatcagactgcatccatagtaggtgccccacaaacatggggaagatacgtaacctgagcaacagtttgt

SEQ ID NO: 247499 - DNA, 613 bp, Homo sapiens
gcttccataacctctatgaacctagagttgtgatgactggcccctttctggggatggctttccctggtggctgactctgtaagctttcttttctcttccttctttccaagagtctgtcctttctcacatccacaagccacatttctgagaactgacattattgagkaagtcggggaatctctgaatgggagaaaaataataaaatacagacttaagacagatatgtgaaaatcagctgaaaataattaggatcttttactcagtggaacaggaggaccaaagaatttgagaagtttggtgtgatcttcagaaggcatgcagagtaaacacgtagggttatagaaatatttaagaaaagggtcaatttgtcaaactacaggcaagggtaatgactgtagtgtttgcagttatattagaaatgatttctttactgacatatatttttaataaggaatattttaaaggtaacatttttagatctacttttacctcttatgatgcttacttttcctcccttacaatatctacgatcggggaaattccataaacaaagcatgcttttttcttactaggtcaaaacgaagtgttacactagcctcttaataaatgtcaa

SEQ ID NO: 247500 - DNA, 613 bp, Homo sapiens
gcttccataacctctatgaacctagagttgtgatgactggcccctttctggggatggctttccctggtggctgactctgtaagctttcttttctcttccttctttccaagagtctgtcctttctcacatccacaagccacatttctgagaactgacattattgagtaagtcggggaatctctgaatgggagaaaaataawaaaatacagacttaagacagatatgtgaaaatcagctgaaaataattaggatcttttactcagtggaacaggaggaccaaagaatttgagaagtttggtgtgatcttcagaaggcatgcagagtaaacacgtagggttatagaaatatttaagaaaagggtcaatttgtcaaactacaggcaagggtaatgactgtagtgtttgcagttatattagaaatgatttctttactgacatatatttttaataaggaatattttaaaggtaacatttttagatctacttttacctcttatgatgcttacttttcctcccttacaatatctacgatcggggaaattccataaacaaagcatgcttttttcttactaggtcaaaacgaagtgttacactagcctcttaataaatgtcaa

SEQ ID NO: 247501 - DNA, 613 bp, Homo sapiens
gcttccataacctctatgaacctagagttgtgatgactggcccctttctggggatggctttccctggtggctgactctgtaagctttcttttctcttccttctttccaagagtctgtcctttctcacatccacaagccacatttctgagaactgacattattgagtaagtcggggaatctctgaatgggagaaaaataataaaatacagacttaagacagrtatgtgaaaatcagctgaaaataattaggatcttttactcagtggaacaggaggaccaaagaatttgagaagtttggtgtgatcttcagaaggcatgcagagtaaacacgtagggttatagaaatatttaagaaaagggtcaatttgtcaaactacaggcaagggtaatgactgtagtgtttgcagttatattagaaatgatttctttactgacatatatttttaataaggaatattttaaaggtaacatttttagatctacttttacctcttatgatgcttacttttcctcccttacaatatctacgatcggggaaattccataaacaaagcatgcttttttcttactaggtcaaaacgaagtgttacactagcctcttaataaatgtcaa

SEQ ID NO: 247502 - DNA, 576 bp, Homo sapiens
aatacacccttaagttttaagtaggtttttgtatttaacgattctgtctgaataacctgcattttgccagtgttttgtgaaagactgaatgattcgtaccagcactccactcccccgtagtacatcgacagctttaccatggcttgatggttggtggcatgtacttcccagtccttgcattttgacttcatcaagtgwgcttatgtagttaagcttcattcattcataagctcctctcagtgcctttaaagaacatgccactgcctgggcttctccaaacacttcagtctgtgcctcgtaatgaaacgtgatgagccaagctcagccagcttgcagcctgaagcagatccatcctcccagctcagccaagtcaagagtagccaaaactcagccaaccacagaacagagagctccagagtaatatttgttgttcgaagccatgaaatttttgaatgggtgattatgcagcattatcgtcatgatatttgaaaaagaataacttatcactgcaagttcttgatcacgttttttaaacgaactttttaatctatctctaataaatcaaggtatataaaa

SEQ ID NO: 247503 - DNA, 576 bp, Homo sapiens
aatacacccttaagttttaagtaggtttttgtatttaacgattctgtctgaataacctgcattttgccagtgttttgtgaaagactgaatgattcgtaccagcactccactcccccgtagtacatcgacagctttaccatggcttgatggttggtggcatgtacttcccagtccttgcattttgacttcatcaagtgtgcttatgtagttaagcttcattcattcataagctcctctcagtgcctttaaagaacatgccactgcctgggcttctccaaacacttcagtctgtgcctcgtaatgaaacgtgatgagccaagctcagccagcttgcagcctgaagcagatccatcctcccagctcagccaagtcaagagtagccaaaactcagccaaccacagaacagagagctccagagtaatatttgttgttcgaagccrtgaaatttttgaatgggtgattatgcagcattatcgtcatgatatttgaaaaagaataacttatcactgcaagttcttgatcacgttttttaaacgaactttttaatctatctctaataaatcaaggtatataaaa

SEQ ID NO: 247504 - DNA, 596 bp, Homo sapiens
tatcaaagaatacctgaaatattgcatattattatgactttctactttaatttattgtttcttgttcattatatacaatttcaatgtcgattggatatgttcctgtttagtattaacatttacagcttgatattttgaattttgaatgtttgctttacctcaatattaagaagtattttaaaagatgtgtatttttgacatcaaatgcttagatttcctaaagggcagccagaatatatatgccagtcaagtggaatccattactcaaccaaagacaaaaatagagcagtaagagatgccattgccttttctgatgatattggacaagttggaaagctaatggcccaaatgagtttgagttggaccagaaaaytggaatcaataacatctggatgttctcactcgaaacaatttccacaattccctaactgctgatgaacgacagaattctactattaaacaatgatcagtttcactgtacgtcaatgatttttccactttttgtcaaataaattctggtatcatgataaacagcaaagaatttaatactgcctggccactggcttaaaaaaattttagaaaaaaatgaacatgca

SEQ ID NO: 247505 - DNA, 596 bp, Homo sapiens
tatcaaagaatacctgaaatattgcatattattatgactttctactttaatttattgtttcttgttcattatatacaatttcaatgtcgattggatatgttcctgtttagtattaacatttacagcttgatattttgaattttgaatgtttgctttacctcaatattaagaagtattttaaaagatgtgtatttttgacatcaaatgcttagatttcctaaagggcagccagaatatatatgccagtcaagtggaatccattactcaaccaaagacaaaaatagagcagtaagagatgccattgccttttctgatgatattggacaagttggaaagctaatggcccaaatgagtttgagttggaccagaaaattggaatcaataacatctggatgttctcactcraaacaatttccacaattccctaactgctgatgaacgacagaattctactattaaacaatgatcagtttcactgtacgtcaatgatttttccactttttgtcaaataaattctggtatcatgataaacagcaaagaatttaatactgcctggccactggcttaaaaaaattttagaaaaaaatgaacatgca

SEQ ID NO: 247506 - DNA, 535 bp, Homo sapiens
ggctggcttaatgagggaagaagcagcaggcagaaaaaaaacaaagttcgaggctgaatagaaggcattggggaataaaagctatgagagatgatgccatttactgattgcagatactaatctttcatagttcaaagatggagaatttccaggtgttaacaaggtcctgtgtgtggccatgagagtgtgtggcagagtgcctggaactgaaaaatatcaaggaggaagcgttaagaggccaagaaagcattggtgttaatacacaagaagaagaatcacactacagtgggaatcccttggtgttctgcatactgataggtgacaccacagatgtgacacagtgttgacgttaaattattacttgttaaatgaaagaagagaagaaagtgttatttggattgtacattagaggaataagaatcaagaaagtcactgactagaaattagaagcakgggattataagatattctgcagaaaataaatatttgacaacaaaatgtaaaataatgatgcaaaagagaaaaatagcaaaat

SEQ ID NO: 247507 - DNA, 588 bp, Homo sapiens
aacattttaggctcatctgttatgctttaatattgcaatgtgaacattacaagactcaggatgcacctcgaataaaataaacagctattaagatgccaaattagmgacagaaaacgtaaaatctgattaaattttctttaaatttcttctagattactctttacagtcaatagaattaatgggttactatcaacaaaaatcattggattcccttagcatcagaataaagaataaccaaattgtgtgatcaaactaggttaatactcactttggcaaaaattatgttaactcaaaatcatgttaacatcaaagctatacagtgatgtataaaaactgggactcccatgaaactagagttaataatacaaatgcacaaaacaggaagcataacatttgagttgaaaaactcttagagtaaaatgtttaaattatctgattggaaatgttagagaacagaaatgatcattgacatttcagttttgatatcaacataaatgatagtggtgatggtggtggcattccctcctggaatcaattaggaatgtctctcctgctatctgcctggagagccatctttcatcagggtaa

SEQ ID NO: 247508 - DNA, 588 bp, Homo sapiens
aacattttaggctcatctgttatgctttaatattgcaatgtgaacattacaagactcaggatgcacctcgaataaaataaacagctattaagatgccaaattagagacagaaaacgtaaaatctgattaaattttctttaaatttcttctagattactctttacagtcaatagaattratgggttactatcaacaaaaatcattggattcccttagcatcagaataaagaataaccaaattgtgtgatcaaactaggttaatactcactttggcaaaaattatgttaactcaaaatcatgttaacatcaaagctatacagtgatgtataaaaactgggactcccatgaaactagagttaataatacaaatgcacaaaacaggaagcataacatttgagttgaaaaactcttagagtaaaatgtttaaattatctgattggaaatgttagagaacagaaatgatcattgacatttcagttttgatatcaacataaatgatagtggtgatggtggtggcattccctcctggaatcaattaggaatgtctctcctgctatctgcctggagagccatctttcatcagggtaa

SEQ ID NO: 247509 - DNA, 612 bp, Homo sapiens
tgtactgttgtgagaatggcttaagagagtggattaraaaacaccttctagagtctagaatgctgttaaaaattgaattgtcattttattgtttaatgtacctttttagattgataaagagcaatacaaatacaaatgtatggctattgacttttcgccttcatttgttcacatatgctctgacatacacactatctaacaatgtgtgttcaacttgtgcagatgagctagaaaaaacaaaagtattttccgttgatgccctaacttctgtgaaatctgaagatatttaagcacatccccccaaaagtgcacggtcacggctctggcatttacacagcatcagtggctcctcactcaaatcctttgcgagtcctcccccgtggtctacttgtcatcacaggtataaagattacccacccacaggtgacaggtgtaaccatccgtgcagcatgaatctcatcgaaactgatattgtatctacaaagcaaataacatgaaatgctttttctcatacagtcaaatgcctgtgtatgtattaaattaattgtgttcattgataattcttgcttatgcaataactgttctcaacttttatgttctcccactttctgg

SEQ ID NO: 247510 - DNA, 612 bp, Homo sapiens
tgtactgttgtgagaatggcttaagagagtggattagaaaacaccttctagagtctagaatgctgttaaaaattgaattgtcattttattgtttaatgtacctttttagattgataaagagcaatacaaatacaaatgtatggctattgacttttcgccttcatttgttcacatatgctctgacatacacactatctaacaatgtgtgttcaacttgtgcagatgagctagaaaaaacaaaagtattttccgttgatgccctaacttctgtgaaatctgaagatatttaagcacatccccccaaaagtgcacggtcacggctctggcatttacacagcatcagtggctcctcactcaaatcctttgcgagtcctcccccgtggtctacttgtcatcacaggtatwaagattacccacccacaggtgacaggtgtaaccatccgtgcagcatgaatctcatcgaaactgatattgtatctacaaagcaaataacatgaaatgctttttctcatacagtcaaatgcctgtgtatgtattaaattaattgtgttcattgataattcttgcttatgcaataactgttctcaacttttatgttctcccactttctgg

SEQ ID NO: 247511 - DNA, 581 bp, Homo sapiens
gagctcctgacctcaggtgatgcacccgccttggcctcccaaagtgctggaattacaggcgtgagccaccgtgcctggccctagcatgacacttttctatgtgtgttcaacaaatctgaaaacaacgtgatgcagatatgattattgtataagtttcataaatgaagaagacygagatccagaaagataaattaattgttcaatgtcacatagctagtatttcacagaacatgaatataaacttacacagtctgtttccgcaattcgtgcttttaagaaatatgtcagtggttcccaaaccttaatgcatataagaatcatctcgagaacctattaaaatagaatttcctggatcgcatgcttggatattcagagatttaaggtagggctcatgaatgtgtgtgtgtaacaaactcacagatgtcactgttgctgcttgtccaggtactatgctttgagacccactgaactacctacactgactctctcatgaggataatcaaagatatcatcacctgaatctgaatagtgttcactattttcactgagaaaacactaaaatattgttctgttttggaaaa

SEQ ID NO: 247512 - DNA, 519 bp, Homo sapiens
ggaaacccaaaggcttgcaacaacagccattccctgctcttgaaactgctgggaagatttcggctcactctgggtctgttgggatgggctggatgtgattctaggctatagcttaagtctagatcagctgcatgcatcttctcatttggggacctgtggcggcatgaataatgttgctccgacaaatggcagaagcacaggaggccaatccaaatcacacacrtttacttagagcctctgctcatgttaggtctgcaacatttctgttgactgatgcaagtcaatggccaagaccagagccactggccaaggaaaatgtgcagtcgacataaattcctgaaggctctgcaaggtcacatgacaaagaggagacgtgtcagtcatcctgttacaggaggaagtaaagatgagcatagtaagctggtcatcaggtagaactgctcaaaaacttcataagctaagccctctccaaaggagtttcagtaatggtcatttccccattgcctgcagttttattgc

SEQ ID NO: 247513 - DNA, 524 bp, Homo sapiens
ttacaagcaatgtgtagggggaagaggaatagaagttgtctgtattactaatgtctgcactccaaggaagccagctcagaaagccccgccgttamatatgttaaaaacagaaagagaatatagagcactaaaatggtggatttgatggggcaaggaaagcataccaaattctatgcgaatattttcttggtctgtgttataaaattgtatagttttactgtggacttggataactttcttattttttattataattttccattttctgtttgaccattcccatacctctgaacatttactgtaattaggagagaaagtaagaatatgtttctgtaatgaacatattccctttaccatcccttacatagctgaaccaaataaatgcacaagccaagaatgtcctccattatatgataaacaccatagaaacgggagcatgtttattttctccactaccctatccttcacgggtgtctggcaccatgtagataatcccagtagatatttttttaagtaaacttgag

SEQ ID NO: 247514 - DNA, 604 bp, Homo sapiens
tatacaacaaatgtatacatacgttcakatggaagtaagaagtaccacatctgagagcggaagaggcactgtaatcacccatcccaaagaagatgatttcttaggaaaagaagtgagtttgggaaatatattagatgtattctcctgtctcttccatattcttgggaatttgagccatcacttatctctgatgtgccttgcttgagaagtggtttctatactatatttgatgatgtggatctgataacacaatattcaaatattttccagctgtgttaactgagtctctagaggcagatctcctgagaattgtcagttgtgtttattttccagttaagtctactttcagagagccattattgaaagagaaaagtttcaacagaaagatgattattgttaatattatcgtggtaagaccacttaatgtgagatctatcctgttagcacatttttacacacccactgttgtgttgttaactataggtgcaatgttgcacagcagacttcaagagcttattcatcttccataataaaactctgtaccattactgttgaacagcaacttgccatttctccctcctttcacctctgcaacagaatgata

SEQ ID NO: 247515 - DNA, 536 bp, Homo sapiens
gcgttcccagggtgctggttagaaatacacctctcaggcccacccagacctkctgaatcagaatctgctgtttccaaaattcccaagtgattctcatgcaccttaaagctttagaaacactgttctaattagtgttcttaaaatattgctatgggatacaggctttagtaaattctcaggatattctaccatgtactcaagtttgagaaacaggagatttaataaatactgatgtttggatcccatccatagagattctgttttgattggtgtagggtgtaatctggcattaacatttttaaattgcccctggtgagtttcatgaatggcaatgtttgggaacacctgctttaagttaagccatgagctaattgttcttcatcatattgcagatgtgggaactgagacgttataaggaaatccaatttgcgagtggtagagccagacttaagcttagacccttaactcacttattctcaaaactggtctgtgctgtttattattttacaggagagttctatattgctatgtttaat

SEQ ID NO: 247516 - DNA, 532 bp, Homo sapiens
actgtttctgtacctcgcttctaattcctgtacgtcactttaccttttttgtctataaatttattctgaccacaaggcacccctggagcctctgtgagtctgctgtggttctggggactgccggattcgcgaatcgttcatttctcagttaaactcctttaaattaattcagctgaagtttttcttttatcaatgaaaagactagactggcttagccttccagccygcacctttctcccatgctggatgcttcctgcccttgaatatcagactccaagttcttcagttttgggactcagactggcttccttgctcctcagcttgcagatgccctattgtggggtcttgtgttcgtgtgagttaatacttaataccctctcctttatatatacatcctattagttctgtccctctagagaaccctgactaatacaatgtctccattgaaaagaaaagaaaatctattaataaactgatatagtcagagcccctcaagaaaaataccaaagaaactccaatgttgtagagaatt

SEQ ID NO: 247517 - DNA, 562 bp, Homo sapiens
tgtacatacattcaatttcatattgactcttgcctttttcagcagtgawcagtaaaaattatctaaaaatcaatcctgaaggttatactttatttttccattttgaaccttgcccttgaaagatcatttatatattttaaacacatttttaaaaatgaatctccagaagtctaatttctcatgctaaccaaattagagaggttaattcgatgacggactcttagaaacaatcatcattagaacttgggtattatttcaaacgcatctctcttccaaatcttagcagttgaaacaatttcacaggttaaaccagccagcttgacagcccgtgaatggctactcactaaagggtccaagcagaggcaaaatgatggtcctatctcttaaagacagagcaacagaatatttggaattaaatagaactggacttaaatctcatcccagtggacaactgggaaaacttggaaacattaatcctgctgaatatttgtgcatcatttaataactaatacatactgaattaagtagttagcaggatttacaacactgtgtataaggagcc

SEQ ID NO: 247518 - DNA, 562 bp, Homo sapiens
tgtacatacattcaatttcatattgactcttgcctttttcagcagtgatcagtaaaaattatctaaaaatcaatcctgaaggttatactttatttttccattttgaaccttgcccttgaaagatcatttatatattttaaacacatttttaaaaatgaatctccagaagtctaatttctcatgctaaccaaattagagaggttaattcgatgacgractcttagaaacaatcatcattagaacttgggtattatttcaaacgcatctctcttccaaatcttagcagttgaaacaatttcacaggttaaaccagccagcttgacagcccgtgaatggctactcactaaagggtccaagcagaggcaaaatgatggtcctatctcttaaagacagagcaacagaatatttggaattaaatagaactggacttaaatctcatcccagtggacaactgggaaaacttggaaacattaatcctgctgaatatttgtgcatcatttaataactaatacatactgaattaagtagttagcaggatttacaacactgtgtataaggagcc

SEQ ID NO: 247519 - DNA, 498 bp, Homo sapiens
aataccaaacagatagagttgatattagttaggattaaggggtctccatactgrtgttcttactacccaaaatagttgtggtagacatgagaagaattataaatagtgcaccaaagacaggacaaaaaagggggtggatgtggtgagaaagaggacaatgggtgtctgggagagggatggaggaggggctaaaattgaagacaagatgcttgccataactccatggctaaattgtgaactacattttcaaggtaaggattttatatcttttttgcattagcatctccagaactcatcagagtacttgacagattacatgcagtcagagtgtgaggcaaaaatgggcagcctgttgactttaaaaatagcattactaaatctgttggaatatcgaccaaacatcgaattcattcttggggcatttataagaattcttccttatttttggcttgaatttccttatatccctgctttgaatctttaatataagctggcttc

SEQ ID NO: 247520 - DNA, 604 bp, Homo sapiens
cttcagaagtaactcaagaattacattttcatcttcaagaaaatgaaagaaggcttgactaagcaaaagttgtgttattcaacagctaagcagtaagataaaaaggtgaacttttggaaatttggtatgcatcagttcaaacgtatttcctacctgaatccaaacagctttcacattgtaaagattcaggctcatgcagaaacttgtttgtgaaataaattaaaacaaaataaaacaaaacaaaagcagctgctctttaytgggatatatctcagcacattgcattgctgaatttaggttgagcaaaaagtcaaatattggaactgttaataagcattatgtttatttgaaattacctgtgagctaagttgattagggatcccttgctttgaatttaacgaattatttatttcttttaaactgacaagaaatagctgcattttcactaaggtctatgtcaaattcttgagttcaaatgctttttatacataaactttatgtttttgataccaccctcgctaggattcttgcattacttcctggttacttgtaaaaccgagactcatctagttatattatttgaagttaataaaccactgaagga

SEQ ID NO: 247521 - DNA, 604 bp, Homo sapiens
cttcagaagtaactcaagaattacattttcatcttcaagaaaatgaaagaaggcttgactaagcaaaagttgtgttattcaacagctaagcagtaagataaaaaggtgaacttttggaaatttggtatgcatcagttcaaacgtatttcctacctgaatccaaacagctttcacattgtaaagattcaggctcatgcagaaacttgtttgtgaaataaattaaaacaaaataaaacaaaacaaaagcagctgctctttattgggatatatctcagcacattgcattgctgaatttaggttgagcaaaaagtcaaatattggaactgttaataagcattatgtttatttgaaattacctgtgagctaagttgattagggatcccttgctttgaatttaacraattatttatttcttttaaactgacaagaaatagctgcattttcactaaggtctatgtcaaattcttgagttcaaatgctttttatacataaactttatgtttttgataccaccctcgctaggattcttgcattacttcctggttacttgtaaaaccgagactcatctagttatattatttgaagttaataaaccactgaagga

SEQ ID NO: 247522 - DNA, 388 bp, Homo sapiens
aaatgctacacatacccacctttataatggaatcacctctctgaaatgactgaccctttttctgtttatttctcagatcttgtatcagaatgtcatagatatattgtgatcagcaatgccatagcactgaaagtagaaggctttttgcactgcctctcaaacgtcaagccaagagacygtttcctgacttaatgtaatactcaaaaaaaaaaaagcattgaaaataccatatatttcagacttacagaattgaaagagattagattacaccatatggtaaccgacccagtttcttcagtgacctcagacacctacctgaatttcctagaagtaccagttaaatgggatcatttttttattttactttatttagttgtgttatatcact

SEQ ID NO: 247523 - DNA, 561 bp, Homo sapiens
gtcagtgcctgacttgcaagatgtgcaaaaatgtgagagacgaattttctcccagtgaagatatgctgggargatgcaaaataagctaagaaaattttcactctagataagaggagtcaaaggaagattagaagggatgcctggaatgtgtcagttttggtctactgtatatatagaattagcttagatagctatgtcctgtaccagtatatccactacaatactatcattaaaagattaatgcctctgctaatttatggtaaacctttagaattgtccagtgtaatatttagaaacagcacttgtctttgcagttaaattaatacagaccattgattctcacctaagtatgatttggcaatttctaaagatatttgaggatgtcacaacctggagtactgttagcatctggtaagtagagggcaggatgccccaaatcccacaatgcacaggacagcttcctaaaacaaataattattccacttaaaagccaatgatgccaagattaagaaaccctaatgtatatatgcctaaattcagtaattgtatctaagttcaaat

SEQ ID NO: 247524 - DNA, 392 bp, Homo sapiens
aaaaatattgattaatacaaatatctcagataaaattctgtactattcctgatagaagtgtattacattaaggaatagcctttaaaattttttgagtaagtcttaagtctcatatctctgcaatgtaataatttatctttctcattgaggtttagttaatagataaggacaatgattatggcgtattgtcatactacttacccatacaaagaaaacatactacttagccatactacttacccatacaaagaaaaacatactacttacccatacaaagaaaaatgaattttgcttccgcatgtcttatttcaaaccactttttaacatgcatwtcttcatagatacatatatatttaacctttacatcctaaataggttaaaaagaagttgta

SEQ ID NO: 247525 - DNA, 602 bp, Homo sapiens
ctcttattaagactacaaaacacccttgttgttagaagagaagactaaattctagttttgcatcagtgtacttttgatattaagactcattttaaaaaccgttataataaatgtattccattttagtcagtttgaccctataggatccctcttgctctctttcttcccaacttcatgtccattcagttttcccccatctttccttctttcattttgaaacaaccttttgataacctctaaactasacaaagttattttccctctacaaaaaaaacctcataccttataacaacttactttccttgtatactttctatgcagaattgtttttcttatcatttacagtagttttaattatgttattagaattttaagacttagtaaccctaatttccagtgaaaacctaggaagcaagcaattttgaactgtcacataacatttgatgactgcatatttcatcatttctagaaatatatgcttcctcatagaatactttttcaatgtggaacaggaaatatttactaacccaagtatattttgtctctataaaatttaagaacccaaaggtaaataaatttatgttcaccagttaatgtttcag

SEQ ID NO: 247526 - DNA, 622 bp, Homo sapiens
ttttgtatttttagtagagacaaggtttcaccatattggccaagctggtctcggactcctgacctcaggtgatcggcccggcctgcctcagcctcccaaagtgctgagattacaggcgtgaagccaccgtgcctggcaagttcatggtttaacagcctgtcttccctattagacttcctatcagggcagggaccacatctgacttgttttgttgtttcccacgcctagtacatttttggcattaaataaatatttgttgtytggatgaataaactttagccagtgtagctcattttatattgttttctttgagaaatcctaggactgtagctgtgtttgtgttctttattacttgatttatatttgttcttttgttatttttgttctttttgcgtttgttcttttccatacccacaagttcttctttgaatacagttatttgaccagcactgcctaaattctagggagatgtccatttaaaagcaatttccctcctgtcccacaaaaatgtaaggttttttttcctttctctcaaatgatggtggtgtagacaacccttgaaatctcagatctttcttagagaagaaaggatcagacatattaaggagctgttatgcttcaa

SEQ ID NO: 247527 - DNA, 281 bp, Homo sapiens
agtctgggtgaatcttacagagatgatcagggtgcagttggcgtgggcaaagctcagcraggcgtcatccagaggtagctggtgtctatctagatcaggaatggagaacttcttgtagtacctgtggggacaccgagaggccattggggcactcggcaaggtgacccaacagccaggcgtcaggccctctgctgcctagcttctacctagttcttccacaccttccacacacgcagagagggagaagggaaaccagttagaacaccagtatttcagagctc

SEQ ID NO: 247528 - DNA, 555 bp, Homo sapiens
gtgggcacagattacttggaatagtaatattgggcacaaggagcaccacttaagtttttctttgttttttttctcactcaggaaatttttctgacttcactcttttgcagaataaaagaaaaaaacctaagttgtatttcccaatttaatatacttttggaaatccaacgatgtttctgacagcttccccttttcccctgtcagaagttgaacagggtgggactgactgggggagcgggtggaatcatgtgcctcccatcacgtgcctctttccaagcccctatgggcctcacttccttctgccaccccaactgccttttccaaagtgccagggctgcctattctgtcccacaggtgacgctgctctccttctctgtggactctgaattcacttttgttgattacatcaagggagggtgagtcacaggccaagctctgggctgaaagcccrgcaataaattactcccagttctgagccccaggtttcttatttatgaatggtcagggcccagtgagaccatggagataaactttaaaacacttggccaactataa

SEQ ID NO: 247529 - DNA, 659 bp, Homo sapiens
tgtaagtgaaattctgagtgaaatctactttatacgtgtgaatgatgagcaccaaattctactcagtactagcttatcaaattttagttttaaaaagatttttgaaaaaaactagagataaaattttgtgttactatttttaaattgctacatcatcctgatactctggaattctcagaaatcaactacaacagaaaaaaaaaagtcaccttgtgagatataktccaaagttatcatccttttcccctaaaaatcaaagctgtgtagttttgtgtcttaaataaaaaaaaagaggactagaaacaagttaaaatctgtatttcgaaattctctaatgcaaaagtaacctttgggaaacttcctaagcaataagcacaatgacactcatacaaaccaaatttctctaaattatttcacaaggaccatacaataaattcagcaacatcaatgatatcaacacattaacaccactggatatgtgtaattgtaagagaacagcaataattagaagtcacaccacttcctagaacagcagttctaaaactacagtccacaaaccagctgcagtagcatcagctgggagtctgttagaaatgcagcttctctgattccatcccacacttgctgaatcagaaactctagggatagtgcctagcaaa

SEQ ID NO: 247530 - DNA, 528 bp, Homo sapiens
caaatgcagacatctctgggcaaatccctttcataagccaactatcaactcctcccgcaaacagcggccccatccaagatgggcagcttgagccctggacagatgacaatgtgaaatggcttcctcctgaagacagaaactagggcaataatcctggttccgtgacctgagagacatgggtggggtctcataaagaggaccgtaagctatgaaataayatgagaatctcagtacacttctgtagacaaaacatacatcatttacattgttttgcacttacgtttctttttcacaagggacacgtttttgccaggactcgaattttgaaattatgttcattgataaggctagggaaaccttaggccagacaaagagatgacattaccattgtaagccctatggaggaaaacaatcaataattctcctcttctttttgatttcaaaagaccttccaacttgaaccaaaatgcaacctctcaccctatacctgcatttagcttctcagatgtggagctgagaggtggatgt

SEQ ID NO: 247531 - DNA, 528 bp, Homo sapiens
caaatgcagacatctctgggcaaatccctttcataagccaactatcaactcctcccgcaaacagcggccccatccaagatgggcagcttgagccctggacagatgacaatgtgaaatggcttcctcctgaagacagaaactagggcaataatcctggttccgtgacctgagagacatgggtggggtctcataaagaggaccgtaagctatgaaataacrtgagaatctcagtacacttctgtagacaaaacatacatcatttacattgttttgcacttacgtttctttttcacaagggacacgtttttgccaggactcgaattttgaaattatgttcattgataaggctagggaaaccttaggccagacaaagagatgacattaccattgtaagccctatggaggaaaacaatcaataattctcctcttctttttgatttcaaaagaccttccaacttgaaccaaaatgcaacctctcaccctatacctgcatttagcttctcagatgtggagctgagaggtggatgt

SEQ ID NO: 247532 - DNA, 528 bp, Homo sapiens
caaatgcagacatctctgggcaaatccctttcataagccaactatcaactcctcccgcaaacagcggccccatccaagatgggcagcttgagccctggacagatgacaatgtgaaatggcttcctcctgaagacagaaactagggcaataatcctggttccgtgacctgagagacatgggtggggtctcataaagaggaccgtaagctatgaaataacatgagaatctcagtacacttctgtagacaaaacatacatcatttacattgttttgcacttacgtttctttttcayaagggacacgtttttgccaggactcgaattttgaaattatgttcattgataaggctagggaaaccttaggccagacaaagagatgacattaccattgtaagccctatggaggaaaacaatcaataattctcctcttctttttgatttcaaaagaccttccaacttgaaccaaaatgcaacctctcaccctatacctgcatttagcttctcagatgtggagctgagaggtggatgt

SEQ ID NO: 247533 - DNA, 626 bp, Homo sapiens
ttattattagctagttaaacataggccttagaaaacaatttccaacagtcttacttctgaataaagatggccctatattttttacctcaactccttacaacctcaaaagaaataccaagagttgaaggggccttatcccctagaccaagctcatctttctgttgaaagtcaccttggcatacacagagagaccaacagacaacatcagcacccaccatgcctgctccacagcgcattctccttagatcacagcaatcaatttcatgcctctctgacactactcatctgcaaaaaattcattccttgacagatgttttatttctagtattccctatgaaatcacactaaaaaarttcaaaaacaaatacattgattttaaagccacactaagcagtatactagattttttaattttcacctcaaaatggtagaaacatgtatagaaagagaaaaaatgtgaaattcagtaggattttctttactgtcattttaggataactcctgttcattcccttacttggtattttctttttttaaaaccattttattgaggtatgattgacatacagaaagctgcacatacttaatgtacacatcttgatgagtctaggaataagtaaacaccc

SEQ ID NO: 247534 - DNA, 582 bp, Homo sapiens
aattaaaagaaagatttttaagacaagtatctatagtctctggtcagtagccaatttcaaagagataatttaagtttttattttaatataatgtagaatagatatatgcccacatacataatatagaactgcaccttctagaaaaaaggttatcatgattttccagacccagtgattcattcaactgaacaaatacttgtgagactttactatgtgaaaagcaccatgctagktgcatgatttctctttttttttttttttttttttttttgagacggagtttcgctcttattgcccaggctggagtgcagtggcgcgatcttggctcaccacaacctccacctcccgggttcaagcgattctcgtgcctcagcctcccgagtagctgggattacaggcttgtgccaccacacccagctaattttgtatttttagtagagatggggtttcaccatgttggtcaggctggtctcaaactcctgacctcaggtgatctgcccacctcagcctcccaaagtgctgggattgcaggcatgagccaccaggcccagccacatgatttcttgtatcatgtattttaaa

SEQ ID NO: 247535 - DNA, 582 bp, Homo sapiens
aattaaaagaaagatttttaagacaagtatctatagtctctggtcagtagccaatttcaaagagataatttaagtttttattttaatataatgtagaatagatatatgcccacatacataatatagaactgcaccttctagaaaaaaggttatcatgattttccagacccagtgattcattcaactgaacaaatacttgtgagactttactatgtgaaaagcaccatgctagttgcatgatttctctttttttttttttttttttttttttgagacggagtttcgctcttattgcccaggctggagtgcagtggcgcgatcttggctcaccacaacctccacctcccgggttcaagcgattctcgtgcctcagcctcccgagtagctgggattacaggcttgtgccaccacacccagctaattttgtatttttagtagagatggggtttcaccatgttggtcaggctggtctcaaactcctgacctcaggtgatctgcccacctcagcctcccaaagtgctgggattgcaggcrtgagccaccaggcccagccacatgatttcttgtatcatgtattttaaa

SEQ ID NO: 247536 - DNA, 513 bp, Homo sapiens
tgtcctaggcctggggagaaaaggactgaagcgtgagtcaaggactgtcactacccatccatggagcagtagttaccatawccagccaagccctcctctgccctgccactctacctagaccaggcagcagctgaccttcctgattgctagtttccaactaacatcctttctttaccttatctttccaaggatccacttgcttcattcaccttccctgctcagaactcatctgttacaccctagcctgccatgctgtctcacgcatttgagggcaactttctttctttctttctgcaatagggccaattacggacaaacaaaaatgcttatggggctgcttctttacttaactgaagatgaaaatggttttatttagtactatggtggaaaatacatattcttaccactcggatttgtttattggatataaaaatatcaataagaaaaccagcactatatctttacgaataaaaatgttactaatatctgggtatatctgaaggcacaactaat

SEQ ID NO: 247537 - DNA, 418 bp, Homo sapiens
accacaccccagctgttttttttttttttggcagaaatggggtcttcctactttgcctaggctggtcttgaactcctgggttcaagccagcctccagccttggcctcccaaagtgctgggattacaggctcatgtgagctaccgtgcccagccagccacgctcgtttatgtgtatrgtgtctgtgtctgcttccacagagtggaacagttgcaacagagatgctgtggcctacaaaccctaaaatgtttactgtcagggcctttatagaaaatgtctgctgacagcattcccctctcaatctcctccaggggcctcccgttcctcttacagggtaacccgaagtccttgctttggcctaaaggcctgtgccactctgacttatctcccgcttctcccctgcatcactgcactacactc

SEQ ID NO: 247538 - DNA, 513 bp, Homo sapiens
tgcctgccaggcctggggtgctgtcagggcgggccccccaggagagtcccccaggtgaggtagcagtgccattgcattcaaggagccaggaaagaagggtgggatgggggcatttagggtaaatctcagacaaggctggctccaagggtctcctctaattttattttcattgtattttcttttcttttttttttttttttgttcttgtttatttgtttgttcatttccttttatcagaagccagtgtgaaagacatagctgcattgaattccacgctgggtacgctatttttttttcccctccccattttccttttgagttggcrtttgtcttgactttgttgtgtatcagggggacacatggcttctgttgtgtgtgcagggagccctggccaagagtcacccaggggatgccatggtggactcagcgatgtgtcccaagcaagtcttggagcctgtagggggagaggaggtggcgacgtgcatgcgtgtatttgtgtgtgtcttgtagacg

SEQ ID NO: 247539 - DNA, 578 bp, Homo sapiens
gcaggaatttgtcagggcgagaagaagaaagggttccctgagcagagggaatggcaggggcaaaggctgggggaggggaacacccaaggcgtgttcagttaattcctcccagccccgagaggtgccaggctccctgaaggtgtttctgattaacaagaggttagcacacacctctccacggaattcgtctcaaaaaaaaaaaaagggtaattattaaagtggcaagagcaaagaatctgcttggagcaagatttaaagaacacaaaaccctaggaagagccagccatctttccccagctgctggtggaggccctgtcccttccctaggcagacattgttgttctctctctggggaggtcagctccccactgcagtcagcatggccaggggtcagggagaaggggctgagccacaggtggcagcatcagagcaaagtgtattcacctccattcccttcctggtcytcagcactgcccagaggaggtcataggacagggattattattacatccatttgacagaactcggaatggctaagccactggcccagactcagttaactacccagaggtagtgaa

SEQ ID NO: 247540 - DNA, 578 bp, Homo sapiens
gcaggaatttgtcagggcgagaagaagaaagggttccctgagcagagggaatggcaggggcaaaggctgggggaggggaacacccaaggcgtgttcagttaattcctcccagccccgagaggtgccaggctccctgaaggtgtttctgattaacaagaggttagcacacacctctccacggaattcgtctcaaaaaaaaaaaaagggtaattattaaagtggcaagagcaaagaatctgcttggagcaagatttaaagaacacaaaaccctaggaagagccagccatctttccccagctgctggtggaggccctgtcccttccctaggcagacattgttgttctctctctggggaggtcagctccccactgcagtcagcatggccaggggtcagggagaaggggctgagccacaggtggcagcatcagagcaaagtgtattcacctccattcccttcctggtcttcagcactgcccagaggaggtcataggacagggattattattacatccatttgacagaactyggaatggctaagccactggcccagactcagttaactacccagaggtagtgaa

SEQ ID NO: 247541 - DNA, 590 bp, Homo sapiens
gtgagagatccaacagcagagaggaggcaggagggcagctgggggktgttgggggggcggggtccagcttggattaagggtctaccagggtgtttctcccacaaggctttcgttagccagtgggaagccagcaggccggggtgccaggaggtgggctcctgtggcagctctgcccaggagagtcccttgtttggctggaggactggagggtgctgggtaaatcgtttagcctttttgggccccatattgtccttatctgtaatatcagatgcaaaagcccttctctcttaccccactgaggacttcagggtatccaaggctgcaggggcatggctattttcagaaccccaaaccaggacccatggagaagtggcagtgggacagaaaacgtgaaattagcagcagttgtcccagagaatactaagtgtacgggacagggctggggaagcctgagagaggtggtgagtgctcagacgctggcatgtatggaatctggagccaggctgcgggttctgaccccagcacaccctttccttagaccagctcctggttcagggcgcacaacattatttttcctatagtatgaccgg

SEQ ID NO: 247542 - DNA, 590 bp, Homo sapiens
gtgagagatccaacagcagagaggaggcaggagggcagctggggggtgttgggggggcggggtccagcttggattaagggtctaccagggtgtttctcccacaaggctttcgttagccagtgggaagccagcaggcyggggtgccaggaggtgggctcctgtggcagctctgcccaggagagtcccttgtttggctggaggactggagggtgctgggtaaatcgtttagcctttttgggccccatattgtccttatctgtaatatcagatgcaaaagcccttctctcttaccccactgaggacttcagggtatccaaggctgcaggggcatggctattttcagaaccccaaaccaggacccatggagaagtggcagtgggacagaaaacgtgaaattagcagcagttgtcccagagaatactaagtgtacgggacagggctggggaagcctgagagaggtggtgagtgctcagacgctggcatgtatggaatctggagccaggctgcgggttctgaccccagcacaccctttccttagaccagctcctggttcagggcgcacaacattatttttcctatagtatgaccgg

SEQ ID NO: 247543 - DNA, 590 bp, Homo sapiens
gtgagagatccaacagcagagaggaggcaggagggcagctggggggtgttgggggggcggggtccagcttggattaagggtctaccagggtgtttctcccacaaggctttcgttagccagtgggaagccagcaggccggggtgccaggaggtgggctcctgtggcagctctgcccaggagagtcccttgtttggctggaggactggagggtgctgggtaaatcgtttagcctttttgggccccatattgtccttatctgtaatatcagatgcaaaagcccttctctcttaccccactgaggacttcagggtatccaaggctgcaggggcatggctattttcagaaccccaaaccaggacccatggagaagtggcagtgggacagaaaacgtgaaattagcagcagttgtcccagagaatactaagtgtacgggacagggctggggaagcctgagagaggtggtgagtgctcagacgcyggcatgtatggaatctggagccaggctgcgggttctgaccccagcacaccctttccttagaccagctcctggttcagggcgcacaacattatttttcctatagtatgaccgg

SEQ ID NO: 247544 - DNA, 528 bp, Homo sapiens
gtgtgtttgtgaagagagatagaggaaaacatgaatcagtcaataaacgatgaataaataatgctatgatgaaaatgtaggggggtggtgagtaacaaagggtgcttcttttatttttttctttgagacagagtcttactctgtcgtccaggctggagtgcagtggtgccatctcggttcacygcaaactccgcctccaggttcaagcaattctcctgtcttagactcccgagtagctgggactacaggcacccaccaccttgcccggctaatttttgtatttttagtagagacagggtttcaccatgttggtcaggctggtctcaaactcttgacctcaggtgattcgtctgcctcgacctcccaaagtgctgggattacaggcatgagccacacgcctggccacgacgggtgcttctttatgtagtctagtcaaagaagacctctcaaaggaggctgcagttgagcagaaacttgaaggaagggtgtgagcatgtgtagggtggtgggattagcaggtgcaaaggc

SEQ ID NO: 247545 - DNA, 574 bp, Homo sapiens
ggcgaacagcggacgccaattcttttgaaagcactgtgttccttagcaccgcgggtcgctacgggcctcttgctgtcgcgggatttcggtccaccttccgattgggccgccgcatcccggatcagatttcgcgggcgacccacggaacccgcggagccgggacgtgaaaggttagaaggtttcccgttcccatcaagccctagggctcctcgtggctgctgggagttgtagtctgaacgcttctatcttggcgagaagcgcctacgctccccctaccgagtcccgcggtrattcttaaagcacctgcaccgcccccccgccgcctgcagagggcgcagcaggtcttgcacctcttctgcatctcattctccaggcttcagacctgtctccctcattcaaaaaatatttattatcgagctcttacttgctacccagcactgatataggcactcaggaatacaacaatgaataagatagtagaaaaattctatatcctcataaggcttacgtttccatgtactgaaagcaatgaacaaataaatcttatcagagtgataagggttgtgaaggagat

SEQ ID NO: 247546 - DNA, 615 bp, Homo sapiens
taaaatgaggataataatggtatctatctatttccattttacgtgtgtatttgatttgacaaacaattatatagcattcaggatcaggacaagaggtagacacratgaatatcagtgcatttaatcccaaaagggctgtgaaaactgtgaaaattgtcagaatcaatatggagtcacttgtattaaaaatcctggcaaatagagccagggaaggccacggaggaaggattttcatgcctaaaagtcctgataacaaaaactatcacaaaagactctgcaaaacccacaaccttgcacaaaggtcatcgcaaccttaccaaaaaaaaattattctgtgaggacatctgcccaggaactgcctgttcaaacttggactggcactaccctggttatttgtccttatagccaaggaaaatcatctcaaaacaattatgtaatcctcattttccctttaaaaacatttgtctttcttcacctccctgaatccacacatagtttacccaagacatgcatattctcatcacaatgcctattcccaaataaacaccactttcttttagccagcttctctctctgtttgttatttatgttgacataatggtgtcagaagtagga

SEQ ID NO: 247547 - DNA, 615 bp, Homo sapiens
taaaatgaggataataatggtatctatctatttccattttacgtgtgtatttgatttgacaaacaattatatagcattcaggatcaggacaagaggtagacacaatgaatatcagtgcatttaatcccaaaagggctgtgaaaactgtgaaaattgtcagaatcaatatggagtcacttgtattaaaaatcctggcaaatagagccagggaaggccacggaggaaggattttcatgcctaaaagtcctgataacaaaaactatcacaaaagactctgcaaaacccacaaccttgcacaaaggtcatcgcaaccttaccaaaaaaaaattattctgtgaggacatctgcccaggaactgcctgttcaaacttggactggcactaccctggttattkgtccttatagccaaggaaaatcatctcaaaacaattatgtaatcctcattttccctttaaaaacatttgtctttcttcacctccctgaatccacacatagtttacccaagacatgcatattctcatcacaatgcctattcccaaataaacaccactttcttttagccagcttctctctctgtttgttatttatgttgacataatggtgtcagaagtagga

SEQ ID NO: 247548 - DNA, 612 bp, Homo sapiens
actggtaaaatatacttttgtgaacacagacagaagcatttactttttttcctacttgatctcaccagaatttggaaactatttatgagtattcttatggcaatatggttatttgcatayattcagtaagaatttgctctctttttataataggatacagttggaaatattggttgtagtaccaaggctttgactggaatgttatattcaagaatgtacgtagcacacatacctggcttcaagggttcccagcattgcagcaagtgagtaaaaattgtcacttccttgcaggcccaggaatcttaagactatgtaaaatctgaaatctaccttggttcggctttctagcctcaagagcctttaaaatttgaagtctgagattcttttgtgttcaacgtagaaagaaaaaattatgtttctaaataaaagctatggtacacctgtaattagattgtagccctgaacactgtttctgagttctcattatttacctatagactaaactaaaccctgaattcttctagattcctccaatccaacttttttccatggaattactaaaaacaggaactgttctgttcctggagcattataaactgaaattagatgaat

SEQ ID NO: 247549 - DNA, 612 bp, Homo sapiens
actggtaaaatatacttttgtgaacacagacagaagcatttactttttttcctacttgatctcaccagaatttggaaactatttatgagtattcttatggcaatatggttatttgcatatattcagtaagaatttgctctctttttataataggatacagttggaaatattggttgtagtaccaaggctttgactggaatgttatattcragaatgtacgtagcacacatacctggcttcaagggttcccagcattgcagcaagtgagtaaaaattgtcacttccttgcaggcccaggaatcttaagactatgtaaaatctgaaatctaccttggttcggctttctagcctcaagagcctttaaaatttgaagtctgagattcttttgtgttcaacgtagaaagaaaaaattatgtttctaaataaaagctatggtacacctgtaattagattgtagccctgaacactgtttctgagttctcattatttacctatagactaaactaaaccctgaattcttctagattcctccaatccaacttttttccatggaattactaaaaacaggaactgttctgttcctggagcattataaactgaaattagatgaat

SEQ ID NO: 247550 - DNA, 612 bp, Homo sapiens
actggtaaaatatacttttgtgaacacagacagaagcatttactttttttcctacttgatctcaccagaatttggaaactatttatgagtattcttatggcaatatggttatttgcatatattcagtaagaatttgctctctttttataataggatacagttggaaatattggttgtagtaccaaggctttgactggaatgttatattcaagaatgtacgtagcayacatacctggcttcaagggttcccagcattgcagcaagtgagtaaaaattgtcacttccttgcaggcccaggaatcttaagactatgtaaaatctgaaatctaccttggttcggctttctagcctcaagagcctttaaaatttgaagtctgagattcttttgtgttcaacgtagaaagaaaaaattatgtttctaaataaaagctatggtacacctgtaattagattgtagccctgaacactgtttctgagttctcattatttacctatagactaaactaaaccctgaattcttctagattcctccaatccaacttttttccatggaattactaaaaacaggaactgttctgttcctggagcattataaactgaaattagatgaat

SEQ ID NO: 247551 - DNA, 571 bp, Homo sapiens
aaatcattagccatatatgaatcgttccttttttttttttttccttttgagagagactctctgtcacccaggctggagtgcagtggcacgatctcagctcactgcaacctctgccacccgggtccaagcgatccttctgcctcagcctccagagtagctgggattacaggcacatgacaccatgtctagttaatttttttgtttttttagtaaagacggggtttcaccatgttggccaagctagtttctgatccaagtgatctgcccactttggcctcccaaaggaatcattcttattatgccaatcaatcatttagaccacaatctgaaggaacactctatgggaagatgctgcaaacagttgtccggtaaaacacaaagtcacatattcattggaytgagtttaacttgagcctttgattcttggaatggctcctagcaatggtgttggcatctgctactctcttccaatgactgtctagggaagcccagctgccaaggaaggaggctgagcatactacagcttcctgcaacaacacgggtgactcccacaaacatcgtgctgagcaaa

SEQ ID NO: 247552 - DNA, 399 bp, Homo sapiens
ttgttatggggttctcgtctcgccaagctttagatagatctgtttccggaaagctcacttttaaaaaaatcagatttgaagattgttggaattctggctctttatagtgagtcacatctctatagtcagttcattttcactcgcatatgaggtctcagtttgagyatcatgttttaaactgtctgcaatttgatttactggaaatacacctctacagagaaggtgtagtctttcctggttccattcccaatagtatgagggttatgtgtgaagttatttgcatttgtgttctctgtcattttcaaatcacggaatttaagaagtatgtataaatagattaagtgcacaataatacaacaaacctaaaagagttggcaaattaaaccttgaaattcttta

SEQ ID NO: 247553 - DNA, 399 bp, Homo sapiens
ttgttatggggttctcgtctcgccaagctttagatagatctgtttccggaaagctcacttttaaaaaaatcagatttgaagattgttggaattctggctctttatagtgagtcacatctctatagtcagttcattttcactcgcatatgaggtctcagtttgagcatcatgtyttaaactgtctgcaatttgatttactggaaatacacctctacagagaaggtgtagtctttcctggttccattcccaatagtatgagggttatgtgtgaagttatttgcatttgtgttctctgtcattttcaaatcacggaatttaagaagtatgtataaatagattaagtgcacaataatacaacaaacctaaaagagttggcaaattaaaccttgaaattcttta

SEQ ID NO: 247554 - DNA, 574 bp, Homo sapiens
tctttcctggttccattcccaatagtatgagggttatgtgtgaagttatttgcatttgtgttctctgtcattttcaaatcacggaatttaagaagtatgtataaatagattaagtgcacaataatacaacaaacctaaaagagttggcaaattaaaccttgaaattctttacaaaattccatatcttataaaggacaaccattaaggggactttggtgtcaatattttctgtaatgcaagccctttaatacttttccaccacaacctraatttgtctgtaatcaagctactgagataggaatgctgcattctcattttcctcctcctataagcctctgtaccaaaacattcaaaggccaggcatttactttttatttatacatattaaaaatttcttccaggagtgaagtttccaaacacaacgtgtctggacaggaagcaaatgttgttttaggggaaagttctaataaccccatttatgcaagcacattagagcagaaagaatcatttctgttagttaacatttttgagccagaaaattaaaaacaaatatttaacttcccaatttggaatt

SEQ ID NO: 247555 - DNA, 554 bp, Homo sapiens
taaaaacaaatatttaacttcccaatttggaattcaggctggcattgacgtctaaactttkacaatgcatactcaatgaattaaacacaatctctactagccaaataaaactgccttcatgtggctcaaaataagtttgaataaactgaaagataaataaaatgcacgggggacacccaggaagagagctgatgtgtgtgagcttggccaaaagacggcttttggactctgctcaactcaggggttttatgacacctaataaagctatacttagagaagacaaatattcaataaatatgagcacatacttacaaacatatgtactgttttcacttttcttcttccaaacctacttttacagcagtttattattggatatgaatttccccttctccatttctcatcacaaattaggtgggctcctaaagcgtcccatttctccctttagatttggggccccccagctgataaaggagttgtgattgcaggtggatttgatctgatttcccctgaacaggctggcggtgggaagcaggcattggagtcccacggct

SEQ ID NO: 247556 - DNA, 554 bp, Homo sapiens
taaaaacaaatatttaacttcccaatttggaattcaggctggcattgacgtctaaactttgacaatgcatactcaatgaattaaacacaatctctactagccaaataaaactgccttcatgtggctcaaaataagtttgaataaactgaaagataaataaaatgcacgggggacacccaggaagagagctgatgtgtgtgagcttggccaaaagacggcttttggactctgctcaaytcaggggttttatgacacctaataaagctatacttagagaagacaaatattcaataaatatgagcacatacttacaaacatatgtactgttttcacttttcttcttccaaacctacttttacagcagtttattattggatatgaatttccccttctccatttctcatcacaaattaggtgggctcctaaagcgtcccatttctccctttagatttggggccccccagctgataaaggagttgtgattgcaggtggatttgatctgatttcccctgaacaggctggcggtgggaagcaggcattggagtcccacggct

SEQ ID NO: 247557 - DNA, 554 bp, Homo sapiens
taaaaacaaatatttaacttcccaatttggaattcaggctggcattgacgtctaaactttgacaatgcatactcaatgaattaaacacaatctctactagccaaataaaactgccttcatgtggctcaaaataagtttgaataaactgaaagataaataaaatgcacgggggacacccaggaagagagctgatgtgtgtgagcttggccaaaagacggcttttggactctgctcaactcaggggttttatgacacctaataaagctatacttagagaagacaaatattcaataaatatgagcacatacttacaaacatatgtactgttttcacytttcttcttccaaacctacttttacagcagtttattattggatatgaatttccccttctccatttctcatcacaaattaggtgggctcctaaagcgtcccatttctccctttagatttggggccccccagctgataaaggagttgtgattgcaggtggatttgatctgatttcccctgaacaggctggcggtgggaagcaggcattggagtcccacggct

SEQ ID NO: 247558 - DNA, 646 bp, Homo sapiens
gtgagcacttaagcagcaagacaacaaagtcagcagatgacattttaatgtgcattttgatgttccatgtcttgaaactcaaccacaacaagagtagaaaacaacaaaaaagagttccaaaaacacgtttctggatcatacgattcatctgcaaggaagagagcttaccgcaaatttcaaaggtctgtaagcatcagaataaaaatacaattttttaaattcttggtatattttgtctcctttcctaggagcgaatctcttgaaagttctctccttcgtcacagggtcttcctcaagcttgtagtcgttcattcgctcacagactttctccaaaagatccgttaggaacgcctccgactgagctagggggatctaagaagaaagacagggcgaggaaacttgtcttaatgttaatgttacttcaaagaccttccggcgagtccacatggaaacgccacactctccctgaatgmaaacgtgtgccacttccctagcacgggcccagaagacggtaccgcagattgttattacaatgtaacaacgacctgctttacatcattacggggctagcgtaaattccagttttttaaaagtgcatatatttcaaagtggccagaaaaaaaatacattcaaactagaaactata

SEQ ID NO: 247559 - DNA, 626 bp, Homo sapiens
ccagttcttgttactcacagacattaccagtaacatatatgcttaggttgttcaaaaaaaaaaggtaataaaataagaacaatgtgattttggggggatatttttccagaattcatttttcyttttaatttctggagcttattttcaacttaacagtgatcaaacagaaaaaaaaaaggcgtaatgaatcaacattaatgatctttccaaatgggggtcatctaacaatttgattctttatgaagttaaaaaacacactttccttttattattaaatgcaaaattggtactagcatttgctttcctattttaaaacgtattctgccagtttgaaaaataaaccctttaatttttgaacattttaggtagaatgaaaagaaatacaatctgtcacatgaaaaataccataagcttaacctctgttaaaaaatcttctaagcaaggactttgggcacccaattcacactgcacctcttggctgtgccctccggtgggcaccgctcagagggctcctactgctttccaaaaactcctaagaggagaaagtgacagtacgtaaaaaggcagaggcaacaatattgcggcataaacggagcatgatgcgaatgtgttcattcattcaacaa

SEQ ID NO: 247560 - DNA, 626 bp, Homo sapiens
ccagttcttgttactcacagacattaccagtaacatatatgcttaggttgttcaaaaaaaaaaggtaataaaataagaacaatgtgattttggggggatatttttccagaattcatttttctttttaatttctggagcttattttcaacttaacagtgatcaaacagaaaaaaaaaaggcgtaatgaatcaacattaatgatctttccaaatgggggtcatctaacaatttgattctttatgaagttaaaaaacacactttccttttattattaaatgcaaaattggtactagcatttgctttcctattttaaaacgtattctgccagtttgaaaaataaaccctttaatttttgaacattttaggtagaatgaaaagaaatacaatctgtcacatgaaaaataccataagcttaacctctgttaaaaaatcttctaagcaaggactttgggcacccaattcacactgcacctcttggctgtgccctccggtggrcaccgctcagagggctcctactgctttccaaaaactcctaagaggagaaagtgacagtacgtaaaaaggcagaggcaacaatattgcggcataaacggagcatgatgcgaatgtgttcattcattcaacaa

SEQ ID NO: 247561 - DNA, 621 bp, Homo sapiens
cattgcctggctgcctgtggggaaggagctcctgccgttggcagacacctctgcagccaggcgtggggtgtccttccatcaaagcaacgccagggggcaagaagcgttaacaaagcccgggacgctccgcactctccctttatctacccgtgtgtgygtgtcacactttccagggcgaaatgtcattttgcaaggttatacatttccaattcctcatagagccttatcgctcatcatttacctcttgggcacaaacaaacagcctctttaaataaagccagggaagggaagcatatacctttgtacaattaaaaatagcacaagaatgccaaaatgtattggaccttgctgttaatccgacttacctggctgacactctggcctaatcctattttctcctcgcattagaatgactctacaaggctacgttttgttcttcgggagcacagtttacctggccagtgggctgaggatcagagaagcctcaccacctaaggtggggagaggggctgcagactgcccagcctggccccagcctgctggaggtcccagtgcagagcctgcttggcgagacagaaagcaaacgaaatcactcaagggaaacttcgctggagacaaaac

SEQ ID NO: 247562 - DNA, 466 bp, Homo sapiens
cggcctcctggccgctgccttctcgcacccagggtcttcggcctgggctccacacctcaggcccctcaagtaatcggcctcttggtggccgggcactgcctttccggctgctctctgcacccgtctgcccctccggcctcccctggcggctacaggcgtccggggccctcgctccccagctccaggcgtcccgggagccaggcgcgcagcggggcgagttctygtgtccgtgtgagcgcgggcgtgtgtatgcgtgcgcgtgcacgagcgtgagtgtgcgtgagcgtgagtttgagtgtgcatgcgggtgtgaatgtgtacatgtacacgaatgtgagtgtgagtgtgcatgagcgtgagcgtgcgtgtgcgtgcgagtgtgcacgagcgtgactgtgagtgtgcgtgcgtggaagcgcggcggggagcctggctgaaggcctgctgcctgcatggctgtcagaga

SEQ ID NO: 247563 - DNA, 466 bp, Homo sapiens
cggcctcctggccgctgccttctcgcacccagggtcttcggcctgggctccacacctcaggcccctcaagtaatcggcctcttggtggccgggcactgcctttccggctgctctctgcacccgtctgcccctccggcctcccctggcggctacaggcgtccggggccctcgctccccagctccaggcgtcccgggagccaggcgcgcagcggggcgagttctcgtgtccgtgtgagcgcgggcgtgtgtatgcgtgcgcgtgcacgagcgtgagtgtgcgtgagcgtgagtttgagtgtgcatgmgggtgtgaatgtgtacatgtacacgaatgtgagtgtgagtgtgcatgagcgtgagcgtgcgtgtgcgtgcgagtgtgcacgagcgtgactgtgagtgtgcgtgcgtggaagcgcggcggggagcctggctgaaggcctgctgcctgcatggctgtcagaga

SEQ ID NO: 247564 - DNA, 588 bp, Homo sapiens
ccagctgtcatgtgcggggatccagatgctgccatcagaggggtggtgctgcagacggaaagcagctagaacaactggctgcgagcccctccctctgcagccctgggagatgacttcggaaagccatctcaatccctcaatcccaaaccgcagagtgatgcctcaggctgtgggtaatttcccaaggccacgatctcagataggaccccttcgcctcccaaagagtttgctgggctttccccagtcttgggcggacttggatgagtgatcttccctccctgctagaacctttgtgcttgcagttcacatgaacttgagcrtggatctaatcatagggatgcaggcccgcagctgtgcagacacagatgctgcatgaatgcatgcctgcagaaatgacggatgccataattcaaacgctgaggcggcaggcacaggggccgggtgtgtgtgcacacttcctacgtgcaacgaactccttcggtcctcaggacacatctgtgagggtggcctgagatcacccccattttgcagatgaggaaacagatgtgtggagggcctgggacgcaccaggccagtgtctgccggagc

SEQ ID NO: 247565 - DNA, 588 bp, Homo sapiens
ccagctgtcatgtgcggggatccagatgctgccatcagaggggtggtgctgcagacggaaagcagctagaacaactggctgcgagcccctccctctgcagccctgggagatgacttcggaaagccatctcaatccctcaatcccaaaccgcagagtgatgcctcaggctgtgggtaatttcccaaggccacgatctcagataggaccccttcgcctcccaaagagtttgctgggctttccccagtcttgggcggacttggatgagtgatcttccctccctgctagaacctttgtgcttgcagttcacatgaacttgagcgtggatctaatcatagggatgcaggcccrcagctgtgcagacacagatgctgcatgaatgcatgcctgcagaaatgacggatgccataattcaaacgctgaggcggcaggcacaggggccgggtgtgtgtgcacacttcctacgtgcaacgaactccttcggtcctcaggacacatctgtgagggtggcctgagatcacccccattttgcagatgaggaaacagatgtgtggagggcctgggacgcaccaggccagtgtctgccggagc

SEQ ID NO: 247566 - DNA, 588 bp, Homo sapiens
ccagctgtcatgtgcggggatccagatgctgccatcagaggggtggtgctgcagacggaaagcagctagaacaactggctgcgagcccctccctctgcagccctgggagatgacttcggaaagccatctcaatccctcaatcccaaaccgcagagtgatgcctcaggctgtgggtaatttcccaaggccacgatctcagataggaccccttcgcctcccaaagagtttgctgggctttccccagtcttgggcggacttggatgagtgatcttccctccctgctagaacctttgtgcttgcagttcacatgaacttgagcgtggatctaatcatagggatgcaggcccgcagctgtgcagacacagatgctgcatgaatgcatgcctgcagaaatgacggatgccataattcaaacgctgaggcggcaggcacaggggccgggtgtgtgtgcacacttcctacgtgcaacgaactccttcggtcctcaggacacatctgtgagggtggcctgagatcacccccattttgcagatgaggaaacagatgtgtggagggccygggacgcaccaggccagtgtctgccggagc

SEQ ID NO: 247567 - DNA, 573 bp, Homo sapiens
tctgtgccctaaggtacagattatcaccaatttcccatttgggaatactggaggggtggggattcctcattgccctcttcccttgaagtaaatccgtattttagaatctcttacctacaagtacccctttcccagtaccaaattcagttccagttgggttatcrttgacttcaagtacagaaacccattcaaactggcttgtgttgccagactcagttttgcactttgaacacaagaacaagataaaactcaaaatatactaggagaatgagacacaaatcaatatattgtagtaagtaccataaaatgagtataaataactatgggaaacaaatgagtttttgtctaattgggcaaatagctaagaaaacaataaatcctatacatgttggtcatttacaatgttttaacagccctatcactgggtacttgttctaacttttctataacactaacagggagaaataacttgtttgaaaggacaaaaattttaatgtccaaaataagcaaaaccaaagaaccgtgtcaggaattcatttttgatcaaagtgtttttcaacttggaagtcattg

SEQ ID NO: 247568 - DNA, 573 bp, Homo sapiens
tctgtgccctaaggtacagattatcaccaatttcccatttgggaatactggaggggtggggattcctcattgccctcttcccttgaagtaaatccgtattttagaatctcttacctacaagtacccctttcccagtaccaaattcagttccagttgggttatcattgacttcaagtacagaaacccattcaaactggcttgtgttgccagactcagttttgcactttgaacacaagaacaagataaaactcaaaatatactaggagaatgagacacaaatcaatatattgtagtaagtaccataaaatgagtataaataactatgggaaacaaatgagtttttgtctaattgggcaaatagctaagaaaacaataaatcctatacatgttggtcatttacaatgttttaacagccctatcactgggtacttgttctaacttttctataacactaacagggagaaataacttgtttgaaaggacaaaaattttaatgtccaaaataagcaaaaccaaagaacmgtgtcaggaattcatttttgatcaaagtgtttttcaacttggaagtcattg

SEQ ID NO: 247569 - DNA, 515 bp, Homo sapiens
tgtagttcccatcatctcatgtgtcatgggagggacccagtggaaggtaattgaatcatgggggcagttaccccatgctagtcttgagatagtgagtttttacaagatctgatggttttataaggggcctttccctccttgctgagctcttctttctcctgactccatgtgaagaaggacatgtttgcttacccttctgccatgattgtaagtttcctaaggcctcaccagccatggggaactgtgagtcaattaaatcttttattaaaaaaaataggactaatacaacaatgtagcaccatcactaggaaaagaacacttattgcagtatgagagctgaaacaacaaggcagggcatggcctcatttgaccttaaatgagaatgcatgcaytgggtaactcaaattctagagccctacgtgcatgtctgtgaaagcattgctgagtaacaagttcggacaaaaaagcactgctgactgttgattgtgaattttaccaagtaggaaattcacaaa

SEQ ID NO: 247570 - DNA, 566 bp, Homo sapiens
tgactgtatgatttccactatttcaagtctcttaacgtgtattatggccaaggtatggtctatcttggtgagtcctgtgtgtgcttgagaagaatgtctaacgtgctactgttgaatggaatagtctacagatgtctattatatcaagttgactgatggtgttgctgagttcaactatgtccttagtgattttctgtctgttggatacgcccatttctgataacggggtatttccaactgtaatagtggatttctctatttctccttgcagttctattagtttttgcctgagtttttattttaattaaattttcagttctaagtcttctattcagttattacatatttcatttctttgatgagattttctagcttttcatttgtttcaaaagtgtctgtaactgcttgtccaagtatcttcatggtagctgctttaaaagtytctcagttaattatagttccaacacctgtgtcaatcttgatgttggcatctattatcttttctcattcaagttgagattttcttggtgtgtgttaagatgagcgatttttactatatcctggtc

SEQ ID NO: 247571 - DNA, 461 bp, Homo sapiens
acaccttatgttggtagtttttactttctgccaacctgacaggagcaaatgataactgattgtggttagtttgcattttctccccgcacccccccttttttttttcgacaatgtcttgctctgttgcctgggctggagtgaagtggcgtgatctcagcacactgcaacctctgtctcctgggttcaagcgattctcctggctcagcctcccaagtagctgggactacaggcaygtgccaccacgcctggctaatttttgtagagatgagggaggttcaccatgttggccaggctggtctcagcttcctgacctcaagtgatctgcccgcctcagcctcccaaagtgcctgtaggcataagccactgaatccagcccccaatttttgagaatgatcatgtactaagtatatttattggtcatgtttccacatctgtgaaatacccattcaagttttttacct

SEQ ID NO: 247572 - DNA, 543 bp, Homo sapiens
acattgtactattctatttgtatgaaatgtccagaataggcaaatccagggagacagaaagtagattactggttgtggtgaggagaggatggttaatgactgctaatgtataatgtttctcttrgagatgataaaaatttgctggaattagtgttgttagttgcacaatatagtgaatatactgaaagccactgaaatatacaatttcaaaggctgaattttatggtgtgtaaattttatctaaaaataggtttaaaggattaaatttcttagtcttagaggcatgttatccttttacctacaaaatcatgataaaataatacaaaagacacactgaaaacaaccacgtaaaagaaaaaatttctgaaatacttttttaaaaagacttactgaagttttagcacaagatttctttttccatagagtccatagggtttttttgcacctgtttggaaagagctgtattaatgcttgtattaatgctgctaactgaataaattttttgttatacagagttctaagcatatacatggcactgaataa

SEQ ID NO: 247573 - DNA, 648 bp, Homo sapiens
caccgttggtcttgcaattcattttgaaatttattcttatcatacctaacttgaaagcaaatgtctcaaccaggtattctgtatacaaacagtaaattaattatcttatttcatgactcactccaactccaactcactgtgaacttggagtttctcctagaaaccctcgtggagagtggtgctcagctgtgcatcargcctttattttgggcgcaggtttctagttatagtttctacattgggcaaggaacttccttttatgtattttctgtcacttgaatgagattttgacaggtatgagataaacacatttgcttagaccactatcttgaatgagttaatatgcaagttttaaattttaaggcatattgtcaaaatcaaccttccaaaataaaatttgcatcagtttacacttccatcaacagcagaggagagtgccagttttctcattctcatgccagttctcagtgggatccctcctctgaatttttcttagcctcgtaaattaaaaaagtatgatttatatttgtatttctttgattgctagtgaagttaagcatcttttcatctgtgtgattgcttcttagcttctgttcttggaaattttctgtttaatccccatttattttctattgaagtgtttgttca

SEQ ID NO: 247574 - DNA, 582 bp, Homo sapiens
ttatttactaacaacatgatgcaattgcaattattctggaaaactcatcattaaccttcctcatgagatcactcacggctgtcattatctctgtttacagatcaagtctttcccaacctcacctgaactactgtaatttgatatttactgamttctctttcttcagaacaactttgcctttatactttctttccatttctagaaacgtgtatgaaatcttttgataaatgtagagaatggtcttttgagcctttcagagtctttttgtggatccagaccgcagctagataagaaactgtacagacctagaaccagacctgaaaggtagtataggccctgccggaacaggaattgaaagaaatgaaagaatgtgtaagcacaaactcagttgtatgtaaaaaacccaattccccctaagaaagagaaaaagctggagtcctttaaaaattaactgcctgtttttctgtggctagtgagccttatgtcgcctcctttcccaggcattgtgaagaccctgtttctctagctgtgcagctgcaaggtcactagacagataaactcaagtcataaaatatgtttttc

SEQ ID NO: 247575 - DNA, 622 bp, Homo sapiens
tggagaaagctaataagggaaccagctcagatttcatctgggtagacaaaccaatgtggccttcatttagaatcttcagggaattactggaggtgatttttcacttctcaaccttcaaatacatctctttctttttctctttctgttgtctctcttctcctatcttctgaccaatttttgcttccacatgtgtccttttttctttcttcctttcctttgcctcaattccacactcactaccagaagcagtgataggcaccaagtaygaatgctctgaaagctccttagaatccaaagttggtccatttaggccaggaatcaccttaatttctcaaagaaactcaagatttactctatctcttgactaactgcatgggaggtcagaaatcatgttctcatattatatgtacatgaaattgtctcgtagatattggattattgtgattttaggagttctggtatttcaagccctcaggcatccctcaatggaagatgcaggagaaatgataatggttccacctaagagttcttattaatagtgagtataatgtaagcataatttttttccaagtcttcatggataatagaaggaactgggatcaaaggcacttaagagtaactc

SEQ ID NO: 247576 - DNA, 570 bp, Homo sapiens
ctttaccaggccatttttgctgcaattgcccacttagagttaagacttggcataggagcaccaggaattgcccctaatgggtcctttgagtcccagagatattcctcttgcctctctctgtagcagcagctctatcttcttatgatgaatagggtcgattgctagattattaactgctaggatagtaattacaaaaggaactcagtctcactatgttttgcgttgctataacagaatacctgagactgggtaatttataataaacagaaatttattttctcacagttctggatgctgggaagtctaagatcaaggtaccagcatctgacaaaagctttcttgttgtgtcatcacatgacagaaggtcaaagggcaaagaggcaaaaagggggctgaacttgtccttttataacagattaatcccaccatgagcatggaactctcatgacccaatcacctcccaaaggttccacctccaacaccatcacaagggcaaccaaattcaacasaagttttagagaggacaaacacttaaaccatagcaaactttatatgaccatgtggcagcca

SEQ ID NO: 247577 - DNA, 565 bp, Homo sapiens
accaatttattttttgttgtaagttaattggtttctccattgaatatctgatattcaagatgttttctttatgaccttgtttaaaaggaatctcttgtgaattcactcagaatgaactaacaaaaccgagtttctttttttctttttcttttttacttcttccttcatcaaagtcttcttagctaaaaaaaaacctgamcttccaaatgcacaaaactgagggccagccttttcattcagtccttttgatcttcatgttccagtgttttgttaagtcttttatgatgggaaatttgcttcgcgaaaagtgtaagaggagaacaatttggcataatatgtgtagtgctgaattcactgaatttcatgatttattcagtcctatgaactaccactcccttattttgtgtgtgttgtactactttttagttattttccaaaagtcttttcacctctcttgaatccctgccaaggataaaggataaagtaggaggtaagaaaaataactttagtcctagtgcaagtcagtatgcacctacttcaacagttttttaaaaagatcgcatga

SEQ ID NO: 247578 - DNA, 558 bp, Homo sapiens
agtcactgaaatgacaatatatgtaacaatcaaattttgaaaacagtattaaacactgaggtttctagccttagctggtcattcctataaagtccagcaaaaaatatgatgcatgggttattaattttcatgcttctatttctttactctaaatagaaacactaaatggaaatgttcagagataatataatgacaaaaggacagtagagaacaaagcaccaacatgtggaacaaataaaataatatgcaactctgtggaggttctccatcaaatttggcaaatcagggatgacagtaaaaaatgaagatctcttactcatgtaataatcatactgatatatatttgcaaataaatggaatgcacagaaagttaaattttgaatatttttgttgtttctgagtgtgataaaactagagttgcctcattataaactaagattctcccccacctcaaaattctattgttcagaggagagagagaatgtaagattaygattctctgtgacagatgacctgggctctgctacaccacaggctaaactctgcggtgtagtgccc

SEQ ID NO: 247579 - DNA, 588 bp, Homo sapiens
cttttagcgctgcagcaattggtccctcaatcatgcaaacagcctaatgattctctttttttaaaaaaagaaaaaaacaaagctgttctgatttcctccaggaataaatctatgcttcaattattttccagtctgtggatagtttattcattttcttaatggtgtctttggatgagtaggaaattttaattttgatggagtctaatgtattgtttttttctcttatagttagtgctttttgtttcctgtgcaagaaatttttgcctgcacaattgtgcacttttatatttgactgaaaacagttttatgagattataagcagcccaattcccttgcagctgctacacctaaaggttcctatggtaaaaggaggctccctttgaactttgcataatgttgttatactttccagggaaccatccatttcgtgggttgggaagamttaataatgatgttaactaatatttgttaaatgctttgattatgtgacatttcgttaacagccttatgtacctgaaggcatttaactttctgttttttgagatggaatcttgctctgttgcccagcctggagtgcagtggcatgat

SEQ ID NO: 247580 - DNA, 558 bp, Homo sapiens
gcaatcaggcaagtgaaagaaatgaagtgcatcaaaatgggaaaggaagaagtcaaattatccttgtttgtagatgacatgatcttatatttaggaaaacctagtgtcattaaaaaaaccctcttagaactgataaattcagtaaagttgcaggatacaaaatcaacaaacactcatcagtagtatttctatatgataatagttattgatctgaaaaggaaatcaggaaatcaatctcatttacaacagttgcaaatgctgcactctgagcttgcaccactgaactccagcctgggtgacagagtgcgactgtcgcaaaaaaaggaaaggaaaatggaagggagaaagggagaaaaaaggagaaaaggsagaaaggacaaaaagggagaaaggggaaaggggaaaggagaaaggagaaaggggaagaggaaggggaaggggaaggggaagggaaggaaaggaacacttaccactggatatttggaaaaccctaacttggaaaactagaaagtacagaaaactatattgtcatgatccaaagatcatcactcataacaa

SEQ ID NO: 247581 - DNA, 614 bp, Homo sapiens
aagttctgcagacgttctactggggtgtctgtggttctgtgaagtacatgacattgtcttcacagccatatcctccagtttctggtcttctccctcccacccacactcccaagaagatgaacatttcacttcgtccactaaatgacccataagttaatatgggagttccaggtggtagaggacaccaaggtcaagtgtcacctgggtctcaagggaggaaaggtgctaagaatggcccggctctgctgtaggtaaatttctctccatctcactccaccaacctcctcatcsccctgcattctagatatatgctgcagtcacaaacagctcttgaatctcagggacttaaaacaacaaagtttatttcttgcttgtcgcttcatgtccctctcaggtgggtagagggtgctgagctcctcatcatcctcactccaatccaagctgatggagactccatcatgggcaccagtcaccctggcgtaagcacttaacacgtgggcctagtgtttcttatgatgaaatctgttttctcccatgatgtagttcttttgaagatggcataatcagggacagaaagaatgagaattctcattacagggcagtaaaaaggccaa

SEQ ID NO: 247582 - DNA, 581 bp, Homo sapiens
gcttgctggcaggccatttggcaaaatgtatcaaaagcattaaaaatgcatatgccatttgagccaggaattccatttctaggaacttaccctaaggaaacagtctaagattgaggtgccagggaattcattacatccttatttagaatgggggaraaaaactggaaacaacctcaatgaggagagcaatgttaataaataaatgtgatcataagatggaattctgggctgccacaacaagtgacattcccaaaacactaaagagaaagacagaagaaaaaagcagtatgatacaatacaatcctatttttaaaatttattttactttatttttatttgtttgtttggttgtttaaacacagagtctcactctgttgcacaggctggagtgcagtggtgcgaccacgactcactgcaggcttgacctcccaggctcaaaagatcctccctcctcagcctcccaagtagctgggactacaaccacatgcagctaattttaaaattttttgtagagatggagttccactgtgttgcccaggctggtgttaaattcctgggctcaagagatcctcccaactcag

SEQ ID NO: 247583 - DNA, 595 bp, Homo sapiens
atgtttagatctggtgaatattacagctggtcactctttatacagcttgaaattggggattggtaagtatacagytgtagattgtacttgatagcttacttaatatttaatggtgctgcagcataagatatcctcttaaatggaagattaaattacccagtggattttaatgtttcttctaaacttctacttgagtgtgaaacctaatgttatcaatattaaaactattgatattaatcaactcctgtccctaagcaagaaaggaaaactaactggaaataagttgaaggaatatcaagagttaccttaaatataaaatacttaagtcattacttaatatccttgatagggtcttggaaactgcaactttaagtgaaaggacatataacaaaaccaattttaccataggctaactgatataaacaagagttaagtttctatggcatctttctggtcacagaaacatcactgaacctctaaataaagacacaaagcacttctaatattaaacattgaaataaatgtgagctatgctcacatttaagaaagattacaaagaacaagaaacataattacttacccagtttttggtgaa

SEQ ID NO: 247584 - DNA, 595 bp, Homo sapiens
atgtttagatctggtgaatattacagctggtcactctttatacagcttgaaattggggattggtaagtatacagttgtagattgtacttgatagcttacttaatatttaatggtgctgcagcataagatatcctcttaaatggaagattaaattacccagtggattttaatgtttcttctaaacttctacttgagtgtgaaacctaatgttatcaatattaaaactattgatattaatcaactcctgtccctaagcaagaaaggaaaactaactggaaataagttgaaggaatatcaagagttaccttaaatataaaatacttaagtcattacttaatatccttgatagggtcttggaaactgcaactttaagtgaaaggacatataacaaaaccaattttaccataggctaactgatataaacaagagttaagtttctatggcatctttctggtcacagaaacatcactgaacctctaaataaagacacaaagcacttctaatattaaacattgaaataaatgtgagctatgctyacatttaagaaagattacaaagaacaagaaacataattacttacccagtttttggtgaa

SEQ ID NO: 247585 - DNA, 568 bp, Homo sapiens
acctgtggtcctagctacccaggaggttgtgacaggatcactcgagcccagaagttcaaggctgcagtgagctgtgatggcaccactgcgctgaagcctgaatgagcgagtgagaccatctcttaaaaagaaaaaaaaaatcaagtaattgctgtaamtattattttgatttgacgtttagtattgtaacatcagctaaatatttagtatgctaagtgtgcatttatttgttaccttcatattcagaatgcagcactgactctttagtaagaattaacaactaactttgttgaaaacaatgaattgtagtgttagatgaaatcatttgctttaagcatagttatcaccgcaccatttaacaggtaaatcccttatctaattatggctagaaatgtttgaaagaccacaaaatgtggggaaaaacatgatttagtgaaaagaatgtaggctttggagtcagactttggatcaaatatctgctgtgtactataccaccagtaaggctatggtacttacctgaatcttcctgaactatagtttcttcatctgtaatatgaagacagtaata

SEQ ID NO: 247586 - DNA, 541 bp, Homo sapiens
catcatctcttcttttccatgaccatttcagactagaggttagaattccataagcaagtgcagcttctcttttggtggaagattaatacagaatcaccttcacctgttgtatgccctgccatcctggctactaatctggcttggggcttaggttccaytgctgactgctattgggcttctaaactgtttccctgacccctttatattggaccttctatgccagaattcccaaacccaaaaccctctgattttcctggttcgtagccctgaaagtcggcttcagtttgcacttctattaattatttttattcacctatattgtcccctaatctcctgataaggatgtgatttctcatagataaatctccaaagtacaggaagcccacccaaattctctatctctatgctctgactactaggatatcctgtttgctacccaattatgagaccctcctgtcaactgtttttgtatacagtggcttgcaagacaatagcggcattatttatttgctcccctctaacaggtcttagaataagtaga

SEQ ID NO: 247587 - DNA, 541 bp, Homo sapiens
catcatctcttcttttccatgaccatttcagactagaggttagaattccataagcaagtgcagcttctcttttggtggaagattaatacagaatcaccttcacctgttgtatgccctgccatcctggctactaatctggcttggggcttaggttccattgctgactgctattgggcttctaaactgtttccctgacccctttatattggaccttctatgccagaattcccaaacccaaaaccctctgattttcctggttcgtagccctgaaagtcggcttcagtttgcacttytattaattatttttattcacctatattgtcccctaatctcctgataaggatgtgatttctcatagataaatctccaaagtacaggaagcccacccaaattctctatctctatgctctgactactaggatatcctgtttgctacccaattatgagaccctcctgtcaactgtttttgtatacagtggcttgcaagacaatagcggcattatttatttgctcccctctaacaggtcttagaataagtaga

SEQ ID NO: 247588 - DNA, 497 bp, Homo sapiens
ttgatagaggcttgtcaatctgattgattcctttaaagaaacagctttttgtttcattgattttctctattgcctttctgtttttgtttttattaatttctgctcttatctttactagttcatttctttgtcttgttttgggtttattctgctcctctttttttaagtttggtcatgggagcttagattatgtatttgagacttttcctctttctaatgtatgcattaaatttccctctcagcatttstctagctatgtcccacaaattttgacatgttgtattttcatcttcatgtagttcaatgtattcttgtttccccttgagacttcctctttgacccatggattctttagaagggctctttcatctccaagtttaacagaaatgttatttccaaaataacagaaagttttcctttctgttatttgtttttaattttattccattgtgttcagacaacacactgtatgatttacttattttaaattgttgagg

SEQ ID NO: 247589 - DNA, 574 bp, Homo sapiens
ttttccttaaaatgttcctatccatagatatcctggctaatgaggccgagtcatgtgatctaaattggcagatgtttcactgaagtcactaagagtttggcgtaaataaggattgaacaagaatttaggattaatttccttggtcccaaaaggtggactaagtttttgggacccttgtttaaaggacttgcatccagattgccatccaccatctgggtacttgacaaaaagaatttgggtttttaaaaaaagtctccccttagtccacttctaaacccacgtaaaagcagtttggaactggtcagagccccacagaaagaaataggagactgagatttttggataaaagtttttcttttttatggagataattggcaataatactgactttcagcctagactccatatcctttatctcgatcagaaaacattttggatagaaaggtggggtrggagtgagctcattgcctgcagtgactcccgcacagggaccctgaataagacattcattggcagaaaagcagtggttactgaaaatggctgggggaagcgtggagaggagggggagtggagc

SEQ ID NO: 247590 - DNA, 598 bp, Homo sapiens
ataagaataggtcaccatcggctcagaatctgtacccagcacacgttctcctgctgatcctagcataggatcaaagcccatctkcttctcctctctaatttctaggtgctggcttcccacaatcactctttccatgacactgtgtttttcaacctcatcggatgcatgaggaggtgtctttaaagatcatcagtcccactagggcacgagagggctcagaagttcgactatctggcctgctattccccatttttatagggatgagggctgaccctaggtgccttctttcctcatctccccacctggactggccctcggaggtgtggaacacatgtagtgtgtttagtaagaaaattaacacgtactatttcctatcacattaaatatgaaactgtggtggaaagcaaactttggggaaaggtaaactcctgttttgttaatgctttggcaagatttcccccaatggctctgtgcttgctctaagctggatttacaccaagctcacccttctcagcacctgtttttctcttatgtaagggaaaaaaatgtcttgaaaatctgcactgggcatttgccatgctagactgagaaacaccaa

SEQ ID NO: 247591 - DNA, 456 bp, Homo sapiens
tctggactcttgccagtagattttgtctgactcttgytctgatgctattctttgttattttcaggaaggggagctagatgtagaatacatttctttttcttggtaacgtgaacagcaagaagcaagtagagtacatttcttatgagagaatatgctcgggactttgattcatatctggtgggtcccaaaagaccagggtactgcagatttaagaccatgttgcaaattcggcatgcattcaataggactaccttagtgaggggagtaattttataaaattatcaattcagtctcaaagaataatagcaggaaatgtatttctgactatttagaagtgactcattgtgggactgtttgaaaactatattatttttatcagtaaatagaattgcctatagtcaatgttatctcttcacatccagggattctaagatccggttacccatttccctcaaa

SEQ ID NO: 247592 - DNA, 514 bp, Homo sapiens
agcagggaaggggacaaaaggattacagtcagaagaataatcactgattaatacccagtcgtgtgctcagagttatatcatgacagaagggaaagaaactccaaagagcatgaagtcagtaccccttctaccttcccagcccatttacagatgagggaaggaaaagccctggctgttccaatgaagtcagcactttcataatcataagacagcagtgaattaggatgcagttcacgttgtgtgaactgagtcgtggtgcccaccattgagttatgctactcaaggggctcaggagtagcttatgctactcctgggagcacatgctcagctctgggccaccagttttaaaagacactcgggattacctgaagaggaccagccaggatttagagaagcctggactccacatgagaagagaagcagtaggaaggattggggtctcttgcatgtggaagaggagactagaagrgaacatgaaaaccattttaatcagtctaggaacaagtggacttcc

SEQ ID NO: 247593 - DNA, 584 bp, Homo sapiens
atgggctcacatcttaacagccttatagtcaggtaggaaggctgtttctaagttcctgtccaaaaatccaaaaattaactaaatgtctgccatacactggacacaggccaagacacaggatgcatcagtgagcaaaacaaacatccatgtccacgtggaagtgacattctcgaggaactggcctagggagatttagatacccatcccaccttcaagtacctctctggtccatcctttgcaccctgggaacctctgaccatgtgcctgcctgtccttgctcaaaarcttgcttggttgtactttcttagagtatctcattcaaaatccccaatatggtagtcagggccctctacaattgggctccaatttctctactttctccatcatgcactcagctaaaaatagaaaggaaaagaggcctttgtggttccccaggcatgttcttcacttttgtacctctatcctttatcagattcttcttttagcttggactctcccactaccatctctcctggaaagtttaactttctcttaagctctatctcaaatacttatctcttctacgaagcctttcccaatttctc

SEQ ID NO: 247594 - DNA, 584 bp, Homo sapiens
atgggctcacatcttaacagccttatagtcaggtaggaaggctgtttctaagttcctgtccaaaaatccaaaaattaactaaatgtctgccatacactggacacaggccaagacacaggatgcatcagtgagcaaaacaaacatccatgtccacgtggaagtgacattctcgaggaactggcctagggagatttagatacccatcccaccttcaagtacctctctggtccatcctttgcaccctgggaacctctgaccatgtgcctgcctgtccttgctcaaaagcttgcttggttgtactttcttagagtatctcattcaaaatccccaatatggtagtcagggccctctacaattgggctccaatttctctactttctccatcatgcactcagctaaaaatagaaaggaaaagaggcctttgtggttccccaggcatgttcttcacttttrtacctctatcctttatcagattcttcttttagcttggactctcccactaccatctctcctggaaagtttaactttctcttaagctctatctcaaatacttatctcttctacgaagcctttcccaatttctc

SEQ ID NO: 247595 - DNA, 594 bp, Homo sapiens
aggttgaatgtaaaacccttaagacctgtgctttctgtgggtcatgggtccaatgtgaatacttagagaatgttgaatcacactaacataatacagataattttgtttgttataaaaatatatattctttctttttttttttttttgagatggagtctcactctgttgcccaggctggagtgcactggcacaatctcagctcactgcaacctccacctcccrggttcaagtgattctcatgcctcagcctcccaagtagctgggactacaggtgtgtgtcatcaggcttggataatttttgtatttttagtagagacaaggttttaccatgttggccaggctggtctcaaactcctggtgtcaagtgatctgcctgcctcagcctcccaaagtgttggaattacaggtgtgagccactgtgcccggcctggaaatgtattttcatgtgtaaagagttcatatgcatcaaggatcgtttgtcttgtgctgttgttgctggaagtctagcttgctcatgcaacaggaaggtgagggcatagcaccggtgttggctttttgagagataactgaggggctgaggaaagaatgaaactg

SEQ ID NO: 247596 - DNA, 594 bp, Homo sapiens
aggttgaatgtaaaacccttaagacctgtgctttctgtgggtcatgggtccaatgtgaatacttagagaatgttgaatcacactaacataatacagataattttgtttgttataaaaatatatattctttctttttttttttttttgagatggagtctcactctgttgcccaggctggagtgcactggcacaatctcagctcactgcaacctccacctcccgggttcaagtgattctcatgcctcagcctcccaagtagctgggactacaggtgtgtgtcatcaggcttggatartttttgtatttttagtagagacaaggttttaccatgttggccaggctggtctcaaactcctggtgtcaagtgatctgcctgcctcagcctcccaaagtgttggaattacaggtgtgagccactgtgcccggcctggaaatgtattttcatgtgtaaagagttcatatgcatcaaggatcgtttgtcttgtgctgttgttgctggaagtctagcttgctcatgcaacaggaaggtgagggcatagcaccggtgttggctttttgagagataactgaggggctgaggaaagaatgaaactg

SEQ ID NO: 247597 - DNA, 594 bp, Homo sapiens
aggttgaatgtaaaacccttaagacctgtgctttctgtgggtcatgggtccaatgtgaatacttagagaatgttgaatcacactaacataatacagataattttgtttgttataaaaatatatattctttctttttttttttttttgagatggagtctcactctgttgcccaggctggagtgcactggcacaatctcagctcactgcaacctccacctcccgggttcaagtgattctcatgcctcagcctcccaagtagctgggactacaggtgtgtgtcatcaggcttggataatttttgtatttttagtagagacaaggttttaccatgttggccaggctggtctcaaactcctggtgtcaagtgatctgcctgcctcagcctcccaaagtgttggaattacaggtgtgagccactgtgcccggcctggaaatgtattttcatgtgtaaagagttcatatgcawcaaggatcgtttgtcttgtgctgttgttgctggaagtctagcttgctcatgcaacaggaaggtgagggcatagcaccggtgttggctttttgagagataactgaggggctgaggaaagaatgaaactg

SEQ ID NO: 247598 - DNA, 556 bp, Homo sapiens
gttgtctagacgtaggtgtcgttctggattgcctccaaggtcatgcagagcaagggcggccaagtaggaacaaaccgaacacgccctcattctgaagctgggagagctcagcctgacctgtgaagcaggcaaggaagccccaactccaagtcttttgcttttctacacctagcaccttctgctctgccaaatttgtctgagtttggtgccttatttctgtccactgcagtggtagccatactttcctctcataaccttctgtttgtgggctctcttcaaccttgaaggcctggaaccttatttatatttgaactcatttttacgcactctcgttcagattatctgggtgattccctgatgcctgctgctgtaaaacttatatctcatgcccagaataaaagcatatcacattgggaaacatttctattttgagggggccaaatgaggtacctagtcattgattctygccaaccctgtcctgtatccccagtgtctgtgtgacctctgatgattaagggttgtaaaagagtctccagtctgggaagggaagctcagg

SEQ ID NO: 247599 - DNA, 559 bp, Homo sapiens
cttcctgtcttcagtcttacacacactcacacttacacacacacacacggccaggattaaggtaagttgagtaaaacacttgccctgggcacaaaacttaaggagatgccaaaaaaaaaaccccacagtaatcaagataaataatattttaatgcaatcttttttaaaaatcagaattaatgttaaaaacccacgatgcacagaatatcaaaactttaaacagaggcaggatcagtattattgatttttcctttgcctcaggctccaatacagtttgtcatggcatggtactgtaactgatcctgcgtttatttaaagtgttgatrttttgtttattatggattttcatgttaattatgattttgaagatatcacattaaaatgatgaagacaaaaatgatttatcttgattactgtggtttctggagccccgttcaattctgagtgcctcactggccacccccagtcctggccctgaagacacaggagtcagacagacacatacagacagacaagcacaggtagacacacacaaatgccctctctacagttcacagga

SEQ ID NO: 247600 - DNA, 586 bp, Homo sapiens
tgctgcatcttttggccattgttcttaacatcatttcttctatgctataaaaatcgctgaatgaggacaaagtggagacatgtttctgccatcctgtggacaggcttaggtataatgtttttgagtattaaaaacacaaagtgttgaggagggtgggactaggcagggcagaatcatctgattgtaaggtggctcttatatgatattaggacagtccratactcaaactccaaagagcatcattgctgttctgttttgtttttcagtcagcaaacatttattatgtacccactatatgtgaggcaatgggctaggttctgggtttacaactatgaaattggcccgggcgcagtggctcacacctgtcatcccagcactctgggaggccgaggcaggtggattccctgaggtcaggagttagagaccagcctggccaacatgataaaaccccatctctactaaaaatacaaaaattagctgggggtggtggcacgtgcctgtaatcccagctactcaagaggctgaggcaggagaattgcttgaacccaggaggcagatgttgcagtgagctgagttcatgccactc

SEQ ID NO: 247601 - DNA, 584 bp, Homo sapiens
ttatcaggtggagttttcctgcacaagctctctttgcttgctgccatccatgtaagatgtgacttgctcctccttgccttccaccatgattgtgaggctaccccagccacatggaactgtaagtccaattaaacctctttcttttctaaattgcccagtcttgagtatgtctttatcagcagcacgaaaacaggggtgggagtggatgggccgtaagctagggaaacatagattagcggaggaaccctacacatggaagtcacctyagactcccaaatcctgtgatacaagtttagcattggaaaaaaaaagtctttccttgtttcttttctttggaggataggggctgaaggggagctgaagccaagcatctccttgcatatctcaggttcagtgacagaagagcttttggaccctgcataccttttaaaagcagttaccttggctttcataaaattgaatgtgaacgtaggtcctctttgtgtagagaattgttaccaaatcctcccagaggagaataagcacatgatgagagcttaaatagagggaaatggatctctccgctctctcacactggtggcaga

SEQ ID NO: 247602 - DNA, 584 bp, Homo sapiens
ttatcaggtggagttttcctgcacaagctctctttgcttgctgccatccatgtaagatgtgacttgctcctccttgccttccaccatgattgtgaggctaccccagccacatggaactgtaagtccaattaaacctctttcttttctaaattgcccagtcttgagtatgtctttatcagcagcacgaaaacaggggtgggagtggatgggccgtaagctagggaaacatagattagcggaggaaccctacacatggaagtcaccttagactcccaaatcctgtgatacaagtttagcattggaaaaaaaaagtctttccttgtttcttttctttggaggataggggctgaaggggagctgaagccaagcatctccttgcatatctcaggttcagtgacagaagagcttttggaccctgcataccttttaaaagcagttaccttggctttcataaaattgaatgtgaaygtaggtcctctttgtgtagagaattgttaccaaatcctcccagaggagaataagcacatgatgagagcttaaatagagggaaatggatctctccgctctctcacactggtggcaga

SEQ ID NO: 247603 - DNA, 638 bp, Homo sapiens
ttaataataagctccaatggagacttttaatcatgtttgtaagggctgccatttcaaagcaacccattagaaccaaagccttcattatttgagagatgtttttatgggaagtctgttgatatcacactttgaaagtgaattaatgatgagcttgggtaaattgaatattcaaaaagaagtcaaggaaggcccccatgggaaatatggcatatagtgtggtagtaaatggggttcctgtctcatcctcgtaggttgcagctctgaactctggttcccctctctctcttgggttgctctgccaagaagagaccagttgaagaataacactgtatttcactatatggcattgttattacttctatttgcatattaatgttctagaatcagatggcagtgcaactacatacatgacaccagggagtataggaagaaggagygggtggtttactacaggacacagattcctgtgtttgatctaaaaaataaaaaggcagtaaatacaaaatgtttttaaacaagagaagctttaaacctcaatgggctttggttcttgggcttgttagaacagtttggtctttgaaacactgagtgagctctcagggagagctgagcacttggaagcagaagcacatgcattg

SEQ ID NO: 247604 - DNA, 610 bp, Homo sapiens
ttcgggaaattgaacagttcttgtattttcttgcttccttatctttgctcatttaattccatccakctgaatgatctttccatccattagctttggacaaatagtgtttaatgtatttcaggcccttgagtacaaagataaataaggcacagtctcgtcccataagaatcttatttagtgtgtgagtgtgtgagttggccatatcaacaagcaattccagtaaaatttggtgagtgatttgataagtttctatgggtagattaactatggtcaccaattctttgtggctcctcttatgaaaaagaggattctctctcacctccctgggcctgggctgtccctgtgtcttgctttgacctatagaattcagtggaagtgacactgttgtcatttctgagccttggcctctagaggtcttgccagcttctgccctccctcttggatctcagctgccataacaggacacccagtgaagtggactggataatgagaggccactcagaagagaatggaggtggctcagctgatggcagcactgtgttaatcatgttttgtattttctgtattgttaagatgtttggacatcttgcaggtctttcagacctgggga

SEQ ID NO: 247605 - DNA, 561 bp, Homo sapiens
ctatttattccaaaggaaggaagcagaggaagattgcatggtaaagccgggttgctgggcaaatgattccattgtcgtagaacgtggaaccagagttttgggcagaaatggcctggggaatggtgaatttgctcagttgtgcctcctaactgagttttttcactttgcgttggtggcttatgttcatggtttcataggtttaactgtctgattggtggccactttgagcacaatgggattgttaacacttgttggttgtatagggtcaaagcttatacacggatgagaattgactgctcagaccaagtgtttggcaattctcagtctgtattttgttctttaacttgctctaaaattcacaatagagttaatctattcctcttctcgagctttacttattttcggaattaattatagttggccctcattatccacagtttagctttcccaagtttctgttacctcaactgtggtccaaaaataggttaagtacagtacattaagatatkttgagaaacagagagagacagagaccatattaatataaattttattacagta

SEQ ID NO: 247606 - DNA, 633 bp, Homo sapiens
tcacgtgtagccattgttctactgacacagctaagaagtgacgcacttctcacctcggttgtgctagaaactgctcttattaatttcttatgagttctctggctaaatccctacagcagatgtttaaaacttactctaccttccagaactctgactgtattcttgcccccttctcagtcataggtgacctcaaatcttactttacaaaaaaatttaaaaagatgaggtcatttgacttgagctatgtcctttgcaccccagaaatcactgtattttcaccctttctcttgtttcattttgattttgagaaatctagtcccttctttgttccattgctgggctcttcccatagctcttgacaccatccctgatgccatccctcttacttccttagtgccttgtgtcaccatctagccctttctttcttgcatgttcagtcccttcatttcaacrggtgccttcttatttgcttacagaccatggctactgtggtctagaggaagcttctctctgtcctgctgtcccgtaagttcctgcttattctctccctcactcttttttccagcaggtggctgcatcccggcacccaagggccatctcctgatctcctgtgggatggccctctccacacag

SEQ ID NO: 247607 - DNA, 568 bp, Homo sapiens
actgcttttaacattcattacatacatacaagtatctgtggagcactactgtgtgtgccaggcacagtggtaagggctttacataactttttaggataattctcaccaggatctgtcaacagccaccatcaccccccttctacagrcaggaagtagggtccctgagagacccagcagtttgcttagagtgataggatctgtagaggagggatttcaacccagggtgctttactgttgagccttctcccttctcccagctaaactgccttaaccacctccagctctgtggattatccgcctatctaactccatctgcagcccccaccctcagctgcagcctcttgggagtagaatacccccaaggttgacctctgggtcccccttggcctcaccccatagagggagctggggatgatctgttaactaatgtcaaatcgatgcttgagctttcttatgaaattgcatggcagtaaaacctttggctccaaagactgtagccaatactacatgcataaaaatagtctagccgtcaggaaaatccacagttgagtgttagtggctagcacat

SEQ ID NO: 247608 - DNA, 568 bp, Homo sapiens
actgcttttaacattcattacatacatacaagtatctgtggagcactactgtgtgtgccaggcacagtggtaagggctttacataactttttaggataattctcaccaggatctgtcaacagccaccatcaccccccttctacaggcaggaagtagggtccctgagagacccagcagtttgcttagagtgataggatctgtagaggagggatttcaacccagggtgctttactgttgagccttctcccttctcccagctaaactgccttaaccacctccagctctgtggattatccgcctatctaactccatctgcagcccccaccctcagctgcagcctcttgggagtagaatacccccaaggttgwcctctgggtcccccttggcctcaccccatagagggagctggggatgatctgttaactaatgtcaaatcgatgcttgagctttcttatgaaattgcatggcagtaaaacctttggctccaaagactgtagccaatactacatgcataaaaatagtctagccgtcaggaaaatccacagttgagtgttagtggctagcacat

SEQ ID NO: 247609 - DNA, 591 bp, Homo sapiens
atttactctttgagttagtgtcctcatctgataaggcagatattagaatatctctcttgcctattttgggtagttaaatgtaagcgtgtattaaaatgcaccatacacgtgaaagtggtcttcaactggcaggttttgttatgaaaccatgatcatcaataaaatgagagcaggagaactacactgttcaacctggcagccactggccacacrtggctattaaagcccttgacatatgattagtgagattgaggaactacattctgacttttatttcattaatttagatttaatcagccatgtgtggttatttgctataatagtggacagtacaggagatggtttcagctggaggggatctcggagaccacttagtccagtcccttgatttcacagataagactgaagttcttagtggggcagcaacttgcctaaagtcgtatggtaagttagcagagagcaggttcagaactaggtcttctaacaccctgatagtctccacttcaaaaaaatctgaatatccctaatttcaaccaggagattaggaaagaagattgatcatcatcaacctgcagttcattgaaataaaca

SEQ ID NO: 247610 - DNA, 514 bp, Homo sapiens
gaatctctgttttcttgtctgtaaaataggaataaggaatatctagtgctgttcctgggcttagagggtatctatcttcattaaatattaacttcctttggctaactgagtttgcattagtggatggctttgtaattaagaaatgtaatgaatgcttaaaaagtctccagactctctactaaaaatacaaaaaaaattagctgggcgtggtgacgggtgcctgtagtcccagctactcgggaggctgaggcaggagaatggcatgaacccaggaggcggagcttgcagtgagccgagatcgtgccactgcactccagcctgggtgacagagcaagactgcatctcaaaaaaaaaaaaaaaaaaaaaaaaaaagtctccagacaacaatgagatactactgtgyacttttaaggatggcaaaaataccaaatgcttgaaacaccaaatgctggcaaggatgtggagcaacaggaagtctcattcactgctggtgggaatgcaaaatggtacagcc

SEQ ID NO: 247611 - DNA, 610 bp, Homo sapiens
tggtcctgtttcccacactcttgagtaagatcaacattttacagtagttctcctttatccatgggattataccatgctgcacaatttaaaatgtataagttgtttgtttctggaattttccatttaatactttgttttctgaagttttagttaccctggtcayctgcagtctgaaaatacaaaatggaaaattccagactgtggctgaccagaggtaactgaaacctcagaaagtaaaaccatagaatggggttgggtggggtgggtgcaagctccagtatttttgcaaaatatacaaagtgaaaaacagtatcttgttttaacttacattccttgatttttttagatagctaaaaatgttatgtgtttattggctgtttgctttgtttttgttgcaaacttatttttctattgaattgttcagttttctgttgctgattttttaattgctttgtatataaaagaaattaaccctcttcctgttatataaattgcagactttttttttctatcctgtggtttatctcttgactttacggtattctagtcttgaaaaagttttaacttttatataagtaaatttatcaatcttatcttttatgtctgtcac

SEQ ID NO: 247612 - DNA, 610 bp, Homo sapiens
tggtcctgtttcccacactcttgagtaagatcaacattttacagtagttctcctttatccatgggattataccatgctgcacaatttaaaatgtataagttgtttgtttctggaattttccatttaatactttgttttctgaagttttagttaccctggtcatctgcagtctgaaaatacaaaatggaaaattccagactgtggctgaccagaggtaactgaaacctcagaaagtaaaaccatagaatggggttgggtggggtgggtgcaagctccagtatttttgcaaaatatacaaagtgaaaaacagtatcttgttttaacttacattccttgatttttttagatagctaaaaatgttatgtgtttattggctgtttgctttgtttttgttgcaaacttatttttctattgaattgttcagttttctgttgctgattttttaattgctttgtatataaaagaaattaaccctcttcctgttatataaattgcagactttttttttctatcctgtggtttatctcttgactttayggtattctagtcttgaaaaagttttaacttttatataagtaaatttatcaatcttatcttttatgtctgtcac

SEQ ID NO: 247613 - DNA, 598 bp, Homo sapiens
caggcaggatacagagttcttgatggtgtagtttgtatttttccaaggtagatcttaaactggcaacataattacacttactcttgtcttttaggctaaaaaataattgtcagtacttgtggaatgtcaatatttctgtgttgcttaattagatcatagagratgctcagtttcctggagcatgttttctttttgtttggtttgttttgagagaaggagattagcagggtacagaaagccaattctctgagattactggaaaataaagcatttacataaatagttccagaaagatttatatggatctattttcaaaaattatagtctgtagacttgcaggtaaaaaagctccaagcagggaaaataggcagaattagtttctcaggaagaacatgtgtttggatgcctcttaaatttatgattttaggataatctaataccactataattatactactactatatatttttctacatgatactccggtttagctcagcaagagttacagatgtttgctaattcctgaagcatctgaaacaggtattaagtcattcacctaccgatatttaatgagccctgtctaggagcaagacatta

SEQ ID NO: 247614 - DNA, 609 bp, Homo sapiens
ctgggcgacaaggcaaaactccgtctcaaaaaaaaaaaaaaaaaaaaaaaaaagaatatgtttgtcttagtcatgaccttagggaaaaaaattcagtattttccaccaaatttcctgagtcttaaaatcgcaggtggctgatggtggtacttagcctctgtaattgcatgagccaatttctcataataaatataaacttactattaagggaggagaccacccctcatattgtyttatgcccagtttctgcctccaaagaaagaagtaaaagctaaaaggcagaaatgaaatccacaagcagacagcccggcgccacaccctgggcctggtagttaaagatcgatccctgacctaatcagttatgttatctatagattatagacattgtatagaaaagcactgtgaaaatccctgtcccgttctgttccgttctaattaccggcgcatgcagcccccagtcacgtaccccctgcttgctcaatcaaccacgatcctctcacgcggacccccttagaggtgtgagcccttaaaagggacaggaattgctcactctgggagctcagttgttggaaacctgagtctcgcggaagcggaagctcccggccaaat

SEQ ID NO: 247615 - DNA, 612 bp, Homo sapiens
cggtgggcctttttaatctagaaattcctgtcattccactttggaaatttccttgaattkttcctttgactgtttcttcatgtatgttcttttgttgttgttccctctttctgtaattcctatcattgagatgttagacctcttggactgatcatctaattttcttttttacttttctctgctgttttccttctctttgattttttgctctactttcctcaatttaccttctagtctttgtattgagatttttgtttcagctttcatatttttaacttccaaaagcttcctttcattgtattaatgtccctcctggacattgggtatcaaattgctgataccctgatctgggtatcaaattgctttttaaacagttctcaggcccacctacacccctcacttttggttgaacctgtattacagatttctgagcctttggcgggttctatggtgacaaattgctccttgctttccccagtgctgactaggaattcagctttcatagatctcagtcatttatccttccctagatgctttccagtttccaaactgtacatgttagagtggggcaggggtgtgagtaagtcattacaaattccatttactgtcatt

SEQ ID NO: 247616 - DNA, 497 bp, Homo sapiens
tgcaggtatctgggttaggatatcaacatatcttttttggggacacagttcaatccatataaaggccttttgctcctgcctttcatctacctggagatgcagcaacatcttgtgactatgaggctacaaacatgaggaaacaagtttacaagctaaagctggtggaaaggaaagctagggaaaaagaaggagtctgacagcattactacacagttgaactactgccagcaaccactcacctctagacctcttgctaggtaagaaaaataactccaggttacttaacctctgccaggtttctttcacctgtagccaaaaacattccaatgcakacacaaaactttccctagttcataataaaattagaaaaataagtaaggtaataaaattttcatagatctggattcattaaatttaaaggactaatctttgttctgaaattatgttattcccacttttaaaaaattaaaatatcctttcttttatgaaatgacggt

SEQ ID NO: 247617 - DNA, 570 bp, Homo sapiens
aagtctgctacttcccgttaaagcagcagtggtgtgattactactaacagtattactagtttttattatgatgacaatgctagaacccatcagctgctgtgttaagggctttatatacatcaacatttcaaattctgacaacaatcttgtgactatcatcactcctatttaatagaacacaatgatgaagcccaaagaggttaaacagtgggcccacattttccagtacagacyaacagagctgatttgaagtcttggggggtggttgatcaagaaaggaagccaccgtatcctacgtgacactggccttgtatggaagtacccaacagtgctgtgaaggccttcctcctctcccagtctccttctggacttgcgctttcatcacttaaaactctatttttttacattgccaaatgctcttcattctgtcagaggaagcatatttagctatgatcaatctgctttcattaaatctttagtgatgctgagggaaacgaaaaactacttgaagcagacatcagggacctgggcatctaaacaggctctatttcttacttgctttgtcatctg

SEQ ID NO: 247618 - DNA, 570 bp, Homo sapiens
aagtctgctacttcccgttaaagcagcagtggtgtgattactactaacagtattactagtttttattatgatgacaatgctagaacccatcagctgctgtgttaagggctttatatacatcaacatttcaaattctgacaacaatcttgtgactatcatcactcctatttaatagaacacaatgatgaagcccaaagaggttaaacagtgggcccacattttccagtacagactaacagagctgatttgaagtcttggggggtggttgatcaagaaaggaagccaccgtatcctacgtgacactggccttgtatggaagtacccaacagtgctgtgaaggccttcctcctctcccagtctccttctggacttgcgctttcatcacttaaaactctatttttttacattgccaaatgctcttcattctgwcagaggaagcatatttagctatgatcaatctgctttcattaaatctttagtgatgctgagggaaacgaaaaactacttgaagcagacatcagggacctgggcatctaaacaggctctatttcttacttgctttgtcatctg

SEQ ID NO: 247619 - DNA, 570 bp, Homo sapiens
aagtctgctacttcccgttaaagcagcagtggtgtgattactactaacagtattactagtttttattatgatgacaatgctagaacccatcagctgctgtgttaagggctttatatacatcaacatttcaaattctgacaacaatcttgtgactatcatcactcctatttaatagaacacaatgatgaagcccaaagaggttaaacagtgggcccacattttccagtacagactaacagagctgatttgaagtcttggggggtggttgatcaagaaaggaagccaccgtatcctacgtgacactggccttgtatggaagtacccaacagtgctgtgaaggccttcctcctctcccagtctccttctggacttgcgctttcatcacttaaaactctatttttttacattgccaaatgctcttcattctgtcagaggaagcatatttagctatgatcaatctgctttcattaaatctttagtgatgctgagggaaacgaaaaacyacttgaagcagacatcagggacctgggcatctaaacaggctctatttcttacttgctttgtcatctg

SEQ ID NO: 247620 - DNA, 537 bp, Homo sapiens
cctaaaaaagaattgccttgaacagtttgggctgctataatagaataccacaggctgtgtggcttcaacaacaaacatgtatttctcgcagctctggaagctggtgaattgccctcttcttggtttgtagaagactgtctttttgtgtattcttacatagtccagagagatcatctctcttacttatcttcttataagggcactaatcccactcatgagggctcccctcttatgacctaatcrcctcccaatgtcccacctcctaatgtcatcacagagggggctataatttcgacatatgaacttggcagggacacattcagcctataacaagaatctagatgccagtggttgaaagaggctaggatgaccttccaggtgtctgcaatcatacaactgatagcagtgctacatcagtatgtggttaataggtgataagcatctttccaacttatatattatgccatctctgacactcttatcgttttgcagattagtggcaggctaatttcatttgaatgagttattggaattttc

SEQ ID NO: 247621 - DNA, 537 bp, Homo sapiens
cctaaaaaagaattgccttgaacagtttgggctgctataatagaataccacaggctgtgtggcttcaacaacaaacatgtatttctcgcagctctggaagctggtgaattgccctcttcttggtttgtagaagactgtctttttgtgtattcttacatagtccagagagatcatctctcttacttatcttcttataagggcactaatcccactcatgagggctcccctcttatgacctaatcacctcccaatgtcccacctcctaatgtcatcacagagggggctataatttcgacatatgaacttggcagggacacattcagcctataacaagaatctagatgccagtggttgaaagaggctaggatgaccttccaggtgtctgcaatcatacaactgatagcagtgctacrtcagtatgtggttaataggtgataagcatctttccaacttatatattatgccatctctgacactcttatcgttttgcagattagtggcaggctaatttcatttgaatgagttattggaattttc

SEQ ID NO: 247622 - DNA, 435 bp, Homo sapiens
ctatgttaatgcaaatgacagaacttcattcttttgtggctgaatagtattccattgtgtatatgtatacaattttttttaatccattcattgagggacacttaggctgattcgatattgtgacttttgggattgctgaattgtatggcacatctatctttagtttttagaggaaggtcgatactgttttccacagtggctgtaccagtttccactscccccggtagtggactagtgttctcctttctctgcatcctaaccagcatttgttgttgttttttttgataatagcctattttaatggatgctatcaataatataatttagtaggatagttttagtgatacctttttgaatttatattttcataacttgtgaaatgtccctcacacctcatcttttggcctcttctctatctctaagattttgcaaaac

SEQ ID NO: 247623 - DNA, 435 bp, Homo sapiens
ctatgttaatgcaaatgacagaacttcattcttttgtggctgaatagtattccattgtgtatatgtatacaattttttttaatccattcattgagggacacttaggctgattcgatattgtgacttttgggattgctgaattgtatggcacatctatctttagtttttagaggaaggtcgatactgttttccacagtggctgtaccagtttccactccccccggtagtggactagtgttctcctttctctgcatcctaaccwgcatttgttgttgttttttttgataatagcctattttaatggatgctatcaataatataatttagtaggatagttttagtgatacctttttgaatttatattttcataacttgtgaaatgtccctcacacctcatcttttggcctcttctctatctctaagattttgcaaaac

SEQ ID NO: 247624 - DNA, 493 bp, Homo sapiens
catgggggtattttgaggagaaaataaastactttagtttaaaataataatacctaataataatgataataataataatatctaatacttaaatagaacttattctatgtcaggcaatcttctaagtgctttagatatattaattattttaattctcaccataaccctgtgaagaagaaattattatcaccatttacaatgagaaagtttaggcatagagaaattaagtaaaaataacacaattgttaagtgtaagagctgagatttaaaccttggcagtccggttccagaatctgttccctcaacaaccacattatattgtttatctaataataagaagaactaacacttgtgtaaggcttactacatgccagatactattccaatggtccaattaacttacttaactgtcacaatagtcctttgaggtatctgtgaggaagatgctgttattacctgtattaaaatgctctgtgaagacttccacatgtag

SEQ ID NO: 247625 - DNA, 493 bp, Homo sapiens
catgggggtattttgaggagaaaataaactactttagtttaaaataataatacctaataataatgataataataataatatctaatacttaaatagaacttattctatgtcaggcaatcttctaagtgctttagatatattaattattttaattctcaccataaccctgtgaagaagaaattattatcaccatttacaatgagaaagtttaggcatagagaaattaagtaaaaataacacaattgttaagtgtaagagctgagatttaaaccttggcagtccggttccagaatctgttccctcaacaaccacattrtattgtttatctaataataagaagaactaacacttgtgtaaggcttactacatgccagatactattccaatggtccaattaacttacttaactgtcacaatagtcctttgaggtatctgtgaggaagatgctgttattacctgtattaaaatgctctgtgaagacttccacatgtag

SEQ ID NO: 247626 - DNA, 621 bp, Homo sapiens
gcaaatgttgggtaaatctgaatctgaatgagaagataggggcaaaaaagatgtatgaataatataaaaataactttaaaatctgttctatttattttttgttttgttttctgagacaaggtcttgctctgttacccaggctggagtgcagtggtgcaatcatagctcactgcaactcctgggctcaagggatcctcccacctcagcctcccaagtagctgggaccacaggcacacaccaccaagccmggctagttgtctttatttttatttttaatagagacgaggtctccctgtgatgcccaggctggtcttgaactcctgaacttgagtgatcctcctgtatcagcctcccaaagtgctgggattacaggcatgagtcactgtgcccagccaaaatctgttctattaatttagtgtttataaaaacaacttgccagcttttattatggcaacttgaactttaatggacaagaaaagagatttgatttaacttcatatacttgcagtttggactgttggagaaaatattaacagcatgtccattgctgtaatgcaagctgggaattataacctaaggcagcatgaagagtgttcttaaattctagtcctgcaagtcacc

SEQ ID NO: 247627 - DNA, 441 bp, Homo sapiens
aggaggttagttattaagctaatcagggagagaccagagaaaagtgaagcgcaatgcaaggaaatccaaaaaatgatacaagaagtgaagggagaaatattcaaggaaatagatagcttaaagaaaaaacaatacaaaattcaggaaactttggacacacttttagaaatgtgaaatgctctggaaagtctcagcaatakaattgaataagtagaagaaagaaattcagagctcaaagacaaggcctttttttttttttttttttttttgagatggagtttcactcttgctgcccaggctggagtgcaatggtgcgatctccgctcaccgcaacctccacctcccgggttcaagcgattctcctgcctcagcctcccaagtagctgggattacaccatgcccagctaattttatatttttagtagagacagggtttctcca

SEQ ID NO: 247628 - DNA, 549 bp, Homo sapiens
gttcaccaatatgttagttgtttggaaaagcatagagccctgcctgcagcactgcatgcaattcatttcagagtttctcctgttctgatggtcaggacgccatggttgaaaatcagcatgaaattgtggtttggttccactttatctatggggcatcattgtttgtttgttgtttttcagcactggggtgggtgtgaagagacaaaggggacaaaactagtgcctctgttcataaaatcatgtctctyacatgtgcagaggtgacgacacatcttggagaacccagaagtgacatggcctcctcatggatccctctatctcatctttcctgtctgcaaggctgctgtttaacttcccagaccccaatcccatcctagtaagcttctacccaacattcttctatggctccttattacctttagcagtggctcccaatctgtagaggactccccagaactggggctcaggaacccatgtctcacatacagtctcacacacatgatcagcaaattatgcacgttgtttttcaatgtaggtaaatgctgttgt

SEQ ID NO: 247629 - DNA, 546 bp, Homo sapiens
taacaccacctggcatgcatattgcactctcttctgggagctctgatggtagagaacgcatggtttcatgtactgttgccgacaaacttggagctgccatacccgccctattttccagattcacatacagaggctggggagatcatagtatgtcaatggctaaagcaggtttcttaatcccaagccattgcttcttcattgaaatttcttaactatacaggatcttgaatttaggcctcttgggttcatgacmgtggctagaggtgatgagctaaaatcagaaatgacttcacttgtagtgttagtaccttttgggaagcaaagtttaaaagcatgcttaaaggacatcaaaataatccaaagaaacacagtatgtccctaggacactctgggggaagctgtacttccacacagtccttttagtccttcctggggaagtgggggagctctatcagccatttaggtgccagaccttggatagattcaggtcctcactgtggattttactgcctctagaatatggctcaacacctttttgctgctaag

SEQ ID NO: 247630 - DNA, 523 bp, Homo sapiens
tgaacacttcattagcttatgggctgctctggtggagtagattgaaaggttggctctcaattcattattttctgctcttctacttgcttgcattttataggtgggccacattttttaaatgtctcagtttgctcctgtataaaatagagaaaatcatcccagaataatcattttgataataataataacactgcattcacctggtgtttttgaatacctgctacatgccaggtactgtttaatggcaccagggatacaagtgagcacaacataattcatgccttcatggagcttacattctaaaagaggatagagaaaacacaaacataaaaataatatttagtayatcagaaagtaatacattttaggaaaaaaaaataaagcaggaatgggaggtagggagtggtggagagagaggtactatagggtataatcagggaaagtcttactgataattagaagaaagtgagggagcaagccacatggctattttggagaaagcttctaagcataggaaatagca

SEQ ID NO: 247631 - DNA, 461 bp, Homo sapiens
aaagtgcaatgtcattacaggtaggcacacagaggtattggagaggagatggcataaaagagggagaagaaaaacaaagatgagcaagaaggatattgagatagattgagaacagacaggcagagaaagacacacacaaagaggaaatgaatattctagggtcataagaaaccagggactagagatcttgtgacatcaacagaaggcagagactgcaagacaaaaggcaacttaagccatttcctggtctgttaagtcacccacggcagcacaatgtgctgagaactgatgtctgcctgtgatcattgtttacttagaaagccagctgacatgagatgaaattaacacaataggatggaaaattgctaataaaacaaaaatccctgcckttagattttcatagcctaattattcagcacgttactcactaatggcatgagacattaccatgctaatgtgta

SEQ ID NO: 247632 - DNA, 623 bp, Homo sapiens
ttcagcccctacctgattttgagcaaataaatgactcacgacatgcccttggccaaaccatggagcctcttggggcttcagcttcctctttaataaaatgggatgagtaatccttgcctcgccttcattttacaagcatgtaacaaggatgaatcaagtaatggctgtagartcctttgaggtccttggagaaatacttgctatataaatgcaaagtatgatgtccatttctattacattgtgttttgcaaataaatatataagcctatggcacatccatgtcagtgcctgtctggccagccatttgccatgtacatcttttaatcatctccatacatttattcattgaaagcatattccaaatctgtaatgcatgggttattattattattttttctttttggaagcccagggcacatgtctgttctgcctcatttcagctgctgggaattctgacagatccattgttggtgatatgtgcacggggggaggttttcaatatcatcagagacctagatccagaccaaagaaggtttcatgttcatcgtccttcccattcccttttcctgaccctcttaattgagctgttcagaaaagaggccctgtcattcttttgaaaaata

SEQ ID NO: 247633 - DNA, 475 bp, Homo sapiens
ttgcctcctgtcattcttggaagtgggagagggagctacagtttccacagtctctctttgctgaggaaatgcaggagctctatgmcttggtgttgcaatttctttttatcaattcatccttctactgtctcttatctggagatttcctgtctccttgattatgatgatccttggaatgaaaggcttaaaaaagaacttggatttcaccttatatacacatttctatctggtaataaaagatgaggggaacgaaactagccaccattcacccagagagtgaacaacatttaaaactcagaggctgacatgccacttaggtttggctcattgaagacattgggttaatgacttctctgaaaggaaaagttttactcgtatcccctatttattcaatggttttctaattgggcacctactatgttccgggtatcaacacttaattggaggggcataattagtaaccaaaaaggcacgc

SEQ ID NO: 247634 - DNA, 593 bp, Homo sapiens
ttaatattttcaggctttttaattttagccattcttgtgsgtgtgtggtgctatttaattttaatttgcatttctttgatgactaatgatatcgagcatctttaaatttgtttattgcctatccatatattttcttttgtagcatatcttttttttgctttgaattgtcttattcttattaataagattcttgattcttaataagttcctctggggtatatttaaatttaaatttgtatttatacatatgatacacacacacacacacacacacacacacacacacacacacacatatagcaaatgtttctcccagtctgtggcttgcctttttattttcttaataatgtctttcaaagtttaaaatttgtcatttttttcttttgatattcatactttttgcatcctaagaaatacttgcctatcccaagttgcaaagattttatcctatattttcttctaaaatttttatagttcaggttttatgtttaggtctatgatcaatttcaagtcaatgtttttgtatgatgtaagagataggtcaacattcattttttttccgtatatgtattcaattgtcccagaccatttat

SEQ ID NO: 247635 - DNA, 593 bp, Homo sapiens
ttaatattttcaggctttttaattttagccattcttgtgggtgtgtggtgctatttaattttaatttgcatttctttgatgactaatgatatcgagcatctttraatttgtttattgcctatccatatattttcttttgtagcatatcttttttttgctttgaattgtcttattcttattaataagattcttgattcttaataagttcctctggggtatatttaaatttaaatttgtatttatacatatgatacacacacacacacacacacacacacacacacacacacacacatatagcaaatgtttctcccagtctgtggcttgcctttttattttcttaataatgtctttcaaagtttaaaatttgtcatttttttcttttgatattcatactttttgcatcctaagaaatacttgcctatcccaagttgcaaagattttatcctatattttcttctaaaatttttatagttcaggttttatgtttaggtctatgatcaatttcaagtcaatgtttttgtatgatgtaagagataggtcaacattcattttttttccgtatatgtattcaattgtcccagaccatttat

SEQ ID NO: 247636 - DNA, 593 bp, Homo sapiens
ttaatattttcaggctttttaattttagccattcttgtgggtgtgtggtgctatttaattttaatttgcatttctttgatgactaatgatatcgagcatctttaaatttgtttattgcctatccatatattttcttttgtagcatatcttttttttgctttgaattgtcttattcttattaataagattcttgattcttaataagttcctctggggtatatttaaatttaaatttgtatttatacatatgatacacacacacacacacacacacacacacacacacacacacacatatagcaaatgtttctcccagtctgtggcttgcctttttattttcttaataatgtctttcaaagtttaaaatttgtcatttttttcttttgatattcatactttttgcatcctaagaaatacttgcctatcccaagttgcaaagattttatcctatattttcttctaaaatttttatagttcaggttttatgtttaggtctatgatcaatttcaagtcaatgtttttgtatgatgtaagagatargtcaacattcattttttttccgtatatgtattcaattgtcccagaccatttat

SEQ ID NO: 247637 - DNA, 607 bp, Homo sapiens
tttacttctacgagttctgctttgttagattccacatgtaagtgagatcgtgtagtacacttatgtgatcacgtggtgacacttaggctgtttcctatcttggctgctgtgaataaggctgcagtgagcatsaaagtgcagacattcccgtcaacatactgatttcggttcctttgactatatatccaggagtgtgattactgggttgtatggtgattctagttttagtgtttttgaggaacctccaaaccattttccataatggctgtaactaatttacattcccacaatgtataagaattgccattttcccatatcccccctaacagttacctttcatctttttggtactagccattctaacaggtgaaatgtgttaagtcattgtggttttattttgtgtttccctaatgattagtgatactgagcattttttcatgtatctattggccatttgtatgtcttcttttgagaaatgtctatttaggttctttgctcatttttaattgggttatttgttttcttgccattgaattgtttgagttccttctatattttgataacaccttgttacatgtacagtttgcaaacatttcttcccattcta

SEQ ID NO: 247638 - DNA, 607 bp, Homo sapiens
tttacttctacgagttctgctttgttagattccacatgtaagtgagatcgtgtagtacacttatgtgatcacgtggtgacacttaggctgtttcctatcttggctgctgtgaataaggctgcagtgagcatgaaagtgcagacattcccgtcaacatactgatttcggttcctttgactatatatccaggagtgtgattactgggttgtatggtgattctagttttagtgtttttgaggaacctscaaaccattttccataatggctgtaactaatttacattcccacaatgtataagaattgccattttcccatatcccccctaacagttacctttcatctttttggtactagccattctaacaggtgaaatgtgttaagtcattgtggttttattttgtgtttccctaatgattagtgatactgagcattttttcatgtatctattggccatttgtatgtcttcttttgagaaatgtctatttaggttctttgctcatttttaattgggttatttgttttcttgccattgaattgtttgagttccttctatattttgataacaccttgttacatgtacagtttgcaaacatttcttcccattcta

SEQ ID NO: 247639 - DNA, 607 bp, Homo sapiens
tttacttctacgagttctgctttgttagattccacatgtaagtgagatcgtgtagtacacttatgtgatcacgtggtgacacttaggctgtttcctatcttggctgctgtgaataaggctgcagtgagcatgaaagtgcagacattcccgtcaacatactgatttcggttcctttgactatatatccaggagtgtgattactgggttgtatggtgattctagttttagtgtttttgaggaacctccaaaccattttccataatggctgtaactaatttacattcccacaatrtataagaattgccattttcccatatcccccctaacagttacctttcatctttttggtactagccattctaacaggtgaaatgtgttaagtcattgtggttttattttgtgtttccctaatgattagtgatactgagcattttttcatgtatctattggccatttgtatgtcttcttttgagaaatgtctatttaggttctttgctcatttttaattgggttatttgttttcttgccattgaattgtttgagttccttctatattttgataacaccttgttacatgtacagtttgcaaacatttcttcccattcta

SEQ ID NO: 247640 - DNA, 558 bp, Homo sapiens
tgtaaaggtaatatgagaagataatatgtagtgtgtggtaggcagtctccaaaatggcctcacaatgatccacatctcctgggattcatgtccttgtgtaatctcctctcccagagtgtgggctggacctagtggttgacttctactaagcagactgtgagaaaagtaataagatgtcacttctgagttaggctcccaaaagactatggcttccatcttctgtgctctctcttactctcttgcttgcttggatggaacaaatgccatgttgtgagctgccctgtggagargcccatgtgacaggaactaggggaggcctctggccaacagccagcatggaacagaagccttggtccaacatctgcaggaaaatcaattctgcctgtaaccacgagtcaacttaggaggcagatgttccccagttgagccttgagatgactgcagcttatctcaggtgagatacccagccaagctgtgcccaaattcctgacccacagataatgtgagatactaaatgttggtttttttatgccaccaagttttggaggtaatttatta

SEQ ID NO: 247641 - DNA, 558 bp, Homo sapiens
tgtaaaggtaatatgagaagataatatgtagtgtgtggtaggcagtctccaaaatggcctcacaatgatccacatctcctgggattcatgtccttgtgtaatctcctctcccagagtgtgggctggacctagtggttgacttctactaagcagactgtgagaaaagtaataagatgtcacttctgagttaggctcccaaaagactatggcttccatcttctgtgctctctcttactctcttgcttgcttggatggaacaaatgccatgttgtgagctgccctgtggagaggcccatgtgacaggaactaggggaggcctctggccaacagccagcatggaacagaagccttggtccaacatctgcaggaaaatcaattctgcctgtaaccacgagtcaacttaggaggcagatgttccccagttgagccttgagatgactgcagctyatctcaggtgagatacccagccaagctgtgcccaaattcctgacccacagataatgtgagatactaaatgttggtttttttatgccaccaagttttggaggtaatttatta

SEQ ID NO: 247642 - DNA, 462 bp, Homo sapiens
cctttaaaaatcatttaattttgttcatgaaccattaggttgattatcttgttaggacttttaagttcaataaatttttattttattaaaaagtktgtacacaaaaatgcgcaaaggaatgcatgtgtcactcaccaacaagcagttaaatgactattttccaatattttctttacagctattttatgaagtaaaactttacaaatacagctattctttccattatttctcccttttttgcttccctagatagaacctattaaggttggtgaccataaattatatataaaatcaaatgaattttatatattttgtatattacataaacagtatattattgtacttttactacaggcaggtagctatgcacaagatattgtattatgttgcatagcttaaaattatgtaaatggtatgatgctatatgcaacttgttcttccattttatttttgagattggtt

SEQ ID NO: 247643 - DNA, 462 bp, Homo sapiens
cctttaaaaatcatttaattttgttcatgaaccattaggttgattatcttgttaggacttttaagttcaataaatttttattttattaaaaagtgtgtacacaaaaatgcgcaaaggaatgcatgtgtcactcaccaacaagcagttaaatgactattttccaatattttctttacagctattttatgaagtaaaactttacaaatacagctattctttccattatttctcccttttttgcttccctagatagaacctattaaggttggtgaccataaattatatataaaatcaaatgaattttatatattttgtatattacataaacagtatattattgtacttttactacaggcaggtagctrtgcacaagatattgtattatgttgcatagcttaaaattatgtaaatggtatgatgctatatgcaacttgttcttccattttatttttgagattggtt

SEQ ID NO: 247644 - DNA, 498 bp, Homo sapiens
actgctataaatatgcatgtacaagttgttcttcatacaatgacttcttttcttctgggtagatacccaagattgggattactggatcaaatggtatatctacttttagctctttaaggaatctccacgctgttttccatagtggttgtaccagtttatcttctcaccaaccatgtaaaaatgtttccttttcatcatatacctgccaacatcaattattttttcatttyttgactccggccattctttcaggagtgcagtggtattgtaatagggttttgatttgtatttccctgataattagtgatgttaagcatttttcatatgtttcttggccatttgtttatcttcttttgagaattatctattcatgtccttagctcactttttgatggatttgtttgtttttttcttgctgatatgagttactgtagattctggatattagtcctttgctggatgcaaagattttcttccactctgtgggttgtctgttta

SEQ ID NO: 247645 - DNA, 573 bp, Homo sapiens
atggtaattttcaccatattgatgctacccattcatgagcatgagatgtgtttccatttgtttgtgtcatctatgttttctttaggtttttttggttttgyttttgttttttttttgagatggagtctcactctgtcacccaggctggagtgcagtggcacaatctcgtctcactgcaacctccgcctccggggttcaagcaattctcctgcctcagcctcctcagtagctgggattacaggtgtgtgccaacacacctggctaatttttgtatatttattagagacaggatttcaccatgttggccaggctgatcttgaattcctgacctcaggtgacccacctgcctcagcctcccaaagtgctgggattacaggcatgagccaccatgcctggccatcaactatgttttctttcagcagtattttgtagttttccttgtagagatctttcacctccttggttaagtatattcctaactttttttttttttggatgccctttatttctttgtcttgtctagttgctctggctaggacttccagcactatgttgaatagaagtggtgaaagt

SEQ ID NO: 247646 - DNA, 588 bp, Homo sapiens
ctctttgtgggcctctaagaactttatgaatctggatgctcctgtgttggtgcatatatatttaggacagttagatcttcttgttgaatggaaccctttaccattatgtaatgcccttctttgcttttattgtttgttattggtttaaaatctgtcctgtctgaaattagaaacctctgtttttttctggttttcattggcttggtagatttttctccatccctttagtttgagcctatggctgtcattgcaagtgagatgggtttcttgtagaccgcacatggttgtgtcttgcttctttatccaactttccattatgtgacttttaattaggacatttaacccatttacattcaaagttaatattgtgtaggtgtgaatctgtcaytgtgttgttagctggttattctgcagaattgattgtgtggttactttatagtatcaatggtctatgtacttaagtgtgtttttgtggtggctgataatcatctttcctttccatatttagcactccctttaggacctcttgtaaggacagtctagtggtaataaattctgtatacttggctgaaaaggatcatgtttctt

SEQ ID NO: 247647 - DNA, 592 bp, Homo sapiens
gagtagctgggaatacaggtgtgcaccaccacacccagctaatttttgtagttttagtagagacggggttttgccatgtttcccaggatggtcttgaacttctgagctcaagagatctcccgacctcggcctcccaaagtaccgggactgcaggtatgagtcactatgcccagcccttcctttccaaacttcatagaaatgacctatccctagtaagctgtttacagatagaaataacagctctcagcattattaacaaattattttaaggtaaactccatgaagggagaacaattagatgtaaaaataaaaatgggctgtttgtctatttcaccactatttttccatactctttctgaataactgataaattatcttgctgtgtttgagcattagacttagacatttgtgattasaaaacccctcaactagtcatatataaccaaccctgagttctggcatttttcataggttactattggcactttcattttcttgtgtaaataaacccaaggcaattaaatgacatctccctctatcagcttaaaacaggatgaaaggcatgattcaataactttctccctatacccag

SEQ ID NO: 247648 - DNA, 601 bp, Homo sapiens
ggactgcaggtatgagtcactatgcccagcccttcctttccaaacttcatagaaatgacctatccctagtaagctgtttacagatagaaataacagctctcagcattattaacaaattattttaaggtaaactccatgaagggagaacaattagatgtaaaaataaaaatgggctgtttgtctatttcaccactatttttccatactctttctgaataactgataaattatcttgctgtgtttgagcattagacttagacatttgtgattacaaaacccctcaactagtcatatataaccaaccctgagttctggcatttttcayaggttactattggcactttcattttcttgtgtaaataaacccaaggcaattaaatgacatctccctctatcagcttaaaacaggatgaaaggcatgattcaataactttctccctatacccaggctccacacaatttcctgttgctattttgtgaagagactttgatgtggtttggttctatgtttccacccaaatctcatctcaaattgtaatcccccacatgttgagggagggacctggtgggaggtgattagatgatgggggtggatttgcct

SEQ ID NO: 247649 - DNA, 601 bp, Homo sapiens
ggactgcaggtatgagtcactatgcccagcccttcctttccaaacttcatagaaatgacctatccctagtaagctgtttacagatagaaataacagctctcagcattattaacaaattattttaaggtaaactccatgaagggagaacaattagatgtaaaaataaaaatgggctgtttgtctatttcaccactatttttccatactctttctgaataactgataaattatcttgctgtgtttgagcattagacttagacatttgtgattacaaaacccctcaactagtcatatataaccaaccctgagttctggcatttttcataggttactattggcactttcattttcttgtgtaaataaacccaaggcaattaaatgacatctccctctatcagcttaaaacaggatgaaaggcatgattcaataacttyctccctatacccaggctccacacaatttcctgttgctattttgtgaagagactttgatgtggtttggttctatgtttccacccaaatctcatctcaaattgtaatcccccacatgttgagggagggacctggtgggaggtgattagatgatgggggtggatttgcct

SEQ ID NO: 247650 - DNA, 352 bp, Homo sapiens
ttgagggagggacctggtgggaggtgattagatgatgggggtggatttgcctcgtgctgttatcatgacagtgaatracttctcatgagatctgatagtttcaaagtgtggcacttccccgcttgctttctctctctcctgccaccatgtaagaagatgcttgcttctcctttgccttctgccatgattgtaagtttcaggaagtccctctagccaagcggaactgtgagtcaattaaatctcttttctttataaatgacccagtctcaggtcacttacagcagtgtgaaaacagactaatacagacttcttaaacaatctattttttgtcatttgttcacccaccacccca

SEQ ID NO: 247651 - DNA, 352 bp, Homo sapiens
ttgagggagggacctggtgggaggtgattagatgatgggggtggatttgcctcgtgctgttatcatgacagtgaataacttctcatgagatctgatagtttcaaagtgtggcacttccccgcttgctttctctctctcctgccaccatgtaagaagatgcttgcttctcctttgccttctgccatgattgtaagtttcaggaagtccctctagccaagcggaactgtgagtcaattaaatctcttttctttataaatgacccagtctcaggtcacttayagcagtgtgaaaacagactaatacagacttcttaaacaatctattttttgtcatttgttcacccaccacccca

SEQ ID NO: 247652 - DNA, 527 bp, Homo sapiens
catatcacaaatttactgcttaaacattgttttctttcaagttccatgtgatttatttctacaaaagtgataggatttatgaatctttattttttgaaataagtgcaatttaagagaaaaatgaaaagaaaaccacattttttgaaccatctgagaataagctacatgtgatgtttcctggaatatgttgaatatttcagcctatattctccatgaacattctctttgtttatagaataatcatagaattaccatcaaaatcaagaaattaacattactacattactaacagccattcaagttttgccaaatatcccagcaatgtcttttatagccaaaggaataaataagagtcacatttggcccacagtttcatattattttaggctgtttcaatttggaatagttcctagtctttccttgaaactttytgaagagtgtaggagagttattttttaaagaaagtccttcaagtttatctgatgtttatttcatgattgaattcaggctatgcctgtttggcagga

SEQ ID NO: 247653 - DNA, 593 bp, Homo sapiens
tgtgagtgtatcctatgtatctttattctctgtgacacttagttttgccagacttctgaatttttgtcaatattctttagcatgacaatttatattcctaatcctatgctrtaattagtcaactgttcttcttgattcaactaactcaatatacttatttatttattcatcctgcaaatatttgagtagaaatgtcatgtccagtactggataggtgtgagataaagtaatagcagaaggcaatgcatgcctcttctcttacagcttgcacaacgtgggtgaaatgagcattaatccatttatcatcctgttcaatagaaagggatgaatatctagtgctgaagacctgtaatgggggaatttgacccagacagcaaaatcaggagctcacaagagaatggaagagcatgagtgtttctggtaggtgagagtgagggggattattttataaggtcttacaggagatggagggtcagactatgtagggccttgtgtgtcaaattaaggagtttggatgttagcataagagacatgagaggcctttgtgttagtctgctcaggctgccataacagaataccacagactatcacaa

SEQ ID NO: 247654 - DNA, 585 bp, Homo sapiens
ctcttacagcttgcacaacgtgggtgaaatgagcattaatccatttatcatcctgttcaatagaaagggatgaatatctagtgctgaagacctgtaatgggggaatttgacccagacagcaaaatcaggagctcacaagagaatggaagagcatgagtgtttctggtaggtgagagtgagggggattattttatraggtcttacaggagatggagggtcagactatgtagggccttgtgtgtcaaattaaggagtttggatgttagcataagagacatgagaggcctttgtgttagtctgctcaggctgccataacagaataccacagactatcacaaataatggaaatttattttcttacagttctcggggcaggaagtccaaggtcaccatgttggcatggttggtttctgatgatggttttctttcttctggcttgtaaatggctctcttcttgctgtgtcttcacaaggcctttcctctatgtgcacatactcctggtatcttcttattcttcttataaggacagcagtccctgttggattaggcccccaccctgatgaactgtttagcctgaatcacctc

SEQ ID NO: 247655 - DNA, 585 bp, Homo sapiens
ctcttacagcttgcacaacgtgggtgaaatgagcattaatccatttatcatcctgttcaatagaaagggatgaatatctagtgctgaagacctgtaatgggggaatttgacccagacagcaaaatcaggagctcacaagagaatggaagagcatgagtgtttctggtaggtgagagtgagggggattattttataaggtcttacaggagatggagggtcagactatgtagggccttgtgtgtcaaattaaggagtttggatgttagcataagagacatgagaggcctttgtgttagtctgctcaggctgccataacagaataccacagactatcacaaataatggaaatttattttcttacagttctcggggcaggaagtccaaggtcaccatgttggcatggttggtttctgatgatggttttctttctyctggcttgtaaatggctctcttcttgctgtgtcttcacaaggcctttcctctatgtgcacatactcctggtatcttcttattcttcttataaggacagcagtccctgttggattaggcccccaccctgatgaactgtttagcctgaatcacctc

SEQ ID NO: 247656 - DNA, 562 bp, Homo sapiens
tgatgtaataaacaagacaggatgtatttgaaattcactgaagcataaaactaaattaagtagataagtgcatatttttaatttgaagctacrtaaagactgctatttaggcattaattcttaaacaaagggctgctgtcagggtcctaagataaatagcatatgttcagaagtaaaaggaagccccaaattagacaaatttaaacaatctagactgctcaaagaagacataaatatgcatttgcctgcattccctgggaagtgaaatgaatgcctgcaagctctgaataaagaatgttgacattctctatccattcatgttaactcagatgtaatttaatgcttcacccctcatagtataaatctccccatctgtttatttactcactaatgttgatttcaaaataattccttcaaaaaataaataaaacaggacgcattctttatgttaatttagggggaaaatcttttcatgagtaaaatatataccagaaataacagatttttatgaatctctttgttgatgttgaactggcgttggggatctgtactgtagcatctt

SEQ ID NO: 247657 - DNA, 562 bp, Homo sapiens
tgatgtaataaacaagacaggatgtatttgaaattcactgaagcataaaactaaattaagtagataagtgcatatttttaatttgaagctacataaagactgctatttaggcattaattcttaaacaaagggctgctgtcagggtcctaagataaatagcatatgttcagargtaaaaggaagccccaaattagacaaatttaaacaatctagactgctcaaagaagacataaatatgcatttgcctgcattccctgggaagtgaaatgaatgcctgcaagctctgaataaagaatgttgacattctctatccattcatgttaactcagatgtaatttaatgcttcacccctcatagtataaatctccccatctgtttatttactcactaatgttgatttcaaaataattccttcaaaaaataaataaaacaggacgcattctttatgttaatttagggggaaaatcttttcatgagtaaaatatataccagaaataacagatttttatgaatctctttgttgatgttgaactggcgttggggatctgtactgtagcatctt

SEQ ID NO: 247658 - DNA, 600 bp, Homo sapiens
ttaccaaattttctggaggaccaggaatcaagctgagatctatgtaaccaagaacatgtggtcaagagaaatgcccaaccatcgtatgaaatgttctgaatgaaaccccactcctgacattcatgtcacttggtaccagtgatgttgagacttcttcctgaactgcccctggaagagctctccatctttctcatcatgcttggccaaagctctactctctctttgcggacacctccctgtagggctcatactgaacttccaagtatcctggaggtgtgtgtctgtcttgtggcccattggctacccatataactctctgcaagggagactrggaaatgcagtcctctctgttcaggaaggtgtttctgactagagtgggagccataggtgcctacctgccacaagggagtagtttcagcatgctgttcacctattctcagaccttcctccatcttcaggacctctttccaaaatcagaaaactagtcaagggaaaaggaagaaattcagtgatgttgagttttatggtacctaatatactttgggggcatttctaaatgtatgaataatgtaggtaaaatgctaacttcttagaactcac

SEQ ID NO: 247659 - DNA, 525 bp, Homo sapiens
tgttaaaaaggcaaaagttcacttgttcgttctctttcaggaggccagagctatcctacgtttcactttctgatttatatcaaagactaagtgactgtttcatcttcttttataaacaggatctccattccccatttcagttcccrgaaggcttgataaaagataaagcttcgacctcaaaaaataaaaaaaataaaaattttaaaaagctgtggattcctcccatcaccttcataaatataaccctgctttgtaccctgtcctgagtgtgccgttactttgaggaagccctgagactgggcccaccttgaggagggagtgtgtgctatcagcatatttatgaccaccttgcctctgtggcaaacattccttcaaacaattgtgctttatagaagactgccagactgatgtggggccactagtttatgctggcatttgtggtcagggagaaattgtatgctaaccctattgaaaacaccatttttaatggcccttgtgacataggactaaatgaacatcaactgc

SEQ ID NO: 247660 - DNA, 525 bp, Homo sapiens
tgttaaaaaggcaaaagttcacttgttcgttctctttcaggaggccagagctatcctacgtttcactttctgatttatatcaaagactaagtgactgtttcatcttcttttataaacaggatctccattccccatttcagttcccagaaggcttgataaaagataaagcttcgacctcaaaaaataaaaaaaataaaaattttaaaaagctgtggattcctcccatcaccttcataaatataaccctgctttgtaccctgtccygagtgtgccgttactttgaggaagccctgagactgggcccaccttgaggagggagtgtgtgctatcagcatatttatgaccaccttgcctctgtggcaaacattccttcaaacaattgtgctttatagaagactgccagactgatgtggggccactagtttatgctggcatttgtggtcagggagaaattgtatgctaaccctattgaaaacaccatttttaatggcccttgtgacataggactaaatgaacatcaactgc

SEQ ID NO: 247661 - DNA, 580 bp, Homo sapiens
ctcctgcctcagcttccccaagtagctgggaccacaggcgcttgacaccaggcccagctgttgttttattattattttttttttattttttacagagatggggtcttactttagtgcccatgctattctcaaactcctagcttcaagcaataatacacagttctaagtcctgtggatataattttcatcaagacatgagcagtttacattccagagggcagacaagaaaatacattgaaatataaacaaattggaacacttcgagagtgacagtgatatgacaaaaaataagctgtagttaactagggagcaactgggggttggcaagtgctgtttcacagaggggatgaaggagggcctctccaaggaagagaaatttaatcctgaagaaagagaaacagccatctttgggaatatcttgggraaaaaaattctggaacagatagttagagggtatcactgcctccacagcctcttttcctctcctgtggatacttttggcctgggttttatgtagaagtaactctgtatgagctttggggccagactcagaattctttccccacttcttccttccatt

SEQ ID NO: 247662 - DNA, 498 bp, Homo sapiens
tacaagtaattctatcttaaattcaaccttttccttcaacctaccagcgtagctaacagagtgtagaaaagcactgtttcaaaacgtaattggcaccctatggaagatgagttcttaacatggcaaaggaattggggcccatgagatgtgaagggcagttgaaggaacctaggagctagtagttcagggaaaagaggtctcagggtaaacacagatatcccaagacataaattagkcaaggtgtaaattggttttatttggtcccgaaatactgagctagtaccaagtatcagaaataacaagtcaggcttcggcttattatactgagtgtttactttaaacaattagtattttatagaactgaaaaggatggaaccggcattagttaatatcatgataagcctggagacagattgatctgggctcaagtctttgtgcttcttaggtgtgatattggtcatgccgattaacatccattatctttaaaatgggcctaat

SEQ ID NO: 247663 - DNA, 545 bp, Homo sapiens
tggatctaccacatgcactgggagaagtcagagctgaggtaagaacagcagttggacctgctgcatgcatgctgtgcagagaagcctggaggtcccatagcaggcaatgagcaagtcagtgaagaaaatgcaggaaaggtcactctgagtacttgtgctaaaaacccataaagaacatcatgaggaattcctgctggacattgatttctcatctgtgcatcaagagaggaacctgggaggtgcttaatcagctgccaatggcaagatttactctaatttagaataggaaacaacaacrgttagattttctgtctttccctcctttttttttttttctatctggtctgtttctgaaatgtaataaagctaagaattaacaaaaaaaaaagccacaaaccttcaggcaatttcagtctgaagcaaatgcattctttcttcctccaaactgcaaacattccagaaggggcatgtgtcaaagacagtaagacagattcaagtttatgctcttcttcaccagactgacctcgagaggaggcatactaagc

SEQ ID NO: 247664 - DNA, 569 bp, Homo sapiens
atatttgctttatatacctgggtgctccaatgttgaataaacatatatttatacttgttatattctcttgtgagttgatccatttactattatatcattatataatgtccttctctggctctttttaacagttcttgactttaagtctgtattgtctgatacaaacatagctactcctggtggctttyggtttctatttgcatagaatgtattgtccatcccttcactttcaatctgtgtgtctttacaggtaaggttagttttttataggtaacatatagttatgtttttttatctattcagccaatttatatcttttaaatgaagagtgtaatccgcttacattcaaggttattattgataggtgaggacttactcctggtgttttattgactgttttctggttgtttaggtatatcattttttccttaagtcctatcttcttgtttatttttgcagttgggtggttttctgtagtgataaggattctttctctttcttctttttgtgtatcagttctaccagtgagttttatagttttacatgtttttatgatggtggttaccatc

SEQ ID NO: 247665 - DNA, 611 bp, Homo sapiens
atttaatggtctgataaggttatcttctttgagataagattgaattttgtttctgtcagttgggagaattgatttagtttgataaagctggaagcagagctgtatatcacttgtttatgtgacactatcagattatcmttttggaaaagataaggctggctaaatttgtggtataaggtgagacccaaatcagctagaagcattcacagatagtcacattgcattttaattcattagcagtgtttttcattaaaacaaggattctaaacccttcataaggtgaattttttgtgtgtgattcagcatcctcttattttaataaatcttgagactttagattttcttaagtgagacacacttgttatttctctacctcttcttggtaccattagagatttaaaaatctttttgagtttaagaggagaacctgatttaaagcaacaaaacccactcaagcctgtgaaaatattggagaaccacatgactttcttttttcaaatcaagtgttccaagaaagatccatttttaaaagatgatttgctgacacttcagatcttgaatccaaggtgctgattcatgcagtttgaagttcagggaattgcttaaagtta

SEQ ID NO: 247666 - DNA, 611 bp, Homo sapiens
atttaatggtctgataaggttatcttctttgagataagattgaattttgtttctgtcagttgggagaattgatttagtttgataaagctggaagcagagctgtatatcacttgtttatgtgacactatcagattatccttttggaaaagataaggctggctaaatttgtggtataaggtgagacccaaatcagctagaagcattcacagatagtcacattgcattttaattcattagcagtgtttttcattaaaacaaggattytaaacccttcataaggtgaattttttgtgtgtgattcagcatcctcttattttaataaatcttgagactttagattttcttaagtgagacacacttgttatttctctacctcttcttggtaccattagagatttaaaaatctttttgagtttaagaggagaacctgatttaaagcaacaaaacccactcaagcctgtgaaaatattggagaaccacatgactttcttttttcaaatcaagtgttccaagaaagatccatttttaaaagatgatttgctgacacttcagatcttgaatccaaggtgctgattcatgcagtttgaagttcagggaattgcttaaagtta

SEQ ID NO: 247667 - DNA, 540 bp, Homo sapiens
tgagttcgtggatagatacatcccactgaagtgagaaactcggccgtgagttcgtggatagatacatcccactgaagtgagacactcggccgtgagttcgtgtgccctgctctttcagggtctgatcaccctaggtgaactcatacaggttatgacctgcacagctcaattccacacctatgatcctgcaagccttacctggatcttagctataaaaagcctctttcatggggacttccccatcaagccttctctcctrtaacctccaaacaatctctgtttccaatgaattaaaaaaaaaaaaaagtttaagaccaccaccactttaccaaatacttaaatttggggcaaaaaaaataaaaataaataaatcaggagtggtataataaattagatatagaaggctgaagattggccctgtaacctgatcacccacttgcaactctgaaatcagcatcctttttcctacaaaaaaatctctgtatctcttccagcgtttttagcttcactctaacatagggagtctttatttatttattt

SEQ ID NO: 247668 - DNA, 540 bp, Homo sapiens
tgagttcgtggatagatacatcccactgaagtgagaaactcggccgtgagttcgtggatagatacatcccactgaagtgagacactcggccgtgagttcgtgtgccctgctctttcagggtctgatcaccctaggtgaactcatacaggttatgacctgcacagctcaattccacacctatgatcctgcaagccttacctggatcttagctataaaaagcctctttcatggggacttccccatcaagccttctctcctataacctccaaacaatctctgtttccaatgaattaaaaaaaaaaaaaagtttaagaccaccaccactttaccaaatacttaaatttggggcaaaaaaaataaaaataaataaatcaggagtggtataataaattagatatagaaggctgaagattggccctgtaacctgatcacccacttgcaactctgaaatcagcatcctttttcctacaaaaaaatctctgtatctcttccagcgtttttagcttcastctaacatagggagtctttatttatttattt

SEQ ID NO: 247669 - DNA, 538 bp, Homo sapiens
taaagtaactgaatgagacaaaaagcaaataatagcccaattcagtttcaactaaagtcaaagaaagtggcttaaatacctcaaaactgacccattaccacaccaaatgattgctgaagaagataaaatcttctttggatattttacaataggatgaaggctggagaatgcagctagaacatcactctacagcagtgtctctcaactaaggcatttttgscccccaagaagacacttattaatgtctggagatatttttgcgttgcacaaccaggagggggctgctactggcatctagtgagtagcagtcaggggatgctgttaagcatctgtagtgcacaggacagccctacacatagaggaatctcaaaatgtcaatactgctgaggttgagaaaccctggtctaagaaaagctggggcaactctatccttgtttaataaggaagaaattttatttcattctagggaggcagatgcatgagatgcaaaacctgcaagtaacatataattagttgattctactcacaattttggaaa

SEQ ID NO: 247670 - DNA, 635 bp, Homo sapiens
gtttggtgttctatatggcttaaaggtcataaaaggtaaaagttgtctaagatcaatgggcagcctgctgctatactgtaagttcctgatcttactctcagactcagtcccccaactatattactcacaatagtaagagtaagagtaactggatctgttgagtgttgtatgcataaatggctacatgatggttaggttaaggtcatgggtatacttcttgagaaaacttacctgtatcagartaataaagtggtttagaaatttagctccagtttctggctgccaaggtttgaatcttgaatctgctacttactagtttggtgacttcagttaagttcttacctactttctgcttttctctcctcatctgtcaaagaggaaccctgataatggggttcttatggggatgtgagcccttggagaaatgctattattattatccaaagtctaccaattgctacacagccccaggaatctgttgtgcaggtgcaagccacggtgactggggtgtggaggagcctggggcacaccggaaatgggatgtacaagcaacaggcacagatgctctcccgctaaaggaactcagtgtccatattctccaggaggatgcagtattaaactgacatatatgcccc

SEQ ID NO: 247671 - DNA, 512 bp, Homo sapiens
cagtacctggcacttaggatctgatcaataaatattttttgaagtgaatgaatgaatgaatacaagttctactaggaatcaactagcccacttaattcaatgagcatctactcttacaatagactttttatttctcctcaactgctaagtttctttaaaaaccaaaaacctacatgtttgtatgtattagcctgtttctgttagtgttgagtcacgcccataaaattgagcaaaatgacagtgagggcacataatgtgtctaacaggtggctggcgtcatgaagaaagtcagtaagaacccagaatcatattctgaaacaatacaattttagaactgaatgtttctcttcaatttcccttcactcagtactttctcttcaatgcttttattttatggaaatttctcaacatcttgagacgtcagtcaggcttattatcaygaatcttgaaaaaaaattaggcttaagaggaatcagagtgtaaataatccaatatccaccttcctttccagg

SEQ ID NO: 247672 - DNA, 563 bp, Homo sapiens
tggttctttgtatgttgagtaattttggattatatcctgaacattttgcatattatgttttaagacattgggtcctgttaaaatctggagaatgttgaagtttttgttacagcagatgatcagctggtttcaattcatcctacatgttctctttctccttctgtggttggtgattgtcctgtcagtttagttttcaaagcctttgttgttcaggtcttccaggtacataagccacccagggtagtcagggactttggtcagtggtttatatagtagttaagtgtcaaagactttgctgtgcttatttggctctgttctgcatgtgcatagctcargggcaatcctgagacttagagttcacatgtagcattaggagttaaacattttcaactcctttcctctctgagatgtcctccacattttctggctcccaggatcctctcttatccagcctccaatggcccctttttctggtcacctagccagacagtatttttctctcagcctctgctccaccacacagttctgtttgcccgtaagagcgaagcagataaagagataac

SEQ ID NO: 247673 - DNA, 579 bp, Homo sapiens
actttaaatgcattttttcactttattcatcaactttgaagtgcatatcaatattatccatattttataggtgagaaaattgaagcttcataaagaggttaaataacttgcctaaggtcagatagctgatgagtctcagaggcttgatcaaacccagacctacctaactttgaagcccatgactttttaaacatgattttgcaaagcatagatcttagcttttagaaacagatctgagctatatgctgcttaacagatatgtgacatgggcaaattatgtaatattttgaactttgatcttcatctgtaaagtggtgataataaaacctttcttgcagtgtttttttaagatgagaaataattgatataaagtccctgaaaaggagtaggcatttgataaatgtgtctttctttaccctgaaaaatactcagtgtgcactatgttaggttatttctttttaaccttaacttattagatattttcaatagttattttctcctttcagcatcagcatgcgccaycaacaaaagactgtaaaaaacaaacaaacaaaaaagtgttgaatgggacatccatac

SEQ ID NO: 247674 - DNA, 594 bp, Homo sapiens
gttccattgtaaaccaactggaaatagtttaaatagtactaaagctgtattaagatagacagctttgtcctgagattcatctggtttaggtcatgaaaaaaatagtttcttacctaaatgcttttgtaagaatgctaatgaagctttgttgctaagatcaatagctrcatttgaatctatgtctccctttaatttgagcatgtgtccaattattttgccagttgcaaaagtgaagtcagcaaaattctggtggactgaacccctaaaagagaacaagacatttaaaagtcacattgtttgataaaattattatttttttagttagagtgtaagaaaggtactggtcttgttggtctgtttactgaaaaccaaagaagaaataaaacttgtaatttgatctacttagatgtgtttcaagggtcacaggctgtttgtttagggatcccagagtatattcttcttccctctagaaatacaactcaaagaatcttgttcttgcttggtatcttgattttagaagaaatgattcttgctttttagtgaattggaatacttccagtttgaatactggaatgtgttctgtattgaagggtc

SEQ ID NO: 247675 - DNA, 396 bp, Homo sapiens
ttggttcgtaagaagtattctttccccgagtccccaaagtccaatgtatcattcttttgtcttygcgtcctcataacttagctcccacatatgagtgagaacatacaatgtttgttttttccattcctgagttacttcacttagaataatggtctccaactccatccaggttgctgtgaatgccattattttgttcctttttatggctgagtagtaatacatggtgtgtgtgtgtgtatatatatatatattttacatatatttttttttctttatcaccttgttgattgatgggcatttgggctggttccatattttttcagttgcaaattgtgctgctataaacatccatgtgcaagtatctttttcgtataatgacttcttttcctgtgggta

SEQ ID NO: 247676 - DNA, 524 bp, Homo sapiens
gaaatcaaatagctagctgaactacatttacagtgctgaagagaattctttattgcaagtgctacccaacttcttcccagctaaaagccatctctcttattttctgagttttacaatcccttgargtagaagaggggtgacaggtgagaaagtggtggaagaaagtgaagagggtggttgttgttatgaaaatgtgccactcagctatcatgctacagactgcatagcttactaaagaccctatccagctcctgcccctctgtatccatcaccatggtcaagtggaagctaagcatccagtgagctgctcccagagacttggcacagcatgggtactaacattagcccattcctatgagatacaggactcttgataagcaaatatagtccagcactccttccattggcctggctcaatatttcttagaaccatgcttcattctgaagctcttcttatccaatccttctcccttccccatcaccttttcaggtgtccaacctgtgtcatggtccaaaggttctcc

SEQ ID NO: 247677 - DNA, 582 bp, Homo sapiens
aatttcagtagtcaatgccaagctagtgagttgtatatattttctgcaaacaaattgtgtttgtttttgttttgtagaaagcttctaattaatagttttttgtaaagcagctttgttaaaatacaattcacataccataaaaytggattcatttaaaatgtagaattcagtggttttgggccttttggagttgtgaaagcatctaatctaatttaagaacatttcatcaccccaaaaagaaatcctgtacttatcagcagtcactccccaccccaacctccatcgcagccctaggctgcctatagtctacattctagctatctagatttgcttattctgggcattccacatacatggaggtatgcaatatgtggtcttctgtaactggcttctttcacttagcatgtttcaaggttcatccataaagtatgtatcagtacttcattcctttttattgccaaataagaatgctttatatggatattccacattttgtgtatctattcatctattgatgaacctttgggatgtttccacttttgcctcttataaataatgcttctaagaacatacatgtacaaa

SEQ ID NO: 247678 - DNA, 486 bp, Homo sapiens
tgtttccacttttgcctcttataaataatgcttctaagaacatacatgtacaaatgtttatatggatatatgtttttcttctcttgggtatatagctcattggaatactcagactttcccatttcaaaacttactacaaacctgcagtaatcaggactgtgtagtactagcataaagatagatatttagagcaacggagtagatctgagagtctagaaaaaacccttatatttatgttcaattgttttgtggcaattgttgtcaagtataaaaattaactcaaaacggatcacagacctaaaagtaagwcttaaaactataaaactcttagaggaaaacacaggaatacatctttgtgagggagaggaccaacttcattcttttagctgtagatatccagttgtctcagcatcatttattgaaaagactattatgttgtcactgaattttcctggcatacttattggaatcaggaagtgtgagtcc

SEQ ID NO: 247679 - DNA, 520 bp, Homo sapiens
cttgtatctgcttctgcattcagtttgttgttttggttaaagtatataaagacaatctggttatacacacacacatacmcacaagtatatgtaatatatatacatatatgtgcatgagatatatatacatacacatatacatacacacatatgtatatataacatatagttgtgtattatatacacatatacacatgtatattatatatacgtgtgtgtacatataatatacacatatatattatatatataaagttggaaaagggaggaatattttcagataattgtggatattgtttgatactacaacaatattgtgtaagttgtagtgtcttaaagattagttgcaatgtgcagtctgaaatgatatcaatgcactttctatatggttttattaaaatccattggtctaccaaatggatctctttatccatgcatgattttgtaacattctatctttgccatggaaaatattggtctttagggtgataaatattttctaaacatgcacacatttcat

SEQ ID NO: 247680 - DNA, 563 bp, Homo sapiens
tatattccagaactaagagatttgccttgaactaagggcaagaccacaaaatcctccacaaattccagatgatcatgcagtaatttaactgctctaacaaaaattaacacaattcagaggagaatgaaaacacgcataatcactacaatgtaacacaatgtctaatatataatcgaaaattatgagacctgtgaaggaacaggaaattgttattgatagatattagtaaaagcaataactagaaagagaaacagaccccaaggtgactaaaatgttagacttaacagacaaacactttaaatctctattgtatacttgttacataatttaatggaawaaagatgaacatacaaataatctcagcagacaaatgggagattatataaaagaacccaatgaaaattctaccagtattatatcaaaaataaaaaattcactggataattttaaaagctgactggcgatggtaaaagagacagagagaaaaatgttcagaaaaatgaatagcgctttagtgaccaatgggaaaaaaatcacccagtctaagatatgtgcagttagag

SEQ ID NO: 247681 - DNA, 563 bp, Homo sapiens
tatattccagaactaagagatttgccttgaactaagggcaagaccacaaaatcctccacaaattccagatgatcatgcagtaatttaactgctctaacaaaaattaacacaattcagaggagaatgaaaacacgcataatcactacaatgtaacacaatgtctaatatataatcgaaaattatgagacctgtgaaggaacaggaaattgttattgatagatattagtaaaagcaataactagaaagagaaacagaccccaaggtgactaaaatgttagacttaacagacaaacactttaaatctctattgtatacttgttacataatttaatggaataaagatgaacatacaaataatctcagcagacaaatgggagattatataaaagaacccaatgaaaattctaycagtattatatcaaaaataaaaaattcactggataattttaaaagctgactggcgatggtaaaagagacagagagaaaaatgttcagaaaaatgaatagcgctttagtgaccaatgggaaaaaaatcacccagtctaagatatgtgcagttagag

SEQ ID NO: 247682 - DNA, 602 bp, Homo sapiens
agtgatttttgacatgatgataaacaagtagaataagataggaaaacagagataccagatcaagaaatgaggagtcttggcaaacttggcaaacragactcttgcgaagagtacttaatgaggaaagcaaaattttatagcaaatgttgctggaacaactgggctaataaataccaaccaatcagtctcaatctcttcatcctgttgtacacaaaattagtttgcaatcaattatagacaaaaattgaaaccatacaacttcaaaaaatattggaatatatctttgtgacttggtttaagcacatatttcttagaatataaaaacacaaaccataagttaaaaaattgataaatcacactttatcagcatttaaagcttttgcatttcaaaattcactgcttgaaaaacaaaaacaaataggtaagtaacagactaacagaaaatatttataatacatatatctgaaaaagggctttagccataatatataaaatcctacaaataataaaaagacaaacaatataatttttaaaactcatgaaggagttggacagaccctcgtaaaagaagatacaaaaatagccagtagcatactaaaatg

SEQ ID NO: 247683 - DNA, 602 bp, Homo sapiens
agtgatttttgacatgatgataaacaagtagaataagataggaaaacagagataccagatcaagaaatgaggagtcttggcaaacttggcaaacgagactcttgcgaagagtacttaatgaggaaagcaaaattttatagcaaatgttgctggaacaactgggctaataartaccaaccaatcagtctcaatctcttcatcctgttgtacacaaaattagtttgcaatcaattatagacaaaaattgaaaccatacaacttcaaaaaatattggaatatatctttgtgacttggtttaagcacatatttcttagaatataaaaacacaaaccataagttaaaaaattgataaatcacactttatcagcatttaaagcttttgcatttcaaaattcactgcttgaaaaacaaaaacaaataggtaagtaacagactaacagaaaatatttataatacatatatctgaaaaagggctttagccataatatataaaatcctacaaataataaaaagacaaacaatataatttttaaaactcatgaaggagttggacagaccctcgtaaaagaagatacaaaaatagccagtagcatactaaaatg

SEQ ID NO: 247684 - DNA, 605 bp, Homo sapiens
caatgcctgggtggtgtcgtgctcaccagctcctttccgcagacctgatgccgatcagatttactccctgctgaattcaccccccagtcaggccggttttccttgtttcaccgtgttctctgaatacactgaattactccgagcatctatagttggcaatgccctgcgcattttccgcactccgrtacactttacactgaacaccaattcggaagttgtgtggaccgtgctccagattggaaggcctgccactgtgctggtgtcatttctccctggaaatgacaatgaaggacaatcaggaatagcacttaggtctgaggagaaatggagctagaaggagccgtttcatagctcagtgtaacacagagttatttggggtttaactgaaacgccttccttcatcttccaatgttttctcttcaatccactttctaataaattaaaaacacactcatttaaaacttcagctagaaacttagggaaagtagtttgaaatttatgtgtggtgttattaaaattttatatttttaaatcgtgttttggtttttggtgaggtgccagaactggagatgaaattttgcttattttgattttgagtattctgc

SEQ ID NO: 247685 - DNA, 646 bp, Homo sapiens
tccatctaaaatataaagttgaaattaaaactaggatcttcaagggagaaaatgtccaggaaaggcctgacgcaagtgtgatgtacctaaaatggattgattttgagctattagtggtgtctcaaacaggagatcccatttaaatctgaaatctgaatgttctccaaatgacccagagcaggaagcatartcaagccctccactagattacagggaacaatattcacatagtcgcagaaatgctgcatattggttttctgcttttagattcaccttataggcaagtcaaagaataactatgactctaaaagataatgtaaatatgattaatttttttaatgcacagggtaaacgtcaataggtaaaaaggggtaggagcaggagtaaggtggagagaagggtggggtactaaggttctcattttaggaagtgacagtcaaaagatactgtctgtagttgacaggacgaaatggtctgggtgtacagaggagagagcaatgcagggctgaatatagagacgtatctctattaggaggtcagggaggaggtaagaccagtgtgtatgtgagttaaatcttcatttctcttaggaaaaattaggtacatagggcctaagatgatataccaggaaataataagatagcat

SEQ ID NO: 247686 - DNA, 646 bp, Homo sapiens
tccatctaaaatataaagttgaaattaaaactaggatcttcaagggagaaaatgtccaggaaaggcctgacgcaagtgtgatgtacctaaaatggattgattttgagctattagtggtgtctcaaacaggagatcccatttaaatctgaaatctgaatgttctccaaatgacccagagcaggaagcatagtcaagccctccactagattacagggaacaatattcacatagtcgcagaaatgctgcatattggttttctgcttttagattcaccttataggcaagtcaaagaataactatgactctaaaagataatgtaaatatgattaatttttttaatgcacagggtaaacgtcaataggtaaaaaggggtaggagcaggagtaaggtggagagaagggtggggtactaaggttctcattttaggaagtgacagtcaaaagatactgtctgtagttgacaggacraaatggtctgggtgtacagaggagagagcaatgcagggctgaatatagagacgtatctctattaggaggtcagggaggaggtaagaccagtgtgtatgtgagttaaatcttcatttctcttaggaaaaattaggtacatagggcctaagatgatataccaggaaataataagatagcat

SEQ ID NO: 247687 - DNA, 568 bp, Homo sapiens
aatagctgcaaaatataaaataaaatacttaggaatatacctaaccaaagactgaaagaccrctgcaaggaaaactacaaaacactgctgaaagaaatcatagatgacacaaacaaatggaaagctatcccttgctcatggatgagtagaatccatactgtgaaagtgaacacaattgccaaaagcaatctacaaattctatacaattcccatcaaaataccaccatcattcttcacagacctggaaaaaccatcctaaaattcacatggaaccaaaaaagaacccacatagccaacacaagactaagtaaaaagaacaaatctggagtcatcacgttacccaacttcaaactatactgtaaggccatagtcaccaaaaacaggaaagtactggtataaaaatagatacatagaccaatggaacagaatagagaacccagaaataaactcaaatacttacagccaactgatcttcaacaaaacaaacaaaaacataaagtggggaaatgacatcctattcaataaacggtgctgggataattggcaagccacatgtagaagaatgaaa

SEQ ID NO: 247688 - DNA, 568 bp, Homo sapiens
aatagctgcaaaatataaaataaaatacttaggaatatacctaaccaaagactgaaagaccactgcaaggaaaactacaaaacactgctgaaagaaatcatagatgacacaaacaaatggaaagctatcccttgctcatggatgagtagaatccatactgtgaaagtgaacacaattgccaaaagcaatctacaaattctatacaattcccatcaaaataccaccatcattcttcacagacctggaaaaaccatcctaaaattcacatggaaccaaaaaagaacccacatagccaacacaagactaagtaaaaagaacaaatctggagtcatcacgttacccaacttcaaactatactrtaaggccatagtcaccaaaaacaggaaagtactggtataaaaatagatacatagaccaatggaacagaatagagaacccagaaataaactcaaatacttacagccaactgatcttcaacaaaacaaacaaaaacataaagtggggaaatgacatcctattcaataaacggtgctgggataattggcaagccacatgtagaagaatgaaa

SEQ ID NO: 247689 - DNA, 648 bp, Homo sapiens
aatatttaaacagggtaaccttagttccactctctagaggttcctattgttaacttatatattcttccataaaactttatgttcctataccctatgtatatacatatcgaacagtagattatatataatatgtaaaatatacactgtatcttacgtgtcatattaatatatcttgtctgtatgtgatatatatcatataatctgatctacatgtttttctcaattaggatgtcttaaatactaaaggtaacattagcagtaaatagtaaagcaggcttatatcccaaacatttcatctgttctcccacacttctgcgggagttaggcaaggccatgctattagctctgcccggcaggctgtgggatacacacacacttctgggccaaagcacagaaaagctggtgtgcacatgctttggtgactgaggaacctctgtgtttgagatgcagagccacaagatcaaagcagcttgcgtgctcagggattgcctggagagtcccctggattsacagaaaagtttatgtgactgagaaataagccttcttacattaaagccactgagactttggggttgtttgtaactctagcataacctaccctatcttaatcagcaaccctttcacattaccatatttgcatacctcatt

SEQ ID NO: 247690 - DNA, 539 bp, Homo sapiens
tgtcattactcaaagaaagcccccgtatcttcatttcataaattagctaattagttccagagagaatttacagccaagactcaagtgttctgattttgtacaatgcttattctgttacactggtgccaaacatgcagataaatctggtagcattttggcatttactgtgctcagtgccacttttcttggtttattcaccaaaaagtaaaggcattctattccagcaaacyagtagaaaatccttaagtaaacagtgcctccgcccgacttccccatcctattaagttttttaaaaaacttactataagccattttttaaagtgagctacagttgttcccccaatatagatgctccacttgaaaatcattacagatttagtgaacgtttgatcacacatcactatttttaaagtaggattctgcttgtgctttataataaaatataccaaaatttaatatctaatgaaagggttggtattccagaatagggaagaagtgtaagttatctatcaatccataacaaatcactgtaaaatata

SEQ ID NO: 247691 - DNA, 505 bp, Homo sapiens
gcctcacattttcaaattgtccttgattttcctttaagcactttctcttccagatggatttttgaatcaattttgtagtgttttaaaaaaacacacaggatttttagagccatgaaactactctgtgatacaacaatggtagatatgtcattacacgtttgttcaaacccacagaatacacaatatcaagagtgaacctgatgtaacctatggactttgggtgataataatgtgtcaatgtaggttcatcagttgtaacaaatgcacaactctggtggaaaatgttgataatggtggaagctatgcrtgtgtgggggaaaatctctgaaccttcctcccaattttggctgtgaacctaaaaccactcaaaaaaaaaaagtcttctttaaaaattggggatttcattagggattaaatggaatgtctacataattatggaggagctagatggtttaaaataatgaatcaggttattcagaaaaacagtatttccttctacttattc

SEQ ID NO: 247692 - DNA, 630 bp, Homo sapiens
tagcaatgctgaaagagaactcaaccatatttttactttggcatatctggcaccttcctctgcctaattgtgggtggtgggagatacagaccctttatgtcctaacctgtgtgtgccttttgtgttgctggtgctgtatggcagggagtgggtaataagtaggacatgggaagacaatatactggagtggtggtaaaaatatagctaaaaatgagctgtgaggaaggatcagcaaaagctgaaaactgggaagggaaggggagtttgggacatggggaaaagatgggrccaggcactgggcactctgggcaggcaagaggtgctattgcaggtgtcttggcatgagaaatgccacccttttcctttctgtccaggcactcattgtgtggttgagggaagaggatttgagctgaggatttgtgcacaccgaatgttgctggtgaaggtggagattccactgtggtgtctggttaggatagccaactgctggtacatgaggcctctcttgattgtgcgttcacgtgggcaggcagtctgttctctctctcctcggtgtcctgaaaggaaagtaaaatctctctctctgtagtgaatatcagtcatcaaatgtctaagctgtctgcctggctc

SEQ ID NO: 247693 - DNA, 630 bp, Homo sapiens
tagcaatgctgaaagagaactcaaccatatttttactttggcatatctggcaccttcctctgcctaattgtgggtggtgggagatacagaccctttatgtcctaacctgtgtgtgccttttgtgttgctggtgctgtatggcagggagtgggtaataagtaggacatgggaagacaatatactggagtggtggtaaaaatatagctaaaaatgagctgtgaggaaggatcagcaaaagctgaaaactgggaagggaaggggagtttgggacatggggaaaagatggggccaggcactgggcactctgggcaggcaagaggtgctattgcaggtgtcttggcatgagaaatgccacccttttcctttctgtccaggcactcattgtgtggttgagggaagaggatttgagctgaggatttgtgcacaccraatgttgctggtgaaggtggagattccactgtggtgtctggttaggatagccaactgctggtacatgaggcctctcttgattgtgcgttcacgtgggcaggcagtctgttctctctctcctcggtgtcctgaaaggaaagtaaaatctctctctctgtagtgaatatcagtcatcaaatgtctaagctgtctgcctggctc

SEQ ID NO: 247694 - DNA, 667 bp, Homo sapiens
gtcacctgcagtttatttcaagtgtaatttggaaaaccaggcagcaggttcatccagttttcactttggagattgccccagaaggtctgtgagattcctgggattgggttgtgggctctttggtgtagacctcactatagcttctagaggggcccctcagcttaaggaaggcggcttcttgccataattttcaattgaatcagaatctttaatggatttttgttttattttaccttcattctttattaagatgaaattcacataccatagtattcactcatttgaaccatttgacggtttttagtatattttaaaagttgtgcaactgtcaccactatctgattttagaacattttcattatccccaaaagaaaccttgtgaccattagaaggcacactctrtttcctactccaagctccccagtcctagtcaaccagtaatctattaatctttctgtctctgtagcttattctgaacatttcatataaatggtgggctgagttttgtgtagcaaatttatattcttttcactcagcttgaaggccttccagtgagcttgttctgctaattccccattctcatcttaccctgcttccccagctgctgtttagtctagttcagctaatttttcccagcgttacttctgttcttatgccctatctcttc

SEQ ID NO: 247695 - DNA, 621 bp, Homo sapiens
gacatacagccacctggggagttgggaccttaactgttaggcaacggtggaaatcaagctgccaggtagttcttgagtttgggttggtactcagaatgtaatatttataagataaaagatattatattctctcactttgaattaccaatagtattttaaggaaccttttatgccaaacagcatttgtgccaaaaagrcatcagtttatttaagaaattcccaaatgcagtggagtttctccttagagctaggtgtcttctgcctgactcaagattgtaaactcacaggggatggccctgtaaatgttaggaaataagtatttgcagtggtcctgagtttggaagactgtgaatgcagactggatatacctgttttgtgtgtgtgtctcaggttaattgcagttttcaaagtaactttaaatttgcttatatttcacatatttttttaatgaaagagagatgccttgcagatgagcagtctgggtaacaacaacaacaaaatatatatatatatatgaaagaaaggggaaggagagcattaggacaaatacctaatgcacgcgggacttcaaacctagatgacgggttaataggtgcagcaaaccaccatggcccatgtata

SEQ ID NO: 247696 - DNA, 595 bp, Homo sapiens
ccttgatgttggacttggagcctccagaaatgtgagaaagtaaacttctgttgtttaggccaccctatttatggaactttgttacagcagccccaggaaactaacacaagggttctgagtgcagtcgggctctggtgcctttcagaggctccgaggttttgtttgtatcctagtaaaacacctttttaatgcttacctggaaacctgtgataatttttcttaggtttttagaaaaattactttatcttgtccttatttcttctcagaaaggtttttgtttcccatatctataatattttctcacattgttaaaattttagctccttccctctgcttcttggggaaaccttcccgagcttattctctttatcatggactaagttttctatagtatcagttttccttgactacctgaaatgtggatcatgctttttaaatttcctgcttttctttccttatctttaatagtctatagtatagatatatagtatagaatgccttagtctgtagtatagctcaagcttgtccaacscacggcctgtgggtcacatgaggcccaggacggctttgaatgcggcccaacaaaaatttgtaa

SEQ ID NO: 247697 - DNA, 595 bp, Homo sapiens
tcagattaatataagatgattaaatatggaaaggaagagaggctgaaagctcctgagggatatcattagggcaaattgccaaagaatgaaacatgagccagttaggagagtctggaagctgcaataatatcaggggacttgaatgttcgacagttggagcttcagtaatgtgtgaactgcgggttacggtatcaagagactctgttcactgacacatagaatgtcactattgaccagcaaactgcccaagcttgacagctgtactacaggaagccaagtatatcataatttcatatttaaactgttcattccagattaacattttgtttcctagctttatatcacaacagctgtaattacactgttgctattttaaaggtaattgccattttaattgttttgttttggtaagcagttaattaaacattttttagtacttaacaaaaggatatcacttttttctcccatcttctgaccctcatcagaattctttyaatgtgactttctttccatggtaaattatatttctgtagatgtaaagtcatttatatgcataaagcaataattaaatcagcattcttaatcattttaaagt

SEQ ID NO: 247698 - DNA, 508 bp, Homo sapiens
caacattatctgatgaatttgactgatttcttagaggatggtttctgtaattatatgcagagtcacaaaatttctgcaatggccagcatctggtagagggttatgcctgctaatcaagatctaccagragagaaccgagtctacaggacttggcaactttctggatgtggggtataggtgacaaggagaggaaaaaatatatgacaactccttcccaaccacagttctggaactaagcaaccagaatgaattattaaaggtaatatagcaaaagtgtcaggtttaagtagaattataaggaatctgctttggcaaatatttattctgttaaccatgagacacctaaatggagatttccaaagaagacggaagcatcccaaagataatcctccatattcacctagtagcatgcaagagctgtgaaacttaaaaaaaaatgagaaaatactattatggcatattcttttacagatgatagcaaagttgcaagtaaataaaataaaacaaa

SEQ ID NO: 247699 - DNA, 624 bp, Homo sapiens
agaagggaaagaagccaaagagacttcagaagatattggactgctccatgaagtagtgtcattatgtcatatgacatctgacttccaacaaagcttgaacatttcagacaaaaacacaaatggaaaccaaacttaaatcttgcatccaagcttctatggagacattttgagattcaatgcaatctgtataataaacagaattatttgtaggaatggcaactcatactatttaaatttttttttgcatttgcaacatttttctcacttgttcatttcgaggatatatgaaatgcattgatttttaaatataaagcgaattctactgtgcttttaaatcaggtactagtktgtatgtatgtttaaagtatgtattgaccatgagatttcccagtgtttggtgcttaatgccgtttattttatttaagctaagaatgcatatgtaacccatgcacataaccagtagctactatactaatctggttgagcatgaactgatcaagatatcaaaacttatcaaaactagcctgaagctgatgaaactgttaacccactaattgccttaatcttaaagctgttttttaagcatacttaaataatgtatgaaagtatgtataaagtttgaag

SEQ ID NO: 247700 - DNA, 600 bp, Homo sapiens
gtgtttattgacccccacttaaggtttaaggacagagatgaaatgtagtcaagtgtacatgaacaatgttccagggaccagaaagatgagcttctcatccaagagctctgatggtttcacctaaagcaaaggtcaaattcctattgaaataagcacaacgtttccctctgggtgcagaatatctgggattaatatgctgaacctttcttatttatatagaagaagcaaaagcctgacaataagaaaagaaatattatccctgcaagcctaagrttccgctatttttgttgattttgattgtgaaaactttgcctgccaccatcaaagggattattagtctcattaccctcagtgtctctgtatgagaggcctggtcacatcttcattttatagatgcagaaaaaaaatctcagcttgtgtttacatacaaataaaataacctacgtagagtagtattatggtagtaggtctgggaatttcctttcctagaagtaacaatgaattattatatatgcatacaattttgtacatatatggaaaatagtgcattaatagcacaaaaataagagtatattgtggaaggttccagatgaataaaaa

SEQ ID NO: 247701 - DNA, 600 bp, Homo sapiens
gtgtttattgacccccacttaaggtttaaggacagagatgaaatgtagtcaagtgtacatgaacaatgttccagggaccagaaagatgagcttctcatccaagagctctgatggtttcacctaaagcaaaggtcaaattcctattgaaataagcacaacgtttccctctgggtgcagaatatctgggattaatatgctgaacctttcttatttatatagaagaagcaaaagcctgacaataagaaaagaaatattatccctgcaagcctaagattccgctatttttgttgattttgattgtgaaaactttgcctgccaccatcaaagggattattagtctcattaccctcagtgtctctgtatgagaggcctggtcacatcttcattttatagatgcagaaaaaaaatctcagcttgtgtttacatacaaataaaataacctacgtagagtagtaktatggtagtaggtctgggaatttcctttcctagaagtaacaatgaattattatatatgcatacaattttgtacatatatggaaaatagtgcattaatagcacaaaaataagagtatattgtggaaggttccagatgaataaaaa

SEQ ID NO: 247702 - DNA, 530 bp, Homo sapiens
gacacccacaactattgttttatgtgaagatkcttttcctttcaaggtgcatctttcatatgttttcaaattagctttattaaaatgtggtttacattcatcacaattcacccatttcataactataattcagtgaatgttgacaattacgtagtcatgcaaccaccactacatcaagactgagaacagttcctcaccctaaaagttattttgtgctctttgcagctgcctctcctctcaatcctaatccctggccatctctgatatgtttttactatagtttcgccttttcaagaattttacataaatgaattttttcacttcacatggtggtattgtcaatccttttaatttcagccattctggtttgtgtgtagtggtatctccttttggttttaatttttatttttcttatgaccgaagatcatgagaatcttttcatgtgcttattggcaattcatagatcttctttggagaagagtatattcaactattttgtgcattttgtattgtttctcttattactgact

SEQ ID NO: 247703 - DNA, 530 bp, Homo sapiens
gacacccacaactattgttttatgtgaagatgctttycctttcaaggtgcatctttcatatgttttcaaattagctttattaaaatgtggtttacattcatcacaattcacccatttcataactataattcagtgaatgttgacaattacgtagtcatgcaaccaccactacatcaagactgagaacagttcctcaccctaaaagttattttgtgctctttgcagctgcctctcctctcaatcctaatccctggccatctctgatatgtttttactatagtttcgccttttcaagaattttacataaatgaattttttcacttcacatggtggtattgtcaatccttttaatttcagccattctggtttgtgtgtagtggtatctccttttggttttaatttttatttttcttatgaccgaagatcatgagaatcttttcatgtgcttattggcaattcatagatcttctttggagaagagtatattcaactattttgtgcattttgtattgtttctcttattactgact

SEQ ID NO: 247704 - DNA, 530 bp, Homo sapiens
gacacccacaactattgttttatgtgaagatgcttttcctttcaaggtgcatctttcatatgttttcaaattagctttattaaaatgtggtttacattcatcacaattcacccatttcataactataattcagtgaatgttgacaattacgtagtcatgcaaccaccactacatcaagactgagaacagttcctcaccctaaaagttattttgtgctctttgcagctgcctctcctctcaatcctaatccctggccatctctgatatgtttttactatagtttcgccttttcaagaattttacataaatgaattttttcacttcacatrgtggtattgtcaatccttttaatttcagccattctggtttgtgtgtagtggtatctccttttggttttaatttttatttttcttatgaccgaagatcatgagaatcttttcatgtgcttattggcaattcatagatcttctttggagaagagtatattcaactattttgtgcattttgtattgtttctcttattactgact

SEQ ID NO: 247705 - DNA, 616 bp, Homo sapiens
acaaactatactcaaagtcacgaataaatcatgctttttttttttttgtagcatggaagaatctaatgactttcaacattagggcaagagtgttagataaaacataccaaaaatatttaaagtatttgctatgtctcccaaaacgaataattgaggcttcaaaacaaacaaacaaaccaaatcggtgagttaacgaggtggcaggtggtaagtatgggtatagttcctatgagttaatatcaaattaatatcctcagggattcggcagatacagcatttgatcctcaagaggtatgaaggagaaattaagacctctgtgtcaagacccttgatggaatgcctagtctattaaggtgggactagaagcattccaatctctgacccagaaaactaacaaagaaagcttttgtctgcctagggatctggatggaaaaataaacctagaaacaaacaaacasagaattctgtatacaaaaatcaaacttcagtatttgcttcatgtggttttgtagtagattatagtgtacataaattctgtttattatgcacatagcatagtactcccaaactaataaattacaataaaatgtagtcgacaacaagtggcaactctgaa

SEQ ID NO: 247706 - DNA, 538 bp, Homo sapiens
gatagtttcagtaggattggtatcaattctttgaatgtctgatcgaattcagttgttaatccatctggtccggtacgttttttgttggcaatttttttattaccacgtcattctcgctgcttgttattggtctgttcagggtttctatttctccttgatttaatcgaggagggttgtatattttcaggaacttattcatctcctggaatgarttgaattccaggagatgaatagtagtagccttgagtgatcttttgtatttctgtggtattggttgtagtatctctcccatttcatttctaattgagattatttggatcttctctcttcttttcttggtcaatctcactaatgttctatcaattctgtttatcttttcaaagaaccagctttttgtttcatttttcttttgtatttttttttgttgttatttcaattttattcagttctgctctgttctttgttatttcttttcttctgctgggtttgggtttggtttgttcttatttctctagttccttgaggtgtgaccttagat

SEQ ID NO: 247707 - DNA, 538 bp, Homo sapiens
gatagtttcagtaggattggtatcaattctttgaatgtctgatcgaattcagttgttaatccatctggtccggtacgttttttgttggcaatttttttattaccacgtcattctcgctgcttgttattggtctgttcagggtttctatttctccttgatttaatcgaggagggttgtatattttcaggaacttattcatctcctggaatgaattgaattccaggagatgaatagtagtagccttgagtgatcttttgtatttctgtggtattggttgtagtatctctcccatttcatttctaattgagattatttggatcttctctcttcttttcttggtcaatctcactaatgttctatcmattctgtttatcttttcaaagaaccagctttttgtttcatttttcttttgtatttttttttgttgttatttcaattttattcagttctgctctgttctttgttatttcttttcttctgctgggtttgggtttggtttgttcttatttctctagttccttgaggtgtgaccttagat

SEQ ID NO: 247708 - DNA, 611 bp, Homo sapiens
agaagccccagatgtgtctgcagtggtcttccagggagaacaaggaccccttctccaaaatccttcattatcacagaggctgcctgcctgttggggtagaggtacagactttccctactgctcycagtgctgcaattgtgtctctcctgtaagaaacttccaaccagcagaaagatctaggactcaaggcctactgttcagaattttttcttccacagtaccctgtggaagtattcccttcatgttggactctccccgttagcctaggaatgggacttcttgagagccaggctgcaatgattgttattgctcttctgtgtctagccacccggtgcagctaccagactccaggctggtcctcgggaatgtctgcaaaggatccagtgatacgacctgtcttcaagtctcccagcagtaggtaccagcacccactctgatggcatcacaggggagtaagatagattgtgagaatccttggttgtagacaggcttagtgagctggctctctcaaatgctggttatactagtagtgaaattgtcacatagacgcaggacctctggttagtcacggtgtttcaggcagtggtgttagctgagatcatgcagccatt

SEQ ID NO: 247709 - DNA, 611 bp, Homo sapiens
agaagccccagatgtgtctgcagtggtcttccagggagaacaaggaccccttctccaaaatccttcattatcacagaggctgcctgcctgttggggtagaggtacagactttccctactgctctcagtgctgcaattgtgtctctcctgtaagaaacttccaaccagcagaaagatctaggactcaaggcctactgttcagaattttttcttccacagtaccctgtggaagtattcccttcatgttggactctccccgttagcctaggaatgggacttcttgagagccaggctgcaatgattgttattgctcttctgtgtctagccacccggtgcagctaccagactccaggctggtcctcgggaatgtctgcaaaggatccagtgatacgacctrtcttcaagtctcccagcagtaggtaccagcacccactctgatggcatcacaggggagtaagatagattgtgagaatccttggttgtagacaggcttagtgagctggctctctcaaatgctggttatactagtagtgaaattgtcacatagacgcaggacctctggttagtcacggtgtttcaggcagtggtgttagctgagatcatgcagccatt

SEQ ID NO: 247710 - DNA, 522 bp, Homo sapiens
actgtacatgtctgagtttgttgccttcagccaggaggttgcactttccagagaggaccagctgcatttgtagcagtgggatttgaactgccctaagttgtccaggggaagtattctgattcctcaggcaatggrtgttgccataaagctcccaaaatttatgtcttttgtcttaagctaccagagcaagtggataaatactgcttgttgtgggcagggttaggtgggtctgagctcagacttttcttgggcagggtctgccacggccactgtggggatgggggtggttcttaggctgctggggtagtgttccgaaggggatatatgtacttgttttaaaatcagatttgtgtgtcccagatatgtttgagtgattcaaaaacttgtgttttgaacaatcttaggtgggataagccagtgctaaaaaccttcaaggtctgggcatctttgaaactgtcagcaaaagaaggattttgctgacaccagtttcaaagaacctagtcaaggttaagggaaggactg

SEQ ID NO: 247711 - DNA, 557 bp, Homo sapiens
tctatgacaaagatgacaactaggtctttgattctttgagcatycgatccaggtagttaatctttcctgtatctggttcattcgctacactgggattacctgtaaaatacgttagaactaaaaggtggaacatagggatatggaaaaagtaactacaagctgaggatttaatattttctggcattttagatgtcatctcttaattttcaccacaatctaatgatatagagattattgcatgtatttaaaagatgatttaagcaatttgtccaaagtcacacagctagtaagcagcttagaatccaaattatcagggcttgtttaattacgcacagctgcatccttagatagagcactatataaatgtaaccccaaatctaccccataatttcaactgtattacccttagttggcatatctgcagactgaaagaagagtaaaaatggttattttatatttcaggtctcttactatgcacagtgcttatgtaaccaatcatgcttctctgattactgatgtttgcttagtgtgtgtgtgttttgttttttttggacttt

SEQ ID NO: 247712 - DNA, 353 bp, Homo sapiens
tttcatgcaggtatttttttcttaggctgcaaaatacataagcttggggatttgttgtagactttagataagcaaggtaacacttctggatctcagttgcctcaactgtaaaatggagggtagtacagattgtacctactttcaaaaaatttatgtattacaagcatcttaattttcttatgtctaaaaagttatattttctcattcgtctgcctatatcccttattcctycccctcccaaaccccaggaatttaaatttaccctgcattttgcctttttaatatttgtctgccacctggtgatcaaaatggtaactgcaaggttaacagtctccttggtgcatcaggggagt

SEQ ID NO: 247713 - DNA, 573 bp, Homo sapiens
gagactcaagaatatgcatgtttaacaggctctccaggtaagtcagtcttaccataagagagcaagcagtctgagactacactctgagaaacactatttaggatattgaaatcagttaacaagagatgctgggagaaaaagtatcctttatcctgataaactgtctcctcttgtacatttcttctgtcattatgtctctatattcccccatgtcacattacattttatcattttttcatgttataaaatacatgcttgatgcaattaccatctcctatctattcataactcaaatctttcttaacactccaaaactgttgaatcttcatttactagtaatacaagtgctgacattagctatagattacataccatgaatcactatcatgaaaaagaataataggaaaatgtagaaatctgtaacaattttttatgttaaaagcttytaaatatcttctgaaaatctgtagctaacataaaaggaaatatttcactttggtcccactccttttattcaacatcttattatgtcagggaaagtagatcacagcacaaaacagagcaagtgctcag

SEQ ID NO: 247714 - DNA, 595 bp, Homo sapiens
ctacctccacccccaaaaaagattacgatgtaaggaatatgattccagtctttttaaagtattattatatataaatagtttttttaaaagatttttactttagaaaataaaaaaaaattaaaatgcaccttacatctctgcaaaagaaaattccttaatgtgtatttttaaaaataaaacatgaaattcacaactcagttctccacaaatcaagaacacaatgttctcyggacaatcacaacacatatgctcactaagaatacaggcaagtcaagccattcctcagcctttattataccagatccttgactgcataattgttgcctgagttataagggagtattaaacacaatgccacaagccattccaaaccaaatcataaatatgcagccttcacttccaaaactagtcaatgatagctcctgagatccctgtggatgtgtagaaaataggaaaagaatgtacctgttctagaactatgctggccaataaggtagctatcagtcatatacacacttgatatttgacttgtctcaactgagatttgccgtaagagtaaacagacactgtatttagaagactcagtacaaaaaaa

SEQ ID NO: 247715 - DNA, 595 bp, Homo sapiens
ctacctccacccccaaaaaagattacgatgtaaggaatatgattccagtctttttaaagtattattatatataaatagtttttttaaaagatttttactttagaaaataaaaaaaaattaaaatgcaccttacatctctgcaaaagaaaattccttaatgtgtatttttaaaaataaaacatgaaattcacaactcagttctccacaaatcaagaacacaatgttctctggacaatcacaacacatatgctcactaagaatacaggcaagtcaagccattcctcagcctttattataccagatccttgactgcataattgttgcctgagttataagggagtattaaacacaatgccacaagccattccaaaccaaatcataaatatgcagycttcacttccaaaactagtcaatgatagctcctgagatccctgtggatgtgtagaaaataggaaaagaatgtacctgttctagaactatgctggccaataaggtagctatcagtcatatacacacttgatatttgacttgtctcaactgagatttgccgtaagagtaaacagacactgtatttagaagactcagtacaaaaaaa

SEQ ID NO: 247716 - DNA, 586 bp, Homo sapiens
ctttaaaagcaagtttctattacaaaagataaaagaagtgtaattatatttcctttcagcaatcacttattgaatgcctatttacaaagcacagtaccaaggctgtgtggtggaggcaaggtacacctagatgcctgagttctaacaattgaagactgagaggagaaaaagcatgactatacttttccaagggcaaactgaaagcaatatttgtctcctgaagtaataaaatgttctccaarttactctagaagctgaatgaatctttctaacctgaccaccctagaaatttgttagggacttcatttaccattaaacacaataaagattacagcagaactgtggcaaacctggaactaatataatattctctggggcccttttttttctttataacatatattatgacaatttaacatgttaaaccttcatgttagattacaggaaatattcaatgaattaaacatatccattgacaatctgtgtggttctaagagtttaatttgcttacataacttaatattttttgaaaagtttattttagaattccctgaaaaaactaattctctcaaacttatccccaaat

SEQ ID NO: 247717 - DNA, 609 bp, Homo sapiens
taaataatcattttatttagtctgatgcttgcttgattatattgtgatatttctaataatctattagattttataataacaattataataattgtttctaagcaaatgaactattttactgtatgttcaacctcctacagaacsctgtataattttctaaataatggaatctatgcagcagcgggatctatttataaattcactgcattttcagtgtcattattgggatatattcctgagtaactgctgtggagacagaaagtatcaaaatatacagcagaaatttgaaccatataaagcctgatgggcctgacaaaggttaacagaataacataacattcagctctactccttttctcaccctcgtctcatctcaaaatatatgcaggaaatgcctcctttttcaacctccttcgcattctgaagagaatgtagaactttgttttaaaattgaagccaatgtaaccaacatttgcctatttttaaaaagctcttccttcattctgattggctttagaaacaggcctaatattgacaagaaatttatagagttagtgagagttttcatgctaatatcaacattttattcttttttgctcactcagttcc

SEQ ID NO: 247718 - DNA, 558 bp, Homo sapiens
aagtaactagttttaatcaatccatatggttgcatacttagagttttcttagaaatacattttacatttagcattgaccttggtatgtctaatattttctaggtatttttcacatatttctaagggctaaaaatatttattcatttayactttcattcagtcaatagatatttattaacagctttctcttatccaagcacatgtttgggaacagtcaacttttgttttatgatacagattaaaccaaagggacatattaatttgtgatcaactaataaaccaacagagagcttctaaaagctgaaggattttctaattttacagagcataaagaaccattttattcattttaaatctcaaactatgctgtgtttcataaggaaatcaaaggatatataaggtgtatacacttaggtacacatatatttttagatattttttaaattgatacataataattgtacgtagggatgtttcaatacatacaatgcatagtgatcagatcagggtattagcatatgttccaacatttttcatttctttgggactattcaatat

SEQ ID NO: 247719 - DNA, 626 bp, Homo sapiens
gaaacttaatcagcaatatgatggtatttacaggtgtggccttttggaagtgatgagattatggggacagagccctcatgaatgggattaatgcccttataaaagagaccccagagaactctctcttcctttctgccatgtaaaaacacagcaaggagacagctatttatgagctagaaagctgatcctcaccagacagaaaatctgcttagcacagatcatgggatttctcagcctycagaaccatgagaaataaatttctgttgtttataaaccatgaagactatggtagtttgttatagcagcccaaataaatcaagagagtgtacaaaacaattggcatgtaattctccaaaaatataaatgtcatgaaatagtctttcacgaagactcagaaactgctccagtttaaaggatattaaagagacatgacaactgattgaaaagcatgattttgtaatttcattggctacacagaacattattgggacaattattgaaatttagaataaagtctgtagattagataacaacattttatccatgttaatttgctaattttaaccactgaactgtacctatgtatgataattccatgtttttaggaattatttaagtatttagaa

SEQ ID NO: 247720 - DNA, 580 bp, Homo sapiens
taaacaacataactgaaggaaaaaaatagtaaaaaatatataaataaaataaagaaagaaaattaccctctagtaattcaagtcccctttttcataagcggtgccagagtaaaataaaccaataaaacatgagagacttcactcaaatgtccagaatctttaccaaaaatagtcaacatgaaaagtctttatacctgcaatgttttccactgcttttctcagtattatttatagatctgagttatatattaaaagtggttattaaagctaagccaaaaagaaggaaggctgataaagttttaagcagttttgtttcaagatcaaactggacagatctgcaaagaaaatcacaactatttgcraattttagtgaaacaaatggaacttttacagcaaattcaatgtttacccttaaagataactgaacttaatgactcaaaactttaattatgaggtagttacaaatgtatgtggttccattttgataaagacctgggagaggatccaaggagcaaagttatttgcaaaaaaagttaggcaagatttgatggagtgtacttgttgaatacgaatgactgaa

SEQ ID NO: 247721 - DNA, 580 bp, Homo sapiens
taaacaacataactgaaggaaaaaaatagtaaaaaatatataaataaaataaagaaagaaaattaccctctagtaattcaagtcccctttttcataagcggtgccagagtaaaataaaccaataaaacatgagagacttcactcaaatgtccagaatctttaccaaaaatagtcaacatgaaaagtctttatacctgcaatgttttccactgcttttctcagtattatttatagatctgagttatatattaaaagtggttattaaagctaagccaaaaagaaggaaggctgataaagttttaagcagttttgtttcaagatcaaactggacagatctgcaaagaaaatcacaactatttgcgaattttagtgaaacaaatggaacttttacagcaaattcaatgtttacccttaaagataaytgaacttaatgactcaaaactttaattatgaggtagttacaaatgtatgtggttccattttgataaagacctgggagaggatccaaggagcaaagttatttgcaaaaaaagttaggcaagatttgatggagtgtacttgttgaatacgaatgactgaa

SEQ ID NO: 247722 - DNA, 494 bp, Homo sapiens
tctgttgaaggaatgaaggactaatggaaagagatacacatatgagaagtaaaaaacagaaaaaagaccacatcaatagttacaatcactggtaagaaaaccccaaaatagatctagtctagaaaataaattcaaggaagagtrctttctgatcatggtaatgaaactgagagaagatatttgggaatagaaagagagtagttttgctaatcttgaggatgagaaagttgaataagaaagccttcctgatggggagtaatttggggtgaatctaaattaaaggccacactgagcagactgaataaagttattcatccattgaatcagcatttactgtgagccacctaagtactaggcactagaggaaaattcattaatagatagtccctgaatttatgtgcttatattctacaagagacagctattaaataaaaaagttacataatcaattaattataattgtgttaaatgctataaaagaggcacatagaggg

SEQ ID NO: 247723 - DNA, 620 bp, Homo sapiens
gggagtaatttggggtgaatctaaattaaaggccacactgagcagactgaataaagttattcatccattgaatcagcatttactgtgagccacctaagtactaggcactagaggaaaattcattaatagatagtccctgaatttatgtgcttatattctacaagagacagctattaaataaaaaagttacataatcaattaattataattgtgttaaatgctataaaagaggcacatagagggccaaaggggcttaatctttctgggggtaccaggaaggagaacctgagacctgaagggcaagtgtgtgggggtgggagtggaataacaggaactttctatgttctatgtactayaggtattcaatgaatatctatcaagaattgttatgttcctgcactacatacaccaacacttaccatctcatttactcttcaaagcaaaccaatgaacaaagtttcactatgctcatttaacagaagagaaaattgaggctcagagagataaaatatcttgaccaaggtcacacaggttgtgagccaagattccagtccaaacctgttcaggattttcccatatcagtcaagtgtcaggcaacctgttaccaagatctctgctat

SEQ ID NO: 247724 - DNA, 571 bp, Homo sapiens
aagaggttttcatacatcaacagcaacatcacctggaaacaatttttgattagttaggcacttactaattattccctgcttttctttttttgagatgaagtctcactctgtcgcccaggctggagtgcaatggcacaatctgggctcactgcaagctccccctcccaggttcacgtcattctcctgcctcagcctctcaagcagctgggactacaggtgcccaccaccacacccggctaattttttgtattttttagtagagacggggtttcacaccatattagccaggatggtctcgatctcctgaccttgtgatctgcctgcctcrgcctcccaaagtgctgggattacaggtgtgagccactgcgcctggccaattattccctacttttaaaataaattataatcgtgctgagagaataaaaaaattaaaggaaagagttcagtgagccgtgatcatgcaactgcactccagcctgctcaacagacaacaaacaaacaaagttatcattcaaaatgtttcccatggccagatgcagtagctcctacctctaatacctgtaatgcccgc

SEQ ID NO: 247725 - DNA, 585 bp, Homo sapiens
tgttcgtgtgtgtgtgtgtgtgtttcaagaaaagtttcagccaagcaggtggctcacatctgtaatgccaatgctttaggaggctgaggtgggagaatcacttgatcccaggggtttgagggtacggtgagctatgactgcaccactgcactccagtctgggcaacagagtgcctctgtctctctaaaacataaaagaaattttaatgcracttaaatttttaaggtcaagccttctctgtacaatgaaaacctatgcaatccaaggagattttcaccgtcaaaggagatccttatactgggaagggatatgttgaatcagtaaataaaagcaacttttgcagatttgcaacaaatgcctaatgggagaatttgcttagaatgaatcacttgggtgggtgaacaaacttactggttctgcatcagcaaacatagagtaaatagtgtcttaattttctttccaaagaccagaagaattttgaaaagaaaaataaaaccctaaaatattgttatgtcacacaagaagtggaagtaaacaggcagaaaaaacttctaaagctaagcacttaggaactgagtgttagta

SEQ ID NO: 247726 - DNA, 585 bp, Homo sapiens
tgttcgtgtgtgtgtgtgtgtgtttcaagaaaagtttcagccaagcaggtggctcacatctgtaatgccaatgctttaggaggctgaggtgggagaatcacttgatcccaggggtttgagggtacggtgagctatgactgcaccactgcactccagtctgggcaacagagtgcctctgtctctctaaaacataaaagaaattttaatgcaacttaaatttttaaggtcaagccttctctgtacaatgaaaacctatgcaatccaaggagattttcaccgtcaaaggagatccttatactgggaagggatatgttgaatcagtaaataaaagcaacttttgcagatttkcaacaaatgcctaatgggagaatttgcttagaatgaatcacttgggtgggtgaacaaacttactggttctgcatcagcaaacatagagtaaatagtgtcttaattttctttccaaagaccagaagaattttgaaaagaaaaataaaaccctaaaatattgttatgtcacacaagaagtggaagtaaacaggcagaaaaaacttctaaagctaagcacttaggaactgagtgttagta

SEQ ID NO: 247727 - DNA, 474 bp, Homo sapiens
ggtggctgtgcttccaaccccacctcccagcaagaaaagaacattcaagaccaaattctctatctcacctttacagaaagccaatcccccaggaacagaacagtgtcttcttctctatatttataacaccaaaaacattgttggtactcagtcaatgttaactaataacratgttgatagtcatgactttccactcctggcaagttctagcaaagtctgaaggcatgctgttctgaacatttataactgaaatacgagaagcctttcatgaagccgcagtttcagttgctgagagtcagggaaatgcatcatgtttcagcaagttgctagtagctactacattcaatttctacatattctcataacccagggtacaatcaccaattagaaaagaaaaaataaattcattaaacacctagtttcatcacctaaaaccagcaaatgctttgttgggacttttcatgattcaactaa

SEQ ID NO: 247728 - DNA, 583 bp, Homo sapiens
gaaaagctatatgacactgatttaggcaatgattttttgaacatgactccaaaaccaaaggcaacaaaagccaaaatagacaagattgcatcaagctaaaaagcttctgcacaacaaaggaaataatcaactgagtgaagagacagcctacagattaggagaaaatatttacaagctrtacctctaataaggaatttgtatccaaaaatataagaaactcaaacaactcaatggcaagaaaataaccttattgaaaaatgggcaaaggaactaaaaagacatttttcaaaagacttacaaatggccaacagacatatgaaaaactattccacatcactaatcatcagaaaaatgcatactaatactacaatgagctatcacttcatacttgttagaatggctattatcagaaagtcaaaagatattaagtgttggcaagaatgtggagaaaagagaacccttgtacactgttgatgggaatgtaaattagtacagccattataaaaaatagtatggaggttctttgaataattaaaaatagaactaccatatgatccagcaatcccactactaggtatatatc

SEQ ID NO: 247729 - DNA, 563 bp, Homo sapiens
gtatatacaaagctttgctttgctgccagactttctctaacatctaaaaagtgtagaaagcaccgtyattataggctaaaattgatctcatttatcccaggagtaccaacattctcaaacaggggttcaaactcctgttactataattcttgggcctgttatttcaatgagaatctaattttcttgcaataacaaatggggagatgggagacagtgtcttccaattacaaagaccatgctcctgatattatcagcaaagcgtacctctgggtcactttcaccagaagcaggtttgggccttagttacaccctctggaccaaagtgatgtgaatttaagtgtatttgttagtgaactgtctgatctgggctatggaacagactaaatggaactaatccatctaaacgggaaactcattagacaggtagtcagcctaacttggctactttattacagatagatccaatattaaaaataagatccaatatttaaaaataaaatagtaccttctttttcagggagaactatactaaataagaacagttgatatacatatattcatat

SEQ ID NO: 247730 - DNA, 563 bp, Homo sapiens
gtatatacaaagctttgctttgctgccagactttctctaacatctaaaaagtgtagaaagcaccgttattataggctaaaattgatctcatttatcccaggagtaccaacattctcaaacaggggttcaaactcctgttastataattcttgggcctgttatttcaatgagaatctaattttcttgcaataacaaatggggagatgggagacagtgtcttccaattacaaagaccatgctcctgatattatcagcaaagcgtacctctgggtcactttcaccagaagcaggtttgggccttagttacaccctctggaccaaagtgatgtgaatttaagtgtatttgttagtgaactgtctgatctgggctatggaacagactaaatggaactaatccatctaaacgggaaactcattagacaggtagtcagcctaacttggctactttattacagatagatccaatattaaaaataagatccaatatttaaaaataaaatagtaccttctttttcagggagaactatactaaataagaacagttgatatacatatattcatat

SEQ ID NO: 247731 - DNA, 592 bp, Homo sapiens
gtcttctggggaagactttgtgcattgagacttagacaagttatttcctttaatacaataaccttataaagcatgtactaatattccccagtttatagatgatgaatctgaggaacctggagaggttaagttacttgcccatggacctggagagtaaatggctgagctgtgcttggacaccaaaacctacctttgcccaccatactgggagaccagaattgtcctgtggattcggagaaggctggacaggactggttggaggggatgcaattatggaaagagtagatggagtaataaagaacataaccttcgtaagtagtaaatgccaggcactgtgctcaatacttgacttgcctttcctcatttaatcttccacaaaagtactactagtttgtccactttacagtgaggaaaacaaagcacagaatagttaagcaaatcacccaaagttacacagccagttagcaagtcttacaatkaattcataatattatttcattgtttattttccccatattcatctctctttttgttttctatttctttcttacagaagggggggaaggggacatgttttataatttactgattt

SEQ ID NO: 247732 - DNA, 592 bp, Homo sapiens
gtcttctggggaagactttgtgcattgagacttagacaagttatttcctttaatacaataaccttataaagcatgtactaatattccccagtttatagatgatgaatctgaggaacctggagaggttaagttacttgcccatggacctggagagtaaatggctgagctgtgcttggacaccaaaacctacctttgcccaccatactgggagaccagaattgtcctgtggattcggagaaggctggacaggactggttggaggggatgcaattatggaaagagtagatggagtaataaagaacataaccttcgtaagtagtaaatgccaggcactgtgctcaatacttgacttgcctttcctcatttaatcttccacaaaagtactactagtttgtccactttacagtgaggaaaacaaagcacagaatagttaagcaaatcacccaaagttacacagccagttagcaagtcttacaattaattcataatattatttcattgtttattttccccatattcatctctctttttgttttctatttctttcttacagaagggggggraggggacatgttttataatttactgattt

SEQ ID NO: 247733 - DNA, 638 bp, Homo sapiens
tggtatgaataacccgaacctcagccacaaacyctgagcttcctgaaaggtgtagtggttcttggcagattgtggtgactggcatatgaactctcctaatcatatcccggaaatacaaagagttgtgtggagaactgaaagaacttttttcactagattcctagaatttgagagctccagaagcagcacagctgttggcttcccctgagagagcaagaagggagatgtactctcctttctactctgcaggtgaatagtgttctggtactgccctagatacaacagagaacattcatagctggaacaaactggttggtgtctgccgttaggcaatcaagagactaatgaacatgggtcaaggtcactggtagagcagagaccagtacaaagtgacatcctgggcagatccatgcaggggcaattgcaaggcaccccccagagtctcagagatgctaagtgaaagaggttgtgtgagttactgaggtttatgctggagaatatgagcatagagctattgagactggagaactgattttaatgtgacctaatttatatctaccagcttgaagattaaacatctaaaaccctattacttcattactaattaattatgtgtttgttacaataatctatctgac

SEQ ID NO: 247734 - DNA, 638 bp, Homo sapiens
tggtatgaataacccgaacctcagccacaaactctgagcttcctgaaaggtgtagtggttcttggcagattgtggtgactggcatatgaactctcctaatcatatcccggaaatacaaagagttgtgtggagaactgaaagaacttttttcactagattcctagaatttgagagctccagaagcagcacagctgttggcttcccctgagagagcaagaagggagatgtactctcctttctactctgcaggtgaatagtgttctggtactgccctagatacaacagagaacattcatagctggaacaaactggttggtgtctgccgttaggcaatcaagagactaatgaacatgggtcaaggtcactggtagagcagagaccagtacaaagtgacatcctgggcagatccatgcaggggcaattgcaaggcaccccccagagtctcagagatgctaagtgaaagaggttgtgtgagttactgaggtttatgctggagaakatgagcatagagctattgagactggagaactgattttaatgtgacctaatttatatctaccagcttgaagattaaacatctaaaaccctattacttcattactaattaattatgtgtttgttacaataatctatctgac

SEQ ID NO: 247735 - DNA, 607 bp, Homo sapiens
actgaaccttcagggtagattttaatgacaacctggttgtcttagtccattcaggctgctataacaaaatacctgagtagattagaaatagcagaaatttattgctgacagtcctagaagctaagaagtccaagatgaaggcatcagcagattggatatctggtgatggtttacttccttgttgatggacaactatctattcactgcaagctcacaaggctcaaggggaaaaggatctaggcttctttcataagggcactaatcccatttgtaagaaccctgccctcatgacttaatgacctcccaaagccccacttcctaataccatgatattgggggtgaggatttcaaaacaagaattttgggaggacacaagcagtcagatgatagccctggtttaacccatatggctcatgttctctcccctagcacccttgtatttccccttgtaacactcatcacaayctgcacttgtatattcatttatctgtctgaatgcccgtctccacactaggatacaaacttcttaagggcagggtttacatctgctgtggtcactgttacacaatctccctagcacagtgcctggtacacagtaaatgttcca

SEQ ID NO: 247736 - DNA, 639 bp, Homo sapiens
ataaacaaaaagaaaaagtgaaatctatataaggattatatgataacagtttgcagggagaacaatttaaaaagaagaggggatggggaatgccaggaacaggcatggtgaagatataattattaaaaacaaaataaaaggatagcctcactctgaagatatccaaataaaggatggaaagaggtgaggaaagaaaacaatggcatatcaggctgatgcaagttctggctgaaggacttgagaacatgaagtacctgaagcaggactttgcttggatagttgtgggaatggaaggagaccagagtgactggaccagaggaggaggagtaggagctgaatctgagaggccacaggaaaaaatagtagattattataaagaccttcaatttcattttgrggaaaatcagaagttactgaagtattctgagcaaagaagtgacctaatgccacctagactggagcagcctcactctgctgaggggtgcaaaacaggctgaagcagggacactggtcaggaggtggtgcagcaacacaggtgggaaagttggtggccggaaccaagctggttgccatggtgatggtgagaaatgggcaaattctgggttatattttgaaagaatgctggctggatttgctgat

SEQ ID NO: 247737 - DNA, 604 bp, Homo sapiens
agaataatttagtactcaaaaggcagaattcctttttaggaaaaaaaggatattcagataaattttttcaaataatcatttgaaagcttaaaaatataaaaatgtatttaaactagaacccaataatttagaataattaatagtttcaaagtcactgtagtataattaagtagaataatctttgcattcaagtgtagaataaattcaaggctagttattaaatactagttgcccattgtggacagatgccctctcattcacctagyattttacacactcttccttgctgtttttaacattctgactcgagggtgaatctataatgctgagcacttgaaacttttaactcgcctacctctctctataattggcatattccattcctaaaaaaatcgcaatagactatataaatcacttaataggcacaacaaagcaaaacatgaacaatacacgtcccaaactgatgagacacaaaactattaatgtgaaactgaattgcctagctctgtatcttatacttttctctctgggaagcacatttgaaatgtgggaaataattcaatggggaatataatgtgattttatctgttgtttttagttccaa

SEQ ID NO: 247738 - DNA, 604 bp, Homo sapiens
agaataatttagtactcaaaaggcagaattcctttttaggaaaaaaaggatattcagataaattttttcaaataatcatttgaaagcttaaaaatataaaaatgtatttaaactagaacccaataatttagaataattaatagtttcaaagtcactgtagtataattaagtagaataatctttgcattcaagtgtagaataaattcaaggctagttattaaatactagttgcccattgtggacagatgccctctcattcacctagcattttacacactcttccttgctgtttttaacattctgactcgagggtgaatctataatgctgagcacttgaaacttttaactcgcctrcctctctctataattggcatattccattcctaaaaaaatcgcaatagactatataaatcacttaataggcacaacaaagcaaaacatgaacaatacacgtcccaaactgatgagacacaaaactattaatgtgaaactgaattgcctagctctgtatcttatacttttctctctgggaagcacatttgaaatgtgggaaataattcaatggggaatataatgtgattttatctgttgtttttagttccaa

SEQ ID NO: 247739 - DNA, 491 bp, Homo sapiens
gtttctcaatttttgggggtgatttcatatacattcttaggactgtgaccaaacttgggaaatatctctatcaaatgtctttcatttgtgaactgtaagatttggaagaattttcaaagagcagttcctggctttatatgttttgaacattgtgtctccttcactccacacagacttgtggtgcctgaagctctgggcacattgattttggagtgatctctgggcttgcactttcatgttaccagcaccatggtaatcaggtgtgttcgtggaagctacacccagacagccagcaagaacctaagggtacagggaagagactgagaaccacaagaatataatcacaccaaactgaaactaaatgaatctttaactcagtttctaattagccagatcccaaaatggcccacagtcaccccagtgctaactaacccaagggaaaagtgtgatawaggcaaaatcagtacgtagacattgatcttaaacttctg

SEQ ID NO: 247740 - DNA, 504 bp, Homo sapiens
ccaaacttgggaaatatctctatcaaatgtctttcatttgtgaactgtaagatttggaagaattttcaaagagcagttcctggctttatatgttttgaacattgtgtctccttcactccacacagacttgtggtgcctgaagctctgggcacattgattttggagtgatctctgggcttgcactttcatgttaccagcaccatggtaatcaggtgtgttcgtggaagctacacccagacagccagcaagaacctaagggtacagggaagagactgagaaccacaagaatataatcacaccaaactgaaactaaatgaatctttaactcagtttctaattagccagatcccaaaatggcccacagtcaccccagtgctaactaacccaagggaaaagtgtgatataggcaaaatcagtacgtagacattgatmttaaacttctgcagttaaaatgtctcactcatgcaaaattctaaaagcaaaggagcatgccatcccacccct

SEQ ID NO: 247741 - DNA, 571 bp, Homo sapiens
tgcttttatttctggacaatgtttttacattttttaagactcctattgtgatttttattaaaacaaagttagatytatagaaaagctggaaagaatttgaagttttaacgatattcgctctccctttccagaatatgtggcaaaggagggaaaagaagggattctgaaggaacacacgggaagtcggcagtgtgggagtgatggatatgttcattcccttgcttgtggtgatggtctcactggtgtatacatttgcagtaattgtcaagttgtacactttaaaatatgtgcagtttattttatctcagttacatctcaatgaaactttttttttaagtggcaccaaacatacattaaatagctttcagccaaaagtaaaaactgagtttggtcagaatatttttgtgctattttggttagatttcttctgtcacagttataatggctttctaaaataaactaggaagccggagaaagtcactttaaccttcaagagtagggaaactgaacccataaaaaaagtgcttccaggtcagactcagcctaaaaaacctgaaaaataaatgtgact

SEQ ID NO: 247742 - DNA, 516 bp, Homo sapiens
aaagaatttgaagttttaacgatattcgctctccctttccagaatatgtggcaaaggagggaaaagaagggattctgaaggaacacacgggaagtcggcagtgtgggagtgatggatatgttcattcccttgcttgtggtgatggtctcactggtgtatacatttgcagtaattgtcaagttgtacactttaaaatatgtgcagtttattttatctcagttacatctcaatgaaactttttttttaagtggcaccaaacatacattaaatagctttcagccaaaagtaaaaactgagtttggtcagaatatttttgtgctattttggttagatttcttctgtcacagttataatggctttctaaaataaaytaggaagccggagaaagtcactttaaccttcaagagtagggaaactgaacccataaaaaaagtgcttccaggtcagactcagcctaaaaaacctgaaaaataaatgtgacttctgagtagcagtatatgggaaaaattttctata

SEQ ID NO: 247743 - DNA, 636 bp, Homo sapiens
tcctctggaagcttcgtccaagaggggcacccaacagatgccagccagaactctcctgtatgaagtgtctgtcaacccctgctgggagtatctcccyatcgggaggcacaggggtcaggggccaacttgaggagggagtctgttccttagcagagcttaagggctgtgctgggaaatctgctgttctcttcagagctggcaggcaggaacatttaagtctgctgaagctgtgcccaaagccacccctccccccaggtgctctgtcccagggagatgggagttttatctgtaagcccctgactggggctgctacctttctttcagagataccctgctcagacaggaagaatctagagaggcagtctggctacagcaactttgtggagctgcggtgggctctgcccagtttgaacttcctggcagctttgtttacactgtgagggaaaaaccacctacttaagcctcagtaatggcggacacccctccccacaccaagctagagcatcccaggtcgacttcaggctgctatactggcagcaagaatttcaagccagtgtatcttagcttgctgggctctgtcagtgtgggattcactgagcaagaccccttggctccctggcttcagcccccttccag

SEQ ID NO: 247744 - DNA, 546 bp, Homo sapiens
ccttgtggtataggcacccaagagaatctcctgatctgtggctagtgaagaccgtgggaaaagcatagtatctgggctgggtagcttcgttcctcacggcacagtccctcatgacttcccttgggtagaggagggagttcccgagccccttgtgcttcccaggtggggagacgccccaccctgcttctgcttgccctctgtgggctgcacccactgtctaaccaggtccagtgagatgagctgggtacctcagttggaaatgctgaaatcacctgccttctgtgttgatctcactgggagctgcaggccggagctgtttctatttggccatctttattctcttacaattgaaaaataatgatcttaaaatttttgtctccacaaacaaaagcaagtaaattatctcagtaatatagttttaagaatagttgctcttttttaaytgttggcaggggcataagggataagagaagaaatagttaagaacacaggtgggttcaaatctactctctggcacttactagctggggaactttgggcaactca

SEQ ID NO: 247745 - DNA, 511 bp, Homo sapiens
tagtagggccttcatgtacagctgtgcagggcgtgcactgcacaactctagagtatgtcatttacactggggtctatgtgaatggtgccccctggagttgtgcagggtgaaatctctacaaaggtacaaggcagactgtgatagcttcaaaagaataccgtgtttgacttgcctgggagtcgtttagagaaagtattgctcgaggctttttgtgacatactttctcggtttcagaagggctgttaggcactcgaaatgactttagctcagttttaaatttggaagatggtttggtataataagggaactcctgagacgatttgaggtttagagatctggatttagggctctaggaactttatctcttgtaagaggtacttagattcctattacaatggctcattacacatgggtgtgaacacacacactcacactcacgccttccttttatgygctagggaacactgggactaagaaccgcagcactgaagcttttatgcatttgaatgtg

SEQ ID NO: 247746 - DNA, 553 bp, Homo sapiens
ggattgtagtattggtaattttgccttactatcaaaaggagtaggagcattggatgcggtggctcactcctgtaatcccagcacttcaggaggccgagttgggtggatcacttgagatcaggaattcgagactagcctggccaacatggtgaaacctcgtctctactaaaaataccaaaaattagctgggcatagtggctcatgactgtaatcccagctacttgagaggctgatgcaggagaatcagttgaacccaggaggcagaggttgcagtgagctgagatcgcaccactgcactccagcctggatgacagagagagattccatctcaaaaaaccaaaaccaaaacaaaatgaaaggactgggagcataatctcacctgggaagcaccactggggactcagactcctcatcccaatgggcaaagaatcccagcagctgagttgctggcccaaagcaaggggaacayggaaaaaaggtggagaagagaagtcacatataattatctatagccaggtgaccagttgcagaaacaaagatagtggtctctatt

SEQ ID NO: 247747 - DNA, 594 bp, Homo sapiens
ttggtttattcttgcttttctaattccttgaggtgccttgttagatttgaattttttctgattttttgatgcaggcatttattcctataaactactctcttagcagtactttcgctgtatcccataagttgtggtatgctgtgtttaaattttcatttgttttaattttttataatttctcctaatttctttatygactcaatggttattcagaagcatgttgtttagtttttatgtatttgtgtagtttccaaagttcctcctggtattgagttctacttttattccattgtggcctgagaagatatttgatataattctggttctttataaatatgttgagactggttttgtgtcgtaacatatggtctatcctggagaatgttccatgtgctgatcacaggaatgtttattctttagctattgaatgaaatgttctgtaaatgttaggttcacttgttctaacgtgcagtttaaatccaatgtttcttggttaattttctgtctttatgatctgtttaatgctgagagtggagtgttgaagtccccaactattattagattggaatctacttcttcctttagatctaatag

SEQ ID NO: 247748 - DNA, 629 bp, Homo sapiens
ccatcaaactaaaaagcttctgcataacaaaggaaactaatcaatgaagtgaagtgataacccagagaaaggaaaagatatttgcaaattaccaatccaacatgggattaagaaccagaatatataagaaatgcaaacaatttaataacaaaaaattaataatytaattttaaaataggcaaaaagacctcagtagacatttcttgaaaaacataaaacagaaatggcccatgggtatataaaaaagttcaatatcattaatcatcagataaatgcaaagcaaaattacaatgagatatcatctcaccccagttgaaatggcttttattcaaaagacaggcaataacaaatgttaatgaggatgtagagaaagaggaacacttgtacactgttggtgagaatgcaaattagtacagacactataaagaacattatgatgatttctctaaaaactaaaaataggactaccatatgactcagcaatcccactgctgggtatatatccaagagaaagaagatcaggatattgaagggatatctgcattcccatgtttattgcagcactcttcacaataaccaaaacatggaattaacttacgtgattaccaatggatgactagctaaagaaa

SEQ ID NO: 247749 - DNA, 555 bp, Homo sapiens
tatctaatacttggtaaacattagattattatatttctctttgtgaaaacagctcaaatgaataacgaaaatgtctactttatacttcacatttcatgaagcttcgtgatttaaaacagagcaacttggcctggtgcagtggcttgtgcctgtaatcccagcactttgggaggctgaggcaggtggattgcttgagctctgaagttcaagaccaggctgggcaatatggcaagaccctgcctccactaaaaatataaaaaaatagccaggcattggggtgcacacctgtggtcccagctactcgggaggctgaggcccgagaaccgcttgaacccgagaggcaaaggttgtagtgagccgagatcacgcagctgcaatctagcctgggtgacaaagcgagaccctgtctcaaaataaataaagaaaatagagcarcttgtttaatctcacaaaaacctgatgatgtataagtattaccatcccttttttaaacagaagaaacagagtttcagagaggtcaattgtcttccttggctcacaaaacttgacagaata

SEQ ID NO: 247750 - DNA, 613 bp, Homo sapiens
agtttaaggaataaactcaccatctagagatatctagaagtttcgctccttctctcctactgtctctagctcccagattttactgagataatttagtactttttaagcaaagtatcctgatgcttttcctttaaactagttctttcctttttaaagaaactctatttctaatttctaatatctaatcctagtcattgtaccactgagaaagtgctgctgttcttcttccctccttcttttcgttcatcttcaaagccttcagagtctttcagtctctgttctgcttcataggttgttgattgaatccttttctctttctttttaagtgttttcctcagattatattctgattccatgttctcygcaaatacctttcttgcactctgacaggtgaatgatgtgctcccagctcagtagcagaatctttgggtgtggctgttttttctcagggtttgttagagattattccatcatgtctagctttgagtgtctcaaatgagaactgcagtgtcagtctaattttcattttcttttggtaagaaatttgttctttctttctgaaaacttacagcattttctcttttgtctctgtagctcaggaattttaccagca

SEQ ID NO: 247751 - DNA, 613 bp, Homo sapiens
agtttaaggaataaactcaccatctagagatatctagaagtttcgctccttctctcctactgtctctagctcccagattttactgagataatttagtactttttaagcaaagtatcctgatgcttttcctttaaactagttctttcctttttaaagaaactctatttctaatttctaatatctaatcctagtcattgtaccactgagaaagtgctgctgttcttcttccctccttcttttcgttcatcttcaaagccttcagagtctttcagtctctgttctgcttcataggttgttgattgaatccttttctctttctttttaagtgttttcctcagattatattctgattccatgttctctgcaaatacctttcttgcactctgacaggtgaatgatgtgctcccagctcagtascagaatctttgggtgtggctgttttttctcagggtttgttagagattattccatcatgtctagctttgagtgtctcaaatgagaactgcagtgtcagtctaattttcattttcttttggtaagaaatttgttctttctttctgaaaacttacagcattttctcttttgtctctgtagctcaggaattttaccagca

SEQ ID NO: 247752 - DNA, 613 bp, Homo sapiens
agtttaaggaataaactcaccatctagagatatctagaagtttcgctccttctctcctactgtctctagctcccagattttactgagataatttagtactttttaagcaaagtatcctgatgcttttcctttaaactagttctttcctttttaaagaaactctatttctaatttctaatatctaatcctagtcattgtaccactgagaaagtgctgctgttcttcttccctccttcttttcgttcatcttcaaagccttcagagtctttcagtctctgttctgcttcataggttgttgattgaatccttttctctttctttttaagtgttttcctcagattatattctgattccatgttctctgcaaatacctttcttgcactctgacaggtgaatgatgtgctcccagctcagtagcagaatctttgggtgtggctgttttttctcagggtttgttagagattattccatcatgtctagctttgagtgtctcaaatgagaactgcagtgtcagtctaattttcattttcttttggtaagaaatttgttctttctttctgaaaacttacagsattttctcttttgtctctgtagctcaggaattttaccagca

SEQ ID NO: 247753 - DNA, 592 bp, Homo sapiens
atcctatcccttagtggtcatcttcctgcatccctgttgtgtcaccaccatccgttcatcacctaagctagaaacctgggtgtcattcatgattcattcttctcctcctacaattactatggacttctctttaattcttcatgcatatgtcaagagcccaaaccagtgcctgacacaaataggtaatcgtaaatacatattgaaygaaggaatgaaacaaaaatgaaaaatctgtttctattctgaccacactcttgcctatgtcttctcgtgggtttagatgtccagatacagcactcttgactggcacagtctgaattcacctctccagtttgtcctttttgagttcagggtcctgcacaccaatctcagaattgtccttagagtctgcctagtcagccctttccttcaggcctaacattattgtttacattctaatgtcatgagattaacacacccctccattactgattgactcttcacttataatccagctgtttggtttcttgataccttctaagccccactgtctcaatggctgggttaagatacttaaagtctgcctgcaggttccactaaaatcacaacctga

SEQ ID NO: 247754 - DNA, 592 bp, Homo sapiens
atcctatcccttagtggtcatcttcctgcatccctgttgtgtcaccaccatccgttcatcacctaagctagaaacctgggtgtcattcatgattcattcttctcctcctacaattactatggacttctctttaattcttcatgcatatgtcaagagcccaaaccagtgcctgacacaaataggtaatcgtaaatacatattgaatgaaggaatgaaacaaaaatgaaaaatctgtttctattctgaccacactcttgcctatgtcttctcgtgggtttagatgtccagatacagcactcttgactggcacagtctgaattcacctctccagtttgtcctttttgagttcagggtcctgcacaccaatctcagaattgtccttagagtctgcctagtcagccctttccttcaggcctaacattattgtttacattctaatgtcatgagattaacacacccctccattactgaytgactcttcacttataatccagctgtttggtttcttgataccttctaagccccactgtctcaatggctgggttaagatacttaaagtctgcctgcaggttccactaaaatcacaacctga

SEQ ID NO: 247755 - DNA, 595 bp, Homo sapiens
ttattgtgattaaaagtagactttccaaatcatcatcgctcctaaatattataatactagataaagaatgagataaatacctttgttatgtagaaaatacaacaagctatcatgtgttgtatactttcaaarctcgcagtatgtttcttcgagcagacaatacttggtagtccttgcaaaaccactatacactttatcaggatctaaaaattagaatcacaatgatttttgttttaaaatgtcatccttactcatttcattagaaaatgttccattcaaataatgcaagctttaagacataaaattttgttatcaataattattgataaattgtttattaggaataaaggagagtacactgagataaagttgatacattcaattttgagattagtccttcacctacagcaacttgaaaatcagtggaaagaataaaataaaacacaaatgactataaaacaaagcatattttgataagtatcataaaaggtatagtcagaatgtgacatgtatttgaaaaactatcacatccaggtatagaaggaacttgaaaaaccaaatggaagcttatatggcatattaaatattacatagt

SEQ ID NO: 247756 - DNA, 553 bp, Homo sapiens
ccacagctctgggtcacatagcaaattttatattccacagaagtccccttagccactgggcttcttctggagaaggttaatgtaatacaaaatggaaactgtttacttcttgcaatttcacctggggaacctctaattgtcagtcaactggcagctgctaatagcaacagctttttaaaaggattagaactggtcttaaatgatttcaaacataatacaatacatttttctataactatgccctacaaacataacacratacctttttccacaattaatgcagcacaaaacattaaaagttggcgattacctttgagatttagtttcttttctttagtaagaaataaaaacacaccattttattgctgccaattgctcaattattcagaaaaacattctcaatttcttcagctttagagaaaaaaaaaacctcatttcttttccagcacagtgatatgtattatatacgaatatgactaggcagctaaaggttacccaggggatagaactatttcttcaacccagaaatgaatccctttaacagtgagagggg

SEQ ID NO: 247757 - DNA, 604 bp, Homo sapiens
cagaatggtagattctggtgagggccctctccctggctcgcagacggttaccttctcattggtcctccctcccatgatagaagcgggctacagagcaacctggggtctcttttgtaaagacaccaagctgggtgtggtggttcatgcctataatctcagctctttgggaggccaaggcagatggatcacctcaggtcaggagacaaggtgaaaccccrtctctactaaaaatacaaaaattagccaggtcttgtggcaggcgcctgtagtcccagctactcaggaggctgaggcaggagaatcgcttgaaccccagaggtggaggttgcagtgagctgagattgtgccgctgcactccagcctgagcgacggaatgaaactccatctcaaaaaaataactaaataaaagtaaagacaccaatgccattcataagggctccaccctcatgacctaatttatcctccaaaggacccacctcctaagatcatcatattaggggtgaggattttaacatttaggtgggggggaccacaaatattcagcccataacagcaagcaaatgaaaggaggaaagctggaagcccccacatataataatatgag

SEQ ID NO: 247758 - DNA, 484 bp, Homo sapiens
tgactctacaggggttcaccacatgcctctctgtatacactcctagaagataacattaaaattatgttttctgacttggaaacaacccacggaagcttgcaccaagctggagattccaccatgatgagcagcccaggattcaacctcactgaacacagtagcatgcacaggaaacasactttccattgtgttaaagcaatgacacttgtttgttactgctgtatagctgaagcctattttgactgacgcagcttcctaaatgttggtgctatccaggacgccatcctcaagtttatgctccatgtaactctccctgggtgacctcatccaaacccttgacttcaaccaccaccaatacattgatgactaaaatacaaatctccaatctgctctctcctgagtgccgcattagtatatccaaccatacactggatagctctactcattgtcatccaagtttggatgaactaaatccaagcaagta

SEQ ID NO: 247759 - DNA, 578 bp, Homo sapiens
catcatcatccatctggctacccaagccagaaaccaaggcgacttgaactcctcccttcctcacccatccgccacctccagccagtgtggatcacagtcctgtggacatcctctgtctctccttcacatctgtcccctcctctatgctgaccacccaagtccaggctttcatcatctctactttaagacacaagaaagcagtggccactctcctacttccatttggtctcctttcaatctgtttcccacgcagctgacaaaggttttcaaaaacacgcaaatataacacttctcggcctttgggctaagatcaagtgaaaagaatgmcaatgtgatcatttcactttctttctttaaatccttttaactagctcccctcagttctccagataaaactagatctctatccttccctctaagagagtttattatctaatttctgccaacctttctaacctcagcttttgccttttcctttgctgttagccccactggatttcttgcagtctcacaaaagcaggtgctagctgttaactattattgtttatggcagcagcagtagtaataacattacatat

SEQ ID NO: 247760 - DNA, 569 bp, Homo sapiens
ttgggaggggtcaggggcagaatgatatggtttggctgtrtccccacccaaatctcatcttgaattgtagcttccataatccccacatgtggtgggagggacccagtgggaggtaactgaatcatcggggtggattttcccatgttgttctcatgatagtgaataagtctcacgatatctgatggtttataaagggcagttcccctgcacatgctctccagcttgccgccatgtaagatgtgcctttgctcctcctttgccttcttccgtgattgtgtggcctctccagccatctggaactgtgaattcattaaacctctttttgtttataaattatccagtcccaggtatgtctttatgagcagcatgagaactgactaatccagggcttatcagttaaaagcaaagaagtcatgacattcccaaatcttctcctgtgctctagttaaaaggtctacaacttaaccatagtaaaactaatagaataatctatattgattatggaaatggaagctattatgggacttgaaacagaataaggaaaatagcaaaaggccaaataccaaaag

SEQ ID NO: 247761 - DNA, 569 bp, Homo sapiens
ttgggaggggtcaggggcagaatgatatggtttggctgtatccccacccaaatctcatcttgaattgtagcttccataatccccacatgtggtgggagggacccagtgggaggtaactgaatcatcggggtggattttcccatgttgttctcatgatagtgaataagtctcacgatatctgatggtttataaagggcagttcccctgcacatgctctccagcttgccgccatgtaagatgtgcctttgctcctcctttgccttcttccgtgattgtgtggcctctccagccatctggaactgtgaattcattaaacctctttttgtttataaattatccagtcccaggtatgtctttatgagcagcatgagaactgactaatccagggcttatcagttaaaagcaaagaagtcatgacattcccaaatcttctcctgtgctctagttaaaaggtctacaacttaaccatagtaaaactaatagaataatctatattgattatggaaatggaagctattatgggasttgaaacagaataaggaaaatagcaaaaggccaaataccaaaag

SEQ ID NO: 247762 - DNA, 607 bp, Homo sapiens
aataacacacactctggcctatcagagggtgaagaggatggagaggatcaggaaaaatcactaatgggtccyaggcttaacagctgggtgataaaataatctgtaaaacaagcccccatgacacaagtttacctatgtaacaaacctgcacatggacccctgcacttaaaagtttaaaataaaaataaataaaatgtgttttaatcccccttaagtaacatttatagcaacgtaagatggcgaaaatcaaatgcattatttttagtcaactaaacctgcaaaatacatttttacaaacatactaattatggaaggtttgacatgcagaacacaatggcaaacctcgatttagagaaaacaaacattcaagctaagattggttctgacctgaagagataagcatttttagcaaatctgtgcagttgcttgttgcttcaatggttgaagaattaatcttaagctgcttcccaatgaaatttcggcaagttatctttaaaaagaaaggtgaaaacaaatattagtcgggtatttatagttaaaaatttcgcttacttgaaatgtttctctcattttttatttatcagaataaagagatacataacaatgc

SEQ ID NO: 247763 - DNA, 576 bp, Homo sapiens
acttttataatgagaagtaaatgcagcctaataaaatacaaatttcttcccacaacctcataaggccytacttgatctagtcttttctatttctccagcttccttaaacggatctttactgaacacctattacgtgccaaacactgttacaagaagaagggatgatgtagcagagaacaaaataaaaactctcactcttgtgaaacatcttagtgggagaagacagataataaacaaatagtatggtacattatataatatattaaagaattgcaaatgctctagagagacatagagcaaaaaggcacatagttgtaaatatgatagtgtggaatagcctcacagagaatgtaaaatttagcaaagattgggaaaaggtgagggatccaatgtggatgtttggggagcagcactccaagcaggggcaacagcaaatacaaagaccctgaggcaggaacagctcacacaacagtgcggtgaaaacctgcctgggagtaataggacaggagttactggagagatcagggggatatgttatataggataagttatattaaggtcatgataaagatgttc

SEQ ID NO: 247764 - DNA, 576 bp, Homo sapiens
acttttataatgagaagtaaatgcagcctaataaaatacaaatttcttcccacaacctcataaggccctacttgatctagtcttttctatttctccagcttccttaaacggatctttactgaacacctattacgtgccaaacactgtyacaagaagaagggatgatgtagcagagaacaaaataaaaactctcactcttgtgaaacatcttagtgggagaagacagataataaacaaatagtatggtacattatataatatattaaagaattgcaaatgctctagagagacatagagcaaaaaggcacatagttgtaaatatgatagtgtggaatagcctcacagagaatgtaaaatttagcaaagattgggaaaaggtgagggatccaatgtggatgtttggggagcagcactccaagcaggggcaacagcaaatacaaagaccctgaggcaggaacagctcacacaacagtgcggtgaaaacctgcctgggagtaataggacaggagttactggagagatcagggggatatgttatataggataagttatattaaggtcatgataaagatgttc

SEQ ID NO: 247765 - DNA, 576 bp, Homo sapiens
acttttataatgagaagtaaatgcagcctaataaaatacaaatttcttcccacaacctcataaggccctacttgatctagtcttttctatttctccagcttccttaaacggatctttactgaacacctattacgtgccaaacactgttacaagaagaagggatgatgtagcagagaacaaaataaaaactctyactcttgtgaaacatcttagtgggagaagacagataataaacaaatagtatggtacattatataatatattaaagaattgcaaatgctctagagagacatagagcaaaaaggcacatagttgtaaatatgatagtgtggaatagcctcacagagaatgtaaaatttagcaaagattgggaaaaggtgagggatccaatgtggatgtttggggagcagcactccaagcaggggcaacagcaaatacaaagaccctgaggcaggaacagctcacacaacagtgcggtgaaaacctgcctgggagtaataggacaggagttactggagagatcagggggatatgttatataggataagttatattaaggtcatgataaagatgttc

SEQ ID NO: 247766 - DNA, 635 bp, Homo sapiens
tgctttccaataaatatgtccatttcacctaagtgatcaaacttattaacaaaaattgatcatatttccttttttaatatctataggatttgtagttatagcccttctccactactaatatgagtaatttgtgcttttctcacttttgttcttcatcagtatttctatgagtatactagatttaatttttaatttagaagatcaaattttgactttattgtttttgctttatatttatctaattgatttctgctcttatcatttcttttatttctttttattatttcctttcttctctttagtttagatttaatttgctctttttttctatatataaacatttagataattgatattatatgttttttctttcctattaagcattgaaagctataaatttccgtctatgccctgcttcatttgaatgccatacattttgatgtgttattattagtytcaaatattctctaatttctcttgtgttttcttctttgactcatggggtatttggaattgtattatttaatttccagatatttggagatttttcttcctatattatggcaaaccgtttataatttaattctgtaatggtcaaagaacatactcttcaagagttcagtcttacatttttg

SEQ ID NO: 247767 - DNA, 580 bp, Homo sapiens
catttgattcagtgttttttctatttttaactccaaaagcattatttttccccctaaacttggcaaggcagcatggagtattgaggctgctgaaatccatgaaatatttttctcgtttccattttctggctttgacatattttttcccaagtgcctgtctgtccaaggcttaccatgttgttctttatgaactccatctccattttaccatgcatagaatcacccattccaactgcattattaatttgaaatttcacaagaacagaagagtattgttggagaaatttgcaaagcaaatactttttctgcattatttatgtatgataggaagacagataatatataaaaacgtacaccatctttcttttaatttctgatcttttattgtcattttatatccaagaaaaaagtatacactrtcaagtataattcatgaagtgttttaatttgtaaggttgagttttgtgataggagcaccaaacatatggtatttgttttcagtatcaaaaacacatgaatgttgaatttcaaaagaacagccagtcattaaatgaatccatgtatttggagaatcatatat

SEQ ID NO: 247768 - DNA, 620 bp, Homo sapiens
gttatgcaaacagttgaaaatacaacattttattatacacttcagggaaatctgtctatccctggaaaaagacatcaacttaggtttggcctaaacctgtctccaaactaagctgcctgattttaccaggagatgctgaaaaaaatctcttgaaatcatcaagctgattctgcctccaatggagmtataaactttaaaggcaataaatcccacaatgctcaggcctggatataccatgagtcaaccccatcttgcatccacataagaggcaatttcactaatatgataaaacaaacatacatttttcccatattttaggaatctaggtggcatattttaggacatattggacatgatgtgcctttccttctcaatctttttcggtatatttagttaatgttgagtccctgagatgggaaataatattatagaaatcaccaggtgcattttagttacacaatttttatttattaaaatattttcctgagcaaatgttgataaacagctacataattttaaaaattatctgtatttgtatcatttgctctagcatactttgttctagtaaactaaaaaatacttataaagatgtcagaaaaccaaaacaaatgtatattaat

SEQ ID NO: 247769 - DNA, 624 bp, Homo sapiens
ggaatacaaataactaggttcataaaatgggggtgattaaactaccataaagtaatgaatagaaagttgccatgctaagagaatgtaaaagtgctgagcaagatattaaactgacactaaaagataaaaatctatttcaaggaatttatgtgattataatcccccctcccaattattatctatcaaagaaatgtaggtattcctccataattaaaaaaaagtctctgttagaagcaaaagtcttcaaaatccagartgatctacatacagcttttgactgaggtggttatgcttttcaactgtgaactgccagtgtacacaaatacaaataattgtttagcatctgaagtattgttcaattggaacactgtattttactgtattaattaaacaaaacacaagaacagaatagaaatgacaacaaaataagatatgaatgaatactttcatatgcattgcttcatttggcaaaaccaaacattctattaaatagtatgttttaacgatggccatatttatatcatctacctaccaatctattgctctgcatttatcaatctgcctatatatagcataactgtcaccctctttatattaatttaggaaaatgattgaggaaaacaa

SEQ ID NO: 247770 - DNA, 592 bp, Homo sapiens
atttcatcatgtggaaaaaagtgttatttgtatagattttacaattttttttgctaaatttggaaagaacatagaaaactacacaacaaaatcaaaactattaatgcagagaaaaagagaaagtactacaagaaatggaatgtaatctttgratatatatttgtgcacatgaatgtaagtacagataattcttccaaatagaaagtttggaaaaagcatattttaaggtttttatctaccaatttactaattgatttaaaaagatgttattcaaatttacattccacaaacagtgtattaaagtatctatttccctaccctctaaccaaaaatcagtgtatcaattttttatattttccatttcaatataaatgtaatatcattattgtattaatttgcatgtttaaattgaggtaaaacatcttttcttatgcttataagccattgtatttctttttatattagatgtattcctttactttgtatattttttctattcgtttattaatctcttcttatgaaattataagagttctctatagacaaataaaatcagtacttttggtcatgtgtgttgtaaataattttgctc

SEQ ID NO: 247771 - DNA, 583 bp, Homo sapiens
ttagtccttcagtataaagtctggaaggggacagtatatctcattcagatttggaaagaaacacagactttttttcatccgtaatgtgttaaatgcagatataatttaaattataaagctcccccagatgatttatttaatgttttggctaaataaattgcttcatgtacatgaaagtgttgaattgataaccaaataagatgggtcatgctgcttttccatttctctctcrgtttcaccctaagatctcacaaaagcgctgttggtttttaacctcaccaattccccggcagccagtcactccttaatgttttgcaaactggctttcccatctgccattttctaaaatgatccttttgattcttttcttaatgtttacttaagtcagtaattctcctatttctgtcctttaatcgcaactgtttcttttcgttttgtgggtacaataaaatataatttgtctttttccttcaccttcaagattaaagctgaggaggaggaagaccttgcctatgaacttattaacagtctaaaatcttattagcagtggctttaaagctttgtccaggtattagaataactt

SEQ ID NO: 247772 - DNA, 556 bp, Homo sapiens
ttgcaatattatcttgctgctacatgcttcactaagttggaagagatgccgctaaagagcagggggcacaggaaacctgattcaacttttggaaaccattagagaagcatgctgaagtttggagaaaaaaaaactgccttcttcaggggaaattaagtataatcagaggtcaaggtagaaatttactaacatagattgggcaaccatttacatggattagggcatggactcactccagtttcaccaaatgccacacctggagagtaaacgtaactcttaggcatcagtcacctggagtccccgggctccttaatgctctgtcaagattgatgaggataaascaggaggggcacagatttaagcctataaattgaatcttaggtaagcctatagtcttagacagactatattttagaagacagaatctggcacactttaaaatctgatttttagaaatgtttttattagtttagtacattcacttaacaagcataattttattcacaaatgcctatcatgtgcctggcaatagggtctgaattcttcataacccaga

SEQ ID NO: 247773 - DNA, 551 bp, Homo sapiens
cttatgtgaatatcgactagggtttgtgtaattgtagctcataaagcaggatcttttccatagatacatatttttcataaggtatatttcttcagaatttctagatttgaatgatatagctgtggctattctgttattattagaaacttaatccaatcattcyttattaaaaaaagatttccatagcaacacagacacaaaacaaatttcctgggtagatattataatttgtttcagataatatagaaattctattggagtcattattttaaaattacaattattatacagacttttttatcatagcattaatattaacagttttaaaatgaattcatgccaaaaatacaattttatatctttctattagacataagagacaacagacttgtatctacataagtaaaattaaatcagatggtgatttttaatgaaatatgtgtttttctccaaatctttttcttttggagcagtagggctttttgttttgttttgtttttaattttacaaaattgacctattattaccccaagtattttcttgataacttc

SEQ ID NO: 247774 - DNA, 610 bp, Homo sapiens
agatcaagaaaatgcagcatgtattctcaaaataatcacagataatcttctaagcaggtaactccaaaatccctgaggaggcattgtgttcctttcttcactkggtctcctctgcatgcagtgacaggggcgaaatcagatactgggctcgaggatcacaccaacttcaagccaccaaggtcaaggaggcaacatcaggcaccttggaagcagatcaatccttggcaaaactgaatttcgttttagctagagcacctttttatcttttacctcatactacaccagggggttcatagcccaccccctcttatttgctcaagacctctcatccctgctgtccaccaaggcccccagccaagacaaggaaagagggcctgtgtcctacactcagcccccactgctgttcattttaaactgctttgcaaacctatcagtgctctatagaagttacctctcagagtctccctcggcttgcttttcagctaccggtaaaataatttatgataagttcttctttgatgagaacagtctgctgtgcttcccagcataactggtattctgaagacctgtgtggaatggggaaaagagcattagaacctagggagtacca

SEQ ID NO: 247775 - DNA, 610 bp, Homo sapiens
agatcaagaaaatgcagcatgtattctcaaaataatcacagataatcttctaagcaggtaactccaaaatccctgaggaggcattgtgttcctttcttcacttggtctcctctgcatgcagtgacaggggmgaaatcagatactgggctcgaggatcacaccaacttcaagccaccaaggtcaaggaggcaacatcaggcaccttggaagcagatcaatccttggcaaaactgaatttcgttttagctagagcacctttttatcttttacctcatactacaccagggggttcatagcccaccccctcttatttgctcaagacctctcatccctgctgtccaccaaggcccccagccaagacaaggaaagagggcctgtgtcctacactcagcccccactgctgttcattttaaactgctttgcaaacctatcagtgctctatagaagttacctctcagagtctccctcggcttgcttttcagctaccggtaaaataatttatgataagttcttctttgatgagaacagtctgctgtgcttcccagcataactggtattctgaagacctgtgtggaatggggaaaagagcattagaacctagggagtacca

SEQ ID NO: 247776 - DNA, 576 bp, Homo sapiens
ataagaccctaacaggttcttcagccacaggcacaggatttggcataaagtaggcactcaatacatttctatcaaatcaatgcacctgtactaagatacagacagaatgcagatttattctcagctcaattagaaataaaatgaatatgtttttcattacaaagaaattgattcatgtcatattgccaagccaaatgtgtgaactgaatggactttatgatagtcaaaatgtatatggcttctatatacagaggccacaggctatgagaaatttccccaacaggaatattttgtactctaggatatttttcttatctcattcttcaagtaagacagtcagagacaattgtccccaaagatatttgcttgtaccttttcatagctattaataattttttgttcatgtgtcttgctgtctcaacaaacgacaatctcttatgcctctttcaacccctcatggtgtcaagcacagaaatttgcacattctaggccttcagtaraagttgaattaatattcttgttagagatgtacaaatgaatttctcttaattgaaatatatgcaaactagaactgct

SEQ ID NO: 247777 - DNA, 623 bp, Homo sapiens
tctttgggactctcttagatgagggctaaagtgaccctttaaaatgagamccctctctggaaaattgcatcaggacagcatgattgaggccttgtttgttgagccgaatatcagataagtaagctatatttatcaagttatctttcccctcatgagcttcattgtacttttgctttcttggctcttgacattctccatgtttcccactctgttcagggatccagctgacagtagcccattttctattgtttgggagcatgtcttgagtttcccaaagtgggaggattgcctccgggctgttattgccatttattgagattgggatgatgctctagttctgacagaacagtcctgatttatgttcagctggtgattcattatgacctagatcattttctaccatatttgttcatattcaatcttccctcattttaaaataaggacaaaatacccaagtgtatttcaggcaacttgtcaggatatcaaaaaaatggtttcctattttctgaaattctggcaaatgatgtcaatagcaccagctagtgccataagtatgtacagtttatctgggagaccaccctggagtaggaaccaggaacccatggaagatattgctaaaaggt

SEQ ID NO: 247778 - DNA, 623 bp, Homo sapiens
tctttgggactctcttagatgagggctaaagtgaccctttaaaatgagaaccctctctggaaaattgcatcaggacagcatgattgaggccttgtttgttgagccgaatatcagataagtaagctatatttatcaagttatctttcccctcatgagcttcattgtacttttgctttcttggctcttgacattctccatgtttcccactctgttcagggatccagctgacagtagcccattttctattgtttgggagcatgtcttgagtttcccaaagtgggaggattgcctccgggctgttattgccatttattgagattgggatgatgctctagttctgacagaacagtcctgrtttatgttcagctggtgattcattatgacctagatcattttctaccatatttgttcatattcaatcttccctcattttaaaataaggacaaaatacccaagtgtatttcaggcaacttgtcaggatatcaaaaaaatggtttcctattttctgaaattctggcaaatgatgtcaatagcaccagctagtgccataagtatgtacagtttatctgggagaccaccctggagtaggaaccaggaacccatggaagatattgctaaaaggt

SEQ ID NO: 247779 - DNA, 635 bp, Homo sapiens
catatagttgcactttccttttaaaaatgtggatttgttaacatattttctgtgttatagatttagtaaaatcataaaaggcttaaatctaaggagactagtgtcttctaaaagagtagaactaagaacagaccaaattcccagtaagtttgaggaacgtgacctaaaaaaggcaagaaatagagttaagctctttaaaactccacaactccaattcccctcacgcttctttattatctctatagcatagtcttctatctgatataaaatatatttgctggcttatttatttactcctgtcttcctccacctaaaatgtaaattccaagtagtcagggagttggactcttattcactgctctttcttcaatacttagattgtgctggcacagagtgggtcctcaataaatatcaataagtcgtgatcaaatgaatgttactagtatgcttttttggaayctataaagatttgaggcctaccatacaatcagttttgataaatatgcctcaggtgcttgaaaagaactgtgttctctataggatacatgtggttcaataccagtatgttactcgaacctattatccaaaaaacatgtaattcaaatgatgaaatccaaattctctatgcctatata

SEQ ID NO: 247780 - DNA, 654 bp, Homo sapiens
aatcagctatccagccttagatctaagaagagggtttggctcttagacaaattgactgagtaggaccaagaacaagtcaaactcatattttgaccaactgcagggatggaaaccatgctcaaggaaaataaagaaaaagaaaacattaaaagtaaaataatatttttccttttaaaaatattatccagcaaaaacaatggattatcttagtaaaagaaaagcagatctctgaaaatgatacaggaaccccagaatataatttttagaaattgacactctttatagaatgtatactacattaactctgaaacagaggcataaatcagagaaaatagatttaataaaaagacatgaggctgatatttaacaatgggtgtgtataataaggaaggataccaagagaattaaacagtaatgatagattttaaattcacaaaaattgatgctaataaagagtggaatcaatacaatagaaaactgattcattgcatgcaggtcatacttaaaaagttckcttgtaatatagaagaaaaaacaaagttgaaatgaagagaaagaacataatacatatgatattaaacatatagatctaactttagaattttccaaagaaagatataaaattggaatataagtataataaaatgtaatatg

SEQ ID NO: 247781 - DNA, 608 bp, Homo sapiens
ttaactttacttacagttatctatagcctcttggtagttgacaactgtcagctggaccaacttgcattcattattcactcatcaagcracccagcctagagatgagataaagagcccaagccaacaaacagtccattaaagctatctcaggaaaccaaaaacagccatctcagctggaaaccaccctggctgtgaaagaccagacgttttcaggctccacagtgatggctactgctctgctttgctccaatgtctgaccttatctgaacaagaactgaaagggtctgtaaatctgcctgaaagtttgcagatgtgtgatgtatattaattaggttcttgaaaaagataataatccataggacatgtttttagcctgtgtctgtattcaaaaaataagcagaccaggcatgactaattcattcatattggctgttagcaattgacatggatcactgcacaatcagtttagctttggcactgataggcaccagatttctagctccaacttcagatttgcaagtggaactcagctagatgatagaaaagtaaagggacatgtagagaggattacagtgctcagaccccattttcacttgggagaaatgata

SEQ ID NO: 247782 - DNA, 576 bp, Homo sapiens
ttccttgttttagtgcatttatgcgcacttaccagatgcaccaaaatacataccatatggccctaatatagggttcgcaaacttgtctcttaaaaagtactgattgtgatttyttaggaaaagtcctttttaatttttttttttttttttttttttttgtaatttaaagtttgggatagtgagaaacttgaattatctttcaagttttatcagagacctgattattgaaaagtagcttagtgtaattttctttcttctatagctttcattgcatctaacttgagacttttctctctacctgtgtttctagatcatttgttgtagaatacttacaccattcttggttgtcacctttgagtctaattattatgcccataatcatggataattgtgttagatgaaaataaacatattaccttcacttagttaatcttatcgatatttaggttttccatagtgattttatctacgtaatgtcaggaatggtagatacaatctaccattgtgtctaccaatacaaaaaaaattgggtccagtttttcctttcctttagaaatataaggataaaatctagat

SEQ ID NO: 247783 - DNA, 576 bp, Homo sapiens
ttccttgttttagtgcatttatgcgcacttaccagatgcaccaaaatacataccatatggccctaatatagggttcgcaaacttgtctcttaaaaagtactgattgtgatttcttaggaaaagtcctttttaatttttttttttttttttttttttttgtmatttaaagtttgggatagtgagaaacttgaattatctttcaagttttatcagagacctgattattgaaaagtagcttagtgtaattttctttcttctatagctttcattgcatctaacttgagacttttctctctacctgtgtttctagatcatttgttgtagaatacttacaccattcttggttgtcacctttgagtctaattattatgcccataatcatggataattgtgttagatgaaaataaacatattaccttcacttagttaatcttatcgatatttaggttttccatagtgattttatctacgtaatgtcaggaatggtagatacaatctaccattgtgtctaccaatacaaaaaaaattgggtccagtttttcctttcctttagaaatataaggataaaatctagat

SEQ ID NO: 247784 - DNA, 495 bp, Homo sapiens
tggaaacacctttcacgcaatgactctgtataactagtcatttgtcagggaaaagtgagatttttctctaaaattaatagatttgagagtaagattccatatttagtgtatcaaaggtattrttttaagaatgatatgaattttaaaatagtctaatataaaacataagggggttctcacttaaggaggtcttcatatttaagaggtaaagtacagtttgtagtgtgcaaatctgaaaaagtatgatattgataatattaacaaagtctgacttttgcccaaaatttgtgattaatgtcaaaatgtaaaacaaaacattatcaaaaatagcactattgcaaagctacgtggcaagttaattgtaaactacatttactatatttctgcactatagcaacacttactctagaaaatataaatatcccactatcatttgcatagattcattttaaattgcgtgattttaaaaattaaactttgtctttctacatagtc

SEQ ID NO: 247785 - DNA, 495 bp, Homo sapiens
tggaaacacctttcacgcaatgactctgtataactagtcatttgtcagggaaaagtgagatttttctctaaaattaatagatttgagagtaagattccatatttagtgtatcaaaggtattgttttaagaatgatatgaattttaaaatagtctaatataaaacataagggggttctcacttaaggaggtcttcatatttaagagktaaagtacagtttgtagtgtgcaaatctgaaaaagtatgatattgataatattaacaaagtctgacttttgcccaaaatttgtgattaatgtcaaaatgtaaaacaaaacattatcaaaaatagcactattgcaaagctacgtggcaagttaattgtaaactacatttactatatttctgcactatagcaacacttactctagaaaatataaatatcccactatcatttgcatagattcattttaaattgcgtgattttaaaaattaaactttgtctttctacatagtc

SEQ ID NO: 247786 - DNA, 570 bp, Homo sapiens
catatccttaattagcagagcctaccaatctttttttctaaatatattttttattatttccacttccattttatctccactatcattgccttaatataggacttcatttttcacttggacaatattgcaataacctcttaactcrtctcccagttgcaataaatgtctattaaatttaagtggttgaaatgcttaaagtaacactccctattttgaaaataaatcaactagcaagtacctgctgcccacctacaatatgttccaaacttattatgtgctatgagggagtcaggagaagcagagcatacaaacttccactttacccccaggacactataatgtgggcatggagaactgaaactgtgcttctcaaagtacatgatgcatgcaagtcacctagggatgttactaaaatactgattcagtaggtcttgggtaaggcctgagattttgcatttctaacaaatccccaggagacgtgggtgccactggtctgtaggccatcctttgagtgaaaaaatattaaaatccattaaataccatatgacatacctcatagtgaagattcta

SEQ ID NO: 247787 - DNA, 575 bp, Homo sapiens
gcctttccctttcccaaccttccgtcacactctacatgtattaacaatttatccatatgccataattacatatcaataattgcatgtaatctttatcccaccagttcactcctcctcatcccacacattgtctaaatcagcagtgaccaacagaactttctgtgattatagaaatataatatctgcactgtccaaaacaagatcctctagacaaatacrgccactgaacgcttgaaatgtggctgatgtgacagagaattcaattttatttattttagatttaaattaaaatttaaataacagcatctggctagtggctactgtactggacatatggttttatactatgaacttcttgaaggcaagaatgatgtattagcatccatatactttagtatagtcaatcatagtatgtactcagtaaagttttgttgaataaatggccaaatatgaatgaatcttagtatatagttgacaaagtaatgaatataaagatcagacatatgaaaaagtaacaaatttaatggtgtctaaagataattattgaaagatgagaagagaaatagtgtgatttg

SEQ ID NO: 247788 - DNA, 593 bp, Homo sapiens
attgccatgatgctcaagtcccttatataaatggcatattatttgcatataacctatacacatcctgtatactttatattatctctagattatttataataccgaatacaatgtgagtactatgtaaataattgttatactttattttctatttgtattatttttattgttgtattattattttttatttattcattttttggaaattttcaatcartgattggtagaattcacagatgaagaaccctcagatatgggggtcctactgtagagcatatggatttagagcagccttggatttgtattttgacccccatattaggagttacatgacattaaacaaaatacattaacctctctgtgctttactttcctcttttgcaaaataataccaggttttgtctctggattattgacttataatctggatgaacccaaaacccctggtggaggatgagagagaccaagcatgtcaataccttaacattgttttgtccctggcacacacatgaaaatgcttagccaatgcctgattataagcaaaatgctttcagagtttagagagataatgcttttgctgtatggatgacgtg

SEQ ID NO: 247789 - DNA, 548 bp, Homo sapiens
ttaggagttacatgacattaaacaaaatacattaacctctctgtgctttactttcctcttttgcaaaataataccaggttttgtctctggattattgacttataatctggatgaacccaaaacccctggtggaggatgagagagaccaagcatgtcaataccttaacattgttttgtccctggcacacacatgaaaatgcttagccaatgcctgattataagcaaaatgctttcagagtttagagagataatgcttttgctgtatggatgacgtggattctgtctgaaactgaaagattgttggatttagacatagaaaatgcaaagtcaaaatctgaaaagaagagtatcaactatccacaataattcacaaggccaggagatcggaaattattaattttcttcacaattatgtttatygaaacattgtctaaaatctatgaagtaccatgctaggtgccttagggaagaatggcacaaaataaatggtctctactctcacaggagtcattgaactagtagaggttcctgggggaatcacgccacct

SEQ ID NO: 247790 - DNA, 560 bp, Homo sapiens
gaaaaggtacaacacttgagcactgtgctacaattcagtttttaaaagtgagttattatatgacttagcacatatcatcccttgttgagttgtatttaagtagcatagtgaataagagttttagactgttttgtttgtgttttcaaatgtagtatttgctccatatttttttaaagcaaaataccaagcatagaaatagcacctaccagaggtttagataatttgaaaagcaaagaacatgaacctgttgatgagctgacacccattctatcgcaaaacagttttaggaaaggtgaaaaaaataaaaacatgcaatttttgaaggtgcctggagaagtrcatttatcatttgggatgtatctatgaaatctgcttaaaattaaaaataaaagatttttaaatatttttaaaattaaacttattagacttattgtaaaaatattacacttattgatacaactatgttcactgaaatcactttattcaaaaattactatattaacatatgcatgtatattaaaatattagacttattgatataactatgttcatcaaaattg

SEQ ID NO: 247791 - DNA, 612 bp, Homo sapiens
cttctttgtgtccatgtgtattcaatatttaacctccacttacaggtgagaagatgcagtattctgttttctgctcttgtgttaatttgcgtaggataatggcttcaagctccatccacgttgctgcaaaagtcatgattttgttcttttttatggctgcatatatttccacagtgyatatgtacgacattttctttatccaatccaccactgatgggtatctatgttgattccatgtctttgctattgtgaatagtgctgcaatgaacatacatgtgtatgtgtcttcatggcaaaactatttatattcctttgagtatatacccggtagtgggattgctaggtcaaacggtatttctattttaagttcttcaagaaatctctaaactgctttctacagtagctgaactaatatcattccacaagtagtgtataagcattccttgtgattcacaaccttgccagcatgttattttttgaacatatgtattttgagatgctttgccaactcttttccatggaatagtttaaaaatgtggtaaatttaaccctattttgtatattataaatatttaactttttgtaatttttaaaaacttttttcttttaatt

SEQ ID NO: 247792 - DNA, 497 bp, Homo sapiens
agccacagtatttttatacaacatatattaagccccctgcatactaaaaacattatctcttctaataatgataattttatggggtgggtactattactgatattgtctattaggaaaccaaaactcagagggactaactaattgacacagtaatttgctcacaaacctgtgttagtctgtttgtgtcgctataaaggaatacgtaaggctggataatttataaagcaaaaagatttatttggctcatggttctgcagttctgtacaagaaacatcacagcagcatctacttctggtgagagcctctggcttccactcatggtgggaggcaaagaggaaccattgtgtcatatgaggagtggaacaagccattcatgaaggatctgcttccatgacccaaactcctcctartaggccccacctcctacactggggatcaattttcaacctgagattgggaggaaacagatatccaaactatactaacatcctggttat

SEQ ID NO: 247793 - DNA, 557 bp, Homo sapiens
ccagtttactcctctccctggcaagcaaaccacacacgtgcctaaaagaatccttcatacatcttaaagttatcctttccacacgcagtattcagcaagagaatattctaataatagacagttttgacaatattttgcacacttcctaaattatatttctcctragtaattatatttaaaaatccaaacaatttgatttatagtattctggctcaaaaccaggcagatgagaaatttatctaccagctatatggttcctccaaatacctgggtaaaattgaattcctcctgtttgagttggaagtttaagctcaaaatctagtgatctttataaattgggggtatattgaaaatgtgtatttatataaatgtatgtttgatgtaaataatttattccagtgttactgttgcttgaagaatactagaagtaacaaacactattttgggacttttttgacagggtgacagtgggggaccattaatgtgctacttaccagaatataaaagattttttgtaatgggaattaccagttacggacatggctgtggtcgaagag

SEQ ID NO: 247794 - DNA, 416 bp, Homo sapiens
attaacagcagaaaaggccaagctgagaaaagaatctcagagctggaagactagttcttcaaatcaactcagacagaaataaagaaaaaagaataaacaaaacttccaagaaataggggattatgtaaagagaccaaacctacaactcattgacatccctaaaagagggacagagagcaagaaacttggaaaacctatttgaggatactgtccataaaaatttctgcaaccttgctggagaggttgacattcaaattcaggaaattcagagaagccctgtgaaatattatacaagaataccatccccaaracatatagtcatcagattctccaaggttaatgtaaaagaaaaaatattaaaggcaactagagagaaagggcaggttgcttacaacaggaatccccatcaggctaac

SEQ ID NO: 247795 - DNA, 488 bp, Homo sapiens
ctcttcttggctcttgtttttgtagaaaaggtttttaaccagtcacctacattcttcttttccattttgtcttgccactcttaatgcatgcaygagaggccccaagataacttctgatggcctaggactccttggtaaaaacagaaaaggctccatggattccattttgggagaaacctctgttttcctcatggaaccccaggaattagaggcagatagatccctctcaaaatctgtttttgtcttccccagaaactgcatgcttttgatataggagttaagaagaattcacataggcagatagtaagggtatgggagtcctcaagtaaggcttttctcttcagtgaaatcagcccaatcattttctaacaagaacagcctgtaaagtcaagctgcagacatatagacaagcaagctgggagcttgcacaggtgaatgtcggcaggaactacaaaccagacatgttcaagagggtggttcccatcttc

SEQ ID NO: 247796 - DNA, 488 bp, Homo sapiens
ctcttcttggctcttgtttttgtagaaaaggtttttaaccagtcacctacattcttcttttccattttgtcttgccactcttaatgcatgcacgagaggccccaarataacttctgatggcctaggactccttggtaaaaacagaaaaggctccatggattccattttgggagaaacctctgttttcctcatggaaccccaggaattagaggcagatagatccctctcaaaatctgtttttgtcttccccagaaactgcatgcttttgatataggagttaagaagaattcacataggcagatagtaagggtatgggagtcctcaagtaaggcttttctcttcagtgaaatcagcccaatcattttctaacaagaacagcctgtaaagtcaagctgcagacatatagacaagcaagctgggagcttgcacaggtgaatgtcggcaggaactacaaaccagacatgttcaagagggtggttcccatcttc

SEQ ID NO: 247797 - DNA, 488 bp, Homo sapiens
ctcttcttggctcttgtttttgtagaaaaggtttttaaccagtcacctacattcttcttttccattttgtcttgccactcttaatgcatgcacgagaggccccaagataacttctgatggcctaggactccttggtaaaaacagaaaaggctccatggattccattttgggagaaacctctgttttcctcatggaaccccaggaattagaggcagatagatccctctcaaaatctgtttttgtcttccccagaaactgcatgcttttgatataggagttaagaagaattcacataggcagatagtaagggtatgggagtcctcaagtaaggcttttctcttcartgaaatcagcccaatcattttctaacaagaacagcctgtaaagtcaagctgcagacatatagacaagcaagctgggagcttgcacaggtgaatgtcggcaggaactacaaaccagacatgttcaagagggtggttcccatcttc

SEQ ID NO: 247798 - DNA, 540 bp, Homo sapiens
aggatcacttgagctcaggagttcaagaccagcctggggaacatagtgagaccctgtctatactaaaaataaaaaattaaaaaattagctgggcatgatggcacatgcctgtagtcccagctactcagaaggctgaggcaggagaattgcttgagcccaggagtttgaggctgcaatgagccatgttcatgacactgcactccagcctgtgcratagagtgagactctgcctcaaaaaaaaaaataaaataaaaaataatcgtagcttctctttttttgatgaatttcaatatgtgttatttaatctttttaaaggattgccttagtatgattattatgttatgacatatctattttctctatttctctcacttcttaaactctggttttacttcttggattaaaaaaaaaaaaaaaagctgagattaaagtttcccaactattactgccaagttactgttctatttaaagtgtggtttccacaaacagttacttcatattgattctatgctggaatcattcacagttgctttcaatata

SEQ ID NO: 247799 - DNA, 619 bp, Homo sapiens
catgcaggttaagataatcaacaatattttttctataagaaccataaacaagagaaatcctgcaacatatacttcttgcttattacattatggtgtttagcttacaggaacttgggaggagataagaaaaaagaagagaagaggagaggaggcaaacactcattgggcgttgtattcgtctgttttcatgctgctgataaagacatacccaagactgggtaatttataaaagaggtttaatggactcacagttccatgtggctggggaggcctcgcaatcatggcagaacgtgaatggcacgtcttacatggcagcaggcaagtaragaataagaaccgagcaaaaggggtgtccccttataaaaccatcagatcttgtgagacttattcactaccatgagaacagtatgggggaaaccgcccccatgattcaattatctcccaccaggtccctcttacaacacgtgggaattatgggagctacaattcaagatgagatttgggttgggacacagccaaaccatatcagatgttaaactggaggttaatgttctagtcagttggctatagcgagagagactgagagttgccctagtttctgaggtttaatacctaacag

SEQ ID NO: 247800 - DNA, 557 bp, Homo sapiens
tgatttgctgcttgtcttacatcctctgaagcacaacataaacaaactcagcaagaacatctctccctttcaccatctgactcctgcggaaaatccaaatggaattctttgaactaacatcgaaaaattatttctcttccatgtgctctataaaagtttaatattttaaaatccagaaatataatactctctatcctaaaagaggaggctcagattggttccaggtgccagttgcatagaaagcactttcatgaatttatctgccacttactctttatctgaaagctaggtcctattacagtagaacctgttcccaaaggaagttcaaatgcaaaattccatctgtggaaataatattgaattcatttcgactattgcttgaaaagcatctgtttctcttggagagaaaacagytctcaagttctcatcatcttgtttttcatgaaatgatatttctggtttcaaattagaaacagcagaaataaacaaaacaaaaactgtaggattttagagcaacttgaaatggagagaaatttgatttgcacctttaaatgtta

SEQ ID NO: 247801 - DNA, 262 bp, Homo sapiens
ccttggctactttggaaaagaaacaatcctattgggtatccctgcatattcattcattcttaattcatgcatacatttactcattcatcagtcatatattttagaacaccaaaactagcactaaagtattgtatyttctttttctatggatacaaaataaacttcgtgttctcagacgtgtagcaaagtagatgtcaaaaccctagagataggaaaataaaatataaatgctaataagaggtataaaagaacattgttttgc

SEQ ID NO: 247802 - DNA, 553 bp, Homo sapiens
gaattttgaatacaaggtcatcacaagatctaggcaagttttatcatttatttagttttttttttaatgtatgacaaacaaacatcctattccaaaaacacataggctttatatagggaatatgtgttattttctaaattcatagcttctttcctatatgttttcccaaatgcttgtttcacttttataaaaatcctccttaggctgggcacagtggctcatgcctataatcccagcactttgggaggccgaggcaggcrgatcacctgaggtcaggagttcgagaccagcctggccaacatggtaaaaccctgtctctactaaaaataacaaaaattagccaggcatggtggtgcatgcctgcaatcccagctatttgggaagccgaggcacaagaattgcttaaacccaggaggcagaggttgcagtgagccaagacggcacccctgtactccagcctggacaacagagcgagattccatccaaaatcaaaacaaaacaaaacaaaaacaaaaaaaaaacctccttaatatacactaccatacacagtgag

SEQ ID NO: 247803 - DNA, 449 bp, Homo sapiens
tcttgttattggctgtaaaataggtatattcattaagatacctatttatatgaattatacatttatttaagtatgcacatgaacaataatttttacttaatgtatttatatattacacgtawaattaattttcaggattataatgaaacataaatgagttaacatatgcaagatacctagcaccttacattctaatgcctggaactttgaaacaattccaatcgaaactccttcttctccacatccagcatttttaaaaaattaacttctgcattagtctggtaaattaccaacagcctcttcaaggcaacctaagcttttgctaacatgtacctcaaaactcttccagcctctaccctttccccacatccaagattatgttcacatttttaggcatttgttccagcatatccccacttctcaatgccaaaatctgccataacaaagtg

SEQ ID NO: 247804 - DNA, 534 bp, Homo sapiens
aacgctttaaataacatattgtagcccttcttaaccttcaatggaacaaggttttcctgttggattgttcctgacctcctgttgaccatgaaaattaggtctaacactatacggtctatgtaaactgattaaaagaccagcagaaatcagaacaccacatttattgactttgctttctaccctgatcttatgttatccctgatggcttctttctgcattagtgctcaagagcatttccaaagtgtttctgagtctgacaaagggacagagctgttcttgaatgagacacctcacagtctgacacttggttttgtttgaaaaaggggcatgaaagtcatctcagcaggcctgtggtgggcgtctaatgagatgacagatgtgaaacctctctgggaatatcaagcacaatgagggmgtcactttctagctttagggatacattcttggaggaggttgaaggaggtgagcctgctgggtgctacatgttcctgatgacctatcctgttgttttgcgataagccctagatgctggct

SEQ ID NO: 247805 - DNA, 546 bp, Homo sapiens
gtagcatatacattaagaagagataaatggaatttaaaagttcttagtccattacattgttcaggagaaaagtaacgtatatattatcattagctttatttatcaagaacacaacctacattgaaaagacaaagtttatttgtaaaactgttaaccaggcttatctctagattgtaggattataggtatttttttctgcttcttgagaatgttttatactttcccacctatttttcttttctttcttttttttttttttttttttttttaatttttgagacagggtctctctttgttacctaggctggagtgcagaggcgcaaycttggctcactgcaacctccgccttctgggttcaaatgattctcgtatgtcagcctcccaagtagctgggattacaggcgtgtgccaacatgctcagctagggttttggtatttttagtaggaatagtgttttgccatgttggccacgctggtctcaaactcctggcctgaagtgatccatttgcctcggcctcccaaagtgctgggattataggcgtgagc

SEQ ID NO: 247806 - DNA, 546 bp, Homo sapiens
gtagcatatacattaagaagagataaatggaatttaaaagttcttagtccattacattgttcaggagaaaagtaacgtatatattatcattagctttatttatcaagaacacaacctacattgaaaagacaaagtttatttgtaaaactgttaaccaggcttatctctagattgtaggattataggtatttttttctgcttcttgagaatgttttatactttcccacctatttttcttttctttcttttttttttttttttttttttttaatttttgagacagggtctctctttgttacctaggctggagtgcagaggcgcaatcttggctcactgcaacctccgccttctgggttcaaatgattctcgtatgtcagcctcccaagtagctgggattacaggcgtgtgccaacatgctcagctagggttttggtatttttagtaggaatagtgttttgccatgttggccaygctggtctcaaactcctggcctgaagtgatccatttgcctcggcctcccaaagtgctgggattataggcgtgagc

SEQ ID NO: 247807 - DNA, 458 bp, Homo sapiens
cattgaatccatagtgaggccccactaggtgcctggtcccatgtgaagctctagagccagtaatgaggatgatctgggccttcaaagagctacacacaaatggtagggttaaggataacaacaagaaagaggtaaataggttaagaagataatttccaattgtgataaatgctctgagaatatacacagggagacatgtcaggaaattactatatgaaggtgttggggggctattttaaggggtttctgaagagtagctattgagtatcatggccacagatacagcagtgtcytattaaccaatatttctgattgtaataagctttcatttaagaacaactttagagaaataagattactgttaaaatactaactgattagatggaaattgttaatacataatgtgtactttccttttttattaagcacttcagttagacaaagagggctaccaactc

SEQ ID NO: 247808 - DNA, 586 bp, Homo sapiens
  misc_feature (1)...(586): n = A,T,C or G
agttgtttagagccgtttcagtaggtaaagcatctaattgtgtctaggtgtttgcatatctttcagtgttgctgtttgtgaggcagcctggaagacaytaccttaaccaggtgatcaaggtaagcatccccagtaatgagacagattaacgtcatggaccccctgatgtgatgcagggagaaaagcacattccctctgtggtattctcaccaaaaggagtaacttcaaactaattgtgagaaagcattaggcaacccagattgagagacagtctaaaaactaactgacctgttgtgttcaaaagtggaaggtcatgacggacaagaaaaaattgaggacctgtcacaggccagaggagattaaggagagatgacaactaaatgctatgtggtttctgaagctgatcctaaaagaggaacagagcattctggaaaaactcgtcaaatttaaatttgatctgtattntagttaatagttttgttgcagtgttaattttttggttttgatcattaaagtacggatataagatattaacattagaagaagttagatgaagagtatgtagaaactctgaactagttttgca

SEQ ID NO: 247809 - DNA, 567 bp, Homo sapiens
cttctcttacacgtggcccttgcccaaaaggtactagtatcacagtgcatctggaagtaaaaacttaagtttttggctttatttctttctcattcaatctttcggcaagtgttcattgagcaccttctaacaactgtactccactttgccctttttatgagagtttacaagaggttttaattctagttcttccaaaccaagagtaggcaaactctttctgcaaagggccagagagtaaatatttcaggctttgcaggccatgtagtctctgcttgtctatgcaactctgccattgcagcccaaaaacagccatggaaaacacgtaaacaaatgggtgtgattgtgttctactcacatttcatgtttaaaaaaaaaatggtgaaccaaatttgactcrtgagttgtagtttgccaactcctgtcctaaactatcaggaaatacctatttctatttgtctagtatggaggattgataatccaaaactccaaaatgaacttttccaaaataaaataaaactccaaaattattttattctcaaactaggtcaaactttactatggacatgt

SEQ ID NO: 247810 - DNA, 630 bp, Homo sapiens
ttgtagctgaaggcatccttccttgatacactacctctataaaggagcaaacagttccatccacttggaatgtccctggcttggcctatagcgctactaattatgtaagctattcttacctagaaagtatgagtgatttctcatgaatctggctactattattaygaatttaattcctaaaagttacccaaaatgttcatattttatttttattttcgaccctagtctctgccctcacctctcccttaacattcttggcaagcttctagacaacacacatccttaagatgcagcttaaaagtcactctgttcttcaactttcctaaaaccacttcacccacaattagggttccctgtcttatgctcctgtagtgtctgcctgttttgtctgttctattgcaccttcatattatattgcaaatactgatttgtgtgtctgccttcccaccagtctatgaacttgctaagggcacaggtcatcctatatccctaatgcctggcactgtagtcagcacctaagaaatgtggaagaaagggagggaggaaaaaggggggggggcaaaaagacagggagggagagaaggagggaaggaggaaggaaataagaaaaagagtggagggagagaggga

SEQ ID NO: 247811 - DNA, 541 bp, Homo sapiens
attactatgtagttgttgaaatgatttaaaggaacaatgtgcatacatggtgtgtgccagcattaccatcataatcagtgtggatggaaagtgaagcttctaaaagcaggtgatccttcagtgaccagtgcaacccaggggtgaacttgttgattttggtgggtctcgcacatgttctggctctcaagtttgagaaatgaagttatgtcaggcatgtcaatctggccyctctacccccaacatcccatgggaaagagatgtgtccaggccagccacacaggtcactgggtacagatgcccccagcctttgaagccctgagctgatgggaattgaaaacgctggcatcccactgggcagctgttctgccaaaagttcacaatcctgcacacttgagaacttcctgaccagccgacccagtgtcaaagggagctgaacctctccttgtctccagccctgaaatggagttgtgggcaaatgcttgcgttcacaggacagcacaaggcatcaatggcctgattatgtcgagacatttgaagacaa

SEQ ID NO: 247812 - DNA, 541 bp, Homo sapiens
attactatgtagttgttgaaatgatttaaaggaacaatgtgcatacatggtgtgtgccagcattaccatcataatcagtgtggatggaaagtgaagcttctaaaagcaggtgatccttcagtgaccagtgcaacccaggggtgaacttgttgattttggtgggtctcgcacatgttctggctctcaagtttgagaaatgaagttatgtcaggcatgtcaatctggcctctctacccccamcatcccatgggaaagagatgtgtccaggccagccacacaggtcactgggtacagatgcccccagcctttgaagccctgagctgatgggaattgaaaacgctggcatcccactgggcagctgttctgccaaaagttcacaatcctgcacacttgagaacttcctgaccagccgacccagtgtcaaagggagctgaacctctccttgtctccagccctgaaatggagttgtgggcaaatgcttgcgttcacaggacagcacaaggcatcaatggcctgattatgtcgagacatttgaagacaa

SEQ ID NO: 247813 - DNA, 624 bp, Homo sapiens
cctatcaccttctgcatagaaatatttgatgacatcccactgccttcaggatgagtccaagctggaatagaaattagaaattgtgaaatttacaagcagcaagaaatctacctctcaattgttaaagatttgcccattctctccttcatgattgatttgcttaaaacatccaccttcctaaygatgatgatgctgatgatgataatgatgataaaaatagaggaaaaaatcaatttaataaaacaacagtgctctagcagaaacttgaatataaaatggcttttactgggaagttctgactttttaggttgcaaggaacaaaatatctttttttaaaagaaatcaagtctgagtcaatcatctttgccatctccccatccctgggattggctcagaaataggcacgtgtctaagtcaggccaatgagacctcaggggatgttttgttggggcttctgaggaagaaactgttttgctcctaaggaagagctcctgaaagagatgctctctggtcccctggggttattgtgtgtggactgaggcagtcatctttttcctagctggaccccagaggaggacaaagtccagtgaattgcaaagaaatgacccaagatcacattgggtc

SEQ ID NO: 247814 - DNA, 548 bp, Homo sapiens
gatggactgttatataattaggactgttatgaattaccattttttctcatacttcatttttcttcttattatctcatattttcttttcagcagcatattttatccccattctctacaggggctattccaaatcattactattctctcctgccttttaaaaccaatttacccmgttatattctgcagatagcttcagttctgacttctgtgaaaaaaaataaaggacattagttatgaaattcattatcttctctcctcaaaaatatacctgtttcttctcccagccttctcgccttcccttttgtctcagaagtatcttagaaggaggtgaggatgcaaggaccaaacactttgtaccattttttccttccttgcctgtaatgatcatccacttcctttgtggatatcattataggtaaggaaggaaaaatcattccacttcctctgtttctctaaagagaaagggaactgcctctcctaccattctataaacaggcccaaatattccccaatcctctaaaatcttccccaactttgcctttctctcc

SEQ ID NO: 247815 - DNA, 548 bp, Homo sapiens
gatggactgttatataattaggactgttatgaattaccattttttctcatacttcatttttcttcttattatctcatattttcttttcagcagcatattttatccccattctctacaggggctattccaaatcattactattctctcctgccttttaaaaccaatttaccccgttatattctgcagatagcttcagttctgacttctgtgaaaaaaaataaaggacattagttatgaaattcattatcttctctcctcaaaaatatacctgtttcttctcccagccttctcgccttcccttttgtctcagaagtatcttagaaggaggtgaggakgcaaggaccaaacactttgtaccattttttccttccttgcctgtaatgatcatccacttcctttgtggatatcattataggtaaggaaggaaaaatcattccacttcctctgtttctctaaagagaaagggaactgcctctcctaccattctataaacaggcccaaatattccccaatcctctaaaatcttccccaactttgcctttctctcc

SEQ ID NO: 247816 - DNA, 548 bp, Homo sapiens
gatggactgttatataattaggactgttatgaattaccattttttctcatacttcatttttcttcttattatctcatattttcttttcagcagcatattttatccccattctctacaggggctattccaaatcattactattctctcctgccttttaaaaccaatttaccccgttatattctgcagatagcttcagttctgacttctgtgaaaaaaaataaaggacattagttatgaaattcattatcttctctcctcaaaaatatacctgtttcttctcccagccttctcgccttcccttttgtctcagaagtatcttagaaggaggtgaggatgcaaggaccaaacactttgwaccattttttccttccttgcctgtaatgatcatccacttcctttgtggatatcattataggtaaggaaggaaaaatcattccacttcctctgtttctctaaagagaaagggaactgcctctcctaccattctataaacaggcccaaatattccccaatcctctaaaatcttccccaactttgcctttctctcc

SEQ ID NO: 247817 - DNA, 548 bp, Homo sapiens
gatggactgttatataattaggactgttatgaattaccattttttctcatacttcatttttcttcttattatctcatattttcttttcagcagcatattttatccccattctctacaggggctattccaaatcattactattctctcctgccttttaaaaccaatttaccccgttatattctgcagatagcttcagttctgacttctgtgaaaaaaaataaaggacattagttatgaaattcattatcttctctcctcaaaaatatacctgtttcttctcccagccttctcgccttcccttttgtctcagaagtatcttagaaggaggtgaggatgcaaggaccaaacactttgtrccattttttccttccttgcctgtaatgatcatccacttcctttgtggatatcattataggtaaggaaggaaaaatcattccacttcctctgtttctctaaagagaaagggaactgcctctcctaccattctataaacaggcccaaatattccccaatcctctaaaatcttccccaactttgcctttctctcc

SEQ ID NO: 247818 - DNA, 608 bp, Homo sapiens
ctcttgtgacatgactccttccttacctccttggcctcagtttactcctcatcgtcaatgtagcgtagtgtttaaaagctcggaatttggagtcagactgcttggattcagcaggcagtgtgaataccatctacacatttcctagctgtttgatttggggcaagttattgttggaagaaaacccttgggctttctaaagtgcccagatcttctgttctctatgaagttggagccagttgagtcttaacacgttaattcatcagctttattactaataaagtttgatggaacctgcaggcaaaatcaggtttaccaagcctagacatctkgatccatccatggggtgaatcttacccaggtgttcaaagctggtaaagaaccgcaggagtcctcctatggtagcagttggcttaccagatagaggggaatgtgtgtgtgtttgggagctgggggtaggagtagaggcaggctactctgaaaatgtcaatagcctagaaatgaatgaaattcatgcactcccaacttttatcagcctccctaattagatatgatgatattgggatttataataataaatgtgtatctatttggtcttcatccctatttct

SEQ ID NO: 247819 - DNA, 574 bp, Homo sapiens
tttgtatccttttataagaaaccagtgatctaataagcaactgttttcttgaatcctgtacgctgttctagcaatagtcaaacatgaggaagggttaccaggaacctccaatttatagccaattggtcagaagcacaggtaacagcttggacttacrattgatgtctgaagttggtaggggagttagcagtggaatgtattcaagtcctgtggcaccaaagtatgttagtagcagtgaatcgtatgggtctgcagcaacctccattcttgcctcctcataagaaagaatccgatgaaggggcataaggcaaagggagagaccaaggcaagttttagaacaggagtgaaagtttatttaaaagctttagagtgggaatgaaaagaagtaaagtacacttgaaagagggccaagtgggcaacttgaaagatcaagtgcacaatatgacctttgacatggggttttatatgttggcatgcttctggggtcttgcatcccttctcccctgattcttcccttggggtgggctgtctgcatgtgcagtggctgccagcactttggaggggccgcaggagc

SEQ ID NO: 247820 - DNA, 478 bp, Homo sapiens
tctgcagcaactcatactgttcttaagtggcagagcttggacacaaactcaggtttgtctgaagccaaaacttacgctcttatctcggtctaacagttataaccccaaaccctcactagcacagagggagagcaggtactgttggggcaaagtatgggtcaagaaacaggcagtcctggatgtaaaaagccaaaatgcagcaaaggcacacagaaaccaaagcatcatctcaatttcagcatgttcagacttgtcaccatctagggctaaggagctatctcatggtaactggytttgttcaagtttacaactctcaccaaagtctcgtttgtagaagcctcagctggggccttctctgaaacttccattgcatcacccagcaattgcattcctccaaccctggctgccagctttctctgcagagaaagctgccttctctttttcttgaagtgcactggacataatctgaaggtgctcc

SEQ ID NO: 247821 - DNA, 557 bp, Homo sapiens
agaaacggtctatgccaagtggccatcaccacacatgcatgtaagcttttatcaaacagttctggagttccaactctttagtagataccagggtatataagatagaataagataggatccttcatcccaaagagctcacagtctagtagaagagacaggtcataaacaagttagtgcatccacgtatgataggtgctaggagaagggtggattccaggtaggwacagttgtcccttggtctctgcagagcactggcttcaggacccctgaggatgccaaaatctgtggatgctcaagtccctgatataaaatgactttgtatttgcttatcacctacatacattctctcatatactttaaaccatctctagattacttataatacctaatacaatgtaaatgctatgtaagtagttgttatactatattgtttttatttgttttattctttttaaaaatattttctatctgcagttgttgaatccacagacacggagcatgtagatatagaggttcgaatgtattgcaaagtaaaaagtgggcacagctggcagagt

SEQ ID NO: 247822 - DNA, 274 bp, Homo sapiens
aacctgatttctctgccagcaaagataagcctggactgctgagttttcactgtcacgcctcctcacatatgaaggcctgagtcctcccagcctggcctgcctcccagtgacaagttaggctcagacagcaggctctgtgcccatctgtctcacttccctcmctgtccagagacccctctccttcctctctacttcctcccttctacccccactccccatcaatattatctcttttggatgcagacctgcctttgaagtaaaccaggagatttct

SEQ ID NO: 247823 - DNA, 640 bp, Homo sapiens
ctaaactatgaggatgcaaaggcacaggaatgacacaatggaatttggggactcagggggaaagggtgggaagcaggtgaggaataagactagaaatcgggttcagtatataccactcaggtgacaggtgcaccaaaatctcacaaatccctactaaagcacttattcatgtaaccaaataccacctattcacaaaaacctatagaaataaaaacttacaaggaaaaaaaagaggcaattagaggaaaaaatatatcatagcatagcagargggggaatggaaattgtgcagggaaaaaaaatcctcatatcctctcattaattaaatgtagttgacaagcagtattaatttgtttgccaaccagatcttagtcacaatacttaaaaaaaaaaaagctttcctaagctgtaattcacatgctatacagtgcacccattgaaagtgtaaagttgaatggtgtttagtatgctcatagacctgtacaaccaccagcacaatgcacaatcaattttagaatatattcatcgctccccccaaaaaacttcataccaactagcagtcatttactctttatccccttcgtccagcacctgacaaccactaatctattctctgtttctatagatttgcctgttttgg

SEQ ID NO: 247824 - DNA, 640 bp, Homo sapiens
ctaaactatgaggatgcaaaggcacaggaatgacacaatggaatttggggactcagggggaaagggtgggaagcaggtgaggaataagactagaaatcgggttcagtatataccactcaggtgacaggtgcaccaaaatctcacaaatccctactaaagcacttattcatgtaaccaaataccacctattcacaaaaacctatagaaataaaaacttacaaggaaaaaaaagaggcaattagaggaaaaaatatatcatagcatagcagaagggggaatggaaattgtgcagggaaaaaaaatcctcatatcctctcattaattaaatgtagttgacaagcagtattaatttgtttgccaaccagatcttagtcacaatacttaaaaaaaaaaaagctttcctaagctgtaattcacatgctatacagtgcacccattgaaagtgtaaagttgaatggtgtttagtatgctcatagacctgtacaaccaccagcacaatgcacaatcaattttagaatatattcatcgctmcccccaaaaaacttcataccaactagcagtcatttactctttatccccttcgtccagcacctgacaaccactaatctattctctgtttctatagatttgcctgttttgg

SEQ ID NO: 247825 - DNA, 640 bp, Homo sapiens
ctaaactatgaggatgcaaaggcacaggaatgacacaatggaatttggggactcagggggaaagggtgggaagcaggtgaggaataagactagaaatcgggttcagtatataccactcaggtgacaggtgcaccaaaatctcacaaatccctactaaagcacttattcatgtaaccaaataccacctattcacaaaaacctatagaaataaaaacttacaaggaaaaaaaagaggcaattagaggaaaaaatatatcatagcatagcagaagggggaatggaaattgtgcagggaaaaaaaatcctcatatcctctcattaattaaatgtagttgacaagcagtattaatttgtttgccaaccagatcttagtcacaatacttaaaaaaaaaaaagctttcctaagctgtaattcacatgctatacagtgcacccattgaaagtgtaaagttgaatggtgtttagtatgctcatagacctgtacaaccaccagcacaatgcacaatcaattttagaatatattcatcgctccccccaaaaaacttcataccaactagcagtcatttactctytatccccttcgtccagcacctgacaaccactaatctattctctgtttctatagatttgcctgttttgg

SEQ ID NO: 247826 - DNA, 569 bp, Homo sapiens
ttcagcaatgaatagaatgggcgtggtttctggcctaacggaacttaatagtcttttcaaattgttttacaaatgaagaaactgaagttcgatagaggtaactgccaaatattacacagccattgaagagcagggctggaatttgaatccagatcttctgactttaactctgaacttttcccagctactctctgctggcttccatggtaagtcaagtcacttccaaagtcaaggccagaggcctggagttcattactaaagaaaaaggccgctgggactggccatttgccttggcactgggatttggaattgagttcatatttgctgttgaatcgttcccttcagtaatgggatagcttggaatggaatggtaacgagagccctgtttgctccagagggcccactccctgtcctgcccaccagccatagtggttgaccaccctctttaagcccyctattgattacaaagagtcaatttctttctgatgcaaatggctgagctcagggcagttagagctgagccatggcccctcaaattactgccttccggactaaatatgtcaggcagc

SEQ ID NO: 247827 - DNA, 620 bp, Homo sapiens
atatgggtataatggatggcttgaacactcagcctgccctcatggagcccacaatttaaattctaattacttttccatctctcatataattcaataactaaaataattttccatttttacttttgggagtttgtattatcaaaatggtagtttcttctttcattttccaatggtaaagttaccttataatattgaatttatttttccaagcracaaatgccaccctagagttacagtctttttctcttcaccaaaatgttcttatttaaattttaactttcagaaatgtaagtcaaacatatattcataatttaaaaagctaagtaatgttacaaatctcttaatgaatcaaagcaaaccttttctccactctcctctgctcgagcctctttccctaaacttttttaaatttttagctgtttcaccttgtttttctaagtattatgtttatactgctgttcttgactgatctcttttgggtattatctggacttcctattaaggaagatgaagatttagtgctcttgtctaagcctaagtcttcatttgctctgactcctttctcagcatagttatgggagaatgcacgctaactaaggaaatactcaatgttttacact

SEQ ID NO: 247828 - DNA, 642 bp, Homo sapiens
aaaccttttctccactctcctctgctcgagcctctttccctaaacttttttaaatttttagctgtttcaccttgtttttctaagtattatgtttatactgctgttcttgactgatctcttttgggtattatctggacttcctattaaggaagatgaagatttagtgctcttgtctaagcctaagtcttcatttgctctgactcctttctyagcatagttatgggagaatgcacgctaactaaggaaatactcaatgttttacacttatgccagctattaagctcagctccaaacccaccttcttatactctgctctgtgatgctgtgctgggactctgcaaactacgttttctttcttctcagctggcttcgtgaaaggagatggaaagtagaaggaaggggaaaaggacttctttctctttcttgctgttcctaccagaatcacactagcagttggtttcggcctccaacttcctttggcaccagtgtttcagaggtatcagcaccagccaagtggcaatctcttttcctagctccatggaggtcttcttccaaaggtctcttgcttctgtaagtccaacttcttgttgacttagttgttcagcactatttactaaaaagcctatttttgcaccagcaatt

SEQ ID NO: 247829 - DNA, 642 bp, Homo sapiens
aaaccttttctccactctcctctgctcgagcctctttccctaaacttttttaaatttttagctgtttcaccttgtttttctaagtattatgtttatactgctgttcttgactgatctcttttgggtattatctggacttcctattaaggaagatgaagatttagtgctcttgtctaagcctaagtcttcatttgctctgactcctttctcagcatagttatgggagratgcacgctaactaaggaaatactcaatgttttacacttatgccagctattaagctcagctccaaacccaccttcttatactctgctctgtgatgctgtgctgggactctgcaaactacgttttctttcttctcagctggcttcgtgaaaggagatggaaagtagaaggaaggggaaaaggacttctttctctttcttgctgttcctaccagaatcacactagcagttggtttcggcctccaacttcctttggcaccagtgtttcagaggtatcagcaccagccaagtggcaatctcttttcctagctccatggaggtcttcttccaaaggtctcttgcttctgtaagtccaacttcttgttgacttagttgttcagcactatttactaaaaagcctatttttgcaccagcaatt

SEQ ID NO: 247830 - DNA, 595 bp, Homo sapiens
aaattgggtgatgcactatgattcagttatttctaacgcattctcagacagtgctggtcttcagctcgccccactcttcgcattccctcttctcagactttgcgctttcccagcttcctgagtccataccatcccctcatctcccctagtccccagccaacccagccagtgccctgttatttatttatggagtggctcatcttatttgaggatgacccagattccttccatctatgaatccttatttgccagctgtcctgttacaagccctgggtaagttatattaatagacagtgactcatagcaccgcacaataatataaccaccagagccacttaagagggatgatatgaatgcactgattccaggtggtctgggccatataatcaagacagctacctttagatggtggtgatgatgataggggatctagtctattattttctggtccctttgtagagtctatttatttaagcttctcttgcctgtatgaaatgggtattttctattttgtatatgagaaaaaagatctctgaagtgttagccaacttgcakcaggtcatagctgacttgcatcagccaaggctggaaggga

SEQ ID NO: 247831 - DNA, 418 bp, Homo sapiens
tccaagtggccactaccaattagtgaagctgacttggagaaataaacctatctttggactagataaagttattttcagctccaaagattctatattctataggtagcccaatctggtggaaagttgggttcatgtaggggattggtagtagacaagataggaaaatgtaagagggaggaatattatatattaaacagctgccagttatagagtgtctacacattatgtggttccaggcaccctacatacattctcacaggaggcacacaaaktcctattggattgtggcttagtctcattttcagatgagatagcaaaggcccatggagaccaagtcactttcccaagaagactcagctggaaatggcatcctgagattagaactgaggtctgtctgactccaaagttgataatattc

SEQ ID NO: 247832 - DNA, 498 bp, Homo sapiens
agctggtccagcaaggaacagaagagcttcccagggtgatggagtctgagctgcatataccccatgttgtatcacaactgagggatcctgaaagcattctgctatgggttttataccctgggtgcccttgggactactgagcacaagtgtcgcagaacatcctattcaaggaggaatgagtatatagccttggctgttccaggcagttcctccatattccaggacattgcattcacagtacattctacaggttatcttgagaattacaggtgggagaggggagagctgattggccatgccatcagtgacctgtcctcctatactcttttgctggcaacttggacattcagcatggtaatagctagatcaacctttatgagaaccctatgaacctttgttcaacctatgctgttgaacccttgcatagacttcatctctgcccctaagattactcttaacatgtgcctacctstgcagtgtctgaggacagaggctggc

SEQ ID NO: 247833 - DNA, 552 bp, Homo sapiens
tagaactttgtgaatgatagcatctggtcatttcttgggtttgacagtaggctacatgagggtgagctggaggtcagtaagaagcacattaacacaaaagctaaatgtctacaaagtgattcacccaactccagtccattccactcaaccaaagaacattccgaggctagtatgtgctcagctgggctgctccaggctgaggagaggagctgcaaaaaatatgatttycatgctcctaaaagagctttcagtcttgttggagaagcaagatgaacaatacctgacagaaagaatcatatccaatgagtgctttagaaaatattgccaaggcactgagaaagaaatgaggatggaagtaggcatagaaggatggtcaatattggcatggggacaaagttgtggcttgaccaactagcaagaaactcaaacttacagagccctgtgtttatgtaaactgtgatatggataataatgacaaccatacgcaaataaaaatgaacatttattaagtgcttactctatgtcaggacctaagagttttgcgtatactaa

SEQ ID NO: 247834 - DNA, 543 bp, Homo sapiens
ctacagttttcccatctggaagaaggtggggtgagctttakgtaaacataagacacttattggctctaagtggccctttaggaagggggacaaaatttctctgaaatccttgagaaatcagactcctgtaagctaaggacaaggctttttgaaaagagtatagctgtaagttgttagtagccaccagtataagcagctccgggataatgcactggcccaggaaaggatttccgggtggggcatcaaacagcacctacaataaacaataacctttattgatatcatatggaactagggttccctgaaacacattttacaaaacatgccatattgcaggcactagagtgaaaatagggatgtaaacaaataactgtaacacaattagctgcacccaacatttatttaaggtgacaggtgctgtgctaggtatagggtgaccaaccatcttggtttgcccaggactgagggggtttattggatgtagaagtttgaaactctcaatttcaaactatgacagtcccagtcaaatctggatgaattatt

SEQ ID NO: 247835 - DNA, 564 bp, Homo sapiens
catctgttgcctattatcagaagcagaatttcaagaatttctgttcactgcatcttggtatctgagttgccaaggaaaacaatgcagataagcactgcgaggaacaacattttacttgcacagataagagacagaacatgatcagcctcaatagtgggcattggttctccatggccagtgggtccctcctagccactgctgcagggcagttggcctacaggcacacaggcacctttttttgtgctgcagcagaaagactgtctcttctccctacagaggacagatgtagcagtggggttgagcaggtgtcatatggcacacacatttaagcagaacaaaggagtgcgcattgagttttaaccaaggaaagatattttcacacaaggtgataagttcagcacaggctgtaaggactctggaactcttggtaagagaatgttacaggtctcaggcccattcttgcatggtttagtgggggwtgaaaggctgcatgcacaagacagcctttctcaatacctactaagtgctagacactgttctagctagtggggacacaacagggaa

SEQ ID NO: 247836 - DNA, 565 bp, Homo sapiens
atgaggaagacacaggctgcagcacgtggcagagctgagagaggagagggtgatgggtgtgttgggaggatagtgaagctgtgtccacacatggaaggcaaccgcagatctgagtagagacagaggcaccaccatgggctgtccatactaagttcctagctaacttgaggacggggtgtccaggaaagcctggtctggattctgaatgatacctggtttgtcttgaccagaggctgagaaagttcctgctctctcctccatgcgctgctgcctaggtaagctgaggacacttacttcacccacagaaatgtcctgctttgacctaatcttgagagcagactcagkccacatagattcagaagcagcccactctcctggacaggattctctccatacgtctagttcttagcccacactacagccttgccagacaagctgcaggatttctgaagtgaactccacatctctgaggcctcatttgtgaccttgccttgtggtttccccagaaaggactcctggatactctcatggaacctaaagttaggtcatggcctagaggctcagc

SEQ ID NO: 247837 - DNA, 541 bp, Homo sapiens
caaaattatatttgacatgtacaccagatgtcacagtcatttgtccattctgaacatgcccaggaaataatgccagagactgaaaatagcagagtgtgtgcagttttttgagcaaagggtggattaatgattttaattaagttgggtttgcatgatttttttctgtgaaaatgattttttaaaattttattatagttttaattsacaagaaataatggtatatatcatggctacaatgtgacgttttggtatatgtttacattgtggaatgattaaatcaagctaattaacatatctatcacctcacatatatgtcaattgaaaatgatttgcagggtctctctattaaaccttaatttaggaatgtgtagagtttgtctataagatacatgaggttttaattttaatgtaaaaccctgaagatgggaaagattatgtagaattatgggaaaagtagatattttggaatcagatggatcttcctttaaattctgactctgcttcttcttcttagctgttgagatctatgcaagttgttttt

SEQ ID NO: 247838 - DNA, 605 bp, Homo sapiens
tgggctctgaatctgaaatgacacagagcaggatctttgatctcaatctcctgactaaatccagaaatacaycagtccctccataacgactcaatacttatgtcagtagtttgagaaaggagtttaaaatatcagctgatgaagagactcttcatgtttaactccctgcaaatatttttctgaacagatatgactattttctagtatatgtaatcaatactgttttcaaatagcttctgtgaaatttgctagaaagattcacctagaatggtcctagccccttcctatcagagcttggggagctcctctccctgccctccacaggatagccctggaggggatcttaggttgagcttcttgaaaatcggtcatttttatgtaaagaattggtgtgaacagaggctgaggcagaagaatcacttgaacctgggaagcagaggttgcagtgagctgagatcgtgccactgcactccagcctgggccatagagtgcgactccgtctcaaaaaaaaaaaaaaaaaaaaaaagaattggtgtgaatggtccctttcctctgatagtgagccccccactttcctatctgcaatgcagtttcttctaaatgaa

SEQ ID NO: 247839 - DNA, 605 bp, Homo sapiens
tgggctctgaatctgaaatgacacagagcaggatctttgatctcaatctcctgactaaatccagaaatacaccagtccctccataacgactcaatacttatgtcagtagtttgagaaaggagtttaaaatatcarctgatgaagagactcttcatgtttaactccctgcaaatatttttctgaacagatatgactattttctagtatatgtaatcaatactgttttcaaatagcttctgtgaaatttgctagaaagattcacctagaatggtcctagccccttcctatcagagcttggggagctcctctccctgccctccacaggatagccctggaggggatcttaggttgagcttcttgaaaatcggtcatttttatgtaaagaattggtgtgaacagaggctgaggcagaagaatcacttgaacctgggaagcagaggttgcagtgagctgagatcgtgccactgcactccagcctgggccatagagtgcgactccgtctcaaaaaaaaaaaaaaaaaaaaaaagaattggtgtgaatggtccctttcctctgatagtgagccccccactttcctatctgcaatgcagtttcttctaaatgaa

SEQ ID NO: 247840 - DNA, 605 bp, Homo sapiens
tgggctctgaatctgaaatgacacagagcaggatctttgatctcaatctcctgactaaatccagaaatacaccagtccctccataacgactcaatacttatgtcagtagtttgagaaaggagtttaaaatatcagctgatgaagagactcttcatgtttaactccctgcaaatatttttctgaacagatatgactattttctagtatatgtaatcaatactgttttcaaatagcttctgtgaaatttgctagaaagattcacctagaatggtcctagccccttcctatcagagcttggggagctcctctccctgccctccacaggatagccctggaggggatcttaggttgagcttcttgaaaatcggtcatttttatgtaaagaattggtgtgaacagaggctgaggcagaagaatcacttgaacctgggaagcagaggttgcagtgagctgagatcgtgccactgcactccagcctgggccatagagtgsgactccgtctcaaaaaaaaaaaaaaaaaaaaaaagaattggtgtgaatggtccctttcctctgatagtgagccccccactttcctatctgcaatgcagtttcttctaaatgaa

SEQ ID NO: 247841 - DNA, 562 bp, Homo sapiens
ttgcagtgagctgagatcgcgccactgcgctccagcctgggtgacagagggagactccatctcaaaaaaaaaaaaaatctatctatctatctatctatctatctatctatctatctatgttcagtaacatccaaagtgtcaaatatttaaaaacaaattaataaaaggtgtataatgcctctattcagaaaaatgtaaaacatattttctagaaaaattaaagacytaaaaagtggagagatagaccatgtttatggattgatggctccatattccatattatacaaatgtctgttttcttcaaataggtctatacgctcaaagcaatccagtcaaaaacattctcacatttttgtggaaattaataatctgattttaatatgtatctgaaaatgctggtatcaccactaaaatagacaagtaaaataaataacagcccagaaatagatccatgcacacatggaaagttgatttatgaaaaaagtgacactgctgagcagcaggaaagtgatgccttttgtatagcattaattagatataaataggaacaaaattagattta

SEQ ID NO: 247842 - DNA, 551 bp, Homo sapiens
actatttcttgccaggggcttttgctagatcttttacttcaaagaccagctgaagtctcaattctcctgtgaagtttttcccttatctctgactggatggggtagtaacttttacatagcatttagacataggaagaaagagagagtcactcyaggttgtcttttcttccccacaaatttgcctttggactgaaatcatgttttatgtttaaagaattcccaacaatgccaagcttaggatgttgtaattctacatatgagtagaattagaaaaatgtgagagttggaagggatttcatcagtggcctggccccaaacacctcagtttccgggtgagaatgctgatccagaaagaaatagacacaaccaagttaattatgaaagttgcactagaacccaggtcgtttgatgtccaattttgtattattccacggcactataaagccttctgatggcttggaagctggctgaccctgagatatttgtccccacacataaactcaaagggtaagtagagagatggttgggtcatggagggatgagtcaccatg

SEQ ID NO: 247843 - DNA, 551 bp, Homo sapiens
actatttcttgccaggggcttttgctagatcttttacttcaaagaccagctgaagtctcaattctcctgtgaagtttttcccttatctctgactggatggggtagtaacttttacatagcatttagacataggaagaaagagagagtcactctaggttgtcttttcttccccacaaatttgcctttggactgaaatcatgttttatgtttaaagaattcccaacaatgccaagcttaggatgttgtaattctacatatgagtagaattagaaaaatgtgagagttggaagggatttcatcagtggcctggccccaaacrcctcagtttccgggtgagaatgctgatccagaaagaaatagacacaaccaagttaattatgaaagttgcactagaacccaggtcgtttgatgtccaattttgtattattccacggcactataaagccttctgatggcttggaagctggctgaccctgagatatttgtccccacacataaactcaaagggtaagtagagagatggttgggtcatggagggatgagtcaccatg

SEQ ID NO: 247844 - DNA, 510 bp, Homo sapiens
taccctgtcatactgtggctaaatattttgaatatcacccctggagaggaatttgtattacsagaagcttcatttccaaagcagcatcttcctaagaatgtgtatgtagtttcggcaggaaaggcatgggttctaatgccagtcctgcttcttacctgctgggtgaccttgggcagatggttttaatccttctgagacttatttatggaacgacaataaccccagaactagtgtagggtggttgtgagaataaatgcatgtaggtaaaagctctggccctaatgagcactcgatgacctcatctttcttcacagtgtatcagaggtaccacatacttcattggtggttagtcttgtagtcatgggatctccaaaaaaccctttcccaacactgaattcaccaagtatctgttatgtctgcctagtctttcaggctaccaaaaagctgttgagtatttctctaagaattgctggtttcatcattgctttcaatggttctcctgggctgggc

SEQ ID NO: 247845 - DNA, 510 bp, Homo sapiens
taccctgtcatactgtggctaaatattttgaatatcacccctggagaggaatttgtattacgagaagcttcatttccaaagcagcatcttcctaagaatgtgtatgtagtttcggcaggaaaggcatgggttctaatgccagtcctgcttcttacctgctgggtgaccttgggcagatggttttaatccttctgagacttatttatggaacgacaataaccccagaactagtgtagggtggttgtgagaataaatgcatgtaggtaaaagctctggccctaatgagcactcgatgacctcatctttcttcacagtgtatcagaggtaccacatacttcattggtggttagtcttgtagtcatgggatctccaaaaaacccttkcccaacactgaattcaccaagtatctgttatgtctgcctagtctttcaggctaccaaaaagctgttgagtatttctctaagaattgctggtttcatcattgctttcaatggttctcctgggctgggc

SEQ ID NO: 247846 - DNA, 254 bp, Homo sapiens
ctcaaattccccaagatcttgtattaccaacaagattggttgttcagttagacagagctcttttgtgtgtgtgcaatgggaagtttcctgtattaacstatataattaatttgcagacaagaaaaacactgcaaacattgttaaaaatgcattttatgttcattttttttttaattttttaaatcgggatttgatcttcaatgctaccaaatcacctctagtaagacacaggtctgcagttagtttttgaagtg

SEQ ID NO: 247847 - DNA, 254 bp, Homo sapiens
ctcaaattccccaagatcttgtattaccaacaagattggttgttcagttagacagagctcttttgtgtgtgtgcaatgggaagtttcctgtattaacctatataattaatttscagacaagaaaaacactgcaaacattgttaaaaatgcattttatgttcattttttttttaattttttaaatcgggatttgatcttcaatgctaccaaatcacctctagtaagacacaggtctgcagttagtttttgaagtg

SEQ ID NO: 247848 - DNA, 590 bp, Homo sapiens
aagaaaaaaccttgagcacccgatagaggttgaatgggacrcactcttaacagccctatgaggcagcaaggactgtttactatctccattctactatgaggaaactaaagtccagagagggtaaatgatttgcccaggatcacatgacagcttagaggcaaagccaagaatagttcaatctacctgactccctcccattcatgcttctccactgcctcaagatggcatacagcttctgcatccccttctcaaatctcccaccccagaaacttacctgattatttacccatacatactgacatgtcctgaaacataaacccaccttccttggttagaattgccctggaagcagagcctggacgaggacttcagtgtagatggccttttgggaggaaatcccaagaagcaggagtgagggagtgaagagagagtgagatgcagagggaagaaaagcaatgggatgtcatggagctcattacagctgtggtagctggggcttggtctcaccaggctcctctctgaggaaccctgtaggatgcttcttagattacctcgccagctgggcatttaccctctaactcctgtccccc

SEQ ID NO: 247849 - DNA, 590 bp, Homo sapiens
aagaaaaaaccttgagcacccgatagaggttgaatgggacacactcttaacagccctatgaggcagcaaggactgtttactatctccattctactatgaggaaactaaagtccagagagggtaaatgatttgcccaggatcacatgacagcttagaggcaaagccaagaatagttcaatctacctgactccctcccattcatgcttctccactgcctcaagatggcatacagcttctgcatccccttctcaaatctcccaccccagaaacttacctgattatttacccatacatactgacakgtcctgaaacataaacccaccttccttggttagaattgccctggaagcagagcctggacgaggacttcagtgtagatggccttttgggaggaaatcccaagaagcaggagtgagggagtgaagagagagtgagatgcagagggaagaaaagcaatgggatgtcatggagctcattacagctgtggtagctggggcttggtctcaccaggctcctctctgaggaaccctgtaggatgcttcttagattacctcgccagctgggcatttaccctctaactcctgtccccc

SEQ ID NO: 247850 - DNA, 595 bp, Homo sapiens
ctgctcttcgtgtctaatttgaactcaggatcctcacggctctaaacaaagcttgtccaacccacagcctgccggccacatgtggttgaggacagctttgaatgcagcacaacacaaattcataaactttcttaaaacatgagattttttttgcaatgtatttttttagctcatcagctattgttaatgttcgtgtattttatgtgtggcccaagacaattattcttcttccagtgtggcccaggaaagccaaaatattggacacccctgctctaaactgtttcattttcaatatgtcttttgtcataaaaaagcttcagttaggttcataggggcacagatcagcatctcaaagctgttcttctgctcttcatgaggccaattcccaatatccctttttctaagcattatatgaccctcagataccacagtctgctgcagtttcccagtctcttggygatgtcacacactggtcttcctgagatgagatactccgctttgttcatagatggtttcccaacatctagtgtggttgtctgaccgcctgcatggcttcaataaattttgctgaacctacgaatgagtaaaagtgaat

SEQ ID NO: 247851 - DNA, 605 bp, Homo sapiens
gtactaataccaccagcacccataatgaaaaccaaaaaatagttaaaaacattttwtacaaatgttctcccccccattatttatggattcatagctacactatcaaagcatagtcattgaatactctccttttgtcttagttctcaagtatgtacatacttaatactcatcattagaccataggtcaacactgctctagttttttgttgtctaagcttattctttactagatacaagagggattatgggaacaatatttcctgagttcttgtatgtggataacagtgtgtgatacacttgtactttatactggaattgtagtttttatcattaccctgtttccttgttttgtttattttgtcaaggatgcctgttgtctgtatgttgagtcttctttatcttaaatattcatcattttctcttgagtccttttttacctgtattcatttcttttttatttaaaattttttagcctgctcacattctatttttcttaaaccattgtttgttatgtttattcactcttgtatttcttctagtttagttttcgtttctgaggtgggtttttttgtttatttctaattctttcctgagttctgccacct

SEQ ID NO: 247852 - DNA, 595 bp, Homo sapiens
catgggtccagctgtttctcactcaacccattacccacggaagaatgttctacctgccttaattctatcagccagtttctcttgtgattctttggctggtgtcttttagttttttaattaaaaaattgtttcttaaatgatttttaaagatgtgagtttttttaatgtgagttattcttagcttttaaaaatgtcatttcatttttttttctatagctataaataattttttccacctgctccctgctcggaaatatcagatggraaaatctcccaagatctctgcaccgtgatatgcagagtggctttctgatatatccaactgggattgtgctcttaaaatttcaatatgtccatttacaacattcctgtatgctctagaggattgatttattttgctctgattatgaaaggattgcagagttccatttaacttgtcgccaacatgatatcgactgcatctctcaaaaggaattaatgtaattttggggggttcttgacttactttagcaacacgaaagaataaagagcaacagttgattcttttatttcacccttctttgactctgattagggactgcttgtgattagatat

SEQ ID NO: 247853 - DNA, 595 bp, Homo sapiens
catgggtccagctgtttctcactcaacccattacccacggaagaatgttctacctgccttaattctatcagccagtttctcttgtgattctttggctggtgtcttttagttttttaattaaaaaattgtttcttaaatgatttttaaagatgtgagtttttttaatgtgagttattcttagcttttaaaaatgtcatttcatttttttttctatagctataaataattttttccacctgctccctgctcggaaatatcagatggaaaaatctcccaagatctctgcaccgtgatatgcagagtggctttctgatatatccaactgggattgtgctcttaaaatttcaatatgtccatttacaacattcctgtatgctctagaggattgatttattttgctctgattatgaaaggattgcagagttccatttaacttgtcgccaacatgatatcgactgcatctctcaaaaggaattaatgtaattttggggggttcttgacttactttagcaacacgaaagaataaagagcaacagttgattcttktatttcacccttctttgactctgattagggactgcttgtgattagatat

SEQ ID NO: 247854 - DNA, 574 bp, Homo sapiens
gggaagacatattgggatgtagacatattgagaacttggcgaacctgatgcctggtagagctctctatggtagagccaggcagtgggcatgaatgcccttcctctcagagtcccacattcaaatgagatttctatggtaamctggtccctgaggttatgcctctgaagtaattgttctcaaccttgtgtgcataacagactctttataagctcccaaaataccaaagcccactatccatcccaagccaattaaataagaatctatgagcagggaagctcaggcattgcacttttttttttttaagtccccagagtgagtccagtgtgcaaataggtttgagaaccgctgctccacaaggttgaatgggggctttctagaatgattttggcaaattttttaatttttggccttcagcagtttatgagtgatcatattaacataccctcattagcataaagtgtattatacttttttagaattactaatttgtttgttgaaaaatatgttattttactgattaggtttactattgttcatatgcttattttttattagtatttccttctgaaccac

SEQ ID NO: 247855 - DNA, 574 bp, Homo sapiens
gggaagacatattgggatgtagacatattgagaacttggcgaacctgatgcctggtagagctctctatggtagagccaggcagtgggcatgaatgcccttcctctcagagtcccacattcaaatgagatttctatggtaaactggtccctgaggttatgcctctgaagtaattgttctcaaccttgtgtgcataacagactctttataagctcccaaaataccaaagcccactatccatcccaagccaattaaataagaatctatgrgcagggaagctcaggcattgcacttttttttttttaagtccccagagtgagtccagtgtgcaaataggtttgagaaccgctgctccacaaggttgaatgggggctttctagaatgattttggcaaattttttaatttttggccttcagcagtttatgagtgatcatattaacataccctcattagcataaagtgtattatacttttttagaattactaatttgtttgttgaaaaatatgttattttactgattaggtttactattgttcatatgcttattttttattagtatttccttctgaaccac

SEQ ID NO: 247856 - DNA, 574 bp, Homo sapiens
gggaagacatattgggatgtagacatattgagaacttggcgaacctgatgcctggtagagctctctatggtagagccaggcagtgggcatgaatgcccttcctctcagagtcccacattcaaatgagatttctatggtaaactggtccctgaggttatgcctctgaagtaattgttctcaaccttgtgtgcataacagactctttataagctcccaaaataccaaagcccactatccatcccaagccaattaaataagaatctatgagcagggaagctcaggcattgcayttttttttttttaagtccccagagtgagtccagtgtgcaaataggtttgagaaccgctgctccacaaggttgaatgggggctttctagaatgattttggcaaattttttaatttttggccttcagcagtttatgagtgatcatattaacataccctcattagcataaagtgtattatacttttttagaattactaatttgtttgttgaaaaatatgttattttactgattaggtttactattgttcatatgcttattttttattagtatttccttctgaaccac

SEQ ID NO: 247857 - DNA, 573 bp, Homo sapiens
atggttcagaaagccagaggatggagggaaatggagaaacagggaaggcaagataacagaaggtgaaggatgctgcttgatttcattgcaccagtgttgacaacatgactttcacttatgaaactgagctacgtacggatgagagtgtgagcatttcctgtaactttccccaggacactctttgcccagatcaccaaagtgcttgctccctcatcttctmagatatttgctcacgcatcaatgtctcaggtcttccctgatcatcctatttaaacatctgtctgtctagagcccccacctacaccccacatctttctttccctgcttcatttgtctccagagcacttttcaacatctaacatttattttaattatgtatcttgtttaccatgtatttcctcttattaaaatggaagcccagaaaagcagagataacctcgattctaaatttctagattgtgattaccttgtttggttaataggacatgttgcttgatgttgctaattattgagctttatgaaaatgctatcattctgtttgttgtcttgtgagcctggctttttatgctcaac

SEQ ID NO: 247858 - DNA, 573 bp, Homo sapiens
atggttcagaaagccagaggatggagggaaatggagaaacagggaaggcaagataacagaaggtgaaggatgctgcttgatttcattgcaccagtgttgacaacatgactttcacttatgaaactgagctacgtacggatgagagtgtgagcatttcctgtaactttccccaggacactctttgcccagatcaccaaagtgcttgctccctcatcttctaagrtatttgctcacgcatcaatgtctcaggtcttccctgatcatcctatttaaacatctgtctgtctagagcccccacctacaccccacatctttctttccctgcttcatttgtctccagagcacttttcaacatctaacatttattttaattatgtatcttgtttaccatgtatttcctcttattaaaatggaagcccagaaaagcagagataacctcgattctaaatttctagattgtgattaccttgtttggttaataggacatgttgcttgatgttgctaattattgagctttatgaaaatgctatcattctgtttgttgtcttgtgagcctggctttttatgctcaac

SEQ ID NO: 247859 - DNA, 438 bp, Homo sapiens
tccagcagataacagcaaagtgttaatgttagcattggcgaaataccttctgtcactgtcagctgcctcggttttctgttacccctaaatgccattcgtggttttatattctaccaagcgtgcctctgtttacataattaacaacttctgcagtggttaatggatgaggagaaaactctctaaggaggcgatcttaattcawcccacgtctcctacaggaagacacacgcttctatgcaaagcgtagacatgacatgatgggggatttacacacggcctttatagagtaatttactagcaaacttgggtgtatattattgtaaactgctgtataccgtgtgattacaagattaagaaagaaggagtgaattgctaatcttgtcagtccaactgttttctttcttgataacatttgcgttattacactttgggtgatga

SEQ ID NO: 247860 - DNA, 579 bp, Homo sapiens
ctcacaaatttgcgtagggtcacgacgagcgtgacggtgagggaggcgcattcygtggtgaggataaacacaccccggatgcacacgtacctggaggagtggagtcaaggtagttttctgtagactgtacttgggggatcagtgagagaaccttctggcatggtccctggtttaacttctcatattctaagaaaacatgaaggtccgctacggcagctctgaggctcctcctggggagaacctgcagaacaactcctgtcctgccattccatttatgggtaccaatttgaaaccgccaaaaaacccccaattattcttatgttggagtcttcctatggttacaatgacaggcacctccaagataatgacagagggtgacgctctcggtaagggtgatcccattcacctttatttatcttgcctccagcccttctatcccctcctccagaaagggactctggcaaatctaggagctgacttcagaggaatgaggtcaatctcgattcgtttcactatttcaaagacataattatttttataatgaaagtaaggtcattcgaaataaccattttaaaaaac

SEQ ID NO: 247861 - DNA, 553 bp, Homo sapiens
ctaaaaaacaaacatcaggtgacaagatgtctgcatttgttcatttccagatgtttttcttgaagaacattattgtttaaagtcctgcaaatattatgaactaattgtagaacatgtacaaaactgtaaaaagaaataaaaatacattattaccatctagtcctttayagctttctacatcttcttatatattcatttatgtaaatttttttacactaagacaggatcagattgcatatggaattttatatcttgcttttttcatgagcttttgcctggaattttgcttcaaatcagtcattaaaattttttaaatagaatgcttttaatgactatgatatggatgtagcacacttaaatgtatgaggatggttatttccaattatttcattattaaaatcaatgtacatccttgtatacaaatctttaaacaaatgttgatatattttaggataaaccctcataagtggaattactgagtcaaaggctgtggacatttaaaaaatacaatacacaatatttttccataaatgctgtgtccatttatacccaa

SEQ ID NO: 247862 - DNA, 553 bp, Homo sapiens
ctaaaaaacaaacatcaggtgacaagatgtctgcatttgttcatttccagatgtttttcttgaagaacattattgtttaaagtcctgcaaatattatgaactaattgtagaacatgtacaaaactgtaaaaagaaataaaaatacattattaccatctagtcctttacagctttctacatctycttatatattcatttatgtaaatttttttacactaagacaggatcagattgcatatggaattttatatcttgcttttttcatgagcttttgcctggaattttgcttcaaatcagtcattaaaattttttaaatagaatgcttttaatgactatgatatggatgtagcacacttaaatgtatgaggatggttatttccaattatttcattattaaaatcaatgtacatccttgtatacaaatctttaaacaaatgttgatatattttaggataaaccctcataagtggaattactgagtcaaaggctgtggacatttaaaaaatacaatacacaatatttttccataaatgctgtgtccatttatacccaa

SEQ ID NO: 247863 - DNA, 554 bp, Homo sapiens
actcaatactgcattctatattgtgcaaaaatttgccctagtgtttgcagctctgcatctcatgttcaattaaatccatgattgatatacatagttagccaaccaagaagttaacacaaaatccaacgaagaagttaacaccaaatgtgtcttattagtgtgtgctgacttaataccatgaagacttagaattaaatacagagagaagcaagtaagtcaaaccaatacaattaatattttggcatcaaatttagaaataacctatgcatgtttatttggcattttagaaggtaaytggacatatcagctgtccacgttaaataacaaaattcagaaaatatgattaattgtagagtttattcaagcacaaaccttgtgggatagctgccctggaagtacagattccaaagaatggaagtatgtgttcagaagcatagatgtctagggttgtttatatagacaagggaagtttaacggaatttcaacatctttctatataaggcttaatgcatagttacaatgatctcattggttgaggtgatatttttctttca

SEQ ID NO: 247864 - DNA, 586 bp, Homo sapiens
gtttttatatgaaattgagggtaagtttttactagcttgaaatagactggtataatgattagaagttttatgtaagctttatgaccacacagacacacacacacacctgtagtagatacaaaaagataaaaagaatcaaagtatattactataagagaactacaaaatagataacaattaacaaaataggaacagtaagtcctcacctatcaataattacttaagggcaaacagattamattaaccagtgagggctgggcatgtggctcactcctgtaatctcagtactttgggaggtggaggcaagtggatcacctgaggtcaggagttcaagatcagctcgaccaacatggtaaacctcgtctctactaaatacaaaaaattcgccgggcgtgctggtgtatgcctgtaatcccagctacttgggaggctgaggcaggagaatcacttgaacccaggaggtggtggttgcagtgagctgagattgcaccattgccctccagcctgggcaacaagaacgaaactctgtcttgaagaaaaaaaaaattaaccaatgaaaagagagagtggctgagtagaatagaaa

SEQ ID NO: 247865 - DNA, 586 bp, Homo sapiens
gtttttatatgaaattgagggtaagtttttactagcttgaaatagactggtataatgattagaagttttatgtaagctttatgaccacacagacacacacacacacctgtagtagatacaaaaagataaaaagaatcaaagtatattactataagagaactacaaaatagataacaattaacaaaataggaacagtaagtcctcacctatcaataattacttaagggcaaacagattaaattaaccagtgagggcygggcatgtggctcactcctgtaatctcagtactttgggaggtggaggcaagtggatcacctgaggtcaggagttcaagatcagctcgaccaacatggtaaacctcgtctctactaaatacaaaaaattcgccgggcgtgctggtgtatgcctgtaatcccagctacttgggaggctgaggcaggagaatcacttgaacccaggaggtggtggttgcagtgagctgagattgcaccattgccctccagcctgggcaacaagaacgaaactctgtcttgaagaaaaaaaaaattaaccaatgaaaagagagagtggctgagtagaatagaaa

SEQ ID NO: 247866 - DNA, 580 bp, Homo sapiens
tgcacagcctcgccaggtgtccactgttaaagtgagagcatcgattagaaaagaatgggactctgcaactcrgaacggggatgtgtgggaggagcctgatgaagcgggggacactaagcttgtaaactctgatgaaccttttttttgccagaagtaacagcttccctatccccagtagtggcaacatcccctccccaacccatgctgccatcagactttccacctttgtctgaggagataaaccctatgctgcctgaggcaacagtgatagcctcccctaaggaaattgccaggcaagataatgttgattcccctcaggagccacccccaacaccccagttttcttctagacctataactagactaaagtcccagtgggcccccagaggtgaggttcagagtgtgacccatgaggaggtgcactacactcaaaaaagaactgcttgagttttctaatttatataagcagagaacaggcatgggaatggatactaagggtgtgggatgatgatggaaggaacagagacttgaatcagactgaatttattgatttgggcccactaagtagggattctgcatt

SEQ ID NO: 247867 - DNA, 534 bp, Homo sapiens
tctttgggtgtggtggcttacgccgataatcccagcactttgggaagctgaggcaggcagatcacctgaggtcaggagttcgagaccagcctggccaacgtggtgaaatacaaaaaatacaaaaatacaaaaattatctaaaaaaagcaaaaattagcagagcatrgtggcaggcgcctgtagtctcaactgctcggggggctgaggcaggagaatcacttgaacctgggaggtggaggatgcactgaggtgagatcgcacccctgcactccagcctgggtgacaagagcgataattctgtctcaaaataaataaacaaataaataaattctccattctcagcgtctatacggctgtacatgattatgtccataggataaattcctagaaaatagaattgctgggtcaaaggtaatgtattaatacattaaaaaatttgatagacatccctataatcccctccgaagagacttaacactcccactaatagtgtaatggaaactacttccctagtactttgcaaactgatcgaga

SEQ ID NO: 247868 - DNA, 593 bp, Homo sapiens
ccaatagtccccagtttaatctgcagtcataataaaacaagcaacaaaacagtgtttgggatttcaatttctcacccttatcatcaagactcactacctcccatcatcaatatttattgagcatttacggtgtactaggcacaatagaacatacagaaaacattgtccctgctcttgaggagcttacatcctaaaagaaaaaacacaccttttaaaatggcatttttgtctggtgttttctgcagagtactgaggaaatattttgtaaagtgagctttgggtgtaacttagycccatcattatttagagaatagagggagagaaagaggaaggattttaaaggcagacaatgacagacaattcaggataggtagggttttaaaaggagataaacacactaaggagagatttgctgcagtaaataggatgagggaagtagtttgtgggatgcgagcaaaggaagcaggatgtcttagatattgagtagagccagaaagatcatgcagcctttttccaagtacgtggccaccaagtaggaatggctggtgacaagacagaacgctaaaaaaggaaggtaatcttgtgcccttgac

SEQ ID NO: 247869 - DNA, 551 bp, Homo sapiens
agataaacacactaaggagagatttgctgcagtaaataggatgagggaagtagtttgtgggatgcgagcaaaggaagcaggatgtcttagatattgagtagagccagaaagatcatgcagcctttttccaagtacgtggccaccaagtaggaatggctggtgacaagacagaacgctaaaaaaggaaggtaatcttgtgcccttgacacatagaaagaacaagggaccaaaaytgaaggcaagctataagagtatcaagaaactcttagaaaccaaaaagtgatttggaagcacaaaacatagttaatgctacccaacgtcatgataggccaagaacactgtggattcctaagttagaaaatgccatataccaaaattttaaatggaacatattcctttttttttttttcccaatcaatctccccctctcccagaaaaaataggagctcatttttttcagagtggggaggaagagaggggatcatgggacatggttggaaacagtagtgatattagtagtatttttgttgttatgataaactttgagaggg

SEQ ID NO: 247870 - DNA, 551 bp, Homo sapiens
agataaacacactaaggagagatttgctgcagtaaataggatgagggaagtagtttgtgggatgcgagcaaaggaagcaggatgtcttagatattgagtagagccagaaagatcatgcagcctttttccaagtacgtggccaccaagtaggaatggctggtgacaagacagaacgctaaaaaaggaaggtaatcttgtgcccttgacacatagaaagaacaagggaccaaaattgaaggcaagctataagagtatcaagaaactcttagaaaccaaaaagtgatttggaagcacaaaacatasttaatgctacccaacgtcatgataggccaagaacactgtggattcctaagttagaaaatgccatataccaaaattttaaatggaacatattcctttttttttttttcccaatcaatctccccctctcccagaaaaaataggagctcatttttttcagagtggggaggaagagaggggatcatgggacatggttggaaacagtagtgatattagtagtatttttgttgttatgataaactttgagaggg

SEQ ID NO: 247871 - DNA, 587 bp, Homo sapiens
taaaataaaaactaaataaacatactcgtagttcatttcagaaaggttttacttaaaaggaagagtaacaatatatttccttataccatccattaatagatacctagaagaaggaaaaaatcactggggtcatataatgtttacagattatagactgtggtagtgagggtcactccaccagatcactaaatagaacctaagatggaaacaaattagacaaaatatcacatatgatgygtacatatgctttgccttctctacattggcttggtgattaagtggggctagatgagcagctggtctatttagattgaaaatagctgccctacgcccaggggaagaaaaatgaagttccatgtaagggaaggcagcaaaagaacagaaggaaatgttatgccacatctgtgtaggtcataaccaatgagtccagtgtcataagaacagtgtgatggggcagaaggatggagaagccagaggacaaatggcttccttttctgtgcagtggtggcgaagaatagaaacctctttccttctcaagattttttttctttcttctcttttctttttttctcccaattcatttaatc

SEQ ID NO: 247872 - DNA, 435 bp, Homo sapiens
  misc_feature (1)...(435): n = A,T,C or G
atgtgaacaacatgtaaagtggtatagagttatttgaaagtagactaagattagtttaatattatttaatacattggaaaacactaaaaactttttttttaatgagaataattgatatgctaatgttacaggaaaggggatccggatccagaccccaagagagggttcttggatctcatgcaagaaagaattcagggcgagtccgcagtgcaaagtgaaagcaaatttattragaaagtaaagggataaaagaatggctactctgtaaacagagcagcccgagggcggnaatcagccaaatagcctgtctgcaagcacactaattctttcttccgcttttaaaagactctgatgcattgttcagtataccagctgcaattttcagctcctgaatttctgctcatttctttgtaattatttcaatctctttgttga

SEQ ID NO: 247873 - DNA, 541 bp, Homo sapiens
ttgaattctgtctaaaagatcacatacctctgtttctccaggactgattcctggtgccttatttagttcatttagtgaggtcatgttttcctgggtcatcttgatacttgtggatgttcgtctgtgtctgggcattgcagggttaggtatttactgtagtctttgcagtcagggcttgtttgtacccttccttcttgggaaggctttccagatatttgaaagaacttgggtggtgctgtctaagctatatctgctttagggggaatcccaaacctggtaacactgcagttcttgcagacttgtagaggtaccaccttgaagttcttggcaaaaattgggaataattctctggattactaggcagaggctcttgttctcttccrttacattcttcaaaacaaatgaagtctcgctctgttctgagccacctgaaccaggggtggagtgacacaagcacccctgtggctaccagtcctagaactatgctgggtctgacctaaagccagcccagcattgagtctcaacaaagccctgctctaac

SEQ ID NO: 247874 - DNA, 566 bp, Homo sapiens
tgttgcatattgatgacaatcagatccatttagagtggaaacataagttggccccttataaaatagtcactggaaggcctatgcatatgttaatagaaccttatgtatcttctgctactaaactctgacatgactgtattctgcaaggctctaatgaattatgtcaaagtgtattttcaccagataatgaaagctttttatgatccactgaccaagggcaatcaaagccttcacaacctagaacccagagattgggttttctaagaatgacatcaaagaaagacttcccttatcatcacactgcagcaaaacttcaggaccttgaaacctgagttcataatcttgcagtacccattctatgaatttagcattttctagaaaaccttttattgttattttaatattattattattattatattattattatttaataatattaatattaatattatttcagtatgcccaccacattcttcatcaaataaatttactcartctggctgagcacagtggctcacgcctgtaatcccagcactttgggaggttgaggcaggtggatcacc

SEQ ID NO: 247875 - DNA, 575 bp, Homo sapiens
acacagcagacaatttacattagtttctgttttctttttccttccttctgtttgatatgtagaatatgccaccataagatctgatgagttaatatagattgacaagagcatactgataaggaagaaaattaatagagtcccaggactggcagaaatcttggaggtcattgaacccttggttagcactctccttaggtcattccagactacttcagaagaacagctattctcttctaaaatgcccctgtcaagattatattatgaactaatctccaagaggctcctaaaggaattagatactgaaatttattcttgtctcatcataggaaccactggaagatgrtcatccttttccttcttattcgtgctacacatgcatcatctaattctgtctcaaatatggaagattctgataaactaaaaatattgtttttgaagtgtttactctttaagacagatacctttaagatactgatactgatatctttaatatagatatcagttatagctaattggggtcattacacttgcttccaaattacatttactttagtctaaagttaacagttttaact

SEQ ID NO: 247876 - DNA, 575 bp, Homo sapiens
acacagcagacaatttacattagtttctgttttctttttccttccttctgtttgatatgtagaatatgccaccataagatctgatgagttaatatagattgacaagagcatactgataaggaagaaaattaatagagtcccaggactggcagaaatcttggaggtcattgaacccttggttagcactctccttaggtcattccagactacttcagaagaacagctattctcttctaaaatgcccctgtcaagattatattatgaactaatctccaagaggctcctaaaggaattagatactgaaatttattcttgtctcatcataggaaccactggaagatggtcatccttttccttcttattcgtgctacacatgcatcatctaattctgtctcaaatatggaagattctgataaactaaaaatattgtttttraagtgtttactctttaagacagatacctttaagatactgatactgatatctttaatatagatatcagttatagctaattggggtcattacacttgcttccaaattacatttactttagtctaaagttaacagttttaact

SEQ ID NO: 247877 - DNA, 601 bp, Homo sapiens
ccagcaccatcacctagtactgtaactgggtgatgttagatgagttacttaacctctctgtacctgggcatcttcatctatgaaaggaacaacactagtacacacttagacatttgttgttgtgaaaaatgagttcgtacttgcaaagctcttagaaaagcatgtgaaataataagtggtcaaagatgttagtaatttttttagttattgttaatattaatgctaaatatraagtacattaagttggtaaagccagttttctacaaaataataaaccattctatggtacttctcagtgcacaaggtcttttctgctacctgatcttatttgttcatcacactacactttgagggaggagaaaagatcttcattattcccattttatagattacataactgagactaaaatttaaaaagaggaatgaatatacccaacttttacacaggcaaatgggatttgaactcctgactcaaatcccatgttctttgcatttaccatgtttagttacttagaggcaaatgttgctatttcaaattcctggattgaagttagagtgaatgttcccaaactaaaatagtgctgatcgcttgaactaatat

SEQ ID NO: 247878 - DNA, 487 bp, Homo sapiens
tagatgagttacttaacctctctgtacctgggcatcttcatctatgaaaggaacaacactagtacacacttagacatttgttgttgtgaaaaatgagttcgtacttgcaaagctcttagaaaagcatgtgaaataataagtggtcaaagatgttagtaatttttttagttattgttaatattaatgctaaatatgaagtacattaagttggtaaagccagttttctacaaaataataaaccattctatggtacttctcagtgcacaaggtcttttctgctacctgatcttatttgttcatcacactacactttgagggaggagaaaagatcttcattattcccattttatagattacataactgagactaaaatttaaaaagaggaatgaatatacccaacttttacacaggmaaatgggatttgaactcctgactcaaatcccatgttctttgcatttaccatgtttagttacttagaggcaaatg

SEQ ID NO: 247879 - DNA, 599 bp, Homo sapiens
tgctttttgttttcttatctcccttaaatcttatgtcatttatagcatcctgtttttatttcatggcttgtattagtctgttctcacattgctatagaagaaatacctgagactgggtaatttataaataaaagaggtttggccgggcactgtggcrcacgcctgtaatcccagcactttgggaggccgaagcgggtggatcacgaggtcaagagattgagaccatcctggtcaacatggtgaaaccccatctctactacaaatataaaaactagcctagccgggcatggtgacttgggaggctgaggcaggagaatcacttgaacctgggaggtggaggttgcagtgagctgagatcgtgccactgcactccagcctggtgacagagtgagactccatctgaaaaataaataaataaataaaaaataaaagaggtttaattggcttatggttctgcaggctgtacagaaagcatagtgacttctgcttctggggaggcctcaggaaacttccaatcatggtggaaggcaaaggggaagtgaggtgtcttatatggtgggagcagaagcaagaggggagaggtgctatgcatttttaaa

SEQ ID NO: 247880 - DNA, 599 bp, Homo sapiens
tgctttttgttttcttatctcccttaaatcttatgtcatttatagcatcctgtttttatttcatggcttgtattagtctgttctcacattgctatagaagaaatacctgagactgggtaatttataaataaaagaggtttggccgggcactgtggcacacgcctgtaatcccagcactttgggaggccgaagcgggtggatcacgaggtcaagagattgagaccatcctggtcaacatggtgaaaycccatctctactacaaatataaaaactagcctagccgggcatggtgacttgggaggctgaggcaggagaatcacttgaacctgggaggtggaggttgcagtgagctgagatcgtgccactgcactccagcctggtgacagagtgagactccatctgaaaaataaataaataaataaaaaataaaagaggtttaattggcttatggttctgcaggctgtacagaaagcatagtgacttctgcttctggggaggcctcaggaaacttccaatcatggtggaaggcaaaggggaagtgaggtgtcttatatggtgggagcagaagcaagaggggagaggtgctatgcatttttaaa

SEQ ID NO: 247881 - DNA, 599 bp, Homo sapiens
tgctttttgttttcttatctcccttaaatcttatgtcatttatagcatcctgtttttatttcatggcttgtattagtctgttctcacattgctatagaagaaatacctgagactgggtaatttataaataaaagaggtttggccgggcactgtggcacacgcctgtaatcccagcactttgggaggccgaagcgggtggatcacgaggtcaagagattgagaccatcctggtcaacatggtgaaaccccatctctactacaamtataaaaactagcctagccgggcatggtgacttgggaggctgaggcaggagaatcacttgaacctgggaggtggaggttgcagtgagctgagatcgtgccactgcactccagcctggtgacagagtgagactccatctgaaaaataaataaataaataaaaaataaaagaggtttaattggcttatggttctgcaggctgtacagaaagcatagtgacttctgcttctggggaggcctcaggaaacttccaatcatggtggaaggcaaaggggaagtgaggtgtcttatatggtgggagcagaagcaagaggggagaggtgctatgcatttttaaa

SEQ ID NO: 247882 - DNA, 532 bp, Homo sapiens
aggatctggggaatgaactttaagccaatccacctgtttcagtcttacacctaactctcatttctgtgactcttggtacctctaagaattcagtcttttcaggactctatgggacaaaacagttcatttctcccattttcataatgatcaccctctgtaggcatggtctagtcttcaaaatgwattgcttcttcacatttttcaaaactctgctgataacaattatcagtacagtctccattctcatgatgtttttccttatgtgcttatatcttctattttttaatgtaattttgtgagaatatcaaatggaatagatataaaagcattttctttcccaaactgtcatgtctaaccagagcaatgatatagtacttggtcattttcttcttttagtatatttataaaagatatctcattttaccctcaaatgacttaatatatgtccacccttggctagattttactttactgagtcatttaagattctgagatctaagtttgaatgcatttttctctcaaatgcctccta

SEQ ID NO: 247883 - DNA, 490 bp, Homo sapiens
tcagaatcatagaagcctaatagatcccagctctcccaattggttgtgtatcgactgtctaattaagaagcaaaactgtctaaggtgatttaagatctagcctcattctacaatgagatggatgtcttgtcaaaaatctgataaaatattcaccaccacaaccttttcaacccagatgctactcagtcaaatgtggaaaaaagagtggaagaaagaacatatattttttgtgtgaatttttttttaaatttttgtaaggactgttgtcctattttatttccctaggactgaatgactatcttcactacatttcttagaactaggaaaataaatgagtatgggcagwtttgtcagataactattttgagggaaggtgattaagattttcttcttgtagtatggcctgctctaccctggcctcttttaagagaaggaagcagtagtgaaagtccagaactaagtatcttgttacccctgacaatagagagcc

SEQ ID NO: 247884 - DNA, 571 bp, Homo sapiens
ctctccgtgaaatttaaggctgctgcctttaactcttatgaagccaaagcacttcacttttatttttccagcaatgaaaaataccctaagcactcttgattcaacaaaaatataaagaattaagaaaggtgaattctctttatcacctttttataggtgaagtgttccactgacaacatgtgaattgatgttcccyaaagcagagtaaacttgtgataatgtagaaagaacacctacctacctggaaatttgggtgtctagttcagttctttgatcttctagctatatagccttagataaatctattagattctttggatctgagtagtcactttttaaattgagaataatgacacctgctcaattgtttgtggaatttattaaatgtttcctctatgtcataccttttgctatatgctcatattaaagctattattttattttagtctgtacaataatcttactattagatgtaacgtcaatataaggttcagataagttaaattacttaaggaaggtcacacagtttataagcaagagaatcaggattcatagttaagtcagtatggca

SEQ ID NO: 247885 - DNA, 617 bp, Homo sapiens
ttaatctcttccagcaacgcccagaaacacccagatacatccagaaacaatactttccgtgcttcaatccaatcaagttgacacttaatattaaccatcatagcacctattaaaaatgacaaagtcatgtcaaagaaatggaggatttttatataaaaggcttcccaaatagtaacgcttcttgaataggaaacattttgttctcttttaaagcagaattsatttaggatgaatatgaggaagtatgtgagaaacagataaaaactcaaaaatgaatttttaacctatgagctgcccagctgtggaacagggacagccatgggaaaaacaagaccatctgttcagaattctatagaagaggattgtatgtctgtatctgagtaattggttgtcagggaactcccaagttgtaaagttcagtgattctgctaactggtaatagtgttttccaagcttgggagattttatttgcctgccctgcaccttccaagctaatgtcaaatttactctgactgcattaaataacttttgtgttgcagatttcatgcttgctattttatagttaaatagtaatgaatccatatttttatttttgagtatttttgtaagcagcattt

SEQ ID NO: 247886 - DNA, 613 bp, Homo sapiens
ttaattccagtataaatataattgtttattcagcttctcttccacttatatcaaacatttttttcatgttacttcattttaagtttgttttaatggttaaatgatatttcaaaatgttaatttaccataattttattccatttttcattcccctattggaatattgctggatatgtgtacatttctttttgttataatgaagatataatggtcaaattgttttctaagacagggtaggaactgtatttataaataatcattgactcaaagtcaatcagtttttgctaattaaartattgctttcacaagtaaattgaagaatcagccaagaacagaaaatttgaggaacaatacagacaataatgtaaatgataaagtttttttagataattcacacaatttttatgtaaatgtgagatgtcataaaatgttccatattataaatgtctgctgaaatttattattatataaaaagcatgagctttaaacatcagtttcactgatgtggatttgtgtgagtaagcctaaataatatttataaaatacattttaagtaaatttattgctttcaaatacctatagcaaccaattataaataagtgcttctgagcaa

SEQ ID NO: 247887 - DNA, 573 bp, Homo sapiens
tgaggaacaatacagacaataatgtaaatgataaagtttttttagataattcacacaatttttatgtaaatgtgagatgtcataaaatgttccatattataaatrtctgctgaaatttattattatataaaaagcatgagctttaaacatcagtttcactgatgtggatttgtgtgagtaagcctaaataatatttataaaatacattttaagtaaatttattgctttcaaatacctatagcaaccaattataaataagtgcttctgagcaaaaaccatggtgggccctaattacttgataactagttataaataaaagtcctttgcatacaaccaattaatgaacttaagtccttagaacagttgattctttttagtaggttacatatatttttatacaatgtcatttataccaagcaaaacttagcaaagcttttcttcttattgagagtcaaaagtaagttttagcccaagctaaatcaaatgaggactaacttcccaattattagagtgtgaattaatgtaaattttttgtgtggtaccataggtggagaaagaatgtataattatttg

SEQ ID NO: 247888 - DNA, 573 bp, Homo sapiens
tgaggaacaatacagacaataatgtaaatgataaagtttttttagataattcacacaatttttatgtaaatgtgagatgtcataaaatgttccatattataaatgtctgctgaaatttattattatataaaaagcatgagctttaaacatcagtttcactgatgtggatttgtgtgagtaagcctaaataatatttataaaatacattttaagtaaatttattgctttcaaatacctatagcaaccaattataaataagtgcttctgagcaaaaaccatggtgggccctaattacttgataactagttataaataaaagtcctttgcatacaaccaattaatgaacttaagtccttagaacagttgattctttttagtaggttacatatatttttatacaatgtcatttatacyaagcaaaacttagcaaagcttttcttcttattgagagtcaaaagtaagttttagcccaagctaaatcaaatgaggactaacttcccaattattagagtgtgaattaatgtaaattttttgtgtggtaccataggtggagaaagaatgtataattatttg

SEQ ID NO: 247889 - DNA, 610 bp, Homo sapiens
gacaatgagtttcctttacaatggctattgaaatgctacagaatagttttctgggagcagttaaatattattggctgtacctatagtgccaaaggaattatgatgagtgtggtggaaggagataatttcaaagctgtattctatcatctcagtggcattaaagtcacctggcttgaagagaaagactttccttttgctgacttctcatcagtcttctctaatggaaaagaaaccctttggagagaaggcccgaaggaagcctcttttataatattaagttctttcaggttcatcttttgattttttcagtagatctctagcagatagttctgtgcctctgaagtacagttgttgggagttttaacttgatkaagctgtcactcaaaattgttgtttatattatcgatccaacatcaaaaagctgccacgccatggatctgatgtcaaaaagttttagagtgacagcaggagcagagggagtattagagcttggatgctcatttctaaacctctctgaggttccctcaactacctgtgggaaacagatcttagattaacctcaggacatgtacagagaaaactgaataaagtttgagttgggagatcattt

SEQ ID NO: 247890 - DNA, 610 bp, Homo sapiens
gacaatgagtttcctttacaatggctattgaaatgctacagaatagttttctgggagcagttaaatattattggctgtacctatagtgccaaaggaattatgatgagtgtggtggaaggagataatttcaaagctgtattctatcatctcagtggcattaaagtcacctggcttgaagagaaagactttccttttgctgacttctcatcagtcttctctaatggaaaagaaaccctttggagagaaggcccgaaggaagcctcttttataatattaagttctttcaggttcatcttttgattttttcagtagatctctagcagatagttctgtgcctctgaagtacagttgttgggagttttaacttgatgaagctgtcactcaaaattgttgtttatattatcgatccaacatcaaaaagctgccacgccatggatctgatgtcaaaaagtttyagagtgacagcaggagcagagggagtattagagcttggatgctcatttctaaacctctctgaggttccctcaactacctgtgggaaacagatcttagattaacctcaggacatgtacagagaaaactgaataaagtttgagttgggagatcattt

SEQ ID NO: 247891 - DNA, 577 bp, Homo sapiens
tacggtcattactacaataacagggttcagcaaactatgatccgtgggccaaaactttcccactgttggctttgcaatagtccataagttaaaaatggttttacatttttaagcaaatgaaaacaatttagaagaagaatatttggtgacatatgaaagctatgtgaaattcaaattcagtgtccacaaataattttatttcaacagaacaatactcattggtttaggacatttttattgatgtttttgagctacaaggacagagttgactagctgcaacagataccacatggcttgcaaaacttaaaatatctactatcgagaactcttcagaaaaaggttgctgctgcttgctttataagctttgtttcctatattcctcatattgayatctgtagaagaataatgatgtcttattggtttatttactttgtaagctgtggatactacctgtcttagtctaatggggcttctataacaaaataccataaactagatcacttataaacaacagaaatttatttctcacagttctgggggccaggaagttcaagattatggtgtctatagatttggt

SEQ ID NO: 247892 - DNA, 516 bp, Homo sapiens
ttatgtcatacactccaattagcatcaccagtatccttttgctggctcactgtccataaaaattaattttattgcttccagaactttgaacaaactcatataatccttcaagcagatgaatgaggcattaaaaaccacaattacattacttcaaagccataattaaaaagtttggtcctcgttscaggcctaccattgatttctaagagaaacatacttcagatctgatgtaagccttaataaattatcagctttgagcaaaataagtttagcttcccataaagaataaaacagggttttattgtgggaaaaggggaagactaaatgattgtaaatttgtattgcatttttataaccacttgggtttgaagtcaaatataatttgacattttattgatatttccagtgtttaaaactgacaagaagtacattaaattttaccatgtaaatctgatatgacaataaaaatccttttgcacttctcattggaattgttgcagtaaagtgaaataagaa

SEQ ID NO: 247893 - DNA, 569 bp, Homo sapiens
gacataaagcccaaatatacattctagtaaattcccatagttctgcatatagtctttctcagctccatgatatggtagcaaccccagcttctcatgcagtgttaataatcccgtcttagttcaggctgctatccctgaacaaataccattgactgggtggcttaaacaacaaatatttattttttacagttctggaggctgagaagtccatgatcccaaagtaccaaccaatttgtttcctggtgaaggccctctcactggtttttagatgaccggctgcttgctgtattctcacgtggcagagagagaaagaaagagagggaaagagatagattgtctttcttgttgtctttttataagggcactactcccaccatgagggctccactcttatgaactacttacctctcaaaggcctcagctccaaattgcacaagggactgtggcttcaacatatgaattttggcaaacattcagtgcatagcaaacctaaacttttcrttgcctgttgtccagcccacctgcatgtggtgcccaaagtgaccaagtggaattgtaacttacagttc

SEQ ID NO: 247894 - DNA, 568 bp, Homo sapiens
tttaatccctcatacacagttgaagatctctgttgggtactgaggtaagactcaaagatctgcacacttttggccattcctttagatccactgacatgcctcttctctagatctcctttyattctgtcttctggaattgcttatttcagccttctaacccaaccaggaagtgtcaaataggaagcttctacaaatagacaaaatgaatagggctcacttaaaaataagtaaaaagagcatgttataggaggaaggaaagatcctatatctgaaaaaatcaagattgctttatgaaataagttgatttgcagtttgaaggataaaacaacaaaactactgttttacgagcatacagacatttgagactagtactctagatgaagagaacacacaagcaaagagggcagtatcagggtgggtggtcagtgaatactaagtagttctatctgggctggatccaagatgagacaattctttttcagaatgagcggtgtaggaaataaatgctgtcataatttgaagaaaaaattatttcataaattctcttaggtcctaatggagtcacctc

SEQ ID NO: 247895 - DNA, 537 bp, Homo sapiens
attgggttcccatggaaggagggcttgaggaaaatatttaagtgtagtttatttgggaagtgatctaagaagcatcgataagagaattgaagaaygagagagagaagggaaggacaccaatgacaggatgcattaatgagcaggttactgctgggctggggctcaccctgctggggcccattgggagatgggataggatcagaatcacaccacccgattagcaaggaagctgacccaccagttcctacctctttagggttgttcctggggtgtccaccctcatacgtgtctagcctaaatggctagcacaatgggaactgagcacaatctcatggaaggctttagcaaaggaaggttttagcaaagagtcatgccaccagctgctggtggaagagtcaatgccaaggagtcctatgtgggataaagatggcaatggcactgttgtttcaacatgaaaacacatttttggagagaaagcatggatagagataagatgtattcatcagttctggtccatttgatgaccagtttaaaaaa

SEQ ID NO: 247896 - DNA, 442 bp, Homo sapiens
catcactgatatctactgaggtaataatacacacttaataatgtttcactcaacaccacagatttgaaaatgcatttcaaaattgcactttctagctccsccataaattagcatacaggattctgtggacactggcatcagctcagaatttcacaattttagaaaacattaccccagcttcagcagagccggtgaggttttcctatcaataacttcagaatgaaaaaaaaaaaaaaatctgcctccttgtctctttgcatccaaatggaacttaaaatacagtcactcttctcaggatccaggccagaactgccaccgtcatctctgtgcttgacagtaaaagaaacacaggaaaaccacagggtgcctctaggtactcagcactggaaattggctttgctaataaagagaaagtatcacctacagcagctactggtatttg

SEQ ID NO: 247897 - DNA, 442 bp, Homo sapiens
catcactgatatctactgaggtaataatacacacttaataatgtttcactcaacaccacagatttgaaaatgcatttcaaaattgcactttctagctccgccataaattagcatacaggattctgtggacactggcatcagctcaraatttcacaattttagaaaacattaccccagcttcagcagagccggtgaggttttcctatcaataacttcagaatgaaaaaaaaaaaaaaatctgcctccttgtctctttgcatccaaatggaacttaaaatacagtcactcttctcaggatccaggccagaactgccaccgtcatctctgtgcttgacagtaaaagaaacacaggaaaaccacagggtgcctctaggtactcagcactggaaattggctttgctaataaagagaaagtatcacctacagcagctactggtatttg

SEQ ID NO: 247898 - DNA, 442 bp, Homo sapiens
catcactgatatctactgaggtaataatacacacttaataatgtttcactcaacaccacagatttgaaaatgcatttcaaaattgcactttctagctccgccataaattagcatacaggattctgtggacactggcatcagctcagaatttcacaattttaraaaacattaccccagcttcagcagagccggtgaggttttcctatcaataacttcagaatgaaaaaaaaaaaaaaatctgcctccttgtctctttgcatccaaatggaacttaaaatacagtcactcttctcaggatccaggccagaactgccaccgtcatctctgtgcttgacagtaaaagaaacacaggaaaaccacagggtgcctctaggtactcagcactggaaattggctttgctaataaagagaaagtatcacctacagcagctactggtatttg

SEQ ID NO: 247899 - DNA, 521 bp, Homo sapiens
cattattcttttgtaaagtaaacatagttgctcttagcatatggttctcaattgatgggcgtgtgtgtgtgtgtgtgttctctctggaaaagttttctctgggagaaaattctagatttcactgttttacatttcaaagttgccagtttgttaaaaaaatcaggctgagaagaaacatgttaggacaaaaatgtgaaagactgtcattaaagcaagcaagaccaaggacggagttttacagactttgcacagaattcttggatcaayccatggacgcggtggttgattttaacaggagctgcagagtctaatccctttcatcacaaatgcatctgggaccagagcccgatttcctgctgcccttgggggactttttaaccatttttttcccccaagcttagagtatacatcaaatcccaggtccacactgacccccactctgggctggaagggcctgacctctctcaagagagtgggggtggaagagaagctgtgaaatacaaagtcatttgatggatgtg

SEQ ID NO: 247900 - DNA, 612 bp, Homo sapiens
caaaaatggggtttcttcccttgtgaggaagacccatgaattagtaacggaattgccaggaatgctaaaaactatctaaatgccatgtattgttttcaagctgttactcctggaaggggctgggttggcattgttttagaggttaggagccaaacatcagctcatctattctccagctgttgtttgtcctccatcttcctgcaatagtcaggcacagggtcttataaaaatgggtttgtgctgctgtatgtttcggtgggtacctttgtttactgaatgggatgtaggtgggggaccagagcatatccgcgtccctcggaaacagtggcgttttagatgtagtatgtcccgtcagctcctctctgccccacccaccccagcccattcattgagcattttttttttttttttgaggcggagtctggctgtattkcccaggctaaagtgcagtggtgccatctctgcccactgcaccctccgcctgccagcttcaagtaattctcctgcctcagcctcccgagtagctggaattacaggcgcgcaccaccacgctcggctaacttttttttttttttttttttttaagagacggagtctagctgtgctgcccaa

SEQ ID NO: 247901 - DNA, 521 bp, Homo sapiens
cattattcttttgtaaagtaaacatagttgctcttagcatatggttctcaattgatgggcgtgtgtgtgtgtgtgtgttctctctggaaaagttttctctgggagaaaattctagatttcactgttttacatttcaaagttgccagtttgttaaaaaaatcaggctgagaagaaacatgttaggacaaaaatgtgaaagactgtcattaaagcaagcaagaccaaggacggagttttacagactttgcacagaattcttggatcaacccatggacgcggtggttgattttaacaggagctgcagagtctaatccctttcatcacaaatgcatctgggaccagagcccgatttcctgctgcccttgggggactttttaaccatttttttyccccaagcttagagtatacatcaaatcccaggtccacactgacccccactctgggctggaagggcctgacctctctcaagagagtgggggtggaagagaagctgtgaaatacaaagtcatttgatggatgtg

SEQ ID NO: 247902 - DNA, 521 bp, Homo sapiens
cattattcttttgtaaagtaaacatagttgctcttagcatatggttctcaattgatgggcgtgtgtgtgtgtgtgtgttctctctggaaaagttttctctgggagaaaattctagatttcactgttttacatttcaaagttgccagtttgttaaaaaaatcaggctgagaagaaacatgttaggacaaaaatgtgaaagactgtcattaaagcaagcaagaccaaggacggagttttacagactttgcacagaattcttggatcaacccatggacgcggtggttgattttaacaggagctgcagagtctaatccctttcatcacaaatgcatctgggaccagagcccgatttcctgctgcccttgggggactttttaaccatttttttcccccaagcttagagtatacatcaaatcccaggtccacactgacccccactctgggctggaagggcctgacctctcycaagagagtgggggtggaagagaagctgtgaaatacaaagtcatttgatggatgtg

SEQ ID NO: 247903 - DNA, 607 bp, Homo sapiens
aaataccctttattgtgtaggccattttgagttgggttttctgtttcttgcaacaaaaagtattctccacacccttccccacatcaaaattaaaccagtgtggaagtacatgctagcatgtatcaccccccttctagtgagattaaaatgtgggtaggattgccatatttctgataaaatactttcattcttaaattcaactttaagaatttcctgacaaaataaatgatttcagccgggcatggtggctagcgcctataatcccagcactttgggaagctgaggcgggaggatcacttgagctcaggggtttgaggccagcctgaacaacatggagaaacctcatctctacaaaaaatataaaaattaactgtgagtgstggtatgtgtctgtagtcccagcttcttgtggggttaagcggagaggatctcttcagcctgggaagttgaggctgcagggagccatgcactccagcctgagtgataaagtgagaccctctctggcctgggtgataaagtaagaccttgtctcaaaaaataaaaataaacgattttgattttttcaacctttactcaggaaattttctccttgttaatgacataaaaa

SEQ ID NO: 247904 - DNA, 541 bp, Homo sapiens
ttttcaaaaccaaaggccaaaagtttgagttaagacaaattcattaaaaaactaaactgtttaactctctatagggcaatgaaatttcttatcaataataacatcagttttaaaatgtgtttcttttattatcttacagagaggaaattaaagcagatactctagaygcagcaaacagacttttttaggcacacaggcattccagtcagacaggtctggaatttgaatactgactgttgcctaatagctgcgggccctttcacaagtcactttatctcactgcgccttagattcattctctctaaaatgggtatttacacatacctccttcacaaactagctttggaagctgatgagattatatatctaacggaagaacaggtatggatgttccctgggtaatcaggcattggtgggttagcagccatcttttttatcattccactcatatacaacacatagctcagatttgttctaaataaacacagtagctgttaaacatatttaaataagaaaagtaggaaccaaaaaggaatactgt

SEQ ID NO: 247905 - DNA, 527 bp, Homo sapiens
gaaaacaccagcagagataccagaaaggaaatcagaactgattaaaaamaacaacaacaaaaaaaaaaaaacgctttcctctttatggagttattatgctttcttttaccctcttttttctttttttcactaaagaaaatctgaatcagaataaacagccatacctctttcttttgcagtaggaagaaaaaatcctactactttttctcttcatttattcagcaaattgtgaaaagaaagttctctatgtgatagaaagccaactatatatttagaaaacacaatattgttagtagtgttaataatcacagcttagattaaatgagcacttactaggtggcagaaactggaccaagtattctacatggattcatccatcctcacagccactcaatcaagtaggcattagtatcgttcctattctacagatgagagaaccaagtcaaagagaagttaagcatctggaaagaagtgtggacaccaccctcaaggtaattcatagtgaggtggtgaaagaggaggaggca

SEQ ID NO: 247906 - DNA, 527 bp, Homo sapiens
gaaaacaccagcagagataccagaaaggaaatcagaactgattaaaaacaacaacaacaaaaaaaaaaaaacgctttcctctttatggagttattatgctttcttttaccctcttttttctttttttcactaaagaaaatctgaatcagaataaacagccatacctctttcttttgcagtaggaagaaaaaatcctactactttttctcttcatttattcagcaaattgtgaaaagaaagttctctatgtgatagaaagccaactatatatttagaaaacacaatattgttartagtgttaataatcacagcttagattaaatgagcacttactaggtggcagaaactggaccaagtattctacatggattcatccatcctcacagccactcaatcaagtaggcattagtatcgttcctattctacagatgagagaaccaagtcaaagagaagttaagcatctggaaagaagtgtggacaccaccctcaaggtaattcatagtgaggtggtgaaagaggaggaggca

SEQ ID NO: 247907 - DNA, 527 bp, Homo sapiens
gaaaacaccagcagagataccagaaaggaaatcagaactgattaaaaacaacaacaacaaaaaaaaaaaaacgctttcctctttatggagttattatgctttcttttaccctcttttttctttttttcactaaagaaaatctgaatcagaataaacagccatacctctttcttttgcagtaggaagaaaaaatcctactactttttctcttcatttattcagcaaattgtgaaaagaaagttctctatgtgatagaaagccaactatatatttagaaaacacaatattgttagtagtgttaataatcacagcttagattaaatgagcacttactaggtggcagaaactggaccaagtattctacatggattcatccatcctcacagccactcaatcaagtaggcattagtatcgttcctattctacagatgagrgaaccaagtcaaagagaagttaagcatctggaaagaagtgtggacaccaccctcaaggtaattcatagtgaggtggtgaaagaggaggaggca

SEQ ID NO: 247908 - DNA, 607 bp, Homo sapiens
cccaatttttgaaaataccaaaaggagaggatctaaaataattttttttacattaagttrtagttagctctaatcagagtaaaaagatgaaaaaaaatatgccatattcagccaggtgtagtggctcacatctgtaatcccaatactttgggaggctgaggcaggcgaataacttgaggttaggagtttgggaccagcctgggaaacacggtgaaattttatctctactaaaaatacaaaaattgccaggcatggtggtgtatgcttgtaatcctagctactggggaggttgaagcaggagaatcacttgaacttgggaggtggagtttgcagtgaaccgagattgcatcactgcacttcagcctgggtgacagagtgagactccatctcaaaaaaaaaaaaaaaaaaagaaagccatattctacattcaaatattgctgtttaagtatctttgtataccaggtaaaaatacaatacaaagaatttctccttgaaatttgaaatatataagagcagagtaaaatccaattaattcccagtaggcaacatcaaatacctaataaaacatgtatttattgggggaaggttagaaaattaaaagggaaag

SEQ ID NO: 247909 - DNA, 607 bp, Homo sapiens
cccaatttttgaaaataccaaaaggagaggatctaaaataattttttttacattaagttgtagttagctctaatcagagtaaaaagatgaaaaaaaatatgccatattcagccaggtgtagtggctcacatctgtaatcccaatactttgggaggcygaggcaggcgaataacttgaggttaggagtttgggaccagcctgggaaacacggtgaaattttatctctactaaaaatacaaaaattgccaggcatggtggtgtatgcttgtaatcctagctactggggaggttgaagcaggagaatcacttgaacttgggaggtggagtttgcagtgaaccgagattgcatcactgcacttcagcctgggtgacagagtgagactccatctcaaaaaaaaaaaaaaaaaaagaaagccatattctacattcaaatattgctgtttaagtatctttgtataccaggtaaaaatacaatacaaagaatttctccttgaaatttgaaatatataagagcagagtaaaatccaattaattcccagtaggcaacatcaaatacctaataaaacatgtatttattgggggaaggttagaaaattaaaagggaaag

SEQ ID NO: 247910 - DNA, 607 bp, Homo sapiens
cccaatttttgaaaataccaaaaggagaggatctaaaataattttttttacattaagttgtagttagctctaatcagagtaaaaagatgaaaaaaaatatgccatattcagccaggtgtagtggctcacatctgtaatcccaatactttgggaggctgaggcaggcgaataacttgaggttaggagtttgggaccagcctgggaaacacggtgaaattttatctctactaaaaatacaaaaattgccaggcatggtggtgtatgcttgtaatcctagctactggggaggttgaagcaggagaatcacttgaacttgggaggtggagtttgcagtgaaccgagatygcatcactgcacttcagcctgggtgacagagtgagactccatctcaaaaaaaaaaaaaaaaaaagaaagccatattctacattcaaatattgctgtttaagtatctttgtataccaggtaaaaatacaatacaaagaatttctccttgaaatttgaaatatataagagcagagtaaaatccaattaattcccagtaggcaacatcaaatacctaataaaacatgtatttattgggggaaggttagaaaattaaaagggaaag

SEQ ID NO: 247911 - DNA, 607 bp, Homo sapiens
cccaatttttgaaaataccaaaaggagaggatctaaaataattttttttacattaagttgtagttagctctaatcagagtaaaaagatgaaaaaaaatatgccatattcagccaggtgtagtggctcacatctgtaatcccaatactttgggaggctgaggcaggcgaataacttgaggttaggagtttgggaccagcctgggaaacacggtgaaattttatctctactaaaaatacaaaaattgccaggcatggtggtgtatgcttgtaatcctagctactggggaggttgaagcaggagaatcacttgaacttgggaggtggagtttgcagtgaaccgagattgcatcactgcacttcagcctgggtgacagagtgagactccatctcaaaaaaaaaaaaaaaaaaagaaagccatattctacattcaaatattgcygtttaagtatctttgtataccaggtaaaaatacaatacaaagaatttctccttgaaatttgaaatatataagagcagagtaaaatccaattaattcccagtaggcaacatcaaatacctaataaaacatgtatttattgggggaaggttagaaaattaaaagggaaag

SEQ ID NO: 247912 - DNA, 560 bp, Homo sapiens
tttgaatgagtgtataaaattgctgtcacttttgtgacaataagattgtatccttggatcactatagaggaatatgaaggttaattaacatccatcagcagccagagtgaagacaagaaaaataaaagtagaattgagggttttcgtgagagtagaaaagatagtggaaaccacacaaaacactaaaacactactttacaatccccctctcactccaatacctttatctatttttctttcctttttattctttgtctcctcccaccaacaaatactgctgtgaaaatgactcaaaaacccctttttaactgagccccccttggccaccctctgatccatctggctgtgtgaaaccccaccatgctgaatgacctccctgccctcactctgcaccacgatgtcattctgtcaacaaacagcatgtcctgtcaatcagaaacaatgagcccagtaaactgcttcagcatgcctcagagcttccactgccaggtcaasactaccagaggcagatgaatggtagaaagacacaagatttcgtgtcaggattattcaatgttatt

SEQ ID NO: 247913 - DNA, 534 bp, Homo sapiens
catgtggctataatgtcctgcaagaatttaagtatagggtaaagtgcaatatgagaggagaccatatataagaacaccaaggaaactcttccttctgaatttggttttaatggaaagatcaacaagtagctataaattaagcctcagacctttaaggttttttctaacacaaaaaggtgagaatatccttcctcataccactccttgcttcccctttctttactttctcccaatcccaaatgatacatgttcagatttgttcccccataattgggagctgccccaaaattatgcagacaagagtttttatattttttcactgttaatgatttggtttgaagcaagaaatttctatgctatagttctgtttacataatcagggaggagggtgtagaaatgtagtttgaagaycttgtagacctcttagaatggaaatcattttaagcagagtaagatacaaatataaggcactgttcattattatcttgacaggaagactgcagacatgttttattctcacaatttgacaacatg

SEQ ID NO: 247914 - DNA, 575 bp, Homo sapiens
tcacataactggtaaagttggagagccagaattcaaatccaatcaacctggctccataacccaggttactaaccactaccacagatacatctaccacttataggctgcagagtaagtaacaggaagaagcgaaaaattaaagaagaaagaaattgaatgaaatggtaatagaaaattcttaaaagagattatgaaaagaaaaagaagaaacccaagaggaaggggggaagattttctttctgccagtcagtttcccatccacattaggaagaagggaaaagtgaggccaactctagtttcccacaacttatggcatagttaacaaagtacttcaatatgatatawtctaggaattctaggaaacctacacaggaaaaataactttccagaaggagtaccaggacaaacaggagagtcaataccaaaaaacaggccataaagttagtctcatgaaggtaccaccacgactccccaaacccccattcctggtgaatttcaagtccctaaagtgactgccatcatggactagctcttagggaatgcagtaatatacaaggaaaaaaacagagaagcat

SEQ ID NO: 247915 - DNA, 546 bp, Homo sapiens
cccctgtctctaaaaaaaaaaaaatatgtaaaagataagtagacagtgacagttttcaaggtggtacttgaaaattcaaacatatagaaattatcatgtgataagatataataattataaaaccataattaacacccttctccatgcttaattgattatatcttccttgtcattttgttccttctttctgtttaattagcaaaayggtgtcttataattctggaacagcaaacaaaatttttcaagtcagcctacttctaacactaaataatttcatattttctctaagtaccttatacctgtgggtccaattttacttctattaataaaggcagaatagatagatttttccagaaggcacttaagtgtctgaattctgcccatggcagagacacaattttatctgaaaaaggttaaagagattaatacttcctcattaaatttccaaataatttatttaagtatatattgccaattttcacataaaattaaagaactttcttttattcccgagaaggcaagtcatgggttgtctcaaacaaaata

SEQ ID NO: 247916 - DNA, 560 bp, Homo sapiens
ctacaaaaaatttaaaaattagctgggcatggtggtgcacacctatagtcccagctactcaggaggcttaagcaggaggattacctgagccccggtgtttgaggctgcagtgagctgtgatcgcaccactgcactccagcctgggtgagagagtgagaccctgactctaaaaataataataaaatwaaaataaataaaataaaattattgttagacctattaaaacagtcttttccagtctgattccaaagaaattagaatttaaaggttttttccaggttactgaaccaaaccccctcaatgtccagggatgccgcagttgccaagatccgcttcatcgctactattttctttcttgttcaagctctccctatggtggctgtggcagcagtcactgaagtaaccaccaagaagccctccaacaaacctacctacttccactcagtcaaaaagaagagaatttaatattggggcagaaggagtggaaggtttgaatacaaagtatgccacagagccaaaggactcattcagctgtcaaccacacacatgaagacacccag

SEQ ID NO: 247917 - DNA, 560 bp, Homo sapiens
ctacaaaaaatttaaaaattagctgggcatggtggtgcacacctatagtcccagctactcaggaggcttaagcaggaggattacctgagccccggtgtttgaggctgcagtgagctgtgatcgcaccactgcactccagcctgggtgagagagtgagaccctgactctaaaaataataataaaataaaaataaataaaataaaattattgttagacctattaaaacagtcttttccagtctgattccaaagaaattagaatttaaaggttttttccaggttactgaaccaaaccccctcaaygtccagggatgccgcagttgccaagatccgcttcatcgctactattttctttcttgttcaagctctccctatggtggctgtggcagcagtcactgaagtaaccaccaagaagccctccaacaaacctacctacttccactcagtcaaaaagaagagaatttaatattggggcagaaggagtggaaggtttgaatacaaagtatgccacagagccaaaggactcattcagctgtcaaccacacacatgaagacacccag

SEQ ID NO: 247918 - DNA, 578 bp, Homo sapiens
gatctcatttgcatatatcctcaattccacaagttttatcccctccaaatgcctctgaacagctttgtgatgtgcagtcagctgatgcctctttgtagctccatagttgctcattaacctgtggtttccagagagacttcttargatagtcattctcatgaattaaatctgaaaacttaactgagtaagagtgacctgttagcaatggtcgtgggatattgtttagaaaaatcaaccgtgtattattttacttggcagagagttaaaatatccaagtgggagtttactaaagaagttgcagctgacccttgactatagttttattggcaagttttgctaaattacatatttttaagtctagcttaccatgaatgccttatctcccaatatagcaactgctttccctctgttacaggatgtattgtgttgtctgattgcttcagttagccgtaatggaatatcacacctggttcatgactgtttgtttttttcccaaacattaagtattctcttaaatattactaatatagttattaatattcatcaactaaggtaagttaaaagtcagaagaaaacat

SEQ ID NO: 247919 - DNA, 312 bp, Homo sapiens
caaaactatataaggatagaataatactagttttcataaagcctggtacaaggaatttacttttttatgtgcccataaaaatgtgtttrtaccaccagtaatttaaaataactatgcaacatgcaacagctattatagtgatacataatatcagtctaccaataattaaataacacttcagttattttagcacttctgttgtgtatttctaaaatgaattgccttatatcataaaagcctcaattttcttcattatttgaaacattttcggagatgaggattttcaacaagcatgttatagtcaaagtgcag

SEQ ID NO: 247920 - DNA, 312 bp, Homo sapiens
caaaactatataaggatagaataatactagttttcataaagcctggtacaaggaatttacttttttatgtgcccataaaaatgtgtttgtaccaccagtaatttaaaataactatgcaacatgcaacagctattatagtgatacataatatcagtctaccaataattaaataacacttcagttattttagcacttctgtygtgtatttctaaaatgaattgccttatatcataaaagcctcaattttcttcattatttgaaacattttcggagatgaggattttcaacaagcatgttatagtcaaagtgcag

SEQ ID NO: 247921 - DNA, 555 bp, Homo sapiens
gcttttcaaaatgaaaacatagcaaaaaaaaaaaaaaaagaagactaaaaataactaccaaagcatcaatgaacaaagaaacaactgaagaagccaatatatgtgtaattggactctccaaagtgggagggaaagaaaaaaaaaactaaataaacaatgtctgaaaattttcaatatataattaaaactaaacccacagatcagtatccgttwtaatgaaattgcttaaaacagtgaaagagagaaaatctttagagcagctgcagggcagagagagcacgtgaaataccaagcagcaaaaataagaatgacaagcaaatttctcattgggaacaatacaagtgagaagagagtgtagcaacatccttaaagtaatgaaaggaaaaaaaaaactcctcttttaatctagaatttattattgaaactctataataaatctttgtgaaaatatctttgaaacacgaagtgaaataaaaactttttttttcagatatccaaaatctgaaagaagttttcactggtaaagattgtctgcttggccaaactttagacaga

SEQ ID NO: 247922 - DNA, 550 bp, Homo sapiens
catttgctcttgccactgtcatgtaagaaatgccttttgcctcctgccatgattctgaggcctcctcagtcatgtggaactgtaagtccaactaaacctctttttcttcccagtctcaggtatttatttatcagcagcatgaaaacagactaacacagagcacatatatgcttcatatatacactcttgtgaagtagarataactaagctacaagtgggtgcttcttcttttgtcaaatatgctgggattttggttggacagtttattttaaaattcccctgccatagtcactttatatttcaattatcccatcatacccagcattctgtatcttctttattgacatatggaattgaaggatgtcattgtccatttctaatttcttatttctgatatatatgcatttttttcttattttgagttattactacaaggttaaatagcagcttatgtctttccccaaatagatttttttaaaagaaataataaacatttattcttgtagcttgagtcatattatttatcctgtgtatacagatcattataaaa

SEQ ID NO: 247923 - DNA, 626 bp, Homo sapiens
gtatgttatttagtaaatgtttattgagtatctactatgtgtcagtcactatgttaagtatagggaatgcctttgtagactaggaaaaagcaagcgaatatcttaaataatagggtgtaagaaagaaaaataaatcaagtaagaagcaattccagaaatatatgagatttaaaagagttraaagccccttattatagggaaagtcttactaagttttaggtaattgttataagagctggttttccttgcatcacaaaaacacatctgtgtattttgatcttgtttccattcttaccacctcctcccctcaactcaacactacttcaatgtttgaaagaaaataatttgcacaatcattgcttctggttgctcagagctttgtctcatggtgagaggtgataaatggagaacagtgagaaggaaaacaattcttttctaaactttgctcttcccttaacccttcaatgcccaacgctgcttaattcaccaactagcacctaccctactaacttaaattcccagggcaaatccccaaagcctcactttatttgtattttctttactaagcaaggagcttgccagcttgaggtgcctgtgtgatatgtaaatgataccctgaattgttt

SEQ ID NO: 247924 - DNA, 389 bp, Homo sapiens
tgtattttctttactaagcaaggagcttgccagcttgaggtgcctgtgtgatatgtaaatgatrccctgaattgttttttatattccacttggcactggaaaggcagtttcaggactgtcatctttgctgaaagatatcaaacctcatatgtcaaggaagattctcaattttaattccaaaaagctggatatttgcttcctagctctgctgatttacatcagtttgtttgatttatctgcaatgatgtaaaggccgctgctgcttttttcaccttacagaatctgaggttaatgagtcttcaaggacataagtacttgaagatgttctgtgtgtagttgaagctgtggaagctcaagtgcatagaacactaatgtagcaaatttggtga

SEQ ID NO: 247925 - DNA, 591 bp, Homo sapiens
aatctttccagatataataattcctcatgacaggaattcctgggctaccttagcctggttcccatgcccgggacccatttgtgctggttggcctttgcaaccatggagtcccacactctttargaagatgatcttggaaaaggaaaggcactccaaattggacctgctgcaggaaggctgtaatgactcccatcgctcttgaaactccttttagacttctcctttccaaagtggggcatgtggttggtacccaaataactttcaattctcaataaactgggcctaaacagttgcatctcctactaggccttttccttgtctcagaactgcatctggcttttgcctttgcaccagtcactgaggacttatttaactacaactttgaggtcatcagaccaagggcaatgttctttaaaggctttcttgaaagttcctctgaggctgctgtgaagaatctcttcttgcaacacacattgacctatctcgtctggcacatacattatatggggaatacaggcactctttgtgtagctgtctggtggtgtaagggcctgtagtgaaaaccttctaaatccactaaaattaggggca

SEQ ID NO: 247926 - DNA, 581 bp, Homo sapiens
aaatatgtaaaaggtcttgtattagtctgttctctcattgctacaaagaaatacctgagactgggtaatttataatgaaaagaggtttaattggcttacggttccttagggtgtacagggagcatggcagcatctgcttctggaggggcctcaggtaactttcactcatggcagaaggcaaagtgggagaaggtamcttgcatgacaggggcaggaccaagaaagaggaggcagatgctgcatacttttaaacaaacagatcttgtaagaactctatcactagaacagcactagggagatggtactaaaccattagaagcctcgcccatgatccaatcatctcccaccaggccccacttccagcattggggattacatttcaacatgagattggggtggggacacagatccaacccatatcaggtctctaatatcagagagactaacatctcgcattgcaggtgtcgtccttgcctacctctaattgtgtgaatctttccttagagctgttggtgatgttgcaagactgcttggggatattgccacagggtctttcaccatggttaactgtttccaatggt

SEQ ID NO: 247927 - DNA, 617 bp, Homo sapiens
tagtacccattacttatttttcctgatcctctccttcctcccaccctccactctccagtagcccctgtgtctgctgttctcctctatgtgttcttgtgaagagaatgcttctctagcacgagttcaatatgatgtaagttctgctgcccattattgataaaactatttttctttaaagagtatccagagataccttttggtttaatttgtctctcttgtatcttgcttttctctctaactctggctaccctcacttcaagctgggaatttgaactggatcggctraatactttatcagtaggaagaaaactctctttacagactgaaaatcattctgcacagaagcacatatgcgcatactcacacacacacagatgccttcaagtgaggatgcctgaagtaattaaaggtaatgtgtatcaagcgttaattacaaaatcactgtgctcttctgaattgtacacaattatcagagaagcagcacaaatatcatcatgccacaaggctgcatttcctaccatgagctttaacaatttattttcagaacttcacttatccattagttatgcatgcatctctacacattccctatatgcctggattattaggtatacgcc

SEQ ID NO: 247928 - DNA, 500 bp, Homo sapiens
acacacagaggacacaaaccttttagatttgagaggacacgaaccttttagattgtagcacctatagaatttaaaattctgcaggtggggtctgccaatctgtccttagcaaaacctccaggtgattctgaagagtctttgaatgtacagaatcagtctttgtgaaaaagttttgtaactttgtagcaaagttgtatatttggctccaggtagagttatctgggacccttagcttccttaagtgcacctgagggaggagttagacaggcatcctctcacaggtaaattgcttacaagctattgccttaaaagggatgaggtgggcaggggaaattaagttcattatttgcaagtaggagtaacttaaattttaragatgtattcttttctataaagtaaataaatataccacgcgcttagaatgaaattaaatacattgtttgacattcctgttaactgtaagtatacagtatttctcccagtagagaaagttagaaaaa

SEQ ID NO: 247929 - DNA, 447 bp, Homo sapiens
gaaatgaaggaggaaaaaaatgactcttacctttttacttcagggaatattgggaaagttgaaagaaggagtatgcttgaggactatgtaggaatccaaagcttgactggatgttgagttcaatattctattatttattctagtacagatgttgagtagatagttacatagaggagtttggaactcacagaacaaatcagggccagagatacctattcaaaagtcagcagtgggtagaatgctatttaaayagattggacaaaaaaaattggctaggaggaaaaataaataatacataaatagatagggctagataagcactcaaagacaagatgccagcaaataatactaaaaagagtagtcagtgagaaaggaatccacaagcagttagtgttgcaataaaacatcttgctttaggctgaaagaccaccttatagataagcacaa

SEQ ID NO: 247930 - DNA, 447 bp, Homo sapiens
gaaatgaaggaggaaaaaaatgactcttacctttttacttcagggaatattgggaaagttgaaagaaggagtatgcttgaggactatgtaggaatccaaagcttgactggatgttgagttcaatattctattatttattctagtacagatgttgagtagatagttacatagaggagtttggaactcacagaacaaatcagggccagagatacctattcaaaagtcagcagtgggtagaatgctatttaaatagattggacaaaaaaaattggctaggaggaaaaataaataatacataaatagatagggytagataagcactcaaagacaagatgccagcaaataatactaaaaagagtagtcagtgagaaaggaatccacaagcagttagtgttgcaataaaacatcttgctttaggctgaaagaccaccttatagataagcacaa

SEQ ID NO: 247931 - DNA, 640 bp, Homo sapiens
tttgcatgaaattttgttaaacagtaattcttactctaaaacttgagtctgtgatacaacctctgaaaaaaaatcacttttcacatatttctaggcatgaatacatctaagtctacatcaatttctaccaatatgtagacagacagtcatattcctccacatagaaaaactggcctcactgaacccttagtgtcatctttgtgttccttttctccaagtacctggtaaggtactaggtagcagaaatcagagtatgccgcagtttccttacttgagtggaaagamctaaattaagcctctacatagcactagaaggaatggagcccatccagtgacctattgggtattaggaactgagtaaagtggctattaatattattgcagaacacagtgattgtggagagggtactgctcttagacccagacaacaggtgtccctacacaagccccaggtccttcaaagggccctactctggttcccctcctgttgcgcctatctctctctgtgggcaaagagtccacagaacccatcccacttataaccatgctgcaaactctgtgggccctacaattctcttctcaagctgccccagcttagccctaaggctggtatagacaagtcttccctcttagaatgggc

SEQ ID NO: 247932 - DNA, 432 bp, Homo sapiens
gtggaccattccagatagaggaaagaattcttcatatgattcagttggtttcaaaactgaatggaaacaaaccacaaacttgtattcttctgtaaatacattgccaaatatgtactacttaagagcayggggaagccaagctccatcccctggtgtatgaacacaacagcaaatgaatccattcccagaactatgatggtatcccttaccccttagaatataggttaaattcctctcttctgtgttctcatagctcctaacactctctgcaatttaacatgcatcatatcagaattggttgttccatctgtattctcttccacaccaatgtaagcttcaagcagtcaggtgccttgttctgtcttgtcaatattcatattccctgtaccagggcaatacctagaagatattaggtgctcaataaatgtgagt

SEQ ID NO: 247933 - DNA, 432 bp, Homo sapiens
gtggaccattccagatagaggaaagaattcttcatatgattcagttggtttcaaaactgaatggaaacaaaccacaaacttgtattcttctgtaaatacattgccaaatatgtactacttaagagcatggggaagccaagctccatcccctggtgtatgaacacamcagcaaatgaatccattcccagaactatgatggtatcccttaccccttagaatataggttaaattcctctcttctgtgttctcatagctcctaacactctctgcaatttaacatgcatcatatcagaattggttgttccatctgtattctcttccacaccaatgtaagcttcaagcagtcaggtgccttgttctgtcttgtcaatattcatattccctgtaccagggcaatacctagaagatattaggtgctcaataaatgtgagt

SEQ ID NO: 247934 - DNA, 555 bp, Homo sapiens
ttaaattcctctcttctgtgttctcatagctcctaacactctctgcaatttaacatgcatcatatcagaattggttgttccatctgtattctcttccacaccaatgtaagcttcaagcagtcaggtgccttgttctgtcttgtcaatattcatattccctgtaccagggcaatacctagaagatattaggtgctcaataaatgtgagttgaagtatattaaaataaattgaattaactgtgaggtttattgttgttgttattttgattaaaaaaaaaggatccccactttttttttttacttttgttctctctcaaaatagaaaattggaagcactggatttgaatgcagtggcatgtttaaggtaggtactctaaatatgaagtgtggctggaataaaaattgttttgtgctgctgattgcaaattgctccttagcttttatagttmtatttcttcatttcctctatcttttttatttacctgcacatattttaaaggcacttgcatttctcaaaagatgggctcaggtatttatgcagtagacatgttaaaat

SEQ ID NO: 247935 - DNA, 592 bp, Homo sapiens
actactttggatactactctggatagttttactaygggtacaaccgcaagcttccaagaggcaggaggcagaagctcccaggccaggtaagagttactccagaattgtcatagtatcaattcactgtacatggtgaaagctgtcataaggcctgcccagatccagggaatggagaagcaaactcaaccatgtgctgggggcatggcaaggtcacactagagaagagtatgtgagacaggagttcttgttgaggacatctttggaaaatagtctgccatgactatgataaagagtttaattgaaagaaacaacttaaattgcattattctacacagatcactcctttgaagcatgtgattattgacttgtttactatataaatggactactttagtttaaaattatgaatattgatatggtttggctgtgtccctacccaaaatctcatcttgaattgtaataattcctatgtgtcaagggcgggaccagatggaggtaatttaatcacaggggcagttaccctcatgctgctcaagctgttcccaggatagtgagttgtcacaagatttgatggttttataagtggcttccc

SEQ ID NO: 247936 - DNA, 523 bp, Homo sapiens
ggcctcctcaaattatctgtgtatagttatggagagaatacctcatatttgttatggagagatttctgtttctgctgataacaaaaggtgcccttcctatttgaaatttaatcaataatcatgctcagggaatgaaccagratctctcttcattcccagccagcttcttctctgctggcatccaacatcttcccaggcagatcccttaaacaatgctgactttacagcaattctaaattcaactcccaacccaaaataggacaaagtgaagaactgtttagaattggtgcaatttaaaatggtttatttatctcaaatattgtggtaattaaatgtgactatgttttgagaaacaacagagcttagggaactttgtgcagggatagaatgacagtggaaatgtgaatgtagatttgtgagttgtaccttgcctatctatgcataaatttaccagcatgtatatacatctgtaaacaaattgatacccacttactgaatctgtatgttagatttaatctagcct

SEQ ID NO: 247937 - DNA, 616 bp, Homo sapiens
gcaatttaaaatggtttatttatctcaaatattgtggtaattaaatgtgactatgttttgagaaacaacagagcttagggaactttgtgcagggatagaatgacagtggaaatgtgaatgtagatttgtgagttgtaccttgcctatctatgcataaatttaccagcatgtatatacatctgtaaacaaattgatacccactyactgaatctgtatgttagatttaatctagcctttatgtccacaccagtgactacctcagaatgtctttacagcagggttccatgtggttggaacaatgagtttggagacttgacttagagctatatttgcttaccaagcacagtgtgtatttattctgcatgtttctttggagtagctactggggatccaacatagacagtggtggcaagcacctctgggcagttttcataatcccttggtgatgcaccactgattaaggtaaagcaaacaccctttcagcagctggacttggggaattagctgccctctctttctttctcctccccaagcttttctggactattgatcaaatgcttgttcctgttactcctctaacacaaatattggcagcattaacaaggcagagagggtc

SEQ ID NO: 247938 - DNA, 616 bp, Homo sapiens
gcaatttaaaatggtttatttatctcaaatattgtggtaattaaatgtgactatgttttgagaaacaacagagcttagggaactttgtgcagggatagaatgacagtggaaatgtgaatgtagatttgtgagttgtaccttgcctatctatgcataaatttaccagcatgtatatacatctgtaaacaaattgatacccacttactgaatctgtatgttagatttaatctagcctttatgtccacaccagtgactacctcagaatgtctttacagcagggttccatgtggttggaacaatgagtttggagacttgacttagagctatatttgcttaccaagcacagtgtgtatttattctgcatgtttctttggagtagctactggggatccaacatagacagtggtggcaagcacctcygggcagttttcataatcccttggtgatgcaccactgattaaggtaaagcaaacaccctttcagcagctggacttggggaattagctgccctctctttctttctcctccccaagcttttctggactattgatcaaatgcttgttcctgttactcctctaacacaaatattggcagcattaacaaggcagagagggtc

SEQ ID NO: 247939 - DNA, 647 bp, Homo sapiens
gtcgtttacgccaggaggtaattccacagagctctgaggaaggagcagggaagggagacgggggaaagaagaacaacaacaaagtttgtaatatcagctaaatagccactgtgggcaacggaagctcaatcccactggagagctcaaagaaccggtaaggacaagcatctggaagttaccccagggcaggattacagagtgttcatctcccagctcctgtcaagtcactggttgagagctgccagggtgaaggtagtggatctacatcctcgcttgttgacctgccatgtgcatggggcatgcaggcatgagagcaaggtcccaggccaagagtcgcgagtgctgcgagttgggtggttcctggraatacggccaggcactcaaagcatctgcttcaaccccaaaaccaacgcaagcttggggttcaaaaaacatatatcatctcaattttcctctaccctttggattaatctattggtttgtaaccccccaaacactctctgagcggttgctgaatctgcagctcaaaagtctgagtagcaggaacatgttgcttgagatttttaaaattttccatacataagctgtaaagcagaatcataacccttcagtatgtgaggtgttacatgccacttgctgaaagtgca

SEQ ID NO: 247940 - DNA, 550 bp, Homo sapiens
agacagacacgtgaatatcgaaaattataacttactgaaacagacactcacaggcagaagtctccttgggagccagtactggtgtgggaaatcttgggctgtaattgatgaactgctacaggttcattatagacaagactgagagttaaaaactccaggacagtgctgtgttaacctgggttctccagagaaacagaactgacaggatgtacatatataaatacatttaatataagaacggacacgcatgattatggagactgagaagtcccaagatctgcagtctgcaaaccggagactcaggagagcaaatggtgtagttctagtctgagtctgaaagcttgagaaccaggaaagccaatggggtaagttccagtttgagcccacaggtatgaggrccaagaagagccaagctttcagttcaggactaaaggcagaagaagactgatgttccagctcaagaagtcaggaaggagaagttccctcttaatcagtgtttttgttctattcaggtcttcagctgattaggtgagggccactcacaggaggg

SEQ ID NO: 247941 - DNA, 562 bp, Homo sapiens
atcccgtctcataagtgcttttcaacattatattggaagtcctagctaatgcaataagataagaaaatgaaataaatatatacagatttggaaggaggaactaaaactctgttgttcatagacaacatgattgtctatgtagaaagtctaaaagaatcatcatcaacaacaagagaacactcctggaaaaaaacattataaggttttcggatataacactaataggttaatatgcaaaattcaattgctttcctatatatcaccaaagaacatttgaaattagaaacaaaatgccatttatattagcacccaaataaacatttaggtataaatctaacaaaatatatacaaaatctatacgcgaaaagctacaaagtctaatgaaataaatttaaaaaggactaaataaatgggtgacacttctgtcagacttagaatatttygtgttcatggacaggactcaatattatcaagatgtcatcttttcccaaatttatctataactacagatttaatgtaatcccatcatttttgttataatgccaaactgattctaaagttt

SEQ ID NO: 247942 - DNA, 661 bp, Homo sapiens
attacatgcattttatcatgcattatgtatatatacaacaaaaccaagtctaatcacacaaacgattactgtctggaatgcgactgcgcttccaatgctctgccacattattaagtagaaggcagtaagtaacacaaaagaaaagatcttggagccagcagaggtttgcgttccgcccagacccctcctgattctccactttgcatggtggttgttctttttactgttctttttaccactcatgaacactcctatctaaagcaagtacagattgtgtccaagacttgcattaacctcaacatctcccaattttttgtgtcctttcctatcttgataacaattcaaaatctcatttgtctctgaaaaatctgttggrcaaatcatgcctgtatctcagagtctcatttttaaaactggaccatcagcattaaaccttccattgcagtggaggagagggagaggagatttgatttctggggaaagcctcatgtagactagcagaaaagagacactattgaggctttacactttcccacatcagagacgtccttcatgttccctaaacaactgtgtgcattattaagcattgatcctatgcaatgatcactgcactttatctatcttcattcataggatttgaagtcatttatgcaagccttaa

SEQ ID NO: 247943 - DNA, 559 bp, Homo sapiens
tgcagtggaggagagggagaggagatttgatttctggggaaagcctcatgtagactagcagaaaagagacactattgaggctttacactttcccacatcagagacgtccttcatgttccctaaacaactgtgtgcattattaagcattgatcctatgcaatgatcactgcactttatctatcttcattcataggatttgaagtcatttatgcaagccttaatatctttaatgaataagtaatgaattcacatttatctagggttgaaattgagtttctgcaatcttttaccatttgacaatcatttattctctggtggcccacttttaaaattttcttggcccactcagcctccagatagaaaaaagaagtctgaaaaaaggatgacttttctgctctcctgacagygtaagtgtatgagaacattagaggagcaagcaaaatgacatcattcccattttcttatctagaacgtctcaaatgtggctgatcatttgaatcattctattgctattgctattagggctgacccccagaatccccaaaacagataccaccaa

SEQ ID NO: 247944 - DNA, 562 bp, Homo sapiens
gcattcacacttaagctgatcatagttacgtactttcgtaacattttaaatatcatctatgtgctcatgatcaatatatatcatttaatcccaaacctcttctctgatttccagtcatgtatgctcaactgtctactcagtatgtccaattgcatgtctattaggcactgccaacttaatatgttgaaaactaagctcttgagcttcccccaagatctgattctcctaaagtttcctccttatttacataacagcaattccaaccttgcatgtgctctgacaacagcttttggagtcatctttagctcctttcactcttgcacagaccacatctaatctgtcaacccatcctcacaacttcgccctctaaatatacatagtgtccaaccttttctcacaccctccattgctccttggtmtgggccaccatgatcatgattttccaggtgaaccactacaggctcctagactaatctccctgcttctgcccttaccccccttccatctatttattcacaatctaacaaccagaatgcctttgttaaatatgaatggaaatagc

SEQ ID NO: 247945 - DNA, 600 bp, Homo sapiens
tgcagcgtgggtctagagatgtgaattactgctggatagattattgtttctaagtgtttttagtgtacagaaattggacatagttaaaataacctgtgattcaataatgatacatctaattcaaatgcacagggctggcgcttaatttcttctgttttacatctctattccttatttttcacactgaaaatcttaatttttcaggtcataagaggacaaaattataatgtgctatgactgcttatttactcacattatatacatacaagtttcagaacaatactattattacattatcactgataatgactactcaaaatagatttatrtattttatatgctatttcattatcccccaaccatatttaatggttatactatatctacatcataatatcatagtttcactgtaatctataatccttcagttttaacctcattctgtattgattatataagtaattatgtagaccaccagtccttgtgttggtgttttctttacaagtgtggttgcctaaaacttgttttctagtagatttcttagaaactgctcatgaggaaaaatacttttgaattactacaagttgtatgtgccacttg

SEQ ID NO: 247946 - DNA, 558 bp, Homo sapiens
atacaccagcaaatatcttcattattcactttgggaarttcctacagatcaatttattggagacagtactcttcacctgggcaaacagcttgcttatctaacagtttacttgtcaacactggcttccttgttcttgttgcatccacttatcttaaattattatatcacaaattttgcccacccaaacagttccttgctttgaaagacctgccttgaaatgacccgagcacagatttcaaagccccataacaatcccacttggacttttcccttgtaagacacccctaagaccctgtcaatggtgttcctcctcacttctaaattaaggctgtctggtgatattttggggcttaacattgtgtgttattgcaaaaccaaataaaaaacacacaccatttctctcaaaacctaggataatttatttctctctctctctctctcttcttttctttattattccctttacctttcactttcctctcctctccttgctttgctttgcttttctttcacaaggtcttgctctgtctcccaggctggagtgcagtggaatgacac

SEQ ID NO: 247947 - DNA, 558 bp, Homo sapiens
atacaccagcaaatatcttcattattcactttgggaagttcctacagatcaatttattggagacagtactcttcacctgggcaaacagcttgcttatctaacagtttacttgtcaacactggcttccttgttcttgttgcatccacttatcttaaattattatatcacaaattttgcccacccaaacagttccttgctttgaaagacctgccttgaaatgacccgagcacagatttcaaagccccataacaatcccacttggacttttcccttgtaagacacccctaagaccctgtcaatggtgttcctcctcactyctaaattaaggctgtctggtgatattttggggcttaacattgtgtgttattgcaaaaccaaataaaaaacacacaccatttctctcaaaacctaggataatttatttctctctctctctctctcttcttttctttattattccctttacctttcactttcctctcctctccttgctttgctttgcttttctttcacaaggtcttgctctgtctcccaggctggagtgcagtggaatgacac

SEQ ID NO: 247948 - DNA, 467 bp, Homo sapiens
tgtcattcttcatactaatctcagtgcttggaaaatagtagataaaaattttttcttgaaggaccacatttaatataagatttgatgtaagattgccatttgcaaaggacctttcacataaaattcagcactttttattctkctggataacaccaatttctttctcactcacttcacttattagaggactgttgatttgattatgatttttagttcaaagagttactgttaagttggaatatttatttttgtccatttaaagtttacttgcactggaaatctggttgaggcaacattgtgattttaaagtctcttgtgaaatatagaggaatcactgtgctcaaattatgaaagaaaaaaagcaaggacttcatttctattaggttgcaactcagagttctgaactcaaccatgaaaaggttttggtaaattgcaaagcaatctacaaatatagttttcctaattct

SEQ ID NO: 247949 - DNA, 562 bp, Homo sapiens
cacaaaacaggctttgtgtgagccataaagctttttaatcacctgggtgcaggtggactgagtctgaaaaaggagtcagcaaagggagataagggtggggcagttttataggatttgggtaggtaatagaaaattacagttaaagggggttgttctcttgcgggcagggkcaggggtcacaaggtactctgtggggagctcctgagactcattgtccaggagaaggaatatcacaaggtcaattgatcaattagggtggggcaggaacaaatcacagtggtggaatgtcatcagttaaggcaggaattggctattttcacttcttctgtggttcttcagttgcttcaggccatctggatgtatacgtgaaggtcacaggggatatgatggcttagcttgggctcagaagcctgacactgggggccaggaagcatagtgctagccagccagtaagcttcttccagcataacaggtttccaattgtaactgttttgcatactcaatttcctgtaagctttcttttaaaaggagttttccttccagaaaaaaaaaagtttggaaa

SEQ ID NO: 247950 - DNA, 577 bp, Homo sapiens
ctgggggccaggaagcatagtgctagccagccagtaagcttcttccagcataacaggtttccaattgtaactgttttgcatactcaatttcctgtaagctttcttttaaaaggagttttccttccagaaaaaaaaaagtttggaaactgccagttagctgctttttttttttttttttttttttttgcaagcaaataaactaaagccgagagcagattaaatgaagacaatgttgaactttacttgagccctgtgatcatggaaaactgaaggttaagaaatcttagccttttgtgttcaagaacctacttcatgcaagaaaccaccactccccatgtgatttagataagactcaagatgccttccttgtttacctatgacaaggctagacacaaaccctytagattccttatttactttatacatgattggctgaactgttttgttcttctgatccactggagcaaaagtttgctaattaatttttggcaaatcttctttcttccccccaggttcctgagctttccccgagtgggcatgggcagcccctcctgcagggcccatataaggaggaggc

SEQ ID NO: 247951 - DNA, 589 bp, Homo sapiens
ttactttatacatgattggctgaactgttttgttcttctgatccactggagcaaaagtttgctaattaatttttggcaaatcttctttcttccccccaggttcctgagctttccccgagtgggcatgggcagcccctcctgcagggcccatataaggaggaggctgactctggggtaaaacattctctgttctactgtcagcttgatccacttttcatctggtgtattctatttcctctcactggttctttttagctttggttccttctccttataaaagaaaagctcttttctgcctaacctttgagacacatgcagatcacatggttgaggtgccctcctcattgcaataggttccctcccactattgcaatagtcccttccctctctcagtcatcctgtaagataaaatctctccttacttaaatttagatttgctttttctttttaatatgacaatgacatgtacacattcaaactgacttgctawaagttttgaatttgtggcctcaaatccagtttggggtttcttcactcccacagttttatctctctaaactgaatgcagtgtggttgttacaaaggaaaa

SEQ ID NO: 247952 - DNA, 470 bp, Homo sapiens
ttcatcttcttcagagaagataccgtgtttcagtttccatctgattactttatattggtatacctttgggtaagtccctttatcttttcagaactrcagtttctgtgccaaaataaaaccaaaccacaaaaaaacagaagtagttgaagtagaactcctgaattctttccaatgttttaatgtctgtagctctttaaaaattctgctaataatatccatatatgattttagtctcctgtagggtgagaaaatggacatttttttatttctgtaaaaattaggaataaacaaataaatcttccccaattctgccttcaattccctgaaacactgacataaaatgtgtataaaaaagaccatcctttaaatctgttttgtcaattattttgctgtcgtaggaccagaactctaacaacagttaaatggcaaagttgaaattcaaaacaacaacatacgacaaacaataaagc

SEQ ID NO: 247953 - DNA, 470 bp, Homo sapiens
ttcatcttcttcagagaagataccgtgtttcagtttccatctgattactttatattggtatacctttgggtaagtccctttatcttttcagaactacagtttctgtgccaaaataaaaccaaaccacaaaaaaacagaagtagttgaagtagaactcctgaattctttycaatgttttaatgtctgtagctctttaaaaattctgctaataatatccatatatgattttagtctcctgtagggtgagaaaatggacatttttttatttctgtaaaaattaggaataaacaaataaatcttccccaattctgccttcaattccctgaaacactgacataaaatgtgtataaaaaagaccatcctttaaatctgttttgtcaattattttgctgtcgtaggaccagaactctaacaacagttaaatggcaaagttgaaattcaaaacaacaacatacgacaaacaataaagc

SEQ ID NO: 247954 - DNA, 501 bp, Homo sapiens
cttttactttggagtagccaaaaatactgaaatgccattctgtatcttgagaaaaggaactgttgcatgttatttgaaaataaaaaaggagaatagccataattcatacctcttatccattagtgattttgtgcatattaaacccaattcaatcagagtctctgggttggggtctgaacattaatatcctctgacagctaatcaaccaggattcagaaccattgatgtagctcaaataacattttcttctttttgcccccactttttttgctcactccttcagacttcayactgacataacttagcttcccctctgtgataatcacattttgcagacaaatcatttctgtggtatttctatgacactgtattagaattgtttatgcacatgtcatctttctcttgctggaccataaggtcattcaggtcacagatagtcgttgtttgtatctgacatgatatgtttgcagatacaatgatttaggcacacaaaggaacaat

SEQ ID NO: 247955 - DNA, 501 bp, Homo sapiens
cttttactttggagtagccaaaaatactgaaatgccattctgtatcttgagaaaaggaactgttgcatgttatttgaaaataaaaaaggagaatagccataattcatacctcttatccattagtgattttgtgcatattaaacccaattcaatcagagtctctgggttggggtctgaacattaatatcctctgacagctaatcaaccaggattcagaaccattgatgtagctcaaataacattttcttctttttgcccccactttttttgctcactccttcagacttcacrctgacataacttagcttcccctctgtgataatcacattttgcagacaaatcatttctgtggtatttctatgacactgtattagaattgtttatgcacatgtcatctttctcttgctggaccataaggtcattcaggtcacagatagtcgttgtttgtatctgacatgatatgtttgcagatacaatgatttaggcacacaaaggaacaat

SEQ ID NO: 247956 - DNA, 640 bp, Homo sapiens
aaaatattcaaatcggaccgtggtcactgyagtcagtatatttcatttgcttcctttctcaacccagttagttttgcctccatgtcttttcttcagctgttaaatactaagtgggattgaattagagggatggtgctgaagaactctcgctaaagaaacacaaagatgtgtaccttcttttatttttttaaataacatgtccttgccacttatttactttgaatccattttctaagtgacacgagaaaagagcaaagcataaatcatgaggtgtgtctttatgaaagatttgagctctggagggtacaacacctgccctctgaggtcaaagcagcatctcgtgccctttgtgctgtgctctctcctctagccaggcccacggggagggcagaggaagagtcactgctgctttctccagcggctgctcacctgctaccggagagaaaaggtgaccttgaaataagagtgtgctatactttgaaagaaatcgtctaaataacagcacaataaatgagggcattattcccatcatgactgtcttcaaggttttgctttctgcttaccattctccctgacggttctttttattccctcctacatcaaaattctcctcctttgcttcaaataagttaaggcgata

SEQ ID NO: 247957 - DNA, 640 bp, Homo sapiens
aaaatattcaaatcggaccgtggtcactgtagtcagtatatttcatttgcttcctttctcaacccagttagttttgcctccatgtcttttcttcagctgttaaatactaagtgggattgaattagagggatggtgctgaagaactctcgctaaagaaacacaaagatgtgtaccttcttttatttttttaaataacatgtccttgccacttatttactttgaatccattttctaagtgacacgagaaaagagcaaagcataaatcatgaggtgtgtctttatgaaagatttgagcyctggagggtacaacacctgccctctgaggtcaaagcagcatctcgtgccctttgtgctgtgctctctcctctagccaggcccacggggagggcagaggaagagtcactgctgctttctccagcggctgctcacctgctaccggagagaaaaggtgaccttgaaataagagtgtgctatactttgaaagaaatcgtctaaataacagcacaataaatgagggcattattcccatcatgactgtcttcaaggttttgctttctgcttaccattctccctgacggttctttttattccctcctacatcaaaattctcctcctttgcttcaaataagttaaggcgata

SEQ ID NO: 247958 - DNA, 483 bp, Homo sapiens
gatgtagggtagaacacctaaaattaatgtgatttttaaacctgcctatctatacttttttttgtgaagtcaataaataggaaaaataagtaagtaaacaygtaaagaaatgtggtcacctagcactgtggcagagactctagactttatttactaattgtagcccctatccctggtcacttgccactatatagacgttgtacatgccggatttattttgaggcgaacgcaatcattttgaaatgcctagttttcaaagtaaaaatgtgttcacgttacaaaaccactgtagcaagacatttctattaaaaatagtcctggtgcttctctttaatgctttgtagactgctgtgtaactcagaggggctgtgcgaagcacatggaggcattagagtaatcattaaagatcaagggatttccaattatccagtcacacttagtagacaatagactgagataaatgaagcatgacttggcagtttc

SEQ ID NO: 247959 - DNA, 482 bp, Homo sapiens
ggctggagtacaggggcatgatcttggctcactgcaacttttgcctcctgggttcaagggattctcctgcctcaacctcccaagtaactggggctttaggcatgcaccgccatgcctggctaatttttgtatttttagtaaaaatgggttttcaccatgttggccaggctagccttgaactcctgacctcaggkgatccacctgcctcggtctcccaaagggctggaattacaggcataagccactgcacctggcctaggagtaaaatctcaaccattttcaatacattttctaaaaataaaaaaataagtaagggcccaaacatgttgctaacaggttaatattttaaaataaaagtaattttccttaagtctattgcctcattctttttctttcaaaccgagttccaggctaggagtttaaactccgaggttagggtagtgtaggggctggaaaaagaaacaaagacctgcctcaagtac

SEQ ID NO: 247960 - DNA, 482 bp, Homo sapiens
ggctggagtacaggggcatgatcttggctcactgcaacttttgcctcctgggttcaagggattctcctgcctcaacctcccaagtaactggggctttaggcatgcaccgccatgcctggctaatttttgtatttttagtaaaaatgggttttcaccatgttggccaggctagccttgaactcctgacctcaggggatccacctgcctcggtctcccaaagkgctggaattacaggcataagccactgcacctggcctaggagtaaaatctcaaccattttcaatacattttctaaaaataaaaaaataagtaagggcccaaacatgttgctaacaggttaatattttaaaataaaagtaattttccttaagtctattgcctcattctttttctttcaaaccgagttccaggctaggagtttaaactccgaggttagggtagtgtaggggctggaaaaagaaacaaagacctgcctcaagtac

SEQ ID NO: 247961 - DNA, 615 bp, Homo sapiens
atttgggctttcccctgggggtttggtaggtaaacatgtaggtgaggggcttcagagcttaagctccatgagctacatgtaaatctyctcctacattatcttgactaatccaatccataaattttgatctagaatgtctcaatttattttctaaataaacttacaaactatcacctactgccctagatcccagctgtttataaatccttggctttgcttctctattctggcagttctcttaaatttggatatgtgcacctgacctggaggtaggaaaacacaactactgtccctaaactagttaactgtgtgaaatttgacaagttgccaacagtttctaagttggtgatctagtttggctgtgtccccacccaaatcttatcttgaattgtggctcccataattcccacgtgttgtgggagggacctggtgagagataattgaatcatggggggcagtttcccccatactgttctcacaataatgaataagtctcacgagatttgatggttttataaggggaaaccactttcccttggctctcattctcttgtccgccaccatataagacatgccttttgtcttccaccatgattgtgaggcctccccagccac

SEQ ID NO: 247962 - DNA, 535 bp, Homo sapiens
tctgcaaataccataatgaataagacacgattggtgtcctgaaagcccccagatttgagtaggaggggcaggaacttacatgaataatttaactactttgaggtaagtggtaaaagagaggtttgtacaggttgcaatacagtttaaagagggaagaggaagtttggaaaaattaaagttgctttcccagaagaattaatgtttgtttctccatcccccaaacattgccttagatcgtgttcttggtattttcctgtttagtaaacattttatctggccctgaaaactcaaaaataaaattttacatgatgtgytgttagtgaaagttccattttcactggaaatttgttgcctaaacaataacaattttacttcctcgaactctaagacctatctcattttaaaaacagattattgtgttataaagggattttgggagatgtaggtgcactgacactgatatttttaacaactctgccaaaacatacatgctcaagtgacttttgcctctttagcacaaaggtcaccttcagaa

SEQ ID NO: 247963 - DNA, 503 bp, Homo sapiens
aatttacatctattaaaaaatatctattcataagagtgtctacctttctgtaccagaaagagaaggatgactcccattcactaaaaactcaatcaagagagaataggtgctgtctgaaatctgcatgacaaacttgacccttgtttgcttttcctggtcacttccccttttccagccccacatccttctttcctatttcaacaaatgtatcaaagaatcatatttaagcctgagttcaaagccacctctttgagatgtactcatttctccgggtatctctcatatataatgacgtatacatgctactaacattctttgtttttctctcattaatcttttgtctcatattttgcaacaaraggtcccagctaagactcactaagcaagagtagagagaaaaacatttttccttcctacacatccaaatgcattagtaccttatatatggtaaagcactcactataaatcaaattgtaaaatgagtcagtaaattcatttggact

SEQ ID NO: 247964 - DNA, 581 bp, Homo sapiens
aactaatagtagttactgtctctatctgtaactttcactccctgccacccaactgtagttagatagccagagatctcatcatgaaccttcatggggaaaaaaaaaatgtggtctgataaattaattacattaaaaaaagtgattaatcaaataccctgatgaggaaatggagaacatattaactaccatttgttgactacttattgtgttattatgatactcatttccttcctcaagtaaatttcagtctagggaaaacatttacaacagaatatgctgagtgctgggatactgaggagtagactagaagtataagaggacagaggaagagtaatgatgtgtgggtgaaaagataataactaggaatctgggaacattrcctaggtgtaatttgagtatcagcaaaacaataaaaattagagaatgataagtaatgtattagatatgagacttggaagcaggaaaagtcttacagaagtgaaggaaggctatttgcaaaaactcaagatcatgacaaaacagactcttcagagaccaagtagtgcattacgaatggaaaataggatggatatagatgtaaa

SEQ ID NO: 247965 - DNA, 581 bp, Homo sapiens
acagcctttcttgagtgtgtattgcccttagctgttaaaaaattttactgatcacgttaaagagtatgaatttctttcatttccatcatctgtaggaaacacgtgtcttatcttgttacccttgagtttcctcttctgtcagcctggattgtaggtcagagctgctactaagcatgtgatcttatgcaaagctttcttttgatatttacttcaggtcagtgtgcagtggctgaaaattcagtacaaatttkggaatccagcaggtctacttttaaaatcctcaggtttgtcagcccggtgtgcttcattttcttccttttcctgtattaaatgagtgtaataatatatgctaggtctttgtaagtgttaagataaggtatcaaaagtgccttgtacagtgcctagcaaatactaagggcttaataaatgttatcgaagtaaattattaccattgccttttttaacaaaaaaggaatttaaagtgatctggatctcaatgtcttcatctataaaatacagtgattcaagtatattcagtttgatttagtcctcatttattgagtatgcagtacttggaaaac

SEQ ID NO: 247966 - DNA, 583 bp, Homo sapiens
atttactagaaataattatatagaaatattttccaaatttgaccttccactccaacaccctatgacactgagtaaatgccagcactcacagggactcatgcatataagaggcttaggtttaataagcatcatgataaatcaggtgttattgtgtcatcagattaacaggtagaaaagtaacaacaataccaaatcaattttaagaataggcagggaaatcggaaattaagtttgaggactgcttcacaagagcattcataggtagcttctaaacaggatgcctggagtcttcctatggggcttacaagtaagagagcattaaagataaacttcacatcattagaaacattcggctgagtttataggtatcaccagcagaccacatcctgctattcaagtagctagtagagacaccatggrgaaaaatgctgacatgaagaggaagtaaaagaaaggaacctggcaggtatagtatggaggggcatggggaaatatttaagaagaagcagatgaagcaaacattattgataaagagagaagaagtcgttaaacatttgtttttggtgacataatagtgctaacc

SEQ ID NO: 247967 - DNA, 473 bp, Homo sapiens
ttacaattatgatggaaggagaaggagaagcaaggcatgtcttacgtggtggcagaagagacgagagagaacagggaaactgccacttttaaaaccatgaaattttgtgagaactctcttactatcacgagaacagcatgggggaatctacctccatgatccagtcacctcctaccacgtgcctctcgacatacgcagattacaatttgagatgtgattttagtggggacacagagccaaaccatatyggtgcataatacttaatacctcattcatggcaatgatcacttcttatctttcattacagtaatttgatagatagcttttctcccatacttgagtgtacagtatgttgtttctctctttaagaatatagttgctgagtgcttgagagcacaactgattaatcttttgttactcccacaatatttggcaaaatgccgtgcatattatagatattcaataaatatttg

SEQ ID NO: 247968 - DNA, 668 bp, Homo sapiens
ataaggtttgtcacattgattgactctgtagcttatgatgctgttagatagcattttacccacagtagaacttctttcaaaattggagtcaatcctctctaactctgccaccactttgtcaaccaagtagatgtaatggtccagatcctttgttgtcatttcaacaatgtccacagcatcttttccaggactacactaactcaagaaacccctttctttgctcatccataagaagcaactcttcattcaacttttatcgtgagattgcagcaattcagtcacatcttcctgttccacttctagttcttgttatcttgctgttttcatcacatctgcatttactttccccactaaagttttgaacccctccaagttatccatgagggttrgaaccacttcttccaaattcctattaatattttgaccttccatgaatcacagctgttcttaatggtatatagaatggcgaatcctctctagaaggtttacaatttactttgctcagatctatcagtggaataattacctatggaatctctacccttataaaatgtattttgtaattcattcttaagtcattggatttgaaatttgaaaattactccttgatccatgggctacaaaattgattttgtgttagcaggcatgaaaataacattaatattgct

SEQ ID NO: 247969 - DNA, 515 bp, Homo sapiens
gaggatcacttgagcccaggagtttgagaccagcctgtgcaacacagcaagactcctatctctacaaaaaataaaaaagaagaaaaaacaacttaaataaatagtcaggcatggtggtgtacgcctatagtcccagctactcaagaggctgaggtgggaggatgggttgagcctgggtggtttagctgagccataatcataccactgagctccagcctggatgacagagcaaaaccctgtctcaaaaatataataaaataagatcaaaaagaaatatttaaaaaaacaaaatacrtcaattgctttcatagcataaaattatgtccagagcaatggcataaaaatgtaatatatagtcttaattgcaggaaaatataatctaatcatctgaaaatatgtcagaaaatctcaaaggtaaatttaatttagcattacttaaatttaactctaaattgtaaataaaatgattgaaaatgatagaacaactgaaggttatagttcgtcatttgtcaaca

SEQ ID NO: 247970 - DNA, 575 bp, Homo sapiens
tttcctttataaattgcctagtctcaggaagttctttatagcactgtgagaatggactaatacagacagcaattactagattgtatggttatagtatgtttacttttgtaagaaactggcaaactgatttccaaaatgactgtactattttgcattttcaccagcaatgaatgagagttcttcttgttctattccttgccagcatttggtgttgtccatgtyctgaattttgacataaaggctgtgtagtagtgtttcattgttattttaatttgcatgtcactcataatctgtcatttggggcatgttttcatatgcctatctgccatttgtgtatattctttactgaggtctctttaaggtttttggcccatttttttagtcagattgttttcttattgtttagttttaagagtcccttttatattttggatagtagtcttttatcagatgtctttgcaaatattttcacttagtttgtggcttgtctttttattctcttgacagtgtcttttacgaagcataaaattttaattttaatgaagtccaacatatcaatttgttttttcatggat

SEQ ID NO: 247971 - DNA, 614 bp, Homo sapiens
ggggctgcaggtgagagatataactttacttttatatatttggcccatgaagattctgagaaggcagtcattctgagagtatcactatgacagtatcattagatrcagcaaattaggttatctgagtgttctagtgctttttttgctgtagtatttagttatattaatgtggattttgttctattacattaaagaattatagtttatttcactatggaatatttaaatattattatcaatttcaatcctattcttcaatcctagccaaaacaggaggtgattcaaaaaagacagttataaatttaaaaagccttgaaatgttctagagacaaaaagtggtatcttcttacatatatttgtgaatgtaattagcaaaaaataatgatatatatatatataaaataaaagtttgaggagtattaagaaagtactaactgtcaatgttttctggccagaattttataccagtgcaccaaaacataattcttgtatgactttgttatgactttgttatgcaatcgttgatgatatttatttgcctcataatgtcgtttttaaacactcaatctgttttcttattgctgcccacatttgggggaaagaaattcacaagt

SEQ ID NO: 247972 - DNA, 571 bp, Homo sapiens
gaatggctaataaaaacatccaaagtagctccaagttgttagtcatcaggcaatataaattgaaaccacactttagtatcactacagtactacaaaaatgactaaaattaaatgattgacaataccaagtattttcaaagatgtagaacaactggaaatttcctacaytgttggtagacatgttaaattatacaggtacaatggaaaaatagtctggtaagtacttatacagttgaacatttacttaccgtacattctagaatttctatgctttttacttaccccaaagaattaaaaatgtgtgttcacaaatacttgtataaagttttattcataatagcctaaaactgaaaaccaaatgtccaacagtcagcaggcgtctggataaacaaactgtagcatatccatatatcgatatactcctcggcgattaaaaggaattaactaccgatgtgcacaacaacttaaatgaatcttataaatcttacacagagagacagaagacatactcaaaatactacgtagtgtattattcaatttacataaaagtataaaactggtgaaagtgttc

SEQ ID NO: 247973 - DNA, 571 bp, Homo sapiens
gaatggctaataaaaacatccaaagtagctccaagttgttagtcatcaggcaatataaattgaaaccacactttagtatcactacagtactacaaaaatgactaaaattaaatgattgacaataccaagtattttcaaagatgtagaacaactggaaatttcctacactgttggtagacatgytaaattatacaggtacaatggaaaaatagtctggtaagtacttatacagttgaacatttacttaccgtacattctagaatttctatgctttttacttaccccaaagaattaaaaatgtgtgttcacaaatacttgtataaagttttattcataatagcctaaaactgaaaaccaaatgtccaacagtcagcaggcgtctggataaacaaactgtagcatatccatatatcgatatactcctcggcgattaaaaggaattaactaccgatgtgcacaacaacttaaatgaatcttataaatcttacacagagagacagaagacatactcaaaatactacgtagtgtattattcaatttacataaaagtataaaactggtgaaagtgttc

SEQ ID NO: 247974 - DNA, 613 bp, Homo sapiens
aacctccctcccacctgcaaggtggtaagatgctatgtccgtattccaccccatctgaactaatccaacactttttggacattatgaatccagcaatggggtgagagaggacataaatcttaggatttcaagtgattagcaaataaagcataatgtcaacaaatggtgatactgaggaaaaattgaaattcatggattctggaaattatgtaattccgtgtactacttctagcaaaagaaggactatataccgtttctaatttttcaggagtaaatttacctctagatacgactaaggactagaaaatggaaattgacaaacatctcacctcagtccagttgagcttcattatagccttagtagaccttgagcgtttgactacagctgtgtacctaactgacctygagattaatatttggggaacagattctggagcactgagagaaaaaagagacaaataaaactgaaaatattgccaattggcaaaaataggcctatagacataggagtacaagagagtttaaagcacaaacacacattaagcatgacagttaactgatagtcataaatttggtaacaagatgtcaagcaaatataaaaagaatcatcatc

SEQ ID NO: 247975 - DNA, 530 bp, Homo sapiens
aaacttcatattttgggataacattcccaaaactccttcaccctcatgcagcagacacatggtctatgaacagttatattcaattcaatttatttccataaaaactaaactttcttcaacatatactgtatataagacactatgccagttcataccaagataagtaagagagaatcccatctcccaaggaggcacctgtctggtggaaaataaaactaatatagacacstataaaataggataaactaaggtaataataaaaataggactgactgagcattgggtatttttatattgcattactttattaaagtcctcaaaataagatacgattttaaataatataatcctgattataaataattaaatcatagagagactgcctaagcacacacactcgtaacaagtaacagagccaaaatgagagcgtcctaattctgtttgaatctaaaacctgttctcagtctactgtaccatacaaaaaactttgagagttaagaaagaagaaaataaaatctagataaaagata

SEQ ID NO: 247976 - DNA, 530 bp, Homo sapiens
aaacttcatattttgggataacattcccaaaactccttcaccctcatgcagcagacacatggtctatgaacagttatattcaattcaatttatttccataaaaactaaactttcttcaacatatactgtatataagacactatgccagttcataccaagataagtaagagagaatcccatctcccaaggaggcacctgtctggtggaaaataaaactaatatagacacctataaaataggataaactaaggtaataataaaaataggactgactgagcattgggtatttttatattgcattactttattraagtcctcaaaataagatacgattttaaataatataatcctgattataaataattaaatcatagagagactgcctaagcacacacactcgtaacaagtaacagagccaaaatgagagcgtcctaattctgtttgaatctaaaacctgttctcagtctactgtaccatacaaaaaactttgagagttaagaaagaagaaaataaaatctagataaaagata

SEQ ID NO: 247977 - DNA, 530 bp, Homo sapiens
aaacttcatattttgggataacattcccaaaactccttcaccctcatgcagcagacacatggtctatgaacagttatattcaattcaatttatttccataaaaactaaactttcttcaacatatactgtatataagacactatgccagttcataccaagataagtaagagagaatcccatctcccaaggaggcacctgtctggtggaaaataaaactaatatagacacctataaaataggataaactaaggtaataataaaaataggactgactgagcattgggtatttttatattgcattactttattaaagtcctcaaaataagatacgattttaaataatataatcctgrttataaataattaaatcatagagagactgcctaagcacacacactcgtaacaagtaacagagccaaaatgagagcgtcctaattctgtttgaatctaaaacctgttctcagtctactgtaccatacaaaaaactttgagagttaagaaagaagaaaataaaatctagataaaagata

SEQ ID NO: 247978 - DNA, 553 bp, Homo sapiens
tcactgcaacttccgcctcccaggttcaggcaattctcctgcctcagcctcctgagaagctgggattacaggtacccaccaccactcccagctcatttttatatttttagtagagacagggttttgccgtgttggccagactggtctcaaactcctgacctcaggtgatccacctgccttggcctcccaaaggtgtgagccaccacacttggctgataaggtcactttttaaaaagaatagtttttaggcatcatagtgtcattaggtactataagcagcaagttctagaaaaaaaaatcacatataataactatcttttgttgactacttagtagaaaccaagtgtacttctagacactctgcatatatcatcaaatttaatcctgacctaatkgaaaaacatataataaaatattaacaaaagtaatccttaggtgaaggtaacagttaactttacatgggttatatcgattaatagataaaaagacaggtaaacatactgttttcctttgaggaaaatagcaagtgttttcctttgaggaaaatgggcag

SEQ ID NO: 247979 - DNA, 587 bp, Homo sapiens
aatgtttattcaattatgacattaaatttatttttctaatgtagagcttaacttcattgtaacacaatctacaacccaaattccacttgtgtgtgtgtctgtgtgcatgtttgtgtgtgtatgtttatgcgtttgtgtgcttgtgtatgtatttgtttggacttgcttgaaagcttttatatcaagtcaattaacaagcaggctatatatactaactgcatatggcatcttaagcagccaagtgacatcaccaagttatgccatttcaggattttttttttttttgctattatgcaacatagagataaagctacagaagtatagctcttacacataacaacatagtttggtacaaaagattcacacacaaggtacagygttcaaagcaacaaaatatgaaatgacatctgtcttttatctgccaataattgacatactgatagcattttttcaattttgagggcagtgtaacaggccacttttacttgtagaattcttggtagaatgaatttgaataacattttaatggcctttcacccactagagtttgagcttacagcaaacagatatgatagcacatttatgtt

SEQ ID NO: 247980 - DNA, 594 bp, Homo sapiens
ctatttttttttcaggagaatgtactcatctttgtctcatattttaggagtctaacaaaactaatgattcagctttaaaatttgtgaaatagtrtaaataaatcagtccatcacaatttctaccctttaaatatgaaatatttttgccacaaggtttttctattattgttagataaaaatcagcactttcttttatatctctatatatgtctagtcttaatattccatgcagaaagaggaatcaaattcataaataatacatctttacctcctaggtggaataaatataaatatggtgagttgtatgctaatcacaaatgtaatgtaaagcattttagtttaaaccttttgatgtcatttaactgattacaatgccaatcattcatctaaatattgaaattagtcatttttgctaatttaaaaagtcttccctaaattttttattgaaccattaatcagtcaaactcctaaggaaaatgaagacagtttttgtagtctaaccaagaatcaaaacaaattctgcaactcaaaatgctttgaggaacagaaaagatattgggtggaaaaagatatctagctttgagtactaatatt

SEQ ID NO: 247981 - DNA, 624 bp, Homo sapiens
ggacaccatctcttgaaataggtaaggatgatgttgctaagaattgaagatgttatagaaaataaagtgggagatattttactccattcatctagtttatacaggcattctttccagtttttttcaacttttattttagattcaaggggtacatgaacaggtttattaactgggtatattgcatgaagctgaggtttgtgrtatgattgattctgtcacccaggtactgaatataatacccagtagcttttcaaccttggacctctccctacttccctctagtaatcctcagtgtctattttcatctttatgtccatgtgtactcatcgttcagttgccacttataagtgaaaacatgcagaatttggtttcctggtacttcgttaattcacttagtataatgaccttcagctccaccttgccacaaagcacatgatttcattcttttttatggctgtgtagtagtccatgttatatatgtatgacattttccttatccagttcaccgttgatgggcacataggttgattccatgacttcgctattgtaaatagtgctgtgatgaacatgtgagtgtatgtgtctttctggtaaaacagtttattttcttttggatatataccc

SEQ ID NO: 247982 - DNA, 624 bp, Homo sapiens
ggacaccatctcttgaaataggtaaggatgatgttgctaagaattgaagatgttatagaaaataaagtgggagatattttactccattcatctagtttatacaggcattctttccagtttttttcaacttttattttagattcaaggggtacatgaacaggtttattaactgggtatattgcatgaagctgaggtttgtgatatgattgattctgtcacccaggtactgaatataatacccagtagcttttcaaccttggacctctccctacttccctctagtaatcctcagtgtctattttcatctttatgtccatgtgtactcatcgttcagttgccacttataagtgaaaacatgcagaatttggtttcctggtacttcgttaattcacttagtataatgaccttcagctccaccttgccacaaagcacatgatttcattcttttttatggctgtgtagtagtccatgttatatatgtaygacattttccttatccagttcaccgttgatgggcacataggttgattccatgacttcgctattgtaaatagtgctgtgatgaacatgtgagtgtatgtgtctttctggtaaaacagtttattttcttttggatatataccc

SEQ ID NO: 247983 - DNA, 612 bp, Homo sapiens
cattagctggtttctttgtagtttctattctatggttgctttataggtcctgtgggctatgtattgaagtgtggttttgtggtataaggtaccactcttttttttctcttttgagatagggtcccgttctgacacccaggatggagtgcagtggcatgatcataggttattgcagccttgacttttcaggcacaatggatcttcccacattagcctcccaggtagcccaggtagctgggattacaggtgcacaccaccatgcgcagctaatttttttttttttttttttttttttttagagatagggttttgycatgctgcccgagctggtctcaaacctctggtctcaatctatccactcacgttggcctcccaaagtgctgggattataggcatgagccacagcacccagctggtattgctttttcctttctgtgtttaggaatcccttaaagatctcttataggctaggctagtgatgacacattcctttagcagttgcttgcctggaaaagatgatgataacaatcctttgaaagcagttatacgttcctgcttcatgttcccctggttttcatcatagtttttaatgttatttttcttaaaaaataa

SEQ ID NO: 247984 - DNA, 439 bp, Homo sapiens
cattaagatagaaacatgaaagagaataaaataagggagatgagaaaatgagcaggttaagaagagttgatttaagggtacttttaaaaatccaacttgaaatgttctgtaggcaagtggatatatagtcctggcactaaggaaaaaaaaaaatgaacygataccaaacatttttgagttaacattcactgattcaataaatactcatggagtacctactatgtactaggcgcttttctaggtaccgggaactcagcaatgaacaaaacaaagtctctgccttaaataatttgtattgtatcagggaaagtcagatgacatttttgtaaagaatgtgatttgtcagattgtgttaagtgcaatggagaaaaaaataaatgggtaaatggaatagaatgccaaaaaataggaattaggattttggcttcatataatacaa

SEQ ID NO: 247985 - DNA, 641 bp, Homo sapiens
aacgccaggctctctggcctttggacttcagtagacccccaagttctcaggctttcccctcagacggagaattacactatcaccttcccttccctggttctgggactttcagacttgaactgagcctcactaccagsatttctgggtcaccagcttgcagatggcctatcttgggacttgtcagcctccataatggcataagccaattctcctaataaattccctctcacacttctatgttatccgtctgtctgtctgtctgcctatctgtctatctgttgatctctcttctatctttctctcctgttggttctttgtctctggagaactctgactaatacatatgtagattgagcatccctaatctgaaaatccaaacatactaactgctccaaaacccaaaatttttgagcttctatatgaaactacaaatagaaaatttcgcacttgacttcatgtgacaggttgcaatcaaaatgcaggtgcacaacataatttattcagtgtctccaagcggttactgtatcaagtaaccttttaatcaaaacacagcatcctaggtgtagacagaaagcttggcattttttgctgttgctgttgttaacagctgacacagatattcctgggatgctactgtgttt

SEQ ID NO: 247986 - DNA, 587 bp, Homo sapiens
gtgactgtattacaatttttctcatctaaatagtgttcattaaatattagaagaaaagagctcaaaatgtaggcagtgattatgtctaaatgttggaatcatacaagatctttactttcttccgtacacatttttacaattgtcatatatattataatgaattgccattacttttatattttctaatcaggagtacacacacacaaaatttaaataccctttgtgtttttataacattagatctatgatttttattataaggagggctgagagtataattacagaaacagcctgttagcttctcttaagaaacattctctcattatttcaagttttgttttcccttggatctcagctttttagtgacaaatgaaataagtattatgtcagtttgtaacaaattattcatttcaaaataagaactccacagaacgtttaattactattctcagcgagtagatcatattcactgttgaaaatatratatagttagaatcttctgtttgggcattttatacacaagataaattcattttttcctaataatttttacctttaagctaatgtaaagggatataaatgattag

SEQ ID NO: 247987 - DNA, 584 bp, Homo sapiens
agacttactgataacatatcagtaagtaatttgggaagtgaaaagcaggaagaaatgagtgaaggatgatcttaatagttacttggttcttaatgtcagtgataatcttattcatcatgttattcctaatacctgattcacagagggcactagatatagaatgaaagaataccttttgtagctaatgttggcactattagcaagcttcaaaagtatctgcatttattaayctccagttggggtttggttcctaatttcttctgttgatttgcagttaactcagtggtggtagcaaggtacaaaataccccaggactacacagaacaacacaatcaaggtagaattgacacaaataactcctaagaaaatgtttcctacatatagagtaaataatttactaaacatgcttaaaataaataaatttggaaaaaaataaaataaatagaaaacttcctcaaattgataaagaacattcttaaaaacttattactaacatcatatgtaatagtgagaaacttgacacttctccactaagactagaaacaagacaaggatatctccctttcaccaactgtttcaacatc

SEQ ID NO: 247988 - DNA, 584 bp, Homo sapiens
gaacaagtaatattcaaaataaaaaaaacataataacatttacattagcacccccccaaaatgaaacacatagatgtaaatcaaacaaaatatctaaaaaataagtagttttcttctatataaggagaactacaaaaccttgaggaatgaaatctartaagtaaataatggatagaactaaataaatggatattccatgttcattattattgtcaaaatgtcagttcttcccaacttgatttatagcttcaatgcaatcccaatcaaaatcctggcaagttattttgtggatgttgacaaactgattctaaagtttatatggagaggcaaaagaactggaatggctaacaaaatattgaaggagaagaacaaagttgaaggactgacatcatctaacgtcaagccttactataaagttataacattcaagacagtgtggtattaatgaaggaataggcaaatagattaatggaagagaagaacccagaaacagacctagataaatataatcaactgatctttgatatagagcaaaggttacataataaagcaaagatagtcttttcaacaaacggtgctagaac

SEQ ID NO: 247989 - DNA, 584 bp, Homo sapiens
gaacaagtaatattcaaaataaaaaaaacataataacatttacattagcacccccccaaaatgaaacacatagatgtaaatcaaacaaaatatctaaaaaataagtagttttcttctatataaggagaactacaaaaccttgaggaatgaaatctagtaagtaaataatggatagaactaaataaatggatattccatgttcattattattgtcaaaatgtcagttcttcccaacttgatttatagcttcaatgcaatcccaatcaaaatcctggcaagttattttgtggatgttgacaaactgattctaaagtttatatggagaggcaaaagamctggaatggctaacaaaatattgaaggagaagaacaaagttgaaggactgacatcatctaacgtcaagccttactataaagttataacattcaagacagtgtggtattaatgaaggaataggcaaatagattaatggaagagaagaacccagaaacagacctagataaatataatcaactgatctttgatatagagcaaaggttacataataaagcaaagatagtcttttcaacaaacggtgctagaac

SEQ ID NO: 247990 - DNA, 584 bp, Homo sapiens
gaacaagtaatattcaaaataaaaaaaacataataacatttacattagcacccccccaaaatgaaacacatagatgtaaatcaaacaaaatatctaaaaaataagtagttttcttctatataaggagaactacaaaaccttgaggaatgaaatctagtaagtaaataatggatagaactaaataaatggatattccatgttcattattattgtcaaaatgtcagttcttcccaacttgatttatagcttcaatgcaatcccaatcaaaatcctggcaagttattttgtggatgttgacaaactgattctaaagtttatatggagaggcaaaagaactggaatggctaacaaaatattgaaggagaagaacaaagttgaaggactgacatcatctaacgtcaagccttactataaagttataacattcaagacagtgtggtattaatgaasgaataggcaaatagattaatggaagagaagaacccagaaacagacctagataaatataatcaactgatctttgatatagagcaaaggttacataataaagcaaagatagtcttttcaacaaacggtgctagaac

SEQ ID NO: 247991 - DNA, 466 bp, Homo sapiens
gctcattcattgctagtagaaacgcacartttcacagccattttggaagagagtttggcagtttctaacaaagctaaacatacttttaccatacaatccagcaatcactctgcttggtatttactcccaaaagttgaaaacttacgttcacacaaaaacctgcaaagagatgcttatagcggctttatttataattgccaaaacttggaaccaaccaaggtattcttcggtaagtaaacgggtaaataaatggtggtacacccagataatggaatattaatcattattttaaaaaatgagccactgaaccataaaaagacatgaaggaatcttaaatgcatattactaagtgaaagaagccaatataaaaaggcaataatatggtataattccaaccatatgacattctagaagaagcaaaactacagagacagtacaaagttcactggttgctaggggttttatg

SEQ ID NO: 247992 - DNA, 466 bp, Homo sapiens
gctcattcattgctagtagaaacgcacaatttcacagccattttggaagagagtttggcagtttctaacaaagctaaacatacttttaccatacaatccagcaatcactctgcttggtatttactcccaaaagttgaaaacttacgttcacacaaaaacctgcaragagatgcttatagcggctttatttataattgccaaaacttggaaccaaccaaggtattcttcggtaagtaaacgggtaaataaatggtggtacacccagataatggaatattaatcattattttaaaaaatgagccactgaaccataaaaagacatgaaggaatcttaaatgcatattactaagtgaaagaagccaatataaaaaggcaataatatggtataattccaaccatatgacattctagaagaagcaaaactacagagacagtacaaagttcactggttgctaggggttttatg

SEQ ID NO: 247993 - DNA, 466 bp, Homo sapiens
gctcattcattgctagtagaaacgcacaatttcacagccattttggaagagagtttggcagtttctaacaaagctaaacatacttttaccatacaatccagcaatcactctgcttggtatttactcccaaaagttgaaaacttacgttcacacaaaaacctgcaaagagatgcttatagcggctttatttataattgccaaaacttggaaccaaccaaggtattcttcrgtaagtaaacgggtaaataaatggtggtacacccagataatggaatattaatcattattttaaaaaatgagccactgaaccataaaaagacatgaaggaatcttaaatgcatattactaagtgaaagaagccaatataaaaaggcaataatatggtataattccaaccatatgacattctagaagaagcaaaactacagagacagtacaaagttcactggttgctaggggttttatg

SEQ ID NO: 247994 - DNA, 545 bp, Homo sapiens
caaccatatgacattctagaagaagcaaaactacagagacagtacaaagttcactggttgctaggggttttatggataggatgaataggcagaacatagaggatttttaggtctgtgaaaatactctgtatgacactataataatagatccatgccatgatatatttgtccaaatccacagaatgtacgacattcatgtaacctctggcctttggttgattatgatgtgtcaatgcaggctcaccaattgtaacaaatgcactactctagtggagggtgttgataatgagggaagctatccatgtrtgggggcagggagcataaagaaaacctctaccttcctcttaattttgctgtgagcctaaaactgccctaaaaattgtcttttgagaaattaaaagacatttagaaatcatggaaaaaatagaaaaacgtaaggcaattgctcatcatagcagataaaaaatccaaaggttctgaattctgtcccaaaataccctcaatagggtgtccacctttacctcattaacttatttgaatggtac

SEQ ID NO: 247995 - DNA, 588 bp, Homo sapiens
acagctaaaagacagctatctgtgaagcaggaagcaggccctcaccagataccgaatcagctgccaccttgatcatggacttctagcctccagcattgtgagaaataaatgtatgttgtttagaagtcacccagtttataccattttgttatagcagccctattggactaacacagtgaagcagtcactacggactgaattakgtccctgcccaaatccatatatatcaaagccctaactcccagtgagtttgtatttgaagatagcatctttaggaggtagttaagattagatgaggtcttaagcatgggatcctaatccaacaggactggtggccttataagaagaggaagaggatgcacacacacatgctctccatcctacacgcaggaactaaggaaaggccatgtggacacacagcaagatagtggtttcctgcaagtcaagcaaagaggtctcgaaatgaaacctactttactggcatcttgatcttggacttcttagcctctggaaccgtaagaataaatttctgttctttaaatgcccagtctgtggtggcccaagcagactaagtcagcagtagggcac

SEQ ID NO: 247996 - DNA, 642 bp, Homo sapiens
tttcaggctcaaaatcctgcactaacattgtaagctccctatggcactagagtttgtatatatactttcaggcagctgaagacataggtaaatctttgcaaatggggagagagggggacaaaaaagggttcctggctcataattttaaagcactacccacagtgggactgttttctaaagaactcttwagtatgcagcatatatactaacatgtaaagcacaccttttgcactaatcaaatgtgaagttatataaatttaatatccaatgacttaagaaagtgggatgccaacactcatctttatgactaaagtatacaattttatgaatcaatgtaaagaagccagcatgcttggaaggaatcttttgctcaaactcagattatgttattacactgctaatcttggtgtgtttttttaaaaacgtaacatccttctaatcaagcatgattagttacaaatagaatccaaagaaatatctcaaatgactatatatctaaattatcttgcttattacttatgggatatttttcttatccatatccaggttaattacaatttcagaaattatctgtacaaatgaataaaattcaattctcttagccaatgagttactttttccagtgtaaagtacagtcattta

SEQ ID NO: 247997 - DNA, 514 bp, Homo sapiens
tgcatttaactcactgtcatttagatatgccgtaagtatttcatggttttttcctcctcccaacacccctctccctgccacggtgtgggaagctcaggttctactctttaccattctctgtgtgaaattcaactgacttctctacctctgtgggcctcamtattggactctatactatgaggaagttaactaaaagattttgaaagcatcttcatgaatgaaaaatgtaagcttctcaacaaacatattgactataatattgactatacattggagaaatcaacacttaacttccttaattatacagactaggacaattttagacaacccattagccttcttaaacttcctttggctgatatgtatgcaatggaatttccatccattttcaaagaactacatataacttctcaaacaggctttcaaatccaccactatgtttctttgccttcctccactaaccttggaagtgactccaatcttctctaggaccttacagtaaaattcctacccc

SEQ ID NO: 247998 - DNA, 584 bp, Homo sapiens
aatgctgtgcacggaaaagtcagacttggtaatgtcaccacagaatttgaaaggatattaatgggtccttttcatttctgaaaaaatagagattagaaccagagaacttcccttcaaggacaatttcttttggaagaaacttatattccctttggatccatgaacacaagtacctacatcattttctagctgtggactcactctttcaaaacatactcagggacagctgatgcaaaggtaagcttggaggtgtagaaaatataaaaatcagtttttctcaagtgtgttccagggccaaatttttactgctgaattttaaatgctggtctatgtttaaggaagatcttataacagctagcatagcatggcacaacacrtagagactcctcacttggttcattctccaatattttggggaatctatagttgaatatatttgttacttggtcctggagtaatgtgggccaaatggagaatcatttctcttatttgagatttgggtcatcatgtgtgaatctgtagtgtctagaataaggcctagcatatggaaggaagaatgaaaaaaaagggagaaagaagagaag

SEQ ID NO: 247999 - DNA, 584 bp, Homo sapiens
aatgctgtgcacggaaaagtcagacttggtaatgtcaccacagaatttgaaaggatattaatgggtccttttcatttctgaaaaaatagagattagaaccagagaacttcccttcaaggacaatttcttttggaagaaacttatattccctttggatccatgaacacaagtacctacatcattttctagctgtggactcactctttcaaaacatactcagggacagctgatgcaaaggtaagcttggaggtgtagaaaatataaaaatcagtttttctcaagtgtgttccagggccaaatttttactgctgaattttaaatgctggtctatgtttaaggaagatcttataacagctagcatagcatggcacaacacatagagactcctcacttggttcattctccaatattttggggaatctatagttgaatatatttgttacttggtcctggagtaatgtgggccaaatggagaaycatttctcttatttgagatttgggtcatcatgtgtgaatctgtagtgtctagaataaggcctagcatatggaaggaagaatgaaaaaaaagggagaaagaagagaag

SEQ ID NO: 248000 - DNA, 557 bp, Homo sapiens
gaatcatgagcccaatctagtctaactcacagctggaagtacttgaagtttttcattctcaagttgaaaaattagtatataatgaattcttaagctccttaatcaaaatatgttatccaggatagatacagaaatcatatttgcaagattcagtatcacaccatgaattaccttctgtgtgtgacaactggggaacagacacaagaaacttcctgagtgctcagtcaacaataatttgaagttggtgaggaagtaggggaggttgcataaaacagcgcaagttatgggaatccttggacagctcttcgttgtccaggactgtcccagcattgcagtgtgtgtagtcctcatggacctcacgataactctctctttgtgttattacctgccctccactgcygcttgcttcccatacatacatcccttaggggaatggtgctgcctcattcaacagagaattcagcttggtacatgccacacaattgatgtgctgctgaagaaacataaattcacagctactcttcaagggcagagaaaatagctttaaaggtaagaaa

SEQ ID NO: 248001 - DNA, 581 bp, Homo sapiens
agtcaacgcccttgaccactatgcatagtgccccaacatcccacacaagctttcagaccttagactcccagaacgcagggcctcatcatctgatcatgttaggtgtccagcatggaaccatatttataggcaatgcctaaatagatactattagaaggagtaatacatgatacaaaactmaacttcactcatgactcaaacacttactgtgtgaccttcgacaaatggttcccatttctgagggctaaacttttcagtctatcacatagaatgtatatggatgcattaaggaagggaacaatatgactgtatttgcattttcaaaaggatagtctgacagttgggtggagatcacaatggaggtggttaagactatgagaaagcaggaggtgatgagattctgaataaaggcaatacgtaagagcagaatatagatcacctcaatgtatcctgaaaaaaagtgggcagcatagccttgggtaagttagcttttctatgcctcaatttcctcctttttgaggaggaataataatatcaagttgtactttttgagtttccatctcttcctcagacatatatat

SEQ ID NO: 248002 - DNA, 581 bp, Homo sapiens
agtcaacgcccttgaccactatgcatagtgccccaacatcccacacaagctttcagaccttagactcccagaacgcagggcctcatcatctgatcatgttaggtgtccagcatggaaccatatttataggcaatgcctaaatagatactattagaaggagtaatacatgatacaaaactcaacttcactcatgactcaaacacttactgtgtgaccttcgacaaakggttcccatttctgagggctaaacttttcagtctatcacatagaatgtatatggatgcattaaggaagggaacaatatgactgtatttgcattttcaaaaggatagtctgacagttgggtggagatcacaatggaggtggttaagactatgagaaagcaggaggtgatgagattctgaataaaggcaatacgtaagagcagaatatagatcacctcaatgtatcctgaaaaaaagtgggcagcatagccttgggtaagttagcttttctatgcctcaatttcctcctttttgaggaggaataataatatcaagttgtactttttgagtttccatctcttcctcagacatatatat

SEQ ID NO: 248003 - DNA, 605 bp, Homo sapiens
ttgctgtaaaaatgtacattaatttaagtgaattcagaagattgattggactagggaaaataaattaattattcatgtcaccagtattttttaaatgcacagtggttatcaggaacatatataattataagtaatgctattattttttaatagcaaagttacagctaaggttaattaatatttttaataaaaataaaattttgttctttgaagttgcaaaatgtattttgttagctctaaatatttttcaaggaaatgtgtgtgaattctgcttacatttttcaawcaaataatattcatttttcatgagtacctccaaagcctccaagcaagcaacagaagtgtccaatatattcaaacattcttttcttgcataaacattaattgggttctttttcagaaaacccaactgggaatcaaatgctactgactttaataggatgtctcatatgtgaaatgaatgtctcttacaatctaccaatgatatttcttgaactctcaatagttcctttccttgagtaggtttgctaactctaccctgaaaaaatgcctaactgaaaccatggaactgctccaatacatttcactcatatttactgattctg

SEQ ID NO: 248004 - DNA, 522 bp, Homo sapiens
tggggaagaaatgatgagcaattccataaggcactgatagacataaaataagagtacatactttcatgtcattccagatagaaatatcaaagatggaacattttccttccccttgacttaacagatgcccactctcatttagaactatttcctgacaatgaaatctagttggagagatacaamataataattcaaacacattgaaataagttttgcactgaggtaaaaaagccacagggtatgaaaaggcatggtgtagttggtgaaagggaggtgaggtattacttgagtaaaaagtttacattggtggggtggcagagataaaagaagatggagatagagataggcaggagttagatcatagtgaaagtcttgtagttattttagggaacccaggaagcttaaatctatcaatcaggatagtgacagggtcagatacatattgtagagacactcttgtgagtaaggaaagactcatttataataaaatatttgtggtagtccatatgatttggtcattct

SEQ ID NO: 248005 - DNA, 540 bp, Homo sapiens
agggaacccaggaagcttaaatctatcaatcaggatagtgacagggtcagatacatattgtagagacactcttgtgagtaaggaaagactcatttataataaaatatttgtggtagtccatatgatttggtcattctgcaatacatttatcaatatctcaaaactcacaagaacatgtaagcaaaagttaaggtatatatagagagagtggaagaatctttagtattctctggtgtcaatttgtatgtgatttttaaaaattgtttttggaagcattttattttctgtttagtggttgytgtagttttcttgagtcttctccctactgctaatttaggctatttggcatattcagcctcatggttgcaaaactggggttttaatattaaaacttccattgttcatttagatttttccttctgaaaatttgtagaattattcaaggcaatcttttatatacactttctaccttcctttgcctcccaaatcaacaacctgaaggtaggccgaattaatacacactagttgtggtaataatgt

SEQ ID NO: 248006 - DNA, 351 bp, Homo sapiens
actctggcaacattttctgaattccacagatccacagtttgagaagatgattgtttaacttgtggcatcatgagggcccaacagtttagaaaacagtrggacagcctgttgccctgcagccaggtgataatccacagtaaccaaaataataacaaatattcatgaaaccactgtctttctttttcagctcattattgaatatttgcactgtatttattatttctgctgcaaagaaagtaagaaattaccaaccaatagatcatgttcttatcaagtgccaggcaaaaataattcttataactacacactaggaagagagtaggaaactggtaggaagggaccaaaatgtta

SEQ ID NO: 248007 - DNA, 351 bp, Homo sapiens
actctggcaacattttctgaattccacagatccacagtttgagaagatgattgtttaacttgtggcatcatgagggcccaacagtttagaaaacagtgggacagcctgttgccctgcagccaggtgataatccacagtaaccaaaataataacaaatattcatgaaaccactgtctttctttttcagctcattattgaatatttgcactgtatttattmtttctgctgcaaagaaagtaagaaattaccaaccaatagatcatgttcttatcaagtgccaggcaaaaataattcttataactacacactaggaagagagtaggaaactggtaggaagggaccaaaatgtta

SEQ ID NO: 248008 - DNA, 581 bp, Homo sapiens
tttgtttacttctcttcctggggttgggccttaaacagtgcaaacacaaagcacaacttctggatcatcagaacgatttagcaatgaaacaggctatctcgaagatgaaaaatatttgaagagaggctagatgctcatctatgaagatgactgaaggaaatgcatgcactaggcagatggtgagattgcatgaccttttaagtcccttacaagtgtaagtttctgtgctatcaagggaacaggccaggtacagtggctcacacctgcaatcctgataccttgggaggccaaggtgggagaatcacttgaggccaggagtttcagaccrgcctggataacaaagcgagaccttgtctctacagaaaataaaataataattagccagacatagtagtgcatgcctgtagtaccatctcctaaggaggttgaggcaggaggatcatttgagcccacacatttgaagtcgcagtgagctttgatcccaccactgcactccagcctgagtgacagagcaagaccctatctctgacaaaatgtggtggtcacattttgacgtttgaggggtcaccacccctcgacag

SEQ ID NO: 248009 - DNA, 571 bp, Homo sapiens
attggcagggctgcattcctttctagagctcagggccctcttgcaagcttgcatggttgttgataaaacttaattctttctggttggagaactgaggccctcaactcttagaggctgcctgccataggaccctctccattagcagcttgcatcaagaagcttgcttcttgaargccagcaggagagtctggcactcctttctcctaagatggagtctttataacatagcctaacatttgccattttatactggccagaagcctgtcacaggtcatgtccacgcttaaagggagaaaattccaataagatgtagatataggaggcagaaattacttatcagtctaaggtctgtttacaacagtatgtgtgtgctctaaaacatatatatgtaaatacgtagaagttggtatgtgccaatctcttatttatgtttattaacccatttcgtttttaccttatttaaaaattaaatgttattattctcattttacatatgagaaaactgaggcagagagcatttaagttactcatccaaagcacgcagctgggcagcagcagaataggtatgtga

SEQ ID NO: 248010 - DNA, 491 bp, Homo sapiens
cataatattaactcaaaagctatgatgatgtctgcttccattgacaattttatttacatatttgaattatctctagttatataatttccatttctttttattacacaaatgtttaatggaaattggggctttgttttattctttyccagtagatgataaattctgtctgccattggaaagaagcacaatgtagattcaaatgagctgccaaattgacttttgtgtttgccctgctttagccttgactgtttctatagcttgcacttttagtgaggattttctgtgcatattagttcatcatatcaggatacaagcagtttatcactatgtagcaactttacagcccaggtgcaggaaagctgtggattagcaattctcagttaggggaagttcagtgcaaacatcacccaatgtgagagtattaggagaggttctatttaatataccttttgttttatgattaaaaaccgaaaaatcttcttccacagctt

SEQ ID NO: 248011 - DNA, 585 bp, Homo sapiens
cactatgtagcaactttacagcccaggtgcaggaaagctgtggattagcaattctcagttaggggaagttcagtgcaaacatcacccaatgtgagagtattaggagaggttctatttaatataccttttgttttatgattaaaaaccgaaaaatcttcttccacagcttcattccactatgtaggctttgatttctattaaaacgtttaagcccttcttggggtgaaggtaggaaatatactttatgctgcagttagtcattacattttagtgtaagttaattccaggccctttcttgaaataaggttttagaaattaaagaatatgmagatgatatatgtttagattgtatgtgcttttatatctatttgtgtgttctatgaggtgtggtgggaggaggcaaattgaagaaataagtatacgacaaagaggcaggaactctgaaaacatgttttactttcttaacagttaatttgaaatttatactgatttattatactattgtctcatttcctgattacttatttgaaaaattgatgcaacaaagaatatgaaattatacggaaagaaccttatagctttcaa

SEQ ID NO: 248012 - DNA, 585 bp, Homo sapiens
cactatgtagcaactttacagcccaggtgcaggaaagctgtggattagcaattctcagttaggggaagttcagtgcaaacatcacccaatgtgagagtattaggagaggttctatttaatataccttttgttttatgattaaaaaccgaaaaatcttcttccacagcttcattccactatgtaggctttgatttctattaaaacgtttaagcccttcttggggtgaaggtaggaaatatactttatgctgcagttagtcattacattttagtgtaagttaattccaggccctttcttgaaataaggttttagaaattaaagaatatgaagatgatatatgtttagattgtatgtgcttttatatctatttgtgtgttctatgaggtgtggtgggaggaggcaaattgaagaaataagtatacsacaaagaggcaggaactctgaaaacatgttttactttcttaacagttaatttgaaatttatactgatttattatactattgtctcatttcctgattacttatttgaaaaattgatgcaacaaagaatatgaaattatacggaaagaaccttatagctttcaa

SEQ ID NO: 248013 - DNA, 585 bp, Homo sapiens
cactatgtagcaactttacagcccaggtgcaggaaagctgtggattagcaattctcagttaggggaagttcagtgcaaacatcacccaatgtgagagtattaggagaggttctatttaatataccttttgttttatgattaaaaaccgaaaaatcttcttccacagcttcattccactatgtaggctttgatttctattaaaacgtttaagcccttcttggggtgaaggtaggaaatatactttatgctgcagttagtcattacattttagtgtaagttaattccaggccctttcttgaaataaggttttagaaattaaagaatatgaagatgatatatgtttagattgtatgtgcttttatatctatttgtgtgttctatgaggtgtggtgggaggaggcaaattgaagaaataagtatacgacaaagaggcaggaactctgaaaacatgttttactttcttaacagttaatttgaaatttatactgatttattatactattgtctcayttcctgattacttatttgaaaaattgatgcaacaaagaatatgaaattatacggaaagaaccttatagctttcaa

SEQ ID NO: 248014 - DNA, 616 bp, Homo sapiens
gttttatatttctgtttcatttttgtttgtgtcatgcgattagtgtgggcaggaacaaaggttgctttttgctgcggtgtctgaaacattcagtgaacaatgtaactcagatttctccagcagtagactgctatatgatgtgccttgtgtggggccttagactctggagagcatatgccaatgatcctgttccacagttagctttcggtagtccttacaacctatgttatagagagggtctctctccactttcttgttcttctctaactgtagaacatcattttgtgtgtgtgtgtgtgactaggcaaaaaattcaggttggggacagagggatgktttgtgttgtttttgagccagtttcatcattggacactcagagatggggtatttttaacacttcttgactctttttctagtgggagtcaaactgtcacttacctgtgttgttttttgcagaagaaataataccttaccctcctcccacctcagtagtagaaaacccctgatttatatcattgcaagttttcaaccccacaataagggcaaactcttttatttctccttccataggaacaatgtacctttgtctgtggtcactggatggagactttccaaa

SEQ ID NO: 248015 - DNA, 438 bp, Homo sapiens
tcattttgtgtgtgtgtgtgtgactaggcaaaaaattcaggttggggacagagggatggtttgtgttgtttttgagccagtttcatcattggacactcagagatggggtatttttaacacttcttgactctttttctagtgggagtcaaactgtcacttacctgtgttgttttttgcagaagaaataataccttaccctcctcccacctcagtagtagaaaacccctgatttatatcattgcaagttttcaaccccacaataagggcaaactcttttatttctccttccataggaacaatgtacctttgtctgtggtcactggatggagactttccaaacctttaccacagtarcacgactctgcattagtgcaaaatcctgggccccaaaacaatccttgttcctctcctgatggaggagtatttttcttgcatccc

SEQ ID NO: 248016 - DNA, 502 bp, Homo sapiens
ggatgctctgagaaaccagcagtttggagcgtaaattgatatgaacagtagaagtgtagcttttaatgtaatcttaaaatgatagatttggcttccagaaaatagcttaaacacttcatctttaaagcattccctgaacttcaggcttcaaagctttagaagcattgtgcctctgtgggactagggagagagcagggtgaggtgttgtgaggtgtggcctcataacttctcagccagctcttttcrttatggacacatgaagtacgggcctgggtatgttacagcagctctgggacatatgaccgattcagcatctgttacatattttattcttttataataattcctcccactatttaaaatttactgatagtattagctctggaaaaagtattaatgggttctgaaagagattcgtcatttaattcaccgttcatagacattttaatgaaagtaattgagaaactgcctgagtttgttttaccctgttttgtttggtgaa

SEQ ID NO: 248017 - DNA, 589 bp, Homo sapiens
aggttcatcaagtccaagactgtttcttgtacacagtcattagagaattgaagcacttgcagaaatttccccctgaccaaatcaaagattgtcatgatcagctctctacacaattagaaaaaaaaaaagaagatcccacgtggtattaatttttctgctaatgtgtatgcaccacagtagagctcacctcagactataaatcattgacttgtaattaatcataaaaataagatttaaaagatttgtcctattgtgtactacaatggcaaattcaaaattgatgaaagataagcagagttactgagtcattttatatatataatgaatcaggggttatatatattatatatagagacacatattttatctctatttagtttagtgtctggtaaactgaataaactaaatagacaygcacacatatgtaattagtggacactaaatggtcaagaagaaaaaaggaaatctgacgtccaagcaaaatttactataacgttttgcaaagttctattcctctcacaatccaatggtgtttgtgactatatatacatatatgtaagtggacactaacaatctcactgccttatgg

SEQ ID NO: 248018 - DNA, 607 bp, Homo sapiens
aatatataagacaaatgttttattagaatagctatatttttcaaaagtttgtttctcaaaaggtgtcgatattcaaaatctatttatttggaacattatcagccaagtgaggcattatggtatttgcakggtctatatgacaacaatacacattgcattcagttgaaaattatgtgattatgctgcacttaaaatcagagtatgtttacaaaactattactttgccttctgggcctagatatatccaaatgtcttgttctcatttaaaaatcagtctgtacacaggttactaatcttctcttgtggtatagatgactttcagaatccttttgtgtttcttttcccaatgttaaaaactcaagaaataagaagccttccaaagaagcaagtctctttttgttcttgttatttttattttcatattattctgcacaaatgtttggttcatagcattgtttttctttactttttccccatagatattaatatgtcatatcaaatgctgacacttttatttctgaggagaaattacacaagagtgaagaactaaaatgaaaggagaaaaactatacatcagtgatgttcatatagcttgtctctactgatc

SEQ ID NO: 248019 - DNA, 607 bp, Homo sapiens
aatatataagacaaatgttttattagaatagctatatttttcaaaagtttgtttctcaaaaggtgtcgatattcaaaatctatttatttggaacattatcagccaagtgaggcattatggtatttgcagggtctatatgacaacaatacacattgcattcagttgaaaattatgtgattatgctgcacttaaaatcagagtatgtttacaaaactattactttgccttctgggcctagatatatccaaatgtcttgttctcatttaaaaatcagtctgtacacaggttactaatcttctcttgyggtatagatgactttcagaatccttttgtgtttcttttcccaatgttaaaaactcaagaaataagaagccttccaaagaagcaagtctctttttgttcttgttatttttattttcatattattctgcacaaatgtttggttcatagcattgtttttctttactttttccccatagatattaatatgtcatatcaaatgctgacacttttatttctgaggagaaattacacaagagtgaagaactaaaatgaaaggagaaaaactatacatcagtgatgttcatatagcttgtctctactgatc

SEQ ID NO: 248020 - DNA, 607 bp, Homo sapiens
aatatataagacaaatgttttattagaatagctatatttttcaaaagtttgtttctcaaaaggtgtcgatattcaaaatctatttatttggaacattatcagccaagtgaggcattatggtatttgcagggtctatatgacaacaatacacattgcattcagttgaaaattatgtgattatgctgcacttaaaatcagagtatgtttacaaaactattactttgccttctgggcctagatatatccaaatgtcttgttctcatttaaaaatcagtctgtacacaggttactaatcttctcttgtggtatagatgactttcagaatccttttgtgtttcttttcccaatgttaaaaactcaagaaataagaagccttccaaagaagcaagtctctttttgttcttgttatttttattttcatattattctgcrcaaatgtttggttcatagcattgtttttctttactttttccccatagatattaatatgtcatatcaaatgctgacacttttatttctgaggagaaattacacaagagtgaagaactaaaatgaaaggagaaaaactatacatcagtgatgttcatatagcttgtctctactgatc

SEQ ID NO: 248021 - DNA, 345 bp, Homo sapiens
agaagctaccagaactaaaaacaaggttttcttgactacctcattctacagatattmataggattgtatgtgatagatattgtgcaagtaagcactgaagaaataataaatactgcacatagtagcatagtacttggcctcatggagggatattcagagtttgaaggcaaactatcaaatttgccattacaggttcaatgcttctttctaaagggcatgtttcaggagctacaaataatatagtcaagtgtcctaatgtaacctgatgacatcagggaataccttctggggaagcaatgttcctaccaagaagattccattaattagtaatggttagctaatgaa

SEQ ID NO: 248022 - DNA, 345 bp, Homo sapiens
agaagctaccagaactaaaaacaaggttttcttgactacctcattctacagatattaataggattgtatgtgatagrtattgtgcaagtaagcactgaagaaataataaatactgcacatagtagcatagtacttggcctcatggagggatattcagagtttgaaggcaaactatcaaatttgccattacaggttcaatgcttctttctaaagggcatgtttcaggagctacaaataatatagtcaagtgtcctaatgtaacctgatgacatcagggaataccttctggggaagcaatgttcctaccaagaagattccattaattagtaatggttagctaatgaa

SEQ ID NO: 248023 - DNA, 447 bp, Homo sapiens
caaaagagttactatcttcttactgagcttgagtcatgttataaagacacctccactactttagtagaagccattttctctcacctcctccttgttccgctgcctctcattcctgcctgcagaaggcagagatgaggtagccatgctcctaggtgcagatttaaaatgggagctatcagagagctctgaactcagccaccacggttacctttgatgtcttttcattgatttcctcttaaatcttatctctaaatttatattttttagagtttctactctatttttagtatttctcatttgtctttagccatatttacctccagagcatctggctattggataatacatattttctttgtatttttacgaagtttttctcccaatgtttataatatatatattaattgtcccaaaagttyccttccttctctattataaatcccccaa

SEQ ID NO: 248024 - DNA, 322 bp, Homo sapiens
ctagtgataaatattttctggagaaactattagattcattcatgaaaaccacacttgagagcgctctctcttccaaagcagctttgcatacagaaaagtatcagcaagaacaagtgcccatcagttaaccaaagatatcatatttcagcyagcactgtcctcgacccactaactgttgctatcaattcagtctaaatatcagtcacaacagttaaatattaggctaaataatgttatacaatgctcatgtcattgtctgagacaattcttttggcttcgtatttagaggtatagcaggatacactgttgctgtttagaaata

SEQ ID NO: 248025 - DNA, 581 bp, Homo sapiens
tcagaatctaagcatatttaagcaaaaatttcagcaagtcattaacaataataaagcagtctggcaagtactgaaagyagcttttattcatgcttttacttgaactaagttaatacatatatacatacatatgcacacacacacacacacacacacagacacaagttttggttgtttttgccacaagcatgctgataaacccctgaagctcacacaaagcagcagacaaaactagaagcaaccatgctcagggtttaaggacattttaaaatttaaaacaacctttccacatttcacatacagcgtgcataaatttgacatgcaatcttcaagaagaaatattttaacataaatcttaaaattagtttatccaaatgagtttattcttattttcattattattgtttttaggcttctggtatcttaaaccctgcatgctgcagatctaagctgtgctcagcagcggctgtgacagaagaagctacctgcaagttttcacagtgccatctcatatccatgtctgtctggctaccctgcgtgcttagagcttttttcttaattcttaatggaaatcctaggaa

SEQ ID NO: 248026 - DNA, 530 bp, Homo sapiens
actcaggataatcctgtcatctcaattccttaacttgatcacatcagcaaattcctctttgccatgtaaagtaaaataacatattcacaaattcyggggattaggatgtgaatatcttggagagactataattcagcctaccacagataccagaacctggttctttgaaacaacaatagaactgctaaaactttaatcaaactgatatgggaaaatataaacaattcatatatacctatatcaagaatgaaagaagagtgacaactgcagctcttataggcattaaatagataaagagggactacagtgaacaaatttctatcaataattttgtctatttagattaaatatataaattctcagcaaaatgaaagttaactcaatcagaatagataaatgaatagctctatatctattaaagcaatttactttgtagttaaaaccttcccacaaagaaaaaccctactcctagatggcttcactggtaaattctactgaacatttatagaaaaatgataccagttctacac

SEQ ID NO: 248027 - DNA, 543 bp, Homo sapiens
actttaacactcttgtaccaagcctagtttaactttttctcctctctttcagtttgtccctcctcactcttcagttttcaattcatcaattcctgttaaaacaagaacttcagattattttgtgttaatgggatcattcactgtaaacctgtcctstgatcttatctcccccggtcttgataatatatgccataaattgtttcactttcgatttctgatgttaaatctctttctacattagctttttctgtccacctccctattactttttttctcaagcctgtctttaatgcttcatatgaaggtggctctttgggcagaaattggttttatttatgtgatagcttctaatgaaattcttagtttatatgatgttttcctattttccaacttttttcttggaatatgggttgtgtttttctgtttgtttttgttttgaatcctgtttaagtctgaataatgtttcatcatgggctgcccctcctgcaggtcattgtttcctaatgtactggttttcttaaatttctttttcctgcttgcaat

SEQ ID NO: 248028 - DNA, 544 bp, Homo sapiens
catctgtcagtttaaatcaaaggctagaaattaagcttagtgaggaaggcaagtcaaaaaccaagacagactgaaagctaggcctgtgctcagttagccgacttgtgaatgaaaaaaaaaaagtttttgaaggaaattaaaattgctactccagtgaaaacacaaatgataagaaagcaaaacaggcttattgctgatagaaagaaagttttaatggtctgggtagatcaaaycagccacaacattccctgaagccaaaacctaactcacagaaaggccctaaatgtcttcaattctatgaaggctgacagaggtgaggaagctgcaagagaaaagtttgaacctagcagaggctggtttataaggtttaaggaaagaagctatctttataacattaaagtggaaggtgaagtagcaagtgctgatgtgaaaacttcagctagttattcagaaaatctatctaagataattgatggaaatggctacactaaacaacagattttcaatgtagacaaaacagccttattttgaaagaagatgcaac

SEQ ID NO: 248029 - DNA, 544 bp, Homo sapiens
catctgtcagtttaaatcaaaggctagaaattaagcttagtgaggaaggcaagtcaaaaaccaagacagactgaaagctaggcctgtgctcagttagccgacttgtgaatgaaaaaaaaaaagtttttgaaggaaattaaaattgctactccagtgaaaacacaaatgataagaaagcaaaacaggcttattgctgatagaaagaaagttttaatggtctgggtagatcaaaccagccacaacattccctgaagccaaaacctaactcacagaaaggccctaaatgtcttcaattctatgaaggctgacagaggtgaggaagctgcaagagaaaagtttgaacctagcagaggctggtttataaggtttaaggaaagaagctatctttataacattaaagtggaaggtgaagtagcaagtgctgaygtgaaaacttcagctagttattcagaaaatctatctaagataattgatggaaatggctacactaaacaacagattttcaatgtagacaaaacagccttattttgaaagaagatgcaac

SEQ ID NO: 248030 - DNA, 544 bp, Homo sapiens
catctgtcagtttaaatcaaaggctagaaattaagcttagtgaggaaggcaagtcaaaaaccaagacagactgaaagctaggcctgtgctcagttagccgacttgtgaatgaaaaaaaaaaagtttttgaaggaaattaaaattgctactccagtgaaaacacaaatgataagaaagcaaaacaggcttattgctgatagaaagaaagttttaatggtctgggtagatcaaaccagccacaacattccctgaagccaaaacctaactcacagaaaggccctaaatgtcttcaattctatgaaggctgacagaggtgaggaagctgcaagagaaaagtttgaacctagcagaggctggtttataaggtttaaggaaagaagctatctttataacattaaagtggaaggtgaagtagcaagtgctgatgtgaaaacttcagctagttattcagaaaatctakctaagataattgatggaaatggctacactaaacaacagattttcaatgtagacaaaacagccttattttgaaagaagatgcaac

SEQ ID NO: 248031 - DNA, 314 bp, Homo sapiens
aaatttgttcagcttttgacaaatctgtatacacatttgtctttgatttttagctgtttgtttgactttttaactttttagctattaaattttatcatttactaggctagagcagaaatgataatacaggtttttcctcatttcttaaggtgtgattaattacaaacatggccaaaattcttgcaattcctctccttgaatttgggctgaccatgtgacttgcttaatcrgtgtggcaaaagcaatgtaacgtgagttctgtacctgagcctcaagaggctttgcaaaattccattttcactcatgggattctg

SEQ ID NO: 248032 - DNA, 550 bp, Homo sapiens
attttctcctgagatttcattaaagatamgatattaggaagactgaaggctattgtgctggcttaccacatcatatacttccaaccatcagaagtgaatgacaatgcaataatgcaaaagaactcagctcttatcaaccacagaagcatttagaatttctgtgactgctctttgagtacaaacgattattactaaactttgtcaaactgggaagattaaaagatttttcagggttgtgtaagtgcaataccataaatactcaaccaagtagaaactgcttcagcaggttaaactaatgtggggaagacactagaaatatcagaattcagaaacactgactccaatgcattgtttttttcatatttcagaatctgctaaaagttgaaaaccagattaattgcggccatagaaaagccttctcatctgtcatttgaatgtgaaaagaaattacttgaaatgtagtgggcattctacatttcaagaaagaaagagggtcgatgaatgaaataagcagaaaaaggaacagcttagaatatgatatgtagagata

SEQ ID NO: 248033 - DNA, 424 bp, Homo sapiens
catgccatggtttggttaaaagcttcattacatgtatttatgaagagtcttatggatgaaataatttacaacatctattacatatattgaaatgtatgctactgcttccatttcttataatctgcggaacccaggtctgaaaccacttggtggaaaacgtttttaaattttattttggtaccaagtggcaataacaaaagttcaatgactggctgagtagcaatttggactgatttctaaatgtgggcacagcattaatgaaagacatttcttatttttgagataaagcaaacctacatgaaagagaaattacatcatytgggtactagtttcagtgaatgcctgacaatgggggagtcggaagagtggtgtaatgacggaatgctaaagctaggtgagttaggaagggttatttggagataag

SEQ ID NO: 248034 - DNA, 515 bp, Homo sapiens
gcttgttttatttgaaactctaaaatgggaggacattttcaaagacatgccattcaaacaaggataatgcatgttttatgtctataaacrtaacaaaagtggggaggaatttgtaggttgcttgttttggttgtggttgtatttttctttgttgaatgtatctccatcattttttaaaagagaatgtatttataaatatcacagctttgtcattttatatgtaatatatgggagttaatcagatcagcatgctttattttaaaaataaatattttaattcagaataatttgagattctagaaatgtcataaacatattttagagagttctttttgttcatttttccctaatgtgaatatgtcatataaccgttgtatatctgtcaatactaagaaattaacattcagttaattttaatcaatttttaaggtgaattacttttgaaaagtgatttactttacagtttttgtgtcatagatgcactgtgtgtcataagactactttgggaaatttat

SEQ ID NO: 248035 - DNA, 595 bp, Homo sapiens
tctttcctgctactttcagaccataacctttccctgtcacactcataaagctatggtattttctacctgttttcacatctattatcagaggacctcataatcactcttccaccttcactgtagatgtgagtatgtttcctagtccaccgttctgtctttgtatgtgccacacatagttaggatttaaacttccaagggcacagtctatccagtatcccagcctgaaaatcccctaatctactgtcactccatttacacaacctcacctgtatcactgtgtcaccttctccacagcattcagcagcctggttatacatgtgtagaaggcatgaggttggattgctgcagaaaggtactaaaggatttttagcattcttcatmatatcacgaattgaaagaccctcctttcactttcactctttttaatttttcatttataccactgaatagccataactctaaatcagaatttcaccattgtgtgttctaccttgggttgagtcttttagcacttacaaatttttattttaattagaaattattcattgataccacacatataatttaatttcacactcatataatttggattcac

SEQ ID NO: 248036 - DNA, 626 bp, Homo sapiens
ttttgacctggccttatgccaggtcattaggtgaagatttttctattataaatgcaaaacaaatttataataggaacagatttttctattataaatgcaaagacactctcttcttcaaatagaaattggagaagagagttatcacaattatttattttcatcaaaactgccctttttattctgaatgaattgaatattaaagttaaaactaatctcgataatctaggcaattatttcattactytctttactgctatcagctattttcatagttttaaaaataataaatcattatatatatatatatttttccttttccaaaaagacttatcagagaaaggagctgtttagaataccttactgctggagatcaaaactgggccattgattgtaaaacattagctttttctaaatgtgttttgatgttatttcaccaagaatccatctcattctgtagttatcctttgttttgctttcctaggtcagttaaccatgattgtgggccaagtaggatgtgggaagtcctctcttctccttgccatcctcggtgagatgcagacattggaaggaaaagttcactggagcaagtatgtatatttttagttggcttccattgctatgtcata

SEQ ID NO: 248037 - DNA, 521 bp, Homo sapiens
ttataatagtataaactagtatattgctgagacaaaagtaaggatgggattgtaaagataggtttttaaagttaaatgggtaacacttcaagaaataacttaaaagtttattctataacaaaataagttatggaaaatgtgcattatttataaggcttaaatagaaacagtgccttaaagtttcaatgttcagagaagaaatatcaaatgatcttttccaaaatctgtataagaaagtgaaaatcaactatttatccttatacttaaactagatactagaagcgtctagttggagatatgaatagstttgattagtgcaattctaaagacatggaaaagaaagtgcatcttccagacatttgaatgattgcttccagcatgatgtttcttctagatatttgaatggtggtcaaagcacattgtggtaataaagtgattcagaaatatgttacataattggttaataaagagtaaattatacttatttagtttggcctacttagtagactcctcgtaagtag

SEQ ID NO: 248038 - DNA, 536 bp, Homo sapiens
attggttcacaatgctagaagtgaatccaaactgtcccataaagctgggtttgggccccaatctactattatttgcaagatgtaatcttgttatgaatttaaacctttcctctaacgtccatgaataagagttggtaataactgtagtagaccctccaacactgcacaaaatgagatttttttccctttatttcttctaaaaaaaatggatacataygcagaacatgcaggtttgttacataggtatacgtgtgccatgatggtttgctgcacctattgacccaccctctaagttccctcccctcacccccaccccccaataggccctggtatgtgtaattcccctctctgtgctcatgtgttctcaacattcaattcccatttatgagtgagaacatgcggtgtttggttatctgttcctgtaatatttttatccatacctaccgtaagtgcatacagaagacccaagcctaccaatccagaattcgaagacccactaatggatgctatagatgcagtgaggacaatgcaagctc

SEQ ID NO: 248039 - DNA, 612 bp, Homo sapiens
agttcagttacattgtgggttaaatcaggttctaccggctattctggaaaaccaaccatttccccttttctgtggggaaatgtattctgaattctaaacaactaacccacacattttggaatctatggtaaattgggagcttcctgtatatgccaatacaaagaaaaaaaaacctacacagtttttctgttacatcaawaaaccaataaaccttttgtgattagtcgctaggtagtgaccttggttgattttttttggcctcatacaacatgtctgatttaggaaactttctattctagagggttgtactacttcagattcttggttaaaagagtgaaaacaaaaatgtctcctgaatcccatttttacagagagtttgaccccagttttaaattttgcataacgatatgaagaccaacatttataaatgaagctaaattaaactcaaaattaaagaggatccctgtcttgtgcatatcatataatgaaataaaataaaccttcataatgaaaagtagatttgattccagttcgattccccatgctgtgaccaaaaggtttaagaccttggagacttaaaaaaacaaataaacaaacaaaaaaacccaaaca

SEQ ID NO: 248040 - DNA, 564 bp, Homo sapiens
aaagttagagaagtttgaaattgtggttgggggcaaagatagaactaatattgtttctatgaagaagccacagcagtactygttgtgaaattaagtgttataaattgatagtaacaaatgtggtgcttcccatatgggagtaaatcagaatcccctgagaacttttcaaaagcatcttacccagatccaacctcagcctaccaaatcaatgtctattcactaagatagggagtagatgtgcaatttgaaaaagcttcccaagaaaatcctacaacttcttggttccttccctctgcttctttcacaggattaggccaaagtgagaaaattcaagttagtataatattaattacaggtataccttagagatattgcagttttggttccagaccattgcaataaagcaaatatcaaaataaagacagttacacaaaccttttgtttcccagtgcatataaaacatttatattatattgtaatctagtaagtgtgtaataccattatggctgaaaaatatacatatctcaattcaaaaaatattttaatgctaaaaaatgctaatgt

SEQ ID NO: 248041 - DNA, 537 bp, Homo sapiens
ttctctctgttgtcacaatcaattccagcaagcyttataccttctccaaatgacaagctgacgctagagtttatattcatgtactccttgcagattctagggaacacaagtaaaggcttgtcaaaaagtggcccaccctctccatctgagaggacctgtaagttctgcaagttaggaaacatccttcagagcatgtgatggcagtcttcatattttacagacacccctaagcttcatgaatgattctgttaaactggtctcatagagagtaggaggaaaaaccacagaacttcccaccaatctgatgctacttgactttaaccactatccctcatctcacagtcttcttgtacaagcacagaaagtgcaggaaggtttgagggctgtgaccagaggcaggttttgtcatctattataagtgctaaggggttcagggtaaagaggatataagttttccctcgcttaataggacatagtggtatgtaatactctttgaccccaggagtagagccctagttgccaattctgagaaaaatc

SEQ ID NO: 248042 - DNA, 537 bp, Homo sapiens
ttctctctgttgtcacaatcaattccagcaagccttataccttctccaaatgacaagctgacgctagagtttatattcatgtactccttgcagattctagggaacacaagtaaaggcttgtcaaaaagtggcccaccctctccatctgagaggacctgtaagttctgcaagttaggaaacatcyttcagagcatgtgatggcagtcttcatattttacagacacccctaagcttcatgaatgattctgttaaactggtctcatagagagtaggaggaaaaaccacagaacttcccaccaatctgatgctacttgactttaaccactatccctcatctcacagtcttcttgtacaagcacagaaagtgcaggaaggtttgagggctgtgaccagaggcaggttttgtcatctattataagtgctaaggggttcagggtaaagaggatataagttttccctcgcttaataggacatagtggtatgtaatactctttgaccccaggagtagagccctagttgccaattctgagaaaaatc

SEQ ID NO: 248043 - DNA, 614 bp, Homo sapiens
ttttgtttttattggatatctcaaactacctaattagttaggcagtaaacgtgtcattggccccagacagctgctattaagctattatcattggcatataggcataaattatatacttgaactgcatggatacagttcattaattgatgttttgagccatgataaatcagagagagagagactaggatagcaggggtaaattctgagttttaaaggaaaaagaagacagtggcaaaccagagaggacaggtctgaatggttttgcccttggtttggggaaagagaagtatattaagataggacacyaactttagctttttaacagttttagttaccgtcagccttcttgtcagtaagtgatttctgaagtcataagaaggtgaggagctcagctcattcctttagtccacagacaaccatcctctactcacatgatgctgccccctacttttcatcctctcagccttgaaaagctagtacaattccaagagaatatagaaagtcaaatttatggtgggtgacagcgttttcaagaaaaaatttatgcccttttaaaaatctgaagactacttaaaaggttggaagtgtcatgggaccactttgcaaattcatgc

SEQ ID NO: 248044 - DNA, 579 bp, Homo sapiens
ggtgcattctcgggtcaccacctcgttgatggtagaacggcctttcttctcaccaccctcttcgcaggagccattttaccgcacccaagttggaaaggctcaatttctttatgattataggataaatgattatttccgttttccttgagtcactctggtaagtttttttctttcccargaaatttgtggcagggcacagtgtctcatatctgtagtcccagcactttgggagactgaggcagatggatcccttgagcccaggagtttgagtccagcctgggcaacatggtgaaaccctatctctacaaaaaatacaaaaattttagctgagcgtggtggtacatgcctgtagtcccagctacccaggaggctgaagtaggaggattgcttgaccccaggagattgtaatgagccaagatcacactgttgcattccagcctgtgggacggagtgagactctgtctcaaaaaaataaaaaaaagaaagaaatttgtctgtctcgtctgcttcagatttataaatatttgcccataaggtattatgctttaaataactattactatttttgtacctcacatt

SEQ ID NO: 248045 - DNA, 579 bp, Homo sapiens
ggtgcattctcgggtcaccacctcgttgatggtagaacggcctttcttctcaccaccctcttcgcaggagccattttaccgcacccaagttggaaaggctcaatttctttatgattataggataaatgattatttccgttttccttgagtcactctggtaagtttttttctttcccaagaaatttgtggcagggcacagtgtctcatatctgtagtcccagcactttgggagactgaggcagatggatcccttgagcccaggwgtttgagtccagcctgggcaacatggtgaaaccctatctctacaaaaaatacaaaaattttagctgagcgtggtggtacatgcctgtagtcccagctacccaggaggctgaagtaggaggattgcttgaccccaggagattgtaatgagccaagatcacactgttgcattccagcctgtgggacggagtgagactctgtctcaaaaaaataaaaaaaagaaagaaatttgtctgtctcgtctgcttcagatttataaatatttgcccataaggtattatgctttaaataactattactatttttgtacctcacatt

SEQ ID NO: 248046 - DNA, 580 bp, Homo sapiens
ccaggctgcctaactgaagctgggttattttaatgtaaaccatcgtggtggtcaagcaaagcatcactccccctgccaygtagttttgacagtttgggcagatggagatggattgtgtaagggctagcagctgatagagagttcagaaggtccagggtgggccttgggtgacagcaggtataatagccacgaggctggccaatcctgggagcacaggttcctgcttatagacgagacaggtacaggggccccggggctgccacacttgggaagggaacacccgggttctctttgtggttctgtcagtgattagggtcttcagaaatctctgcgtctcagctgtctcgtgtgtaaacagctcctgactctcttgagctgcttaggaagctaaaaatactccaccttttagagaaagggcaccttgtaacttagggaattaattcccacatccttcctacactgactccttaagtcataattcagcaaagacgagcagggatttcctcctccctctccctactggttctctattacagatcggggatgtggagactggggaaaggcaggtctagcccccagc

SEQ ID NO: 248047 - DNA, 570 bp, Homo sapiens
gtaaggcagaattcctgatcatagagaaggtgaacgctcaagttaacttaccaactctcatatacccactagcagttcatgtatgttcctgttggctcagatgtagatgttcactaacattttgtattatcaatctttttattttttggcaacctcgtgggtgtttcctgttaacttattgggatctgagaagcttttcctaagtaccagttaggttgagcactttccatatccatcatttagatttcagctattgtgaagcacttgtttgagtctctcctattttttctttttgttgggttatttaaactttttttttcattttttaaaaagttattattattattattttttaagacagagtttcactcttgttgctcaggctggagtgcaatggtgtgatctcagcttgctgcaacctctgacccccakgttcaagcgattctcctgcctcagcctcccgagtagtagggattacaggcatgcgccactacgcccggctaattttgtatttttagtagagatggggtttctccatgttggtcgggctggtctcaaactcccgagctc

SEQ ID NO: 248048 - DNA, 497 bp, Homo sapiens
tgggtgaataatactccattgtaagggtatagcacattttatttacacattgatcttttagtggatatttaggctgcccactctttagctcttacgaataatactgctacgaacattggtgtccaaatatctgttagtccctgttcttcagttctttttgggtgtataggagtagaatggctgttagctttttggtgaactacaaaactgttaccacagcagctccaccattttgcatcgtgtcagcagtgcacaagagttatagyttctccacatcctggacaacatgtatttttccttttatttatttaattttttggatgagagccatccctagtgggtgtgaagtggtaatctcattgtggttttgatttgcatttcccaaatgatgttgaaaatcatttcatgtgcttgttggttgctgttttttttttgatcttctttggagaaatgtcagataggcacagtggctgaacacttataatcccagctatttg

SEQ ID NO: 248049 - DNA, 595 bp, Homo sapiens
agaacaaaaagtgtgggaaaaattgctgaggagaactcaagaaagcaatttctaggcttacccytaggctgcatatgcatggatctgacgctattccgtaccaaaggtttccaaattggaactaacggagagaccactatgcaggtctcagatcagcacatacatgaaacagatggaaacagcactacaaaactctaaacaatatactgacattaaagccacagcccacagaacctgtataccaaacttggcaacacaacaaaacacttttgctctgggaataactgtttagaaaatgaaaagacaagctacagaatgggagaaaataattgcaaatcacctatttggcaaagaacttacatacccagaatatataaagaactctcaaaactcagttgtcagaaaacaaaccacccaatttaaaaatgagcaaaaaatctcaacagacactttactaaagaagatatacatactggtgtcccacatttccgtgagaagcctttgctacatactgtccagtcaaagatgtttgtatattgaacatccttacaagagaaagatgatagctccttccacagcagaagacaatttgtta

SEQ ID NO: 248050 - DNA, 605 bp, Homo sapiens
ccaaacttggcaacacaacaaaacacttttgctctgggaataactgtttagaaaatgaaaagacaagctacagaatgggagaaaataattgcaaatcacctatttggcaaagaacttacatacccagaatatataaagaactctcaaaactcagttgtcagaaaacaaaccacccaatttaaaaatgagcaaaaaatctcaacagacactttactaaagaagatatacatactggtgtcccacatttccgtgagaagcctttgctacatactgtccagtcaaagatgtttgtatattgaacatccttacaagagaaagatgatagctccttccacagcagaagacaatttgttaactgtccagtacagtaaatataatgtctcccttcatatcaaaggtttgagacatttgtttgccaccccttatgagatctgagttccctgagcttggatttcctacttgtgtcgttgcccacagggaayttacagggcaaaggtagtccacgtggacatgaagctggttctgctgatgtcctgtgacctgtgtcctcctcttttgcctccaacccaggagtttcatgtcttgggccaatatccatgaaacca

SEQ ID NO: 248051 - DNA, 520 bp, Homo sapiens
tggctgggttttcttcggcctcccaaagggctgggactacagatgtgagccactgygcctggccccaagtggctttaaacaacaatctaaacctctaagagcaagaattttgtggcagattgtatttttcaaagttgatcccaatacattccaccccacatgttcttcttcaaatgtgacataggacctatgtttctactcctgagtctcattctgtgactacttgaccaatagtaactggtagcttccaattgtagtctcacgggatgcttgtgcttgttctttaaacccaggctccatgcagtgaggaagcccagtcagccccatggacaggcctatgtagagaggaaggaaccatcggcaccaaaatgttggcatgtacataagccctctccaggatgctccagccccagttgagccaccccagtttatgtcatacatcaaaaatatgagctgaccctgctgaaacctgtccaaaatacagacagatgagtaaaattaccaatcattgttgttttaa

SEQ ID NO: 248052 - DNA, 520 bp, Homo sapiens
tggctgggttttcttcggcctcccaaagggctgggactacagatgtgagccactgtgcctggccccaagtggctttaaacaacaatctaaacctctaagagcaagaattttgtggcagattgtatttttcaaagttgatcccaatacattccaccccacatgttcttcttcaaatgtgacataggacctatgtttctactcctgagtctcattctgtgactacttgaccaatagwaactggtagcttccaattgtagtctcacgggatgcttgtgcttgttctttaaacccaggctccatgcagtgaggaagcccagtcagccccatggacaggcctatgtagagaggaaggaaccatcggcaccaaaatgttggcatgtacataagccctctccaggatgctccagccccagttgagccaccccagtttatgtcatacatcaaaaatatgagctgaccctgctgaaacctgtccaaaatacagacagatgagtaaaattaccaatcattgttgttttaa

SEQ ID NO: 248053 - DNA, 578 bp, Homo sapiens
gctcttgaacagtgactaagccttctcctgctcccacccaagaagctattctttggagaaaagcagaaggcagaaggacagatcaggtctggctgtttttccacttagtatctcttaatccaaaatcccaaatctccctgtttggctagcagggacattgtggaagactatcacttggggtgtccaatcaycacttatggttttcaaataagtagccatgagctactatttgaagtcatgaggttcattatttggtctgtctaagcccacacatcctgccctcacccccacccaaacccaaccccaagcaggcaaagtcagttgaagaccattccacaaatctccaacatgctcttgaagggcaacgccgtaatgcctaggatccactgtgtaagtggcagaaagactagcaggcagcagtgacttgttgacatgatacttcacctgatttcattcaatctgggctttcagagacaggcagaatcaaaggaaatgactgagaaaaagcattccgagttctggagatgttaatgagcatagcaattagcataaaggcaattttgacatgtgtggaagtt

SEQ ID NO: 248054 - DNA, 596 bp, Homo sapiens
cagcttcctcgctgcccctgcactagttgcatgagtttggacaagtcgctaaacccctctgtgcctcagtttctccatctgtgacctgagatcaataacagtaatatctaactcacagggtgactatgaagactaaagaagatcatacatatataggaatcagcagaatgtctggcaaagactaagtgtttcataaacattaaccatgatttatttattattaaggagccacaagtcaggatcccaactctcagattctggtttcagttttaatccctttggctggtctctcttcctctctaggcctgtattttactgtctgtaaaaggaaatgttttgaaataaaccagcggttcttctccaggcacagagacaggaggcatgtccatctggggtagaggtgacttttcagactataatgttctaggccacccagtcatcccttggagatcctgatatgcccctcgagcgatgggaacctccaggttaagattcactgtstctgaccagagacggtcctgatgggagtcattgtgcagggaaatggtttggaaacagacacatgaaaaagcttgaaaatctaccatgtgatctgg

SEQ ID NO: 248055 - DNA, 559 bp, Homo sapiens
ggcaactatctctcgcagccccaggtggccacaggatgggcctagcaggaggggccttggctttgtccagacagggtgggcacccagtggcagtgaatctggcaggatgaagggaggccagcaggtggggtgaaagggagagcccggagtcctagggttggyggtgcaggtcagggcctgagaccaggtaaacagaggaggccaaagggccctgcctagaaacctccagagagcttctgcaatttcagaagaaacccaaacccaccagctataagccaaggagcatggctggaaagatccctgagagcacagctctgctcccagcttgggggagaccctggtttctccacctgctgaactcaggtgggaataccaaccccgaggctggccccagcagggtgcatgatcaatgcctttctggcttcttcttctttgatttccttttcttgtctctctcctctatctccatgtgttgctcccatcactggttgaatagccatggcctcaccctttcaaaagaaaccactgagcaactgcctgcattctctaaatgtctccc

SEQ ID NO: 248056 - DNA, 564 bp, Homo sapiens
gaaagaaagtccaggaacaagggtcaccaaaatcattttgggtcctcattcctgctgatcccacgtggtccagaaccacatccaaactttctatatcagttagggttattgtcatggaccacagaaaccaactctgggtaacttaaaccatagggactttattagaaggaygtcaggagcctcacataaaggagagtgactagggaatgagccatgggagctccaagtctcaggacataggcggcaggacacacaatggctccctcagcagaggcagcctggtctgggttgcccgccccagcagtgcccaccagaatctgcagcccttcccactcaccctcacccactcgctcaggggccgtactcaaagtcctgggagacagcacctaattccatgttccccacagtactggggtgggacagggaagagccagctcacaagtgtccaaagtggaaggtttttatctggatttccaccaagaccatgcatttagggaaatggaactccccagtgggaaactgggttgttattaggaaggggagatggatccgggcaggcaaaaa

SEQ ID NO: 248057 - DNA, 512 bp, Homo sapiens
cttgggaatgtccgtgaagtctcctttcaagtacatccactgcctttcgggaagaagagggatctctacgcagtcaggagactggaccgggatcctgtccttaaaactgttttggaagaggagaaaaatactgtcagaaaacatctgttgtccattggctacacagatagycacatcaatggtcaaataagtatctatttagttgaatgaagcccattaaaaagcaataaacactttagtgacttcatttatcaacttaatactatctcgtgatgtttcttgctttacagctaatcgaacttctcatgcattgtgccactggatttgattcaaacacttacttagtgaggtctgctctgtgccagcctctgtcctaagagctggagaaacagtaactaaaatcctgtatctgccctcaagatatagtggtggcaagaaataggtgacaagcacattacaatatacagtacaataagtacaaatagggaccaaggatactgaggacacaaaga

SEQ ID NO: 248058 - DNA, 512 bp, Homo sapiens
cttgggaatgtccgtgaagtctcctttcaagtacatccactgcctttcgggaagaagagggatctctacgcagtcaggagactggaccgggatcctgtccttaaaactgttttggaagaggagaaaaatactgtcagaaaacatctgttgtccattggctacacagatagccacatcaatggtcaaataagtatctatttagttgaatgaagcccattaaaaagcaatwaacactttagtgacttcatttatcaacttaatactatctcgtgatgtttcttgctttacagctaatcgaacttctcatgcattgtgccactggatttgattcaaacacttacttagtgaggtctgctctgtgccagcctctgtcctaagagctggagaaacagtaactaaaatcctgtatctgccctcaagatatagtggtggcaagaaataggtgacaagcacattacaatatacagtacaataagtacaaatagggaccaaggatactgaggacacaaaga

SEQ ID NO: 248059 - DNA, 528 bp, Homo sapiens
aggtaaagtttcttgtagggaacagatcgttgggtcttgtttttccatccattcagccactctctatcttttgattggagagtttaatccatttccattcattgctattattaataagtaggaacttactcctgacagaytgattttttccaaaggtcataccacccaattacattctcattatgaagtctacggaattgtccaagtcacaacagtgctcaccagtgagttcgacactcagcctccatgctctgtgggctacatgttaggcttctcaccccatgttcttaaaaagcattgaacatgttcataaacttgaggtgtaatttaattggcaaaagctaagatacttaggctcccaataagtgatcaataaaattaattagcactcatcttcagatgtaaatcaaggtttacaattttttgaagtccctgtagccttatcttacacagaatcacatgccttcttctggatgattttcacttaggcattgtgaattaccttgtatataaaaataacagcacaat

SEQ ID NO: 248060 - DNA, 528 bp, Homo sapiens
aggtaaagtttcttgtagggaacagatcgttgggtcttgtttttccatccattcagccactctctatcttttgattggagagtttaatccatttccattcattgctattattaataagtaggaacttactcctgacagactgattttttccaaaggtcataccacccaattacattctcattatgaagtctacggaattgtccaagtcacaacagtgctcaccagtgagttcgacactcagcctccatgctctgtgggctacatgttaggcttctcaccccatgttcttaaaaagcattgaacatgttcataaacttgaggtgtaatttaattggcaaaagctaagatacttaggctcccaataagtgatcaataaaattaattagcactcatcttcagatgtaaatcaaggtttacaattttttgaagtccctgtagccttatcttacacagaatcacatgccttcttctggatgattttcacttaggcattgtgaatyaccttgtatataaaaataacagcacaat

SEQ ID NO: 248061 - DNA, 532 bp, Homo sapiens
tgtctatttatccttgtagtgctttcagtttttgcttcatgtcctttaaactcagttattacatgcatatttaagattgtcattttcttttgattaatttattgttttaaatgaccttctttaccctsgtagtatgctttgctttgaaagcttccttgtctgttattaacagagccactctagctttcttttgactagtgcaagcatgatgtatcttttttcatctttttatgtttaacctacttttgtctttaaatatgtgtttctgtaggcgatagagttagatcttacattgtatctaattcaacaacttctgcatttttattactgtgtttagataacttacatgtaatgtatgaatatagttaattctaagtcgaccatctttctatatttatcccatctgttctttatttcctttttcttgtttttgccttgctttagattatttgtctatgattctgttatttctttcataggtttattatgcataatgcttataattgctattatcttagtcatcgctttggat

SEQ ID NO: 248062 - DNA, 427 bp, Homo sapiens
agaagacataacaattataaacatatgtgcatctaacagtacagctccaaaatacatgaaacaaattctgataaaattaaggggatagacaataaaaataactggagacatcaatatcccacattccttaatagataaagctatyagaactaacaaattagtgcagcccatttgcagggtagaatatcagtacaccataatcaattgtattttgcatatgaattctatgatttaaacgtttgtgtttccccaaattcatatgttgaaattctaacccccaaggtaatggtattaagggatggggtccttggaaggtgattaggtcatgagggtggagcccatatagagtagcctcagaaagcttccctggcccttccaccatgtaaggatgcagtgagaagacaaatgcctgcctatgaggaaatga

SEQ ID NO: 248063 - DNA, 657 bp, Homo sapiens
tgaccaaattgctttctcaatggtactgatatgactattaagggactcagcatggtggaactagagggccaaatggctctcaaagtaaattaatatactctattctattgcttcctgctagccatttgctagaacatttattcactaatttgccctctcattcttcatcatgtcattcaattgtttacaagcatgtactgaaaatctgtcctgcttcatttggaaagatctctggaaaaaatgcaggaaactgcaaggcaagtcccagaggttattctttttaacctcttcataccttagttagtttatttatttatatttatttatttatttatttacttagagatggagtctcactctgtcgcccaggctggagtgcagtggtgtgatcttggctcactgcaacctccgcctccygggttcaagcgattctcctgcctcagcctcctgagtagatgggattacaggtgcgcgatgccatgcttggctaatttttgtatgttttttagtagagacagggtttcaccacgttggtcaggctggtctcgaactcctgacctcgtgatctgcctgcatcggcctcccaaagtgctgggattacaggtgtgagccaccacacccagcaaccttagtttattttaaagcataattggaatg

SEQ ID NO: 248064 - DNA, 619 bp, Homo sapiens
gccatgtgccctgtccatgaactgaatgtagttcctattatccaaacacgactcattgacaagggactaacccagtgcttctctgggaagagctactacaaatagatcaagtcaaaagaaaaaggaaacaaaagaccatgacattcaaaactaatctataatggcttttaagcacagaaygggccagtgacagcttgctaacatgggaaccattcgctataaacaccacacgtggtctactggggctccatagccttgccttgaccatgcatccactttgtgatcacggctgagttggtcagactctctgagcatgtttctccctctgtaacacacgagtgtaaatctctaacttgcaggatggttaggaggggtcaacaagaggtcatgcagccaacagcacagagaagagtgcccagcacatggtgagcggcacatgagtgtggctcgttacagcactagagctgagccacatacagtgtgatagctgcctgaccacaggggaaaggccgtgtgtgaaggggacttctctgacttggcatgggcatcaccgaagagaaggtgatgactgactcgctttctctagaagacggaaaataaaatgcattgggagagcagc

SEQ ID NO: 248065 - DNA, 619 bp, Homo sapiens
gccatgtgccctgtccatgaactgaatgtagttcctattatccaaacacgactcattgacaagggactaacccagtgcttctctgggaagagctactacaaatagatcaagtcaaaagaaaaaggaaacaaaagaccatgacattcaaaactaatctataatggcttttaagcacagaacgggccagtgacagcttgctaacatgggaaccattcgctataaacaccacacgtggtctactggggctccatagccttgccttgaccaygcatccactttgtgatcacggctgagttggtcagactctctgagcatgtttctccctctgtaacacacgagtgtaaatctctaacttgcaggatggttaggaggggtcaacaagaggtcatgcagccaacagcacagagaagagtgcccagcacatggtgagcggcacatgagtgtggctcgttacagcactagagctgagccacatacagtgtgatagctgcctgaccacaggggaaaggccgtgtgtgaaggggacttctctgacttggcatgggcatcaccgaagagaaggtgatgactgactcgctttctctagaagacggaaaataaaatgcattgggagagcagc

SEQ ID NO: 248066 - DNA, 619 bp, Homo sapiens
gccatgtgccctgtccatgaactgaatgtagttcctattatccaaacacgactcattgacaagggactaacccagtgcttctctgggaagagctactacaaatagatcaagtcaaaagaaaaaggaaacaaaagaccatgacattcaaaactaatctataatggcttttaagcacagaacgggccagtgacagcttgctaacatgggaaccattcgctataaacaccacacgtggtctactggggctccatagccttgccttgaccatgcatccactttgtgaycacggctgagttggtcagactctctgagcatgtttctccctctgtaacacacgagtgtaaatctctaacttgcaggatggttaggaggggtcaacaagaggtcatgcagccaacagcacagagaagagtgcccagcacatggtgagcggcacatgagtgtggctcgttacagcactagagctgagccacatacagtgtgatagctgcctgaccacaggggaaaggccgtgtgtgaaggggacttctctgacttggcatgggcatcaccgaagagaaggtgatgactgactcgctttctctagaagacggaaaataaaatgcattgggagagcagc

SEQ ID NO: 248067 - DNA, 546 bp, Homo sapiens
tataagctgcaacagagacaactgaagatgaaaaattacaattcccatatataacttatatataatttgtgctgtgcgccaaggagaacctgctttaaatttccatgccaatttacaacccccatactgtaccagacaaagtacagttttagccacattttcaatagtggctattgaaaatgccaccaggacagggttatctaaagacatgttcagtagtgtgtttaccatacaaaaaatgacacggtatagtttaaaaataaatcttacacagacttacatttcaattgtttttctttgaaaggaatgagttgtgtacaaggggcttaaatgctttatagayaagaaaaaaaactgcactaaaacaaacttattcagcatcatcatcttcttcatcttcatcctcctccttctcctcatcctcttcatcttcctcctcttccctctatttatttatttatttatttatttatttatttattgagacagagtcttgctctgtcgcccaggctccagtgcaatggtgcgatcttggctcattgcaac

SEQ ID NO: 248068 - DNA, 564 bp, Homo sapiens
aattcatatagaaatgtgtggataggccaggcattgtggctcacacctgtaatcttaattcactgggaggctgagacaggaagtttgcttgagcccaagagttcgagaccagcctgggcaacacagtgggaccctgtctctaccaaaaaaaaaaacaaaacacacacaaaaattagctaggcatggtggcacacaactggggtcccaagtacttggaagggtgaggtcggaagatagctcatgcctgggaggtcaaggctgcagtgagccttggttagaccactgtgctccagcctggacaacaacgcaagaccctgtctcaaaaaaaaaaaaaaaaattgcccacaggcacgactgaggggcctaaccacactcccacactcatatctctgtgagcctcattaatttcgcagacctcacaaagctcagactgctctgagccacctttctttgttcaccctgattagtttgccttgggctttaatcctcataaactgcctaaatacccaacactgtacatacaatggtttttgtcaatagtytttgtagaagccactttctctg

SEQ ID NO: 248069 - DNA, 572 bp, Homo sapiens
acctacctcataagatctgttgtgaagattgagataattcatacaaggtacttagcatattgcccaacatgtaaatgctcaataaatgttagctattttttaatttaaaagaaaaaagactacaaagagcagtggaaattatgaagctgaaaacacaaggcttttgaaaaygtcattgtgtacacaggacatttttccccatattactgaatctggcctctcttggacttcaaggattcatagtttggtaaccctccagctcattaaacacactctcattggcaggaaaaataaaattacaattagataaataaagcacttaactgtaaaaaggagatggcaatctttttgcctggaacgctaccctaagaacttcacgaaccatcctaaggcactacgcatctgtcacaacacttcaaatgagaattacttgggccctggacatctccctaacgctggaggagatgccacaggacatacaaattggagagggaagccacaattcttctcgaggccagcccaagtgggaagtccattcctaaacatagaaatgctactcccaactctgagaa

SEQ ID NO: 248070 - DNA, 572 bp, Homo sapiens
acctacctcataagatctgttgtgaagattgagataattcatacaaggtacttagcatattgcccaacatgtaaatgctcaataaatgttagctattttttaatttaaaagaaaaaagactacaaagagcagtggaaattatgaagctgaaaacacaaggcttttgaaaacgtcattgtgtacacaggacatttttccccatattactgaatctggcctctcttggacttcaaggattcatagtttggtaaccctccagctcattaaacacactctcattggcaggaaaaataaaattacaattagataaataaagcacttaactgyaaaaaggagatggcaatctttttgcctggaacgctaccctaagaacttcacgaaccatcctaaggcactacgcatctgtcacaacacttcaaatgagaattacttgggccctggacatctccctaacgctggaggagatgccacaggacatacaaattggagagggaagccacaattcttctcgaggccagcccaagtgggaagtccattcctaaacatagaaatgctactcccaactctgagaa

SEQ ID NO: 248071 - DNA, 409 bp, Homo sapiens
taatggaaactaactgaaatggaaatgattcttaraatctctatagtgtagattacattatgttaatactttgaaccatgtaggctgggaagtatcattggtcttggttatgttttccctatctagaccatgataagctgttctatattggccaactatgatggtatcctatactttgcttacccagcctgcaaaactataggagtctcatctcagacagaggtcaagaatactatgggacttcataccttgggtggtctagaaccaaatattgatacatagagaactgggccctagagtgggggtgacacaagagacaggctggttccaaattatcagggatatgtatttatggtatgggacccctttagtgaaagggaaggccttcttacatctctcctgggaattg

SEQ ID NO: 248072 - DNA, 589 bp, Homo sapiens
atgtgtacaaattatgtttactaacataaatgaggaataatgaaaactgattgatatttcaaaattcagctgcatcattagagatccttaatattgcatcccttctcctaattactgtgatatgcctgtcagatcagggttaggattcagggagagcagctccaggctggggcaggacagggggtttgtaaatctcttgtggtaccatatatggagcaaactgagacttgaaaaatacttgtgtcttargctttagaattatgactgccctctgaagaagcccatacgagcttcctggaagatgacagacatgtggcctaatcatccctgttacctcagctcagctgataagccagccaaccgccagtcatgacggtgaggccatcccagatcatcctgtggccagtcacccctccaggtggccacacatgggaaactgaaatcagctgagctgactcagaacaggagaaccacccacccgaccagatcatcagacatgtaaaagcaaaagcagatacctaatgaaaacaaaaaatctctctcatcaggtatgtagagtcatgcatcagttaacattgtgaatagcctt

SEQ ID NO: 248073 - DNA, 469 bp, Homo sapiens
aatcatataaaccatatatgaaacatgatagaggttttctcaaatttgacaaatctgttcaaaatgctgcaaaaccaaaagaaagtttttttaagctatagaaacaaaacagccaggcatggtggctaacccctataatcctatcactttgggaggtcgaggcaagaaaatcactttagctggggagcttgagaccagcctgggcaacagagtgagaccttgtctctattaaaargggaaaaaaaagaggcagggcacggtggctcatgcctgtaatcccagcaatttgggaggccgaggtgggaggatcacctgaggtcaggagttgagaccagcctggtcaacatggtgaaactccatctctactaaaaatacaaaaattacctgggcatggtggcaggtgcctgtaatcccagctactcaggaggctgaggcaggagaatcacttgaacctgggaggtggagattg

SEQ ID NO: 248074 - DNA, 565 bp, Homo sapiens
tgtctgtctacttccttgccagccaggctgttttcctgttttttcttttttgttcatccaataaaatgtgcttcaactgcaaaatctctgtgaccttgcctaaagtgagctaaaattctacgagtttacttttattttgcccaaaatttatcttgctaagttaacttttctaggtaatttgttgagagctcattctatggtatacatgtagaaagctaacttaatcaggcttcatgataaccagaaagtctaaaccataaygcacagcagacattccagtttaaaactctttgcctttgtgctatattaaaatgtgccttgaaacaggcatgatgccatatgatgaataacatatggtacatgacagtccctattcatatggaaaatatgttaatgatatcctatataggaagtaaaagtggaaccagatttatttttctatataggttgatctggtctcagcaactaaaaatacttattttcaatgtcacagtggaaatgagatggaggctgaatagagatggctggtatgtgaggtcacttacaaaataatctaccagataaa

SEQ ID NO: 248075 - DNA, 520 bp, Homo sapiens
aagtatactctatgatgtttgtacaacaacaaaattgcctagcaacacatttctcagaacataatccccatcattaaatgatgcatgactgtacatgrtaggttttctttttcttctttttttctggcaataaggaaggaaaagatacacctggtacgttttctagcatgctagaattttggttggactttgaagactgggtagactttgagccagtggagtggaagagggaaagcagtggtgtgctggagctggctcacactgtctcccgagagctgattgttacattctcagaaatattgtgaggcagttgttaaatgtggcggttactgaaaattaaattatagaaatttacaatgaataaattctatcttaaaaggcagcaaatatgcagccataaaaaaaagaatgagttcatgtcctttgcagggacatggatgaagctggaaaccatcattctcagcaaactaacacaagaccagaaaaccatacactgcatgttctcactcataagtgggag

SEQ ID NO: 248076 - DNA, 487 bp, Homo sapiens
attttcagaacccaaaccaggaaattcccagacaaactaggaggagtgratcacaccgcgtagagggcaggagaaatgagatgaggctacagctggaattgctaaagaagcagtcattcatactagccaggatttgctcatttttgtggtttgggcaatgttcattattttgtctagattctgacatgattacaacgtggtcttgtcactctcttggttcatcatggtgacagagtggccttgtctaatttcgatgttgttggtgctcagtagaaaaccagattccgcctctgagtagcaggctaacttccggaaaagcaaggcattctcatgttgccagcctagtttctaactgtcaggggctgcttttcttttttccagttcccttcttggggggtttcagggctgcttttgggtgggcatgagtttatagatgtgaccttctcatttcaagagttttaattttagccacattggttctgtgcca

SEQ ID NO: 248077 - DNA, 632 bp, Homo sapiens
  misc_feature (1)...(632): n = A,T,C or G
tataaggaaacccaatttatttgatatagacacttatttccatagaatgcattaacattttggtaagtactagtatttcactattaaaccagtatttcctagaaataaatactagtctaatttatttagtgattgtcccataattgtgctttctgttttttttttaaattagaaatatgtaaggggcraataactattctgatttaaattgttctgacttaaaataaatgtccttaataaccgtcatggaaaacaaatggttttatgttttacagatctactgttttaatattatcagaaaatatatatggcgactggattctattttttggaaaacacttaactattagatgaacatagtattacatatctgatttagtttagtcataaagattataaaactatttaaattgtgaagtattatttttaattattaacattggttcaattatttcagctatcttaaactcagttcgatcttccgtatattaaattggatgtttagcaaatcagtctttataccaatggaggaaatactgtggctttagttatatatataatctacattcataaaattttctctagattctgaagacttanctttttgagggtcaacattccaacagacctac

SEQ ID NO: 248078 - DNA, 563 bp, Homo sapiens
atgtttttatatatgtgtgcatatgcctatatatgtttgtgtatgtacataaaatttctgtttcactaactatgaagtcaaaatttggactttttaaaggggacttttctttaaatttcaccttagttgtcctgttgtaagtttgttttcttaaatatttatatgtaaaaattttaataattggtagtatgtcagaaaatggaggacttccatgttgctagagacagctatcaccctattaccagagagcacagcttggatagcttctaaaaggaaaactgaagataaaattatagctgatgtattatatgccatcygctaaatgtctatctcctactttaatgagatattactcttccttgtgagtaacatttttacacttctgaaagaagaaatattgtgagaccgctcattcctctgggaaaatatatacatgtactggatgagacggaacagagaggtgctcttttcaacaaaccaacctctcacagatagattaaaaacaaaacaatagattttgtgcatgggtaaaaattacagactaaaactaaatttatctttag

SEQ ID NO: 248079 - DNA, 553 bp, Homo sapiens
  misc_feature (1)...(553): n = A,T,C or G
nnnnnnnggtcaatcagctcggtacctagttggttgccttaactacagaaccattagaagaaagaacgttaacaatgtttttatactgtctatttaagagagaamggaggaataatatatccacatggtcacatttccctttgattaaaagtttacccatgggacattaagtcacctccacttaaaaggtgtacattcattggcactgttttcatcagggatgtctgaactatggtaatctgtgtgggagcatcattcagagaagagagaggagaaaaatgcactagtagctccctttcttgagctccaatctcctgccattgtctttcattgtctaaacccaactagaagccagctgcatcaggggacttggaaatagagtctacaagtgtcctttactgcagagaaaggagaggaaatggctctcagagccagccggccaggaacagacacatcaggcatggtggtatgaggaaaagtgcagggtggcgacttctgagaatctgtcctggcggcctccaattcagcctcctgctctgtatgctgtgctgtc

SEQ ID NO: 248080 - DNA, 486 bp, Homo sapiens
gctttcatgggctgatgttgagtgtctgtggcttttccaggtgcatggtgcaagctgtcagtggatctaccattctggggtctgcatgatggtggccatcttctcacagctccgccaggcagtgccccagtggggattctgtgtaagggatccaaccccacattttcctttcacactgccctggcagacattctccctgagggggtctgccactgccgcaaacttctgcctggatatctgggcatttccatacatcctctgaaatctaggcggaggttcccaaacctcaattcttgatttctgtgcacccacaggctcaacaccatgtggaagctgccaaggctttgggcttgcaccctctgaagtgacagcctgagctctatgttggctccttttagccacagctggagctgaagcagctgggacacagggcatcatgtcctgaggctgcatagagcagggggtygctggggccaacccaggaaa

SEQ ID NO: 248081 - DNA, 510 bp, Homo sapiens
gtatggcctatagatatggtcagtatttatacagatgttattatgacatggggcatagccttgaggtaagtcagggaaaggttactgctgtttctaccaagtgactgcaaactgattattatctttattcattgcaattataaagaaaataatgacttgatcaatatccgtttatagtttacataggctagttgatttgctccagtaaatatatcatctgtggaatagcagttatatgaatacctggttatrtttatgaaaatcagcagttattttacaagaccctttggcttttgtactggcaaactagagagtaaagcagagttgtgaagaaataaccaccattatatcttcatctcccaagtctttgttgatggcaataatctgtaattccttcaggaatgtagtacagtagtcccccttctctgtggttttgcttcctgtggttttagttatccgtggtcagccatggtccaaaaatagtaatatattttgaaaggaagagaaaga

SEQ ID NO: 248082 - DNA, 504 bp, Homo sapiens
tgtgcctatcacataataaatgcttagtgaatgttacccatcactattatcttctcaagcttcatytttattatttctagaaaaacttttagccatgatccataccttactcaacaacaaagacctcataatggagaaagacattcatttaaatgaatgtagggaaaatttgattgacattctttccttgttgaataagaatatttgctgccaggcacagtggctcacacctgtaatttcagcactttgggaggccaaggtgggtggatcacttgaggccaggagcctagccaacatggtgaaaccccatctctattaaaaatacaaaaattagccaggcatggtggcgtgtgcctgtagttccagctactcgggagtctgaggcataaggattgcttgaacctgtggaggttgcagtgaaccaagattgcaccactgaactccaacctgggtgacagagcaaggctctgtctcagaacaaaataaaaataaataaataaaaaa

SEQ ID NO: 248083 - DNA, 569 bp, Homo sapiens
ctaaaatagaaagtcatttttcaaggtacagctgataacgtatctagagaacacagaacagcctgttttctttgagcatttatgattaaaggattgaattcaggtcttttagtgtattatatatactaaggacagagggcactacttagtcatgtacttgaagcaaaaagtaaagtctttataaagatctcagagggaggctgactgacattatatatttgcgcatttattttttttatcagaagaaatgaaatgaacaaactttcagtaataggataatgtaatgaaaaatattttgttgactatctattgttccaaatacttgcttatgggtttatctggagaatattagtagtgggtatcaagaataaactgttaaacacaaastatttgttctggaatgttcttagaaaaaataggtgtgcatgcatatatatatgtatacacatcacatatatacatattcatgtatttattcatatataaatgtataatcaatttggaaccttatatagagttttttttagtttcccaaaaagcaatagaaaataatataaaacctgcagatt

SEQ ID NO: 248084 - DNA, 524 bp, Homo sapiens
tatagctccagctgattctttaattattctaccaatgtcttttagcactccttccacctccattcaacattggagaaaatccttcttttttcatataaattataatcaacaaaacaggttttaattctctttacttaaatatttttggagaccaaggatatgcattatgtaaaatacataaaattataatgaggcaatgaaatatattcattaacagcatgggctttggaatcatgaatcctgatatatctaaatattatctcttctgatctcaatcatattactaaactacttcaattttctaatatgtaatatggagataatattactacatgtctttccagaaatgacatttggtttacatgagataatactggttcagcwtttaatacaatctgtttggaggtgttttgtcatttttgttatcacgtatgatgtggtttggctctgtctccccacccaaatttcatgttgaattgtaatctccacatgttgaaggtagggcctggtgggagatgactgaa

SEQ ID NO: 248085 - DNA, 583 bp, Homo sapiens
acatgagatttaggaggggccagcagggaatgatatagtttggatttgtgtccccacccaaagctcatgtcaaattacatgaggggcctgctgggaggtgactggatcatgggggtggatttccctcttgctgttcttgtgatagtgagtgagttctcatgagatctggatggtttaaaagtgtgtggcactacttcccccttcagtctctttcctgccagcatgtgaagaaggtgcttgcttccccttcaccttccaccatgattgtaagtttcctgaggccccccgagttatgcatcccgttaaccctgcagagctatgagtcaattaaacctcataattaaamcttcgtaaagtaatcagtcgcaggtagtcctttatatcagtgtgagaacagattaatacaacacataaaatgttttaactactctctctaatatttaatattatgtaattatttatacttactcaatttaatctctcctcacaagtgaaaggaagccttgtctattattatctattctggcaaaatttgggcctgaaatatgtaatattaattacttcctattgggctattccccca

SEQ ID NO: 248086 - DNA, 571 bp, Homo sapiens
aaataaactggactatggagtgacaagggtggaagcaggagaacagttaggagggtttcgtatgtatatttctctgtgtgtaactactggtactactttccagataaaaaaggggattagtgatacttcatttaccaaagtgattccaggcggatcatgtcatgttaacattttaaaggtgttattttattgtaaaaacacgtttaaaaaagtttaaggcaaaaaatcatctacaataaaatcgcctaatcaaataaatgtttttgtcaatctttctcccaaccatttcatgtatttatgtcaattaccatatatgcagtaattttgtagatagaattacataatctatactttyaccttcacatttaacatttcatcacgtgtatcttcctactctaagtgtttggttttcctagctctctatatttcttattttctaactgctttcctcttcctccaaataaccacatgatatttccatatctttcttgatacataaacatttcctctttgaaatattctactctctaaaaatgttgttttgccttcataaaatatgtgtgattctttc

SEQ ID NO: 248087 - DNA, 586 bp, Homo sapiens
cagctgttttttcagagagtcctggtttcttttaatgaagtatgagatttagaaaccattttctgagtgctaggtgtgctcattataattagttgcattattggaggctttctctatctattggaagagctaaaaaatttgtgtatgtattcaaatacamtatccatctatctatctatctatctatctatctatctatctatctgtctaccatctatctgtctatcatgagttcacattccaattcaccaccttaggcctctttctcctttccccttgtaaaactattcttcattaataagaaacctgactctttttattcataatatgtttatgtatttgtttaacctctctgtagctaaccagcttctagttgtatctgcctaaaactgacccaccattaaaatgaaggggaaggaagaggcaagaaaaaggaaaaaagaatagttagaaagctgggtcctggacatgccacattctccctcccaccaccactttccataaagaaggtggtaaaggagaaggggtaactcttttgttatggcagttagcatagtacgttacacatagcagacactcaatatgt

SEQ ID NO: 248088 - DNA, 586 bp, Homo sapiens
cagctgttttttcagagagtcctggtttcttttaatgaagtatgagatttagaaaccattttctgagtgctaggtgtgctcattataattagttgcattattggaggctttctctatctattggaagagctaaaaaatttgtgtatgtattcaaatacactatcyatctatctatctatctatctatctatctatctatctatctgtctaccatctatctgtctatcatgagttcacattccaattcaccaccttaggcctctttctcctttccccttgtaaaactattcttcattaataagaaacctgactctttttattcataatatgtttatgtatttgtttaacctctctgtagctaaccagcttctagttgtatctgcctaaaactgacccaccattaaaatgaaggggaaggaagaggcaagaaaaaggaaaaaagaatagttagaaagctgggtcctggacatgccacattctccctcccaccaccactttccataaagaaggtggtaaaggagaaggggtaactcttttgttatggcagttagcatagtacgttacacatagcagacactcaatatgt

SEQ ID NO: 248089 - DNA, 586 bp, Homo sapiens
cagctgttttttcagagagtcctggtttcttttaatgaagtatgagatttagaaaccattttctgagtgctaggtgtgctcattataattagttgcattattggaggctttctctatctattggaagagctaaaaaatttgtgtatgtattcaaatacactatccatctatctatctatctatctatctatctatctatctatctgtctaccatctatctgtctatcatgagttcacattccaattcaccaccttaggcctctttctcctttccccttgtaaaactattcttcattaataagaaacctgactctttttattcataatatgtttatgtatttgtttaacctctctgtagctaaccarcttctagttgtatctgcctaaaactgacccaccattaaaatgaaggggaaggaagaggcaagaaaaaggaaaaaagaatagttagaaagctgggtcctggacatgccacattctccctcccaccaccactttccataaagaaggtggtaaaggagaaggggtaactcttttgttatggcagttagcatagtacgttacacatagcagacactcaatatgt

SEQ ID NO: 248090 - DNA, 390 bp, Homo sapiens
ttgttcctctctaaaatgactattttgtctgtcagctcctgacttcttttatcatgattcttagctcctttgcattgggtgacaacatgttcctttagctgagtgaagtttgtttttatccatattctgaagcttacttctttcatttcagccatctcagcctcggcccaggcttgagcccttgctggagtgttgcagtcatttggtggaaaaggggaactctggctttttgagttttcagtgtttttctgttgattttttttcctcatctttgtgggcttatctgccttcaatctttgagggtgctgacctttggatggggtttttgtgrgttttttgtttttgttgttttctgtttttcttttaacagttccgcatgaatacatacaa

SEQ ID NO: 248091 - DNA, 546 bp, Homo sapiens
accaatatgtgtcaattaattaatttaatttgtgatgatgtttttgtgccatgctgtatttggtgctgaagataaagtaagaaatgacatagacacagctctattcctcataaaagtcacaatctagtctgggagatactcaagcaatgtacatatattgagaaataggaaattttgttcattaagtgagtgttacatccctaccctcaggtttttgccctctcttgtaggtgagaactgttatcctctctccatctctctcttttaatatttttaaagatagggtcttgctatattgcccaggctgactcaaactcctgggttcaagggacacccccaccttatcctcctgagtagctgaactataggtgcacactaccatgcctkgctcttgttaaataaaatattcataatttcaaatctcatgaaggatttctcaaaaaactaaaaatagaattaacattcaacccagcaatgtcattactgggtacattcctgagggaaaataaatcattctaccataaagacacctgcactcatgtttat

SEQ ID NO: 248092 - DNA, 482 bp, Homo sapiens
aatccacaatccacatatcctgttaccacccctaatacacacaaacacacacacctccatgatgtagatggtttgttctgggggacataktctattagcagcctaattaagcctatacactgaagtgcattttattattattattttttgttgatatggggttttgttatgttgcccaggctggtcttgaactcctggcctcaaagtgatcctcctgcctcagccccacaaagtgttgagattacctgctcatggataggaagaatcaatatcgtgaaaatggccatactgcccaaagtaatttatagattcaatgatattcccattaagctacctgactttctttgcagaattagaaaaaaactactttaaatttcatatggaaccaaaaaagaacccatatagccaagacaatataaataacacctcacttctacaaccatctcatctttgagaatcctgacaaaaacaagcaatgggga

SEQ ID NO: 248093 - DNA, 568 bp, Homo sapiens
ttctcattagccatttcttgtcaaagcattccaggaagacatacccaacaagtgacgtactgacaagagagaagacatagcccatttgctttgtcattccattccaagatggcttaataaagtcaatccagattggggaaagatggctactagttttcattaatagaaataaaatgtgtatatccatatacacatttatatatgtacacatatttgtggataatatatattacaaataaatatacaatatatattacaaatacgtwtgttatatatattgcatatatatatagataataagacagctttaaagagggatataatctttgtaatgtgtttcacttgaagcctattttgggactagtgatggtagaagacatgctgttctttattgtatttataaccatgctgagcttgcaaagagaaaacagactaaactcattagatgaatgtagccaggcagttaaatgtaaacataagggaaatgatttatatggaagtcttcagcatttattctctctcctggaggtttatttgaagacaaaataaaacaaagcaaaaacccagc

SEQ ID NO: 248094 - DNA, 547 bp, Homo sapiens
tcaaataacttgcctgtgatcaaacagctgtaaagtagtaaatggagtttaccctggcagtcttctttgagagcccacaatggggctatatttaatcacaattgtaatagtaatctttattcacatttgcaagcacatttatgtatatgatgtctttctgtctttactccctcaaagctgtcttagaattgttgcatttgtggtgcctaacctggtaatttttctccaactaaattgctcaaatatatctttcatttttcttttctattttcctataattactgttgaacagagtggtgcctaaaaatatgcatatccttcctagttcggtatgaaaatattattgtctacagacaacagtgtccaaaagaacttcccacaatgatggatatgtcccagagctgcactgtccagctcagttgcccctaaccacgtgtggcccctgagcactcgcaaagtgtctsgtatgattgaaaaactgaattttaaattttttacaattttaatcaactttagattaaatttaaatgcctgcatatggctagca

SEQ ID NO: 248095 - DNA, 558 bp, Homo sapiens
atattattgtctacagacaacagtgtccaaaagaacttcccacaatgatggatatgtcccagagctgcactgtccagctcagttgcccctaaccacgtgtggcccctgagcactcgcaaagtgtctcgtatgattgaaaaactgaattttaaattttttacaattttaatcaactttagattaaatttaaatrcctgcatatggctagcagataccatattggacagcacagtctttaacacatttattgtttaagcatatcttaaaattaattatgaaaattatactaattgattcataagttagaagtgcacctgtcagctagcttctatggaattagacataaaaggaaaaagagataaagactttaatgagggagaatccataataagggaaaggatgctttcattcctatattactcttacctaataatgttcctaagagtgcaaagaggatcacaaagtagactactttggggatcataaaattcatatttagaaattttcatgggcactggacatagggcttagagtcattaaattgaagatgaatgtgaa

SEQ ID NO: 248096 - DNA, 454 bp, Homo sapiens
tgaacacaaatataaaacttcttattgttacagacccagacactaaaggcagttgcactagcaggggcaaagcaaaaagatttcttctccccaaagggggccttttaacctttattaagtgggttatcttttcagtggtaccaggctttcctcgatcttcttagattgtgcggcactcatttctccaggttggctgaggaaattgcttctcctgccaccttggactacatccactttaaatgttygtggacttagtgtgacagtggaagcctctccataaatcattttgagatttgctcagacttttaagagtgcctctggtccaggcacatgtgaaaaggtttaagtcatgcaaatatcatgaataaatgagttgtattcatctctaactcctgtgtttacaaagatggcctgggcagctggaaaagcagtcaaacctcactcaacacttgac

SEQ ID NO: 248097 - DNA, 552 bp, Homo sapiens
tgcctgggaccacttctatccagctgatgactagtctgaaaacatcaggcttctcaaagctacagaaaatgtttcctcattaaagtatttttaaaggaatatctttaattgcattgtatctagtcagtcaatgaatgagctttgtctcagcacctgtagataaagtattagcgaatgaggacctgggagattggacatggtctctgccatcaacaaacatgcaataccataataataaacatccaaggsaaataggtgtatgcggaaaaacataactactaagcaggcagaacgtttactattaaaagagagagttgatgttagtagggaaaacttccaagaacagctttaatgcttaagagtgaacattagtttaaatatgacagaaaacagttatgaatattcaattcgtccctccatgaactacactcagcacaaaactgattaattgcataactacattaccttttatgtgtgtgagatacactgaagaaattaatagctttcattacggaaaaaatatacatcttctcccaaggggttgtgttatag

SEQ ID NO: 248098 - DNA, 552 bp, Homo sapiens
tgcctgggaccacttctatccagctgatgactagtctgaaaacatcaggcttctcaaagctacagaaaatgtttcctcattaaagtatttttaaaggaatatctttaattgcattgtatctagtcagtcaatgaatgagctttgtctcagcacctgtagataaagtattagcgaatgaggacctgggagattggacatggtctctgccatcaacaaacatgcaataccataataataaacatccaagggaaataggtgtatgcggaaaaacataactactaagcaggcagaacgtttactattaaaagagagagttgatgttagtagggaaaacttccaagaacagctttaatgcttaagagtgaacattagtttaaatatgacagaaaacagttatgaatattcaattcgtccctccatgaactacactcagcacaaaactgattaattgcataactacattaccttttatgtgtgtgagatacactgaagaaattaatagctttcattacggraaaaatatacatcttctcccaaggggttgtgttatag

SEQ ID NO: 248099 - DNA, 494 bp, Homo sapiens
tcaggtaaaatcagttttgttcatactagcacataaataaaaataggtcataacattttcttaggaatgtatagagactttcaaagtactctgcaccaatttcacatattttccacatgcaatttttttagaagaaaaaaattattctaactatttactaaataggaaaagtcatgggctctaaagcaattttcctaaaagcaatttactgaagttttccacaagccaattcactaaattaccaattcartaacaagtaattggaatataatactaagaataatatgctcatagccattgaacacatatttaaaatgtttcttaaaatatattttataaattagtacatttgatgaatttgtcattctgcaaattgattttttagtgaattggcctgctttcagactaatagattcattccattctatgctaaataacacatttaatgtacacatactatgtgccagggattggttgcttaatactgaatgagg

SEQ ID NO: 248100 - DNA, 547 bp, Homo sapiens
tgctaacccaggactgcaatatatcttgcttttatgggtctttgtgtatcagatgaaataccagataattatgtaaaatascttggatggatcccagaacaaaagttttcaaatggcaaacagattaatcatacactaaaggaaggcataggacccacttgtatgctattagataaaatggacatccctgaggaatatcttactctgaaaaaaatgcctcgagcaagagaaaaatcagcaaaaactgaagaacagtccaaaaatttctgttttctccaaattctagatgttcttcctttcccctctctagtcttccttccccaaccttgcaggagttaggcaaggtgtctttgtaacaaatgtttgcctgcacacatatatactctaagcatttgcttactcatgcatattgcacttttgcactcagctctttaatgttgttcccaaagtcctatgttcaagacttttttccatgtccaaagcatctgtgatcttatattttattttgatgctacacaaactgggctaggaaaactgcccagaagct

SEQ ID NO: 248101 - DNA, 579 bp, Homo sapiens
tgactccccagtggtcgctggcacatctagtgtccagatcttgatttcaaaataccattctccactgaaggaaaggcttattcyagggcagcggtagggacacgacaagatgatgctggaacatctcgtaccatagagcaaggaaatgcttgccgattggcagggacatatcaaaaggacgcaggctccagctggaagttgttactgctgaccaaatttaagataaattgaacatcaataaaaataaagataatagtggattgtaagccattgaataaaaatggaaagcatgagtctatgctgatataaacaattaatgaataaattgaaaacgtgatgagaaatgggatattttcatagtttaaaagaactttctcacaaaattatttactaattacaaaggggaaaagagagcattatttctgtgatattcctgccaaaggtgtataatcggaagttaattgttaggagaaaactttaaaaaaaatccaatttgaggaaacttttataaaataacaggactataatcttccaaaatgtaagcattatgaaagtcaagataagactgtggaacaatgg

SEQ ID NO: 248102 - DNA, 511 bp, Homo sapiens
caccaagcaatttagaggagaaacaaatttaaccttcaaatatttcaaggtgcttttaaaactacataatgtagatctagataccacaatgactgacaatgtattatcagtatcaccataggaaccagaagtgttttatattgtcctaaaaggatctgacacatttttcawaagacaaacccccagtgataccacctgctggtaagcggtttcagttctttggtgtttgttgtctttagcagtccttgatcttcatattttaagatttatttctctggttagaggaggaaagaccttttcaattgttccatagtttcactgtttatctcagccttacacacgacatttgaggtgcatgctgttttgtctggcttctggtatcacgctccagttcatgaccctgtgaatactcacagcctagctaaaatgctgccagtgagtcagtgacacttagggatgggtctggcacagggcaggttagaattgaaagcaagtcctgttgtacacataa

SEQ ID NO: 248103 - DNA, 617 bp, Homo sapiens
tgaatagtgtacattgtacccagtagatggtatttcatccctcatcccacttccaccctccctccttttggagtctccaatgtcttttattctactctgtatgtctgtgtgtacccattgtttagctcccacttataagtgagaacatgtggcttttttctgtttgtgagtcatttcrcttagtataatgaccttcagttccatccatgttgttgcaaaagacaggatttcattcttttttatggctgcatagtattccatggaatgtctgtgtgtgtctatatgtaatatatataatcacattattccatgatatgtgtgtgtatatataatagatataatttataataatattattaataatatattataaccacactattccatgtgtgtgtttgtgtgtgtgtatgtgtgtatattccacacaccatggaataatgtgattatatatattatatatacacacacatatgtgtgtatatatacataaatgtatatatatacacacatggtgtgtatgtgtgtgtatgtgtatatatatatgtatacatatcacattttaacccagtaatccattgatgaacacgtagactgattccgtgagtttgctattgtga

SEQ ID NO: 248104 - DNA, 608 bp, Homo sapiens
gtctctatggcatttcccataaaagggtcctgaatcatcctgatcaggtgactcactgaaatagaacaaaatgtagaaatcatatttcttattgcttctctgatgctgcagcacagctgagttcactgaggaattgggtctagctgagggatctgattggttcctcccattattccttggtaactttccctctctacccttccacccccttcgtaggtagtggcaaaaagaggctcatgttctgcatggccaagtctcagtgatagttcctgcatgatcaatctttgaagtcaagtttaggtcaatggtgtttaacacagagtgggggtgaagggaaaagaagccaagaacgttgaggaatttgtggctcagtctgtaaacaaagaggattgatgttggttgaagacaaaagaggattcattggaaagaaggtgaaatggtcttagaaaaaaggagttgaagctagagagattcctcacagagtttgatatattgtcycaattatctttgcaccacagtgtcggttgcaaaggaagactatatagatgtttgttaaatgaaacaaaaagtagttttattgatatatgggaatccaccacaaagacaaa

SEQ ID NO: 248105 - DNA, 699 bp, Homo sapiens
tctgtaaatcttcacatagaaaacccttagcaaagtgcctaacatatggaaagagtcaatagtgttattaattaaaatattgttctttagatgttcttctattcttaaaatgcctgattgttctggattttcttattcacttttgcttgttttcaaggcaaagaatgaataatagtaacctttctataggagaaaagatggcaggtatgtctacatcagtcaggacaaactggttttgctgcagttacaaacagtcccacaaatctcagtggcttaaatcaagaaaggtgacttttttacctaatgctacatgtccagtgtggactggcaagacarttcaacttatagtggagatacactaacattttatggtaataccaactgaacatgaggtttcagggtttgccatgtcagaagaaggtaagaatacagagtagagcattgtcaattaaatggtttattccgcaagtgacacaaattatcgcttagcttttacttaccctaagtctagatctactatctcctacccacattctcattttgatggcagggaatcagtttttaaattggggttttcaaaataatttcggggtgctttcaacagttcagattcctgggtcctgtcctctgagattctgattctaggttggggaatggtaattgagatattggtattaattctagtgactcaattgtagg

SEQ ID NO: 248106 - DNA, 307 bp, Homo sapiens
aaaaaacacaataatgtgtactcyattaaaatacaattagataagcagttgttataagcttgaaaagtctgcctcttttaccagggtgaaaaagttggaatccatacatagataataaaaagggaaggatataggaacttgtctgaaatgtaagacaaaggaagataaaacacgatttttcttttttttttttaacaaattttaattactttttattgaaaactacactgaacgctaaatgtccacctttacaataaacaaatacagtaatggtaactcacactaaaacaaaacatacttctaatag

SEQ ID NO: 248107 - DNA, 307 bp, Homo sapiens
aaaaaacacaataatgtgtactctattaaaatacaattagataagcagttgttataagcttgaaaagtctgcctcttttaccagggtgaaaaagttggaatccatacatagataataaaaagggaaggatataggaacttgtctgaaatgtaagacaaaggaagataaaacacgatttttcttttttttttttaacaaattttaattactttttattgaaaactacactgaaygctaaatgtccacctttacaataaacaaatacagtaatggtaactcacactaaaacaaaacatacttctaatag

SEQ ID NO: 248108 - DNA, 347 bp, Homo sapiens
gtatttccagggtgcttatgacaaatatagatctgtgtcacagctcagacctatcagagaagaacttccaaaaaagccaaagtaattgcaatgatcaggcaagtgtgagaaatctcaaggttgagtaaagggaattggattgtcttaagggatagtctcatcaatctactgtgcagccgtagctaataaaatgtattccttctaagctgatccagaatatttatactgacttatgcagagaggctccccccacmcaccgtagacccaaagattgcatagaaaatagactagctattgtttttttcatttttcttaccaattagcaaaggctaaggttagtacttaag

SEQ ID NO: 248109 - DNA, 563 bp, Homo sapiens
taggcattatctttctaaaccacaggtatgtatttactagggatcttaattttcattatcctctacttctcaactaggctttgtgaattaccagatataagatggtgtaaaccagaggcagaataaagcacaaaataatatagaagtgcctggagttagccaaactacaacgtatgagggcacagttctgtacaaayaaccttaatttcgacaccaaactgcaagtttgggagggttccccaaaccacctctggttcggtaattcaaaagggcttgaagaactcactaaaaattgtcatagtgatcattattgcttgttacaggaaaggatacagattaaaattgaccaaagaaagatacacatagtgcagagtctgggaggattccaaatgtgaagcttctgttgtcctctcctatggagtttggatgacttattctcctggaattgctagggggtcatatgcatagagtattgccaaacagggacactcacataagcttcaaagtttagagtttttattgaggcttcactacatagatatgattgattgattgcccacaca

SEQ ID NO: 248110 - DNA, 563 bp, Homo sapiens
taggcattatctttctaaaccacaggtatgtatttactagggatcttaattttcattatcctctacttctcaactaggctttgtgaattaccagatataagatggtgtaaaccagaggcagaataaagcacaaaataatatagaagtgcctggagttagccaaactacaacgtatgagggcacagttctgtacaaacaaccttaatttcgacaccaaactgcaagtttgggagggttccccaaaccacctctggttcggtaattcaaaagggcttgaagaactcactaaaaattgtcatagtgatcattattgcttgytacaggaaaggatacagattaaaattgaccaaagaaagatacacatagtgcagagtctgggaggattccaaatgtgaagcttctgttgtcctctcctatggagtttggatgacttattctcctggaattgctagggggtcatatgcatagagtattgccaaacagggacactcacataagcttcaaagtttagagtttttattgaggcttcactacatagatatgattgattgattgcccacaca

SEQ ID NO: 248111 - DNA, 577 bp, Homo sapiens
gttgggggaggcagcctgaagtctctcactatttcctcttaattacttctaaattcagctagcataaatgaaaggtaagaattgggaaataggaakagtgaggagatagaaacgggattgctgtggcagactaattttcaagggagttggttttgccccataaagccagcagatctgtccaccttctacctatttatcatactacctatgtagaactcattaaacttcaagtgatagcaaagtaagaaatagaagccaatggaaggaagaacatgtactcaaaactagctgagatcagaaatgagatatcacaaaaaggtagtatgcaaagttgtgttaagattcatttaagagtcaaaggtattgactttctgtagtgggaaaataaaaaactttgcacctactctgtatgatttacctgaggcatttccaagcccagatcctgtgaatccgattccaaacttcttttttttcttgtttgtaaattcctttccagctttactttcaattccaagatcgaagatgatttccacaataaacagcaggtttccccagagtgcttccaattcaattgctt

SEQ ID NO: 248112 - DNA, 604 bp, Homo sapiens
cattttctgttaagtttattcctggtaatattttcaggttaaaaccttttaaagaaactgaggtttactttcttcaggtcactccagtgttttggatactcacatagaagccccctgtttaggacagcagagaagccccaaagccagcagctggcagacctgcagacgtgcccttgggaccccgttcacatcatgcttcttgttgaatattcatatgcaatcaacagtccccagttgcatctcttatgctgcagctaaagaagaaaacataagctccctttttctctaccctccaatatacttccttccaataaggggacccaatcctaaaccttaagctagaggccatcttcgaggaacagatgtgcagtctggtgatcattacacscaatcactgattcctctcaactctgttttgcttcccctatcacctttacccactgatccttagactagcttttgtttatctgctaggttttggctttctttttggtttttagattctaaggcctttatcccccgctacagagacatccttccaaatattgcctgtgacttgacctgatcccaaagagatgaatacaaattatttctgtagtgcagc

SEQ ID NO: 248113 - DNA, 430 bp, Homo sapiens
atatttctctacatgcataatgcaaatgcattaacttattttcaactgagtactatttcatctgtgccccgatgttataggccattcattcatttattcmacagatatgtatctaatacctattatatgccatgaattatatcagataatgatgattaaacaatcaaaaatagctatagtcccagttttgttttttttttaattgagacagggtctcactctgtctcccaggcgggagtgcggtggtgggatctcggctcacatcaacctccaccttctgggttcaaccaattctcctgactcagcctcccaagtagcggggattacaggtgcatgccaccatgcccagaaaatttttgtatttttattagagatggtgtttcaccatgttggccaagctggtcttgaactgagatcaagtgatctgcct

SEQ ID NO: 248114 - DNA, 511 bp, Homo sapiens
gacatcctcctcaaagtgatgatgctaaggttatcatccccattttacagatgatgttgttgagtcttaggccaagtcacttgtcctgagctttcatacctggcrgtcttggtgctgaggcagggcaaggggtattgactttagagcttgctttcctctgtcagccccagccatctctaactgaatcgtcttataaattcagagtcaggtttcaccagggaagcctatgaaacatgagccacatttttacaagcaatgggcttaacaagtagaaaatcagttttattgttaaggcaaaaaacaaaaaaaataggtgctgataaagtgaagacagattccctagccggctctttctactccttcagatcttgggttaaatgtcacttccccagagaattttcactaatctcctccccattcgtctctcagcacaccttgttttctttcacaccttcatcacgagggataggtgactctgttctgtgttgtcatactccacgggtataaggat

SEQ ID NO: 248115 - DNA, 463 bp, Homo sapiens
ctcctcccagaatattttatttctcctttattccttgagagttgtttcaggatatagaatttgtggttrataatttttttctttcagtacttgaaaaatattgtgctgcttccttctggcctctggttttagatgagaaatccattatcattcaaactggtgtgtccctatcaaagatgtcatttctctctggtgactttccaaattttttcatttttctttttaattttcagaagtctaattaagatgtatcctggtgtagatttattttggtttaaaaatctttattttggaatttactcagcttcttggatctggaggtttgtatctttccatgggtttggggagttttcagccataatttatttgaaggctttttaactccacttttttttccttttggactgtgacaatataaatgttggctatttcattattgtccgacaagtcctgaggctttgtt

SEQ ID NO: 248116 - DNA, 569 bp, Homo sapiens
aataggccacctcctttctattaagaaaggtttttctctcggtatttcactaagaacatgtgtatgtctgtgtctgagtgttgcgaatacattagaaacacttctcaaacacatacataactgcaaagawgatgttatttttacacattttaggcacaaaatgttaatgtcttatctgatatactctgaaatatgacctttataactccatttaatgtgatattgttatgtttaactgtgttttaacattgaggctctcacatggtctttgaaaggaagtatgacccatttaagaaagaaaaattcttggaccaaagattaaactatggaatggtaagaggctggggaatgataggaaagaggtgttagcaatagtccataaggagcacatagtcaaatactgtttgagagacaaactcttctcttgaaaatggaaaattaatcccttctggatggcaaaaggttatcacagatactagaaaaacataggggacaatatagactctatctctgataatgtttccaaactacatgaagtggaaatctgtataaaaagagaaacagggcta

SEQ ID NO: 248117 - DNA, 569 bp, Homo sapiens
aataggccacctcctttctattaagaaaggtttttctctcggtatttcactaagaacatgtgtatgtctgtgtctgagtgttgcgaatacattagaaacacttctcaaacacatacataactgcaaagaagatgttatttttacacattttaggcacaaaatgttaatgtcttatctgatatrctctgaaatatgacctttataactccatttaatgtgatattgttatgtttaactgtgttttaacattgaggctctcacatggtctttgaaaggaagtatgacccatttaagaaagaaaaattcttggaccaaagattaaactatggaatggtaagaggctggggaatgataggaaagaggtgttagcaatagtccataaggagcacatagtcaaatactgtttgagagacaaactcttctcttgaaaatggaaaattaatcccttctggatggcaaaaggttatcacagatactagaaaaacataggggacaatatagactctatctctgataatgtttccaaactacatgaagtggaaatctgtataaaaagagaaacagggcta

SEQ ID NO: 248118 - DNA, 569 bp, Homo sapiens
aataggccacctcctttctattaagaaaggtttttctctcggtatttcactaagaacatgtgtatgtctgtgtctgagtgttgcgaatacattagaaacacttctcaaacacatacataactgcaaagaagatgttatttttacacattttaggcacaaaatgttaatgtcttatctgatatactctgaaatatgacctttatarctccatttaatgtgatattgttatgtttaactgtgttttaacattgaggctctcacatggtctttgaaaggaagtatgacccatttaagaaagaaaaattcttggaccaaagattaaactatggaatggtaagaggctggggaatgataggaaagaggtgttagcaatagtccataaggagcacatagtcaaatactgtttgagagacaaactcttctcttgaaaatggaaaattaatcccttctggatggcaaaaggttatcacagatactagaaaaacataggggacaatatagactctatctctgataatgtttccaaactacatgaagtggaaatctgtataaaaagagaaacagggcta

SEQ ID NO: 248119 - DNA, 569 bp, Homo sapiens
aataggccacctcctttctattaagaaaggtttttctctcggtatttcactaagaacatgtgtatgtctgtgtctgagtgttgcgaatacattagaaacacttctcaaacacatacataactgcaaagaagatgttatttttacacattttaggcacaaaatgttaatgtcttatctgatatactctgaaatatgacctttataactccatttaatgtgatattgttatgtttaactgtgttttaacattgaggctctcacatggtctttgaaaggaagtatgacccatttaagaaagaaaaattcttggaccaaagattaarctatggaatggtaagaggctggggaatgataggaaagaggtgttagcaatagtccataaggagcacatagtcaaatactgtttgagagacaaactcttctcttgaaaatggaaaattaatcccttctggatggcaaaaggttatcacagatactagaaaaacataggggacaatatagactctatctctgataatgtttccaaactacatgaagtggaaatctgtataaaaagagaaacagggcta

SEQ ID NO: 248120 - DNA, 424 bp, Homo sapiens
gggtgaggctctctattcgtttttgagaaaatatctgccaaatgctcaagtctgaataaccatagtttatcagttgttctttcaaataaaaatggtcttcatgaaataacagccagttcagcttgcacaggtgcttttcgtagaggcagtaattgtactttagtatgcagtaaacactaaatttcttcacaaagaatattaaagaaatatatgtactaaagggtcagggtttaataaaaagataattcttactgcttcctcaagagaatccttaaatgaaaytgactgtctgccaactctctaacaagtatatagagtgatgaataatatgatgactactagaacaacttgatgccactaccttgattcatactcaggtaccagcagttttaccaatcaatacttttgcaacagcactgcaaat

SEQ ID NO: 248121 - DNA, 424 bp, Homo sapiens
gggtgaggctctctattcgtttttgagaaaatatctgccaaatgctcaagtctgaataaccatagtttatcagttgttctttcaaataaaaatggtcttcatgaaataacagccagttcagcttgcacaggtgcttttcgtagaggcagtaattgtactttagtatgcagtaaacactaaatttcttcacaaagaatattaaagaaatatatgtactaaagggtcagggtttaataaaaagataattcttactgcttcctcaagagaatccttaaatgaaactgactgtctgccaactctctaacaagtatatagagtgatgaataataygatgactactagaacaacttgatgccactaccttgattcatactcaggtaccagcagttttaccaatcaatacttttgcaacagcactgcaaat

SEQ ID NO: 248122 - DNA, 587 bp, Homo sapiens
acaggttttgctcaccaagtgtaggggctcttcagaagcagcagggatggcaccaaaggagatgcatctgcaaacatatcaaatctaccaaaagtcttttcagcagtaccaaagtttaaggcaatagtttggaatgagtcttatttggacagccaaagcttcatcttaccagctatttagtcctgatgatttttgaataataaaatatgttagaataattttccacttagcaatggtcattcatgaatgggcagcattaccattcatatccctctgttaaaaataggctcattttcttgcttttaaaaaatctcgttgtatattgtgggcatagatttggaacactgtgmaacgtggttaatttggtagcactttatatcatgccatcttgtaataatgcctcttaggaaacggccttaaggatattatgcaaaaggtactttgaagagggtggagaggaagagattacaacttcccttttgcagtcagctcctgtctctgatgtgtaaccctagtgtctactgcctggtttgcctttttctgtattgtccgtgtaaataccatcctgggtcttctgatttgagaat

SEQ ID NO: 248123 - DNA, 550 bp, Homo sapiens
ctttccttgccaaataaggtcatgtgctgttcaagccactcattctgatgcctttcctaaattaccctgcctaccttactatcctaacagcaagtttatctaagatggcacctttcgtaatctttagtctgtgtcacaaaatatgagttgtgtatatcttatattatctcyatattactataagagagctataaccatatttttagtaggtataattaataacagagtccctactaaactttgttctagacataacagattacccaccagttccataaatttctatggaatcatcccttcaatgttccatgcccctgcatatgctgttccttctgcctgggcagccctccctttgttccagaccccaacttatcaggccaactgctgctcatccttaaaggcccagctcaaatgttgcttcttcttcagagcttttcctaatgttatccagtagttagaatttacttctccctctgcattttaattttgctctcagatatagcacttattatctgataattactggtatatgtttttgtctccactagac

SEQ ID NO: 248124 - DNA, 464 bp, Homo sapiens
tactggtatatgtttttgtctccactagactatcaccacctcatgaacagagacaatttttttatctawcttcagcatctaacagttcctagcatgcaggaaaaccttggtagatgctttgttgtctaatgatgtcaatgctataaaagaatcattgccaagatctatgtcatttctctagttctagacttcatacactgacaatgacccttacgtataaacactatcatagtcagtaggtattggaccaatacccctaaagcatgcattgggataagatttgagagaatagagaagaaatgagaacattcatattctcaagttgtgtaaattattttggtgggttttgtgccctttaaagcaagaatcagttattaaaatgctttcaaagggcataagccttatttccatgggcatgaattttcaatagtgtctgaagtttgacaagatatagagaacattat

SEQ ID NO: 248125 - DNA, 550 bp, Homo sapiens
tgtatagacttttattggatatgtcttttcaaaatataaattgttttgtgtacatgtatttttaatttgtgcaagtggtacttggctatagaccttattctgttttctccttttctcactttgtttgtataatatattttttcttgattatgactgctacataataatcaatggtgtggawctaccacattttcctcactccttctcctagtgatgggtacctctagctccctgctaccacagacaatatttctatgaaccttacacatgcccttttgtgaacctgagagaaatccactggtatgtagaacctgcaacagcactggtaggttactgggtttgtggcttatgtatgagctaatttgaccaatttgggcctagttccttgcaaaaaagctacagtggtgcacagtcacaccagcaatacatggagggtcctgctatttccacattccctccaacctttggcgatatccagcttcctaatttctgccagtttaatgggtataaagtaatatttaattgttttaatttgaacttttcttgatca

SEQ ID NO: 248126 - DNA, 597 bp, Homo sapiens
acaaatgtaactatctcaggatttatcatttgacaaaaaagctcaggctctcatctctgtgctttatcttactcagaaatcttggcagrcctgcaaccatggaaacacaggtcctacagtccacatcaactccagatctagctgccctggacttctaaagagcagtctcctgatgctcgaggaagttgtagaatgcttctcggtgctttctattcagcattgcaggtgtttaggagctgagcctcaggagtcagccactcctgattgaaatattggctctgtcacttaccaggtgtgtgaccctaggcgatgtgcatgtcctctatgtgatgctgcatgcacctcagggactctttgtgaggatgaaatgggatagtgcatttcaagtgtaagcccagaacttcacaccaagaaagtgctcactaaacattggggggttcggtcttttttttttttcgggtgggggacagagtctcattctgttgccaggctggagtgcagtggcgtgatctcagctcactgccatctctgcctcctgggttcaagcaattctcctgcctcagtctctcaagtagctgggactacaggtgcccacca

SEQ ID NO: 248127 - DNA, 581 bp, Homo sapiens
agatagtgttgtttgaagttgagcttatggagggtcaatgaatgaataatgacacactcagggaatggccataaagggaatgactaaaggaggatgagatttttgaatgttaggagttaggagtactcaaagatcacctatgtggstatcgaaagggccacaaattatattatttcatcttaataatgactcttttgtccacattttagagagaaaagctgaggctaagagttgggaaacaagtccaaggtccccaagctaggagagggtagactgggatttgaatctggtttgtaagattcatcatctctcttacccactgtgcataatggctcatgtatggtatgttctgctgcctctgtgccatggccaatgaaaaggagttgggagattttcaaatgttttgtgtcattcgctaaccaaatctgtcattcattaacaaagacttattaagcacctattaaacaggagtgcaaggctgggtgcagtggctcacatctgtaatcccagcactttgggaggccgaggcgggctaatcacttgaggccagtagtttgaaaccagcgtggccaacatggtga

SEQ ID NO: 248128 - DNA, 584 bp, Homo sapiens
gaaccacagaaagagggagctggtggagtcaacaaatggagagggaagggccactcaaatggctcttagtcttcactggctgagaaccaaatacagattagctgtacggtagagtgctgcaacggacttacatttatatacacatataaaatatttctgagatcatcagcactctaatgaatcagccctgtctggaacagctctaaatgaattctaaatgagtgcctctctgatttcataccgagtaaatgtatagtaatgcaaagtggcactttctttagttcatcaataatttattaatgrgcactttgttctaggcatgatgtttcttagagtttcaaaaaatgactttgcttttggttgctctgttgctctcatagaactttttcctcttctcttaacagcagtcatcactttctcctgtgtgccagttgtctccaagtcagacacagagtgttttcccctattggattataagcttagtgaaggtaacactcatgtttgattcactattacattctctacaaagcctaacatagttccttgtacaaatagatacacataaatatttgagtaaatgaatg

SEQ ID NO: 248129 - DNA, 598 bp, Homo sapiens
ttaacttcaccaatgattttcccttccacccatgtaattttccagaaattaagcagtagtcacaagaaaaacataagtaagataaccacctcagaattttctgtagatcaaagtactattaaaatgtgtgtgctacttgcagaaacatgacagargccatggaagggagctcaggactaagttaacgccactgattttatttacagatgaggggatggaggctcaggttatttgtcaatgcccaaatggaagtcttgttgattctacctcaaaacgcacccaaatctgtccacttttctccatttctattgcccgcagcataatgcaagccacaaaggttatctcagtaaattaaatttccttgattgtttgcctcctctttttcaaacctcatgattttttttttctatttcgtttagaataaaatccagattcctttacatgccctcccagctcctatgtcacctgttcccagcctgtttttctgactgtatcttctgttgccctctctacccattctaattgaaccaccacctgtttctcatgtgtctcaaactcactaagcttgtctccactgcaaggcccaatcactagtgaa

SEQ ID NO: 248130 - DNA, 598 bp, Homo sapiens
ttaacttcaccaatgattttcccttccacccatgtaattttccagaaattaagcagtagtcacaagaaaaacataagtaagataaccacctcagaattttctgtagatcaaagtactattaaaatgtgtgtgctacttgcagaaacatgacagaggccatggaagggagctcaggactaagttaacgccactgattttatttacagatgaggggatggaggctcaggttatttgtcaatgcccaaatggaagtcttgttgattctacctcaaaacgcacccaaatctgtccacttttctccatttctattgcccscagcataatgcaagccacaaaggttatctcagtaaattaaatttccttgattgtttgcctcctctttttcaaacctcatgattttttttttctatttcgtttagaataaaatccagattcctttacatgccctcccagctcctatgtcacctgttcccagcctgtttttctgactgtatcttctgttgccctctctacccattctaattgaaccaccacctgtttctcatgtgtctcaaactcactaagcttgtctccactgcaaggcccaatcactagtgaa

SEQ ID NO: 248131 - DNA, 582 bp, Homo sapiens
ttaagatatatttgtaaaagtgggaattactagacacatgtctatattctgaatatagagaggattagataagtagcataaacattytaaatgggtgttttttgaagaacaacaaattggctgggtgtggtggctcatgcctgtaatctcagcactgtgggaggcctaggtgggcggatcacctgaggtcaggagtttaagaccagcctggccaacctggtgaaatcctgttcctactaaaaatacaaaaattagccaggcatggtggcacatacctgtaatcccagctacctgagaggctgaggcaggagaatcacttgaacctgggaggtggagtttgcagtgagccaagatcgcaccactgcactccagcctgggcgacagagcaagactctgtctcaaattaaaaaaaaaaaaaaaaaattaaaaaaaaaaaaagaacaacaaatttcagataatttggttattttagaacaaaagataataaattgtagatatatatttatgtgggaaattttattttgaataaaaatgaacatgccgaatgtttataaatgactgatattttaaaattacagcact

SEQ ID NO: 248132 - DNA, 582 bp, Homo sapiens
ttaagatatatttgtaaaagtgggaattactagacacatgtctatattctgaatatagagaggattagataagtagcataaacattctaaatgggtgttttttgaagaacaacaaattggctgggtgtggtggctcatgcctgtaatctcagcactgtgggaggcctaggtgggcrgatcacctgaggtcaggagtttaagaccagcctggccaacctggtgaaatcctgttcctactaaaaatacaaaaattagccaggcatggtggcacatacctgtaatcccagctacctgagaggctgaggcaggagaatcacttgaacctgggaggtggagtttgcagtgagccaagatcgcaccactgcactccagcctgggcgacagagcaagactctgtctcaaattaaaaaaaaaaaaaaaaaattaaaaaaaaaaaaagaacaacaaatttcagataatttggttattttagaacaaaagataataaattgtagatatatatttatgtgggaaattttattttgaataaaaatgaacatgccgaatgtttataaatgactgatattttaaaattacagcact

SEQ ID NO: 248133 - DNA, 582 bp, Homo sapiens
ttaagatatatttgtaaaagtgggaattactagacacatgtctatattctgaatatagagaggattagataagtagcataaacattctaaatgggtgttttttgaagaacaacaaattggctgggtgtggtggctcatgcctgtaatctcagcactgtgggaggcctaggtgggcggatcacctgaggtcaggagtttaagaccagcctggccaacmtggtgaaatcctgttcctactaaaaatacaaaaattagccaggcatggtggcacatacctgtaatcccagctacctgagaggctgaggcaggagaatcacttgaacctgggaggtggagtttgcagtgagccaagatcgcaccactgcactccagcctgggcgacagagcaagactctgtctcaaattaaaaaaaaaaaaaaaaaattaaaaaaaaaaaaagaacaacaaatttcagataatttggttattttagaacaaaagataataaattgtagatatatatttatgtgggaaattttattttgaataaaaatgaacatgccgaatgtttataaatgactgatattttaaaattacagcact

SEQ ID NO: 248134 - DNA, 582 bp, Homo sapiens
ttaagatatatttgtaaaagtgggaattactagacacatgtctatattctgaatatagagaggattagataagtagcataaacattctaaatgggtgttttttgaagaacaacaaattggctgggtgtggtggctcatgcctgtaatctcagcactgtgggaggcctaggtgggcggatcacctgaggtcaggagtttaagaccagcctggccaacctggtgaaatcctgttcctactaaaaatacaaaaattagccaggcatggtggcacatacctgtaatcccagctacctgagaggctgaggcaggagaatcacttgaacctsggaggtggagtttgcagtgagccaagatcgcaccactgcactccagcctgggcgacagagcaagactctgtctcaaattaaaaaaaaaaaaaaaaaattaaaaaaaaaaaaagaacaacaaatttcagataatttggttattttagaacaaaagataataaattgtagatatatatttatgtgggaaattttattttgaataaaaatgaacatgccgaatgtttataaatgactgatattttaaaattacagcact

SEQ ID NO: 248135 - DNA, 619 bp, Homo sapiens
agcataaaggtcaggatgaaaatacctgagtgagatattttgttagaagaaataaaataattctccattatctgaaacaatgatgattggaaagtaaactggattgactggcacagaagttgtgattccatctaaattatccaagtaatttagtgcaaatgttttctccaaaaactatgtgggttgcaaataaattttaaaatgggtattattggttaaacacttaaggagatttgtaattcccccagggaatctaaaaacacagctgagatattgtgccacagtcaaagtctcagtgttatatacttggacttcctaaaacccggactttgaaattagacactaagatgtaagtagtgtgctagtgtagaatggacattggatggagaataagatttggttgcaatcttggctctgctgttctattagcttagggaccttggaaaagtcagctgatttctcrggatacagagatctcatttgaatggaaatagttaatgaacatttagtttataatttatgattgtaacttagttcttagcacacaggttagcatggaataggtgcttggtaaatatttttttctgaatcaaaaggattttagtgaatattttcatct

SEQ ID NO: 248136 - DNA, 537 bp, Homo sapiens
ggctttttcatttcagtaatgggttgagtggatagatgactgaggaggatgatgagggggcttggttattattagaaaacacaaaatatggatctgatttctcattttcatttaaaaagtgacattttggcaaacattttagatttggaaagcagcaaagttttgtaaattagtgtcctatatgattatggacyagaaaggtaattcttcccatgcctgctcttggactctccagttattccccactcttctttataatggtcctgatggaaattctccttaatgctcatttgtgggtttcattttttaaccctgatgagggtttgggatttaagactttttgtttgtttgtttgttttagatggagttttgctcttgttttagatggagttttgctcttgtctcccaggctggagtgcagtggtgcgacctcggctcactgcaacctccacctcccgggttcaagccattctcctgcctcagcctcccaagtagctgggattacaggcacctgccaccatgccaggcgaatttttt

SEQ ID NO: 248137 - DNA, 537 bp, Homo sapiens
ggctttttcatttcagtaatgggttgagtggatagatgactgaggaggatgatgagggggcttggttattattagaaaacacaaaatatggatctgatttctcattttcatttaaaaagtgacattttggcaaacattttagatttggaaagcagcaaagttttgtaaattagtgtcctatatgattatggaccagaaaggtaattcttcccatgcctgctcttggactctccagttattccccactcttctttataatggtcctgatggaaattctccttaatgctcatttgtgggtttcattttttaaccctgatgagggtttgggatttaagactttttgtttgtttgtttgytttagatggagttttgctcttgttttagatggagttttgctcttgtctcccaggctggagtgcagtggtgcgacctcggctcactgcaacctccacctcccgggttcaagccattctcctgcctcagcctcccaagtagctgggattacaggcacctgccaccatgccaggcgaatttttt

SEQ ID NO: 248138 - DNA, 429 bp, Homo sapiens
ctgcattccttccagagtctctaggagagaacccattttcttgtcttttcctgattttggagaccacttgcattcatyggcttgtgaaccttctcctctctcttcaaagccaggattgttaggttggggccttcttatgctactatcttttgctttcttctagctccctcttccttttttaaggacacatgtaactatgttgtgcccagccatactatccagggaaatctctctatttttaaagtcaactgattagcaatcttgattttatctgcaagtttaattactcttttccatgtaacctaatatatttataggtcctaggaattaggatgtggatatttggaggttaggtttttttctgactacagcaagatgatagttggaagaaaaagaatcaagagaaaaattttttcttagtataatgca

SEQ ID NO: 248139 - DNA, 547 bp, Homo sapiens
ttgtgaagtaggtgagatttggttttggggtatcctctcgccatctcaccagaattcagctttcagtgcctccctttgccagattttttacctctagtatctctcttctgtcattttctgcacacatctactttctagcttaatatttggaatctaaacaactcagaatccttaatagaatcctttctaggaaatgaatgtctcatttctgctgggcttgcagacttctgaggtagcaccagtgtccaagtwgaaggcagtctatattcttaagggaattttcttttttaaaaggaaacctcatttctactggtaggccagagatagtagtataccctggaatggacaagaaaattggaaactggacttatcccaggcacataggcagaaactgatgtcgtcagatccttgtgctgcttattcctttttgttctcattccataactctttctctgttcctatattaatctcgggtcagaaataggcctacttaaattttagtaccttgagagcctgttcttcctaacagaaatttgcataacaaaaa

SEQ ID NO: 248140 - DNA, 457 bp, Homo sapiens
atccagagcaaaagcagtgaaatgattgaagatgcattcttcaatctgtagggtttagtaggattacttaggctagagaaaaatccatgaaggtcataatgacatttttatcattttagactcatgtatgccattttttatgttgtctttccaatacacattaaatktttaaagagtgagtgttactttaaaaagcaatgatttaaaaatttatcagttctacctttctgtagtttaataagaatttttacctccatcatttagaaatcaaccaaggatttgtttttgaaactgctaatgtgctttctacaggtgaaaagtaacaggtttgtaccaatgtatttttagcttctaagaatgtacagctaatcagcaataaatgaaaagagtgtcaagctgatgtgacatacatacaacatatcaagtaagctaagcattctctatttttcagaagtta

SEQ ID NO: 248141 - DNA, 597 bp, Homo sapiens
agatggttggacttgaccctctgaccctacttcttgaccactgcagggtccttgtggtcttcctccagcatcaggctgtactaggacaagggtcagatctctgggagggctcctaaagggcaagagcttctctgtaattgttgcaagctctaagaaaattgctcacttaaccttcgatctcccaaaacctcactttcacccttcttccacgctcactccttgtctgttctgtacttgtccctttgtctrtaatattccttcttatataacttttaacccaaagcattaaacttccactcaaagactcccctgacctcccactcataacactgaagtatggtgtattccctcttcccttttttacaaagcctgtgaccttcttctagggcctagtcactgtgttttataattatgtatagacttgtctatctcgacgaataaactctaagccctaggatgtgcatgaatgatgtcttttatgctcattcttgtccctctgaagtgtcttcctcatcataaaattgatggtcagaaaataatgacaaaatataaaataactaggaattgaacatgaactagggaagcgggagaaaggcc

SEQ ID NO: 248142 - DNA, 561 bp, Homo sapiens
caggttgtctccattttttgctattacagataatgctgcagtaaacaccctggggtatacgtgtgtgagcatttctagaagagattattagaaattaaattgcagagttaaaaggaatgcactttttcaaatttttatagatattaccaaattcacttccagtagtatgtcgtattgtggcactgtaaccgaatagcctggcatcaaccctccatttaaaggtatttttttttctttcccctttcccctgcagtttcaagcagcctcagaatgctttctttcctgcattctttttcttttcccattctatgctcccgcgccttgtgccattccaaaccctctcttgaaaaactcctgtgttccctccacaaattgaagagtaaaaaattttggaaagaattccacccactctgccccttgcttgcatggataataaaatctcactctctttttattacacctcactcatgtttctttctataagcagcgagcagccagactttktgctggttacagttcattgttgtcattttaatgtgtttttcctcggtcagtagggag

SEQ ID NO: 248143 - DNA, 593 bp, Homo sapiens
caagaagaatctggacagcccttgctgggtttaaatcataccctttgaagatgtgattgagttagggatcttgagatgggaggtttatcctggattatccttatgtttaatctcaagtatctttataggaggaaaacaaagggagatttgactacagacaagagataagaagcccatgggatagaagcagagtcagagagagaagacactatgggaatatcagggaaggagccacgagccaagggatgtacagaatgctctagaagctaggaagaagaacaacaacaacaaaggaaacagattttccttcatagcctctggaggaagcatagccctgctggcatgtttactttggctcattgaaactgatttagggctctggccttcagaactgtaagaacaaatttgtgtgttgttttatggcactaagtttrtggcaatttgttagagcagccataggaaaccaacacaggcaaaagaaaggacctctgaggcttactccacatctgtcaaatgggatcaataccacattcattcattgaatattttttgagagcctaccatgagccaggcctaagaactgggaaggtgac

SEQ ID NO: 248144 - DNA, 593 bp, Homo sapiens
caagaagaatctggacagcccttgctgggtttaaatcataccctttgaagatgtgattgagttagggatcttgagatgggaggtttatcctggattatccttatgtttaatctcaagtatctttataggaggaaaacaaagggagatttgactacagacaagagataagaagcccatgggatagaagcagagtcagagagagaagacactatgggaatatcagggaaggagccacgagccaagggatgtacagaatgctctagaagctaggaagaagaacaacaacaacaaaggaaacagattttccttcatagcctctggaggaagcatagccctgctggcatgtttactttggctcattgaaactgatttagggctctggccttcagaactgtaagaacaaatttgtgtgttgttttatggcactaagtttgtggcaatttgttagagcagccataggaaaccaacacaggcaaaagaaaggacctctgaggcttactccacatctgtcaaatgggatcaatamcacattcattcattgaatattttttgagagcctaccatgagccaggcctaagaactgggaaggtgac

SEQ ID NO: 248145 - DNA, 595 bp, Homo sapiens
ttacaaattgtgagaagcaacatgaaaaaaagcaggggtatgactgagaataactagtcaagcagagggtcctcctttagatagagttgtcaagggaggttgttggagcagaaaaatcttgacctaagactagcataacaaaaagcagaggataaaaagtgcaggcacagagagcagcaaatgcagtatccaaggagggaaaggacaaaatttaatgcaggaaaaaaggtccatgtgactggagcatagtgttctagggagagacatgaacaaggtgagttgggagagaggcagcagctggatcatgcaggaccttgtgggttgtggtgaggaatactgatatgttctcaggtcaatttggagcaggaggaggtttcaggaaggggagttgcatcatcatttgctmttgtgaggaaatagattttaaacagggaagtggagaggccaggaaactagttaggaagctagttttccaagtgagggatgatgctggcttggatgagaatggaggtggtgaggatgaaggattgctctgaatactgtataacataaaatgcttaataaatggtagctctcgttacagtatgatgatgat

SEQ ID NO: 248146 - DNA, 550 bp, Homo sapiens
agagtacctctgttgttttacaaagaataagtctcctaaccagaaggttctcatggggaatttccaaggtttctaaagttgcacgtgtaaaccccatgctcgccttgacttaacctggtacaggtacaaaaacgtgtagaaataggttgttttgtaattccgctaatagagtgcctccctggaacattttttctcctgatggtttagactttgtcctccgggcaaaccttcgcatttgtcttaaaggaagggtctgagtttttgtttgggggaggggaggtgtgcactctccagccttgatgccctgggctgasaaaagaaatccctctggagcccaatccctgaatggttatgccccgccagacctcatctggggacccagtcatccgacctgtttattcagaagtcacaatgattttttgtttctgcctgccctttccccttttctctgtgttcaagcctgtctctactactagttttatgacattgagctagtttctgcccctctctgagccttcatttcctcagttatgatatggggttgtttctt

SEQ ID NO: 248147 - DNA, 572 bp, Homo sapiens
gaagaagctgtaaccaaccaggtctttgcatttcaatgctgacctgagagagggttgggttgagagaacagatgaactgttggggacttctgtgacttcagtctattgagtgaagtctattgacctaacttctgttagggcagtctattcacctaaggatgggggggtgggcacccattgtccctttacttccaagagataacctttatttcttgataactgtaatttgtcaattcttaagtagtaatttctccaaaagatgtggtcccatttcccaccctctgctcttttttcctttgtctctcacttctttcccatgacagcatcgatgtcttgcccctatttgaatcagatattgtgggaaaggtgagacaagttttcggaggaaccactgtgccttagctgacagcatttacccatctggaccttgaagcataaatagatgttgcaagctcccctgagayttaaaaaattgggtttatattttttctcgaaaactatacaattgctattataaaaggaaattccaaaatcccaccaatggaaaataaccacacattataattagccct

SEQ ID NO: 248148 - DNA, 563 bp, Homo sapiens
ggatggggattccctctcatctagttttatgtccttgggagcttgttaccaaatggtagtactttctcttggtctccaccatctggaggacaggaattgtggagttcatgtcatagtactaaaaattatcttgagcagttaaaagcctttgcaagttcaaaactggctgctctaggctccttctgtgaagagcaatggaaattacctaatgctatagcttagtggctaagactttgcctttttacagtggcagcctggtttcaattcttggctcagagaatgagtcctttctggtttgatatctgtgtgatctttgccayttattctctttccctccatgaacaacttccgacatccatcttgaatttttccttctctgggctacctgtggagagtctagattttgtaaaaattgcttactaccgctttgaaaataccacagacactcgtggttaagtcataaccttagttaaggcttattggtttcacctgggagattacttttgtaatagttaaaaagccagaaatattggctgtttgacctagcttaagtcaggttaata

SEQ ID NO: 248149 - DNA, 551 bp, Homo sapiens
ttggtttggttcaatctggtctgttggggcataatgcatgaactcagtctaaaacaatagcctctcataattttgtttaaaaattcccccattttggtcaggttctcacttaggtgattgacactgtggccaaaacttagggtcttagtgctactctcagttaccatcactttgggtttctggtctcaacatgttacttataggttacagtgtcctcatggtcacacacttttttcagctcttgtyattccagttgaagagagaccatttgacattatagagttggctgcatggaagcatttaaaattttaaggagaatacagtgtgccaggaagagtatagtgtatcagaaagataataacaagagtttggagtagttagttacttaaggtcctcataaaccaaaccacctaaaatccaaagaatgggctaaagagtttgctcacttaagtaagcagtctcttcattaatgtccgacaactgaatataatacctattgtgatgtatttcttcataggccacacgtgccagcagctgcacagttacttctc

SEQ ID NO: 248150 - DNA, 551 bp, Homo sapiens
ttggtttggttcaatctggtctgttggggcataatgcatgaactcagtctaaaacaatagcctctcataattttgtttaaaaattcccccattttggtcaggttctcacttaggtgattgacactgtggccaaaacttagggtcttagtgctactctcagttaccatcactttgggtttctggtctcaacatgttacttataggttacagtgtcctcatggtcacacacttttttcagctcttgttattccagttgaagagagaccatttgacattatagagttggctgcatggaagcatttaaaattttaaggagaatacagtgtgccaggaagastatagtgtatcagaaagataataacaagagtttggagtagttagttacttaaggtcctcataaaccaaaccacctaaaatccaaagaatgggctaaagagtttgctcacttaagtaagcagtctcttcattaatgtccgacaactgaatataatacctattgtgatgtatttcttcataggccacacgtgccagcagctgcacagttacttctc

SEQ ID NO: 248151 - DNA, 551 bp, Homo sapiens
ttggtttggttcaatctggtctgttggggcataatgcatgaactcagtctaaaacaatagcctctcataattttgtttaaaaattcccccattttggtcaggttctcacttaggtgattgacactgtggccaaaacttagggtcttagtgctactctcagttaccatcactttgggtttctggtctcaacatgttacttataggttacagtgtcctcatggtcacacacttttttcagctcttgttattccagttgaagagagaccatttgacattatagagttggctgcatggaagcatttaaaattttaaggagaatacagtgtgccaggaagagtatagtgtatcagaaagataataacaagagtttggagtagttagttacttaaggtcctcataaaccaaaccacctaaaatccaaagaatgggctaaagagtttgctcacttaagtaagcagtctcttcattaatgtccgacarctgaatataatacctattgtgatgtatttcttcataggccacacgtgccagcagctgcacagttacttctc

SEQ ID NO: 248152 - DNA, 565 bp, Homo sapiens
gaataaagagcattcttttaaatcaaatatacgttatctttactaaaatatacattatctttactaaaactcctgcatcagctgccttttgttttgtagtggggacagaaaaaccttcatgagccaccgcagcagtagcccagcagtcaggaaccccagctgccgcgtctgaaggacacggtctgctggcatttgctgagcacttgtgaaataccgagacagcagcaggcatggagtcacttccccatgacacrcagaggctcagagaagtgagtcacttgcccaaggccacacagcaacaagaggtggagacctgggccccccccacagcgttagccctggagcctggaaggagccttggagactccggacccagcccttctgttcacccccatccctgacattgaggaagccccacacccagtaactctggctgatttgtggacccagggcaaggctaagaagtggggctcatctgtagaccctacctgacactctgtccactgggagcacagtgactcccaatgaacattgggagtgactgagcatcctcccagccacacct

SEQ ID NO: 248153 - DNA, 565 bp, Homo sapiens
gaataaagagcattcttttaaatcaaatatacgttatctttactaaaatatacattatctttactaaaactcctgcatcagctgccttttgttttgtagtggggacagaaaaaccttcatgagccaccgcagcagtagcccagcagtcaggaaccccagctgccgcgtctgaaggacacggtctgctggcatttgctgagcacttgtgaaataccgagacagcagcaggcatggagtcacttccccatgacacacagaggctcagagargtgagtcacttgcccaaggccacacagcaacaagaggtggagacctgggccccccccacagcgttagccctggagcctggaaggagccttggagactccggacccagcccttctgttcacccccatccctgacattgaggaagccccacacccagtaactctggctgatttgtggacccagggcaaggctaagaagtggggctcatctgtagaccctacctgacactctgtccactgggagcacagtgactcccaatgaacattgggagtgactgagcatcctcccagccacacct

SEQ ID NO: 248154 - DNA, 565 bp, Homo sapiens
gaataaagagcattcttttaaatcaaatatacgttatctttactaaaatatacattatctttactaaaactcctgcatcagctgccttttgttttgtagtggggacagaaaaaccttcatgagccaccgcagcagtagcccagcagtcaggaaccccagctgccgcgtctgaaggacacggtctgctggcatttgctgagcacttgtgaaataccgagacagcagcaggcatggagtcacttccccatgacacacagaggctcagagaagtgagtcacttgcccaaggccacacagcaacaagaggtggagacctgggccccccccacagcgttagccctggagcctggaargagccttggagactccggacccagcccttctgttcacccccatccctgacattgaggaagccccacacccagtaactctggctgatttgtggacccagggcaaggctaagaagtggggctcatctgtagaccctacctgacactctgtccactgggagcacagtgactcccaatgaacattgggagtgactgagcatcctcccagccacacct

SEQ ID NO: 248155 - DNA, 567 bp, Homo sapiens
tgagaaagcaactatggataatatgtaagcaaataggcatgactgagatccaataaaattttatttaaaaaaccataagacagactggatttggcctgtggcctatagtttgtgacccctcatggaggttgatggaaggtaaccattttagtaaagaaaccaggagacaaaggaagcttttgcagtagtcagctatagtttccttgtcatacatccttggactagtatcaatgtatttaaggttttcacccatctatggtgaaataaagttaggaatctcagttattcattttaaaatgttggccttttttggtgttatgcctttttcatttgttttgcttaagttcttttttcatgtaagaaataacattaatagttrgtgggttttttttaaacaaaagccatttgataaatgtttatgttcccagtggcggtgagaatataaagcagaggcagaagagaggtatagtcaatatgatttagtgatgattgaatgaaaaagatttgggggatagagagaaatctcagatgattcagaggtttccaggtgtacactagcatttaacc

SEQ ID NO: 248156 - DNA, 567 bp, Homo sapiens
tgagaaagcaactatggataatatgtaagcaaataggcatgactgagatccaataaaattttatttaaaaaaccataagacagactggatttggcctgtggcctatagtttgtgacccctcatggaggttgatggaaggtaaccattttagtaaagaaaccaggagacaaaggaagcttttgcagtagtcagctatagtttccttgtcatacatccttggactagtatcaatgtatttaaggttttcacccatctatggtgaaataaagttaggaatctcagttattcattttaaaatgttggccttttttggtgttatgcctttttcatttgttttgcttaagttcttttttcatgtaagaaataacattaatagttggygggttttttttaaacaaaagccatttgataaatgtttatgttcccagtggcggtgagaatataaagcagaggcagaagagaggtatagtcaatatgatttagtgatgattgaatgaaaaagatttgggggatagagagaaatctcagatgattcagaggtttccaggtgtacactagcatttaacc

SEQ ID NO: 248157 - DNA, 601 bp, Homo sapiens
attttctgcagatgcaaaaatagaaggttaattggcttgctgtattgctcagatgtctgctcttttgaagtacatgcttttaaaataattttactcttaagtaatcaagtatggacaatgaaaaattagaaaataattaaaattaaaatttacctgctaaagtaaataaataattaaaattaagaattaactttttaatctatgttaagctactgtcacatcactggcttctgagtaacacttgaaaaataatttatcytagccaaagggagaagaaaaacatgaaccagcaaacgtaactgtgtcaccatttgtttggattaaacttaattcattatgtgttaaatctaccaaaaatgaattagcagatgatttgtagtgttgcaaagacttcctcattgaaaagattttacttcaccataccctaactagtgagtccctacagtgcatttaagtgcttttttaaaagattactaactggagtgtagacacactttaaattattaggagctgaaatcaacatcaaacagaaagaaatgcaaattcttaaattttaatttaaattatatacagtaatatgatagtgttatgcatctacact

SEQ ID NO: 248158 - DNA, 545 bp, Homo sapiens
tttcattataaatcccaattacaaatccctgcttagagaagggttgagtcagttgtaccaccatggtccagttaactatagctgagggaacaggcatgcggctttttaatgtctaagagggtattttgttcctagaaaatgaaatgccctcattgagttgaacagactaaatttgttttaacaatcccatttacaattcaaattcctttaaacaacttaatagcatttatacatttaaaaaaatgattcttttaagcagcattgcaaatgcttgaccccattagcataaaccttcccaagtgcttaamtctcataaacataataaattaaacatacggtgactttccaagttctctgaaacatttcagtacttttgcagacttagtaacattttaaaatacctttcaactgaaactcataagtctaaaagtctgttaagcattttaaattagaatcttaaggccagtgtcacatattgtaatatgccaattatgtttaaatacttcaaacagcaaatactacagtttatctcaatgaatataata

SEQ ID NO: 248159 - DNA, 545 bp, Homo sapiens
tttcattataaatcccaattacaaatccctgcttagagaagggttgagtcagttgtaccaccatggtccagttaactatagctgagggaacaggcatgcggctttttaatgtctaagagggtattttgttcctagaaaatgaaatgccctcattgagttgaacagactaaatttgttttaacaatcccatttacaattcaaattcctttaaacaacttaatagcatttatacatttaaaaaaatgattcttttaagcagcattgcaaatgcttgaccccattagcataaaccttcccaagtgcttaaatctcataaacataataaattaaacatayggtgactttccaagttctctgaaacatttcagtacttttgcagacttagtaacattttaaaatacctttcaactgaaactcataagtctaaaagtctgttaagcattttaaattagaatcttaaggccagtgtcacatattgtaatatgccaattatgtttaaatacttcaaacagcaaatactacagtttatctcaatgaatataata

SEQ ID NO: 248160 - DNA, 503 bp, Homo sapiens
ggttcacttcacctgagggagcctcgtaagcaaaggcaaagatggaaatgtgtccaytgccttggagagttgctgattactccgggaactaacaacggtggacaggaaagggtgtaatcgcagagaagaacctaggtcgaagcttaattgaggggaacttgagccggttaaagaatttggccactctcctatatagcctgggaagccccagaagagcatgccagattaacacaggaaggccgggtgtgagtgtgggcttccctcaatgggagccgccttcacctacctccactgagccccaaagggtccgacgagacacctcgacccaaggacaattaatcggactgtgccagctccctaccctgcacagttcagcagcactggcgtaaaaatcacatggaccctcaaggagccggcgacacacacagcgaaccgaacgtcgcgcgaagatgacgtaccagagcacgctcatgagactcacgcagcccggcggcgcagaggcg

SEQ ID NO: 248161 - DNA, 601 bp, Homo sapiens
gtaaatgtatggtttcgcgacccttgctccactgcgatcctaatgcatttttcttttaattccaattccaattttgaaacaccctgcaccctctcaaaattcctaagaggcaattaaccctaacatgaaaaaattaactggatgttattaatttcctttctgtcccaaatgataatgtatctaagacaactatacatcttggaaagccaatccataatctacctactttatttttcatgaaaacctacattaagttgctaatgcttaatckgaacaaaaattcataaatgtaccttcagttcatcaaaaccaaagctttgtaaagcctttcatggtctaggaatcacaggtgttatagatgacaatgccaataaacttggatacaacatgaattatcatttcttaaattcaaactaagggccacctatataaacatagcatattaaagaactaaccttaggtaagagattaaagtttattttcattgttagcctgatcttttatccatttggtgatattcagatataggaaatgggagaaacagtaactaaaatgtattggaatttaatgatggaggtgagaatatcactgtacagtattt

SEQ ID NO: 248162 - DNA, 611 bp, Homo sapiens
aaccaggaattctgttttggatggaaatcagtaactcagtaagtttgaggtgtccacatgtggcgagctgcctcctggataccaagatatacagatctgggctttattctgcccaccaaatcctttactgaggtactctcttgccaaagcacaygtaggaacaagaaaagaggtaaaaaggaggaagattagagaccattctcgcccttaaggatgttgaaatctgagaagggaagaagggaggcttttcggcacctattgcagagcctgagctggaacagcaggtgctgccttgctcatctgacacttggaaaggtatcagcagcaaaacaagatggggacattcaaaaactggttcttagaaacaaaaacatactgccatgttgaccatctggttcctggctacagcagacaaaacacttagtgacaacataagaaaatgaaaccacatcaaccattttgtgagaaaaccgcccccaaactcttcccttttacagttcagttctccgggtagaatttggccttcagggctattttctttggaaatcatgattattttccaaagaaaaacatgttcaggttttctaatggtcaaggaagagggctagact

SEQ ID NO: 248163 - DNA, 529 bp, Homo sapiens
atagtaaagaatctgatgagatttcctaaccataatccatcaggaactgtggacaatgacagagggattcgatacaggagacaagcacatgtcattccaactttcaaaacggcagattctacaaattatagacagaaggcatttcatgttgatcctarattaagattctagagcagattattaaaagtgtggtgtatgaggacctcgaagaaaaagcagtggcattttggagccagtgtgtgctcccaaagaataagtcacttgagaataaccccattttattatgtggtgataatttaccagactgttagacaaagagatataatagacacagtatatatctttatgaggagatgggggattaagaaccagatgctgatacaaataagtagtaattagttgaacaagcctacttgaaattgataaacatcaacctgaactgaagtttgcatagacacatcaaatggctctgccctagatttcagcctaaataacacttttattgtttcctcaggcattgaataaatgt

SEQ ID NO: 248164 - DNA, 603 bp, Homo sapiens
acagactggtcaaccatttggagataggccatgcaggggaattgtgcaccttctggagactagagaaaaacttttaggtttctttcaatccaaagactcagattttaatcaagaatttcattcatttccccatgcaggttgatacagtttcctcagagaggtccatgaggtctcccatttacatctgggaaggactaactgtctaattcctgagcaaactttgccctcctccccctgyaccccagtgttttccaacgcaatccacatcggatacccaggaaaacaccaccactagtacttgcagtggtgctgcaaacaagaaggacttgagacgacagttagcaaaataactaaataactgaccaacacgtgtatattctactttgagcaccctacaaagtagcctaaatcagggtccctgtcattaatgggctacagtcacgatgtaaagttgagacttatatacaggaacacaaaatgaacccagggacaggtggtaagtaaaaaatgagagggtggtaggagttcaaaagggaaagcagcacagttgctactaagttagttgaaggttacaggcagaaagtggtttaagctgggctttga

SEQ ID NO: 248165 - DNA, 571 bp, Homo sapiens
accactgcactccagcctgggctacagagcgagaccctatctctctttgtttttaagtggaaattgtgtatctctgccaattatatcaggaattcacaaaaagtgatggagattagccaaacatggaaatctttccaggaagtaatacctttagggtgattaataactgtgtggctcatgagaaagcatgttgtcaaaatacaagcatgaccccaagaacgcaccctaaaaatgaagtcagacatttcatgtgtaaccaatayaaaatctgaaataataacagccaatatttaatgagttctcgctgtgtttcatagcatcaaggttaagtgttttatatgtcttatatcataaatattcacaataaccacattcattatgttatcctattgttatccccatgtcatttatgagaaggctgaggtttatagaaactaagtatctctatctaggttacacatataggacgaatattaaaagttggattaaatgttcttcaatggacattttcagatctaagcttgtttgggtctgataagtcttttaatagaagctgaaaaggcagagttgg

SEQ ID NO: 248166 - DNA, 619 bp, Homo sapiens
cctaacacataattaactgctgttggaatgaatctttgtccccttgcctccrtgcctgctggacttcatatctgtgtattaatagtcacttttgtttggcgatcttgtgaaaaatgcagactaatttttaatccttaaagagataatacattcacataattttatttttattttttcagataatggcctttcgccatgtggcacatttcaataattttaaaaaaacagttgcaaaatgttatgcagtaacaaatctcccatctttgtcccaagtcacattgctgtcctacatcacagcaaccacgatagttaatttcttataagttcttccaataatactttatacatatacttgtaatactaataaacattcttcttttcttcctttttaaatagtagtaacatactctgcacacacttcttaacttttcttttagttggttaacaatgtatcctggagattgatccacactgatacacaaagatattcttcattctgtttatggttgcataatacttcattgtatgcatgaaaaatttcttttaatgaaggttggtctgtttccagtttttgttattatgcacaatgagaaatgaacagccttgtagatgtgtcatt

SEQ ID NO: 248167 - DNA, 604 bp, Homo sapiens
cagatggatgtttaaccataactaatttaatcatttgtctattgatggatatttaagtttttccagtttattttagtgtaataaataatgcttctgtgaaaatcctttttattacatctttatatattttgaacaaatgtttccatagaataaatcagatcagggaaatgtatttattcattttagttaactgtttttaatattataaaagaaatacacattcatggcaaaatattcaaagagtacagaaggatacaaggtaaaaagaaaagctccttgggaggccaaggcgggtggattgcttgagaccaggagttcaaggccaatctggacaacagagcaagactctatctcttaagaaaaaaaaaaaaaggaaagaaagaaagctctcttcacactccctactcccarcccccaggaccacccacacaggtatctgctcttcatagtttcttatgagaaaacacattttaatagatgatcctaaattgccctctgaaaactgtatgtaagaataattctttttcttttcttttctttccttctttgttcctttccttctttccttttgaaaagtctcacttttttcatttgggtggccagg

SEQ ID NO: 248168 - DNA, 591 bp, Homo sapiens
gaactgaatgaacaagaaggattctttttgatgagttggcctttctctgtgaacttttcattaggctataaacaaaaatacagacatttccttatcacagayataaatatgataaatggccaatctatggaccatgtagagcagagatgataaataaggtttatttcccatggtatctctgattgtttgctcagtgtcttgaatactaggaacagaaagatgtgaaagccaaatgtggtcttagtgggaaactgtgtgataatcgattaataatgtctgtcatggctgaggagtgacacagtgggagtgcgagtactgatctggaacagtgctactcaaagtgtggtctagcagatggtttaagtgtgctaaatatgtgttacccatgatgaaatgagtacagaaatgcaaaacataagtatttcagcaaaccatttatagccaatttgaccattgctgtcacattccaagcatatacttttggtattttataaagtatatattctagtgatgggttcgaaacatcaccaatcacaactcagcccttgaccagcggtagcttggaaagcactgacgtataggactgtgttt

SEQ ID NO: 248169 - DNA, 566 bp, Homo sapiens
aggaatcattcactgagcatgggtgtttgccagttttcacccttttacttggtggaaggattaagataactactcagagattgccaaaaataccttccctgcctctacctgttcccacttttgatttatcctataaaggctgcattaagatggattccttccattagtgtgtcagtgaggccaacaaagaggttgtgccattaaaagtactgaagggtgatcacaaagaagtgcccaacatccatggttgaactggcccgggtggccactggggtcatgcattaattcacccattcatttgccagttcacgcatactcattcattctggcattcaacaactctttttggaatgccagcaatgtgtgtcacagtgcgaggtactggggataygatgatgaccaagagagacaggttctttgccttcatgaaaatgacagtctaggaggggagacagatattaaatcaataatgtatataagtagtgatataaatcctggtaggtgctccagtggggaagcattggttgctctgagatcagttagcgggggtcttatcttagccaggc

SEQ ID NO: 248170 - DNA, 609 bp, Homo sapiens
gatctggcggtcaatgctgttgctggctgggggcctcaatgggcctgttggccagaacacctaagtgcggcttctgtgtgtgcctgggcttcctcacaacatggtggttggatcccaaggacaagcatctcaaggaagagccaagtgaaagccatgtcctttttagaacctagttctggaagacacgcagcctcccttttgccctgttttatttgttagaaaggaatcaccaaatcctccccatattcaaagggagaggaaattagaatccaccttttacaggcatgttttaaatatgccacattcctttaaacaaaagcacagagaggatcttggaatagtgatagcagttcaaatgtgaaagaaacaatggtttcagagcaaaaatgtctcttctgmgatcttggatgactctaccctggacagcgttttgccagctggccctggcctcccacctccctttagggagatgcattgtcctctgaaaagattctctacccttgcttaaataaatgtagggcaatctaactttagcctgtgtgtgtgtatatgtgtgtgtgtgtgtgtctgtgtgtgtggtgggggccagggttcctcctgccatccata

SEQ ID NO: 248171 - DNA, 560 bp, Homo sapiens
ggggaaacaggactgagggtggcaggttgtgtgaagagagtgtggggtgatgaagccagaagtcagaggccaggtttcaagtttgggtctgccagcagtttccatgaggcctctggacaaatcctttcaccaggtttcaacctgtttcctcaaactctcgaggtgggaacaagactggttccaacatgctgtgattcttcaagctatytggggaggctgattacagggagggaatgacctctagtatattcaaggccttgtgatttactattttgcagctatctctctgcctccctccccttccctcacacacacacacacacacacacacacacaccagtggaaaaatcccatgagggaggaaccctggactcattccctgctgtgttcccagtgcttggcacatggcagtgcccaggaatactgtgattgttgctactgaagaaaatcataagtgagggctgctgtcagacagaggtaaaggggagataatgggttggacccctatgcctttttgaggtcctggattgcctttttcagattagtggctattaagaagc

SEQ ID NO: 248172 - DNA, 563 bp, Homo sapiens
tgtgcttctcttctggtctgaagaccccagaacagcaaagggaggctgactgagcaggtacttgactttggggaaaatgtttttctccartgtcaagagctcttcctatcccagctaacctatgtgcccacaagacgaggggaaagatattcctgcatgtaaaatgtcaccatttcatgcaggtaatgaaactcaagtaagagataggcagatgtgactggggtcacccagcaatttggaggcaaagctgggactagaattgaggtctcctgacacccctcaacaagggctcttcaacaatctcatcagacatgaacaggcaattctttccaaggttgtttgaatgtttaaaaatacaaagatttgcccaaaagggtaaaataataaagtattaggctacatggcaggggactcagtagatctgtttgacaagaagatctttccagaactcctcatatcaccttgtttgcagagggcagcctggaattgaagggtggcctacgctagtaagaaggcacctctcagtgttttcttttctcatctgcagaggcagaaatgaattc

SEQ ID NO: 248173 - DNA, 540 bp, Homo sapiens
gatcatctcccttccctgtgtagcagctgtgttacttcctggcaggttacctcagcagcaacaacttacagggttgatattatttcacttgcctgaaggctgaatttgacttcttaaaagccctgtgagatctcaggtttcctagcaaaagctatgaaatctctagaaataataattaaacatgtgacattggagcagaaatagcaaatcaccaatagaataaaaatgagattctagaaagatatctgtgtacatgctgtaatttaggaccaggtaaaaatgtcctttcaaagcagaggaagaaatcaaaaagcagaagagcggagtgtacgagaactctctgtrctgtctatgcaatgcttctataagtctaaaacgatcctaatgctaaaattttagtttttaaaaaaagtagaggaaaaactagtacctaaagaggaaaacattaacatcagatctgtcttatatcatacacaaaaatatacttcagatggatgacagaactaaatgcaaatgaacaatgtgatggcaataaaaact

SEQ ID NO: 248174 - DNA, 456 bp, Homo sapiens
tgtatgttagaatcaccttgggagcttgttaaaacacagattgttgacccctaatcccagaatttctgattcagtagatgggagaagttttatatttcttactagttcccaggcaatgctaatgctgctccttcagagtctagccctttgagaatcagcagcaacctccattgtgcatgagaatcacattggggagctatgaaaacgtttaggccatcctcctgataaattacatcagaatccccgtgggtggggccaacgtatgcacgtttttaaaamctgggtattccgtgtgcagccataccacaaagtaatgtagaagatacgtgagcctgaaattagtgcaccataaaagtaactaatatttactgagcacttagcatgtgacagtccccctactaaatatgttaccacatgatctcacttaatccccacacgaacttttcaagtagggac

SEQ ID NO: 248175 - DNA, 456 bp, Homo sapiens
tgtatgttagaatcaccttgggagcttgttaaaacacagattgttgacccctaatcccagaatttctgattcagtagatgggagaagttttatatttcttactagttcccaggcaatgctaatgctgctccttcagagtctagccctttgagaatcagcagcaacctccattgtgcatgagaatcacattggggagctatgaaaacgtttaggccatcctcctgataaattacatcagaatccccgtgggtggggccaacgtatgcacgtttttaaaacctgggtattccgtgtgcagccataccacaaagtaatgtagaagatacgtgagcctgaaattagtgcaccataaaagtaactaatatttactgagcacttagcatgtgacagtcmccctactaaatatgttaccacatgatctcacttaatccccacacgaacttttcaagtagggac

SEQ ID NO: 248176 - DNA, 456 bp, Homo sapiens
tgtatgttagaatcaccttgggagcttgttaaaacacagattgttgacccctaatcccagaatttctgattcagtagatgggagaagttttatatttcttactagttcccaggcaatgctaatgctgctccttcagagtctagccctttgagaatcagcagcaacctccattgtgcatgagaatcacattggggagctatgaaaacgtttaggccatcctcctgataaattacatcagaatccccgtgggtggggccaacgtatgcacgtttttaaaacctgggtattccgtgtgcagccataccacaaagtaatgtagaagatacgtgagcctgaaattagtgcaccataaaagtaactaatatttactgagcacttagcatgtgacagtccccctactaaatatgttaccacatgatctcacttaatccmcacacgaacttttcaagtagggac

SEQ ID NO: 248177 - DNA, 216 bp, Homo sapiens
ttttaaccactgaccatttacatttgtcagcatgactgctccatccattattatcatttccccagcgcacagcccwggaaaactgtagttgcattagatcaataaaaaactgaattctcttttaagacagagtcctattgtgtaactatgttgggcaaatgtataacttgtcctatgaaaagaaatcccatacctcatttggtcatagtgcattgt

SEQ ID NO: 248178 - DNA, 549 bp, Homo sapiens
gtttaaaagaacaatagaatgactatagttaacattagccrattgtgtatttcaaaatagctagaagagaatcatttgaatattcctagaataaagaaaatatttaaagtcatggatgtcatgattaccctaatatatatgaatataccaaattattacatgtaccctgaaaatatatacatctagtatcaatttttaaaattaaataaaaataaaagacaaggatgggaaaagaaaagcacaaaacaggcaggacaaaatacgatcaaaaaacagaatactgcgctgctttgaaaatgaataaactactgccatgtggaaaaaatgggctcatcacacaaacataatattgagggaaaaaaaacaaaagtcatacgaaacatgattctatttatccatttaaaaacaggctatgttggaaaacctagataggtggtaaacctacaaaggatagcatagaaattatcaccaaaagcaggggtgagacagaatagggtcttctggggtatgtgtgttcaattctacatggcagcaatctggtgtttgctt

SEQ ID NO: 248179 - DNA, 549 bp, Homo sapiens
gtttaaaagaacaatagaatgactatagttaacattagccgattgtgtatttcaaaatagctagaagagaatcatttgaatattcctagaataaagaaaatatttaaagtcatggatgtcatgattaccctaatatatatgaatataccaaattatyacatgtaccctgaaaatatatacatctagtatcaatttttaaaattaaataaaaataaaagacaaggatgggaaaagaaaagcacaaaacaggcaggacaaaatacgatcaaaaaacagaatactgcgctgctttgaaaatgaataaactactgccatgtggaaaaaatgggctcatcacacaaacataatattgagggaaaaaaaacaaaagtcatacgaaacatgattctatttatccatttaaaaacaggctatgttggaaaacctagataggtggtaaacctacaaaggatagcatagaaattatcaccaaaagcaggggtgagacagaatagggtcttctggggtatgtgtgttcaattctacatggcagcaatctggtgtttgctt

SEQ ID NO: 248180 - DNA, 556 bp, Homo sapiens
ttgtgtgggaagaagagagaaactcggatattctttcctggcctcccttctactctttcttcttgacccctccctgccttttcctcaagcaaagcctaggagggccttagagaacagagacctaatgaggcaaatgagaagtggttactatggggcatgtgatgtgaacccccttctccatgtttcctctgagatcttgtctcacctgttgttctctgcttctttcagtgagtgtggaagatgtacttaaagtgttgacagttgttgggcaatakaaatttgccttctttccctttttttttttccttcgttgcccaattaaaaccttttcgctgcttgggtgaactcagaggtagtgatcagcctcttctggatcttcccttgaggcaggtttttctggggtgttccttcctcatggagcagggcatgtggctggcttcagcactggcccttcacagcagtagccataggcgtgggggcctttttggtcatcattatgggagagtctgttcatgatgctctgataaagtttataacctgggttttggatccatac

SEQ ID NO: 248181 - DNA, 556 bp, Homo sapiens
ttgtgtgggaagaagagagaaactcggatattctttcctggcctcccttctactctttcttcttgacccctccctgccttttcctcaagcaaagcctaggagggccttagagaacagagacctaatgaggcaaatgagaagtggttactatggggcatgtgatgtgaacccccttctccatgtttcctctgagatcttgtctcacctgttgttctctgcttctttcagtgagtgtggaagatgtacttaaagtgttgacagttgttgggcaatataaatttgccttctttccctttttttttttccttcgttgcccarttaaaaccttttcgctgcttgggtgaactcagaggtagtgatcagcctcttctggatcttcccttgaggcaggtttttctggggtgttccttcctcatggagcagggcatgtggctggcttcagcactggcccttcacagcagtagccataggcgtgggggcctttttggtcatcattatgggagagtctgttcatgatgctctgataaagtttataacctgggttttggatccatac

SEQ ID NO: 248182 - DNA, 556 bp, Homo sapiens
ttgtgtgggaagaagagagaaactcggatattctttcctggcctcccttctactctttcttcttgacccctccctgccttttcctcaagcaaagcctaggagggccttagagaacagagacctaatgaggcaaatgagaagtggttactatggggcatgtgatgtgaacccccttctccatgtttcctctgagatcttgtctcacctgttgttctctgcttctttcagtgagtgtggaagatgtacttaaagtgttgacagttgttgggcaatataaatttgccttctttccctttttttttttccttcgttgcccaattaaaaccttttcgctgcttgggtgaactcagaggtastgatcagcctcttctggatcttcccttgaggcaggtttttctggggtgttccttcctcatggagcagggcatgtggctggcttcagcactggcccttcacagcagtagccataggcgtgggggcctttttggtcatcattatgggagagtctgttcatgatgctctgataaagtttataacctgggttttggatccatac

SEQ ID NO: 248183 - DNA, 599 bp, Homo sapiens
tattttaaggcactgtttagcagaaaggagatttctttcctgtctacatactttcagttgggtaagtcttttgcccaaagctgatcctccactgagggacttcccgggaggctcacatggaatacacaccctcagtagagatctctgtgggcacgtcctttgcattgaaggatcagcatggagtcatgataaaggcattarccatcatcaagttgactccttcaagcttctggagtccagagaagtgtggaatgatgtccagttcaggccaccttgaggactgatccccaggcaccaggctgttggtgtgttcactcaatggtgagtgccagttacaatcagggaggggagccagcgctagggataagtgggtctgaggagaccttgtctttcttgtccagtgcaatatctgcagctcctagaacatttcctggcacatgctaggtgttcagtaaatatttgttgattgaatgaatgaaacggagtcccttatgggtgtcaacggtgaaacatctgattttaatgtatcttgagtcactccatgttctctttctagaagtgtggttggattctgagtgtagttgggattcatccagtaa

SEQ ID NO: 248184 - DNA, 566 bp, Homo sapiens
gtcaacagaagccttatctactgtgattatccacagagcacaaataaaggaatagaggctcagccaggctgagtaacttgcccaaggtcacacagcatgcaaaagggaagagcctggattctcagagctggagctcttaactatcaccctccacagcctctctgttggcaaaacttcccgcccctgagagaaaacctgagctgtgaatcaaccattcyccaggctgactgacctagcaaccttacagccaaacagagaaattacttctccccttgcagcagaagagggaaggaaagagtctctaccctttgcccaagcattcctaatggatccatcacccttcccggagtcactggcttcaaacacttagcctgcggtgtaactgaaatcattatcgatccagactgttctctaaatgagctcacaatctaccatgccgcagaccagccaggccccgaggagcagctgcctccttgatccactcttcctggctcatatttacactaggaaattagaagttaaagtaaaagcagatagagatggaattgaattatatcaagcaaaga

SEQ ID NO: 248185 - DNA, 504 bp, Homo sapiens
atgtgataacaatagtatttgcctcaaagagttatggtataattaaattggaaaacatgtcaagaaattagaacgatgtctagcacatagtaggtgttcacattatgttaagtattaacattgtcaccattattaagatcattgttaatattattgttattacagatggggaatccaagtctccaagaaaattagtcactaagcagaggtgaaaggaccaataagtgaaacaagctgaaattaaatctcagtttatctgtccccagatcttgggcttttccaattatatcctgcctttttatggaggatcactggcctctctccatggatgacaactcatagcttgtcwacttcacattgttagatgcaattagaagcggagtgactccaggagtctgaaaagcaaagtagatgagttccaagcattgatcatgtcttgcaacagatgtcttcattatgtaattccagagcaacagaatcatgtcacacacaaattttccaatt

SEQ ID NO: 248186 - DNA, 566 bp, Homo sapiens
acagaaacatattttggcctaggcctacacagggccagggttatcaatgtcgctgtcttccaccacctccccatcttttcccattggaaggtcttcaggtgcaatagcacacatggagccgttatctcctatgataacaatgccttcttctggaatacctactgaaggccctgcctgaggctgccttacaatagaagtacactctaaaatagtgataaagtgtatatatatatgtaaagaagtgataaagaggtccactctaaaaaagtgataaaaagtatatatgtgtatatgtactttttgtatatatacatatgtgtatatatgtatgtgtgtgtgtgtgtatatatatacatactttttatcattattttagcatagtcatttcttgtgatcaattatgtcccatactcaattgtatgtgtcatayttttatatgaccagtcacacagtatgtttgttataccagtatcaccacaaacatgtgaataatacgttatgctacgatgttatgaaatccatgctggcactagaaaatgaattattaagctctattataatgttat

SEQ ID NO: 248187 - DNA, 573 bp, Homo sapiens
ttttctttctttctttcttcaagactcagcagggacacgatactgtgaattaaaattcagacagtgtgaattagaaaaaaagtcagtgttttttcttaagatggaagaaagatatttttcaatgctttattagtaagttagacatcaaaagatgaaaacacatgatattatcatgaaaagagagaaagaatgctgtatgaaataaaacaaacaaaatctaaatatccactaagactttcagtattttcagttaaaacattaaaatatttctcttctcatttgcaacacttttgtgttaatctgtaaacttttttaagtgctcaatttaggagtcataaataggccttctttgaccctattaatcttgcatttcttgacccaattctgtgctctcttttccaacacaacttaatgagtttyctatacctacaatttccagttcctctcctttatgctctttgcaacttctccaatcagtgtttgttttctgtcattccacagaaactgcattcaataaagacagcaaagacctccagtttgtgaaaaccagtgattaattttagtcctcatctt

SEQ ID NO: 248188 - DNA, 612 bp, Homo sapiens
agttgaagccaattgatttgttataaaaatgttagaataaaatggcaatgtcatgttttaaaattgtgcatggatgatttcttggggggtgtttaatggagaaattatatttctgaaagatagaaaataaacttgaatgatggtatgaattatattttgaaacatatcaagtaagtgtaagtacagaatatactygccaagcatgggttttcctaaatatctgagttgactctactttgtaaatatattattgaagcaagttgaaaataaaatatattttctatcaataaacaattatttggcattggttaacacactactgtaggatataggtgaagaaggcaaaaaaatgagaatattattaaatattatcaacccatattgaaaatttgcctttattgtttttgtaaatcatgaattgtaattttttaaattataaatttgcttcagtcttaaaaacaacatgattgcaaggaaaagcaattcatttcaaattattacttaacatgtttttttattatacagctaatatatctcatatgtaagacaaaatttagaaaaataatcataatgaaaaaattatcacatactgtttaaatatttataggtaaa

SEQ ID NO: 248189 - DNA, 625 bp, Homo sapiens
caagtctgccaaccttgctgagctgttctgcagcattttagaaatgcatatgatagcaggaagcactggagaaaatcatgcttactcatatttgagctggmaattaattttctaagctgtgaagttcttcaacttcttttgcaaagctaggtcacctgttttcttaatctaatcatctaaccttcccctaaagcatagaagtttacttttctttgcattaagttctacccagataagcagtgcaaggaaatatcctacatctttaattctaacgctccataaattgtaaggcaaacaatcattttagtaatagttttccagggggaacatgaagaaagaaatgctatcatacaacgcacgtggattagtgttttactgaaagtttattgccaaacaattcatgctttgtggtagtttgggtgagccttgtctagaagcagtctagccagagagaaaattctaaaactgccagcgcaagcataacaataatatctgttagggtgttgcatattgatatgaaaaggagatggtcagctcttgggtgggagacctcacaatctgctagccagaataaaggccacataggaagataggaattgatctatttaacttacaacagaaagta

SEQ ID NO: 248190 - DNA, 550 bp, Homo sapiens
gtataaacttgtgaatctttaaagaaagatcaaaatattggtacattttagatatttcatgatttatttaaaatatatataaactayacttaaaatacagaatatgaaatactttttgcagtttttcagtatcttcagttaccttaatatttattgttcagattttgtgtgtgaaagttttggaaaaaatgtgtaaagttatcatataagggctgagcatactgaaatatagagatgtgcatatatatatgcacacacacaatattttagtgaaaaatagttcattagtggataatgaacataataatttgcaagattgtgatataattagaacaacattcatatcagttataaacatataactaatagagtttgaatattggctcaaactagaactaatctagtttaaatattgaaataggagaatttcctgacctccctcacaggacatgtgacaggggtgtggctcatctgtttggtcgctatgcacactcaaactcttatgggagggggagcatgcagaagggcaggtgcaggagccagggtgagc

SEQ ID NO: 248191 - DNA, 453 bp, Homo sapiens
tctttttaagacactaagtgaaatttttgtaacccggcattcccaggtgataaagtatctatttatctttacaattttaaagtatgataatacrcaatacgcactatacattttacagcatttttatcatgttctccttaggcttttgctactgctgacatcaaaattgtctcacttcctacccagtcaaattctttctcctttgttctcctttctcatttatttattcaaccataatcactcagccttatattaactatgtaatccatctgtcttcatttgtgagaaaaccttaaaaccttaaatcatgcatattagtggcaaatatattttaattttagtttctcaaatttgattaattctcaattgcttctctagtggttagctcagagcaaggggcacagctgtatatttgtgggtgtgctgagactctgtttgctggtggtggaagga

SEQ ID NO: 248192 - DNA, 589 bp, Homo sapiens
tattttatagttttcattatgaagaactttcacttctttggttaagttaattcatagatatttaattttatgtgtggctcttttaaatgggattacttttgaatttcttttcacactattcacgttggcatgtagaaatgctactgatttttgtacattgattttgtgtcttgcaactttattgaattcatttatcagttttaatagttttttggtggagttttcaggttttttcaaacataagattgtatcacttgcaaacaatggtaattgtacttattcctttccaatttggatgcactgtatatctttctcttttctgattgccctagctaggacttccagtactatgctgaattrcagtggtgacagtgggcaatcttatcgtgttccagatcttagtggaaaagctttgctgttttttcccattcagtatgatactagctgtcgatttgtcatatatggcttttatcatgttgagatatgttcctcctatttccagttttttgagggttcttatcgtgaatgaatgttgaatgttatcaaatgctttttcagcagcaattgacacgattttttttatccttca

SEQ ID NO: 248193 - DNA, 589 bp, Homo sapiens
tattttatagttttcattatgaagaactttcacttctttggttaagttaattcatagatatttaattttatgtgtggctcttttaaatgggattacttttgaatttcttttcacactattcacgttggcatgtagaaatgctactgatttttgtacattgattttgtgtcttgcaactttattgaattcatttatcagttttaatagttttttggtggagttttcaggttttttcaaacataagattgtatcacttgcaaacaatggtaattgtacttattcctttccaatttggatgcactgtatatctttctcttttctgattgccctagctaggacttccagtactatgctgaattacagtggtgacagtgggcaatcttatcgtgttccagatcttagtggaaaagctttgctgttttttcccattcagtatgatactagctgtcgatttgtcatatatggcttttatcatgttgagatatgttcctcctatttccagttttttgagggttcttatcrtgaatgaatgttgaatgttatcaaatgctttttcagcagcaattgacacgattttttttatccttca

SEQ ID NO: 248194 - DNA, 559 bp, Homo sapiens
cctcttcttcctaacatattggatggatggaatgggcagaggttgactaggaggagctagtccaatagagggagaaagataaactagggtataggttgcagcccagatggtggggagacaaagatatgtgttggtgccacacaaaaagaataaacctttgtcatgaatacagacagagatatggaaagaaaacaggtgaattaaaaatgaggtgttttttctttcctgtggttcattactccaggtgaacaaggaggaggttagggaggcacccactatagyagagatataggaagagttatttttcacacatttaatgtgatcggatgttgtaccactgatattgagctatgtaaaggtgggcactagggacagcataagttaggccagaggcatcggttgagggagatgctgtaaaataaggtggttgcagaaatgctctgtttgcttcaggtgatacttgatagtcaactcagttaattttgacgatcagagcggtgtttaacaatgatagtatggttgcattggttgagtgttaaggaccctacagggaaatttc

SEQ ID NO: 248195 - DNA, 559 bp, Homo sapiens
cctcttcttcctaacatattggatggatggaatgggcagaggttgactaggaggagctagtccaatagagggagaaagataaactagggtataggttgcagcccagatggtggggagacaaagatatgtgttggtgccacacaaaaagaataaacctttgtcatgaatacagacagagatatggaaagaaaacaggtgaattaaaaatgaggtgttttttctttcctgtggttcattactccaggtgaacaaggaggaggttagggaggcacccactatagcagagatataggaagagttatttttcacacatttaatgtgatcggatgttgtaccactgatattgagctatgtaaaggtgggcactagggacagcataagttaggccagaggcatcggttgagggagatgctgtaaaataaggtggttgcagaaatgctctgtttgcttcaggtgatacttgatagtcaactcagttaattttgacgatcagagyggtgtttaacaatgatagtatggttgcattggttgagtgttaaggaccctacagggaaatttc

SEQ ID NO: 248196 - DNA, 548 bp, Homo sapiens
tgcattattcaacattgatgccccctagggaattccctccctttccattgttgggactaggagatcgggattgtcagaacaataatcattatgcaatatgtggatatgttactatcctaacatattctagctttttcatctatcttattgattttaataattaaacctatttgatcttcaaatgctacacattgttcatggacaattgtacaaaattctaaaacttctctgaattgcactaatccagaagttaccaaaaatcccaaataatcacagtcccctggcttcccttaagcagctgccttgatccactctagaaaaatgttcakagtctatgtttcctgttgacacccatatcttaagagaaaaagggaaaatgaggatgatctacaggaacctaatttctcctaatgtttagctatcaggttatttatttcaatgtcagggagaagagtaaaaagtaaggctataatatttataatacttaggatagaaatttatgttcatagaaatcaaaggaattgtttctttcaacaatatataacata

SEQ ID NO: 248197 - DNA, 564 bp, Homo sapiens
tgtttgtcatgtttgagatctctgagaaatatcaggagtgactagaatcagttttaagatttaatagagtgtgcctgtgaatatttctttccaggatttatgaatatttctgatgcatcttttggaggagtcagaggtcartgtgttgttgaataacaccctctttgcccgaagtctctagtaagagataccacatggaaacaatttcctacaattcaacaaggggagagagaaaaaggaaaaaaaaaagttctctaccaaagaactatctggacctgagtaaagattgttactggagtgcctgatggatgtaaacatattaaatgctaagggaagatgttaaagaggatacctcaggaagttcttatagatgattaagtttgccaaaactttataaattcaatcaattatctaacattgcctaagatcaaaaggaaaatgagggtttttttgtttgatttttaaataaatagggagttatgtgttttatatatcatactgtttagcattatcaatttataagtttaactaaaatacattcatcaaacaatactgtctttttgc

SEQ ID NO: 248198 - DNA, 591 bp, Homo sapiens
ggtggcccacacatttcctggtgaggggctttttcctggtttacgggtggaggctttctggctacatactcctacagcagggagagaaatcgtctccttggctctttaaggatactaatccctgtcggaaaggtttttacccccattacctaattacttcccaatactcccaaatattggaaattagagtttcaaaatatgcattttggggggcacagttattcagttcatagcaatgggggagatgaatcattaacaaaattaacgttatggatttgaattggtggcaagactaatatgaaatgactacatcatgagcaaaagccctcagaactgcatagaatgcattgcccttaagacaagctgcaaagtgttcaaagacagattttaatgggtctttccacaatcttatatttctaggcctaattttcaaattgaattaatatattcaaatttaaaatcttttcagtatcctaaaagaaggaagaatcaaagcttgttgacctayttatcaaagtttgttgatctacctcttaagatatgatcaagaactgtgatcaataccttaggcatgatctagtaggggtagac

SEQ ID NO: 248199 - DNA, 612 bp, Homo sapiens
acaacaactgaacaacagataggtaaattatgtcctatttgcagccaacaattaaaataatatttctaagtgctttataataatgtgcatttattcatgtcaacatgtaaaaaagaaggcagaggtatatataatataatcataattatgtgagggattaaaaaactctaaccaatatggattaaagtacttctaagagaacacatttaaaattgaattagcactaatagtctgccaacaaataaaagcaatgtacatgaaagaatggtgcaaaaacagagagagttatctactaaacagataatgaaacaatcctcaacttgttaaaatgattcaaataaatgtaattgaaaatactagcacaattttatttcttttcataagctaaagtaattttatacatgaatgcatggtgagataaaaatggcaacaaaaggtatatgccttaataatttttatgaaatattttttagaatatttatcaaagctattgaaccacgcaytttgattgtactcattctttaattcagtcttgattatgagatttttttaatctgcaaaaataaaagccagacagaaaatctaactatgcaaatgatccttaaaatatta

SEQ ID NO: 248200 - DNA, 586 bp, Homo sapiens
ttttactattttggggatatcaattttttttaaatctcagaataccttattcatacaaccaaacaagtacaacctctcttatcttggacatctgagatgactagagcttttcctcgacctacrttccaggactagagatctgtctagtccagattgacaaaggtgtttttatggttaatttcatgtgccaacgtgactggaccatggtgctcagatattgggtcagacattcttaattttcctttgagggtgttttttttttttgtttttttgtttttttgtttttttgtttttttctgaatgagatcaacatttaaatcaggagactgagcaaaatagattgccctccacagtgtgagtgagcttcattcaaccagttaaaggttttaatagaacaaagactgatctaccctagaaaataaataattctgccagtggacagccttcaggcttgaacagcatcagttcctccctgggtctccagcctgctgaactactttgcagacatcagagttgctagtctccataactgcatgaggcaattccttaaaataaatcattctatctccctctgtaatgcacgtct

SEQ ID NO: 248201 - DNA, 582 bp, Homo sapiens
tcatctgtactaatgtagggtgaaaatggtatcattggttaattttgagtcaagttgccatttttggaccaatcaatggtgggacaaaaatgagttatggaaaacgtgacagttcccataggatcatttgatcatacaactgcagcaaaaaaaaaattttacttaagaacaaagtttgaagagctgcatgaggaacacttcacatgtgtttaaatacatttgctgaaaatgagtataacaatatcagaatttaagatgaaagacaggcaaaactaasgtttgagtctgacatacatttaaaaaaattaaaaaatacaaaagagcttaattcattcaattttgcaaaaagtaacatgtggttaaacttagttaaactgatgattttcaaggtacaccaattactcgtacctccattactaaatcagtcaagaatgccaaattgaaatatttgtagcaaaaccagacttacttgctcattttattcaattgtggtgaaatagtgaagcatttgggcttcatgaataactggcttcacacatcggctattttttaaaagtgacatttgtagagtatcttaaaagt

SEQ ID NO: 248202 - DNA, 488 bp, Homo sapiens
aagtatcgctaagtacacaggagagtggttgagaatactatggtatagccacacagtggagctctatgcacctgtgaaaaatgaaacaggaggatatctgccagttgagagtgggatgatttctagtatatagcaccacataaaaaagccaatgactgaaatacctrtactatgtttcccttatttacagtaagaagaggggatataagaatatacatatgtatgttctaactggttaactacagggaaagtgtgtcaaagtggtgttaagaacagaagaatgagaatggagcagcagaagtgaagaacgagtaatatttatctgagaactattttgtagcacggattcttggaaatacagtaatgttttcatacccttcacaacccctcagaataaactattaaaacctcatcaaggcatggaggaaagccaaagtggaattcacacactaacaaatgaagttaacaagattacacataatagcatc

SEQ ID NO: 248203 - DNA, 505 bp, Homo sapiens
cctggtgggaggtgattggatcatgagatcatgctgttctcttgatagtgagggggttctcatgagagctgatggttttaaatgtggcacttccttgctgtttctctctcctgctgccttgtgaatatgtgccttgcttccccttcactttccactgtgattgtaagtttgttgaagcctccccagccatatggaactgtgagtcaattaaaactcttatgtttataaattacccagtctcaggtagtatgtttatagtaatgtgaaaacagactaatacagagaattggtaccagcagacwtgggtactgctataaagttaacctgaaaatgtggaagtgatgttggaacaggcagaggttggaacagtttggagggctcaagggaacaaaggaagatgtgggaaagtttgaaacttcctaggatttgttgaatcattttgatcagaatgctaatagagatatggacaatgaagtccaggttgaggtggtctcagatggagata

SEQ ID NO: 248204 - DNA, 517 bp, Homo sapiens
ttgcccttgccctagagatctgtggaactttaaacttgagagagattatttagggtatctggcagaagaaatttctaagcagcaaagcatgcttagaagtgacttggcttattctcaaagtattcagttatatgcattcacaaacagatggtttgaaattggaactcatgcttaaaaaggaagcagagcataaaagtttggaaaatttgcagcccaacagtgtggtacaaaagaaaaacccattttctggagaggcattcaasccagctgcagaaattttcataattaaagaggacctgaaatttaataaccaaaacaatggggaaaatgtctccaaagcatgtcagagaccttcatgccagccccttccatcacaggcccagaggcctaggagggaaaaatggtttcgtaagccagtcccaggggtccactgctccgagcagccttgggacttggtgccctgtgtcccagccactccaggtccagtcatgtctgaaaggagccaaggtaaagcttg

SEQ ID NO: 248205 - DNA, 517 bp, Homo sapiens
ttgcccttgccctagagatctgtggaactttaaacttgagagagattatttagggtatctggcagaagaaatttctaagcagcaaagcatgcttagaagtgacttggcttattctcaaagtattcagttatatgcattcacaaacagatggtttgaaattggaactcatgcttaaaaaggaagcagagcataaaagtttggaaaatttgcagcccaacagtgtggtacaaaagaaaaacccattttctggagaggcattcaagccagctgcagaaattttcataattaawgaggacctgaaatttaataaccaaaacaatggggaaaatgtctccaaagcatgtcagagaccttcatgccagccccttccatcacaggcccagaggcctaggagggaaaaatggtttcgtaagccagtcccaggggtccactgctccgagcagccttgggacttggtgccctgtgtcccagccactccaggtccagtcatgtctgaaaggagccaaggtaaagcttg

SEQ ID NO: 248206 - DNA, 320 bp, Homo sapiens
taaaagttctttattaatttggataacaatccattatcaggtatgtscttagcaactattctctcccagtctctggttcgtcttttcattctcttaacattgtctttcacagaagagaatttttttaaattttaatgtattccagtttatcaattctttcacagattgtgccattggtgtcatatctaaaaagtccttatcaaatgcaagattatctacacgttttcctatgttatcctctaggatttttatagttttgcattttacatttaggtctgtgatacattttgacttagttttggtgatgagtgtaaggtgtg

SEQ ID NO: 248207 - DNA, 540 bp, Homo sapiens
tatcaacttttatagctaggatagaagaacatggcctgggctcaaccaatcagactctcaagctctggactatgaagagagagctggtgtcaagaaatgaaggaaaccattcttgttatgggtggcaacagctggggtggtaagaaccaatttctggagccaagagaggcttccaggcaacttgtggcagccagtagcctgcaactgatgcagagctgctgggaagcatgatcgtggctatgtgtctagctactgcctcgtcccttgttcttgcttgttgtgattctgtttctccattgctcttttcaattttgtgagttttccaattacctttctgacataagcatttaatgctacatattttcttctaattacagcttyagctgtactacaaattttgaccttttgaatctttatttttatccaattcaagatgttttccaatttctcttgtgaattcctatttgacccatgggttacttagaatatgttgtttaatatccaaatattaggggattttaaaaatctttttctgttatt

SEQ ID NO: 248208 - DNA, 575 bp, Homo sapiens
cgctaaccttattcaaaactcactcaatggtttacaaaatgccggttcctcttagttatttcttatcagtgttcttatgcagagaagtgtataaaatacactgtataaaattatgaatgctaattgcaagattttcaggttcttaatattaacaaagatacatcataagccatctttgttaatcagcaaattaaacctattacaccaagtcgacttctaagatttgtcaaagtataattatttttaagttaaaaacttaactctcataaaacatatagtgagcasatgtcaaagatttatttaactcaacgagagaagaagcagaatgacaaagctggaataaagaagagtatgacaaccatcacgtggatagtcattggaagtaattctgaaataagagtgcaaagttagacaccaaactggttaatgtcctacagggcaataaagccataaccatcggggttaccctttttttttctggacagatgtctttagcaatgtaacattttctatgggataacatcaaactttacagagtctgggtcctaattagtaagacacacaatgttacctcc

SEQ ID NO: 248209 - DNA, 560 bp, Homo sapiens
gcttagctggcatttgtattgtcacgggagagagtygggataaggacaacataaataggaaagcttgatcaagaattcccttacttcacagttactgcctaaatgcagatattaatacttaaagtcagcggatgtgaaactaaacagcaagctgagcccagcccctctcacagtttgctgctgtctcaggtctcctgacatgacagtgctcacgtcatttgcagccagagaagccccagcctcacccagcaccctcctcaacccagtgcttctcccatccactcatttccccaccaccggggacccaagcagcctacttcctctgaattaccatgcttatcctcactcatattttggctttgtttcactgttcccctggattttatggttgcattcatactgcagtataaccagtataaatcaatacttaatgatttcgtattttttcgcacactttttgtggacaaagcccagtgacaggtctctctcatctctttctttttcagttcacaccagcacctggcctcattgtcacagatatatccacaagggcttaaatt

SEQ ID NO: 248210 - DNA, 560 bp, Homo sapiens
gcttagctggcatttgtattgtcacgggagagagtcgggataaggacaacataaataggaaagcttgatcaagaattcccttacttcacagttactgcctaaatgcagatattaayacttaaagtcagcggatgtgaaactaaacagcaagctgagcccagcccctctcacagtttgctgctgtctcaggtctcctgacatgacagtgctcacgtcatttgcagccagagaagccccagcctcacccagcaccctcctcaacccagtgcttctcccatccactcatttccccaccaccggggacccaagcagcctacttcctctgaattaccatgcttatcctcactcatattttggctttgtttcactgttcccctggattttatggttgcattcatactgcagtataaccagtataaatcaatacttaatgatttcgtattttttcgcacactttttgtggacaaagcccagtgacaggtctctctcatctctttctttttcagttcacaccagcacctggcctcattgtcacagatatatccacaagggcttaaatt

SEQ ID NO: 248211 - DNA, 578 bp, Homo sapiens
cagaataataatagccctgagcttcaggttaaggtaaggattcaataaagtcatgtatatagaagacacagcacacaaaacgtgtacaatccatttttcctcttcttacccatgctttgaatacaactgcactcagttagatgtatgaaaataataytaaaaattataacagctaatgttattgagtaatgactgcatgctgggtcctaccttaagtgctttacgtgtatcaacccaggtagtcctcacaacatcctatgtggtaggtactattattatcctattttgtagatgtggaaactgagggactgagaggttgaggaatgtgtcaaaggtcatacagcaagcaaactgcagagtcaggatttccaaacctgggagtctaggtccactactggcacaacattttacatactgcccttgttaggcattagtcattacttcattattacactttatgcattcctcaggggtgtgtggatgtgagtgtgagcatgtgtgtgtctgtgtgtgtgtgcatgcatgcacacatgatatggaaaagagaatccaagcaggtggggtggatgaccaggctg

SEQ ID NO: 248212 - DNA, 578 bp, Homo sapiens
cagaataataatagccctgagcttcaggttaaggtaaggattcaataaagtcatgtatatagaagacacagcacacaaaacgtgtacaatccatttttcctcttcttacccatgctttgaatacaactgcactcagttagatgtatgaaaataatactaaaaattataacagctaatgttattgagtaatgactgcatgctgggtcctaccttaagtgctttacgtgtatcaacccaggtagtcctcacaacatcctatgtggtaggtactattattatcctattttgtagatgtggaaactgagggactgagaggttgaggaatgtgtcaaaggtcatacagcaagcaaactgcagagtcaggatttccaaacctgggagtctaggtccactactggcacaacattttacatactgcccttgttaggcattagtcattacttcattattacactttatgcattcctcaggggtgtgtggatgkgagtgtgagcatgtgtgtgtctgtgtgtgtgtgcatgcatgcacacatgatatggaaaagagaatccaagcaggtggggtggatgaccaggctg

SEQ ID NO: 248213 - DNA, 499 bp, Homo sapiens
gatcttggcctcatcacaaaaactctgcctagactcctcatttttcctcttgccccataccaatccccaaaagaatctaattttctaaaacaaggaaagaaggatatgaaagagaagcaaagacagataactttttcctaaagaccctgatcttaacttgtttaaagtttgtccaaaaagaatcttgggatcatgagacatccttggttaaaaagggcctcagaggtgttctggtccaacaactcagctaatttaacacccctaatgttgactgaggccttatgggtaatagtcataattattatgtatttatacccattggggagtcaagaaggatttakggtaactggaatcacaataacaatagctcccaactagcattctgatgttttctacaacatctcaacccagcagtctaatagtgcaaacatacatacccaagcattaaatgcccttccatatgtggacctgtctgactatagtcagaacctcaggaccc

SEQ ID NO: 248214 - DNA, 497 bp, Homo sapiens
tttgttctttctgatgttatgatgtgtctggaatttcttccttctggtgggttcgtggtctggctggtttcaggagtgaagctgcagacctacacagtgagtgtcaaggctcttaaggtggtgcatctggagtagttcgttcctcctgtctggagttgttcattcctcctggtgggtttgtggtctggccaaccccaggagtgaagctgcagaccttctccgtgagtgttacatttcataaaggcagtgcggccccaaacagsgatcagcaacaggatttagtgcaatgagcaaaagaacaaaactccatcgtggaagaggaccccagcaggttgccgctgctggctcgggcagcctgctttcattcccttatctgaccccacccacattctgctgattggcccattttacagagagttgattgttccattttacagagagctgattggtccgttttacagagagctgattggtccgttttgacagggtgctgattg

SEQ ID NO: 248215 - DNA, 497 bp, Homo sapiens
tttgttctttctgatgttatgatgtgtctggaatttcttccttctggtgggttcgtggtctggctggtttcaggagtgaagctgcagacctacacagtgagtgtcaaggctcttaaggtggtgcatctggagtagttcgttcctcctgtctggagttgttcattcctcctggtgggtttgtggtctggccaaccccaggagtgaagctgcagaccttctccgtgagtgttacatttcataaaggcagtgcggccccaaacagggatcagcaacaggatttagtgcaatgagcaaaagaacaaaacyccatcgtggaagaggaccccagcaggttgccgctgctggctcgggcagcctgctttcattcccttatctgaccccacccacattctgctgattggcccattttacagagagttgattgttccattttacagagagctgattggtccgttttacagagagctgattggtccgttttgacagggtgctgattg

SEQ ID NO: 248216 - DNA, 497 bp, Homo sapiens
tttgttctttctgatgttatgatgtgtctggaatttcttccttctggtgggttcgtggtctggctggtttcaggagtgaagctgcagacctacacagtgagtgtcaaggctcttaaggtggtgcatctggagtagttcgttcctcctgtctggagttgttcattcctcctggtgggtttgtggtctggccaaccccaggagtgaagctgcagaccttctccgtgagtgttacatttcataaaggcagtgcggccccaaacagggatcagcaacaggatttagtgcaatgagcaaaagaacaaaactccatcgtggaagaggaccccagyaggttgccgctgctggctcgggcagcctgctttcattcccttatctgaccccacccacattctgctgattggcccattttacagagagttgattgttccattttacagagagctgattggtccgttttacagagagctgattggtccgttttgacagggtgctgattg

SEQ ID NO: 248217 - DNA, 553 bp, Homo sapiens
taccacataaaacaagctgtaattatatctctgctactgagcaatgcaaaaccaactcctaataagcaccatattaagactaacagtaaagctsctgaatgaaattcacaatttcttttgtggtagtttttgttctttgtttgcatctcactattgttatatagtcacgtcattttgaagttcttcacaacttaagaagaaagtgtaacaattgaattaattattcaaagttcactttggttgcaatattttggtttgtttttattctgagggaactggccatttaatattggagagttctaagttcttttttgttttttttagacggagtttctctcttgttgccaagctggagtgcaatggcgcgatctcaggttcaagcaattctcccgtctcagcctcctgagtagctgggattacaggcatgcgccaccacacctggctaattttgtatttttagtagagacagggtttctccatgttgctcaggctggtcttgaactcccgacctcaggtgatctgcctgccttggcctcccaaagttctgggatta

SEQ ID NO: 248218 - DNA, 553 bp, Homo sapiens
taccacataaaacaagctgtaattatatctctgctactgagcaatgcaaaaccaactcctaataagcaccatattaagactaacagtaaagctgctgaatgaaattcacaatttcttttgtggtagtttttgttctttgtttgcatctcactattgttatatagtcacgtcattttgaagttcttcacaacttaagaagaaagtgtaacaattgaattaattattcaaagttcactttggttgcaatattttggtttgtttttattctgagggaactggccatttaatattggagagttctaagttcttttttgttttttttagacggagtttctctcttgttgccaagctggagtgcaatggcgcgatctcaggttcaagcaattctcccgtctcagcctccygagtagctgggattacaggcatgcgccaccacacctggctaattttgtatttttagtagagacagggtttctccatgttgctcaggctggtcttgaactcccgacctcaggtgatctgcctgccttggcctcccaaagttctgggatta

SEQ ID NO: 248219 - DNA, 553 bp, Homo sapiens
taccacataaaacaagctgtaattatatctctgctactgagcaatgcaaaaccaactcctaataagcaccatattaagactaacagtaaagctgctgaatgaaattcacaatttcttttgtggtagtttttgttctttgtttgcatctcactattgttatatagtcacgtcattttgaagttcttcacaacttaagaagaaagtgtaacaattgaattaattattcaaagttcactttggttgcaatattttggtttgtttttattctgagggaactggccatttaatattggagagttctaagttcttttttgttttttttagacggagtttctctcttgttgccaagctggagtgcaatggcgcgatctcaggttcaagcaattctcccgtctcagcctcctgagtagctgggattacaggcatgygccaccacacctggctaattttgtatttttagtagagacagggtttctccatgttgctcaggctggtcttgaactcccgacctcaggtgatctgcctgccttggcctcccaaagttctgggatta

SEQ ID NO: 248220 - DNA, 553 bp, Homo sapiens
taccacataaaacaagctgtaattatatctctgctactgagcaatgcaaaaccaactcctaataagcaccatattaagactaacagtaaagctgctgaatgaaattcacaatttcttttgtggtagtttttgttctttgtttgcatctcactattgttatatagtcacgtcattttgaagttcttcacaacttaagaagaaagtgtaacaattgaattaattattcaaagttcactttggttgcaatattttggtttgtttttattctgagggaactggccatttaatattggagagttctaagttcttttttgttttttttagacggagtttctctcttgttgccaagctggagtgcaatggcgcgatctcaggttcaagcaattctcccgtctcagcctcctgagtagctgggattacaggcatgcgccaccacacctggctaattttgtatttttagtagagacagggtttctccatrttgctcaggctggtcttgaactcccgacctcaggtgatctgcctgccttggcctcccaaagttctgggatta

SEQ ID NO: 248221 - DNA, 537 bp, Homo sapiens
gcccaccaccacacccagctaattgtttttgtgtttttagtagagacggggtttcactatgttggccaggctggtctcgaacccctgacttgtgatctgcccacttcggcctcccaaagtgctgggattacagggatgagccaccgcaccaggcctgcatttcttttttcaaagaattactgtggcattttttccaatgtcattgtgttctgtggttcttatctagtcttcacatttatttacataatgaactttcaatgatggatttctacagratttttgtcactaagtggttgcctagaagtatatatcctaagattgaacatattgaaatatgagctaacttttctcattcaattattgattacttagttagtttatttattatttgggggatgggatcttgcaatgctgcccagaccagactcaaactcctgggctcaaactcctacctcagcctcccaagtaggtgggattacaggcatgtactacttcacctggctcaattatttattatttataactcattgtacatat

SEQ ID NO: 248222 - DNA, 537 bp, Homo sapiens
gcccaccaccacacccagctaattgtttttgtgtttttagtagagacggggtttcactatgttggccaggctggtctcgaacccctgacttgtgatctgcccacttcggcctcccaaagtgctgggattacagggatgagccaccgcaccaggcctgcatttcttttttcaaagaattactgtggcattttttccaatgtcattgtgttctgtggttcttatctagtcttcacatttatttacataatgaactttcaatgatggatttctacagaatttttgtcactaagtggttgcctagaagtatatatcctaagattgaacatattgaaatatgagctaacttttctcattcaattattgattacttagttagtttatttattatttgggggatgggatcttgcaatgctgcccagaccrgactcaaactcctgggctcaaactcctacctcagcctcccaagtaggtgggattacaggcatgtactacttcacctggctcaattatttattatttataactcattgtacatat

SEQ ID NO: 248223 - DNA, 596 bp, Homo sapiens
gtctgcaatcccggcacctcgggaggccgaggctggcggatcactcgtggttaggagctggagaccagcccggccaacacagcgaaaccccgtctccaccaaaaaaacacgaaaaccagtcagtcgtggcggcgcgcacctgcaatcgcaggcactcggcaggctgaggcaagagaatcaggcagggaggttgcagtgagccgagatggcagcagtacagtccagctttggctcggcatcagagggagaccgtggagaaagagggagagggaaagctatatcattcttatgtctttgcatcatcatagcttrgcatctactcataagtgagaacatatgatatttggtatccattcctgaattactttacttaggataatggcctccagctccgtccaagttgctgcaaaaggtattatttcgttcctttttgtggctgagtagtattccatggtgtatatataccacattttctttatccactcattgcttgatgggcagttaggttggttccacatctttgcaattgtgagttgtgctgctccagatatcatctttaactcctttgccttctccacatacatttccaagtcctg

SEQ ID NO: 248224 - DNA, 546 bp, Homo sapiens
cctcccgtcttcgatgggcttggggcgcctggacccttccggggtcactttgccgtcttcctccagcccccctccctactccttgtcgccgccyccccgtcttttcaggaccttgcgcactcaggctggccctatgctttggggtaccccagcagtgcccccgggtctccggccacccggtgacggagggagggagaggctggcgagggggcggcgccttaggtcccagcgcgacccgcctctcagcccctcccgccggctacagccgcgcgggacggggcagggacctcgagaacaccggggacttgcgggccggtggccccgggcaggccacttctgacgcgggtgcgaggccttccgcgggcgtgcacggttgggccggagccgcgccgggggccgggacacgcctggggtcagcgctggcgtcgccgctcgggtggggtgggccgggttcgggtccagtctcctccccacgggcggcccgcgccccgtcttccagtgacccccacatcccttgcgccccgagctggaacttcggcaggttct

SEQ ID NO: 248225 - DNA, 546 bp, Homo sapiens
cctcccgtcttcgatgggcttggggcgcctggacccttccggggtcactttgccgtcttcctccagcccccctccctactccttgtcgccgcccccccgtcttttcaggaccttgcgcactcaggctggccctatgctttggggtaccccagcagtgcccccgggtctccggccaccckgtgacggagggagggagaggctggcgagggggcggcgccttaggtcccagcgcgacccgcctctcagcccctcccgccggctacagccgcgcgggacggggcagggacctcgagaacaccggggacttgcgggccggtggccccgggcaggccacttctgacgcgggtgcgaggccttccgcgggcgtgcacggttgggccggagccgcgccgggggccgggacacgcctggggtcagcgctggcgtcgccgctcgggtggggtgggccgggttcgggtccagtctcctccccacgggcggcccgcgccccgtcttccagtgacccccacatcccttgcgccccgagctggaacttcggcaggttct

SEQ ID NO: 248226 - DNA, 592 bp, Homo sapiens
attaatttatgcctttgaatatttagtatgcttgtttatatttaagtgaatattccatggatgaatgaatgtctccaggcggagaaggcactgtctgtattgttcagcatcacattctgggcaccggcagaggctgggcactaagtcaggagatgagagctgagagggtctagagctgtcctatatgcaatggccattcactaataacaatccctcccaatgtgccggctctgtcctagcagacaagtgctgactcatttcactctcccgatcacccaagaagaagatactattattactttcatgttacagatgaggaaactgaggcacagaattcataagggacccactagctgaggttgcccagtcagtcaaaagtatackaagctaggcacagtggtctatagtcccactaagcctatagtcccagctactcaggaggctaagatgggaggatcatttgagctcagaagttcaagaccagcctgggcaacatagcaagaccctgtttaaaaaaaaaaaaaaagtgtactatatacagccaggatgtgaacccagcaacctggtcccagagtctgtttctgaccacctg

SEQ ID NO: 248227 - DNA, 615 bp, Homo sapiens
gcagacttaaactctactttcattcatttgagaaggatcctgggccccctctatggataggattgtaagctgagaatgcgggttcacgccattctcctgcctcagcctcctgagtagctgggactacaggcctccgccaccacgcctggctaattgtttttgtatttttagtacagacggagtttcaccatgttagccaggatctcccgaccttgtaatccacccacctcggcctcccaaagtgctgggattacaggcgtgagccaccgtgcccggccaagaatcctctgtgcatacacacactctgawgtgtatgcaatcacccaggatggtgttcaaaatgcagatacccaggcctcaggccccaaaccagaatctccagcaatgtggaacagagctgctgtattttaacaagttccccaggccagtctgttgatcacataaagctaagaaccgccactcaggaaagtctagcaaagtggttctcaaatatctgattcatacaaatcatttctggagaattatttatttatttttatattttattttatttttgagacagagtctcactctgttcctcaggctggagtgcaatggcacgatcttggctcactg

SEQ ID NO: 248228 - DNA, 432 bp, Homo sapiens
tgtaattaatcaaagaaccaaaagtggggagggcatcatctacaggtaccatcctggtgtctgatggctcctttcagctccactagggaacacctcagaactagtgacattaccggctgcctactccaatattgagtctccccttttcacttagcaatcaaatctaaattttagctaagaataaggccatgggaaataaaactacatttcccaggttcccctgcagctacatatagtactgagattaaattctgggcaaaggtgtaagcagacttgctgtgtacaatttaagtctccttttttcttacttgcctcctgggacgtaatggctrgagcttgggcagctgtctcataccatgaggtggcaggatacaggtggtggagccagaaggtggaagcagcctgggtccctgatgagaacacaggctcgcc

SEQ ID NO: 248229 - DNA, 295 bp, Homo sapiens
agggcaaagtctccgagggaggaacagcaggaggccagtgcagctggggtacagcaagcaagcagctgagaggtcacagatgaggtcacacagggaaaatgggggcctggggttggggaggggggacttgagcaccgctcagtgcccaggcttgaagcastttacatagatgactcattgggcactgctgctagttcccatttcacaagaagaggaaactgaggcccagagaggaaagcggactcaggcgagaccacagagctcatctacaccaggctgggatcgcccccagccc

SEQ ID NO: 248230 - DNA, 632 bp, Homo sapiens
ttggtacatttttctagggctttcttaatgacactgacacttttagaaatccctcttaggattttgcttttcctttcccaatgtgaatttgtggaatatttagcttttttctactacatagagagaaaggatagacagattcttgcccaacacactgtagwgcatgtagacctagaccttcctttcaattccttgcccaagcccttcccccatatgaggatacttttcgttttctactcaaactcattcaagcttcaccatgctccctccccctaggtaaagctttctgaaagaatgggtttcacactgacagtgatttctgagcctctcatttggatggagttttgttcactaaaatgtgtctagtaaaaacagcatagagaagctttagtgaatgctgaaaccagagtacttggggggatttagtcttatttggaatatttgttccgcttgattaaattctacctgtgttcttgcctctattttttctttctgttcttaataatattgagttatttttccactgcattctatctttcctatgcacaagttcttagtctcaagtcacagttctgcatgtactatccattctggctattatttttacaacattttaaacattaagcatacaa

SEQ ID NO: 248231 - DNA, 620 bp, Homo sapiens
attcaggctttcctagttgtccacaaaacgttctttgaaacaatagaataaaggtaacagctctcttttatatttgttagactcaatwactaaattcattatccttgtaagaaataaaaatctaaatgcacttaggagctcaaaatataatattaaatcagttaaatagatgtattatgacactgaagtaattgaaagtacttttaaaattcactctctgaatagaaaatttaatggctattcaacaaatcaaatccacactgacaccgtacattttaagtcaagtaactagctgctgctaattaaatattccttttagctggccctccaaactgatgcaaggcctaatcaaacatgataataaagaatcaatgtaaaatagtacatatagttaagaactaaattgtatgatacactaaaaatcatccaggcttttaaaatagagaagaaaacctaggcaataccattcaggacataggcatgggcaggacgtcatgtctaaaactaccaaaagcaatggcaaccaagccaaaattgacaaatgggatctaattaaacctaaagagcttctgcacagcaaaagaaactacaatcagagtgaacaggcaacctacagaatg

SEQ ID NO: 248232 - DNA, 620 bp, Homo sapiens
attcaggctttcctagttgtccacaaaacgttctttgaaacaatagaataaaggtaacagctctcttttatatttgttagactcaataactaaattcattatccttgtaagaaataaaaatctaaatgcacttaggagctcaaaatataatattaaatcagttaaatagatgtattatgacactgaagtaattgaaagtacttttaaaattcactctctgaatagaaaatttaatggctattcaacaaatcaaatccacactgacaccgtacattttaagtcaagtaactagctgctgctaattaaatattccttttagctggccctccaaactgatgcaaggmctaatcaaacatgataataaagaatcaatgtaaaatagtacatatagttaagaactaaattgtatgatacactaaaaatcatccaggcttttaaaatagagaagaaaacctaggcaataccattcaggacataggcatgggcaggacgtcatgtctaaaactaccaaaagcaatggcaaccaagccaaaattgacaaatgggatctaattaaacctaaagagcttctgcacagcaaaagaaactacaatcagagtgaacaggcaacctacagaatg

SEQ ID NO: 248233 - DNA, 619 bp, Homo sapiens
tcagtcacaatagtttctgaagaggcttctgtagagaacatattttgttcaatttgatagcaataagaatgaaaaaaattagagtgacacacagcatttggtgtcctactaaatataagcataagaggaattggtcaacatttcgaactccaagtttggatgacaaagaaggtatgatctcaacgacagaaacagatcctttattrtacagtacaagtgatcttgaatatccccttgctccacctgtggaataatctgtcttatggtcattctctagctttatataaaacctggcatttagattcatatttcagtggtcagtgaagttccatcaatcttacttaagctcctgtgagctggggatacccatattcctgaattctccttcaaatttattatgtgcttccatactttttctctttgtcaaagaaatgttcagttgaatgtattagtgtagcttaaaatgcatgcatctacataaatatttgtgaactactacttcaggttaaattatctgctaagcactgaagacattattttacaggttttaataagcaaaataattgaaggcattagaaagctatttagataaagctagttttctgtcctattactaaca

SEQ ID NO: 248234 - DNA, 585 bp, Homo sapiens
tttttctctttgtcaaagaaatgttcagttgaatgtattagtgtagcttaaaatgcatgcatctacataaatatttgtgaactactacttyaggttaaattatctgctaagcactgaagacattattttacaggttttaataagcaaaataattgaaggcattagaaagctatttagataaagctagttttctgtcctattactaacacacttccagaagaacaagtacaaaaatacttcaatgaatgacatattctgtatcaacatcaggaatatcctggctcttgacccaaaaaatagattctctagttaattttggactcttccttcataacaaaattaaataagatataaatttgagtttgagaaattgctgcacacacattaaagcaaggaatatgagtaaagtcctttactctgcaggcaaagtgttgaaagtcacagtagtctatgagtcttccagtggatgattaacatgcaattaaaaaaaactaaaaatttactgtgcaaatgttttatagatattttatagatataaaaaaggataaagatattttatagataataaaaaaggaaaatccagac

SEQ ID NO: 248235 - DNA, 575 bp, Homo sapiens
catgctctgagtgaaaagaaataattaactagtttaggataattaatttctatgtcttgtatacttttcagggactacttatttatgccaatattcatttggctgtctgccaaataataagctgcaggatttggttttgtttctgtttttgtttaaggttaaccatattatcgttacttggaatactccaagcagagttcaatattgaatagtatacgctctattaattacattcaactgaaatattttagttttatctgcccataaactgaatttcagaaagtatttgtctggaaatttcctttctgactgttttagaacaccctttraaactctttataaatcatcattatttggtcgatactttaattttaaataattagtgatattataaagactcatgcattatgtcatatttggcaatatgtaatggtgggaagtaatggaaaactaggtgtattagataatccacatataggtatggacgaatcccaagattaaaaaaagatattcgggaatgagaaaacagtgtgaaaatgacccaaaaagaggtatataaaaggaaattgttaaaa

SEQ ID NO: 248236 - DNA, 575 bp, Homo sapiens
catgctctgagtgaaaagaaataattaactagtttaggataattaatttctatgtcttgtatacttttcagggactacttatttatgccaatattcatttggctgtctgccaaataataagctgcaggatttggttttgtttctgtttttgtttaaggttaaccatattatcgttacttggaatactccaagcagagttcaatattgaatagtatacgctctattaattacattcaactgaaatattttagttttatctgcccataaactgaatttcagaaagtatttgtctggaaatttcctttctgactgttttagaacaccctttgaaactctttataaatcatcattatttggtmgatactttaattttaaataattagtgatattataaagactcatgcattatgtcatatttggcaatatgtaatggtgggaagtaatggaaaactaggtgtattagataatccacatataggtatggacgaatcccaagattaaaaaaagatattcgggaatgagaaaacagtgtgaaaatgacccaaaaagaggtatataaaaggaaattgttaaaa

SEQ ID NO: 248237 - DNA, 522 bp, Homo sapiens
gtcagaattgcaatccaagcagtgacctctatctgagcccccataaaccagataattcacctctgccccaagcagactacagactttgaagatacatgatgctgactgcatgcagatcttctcagaaaatctactggtagttttgactctcctctccagaaagaaaaagactgtagaaatataaacaaactcatctctgatatcctgaaagatctgtttgttttatagaattatctgttcatgtgacarttttaaaatatttgcgctcgaattaaggtttcctggttagaggtggaaagctgatgatatttgtatctagtctgaaggcatgatggcaatgttcttcctcctaacaagtttaaaacaagattttactgtgtcaaaatctttctagttagtaaatactatttaaaccgtatgaagtactaacaaagataattgcttccaagtaacaggtggataattcagtagtagacttaatcacaggatgatgggttttgaatctatgtaaaaagtaggcat

SEQ ID NO: 248238 - DNA, 522 bp, Homo sapiens
gtcagaattgcaatccaagcagtgacctctatctgagcccccataaaccagataattcacctctgccccaagcagactacagactttgaagatacatgatgctgactgcatgcagatcttctcagaaaatctactggtagttttgactctcctctccagaaagaaaaagactgtagaaatataaacaaactcatctctgatatcctgaaagatctgtttgttttatagaattatctgttcatgtgacagttttaaaatatttgcgctcgaattaaggtttcctggttagaggtggaaagctgatgatatttgtatctagtctgaaggcatgatggcaatkttcttcctcctaacaagtttaaaacaagattttactgtgtcaaaatctttctagttagtaaatactatttaaaccgtatgaagtactaacaaagataattgcttccaagtaacaggtggataattcagtagtagacttaatcacaggatgatgggttttgaatctatgtaaaaagtaggcat

SEQ ID NO: 248239 - DNA, 522 bp, Homo sapiens
gtcagaattgcaatccaagcagtgacctctatctgagcccccataaaccagataattcacctctgccccaagcagactacagactttgaagatacatgatgctgactgcatgcagatcttctcagaaaatctactggtagttttgactctcctctccagaaagaaaaagactgtagaaatataaacaaactcatctctgatatcctgaaagatctgtttgttttatagaattatctgttcatgtgacagttttaaaatatttgcgctcgaattaaggtttcctggttagaggtggaaagctgatgatatttgtatctagtctgaaggcatgatggcaatgktcttcctcctaacaagtttaaaacaagattttactgtgtcaaaatctttctagttagtaaatactatttaaaccgtatgaagtactaacaaagataattgcttccaagtaacaggtggataattcagtagtagacttaatcacaggatgatgggttttgaatctatgtaaaaagtaggcat

SEQ ID NO: 248240 - DNA, 563 bp, Homo sapiens
tttcaagttagcatatcataaaataatatcccaagggatgtaaatacaactacctcaaaaatagatatggagataaagtatcatatttaaagcaattttttgtaatgtacattaaattaactagtttctttttagtactaattctcagagcttttaatatgccaatgcatattgtgattctaacagagaaataacaatatgcaccaatattacttgatcagaacatatattttattttcccttacccccaccagtattgtstttcaaaataatgtacattgtgatagtttggacatgtacttaacactgtatataacttatattgattcagcacatttatacttatgtaagtaatacagtggttcctcagtatctgagggggattggtttcaggacctctgcagatccaaaatccacaggtgttccagtcctatgtataaaatagcctattatttgcacataacctgtgcacacatcctcctgtatatttgatattatctctagattacttataatacctgaatcaatttaaatgctatgtaaatagttgctatagtattagt

SEQ ID NO: 248241 - DNA, 501 bp, Homo sapiens
ttgctcaatgagtaaatggtataattgaagatgtagcaagcatttgaaatgataactcatttgataagtatgagccaaattgctttagtttctttaaaatatctgagagctccattatggaactgagacagcctacaaaccstagtctattacataaagctctcagtcccatttacagtgatgcagcatagctttgtgtttctggatacaactcttccttatgatcttttagaagtaaagaccttgtgtttcctaaattgtaactaattcctacagaagacaagacagagtctgggctttgaaactgtcttccatagtgtgatatgtgaaatataaaatgaaaagtaagacagagaagaaagaaaacagtgagtgaattctctatcttcagctgaggtatccaagttctcacttcggaactgactacgggcggttgtgatgcgacccatggagagtaaggaaaagcatggtggggcaacggcccacctatgagtgtcacag

SEQ ID NO: 248242 - DNA, 501 bp, Homo sapiens
ttgctcaatgagtaaatggtataattgaagatgtagcaagcatttgaaatgataactcatttgataagtatgagccaaattgctttagtttctttaaaatatctgagagctccattatggaactgagacagcctacaaaccctagtctattacataaagctctcagtcccatttacagtgawgcagcatagctttgtgtttctggatacaactcttccttatgatcttttagaagtaaagaccttgtgtttcctaaattgtaactaattcctacagaagacaagacagagtctgggctttgaaactgtcttccatagtgtgatatgtgaaatataaaatgaaaagtaagacagagaagaaagaaaacagtgagtgaattctctatcttcagctgaggtatccaagttctcacttcggaactgactacgggcggttgtgatgcgacccatggagagtaaggaaaagcatggtggggcaacggcccacctatgagtgtcacag

SEQ ID NO: 248243 - DNA, 501 bp, Homo sapiens
ttgctcaatgagtaaatggtataattgaagatgtagcaagcatttgaaatgataactcatttgataagtatgagccaaattgctttagtttctttaaaatatctgagagctccattatggaactgagacagcctacaaaccctagtctattacataaagctctcagtcccatttacagtgatgcakcatagctttgtgtttctggatacaactcttccttatgatcttttagaagtaaagaccttgtgtttcctaaattgtaactaattcctacagaagacaagacagagtctgggctttgaaactgtcttccatagtgtgatatgtgaaatataaaatgaaaagtaagacagagaagaaagaaaacagtgagtgaattctctatcttcagctgaggtatccaagttctcacttcggaactgactacgggcggttgtgatgcgacccatggagagtaaggaaaagcatggtggggcaacggcccacctatgagtgtcacag

SEQ ID NO: 248244 - DNA, 501 bp, Homo sapiens
ttgctcaatgagtaaatggtataattgaagatgtagcaagcatttgaaatgataactcatttgataagtatgagccaaattgctttagtttctttaaaatatctgagagctccattatggaactgagacagcctacaaaccctagtctattacataaagctctcagtcccatttacagtgatgcagcatagctttgtgtttctggmtacaactcttccttatgatcttttagaagtaaagaccttgtgtttcctaaattgtaactaattcctacagaagacaagacagagtctgggctttgaaactgtcttccatagtgtgatatgtgaaatataaaatgaaaagtaagacagagaagaaagaaaacagtgagtgaattctctatcttcagctgaggtatccaagttctcacttcggaactgactacgggcggttgtgatgcgacccatggagagtaaggaaaagcatggtggggcaacggcccacctatgagtgtcacag

SEQ ID NO: 248245 - DNA, 630 bp, Homo sapiens
gagccaaattgctttagtttctttaaaatatctgagagctccattatggaactgagacagcctacaaaccctagtctattacataaagctctcagtcccatttacagtgatgcagcatagctttgtgtttctggatacaactcttccttatgatcttttagaagtaaagaccttgtgtttcctaaattgtaactaattcctacagaagacaagacagagtctgggctttgaaactgtcttccatagtgtgatatgtgaaatataaaatgaaaagtaagacagagaagaaagaaaacagtgagtgaattctctatcttcagctgaggtatccaagttctcacttcggaactgactaygggcggttgtgatgcgacccatggagagtaaggaaaagcatggtggggcaacggcccacctatgagtgtcacagaaccaggacaaaccccaaccccagcccagggaggcagtgagtgattgggtgaccctgctggggggaaccactatcttcccactgatctttgcaacccatgagacaggagatctcatgagctcatgccaccagggctttgggttagaagcacagagccatgaggtctctcagcagcctcttggacaagcacaggagacaca

SEQ ID NO: 248246 - DNA, 630 bp, Homo sapiens
gagccaaattgctttagtttctttaaaatatctgagagctccattatggaactgagacagcctacaaaccctagtctattacataaagctctcagtcccatttacagtgatgcagcatagctttgtgtttctggatacaactcttccttatgatcttttagaagtaaagaccttgtgtttcctaaattgtaactaattcctacagaagacaagacagagtctgggctttgaaactgtcttccatagtgtgatatgtgaaatataaaatgaaaagtaagacagagaagaaagaaaacagtgagtgaattctctatcttcagctgaggtatccaagttctcacttcggaactgactacgggcggttgtgatgcgacccatggagagtaaggaaaagcatggtggggcaacggcccacctatgagtgtcacagaaccaggacaaaccccaamcccagcccagggaggcagtgagtgattgggtgaccctgctggggggaaccactatcttcccactgatctttgcaacccatgagacaggagatctcatgagctcatgccaccagggctttgggttagaagcacagagccatgaggtctctcagcagcctcttggacaagcacaggagacaca

SEQ ID NO: 248247 - DNA, 562 bp, Homo sapiens
gggggaactgtcaaaagttatacagagatttctgactgtgtaggggttcagcactcctagcccccttgtttaaggattaactgtatatttacttttgtcttgtattttctttcaactatcaagtaatttttccctaatgatacaaacctgccacttcatagtcaaggaccaaagatcatcacttgactctgttttagaaaataaatgtgcacttagaacaaggtacgtaatttctcatttcatctttgtaaggatyctctaaggcatgtacttatatcccaatgtatagatgaggaatgagtgactgaggagtaaagcatttggttttagactttcccttcaagggcttgtaatcttagtcaaacaggagaatagggagagtcaaacatttttagatgatcaccagtacattttcttttcttcttttttttctttttctttctttcttttttttttttttttttttttttttccagatggagttttgctcttcttgcccaggctggagtgcagtggtgcaatcccagctcactgcaacctctgcctgccgagttcaagcagt

SEQ ID NO: 248248 - DNA, 562 bp, Homo sapiens
gggggaactgtcaaaagttatacagagatttctgactgtgtaggggttcagcactcctagcccccttgtttaaggattaactgtatatttacttttgtcttgtattttctttcaactatcaagtaatttttccctaatgatacaaacctgccacttcatagtcaaggaccaaagatcatcacttgactctgttttagaaaataaatgtgcacttagaacaaggtacgtaatttctcatttcatctttgtaaggattctctaaggcatgtacttatatcccaatgtatagatgaggaatgagtgactgaggagtaaagcatttggttttagactttcccttcaagggcttgtaatcttagtcaaacaggagaatagggagagtcaaacatttttagatgatcaccagtacattttcttttcttcttttttttctttttctttctttcttttttttttttttttttttttttttycagatggagttttgctcttcttgcccaggctggagtgcagtggtgcaatcccagctcactgcaacctctgcctgccgagttcaagcagt

SEQ ID NO: 248249 - DNA, 463 bp, Homo sapiens
gttgtgggagggacccagtgggagataaatgaatcatgaggatggtttccccatactgttcttgacatagtgaataagtttcatgaaaactaatggtttataaggggaaacctcttttgcttgcttctcattctgtctaccctgccaccatgtaagacatgagtcgccttctgccatgactgtgaggcctccccagccacaaggaactgtgagtccatgaaacctctttttctttatagattacccagtctcaggtatgtctttatcagcagcatgaaaacagactaataaggtatccagttaaacaaatcttcatattttatacaaaaagattacctttttgagaattatgcattttatctcttacctgctattaaagagggtctcccattgtgtttttcacatagtgagtcttrgcctgtgaacatagttgtgttagtctgtttttgtgttgctgtaaagg

SEQ ID NO: 248250 - DNA, 563 bp, Homo sapiens
aggatctggaaaggcaaggaaggttctttcctctataggtttcagaaggaacattgccttgccaagattttgatttcagacattaagccttcagaactatgagacaatacatttctatggttctgaggggtttcccaacacatggaattcagtgttaaaccacggcaattctaggcaaattcgaacagttggtcacactattgctgttcattgaataggccagatgcccttccgccataggccctttgatctagaagtttactattcttaaactaagagtttaaagcagctacccarataaccactttactaactccctaaccttcttaaagcctttgaggaaagctcaccttcttcatgagccttatgctatacattctatctaaattgtgctctgccctctgtgcttccaatcctcttatcctactcggttttctttatcttacaaattaccttctaatagattatatagttaacttatttattatgtctattatctgttgttgtcatatccttatgagactataagccacgagagggcaagatcttattattctatgttc

SEQ ID NO: 248251 - DNA, 563 bp, Homo sapiens
aggatctggaaaggcaaggaaggttctttcctctataggtttcagaaggaacattgccttgccaagattttgatttcagacattaagccttcagaactatgagacaatacatttctatggttctgaggggtttcccaacacatggaattcagtgttaaaccacggcaattctaggcaaattcgaacagttggtcacactattgctgttcattgaataggccagatgcccttccgccataggccctttgatctagaagtttactattcttaaactaagagtttaaagcagctacccagataaccactttactaactccctaaccttcttaaagcctttgaggaaagctyaccttcttcatgagccttatgctatacattctatctaaattgtgctctgccctctgtgcttccaatcctcttatcctactcggttttctttatcttacaaattaccttctaatagattatatagttaacttatttattatgtctattatctgttgttgtcatatccttatgagactataagccacgagagggcaagatcttattattctatgttc

SEQ ID NO: 248252 - DNA, 493 bp, Homo sapiens
tcataactctcaattcatttgtccactgtggaaaagttttctttcttattttaaagattagaaatatctagttatttatattactatcattagagacaaaatttgggggaatttaaaaagcaktttttaacctgggtatagaacttaaaaaattagataatactcaacttgttttcaaaatatttcaagcatagtatggtaaaatgccttcaagtgattattgaaagagtacagtaatttctctaggctaagtttagatacttttgatattatatgatttataatatctttctttaaaaagaaaaaaatgatttgtagtttccttatttcttataatttatattttcagtttactgttttgttattccagcaatattagttactgaagaaaagcacatgtcacctcttaagcatgtgattgtgtatatgctaagaaaaaggggtatttagtcaaagtttttatgcatgtttttattgagtaaatgtctaactt

SEQ ID NO: 248253 - DNA, 493 bp, Homo sapiens
tcataactctcaattcatttgtccactgtggaaaagttttctttcttattttaaagattagaaatatctagttatttatattactatcattagagacaaaatttgggggaatttaaaaagcagtttttaacctgggtatagaacttaaaaaattagataatactcaacttgttttcaaaatatttcaagcatagtatggtaaaatgccttcaagtgattattgaaagagtacagtaatttctctaggctaagtttagatacttttgatattatatgatttataatatctttctttaaaaagaaaaaaatgatttgtagtttccttatttcttataatttatattttcagtttactgttttgttattccagcaatattagttactgaagaaaagcacatgtcacctcttaagcatgtgattgtgtatatgctaagaaaaaggggyatttagtcaaagtttttatgcatgtttttattgagtaaatgtctaactt

SEQ ID NO: 248254 - DNA, 532 bp, Homo sapiens
tcttaagcatgtgattgtgtatatgctaagaaaaaggggtatttagtcaaagtttttatgcatgtttttattgagtaaatgtctaacttacataatggtatttttttttttataagtagtaaccattacagcatcctaagtagtccagaaactttgggaacattgttcacagtataaaatgataactgaaatgttttaagctaaatcacttctatataattgmaataagacttaaactgcaccaggtgctgtctctaatatacccatccccttgagagtttggtgttgaatacttccttggtaatggaaaggcacgccaactatgcccactacttgtatcgacacatactctttatctttttataaaaaaaaaaaaaaaaaaaaatactatattgtttcccctatctaaatgatggtcacagaatctgtttttttttttttttaagcaagtggagtaaataataaattttaggaaaatcattacccacttcactcattcattcaattcttattgatcactaagtaccatgaa

SEQ ID NO: 248255 - DNA, 576 bp, Homo sapiens
agcaaaatgctttaaactactaaccaataattattgcctgactacctacttaccaaacagataattacaccctctgtttatagagttcctttcagttgcaaataactttcataaccactaccttttctgattaaaataatacctaatttattaagagtccttactaagtcccagatccttctcacaacagctctgaggtagattctattattccataatttacagatcagaaactgaggtgaagaaatactaaataatttccctcaatgtttcacagatattgagttataagccagattcctgaatcttcccttaagtatcttacaaccttaccccttaccctgtggtgagataacagggcaagcattactgataatttttttaaaaacatccaagatgttaagtaatttgtccaagayggagtagtcaatgagaaggaaaccctggacaaaaatgttagttgtaaaggataaaaagtcccacagatgagtaatcatcaagcgttcccctttcatgcagtcacaaaggagaaaatgaaaatagttcaacattgaagtttattgaacttaaaaaaaa

SEQ ID NO: 248256 - DNA, 574 bp, Homo sapiens
accatacagtctgtcagataagcaagcatcataacaagagaacagctatgaaaatcaatcagaataaaattacgtaaaagtgagagtgttttccctgaggaattaattagcatagctatcccaatctgcaacaccctctccatccattttcttctcaaagtttaattctttaaacttgtgacaaaagaagaaaaaagccaatggatctacttaytttactgtggagggtctgtaagattaacaaaaacaatatattcttggtttattcactcacaaagctatttgtagtagttgatgtaagcacaaaatatgatcgcatctagttgttctatggtcatgcaaagcctgatactgttggctatggcagctgtgaatctaatagaggcaacagaaggacagagtcaagttcaaatccagatctgacctagaaggctatgttcttaactcccacaaatcacaatctcctactgtatataaaaccagagctaaaatagaaggaacctcataatgggatgataaaaaggaagtagaaacaaaagctgcgaagtaaggtaagctaagtctaaattgtagt

SEQ ID NO: 248257 - DNA, 527 bp, Homo sapiens
tgtagtcagaaaagcctgacagatgaaacagcatccgatcacagacttaaaggaagacatgaacaaaccatgacaagaatggaaagagaaagtttagggagagtaaccagcatttgcaatgatctgcatgcttagtatgtttgagaatcagcaaagaggctaatgcaactggagtcgaatcgttatattaggggtagtgctgggtgacaggaaagagtgtcagaaaagtattggaggaccagatctttagagtcttgtagatcatgctgaagaatttgggaaattattggaggattctgaccagggargtcaactagttgtattacactgattttaaccagcagtctcataagtgaaagtgtcaccagtgaaggtgaagaaggccttaaagtaccagtggatctcaccaagcaacagtaaagagtggtgagaaatttgcaaatgatgacatggtttaaaaatggaggaaagtggagactgagaagtagaagggcaggggaaagaaaaagaaaaggcaaggctgtggt

SEQ ID NO: 248258 - DNA, 527 bp, Homo sapiens
tgtagtcagaaaagcctgacagatgaaacagcatccgatcacagacttaaaggaagacatgaacaaaccatgacaagaatggaaagagaaagtttagggagagtaaccagcatttgcaatgatctgcatgcttagtatgtttgagaatcagcaaagaggctaatgcaactggagtcgaatcgttatattaggggtagtgctgggtgacaggaaagagtgtcagaaaagtattggaggaccagatctttagagtcttgtagatcatgctgaagaatttgggaaattattggaggattctgaccagggaggtcaactagttgtattacactgattttaaccagcagtctcataagtgaaagtgtcaccagtgraggtgaagaaggccttaaagtaccagtggatctcaccaagcaacagtaaagagtggtgagaaatttgcaaatgatgacatggtttaaaaatggaggaaagtggagactgagaagtagaagggcaggggaaagaaaaagaaaaggcaaggctgtggt

SEQ ID NO: 248259 - DNA, 568 bp, Homo sapiens
gctcactgcaacctctgcctcctgggatcaggtgatcctctcaactcagcttcttgagtagctagaactacaggcatgcgccatcactcctggctaatttttgtattttatttttttattttttagtagagacaggggtttcacaatgttacccaggctggtcttgaacccctgggttcaaacaatcctcccgactgggcctcccaaaatgctgggattataggtgtgagccactgcacctggcctcctcaatgattttcttaatggcagctggaaacttgtctgctgccttagtcagcagaagctgcttctcctgttatctcgatgtttttaaagccaaaccactaaaattatcaaaccatcctttgctactattaaaattctccagctttaaatccttcatcttccttttgctttaagttgccataaaataactttgctttttctcgagtcatattgcattctataggtatgcctttcttataacaatcttgcatccacrtaaaagctccattttcaacgtatctatctcatgcaaggtttgtgtgcctgctggcatagctacagc

SEQ ID NO: 248260 - DNA, 550 bp, Homo sapiens
tgtttgtacagcatagttgactaaatattttaagcccactgttgagaccctactactcagaaaacagcaaaatatttttttaaatattactgttagttgacagtgcactgcgttactcatgagctctgatggaaaatacaaggagatttatgtagttctcatgcgtgcaaacgtagcgttcatactgcagcccrtggatcaaggagtaatttttacttttaagtcttatttaacgcatacatttcataaggctgtagctgctatagatagtgatttttctgatggatctggaggaaataaattggaaatattcgggaagggattcaccattccaaatgtcattaaactatgtaagtatattggtgattcatgggaggaggtcaacatatcaatataacaggagtttgaaagaaattgattccaaccctcatgaatgactttcatgggttaaaaatttgagaggagcaagtaactgcagatgtggtaaaaatagcaggagaactagaattagaagtgggacctgaagatgtgactgaatggctgcagtctc

SEQ ID NO: 248261 - DNA, 558 bp, Homo sapiens
gattttaaagtaaaaagaaataaaaccatctcttcttaaatgcagaaatctatatgtagtcttggacaatagccataatgaaagttgaaaatgtcagctaccaaaatgaatggtaaaagtaatgaagaaacttgtacatggaaactgaagaaaatgcaaaatacccttaagtaagaaaaaaataaagattgaggttagaaataattaacatttaaaaaygtttaaagggaagatatagatttataatagcacactcaggacacagagggtaaaatcctaaaacaggcacacaaagaaaaaaaattaagactatattcattactataacaagctgtatatagtggataagatactgtcaagaaggcatggatatgctgaactattaacaaagtgaaggcagagttttatataggtatgatggggtagaactgaaggaatgagagggtaataaagacaaattagaattaagtgcagaagtacacaggaataggtcaaagaattaaatttgtatggactaaagtaatctggtgtgacttaaatagagaaagatggacttga

SEQ ID NO: 248262 - DNA, 547 bp, Homo sapiens
gtcgtgtatcagtttgcctattaatcacaacttgtgcctccatttttcttgccaactgctgaataaactttgatgggtttggcatctatgtgactattggaatgctgtcaagaaatggtattcagaacctggggctctagtggtgagatgacatatggatgtgmctctggtgacttcaaaactttctttttggacaaatttataatttctgcagaactggaagaacatcacttacaatgatacttggccatttatatattgtgcagtttaagcaagtgaatcagttgcttcttcaattgctagcaagcaaaaaagtagtggagaagtcatttattaaatgtgcttcagctagcaataaaggtttggaattggatgctattttgaaagcattgtctgttgacagatgagggcctaagaagcatggggttaaggatatcaaaagcattgaatttttttttttataaaagaggaaatatatcccagatgtttagtatttggaaactatttctacctctatgtctttgatgtgagaaccagagccatttcc

SEQ ID NO: 248263 - DNA, 547 bp, Homo sapiens
gtcgtgtatcagtttgcctattaatcacaacttgtgcctccatttttcttgccaactgctgaataaactttgatgggtttggcatctatgtgactattggaatgctgtcaagaaatggtattcagaacctggggctctagtggtgagatgacatatggatgtgactctggtgacttcaaaactttctttttggacaaatttataatttctgcagaactggaagaacatcacttacaatgatacttggccatttatatattgtgcagtttaagcaagtgaatcagttgcttcttcaattgctagcaagcaaaaargtagtggagaagtcatttattaaatgtgcttcagctagcaataaaggtttggaattggatgctattttgaaagcattgtctgttgacagatgagggcctaagaagcatggggttaaggatatcaaaagcattgaatttttttttttataaaagaggaaatatatcccagatgtttagtatttggaaactatttctacctctatgtctttgatgtgagaaccagagccatttcc

SEQ ID NO: 248264 - DNA, 529 bp, Homo sapiens
gctgtcaagaaatggtattcagaacctggggctctagtggtgagatgacatatggatgtgactctggtgacttcaaaactttctttttggacaaatttataatttctgcagaactggaagaacatcacttacaatgatacttggccatttatatattgtgcagtttaagcaagtgaatcagttgcttcttcaattgctagcaagcaaaaaagtagtggagaagtcatttattaaatgtgcttcagctagcaataaaggtttggaattggatgctattttgaaagcattgtctgttgacagatgagggcctaagaagcatggggttaaggatatcaaaagcattgaatttttttttttataaaagaggaaatatatcccagatgtttagtatttggaaactatttctacctctatgtctttgatgtgagaaccagagccatttcccagattacaaaggccataagttcatgcygtcataggaatttagaggcctttagaatggcatatgccaagttcatgtgtgtgtgtg

SEQ ID NO: 248265 - DNA, 532 bp, Homo sapiens
taaggaagctgtctgaacaggatccaagtgcttaatatatgctgaggtcccacttaacatttattatctgttatcgaaggtaggagaaaagcatgtaaattatatggatgtctctgattcaaggaaagggaaagataaatacttatgcagatgctcagtcattttcatcagccattttctaaaacatagcccatctttttttagacttaycagtaactttgtaagaagctctttccattgcttgtaagttaacctatttttacttaaccattgcttacattagcaaagaaatccaacaaaacttgacgctcaaggttgttgtgcaatagatgtaatttgcagaaaaaatcagaaccttaagaaatctggaggactttaaaatgattctcttcatgagtacttttttccaaacagatgtaaaagaataaaagaaagaagagaatcattagcaaatataccataagattttgggtgggtataaaagtgaggcaataattttctgtgtctgctgaacaggtatgcttttgaggta

SEQ ID NO: 248266 - DNA, 544 bp, Homo sapiens
taaatttacatttaaaacacccaccttattgaaaatatttaaaatttaaaaattatattgagctaacatttgttggttgcatacaatgtgctaggcatcgttcaagtggtttttgtgtattaactcattttggttttggatacgtaaatagcactaactggtttttgatggtttgttcttatgctgcccgcacaaatttgagaattgacccaaactcaatggaactataaagagggaccttctcatgatgtaaaaaaagcctctgatctgtcctattttcctcatacagtgagagtcataatacacatttatatgctgctaaaatatgtaggctagagaagtgccatagactcattaattttacaaattgtggtggaaaaagagagtaaaggaaaacaggtaacatttttagttgtcaataaatggatccaatagaagatacattcttaaatagggggmctgattttcggtaaaaggtattttctcatcattacaatgtttagagacaacatctaaatcatatttttatggtttttaggttatg

SEQ ID NO: 248267 - DNA, 445 bp, Homo sapiens
tcagtatcatgagaacagcacatgagagaccacccccatgattcaattgactcccaataggttcttcccatgacacgtgggaattatggaagttacaattcaatatgagatttgggtggggacacagccaaaycctatcatctatcaattggagcaagccaccaagcagatgattgtgaacttttgtgccctcacaaagaaattgaagtgaagtgtaagaatgcttttggctataaatagaagaaaatccagattcagtggacttaagcaaggaaaaaatgtgtatacaataagaaattgaggattggtgaattccatagctacattatatcaccaatatttttttctgtcttatattcaaaattccagtttgtgcagctttgattccatgctagcaatcctcctggtgtaggcatcacatatagatgcaacagttcccagtaga

SEQ ID NO: 248268 - DNA, 532 bp, Homo sapiens
atacacctgtctttagtaaaatgtgggaaatgctttgcctgaatcccttcataattattgtwgtattgtcattccttttatatcttgatgggataggatgatttctaaggtgactttcaatgtggcaaatttgaaactcgtggaatctatattgtaatatttaatttaataacgccatttaattctatggcatctttcctttttatgttacaatatttaagattgagcatattgtaaataaaaaagatttgactttttgaggggaagcagctttattgagacataattcacatactacacaattcatccatttaaagtgcacagatagatgttcttagtatattcatagagttacacaatctaaatcacgataaattgtagaacatttttatctcttgcccccagaatcctacatgatacccattagaagtcacttccatttgcccgcaatacccccagtcctaggcaaccaatattccactatttatctccagaaattggcttgttctggacattttataacagtggaatc

SEQ ID NO: 248269 - DNA, 532 bp, Homo sapiens
atacacctgtctttagtaaaatgtgggaaatgctttgcctgaatcccttcataattattgttgtrttgtcattccttttatatcttgatgggataggatgatttctaaggtgactttcaatgtggcaaatttgaaactcgtggaatctatattgtaatatttaatttaataacgccatttaattctatggcatctttcctttttatgttacaatatttaagattgagcatattgtaaataaaaaagatttgactttttgaggggaagcagctttattgagacataattcacatactacacaattcatccatttaaagtgcacagatagatgttcttagtatattcatagagttacacaatctaaatcacgataaattgtagaacatttttatctcttgcccccagaatcctacatgatacccattagaagtcacttccatttgcccgcaatacccccagtcctaggcaaccaatattccactatttatctccagaaattggcttgttctggacattttataacagtggaatc

SEQ ID NO: 248270 - DNA, 532 bp, Homo sapiens
atacacctgtctttagtaaaatgtgggaaatgctttgcctgaatcccttcataattattgttgtattgtcattccttttatatcttgatgggatrggatgatttctaaggtgactttcaatgtggcaaatttgaaactcgtggaatctatattgtaatatttaatttaataacgccatttaattctatggcatctttcctttttatgttacaatatttaagattgagcatattgtaaataaaaaagatttgactttttgaggggaagcagctttattgagacataattcacatactacacaattcatccatttaaagtgcacagatagatgttcttagtatattcatagagttacacaatctaaatcacgataaattgtagaacatttttatctcttgcccccagaatcctacatgatacccattagaagtcacttccatttgcccgcaatacccccagtcctaggcaaccaatattccactatttatctccagaaattggcttgttctggacattttataacagtggaatc

SEQ ID NO: 248271 - DNA, 495 bp, Homo sapiens
gaaaggccctcggttgacagcccacaaagaactgggacctcagtaccacagctgygtggaactgaattctgccagcaacctgaatgagcaagtaaatggattcttcactagaacctccagaaagaaacatggacctgccataaccttgatttctgccttgtgagacttgaaggagagaccctgctaaaccagctgggcttctgacctgtggaaactgtgagataattaatggagtttgttttaagatgctaaatttgtggtgatttgttaaggcaatgataaaactctaatgcactcacctacagttttaggcagttacctcaccactcctatacttaaaccatgtgtgttttgggtgtgtattggagtttcagtaaactcagacgttgtagtgctgatttcttgagcgtgttcctgggattggagggagaatttctatgacttattttataatttggattacaattggaaatctgttgtcctatttgaagcatt

SEQ ID NO: 248272 - DNA, 495 bp, Homo sapiens
gaaaggccctcggttgacagcccacaaagaactgggacctcagtaccacagctgtgtggaactgaattctgccagcaacctgaatgagcaagtaaatggattcttcactagaacctccagaaagaaacatggacctgccataaccttgatttctgccttgtgagacttgaaggagagaccctgctaaaccagctgggcttctgacctrtggaaactgtgagataattaatggagtttgttttaagatgctaaatttgtggtgatttgttaaggcaatgataaaactctaatgcactcacctacagttttaggcagttacctcaccactcctatacttaaaccatgtgtgttttgggtgtgtattggagtttcagtaaactcagacgttgtagtgctgatttcttgagcgtgttcctgggattggagggagaatttctatgacttattttataatttggattacaattggaaatctgttgtcctatttgaagcatt

SEQ ID NO: 248273 - DNA, 594 bp, Homo sapiens
aaacatgtgtaatactggtgttaatagagtggaaagttcaatgagaaaacaaaataaaacctaaaagtgcatgagaccaaactaaacaaaaaaggtgcaccagatgacatctaagaaaattatgaaattttccatgacactgagtgacaagctttgggatgcataaaaagaatgggagaaaaagaagacagatatacaataactaggaaaaataagactctctgaattgacaagggaatataattttttcaaatgaccgtttgtcttaagggaaccaaatattttartcatgggctaccaactaagcatgcagtgttcttatgatttatctcatcacatcatctgcattcggtttaacatgtgcaatctcagcaaataaactctttttcagcattcctgtgtggtcaggtgacttaagttaaatgtcaggggagatagcaagaagctacagcttagcatattcatcagtgtctaatgagggtcttaagatgagacagaactgaagttaattcaccaaatttgtttgtattatagacgtaaaaggtggcaaatatgaacttaggaaaggtgactcataaaaattttaagtgattt

SEQ ID NO: 248274 - DNA, 583 bp, Homo sapiens
tgactttggaactcaggcttaagcgtatgtgcgtgtttagtaaaaacctgaacagtggtaycagaggttgcacactctggtgaaaacaagcttaacaatatttatgagaataaatcactaaataaagtaacaataggaagctctgggagagggggatcgtaatctggatttgctacaatattttctatagtgtctcagaaatcatgaaatattgcatgaaattaagtatgtttgattcttacagtcaaaaaatgcagacaatagaattgcatttgaaagggtttagatgttggacttagcagataaatgcttcaaaatcttcttctataatttgttcaaagcactaaaagaatgtttaaagactgaaaagtataatgatgatctatcaaataataccaataaaattataaaaattaagcacatagaaattcttgaattggaaatcgaataactaaaataaaaactttataaggatctcaacagtagtttgatcacaagaaaaaaatcaaatagataaatagaaatattccaatctgagattttctaaaaaaaaaaagaaaaagaaataagtaaaaatgaacaa

SEQ ID NO: 248275 - DNA, 629 bp, Homo sapiens
gcttcttaaacttcatatgcctacaaatcacctggaatttctaataaaatgtagattgtgagtcagcctgtctaaagttggggacagagatactgcatttctaagtcgccaaatattactgattgtacgggactgaggaccataactcgagtgacaaggcattggatttgtccttttagaaattataaccacatcatttaaaatcacatacayaaaaatttatgtatatatgttatatataaaagacaaattacatatacataatgtaaaattgatataacaattttataggaaagattaaggttctctcaaataattctcatagattcattttaatttaaaaattagttgttgaagcaatatctgagtaaattctaattattgaaaaaagtacaaataaggccaaggaccccttttgattactgaatatgtctcacaaccagtccttcctctccagctctactggcatctctctttcctctgccccactcaaaaataaatataacttttaccagtttggtatatgttcttccatatctttttctacgcatttatgtacattcatatgcacctatacattatttatttggaaattaatgttttagttgtgttataattgtgtctgtatt

SEQ ID NO: 248276 - DNA, 629 bp, Homo sapiens
gcttcttaaacttcatatgcctacaaatcacctggaatttctaataaaatgtagattgtgagtcagcctgtctaaagttggggacagagatactgcatttctaagtcgccaaatattactgattgtacgggactgaggaccataactcgagtgacaaggcattggatttgtccttttagaaattataaccacatcatttaaaatcacatacataaaaatttatgtatatatgttatatataaaagacaaattacatatayataatgtaaaattgatataacaattttataggaaagattaaggttctctcaaataattctcatagattcattttaatttaaaaattagttgttgaagcaatatctgagtaaattctaattattgaaaaaagtacaaataaggccaaggaccccttttgattactgaatatgtctcacaaccagtccttcctctccagctctactggcatctctctttcctctgccccactcaaaaataaatataacttttaccagtttggtatatgttcttccatatctttttctacgcatttatgtacattcatatgcacctatacattatttatttggaaattaatgttttagttgtgttataattgtgtctgtatt

SEQ ID NO: 248277 - DNA, 535 bp, Homo sapiens
  misc_feature (1)...(535): n = A,T,C or G
caaaaaaaaaaaaaaagtatttcctgggtacaggaatgctatttttgtggtggcaaaattttttcaaagtgatacctaagccaattaaatctttacttttactagggttgtccattcaattgcagcctatacaaatagtagaagacatgaatggtgttccataatgacaggacttattttgctttttttttcccccttgtgtcagacgtaatttagccttcttgaaaattctcytgggtttgctccaagagaataatttacagctacaatctagatttcttctagatttacatattcctaaaagggctcagagaatactagcttacattattaccttcacaaaagtgttaccaaagttctaatattcgaacctataattcttagntcttggatccttcctagatttattcctggcctttcaaccaaattcatggcaggttcggcaaatattgagctttcacatggcattttgcagacgaactcttaggtaccacaggatatatgcaggttttgtcatgaatagcactgatgccat

SEQ ID NO: 248278 - DNA, 535 bp, Homo sapiens
  misc_feature (1)...(535): n = A,T,C or G
caaaaaaaaaaaaaaagtatttcctgggtacaggaatgctatttttgtggtggcaaaattttttcaaagtgatacctaagccaattaaatctttacttttactagggttgtccattcaattgcagcctatacaaatagtagaagacatgaatggtgttccataatgacaggacttattttgctttttttttcccccttgtgtcagacgtaatttagccttcttgaaaattctcctgggtttgctccaagagaataatttacagctacaatckagatttcttctagatttacatattcctaaaagggctcagagaatactagcttacattattaccttcacaaaagtgttaccaaagttctaatattcgaacctataattcttagntcttggatccttcctagatttattcctggcctttcaaccaaattcatggcaggttcggcaaatattgagctttcacatggcattttgcagacgaactcttaggtaccacaggatatatgcaggttttgtcatgaatagcactgatgccat

SEQ ID NO: 248279 - DNA, 566 bp, Homo sapiens
gaaaagtataatgatgatctatcaaataataccaataaaattataaaaattaagcacatagaaattcttgaattggaaatcgaataactaaaataaaaactttataaggatctcaacagtagtttgatcacaagaaaaaaatcaaatagataaatagaaatattccaatctgagattttctaaaaaaaaaaagaaaaagaaataagtaaaaatgaacaaagtcttaggggtctktaagacacaattaggcaaaccaaaccatatattaatagcagcaccaaaatgagaggagagaaagaaaggggcagacaaaatactcaagaaaataatggccctaactcttctgaatttgatgaagacctttgcacatccaagaagctcaacaaactccaacaggatgaacacaaagagatccgcacctaacacatcaaaagttaaagagttgaaagacaaagataatattgaaagcattaagagaaaagatgactcatcatgcacagggtaaccccagtactttagcagctgacttcctatcagaaacaacagaggccagaaggcagtggtta

SEQ ID NO: 248280 - DNA, 566 bp, Homo sapiens
gaaaagtataatgatgatctatcaaataataccaataaaattataaaaattaagcacatagaaattcttgaattggaaatcgaataactaaaataaaaactttataaggatctcaacagtagtttgatcacaagaaaaaaatcaaatagataaatagaaatattccaatctgagattttctaaaaaaaaaaagaaaaagaaataagtaaaaatgaacaaagtcttaggggtctgtaagacacaattaggcaaaccaaaccatatattaatagcagcaccaaaatgrgaggagagaaagaaaggggcagacaaaatactcaagaaaataatggccctaactcttctgaatttgatgaagacctttgcacatccaagaagctcaacaaactccaacaggatgaacacaaagagatccgcacctaacacatcaaaagttaaagagttgaaagacaaagataatattgaaagcattaagagaaaagatgactcatcatgcacagggtaaccccagtactttagcagctgacttcctatcagaaacaacagaggccagaaggcagtggtta

SEQ ID NO: 248281 - DNA, 442 bp, Homo sapiens
gtgttgtatagacagacgcaggtacacacagatacatactcagatccatgggtctctgtgctctctagcccaggttctatcctggacaaagagatccctagtgggacaagatccagcccgcagacctgtagccagccctgccctgggaacccctctctgggtcccgtgcagtggggccagagtggaggagacggggtcatgcctctccctgaggcaggaggtgagtgggcggcctacagaggccctgccctgaacytgggcctcagccttggcagctggggagatggtctggtgaatggtaggctgagacagcctgagctgagtggagcactttcctgcaggcaggcaggtgagatacagaggcctgtcaacctctctgagcctcagcttttccttcatgaaaattgagcaaataaacctacctactttgtggagtatcgcg

SEQ ID NO: 248282 - DNA, 587 bp, Homo sapiens
tttaaaatttggttgtgtattttctcattgttgaatcctaagggttacatttttaagaggtagactgtgtctttcaaggaattggtccatttcatctaggttatcaaatctgtggtcatagagttgttcctaatattcctttattatccttttaatacccattaaatcaggagtgatggcctgtctttcatttctgtattagtaatttgtatcttctctcatttttccttagttagcctggctagagctttatcattctatcgatcttttcaaaaagcaagcttttaatttcatcatttttctttattggtttccccttttaaattacrttgatttctgctcttatgcttattatttcttttcttctgcttcatttggattaaatttgctcttcttttgctactttcttaaggtggaagccttgattgttgatttgggattttccaggtgtctttctgttattaatttctaatttaattccattgtggtctgagagtacacttttaataacttctattcttctaaatttgttaaggtgtattttatggcccagaatatgggctttcttcgtaaacgttccatgtgag

SEQ ID NO: 248283 - DNA, 588 bp, Homo sapiens
atcctaatagacaacaatggattataaaatatgagaaaactttctttaaaattacaaatcctgaagtgtatctcaagtacagaaccaacttctaaatatgctatatttgtttttaatatttttattcatttaataagtttttagcgaaggtcaactgcttgacgagcactatactgatgcctttggaaatgacaatgattagcaaaaacaaataggatacttacagtctagtacasgaaacaatcaaataataaaccaatttacaatgaatggtagctgaattatgtgctctgagggtaagaacacagttttgtttgacaggaatatgattttgacttggaggtaaggaaagggttccccaaataagtcacagataaaccgagatttgaaggataagaacttaattaggcaagggaagaaaggcagagtccaggaaaagtgaatatatagcaaatatatataccaactgagctgggaagaacaagatacattcaataaaatccatgtgaagggagagaaagaagaatcaggactggagggacagacagaagcccagaaggtgttcagcctcataaaccaggttaaaaa

SEQ ID NO: 248284 - DNA, 588 bp, Homo sapiens
atcctaatagacaacaatggattataaaatatgagaaaactttctttaaaattacaaatcctgaagtgtatctcaagtacagaaccaacttctaaatatgctatatttgtttttaatatttttattcatttaataagtttttagcgaaggtcaactgcttgacgagcactatactgatgcctttggaaatgacaatgattagcaaaaacaaataggatacttacagtctagtacaggaaacaatcaaataataaaccaatttacaatgaatggtagctgaattatgtgctctgagggtaagaacacagttttgtttgacaggaatatgattttgacttggaggtaaggaaagggttccccaaataagtcacagataaaccgagatttgaaggataagaacttaattaggcaagggaagaaaggcagagtccagraaaagtgaatatatagcaaatatatataccaactgagctgggaagaacaagatacattcaataaaatccatgtgaagggagagaaagaagaatcaggactggagggacagacagaagcccagaaggtgttcagcctcataaaccaggttaaaaa

SEQ ID NO: 248285 - DNA, 624 bp, Homo sapiens
aaaacttcaactgtaataccatgttattatggtcatcaaatccaaatttgacaaaacattaagcaatgtaaatttaatttcagcaatagaaaatagaaaattttttcctcaaaatgaaaaaattattgattgtttcatgagactccatatgcaggttcaattcctgtatgcttgcattgttgagggtgagattaggttgaaggttagcaggaaattaataaggtgggattgggctggcccaaggaaacctggaaactttgttatgaacacatggtgttgggttttctaggaaccccggaaacaaagaacaaccactgctgaagctacaattttgtaaattgttagtgcctgaagtattgctccctccactttgcttgtttttttttaattacarctataagaggtatagttgacatacaactcatccatttaaagtatacaatccaatggctttagtatattcacagagctgtgtatccatcaccgtaatcaattttagaacattctcaccaccccaaaaggaatctctattccccttagtcatgggcaggtgatgacctgcccatacccctagcagacctcacccctagtgctaggcaactattaatctgctttccattgcta

SEQ ID NO: 248286 - DNA, 595 bp, Homo sapiens
taagcggtacagccagtatttaattccgcatctgtttactgaagaatccattttcttcctgctctactattctgcacctgatcaatatttgctgaatgaatgaaaaagcaatgtcatttgcacacagcataggtacagatatgttaatttattggcaaataaaaagctgcattcargtgtgctatgtccatatttttaagaaggtttcattcagtaatttataaatattatttactgggctatgaatttatattagagttttcattattgtgggagaaacagacactgaaaacaaattgaaaaattaaaaaaaaaaattcagatagtgattatgctatgaaagaaatcaaaaaaggatgaggttgtagaaaatgtctgggtcccagagctgatgccgtctgggaaggaaagagcaaggaacgccgaggaaggtaaaagtaactctgttgatgaatctgagcgataagaagaaaccagtcctgcggaagacgcagagaaaacatgtttcacccaaagggaacagcaagtgcaaaatcactgaggtgggaacaaacttgactcatctggggactaaaaagacagtcagggaggctga

SEQ ID NO: 248287 - DNA, 549 bp, Homo sapiens
ctgctagattgctttcccatgcacatccacacggcttgcttgctcacttcattagtcatgctcaaactcacctataagaaatttcccatgtctgtatcataaataccttaaaaagggggracaaaatgtaaaaaaatgcttttcagacattggacaatagataggaaaacatttttactcagagtagttaagcaaattagatgagttttattaatgaattagttttctgtctgtagttaatatctggacttcaacatagggagaagaagcccaaacagagactgaaaatcttattgagttgaacactagaggacagagatgactggagtttgtggggaagaataccagaaaagagggagctaagcagagaaaattctccaaaaatctgtgtaaggtcttccgtacctttctttggatagatgctgatttgtatgtacataggataaaactctacagaactgtgcaaagaacatctgctgaggacctaccagctgaacaaatcccattgctcccacatagctgggaaacatttgagtacctgccacccgg

SEQ ID NO: 248288 - DNA, 549 bp, Homo sapiens
ctgctagattgctttcccatgcacatccacacggcttgcttgctcacttcattagtcatgctcaaactcacctataagaaatttcccatgtctgtatcataaataccttaaaaagggggaacaaaatgtaaaaaaatgcttttcagacattggacaatagataggaaaacatttttactcagagtagttaagcaaattagatgagttttattaatgaattagttttctgtctgtagttaatatctggacttcaacatagggagaagaagcccaaacagagactgaaaatcttattgagttgaacactagaggacagagatgactggagtttgtggggaagaataccagaaaagagggagctaagcagagaaaattctccaaaaatctgtgtaaggtcttccgtacctttctttggatagatgctgatttgtatgtacataggataaaactctacagaactgtgcaaagaacawctgctgaggacctaccagctgaacaaatcccattgctcccacatagctgggaaacatttgagtacctgccacccgg

SEQ ID NO: 248289 - DNA, 621 bp, Homo sapiens
tgcttccacaagcaattacaaacatacttgaaacaaaaaaaatagaaagtagaacaaagagaaagtatcaacacagagataggagatataaagaaaaaaaaacaaatagaaattgtataactaaaaagtacaaccaccaaaataatgaaactcactggatgggctcaacagcagaatggagaggacagaggaaagaatcagtggccatgaagatgaaacagcagaaattacctagtctgaaaaaacagagaaaaaataaaccaaaaaataatgaacaaagccatttgttcatatagggacatattgaactataataaartatccaacattcatgtcatcagcatctcagaaggagatggatcctggtaagacaatgaaaagacaagctacagactgggaggaaatatttgcaaaccacctatctgacaaaggacctatatctggaatatagaaaggactcccaaaacttattttttaaaaatcaatccaattataaaatggacaaaagacatgaagagacattacataaaaaataaacagatgtcaaactgttatatgaatgagtcagagatggtctctgcgtattggtccccaggttgtttattttttcactgcaggctg

SEQ ID NO: 248290 - DNA, 621 bp, Homo sapiens
tgcttccacaagcaattacaaacatacttgaaacaaaaaaaatagaaagtagaacaaagagaaagtatcaacacagagataggagatataaagaaaaaaaaacaaatagaaattgtataactaaaaagtacaaccaccaaaataatgaaactcactggatgggctcaacagcagaatggagaggacagaggaaagaatcagtggccatgaagatgaaacagcagaaattacctagtctgaaaaaacagagaaaaaataaaccaaaaaataatgaacaaagccatttgttcatatagggacatattgaactataataaagtatccaacattcatgtcatcagcatctcagaaggagatggatcctggtaagacaatgaaaagacaagctacagactgggaggaaatatttgcaaaccacctatctgacaaaggacctatatctggaatatagaaaggactcccaaaactyattttttaaaaatcaatccaattataaaatggacaaaagacatgaagagacattacataaaaaataaacagatgtcaaactgttatatgaatgagtcagagatggtctctgcgtattggtccccaggttgtttattttttcactgcaggctg

SEQ ID NO: 248291 - DNA, 466 bp, Homo sapiens
caaattattgagcttcatctcagccaataaaatcagaaactctgagggcggggccctgcagtctatggcttaatgggccctccaggtgatcctgatgcaaccagaagtttagaaccagccaagtagcttagattaataaacttgcatttctggtgctatggtttggatgcatgtccctccaaatcttatgctggaattttatccccagttttggagatggggccttgtggaagatgtttggctcatagggatggagccctcatgaatgtcttggtctcatcctcatggttatgagtgaattctcaattctcactctgttagttccccccaagagctgattgtttaagagacctgacaccttcccattctcttttgtttcctctctcaccatgtgatcrttgcacaccttggctctccttcaccttccaacgtgagtgaaagcttcctgaagccctcaccagaagca

SEQ ID NO: 248292 - DNA, 591 bp, Homo sapiens
gtacatacatgtttttctgaagtgcttgagattaagttgtagatatattttttaaccctgaattctttagtgtatatttcctaaaaacaaggacataggcttatataaccacaatacaattatcaaaatcaggaaattaacagatacaatactatcatctaatccataggccttattcaaattttattagttttcccaataatatcttttccagaaaaatattttttctggttcagaatccaatacagcatcacacakgcatttagttgtcatgttcctctagtctcattcaatctggagcaatttatcagtctttttctttcttaaccctgatatttttgaagggtataggctatttgttttatgtaacatccctcaattgtagtttgtcatgactagattcgggccacacatttttggtcagaaataccacagaaatgattttctgtccttctcagtgagttatatcaggaggcacatgtatgtttgtctcattacaagtgatgttatctttgatcatttgattgtgttgtctgccaggttgtccactgtaaagaatgtctgttccttaatagttcggtaaaattcccc

SEQ ID NO: 248293 - DNA, 591 bp, Homo sapiens
gtacatacatgtttttctgaagtgcttgagattaagttgtagatatattttttaaccctgaattctttagtgtatatttcctaaaaacaaggacataggcttatataaccacaatacaattatcaaaatcaggaaattaacagatacaatactatcatctaatccataggccttattcaaattttattagttttcccaataatatcttttccagaaaaatattttttctggttcagaatccaatacagcatcacacaggcatttagttgtcatgttcctctagtctcwttcaatctggagcaatttatcagtctttttctttcttaaccctgatatttttgaagggtataggctatttgttttatgtaacatccctcaattgtagtttgtcatgactagattcgggccacacatttttggtcagaaataccacagaaatgattttctgtccttctcagtgagttatatcaggaggcacatgtatgtttgtctcattacaagtgatgttatctttgatcatttgattgtgttgtctgccaggttgtccactgtaaagaatgtctgttccttaatagttcggtaaaattcccc

SEQ ID NO: 248294 - DNA, 561 bp, Homo sapiens
atttgggtcgtttccagcttgaggtgattatgagtagagctgctataaacatctgtgtaaagagttttgtgtgagcacagtatttatatctagggtaaataccctcggagtgaattgcttggttttaattgatagtgtatgttttactttataagaaactgtcaaactatttttcagtggctgtaccattttacactcccaccaggaatgtaggagactcccagttactccacacacttgctggtgtttgctatcaccagattttttctgcttttaattttagtcattccagtgggtatgttggtgtatctcatcacagttttaatttatattttcttgatggctaatgatgttgaacatcttttcatgtgcttactgccatgtgtatatgcttgttaaacaagtgtctgttcaaatgttttgtccatgcttttattgggttatttgtttcctgtttccttctattgagttcagaatatcctttctatattctggatataagttgtttgtmaaataagtgtcttgaaaatgttttccgccagtctgtggcttttcttctca

SEQ ID NO: 248295 - DNA, 618 bp, Homo sapiens
catacaattgttcctagtattctcttgttgccttttaatctgtatggaatctatggtaatatccacccccatcccattttgtgatcttatttttgctccakttgttttctttttttaaatttctattgtaacttcttagggtggtagcttagtttgtgtttaccccttctcacttattaatataagtcttttaaaccatgaattttcccctgaacaccatctataggtacttatagtagaattcatttatcatttccttcatataatctaattttggttgaaattttttctttgccctgacttaaaagagttttgtttgtttgtttactttgaagagatgagggttttttctgattttatctttaattcctacttctactgcattaaaattaggaaattttcctgtaccatatctacctctggaaatgtattgggactttctttgtggactaatatgtggtcaaattttgcacttcttccataggtacatgttttaaaaggaactctgttctttattttcaaggtaaaaagtttcctttgtgctaactacatctacattactaattgattatactgtttagatctacttggtttgtaattgactaagaaagttgaatt

SEQ ID NO: 248296 - DNA, 612 bp, Homo sapiens
aaaagtctgcctaactctactctctccaggaatagtactgacaagcagagcatcctcagacgcgtgcttcaggtgagcctcagatctcaccacctgggaaactagttgcccctggactgtttagccaaatgacccagtgcattttattttattttattttattttatttatttatttttcagacaggaactttttctgttgcccaggctggattgcagtagcgtgatcatggattactgcagccttgacctcccaggctcaatcgatcctgccacctcagcctcccgagtagagtagctgggactacaggcatgcgccatcacagctggctagtttgtttgtttgtttgtttgtttgtttgtttgctttttgtagaaatgggttttgcactattgcccaggctggtcttgaactcctgggctcaagcaatcctcctgcctcagcctcccaaagtgctgggattataggcatgagccaccatgcctggctaatccagatttgttttctaagccagatttgcttagatgttgtkctccttaccacataaaaagttcaaaccaggacagcagagagtgactccactggtgttgttagagaaagcaactgcagcca

SEQ ID NO: 248297 - DNA, 584 bp, Homo sapiens
tgttggcaccaaaatgtatctactctgctctcaacattcctgtgcatgccagcctcacagtttccaacttcaagtacctgcttcttcctgagggattcctctggcaatgggaatctactgaaagtgtcagagagttacaaccctttcctcaagtaattcccaaccaatgactgtgatgaatttgtagaaaaatagttctgcaactttgcctcttagctgacataactaatgggcatattctgcactgcatcacatggctgtcagtggcattgaacaccagttatccacagtgcaaacctgctggttaattcaccttgaattggctttgttcccttcctctctcacttctccagtccttactagtgcttcctgggaccaccacctaaatgaactgctgactcttgaatctttggctcagagactgcctctgtttcagcttttaaaaatagcaataatttcttttgayactccttccatcaggagatggggtttaggtcctcaccccttgaatgtgggtgaacttcagcctcagagcatggtggaagtaatgctatgtgactttcaaggctgtgtcatagatgacc

SEQ ID NO: 248298 - DNA, 546 bp, Homo sapiens
ttgaaacaaaatatttttaaaaatgaaatgaaagtgtgtttagataaacaaaaatcaactcatcagctttactaagaaaaaagagagaatatccarataaataaaatcagaaacaaaaaaggaaacatcataacagatacctcagaaatacaaataatcattatagattattaaaagcaaccatatgccaataaattggaaaacctagaagaaatgaacaaattcctggataaatctactgcaattgaccaagaagaaatagaaacacttaacaaactgataagaattactgagattgaataagcaatagtctcccacaaaagaaaagcccaggaccagatagcttcactgccaaattctacaaaacttacaaaaaagaactaacaccaattctcctcaaactaattcaaaaaaatgaaaagaagggtcttcttcctaactcattctaggaggtcagcattatcttgataccaaaaccaggcaaagacacaacaaagaaagaaaactatgttcatcagtatccctgatgaacataaacacaaaaat

SEQ ID NO: 248299 - DNA, 622 bp, Homo sapiens
caactcatcagctttactaagaaaaaagagagaatatccaaataaataaaatcagaaacaaaaaaggaaacatcataacagatacctcagaaatacaaataatcattatagattattaaaagcaaccatatgccaataaattggaaaacctagaagaaatgaacaaattcctggataaatctactgcaattgaccaagaagaaatagaaacacttaacaaactgataagaattactgagattgaataagcaatagtctcccacaaaagaaaagcccaggaccagatagcttcactgccaaattctacaaaacttacaaaaaagaactaacaccaattctcctcaaactaattcaaaaaaatgaaaagaagggtcttcttcctaaytcattctaggaggtcagcattatcttgataccaaaaccaggcaaagacacaacaaagaaagaaaactatgttcatcagtatccctgatgaacataaacacaaaaatcctcaaaaaatactagcaaattaaatccaatagcacatgaaaaagataatatactattgagatggaatatttcccttgacccccttagtaggcagaaactggagtgcctcgtttcaccaagcctgcagtct

SEQ ID NO: 248300 - DNA, 559 bp, Homo sapiens
taagtctatgctaaagtaatttgcagacattctctatggctacataccagcactatgctagacactaagaataccaccacacatagcaaaggctaagtcccctgccctcatgtagttcacagtctggtgggaatcaaattagaccatggctatcaatcacctagcacagtacctagcacataatacatatatttcttaactgctagtgctacaattttgataagacattattccttctttgctcaactcaaactcraatgtctgtctgctcaatatgcaatgagataactattgtgtaataattcataatattgcaatctttacctttgggagctgttattatttattctcactcattcttttaaaaggcatttcctgaacatatactctgggttaaagaataccagttctacgggaggtggagcttgcagtgagccaagatagcaccactgcactccagcctgggcgacagagcaagactccgtctcaaaaaaaaacaaaaaaacaaaaacaaacaaaaacaacaacaacaacaaaaaacaataccagttctacaaaa

SEQ ID NO: 248301 - DNA, 662 bp, Homo sapiens
taccagctgaatatccctgagtaacccagttgatgtcacatagagaataagaatcwcagccaagccctgattgaattcctgagccacaaaatcatgagctgtaataaaataggggtagtttatttcacaagaatgaataactagaagagttaccttttattgcttatccagtggtatactagccactatacctcatttaatgtttacatgaatccccaaagttagatataattctttcagatttacaaatgagaaaaattagttctgagttggagcaagctacacagaatgagcttggatttgaattcacatctgtctgaggctggagctcattcggaaggggtttccaggacagcctcacccccactggtccctctttcctaagggcttgccctggagcataatgtatgaactttaatgctttgttcttttgggctaaatattgtccaaattccattcttatgcaagcacaggagggcatgctatcatttagtggtcaaagataagaattagctctcagctcttcacttttcgattatttaagatgtgatcatgagatattctgtatcccagactctctgctttatctcacttaatcttcaccataacctatgtcagagatgctacacatagatgcctttattttacaaattaggcccaag

SEQ ID NO: 248302 - DNA, 662 bp, Homo sapiens
taccagctgaatatccctgagtaacccagttgatgtcacatagagaataagaatcacagccaagccctgattgaattcctgagccacaaaatcatgagctgtaataaaataggggtagtttatttcacaagaatgaataactagaagagttaccttttattgcttatccagtgktatactagccactatacctcatttaatgtttacatgaatccccaaagttagatataattctttcagatttacaaatgagaaaaattagttctgagttggagcaagctacacagaatgagcttggatttgaattcacatctgtctgaggctggagctcattcggaaggggtttccaggacagcctcacccccactggtccctctttcctaagggcttgccctggagcataatgtatgaactttaatgctttgttcttttgggctaaatattgtccaaattccattcttatgcaagcacaggagggcatgctatcatttagtggtcaaagataagaattagctctcagctcttcacttttcgattatttaagatgtgatcatgagatattctgtatcccagactctctgctttatctcacttaatcttcaccataacctatgtcagagatgctacacatagatgcctttattttacaaattaggcccaag

SEQ ID NO: 248303 - DNA, 662 bp, Homo sapiens
taccagctgaatatccctgagtaacccagttgatgtcacatagagaataagaatcacagccaagccctgattgaattcctgagccacaaaatcatgagctgtaataaaataggggtagtttatttcacaagaatgaataactagaagagttaccttttattgcttatccagtggtatactagccactatacctcatttaatgtttacatgaatccccaaagttagatataattctttcagatttacaaatgagaaaaattagttctgagttggagcaagctacacagaatgagcttggatttgaattcacrtctgtctgaggctggagctcattcggaaggggtttccaggacagcctcacccccactggtccctctttcctaagggcttgccctggagcataatgtatgaactttaatgctttgttcttttgggctaaatattgtccaaattccattcttatgcaagcacaggagggcatgctatcatttagtggtcaaagataagaattagctctcagctcttcacttttcgattatttaagatgtgatcatgagatattctgtatcccagactctctgctttatctcacttaatcttcaccataacctatgtcagagatgctacacatagatgcctttattttacaaattaggcccaag

SEQ ID NO: 248304 - DNA, 607 bp, Homo sapiens
aatgtttttatatctgatgtctgtgatttttgctacctttttttcttaaaaaaaaatctttgcctaacccaaggctgcatatattttctcctatgttttcttttagaaaagttataagtttagcttttaccttaggcctatgatccatttcaagttaaaaattttgcatgtggcatgagctaagatttaactttaattattatgcatatccgataattccagcaccatttgtttgaaagtttatctcttgtcattgaattccttgtcaattttatagaaaattaattgatcttaaatgtgtgggtctattkgtcagttgttttttctatctatagctatatgtctatatgccagtactacattgtctaaattattatagctttatggtaaggtaatacaatttttccaacaaagaaaaggcatttttcccaggtgacacagcaaggtagtgtccaatccatggctagaattgacatgttcgtatttccagcctggctgtcttcttccttaccctacatttcttcatggtaccatttattcctgggctcccaccctctctcagttcctctacagcaggggaaagtgaaaatgttgtgacatgcaatca

SEQ ID NO: 248305 - DNA, 607 bp, Homo sapiens
aatgtttttatatctgatgtctgtgatttttgctacctttttttcttaaaaaaaaatctttgcctaacccaaggctgcatatattttctcctatgttttcttttagaaaagttataagtttagcttttaccttaggcctatgatccatttcaagttaaaaattttgcatgtggcatgagctaagatttaactttaattattatgcatatccgataattccagcaccatttgtttgaaagtttatctcttgtcattgaattccttgtcaattttatagaaaattaattgatcttaaatgtgtgggtctatttgtcagttgttttttctatctatagctatatgtctatatgccagtactacrttgtctaaattattatagctttatggtaaggtaatacaatttttccaacaaagaaaaggcatttttcccaggtgacacagcaaggtagtgtccaatccatggctagaattgacatgttcgtatttccagcctggctgtcttcttccttaccctacatttcttcatggtaccatttattcctgggctcccaccctctctcagttcctctacagcaggggaaagtgaaaatgttgtgacatgcaatca

SEQ ID NO: 248306 - DNA, 578 bp, Homo sapiens
tcactgtctagtggagaaggggcaaattcataaggaaaaaccattgtatagtgtgataaatgccactctcaatgaatgcatataatgggatcacatcatacatttaacttacatttaaaaagtcattccctttatttataataaaaaacaaatctaacaacasagattagtttacttgaggcagtttattattaaaatggaatgtaataaaccatgcaaacaatcaggaacactttaaaatctatgtcattagttatttgggaaatgataataaagccacaatgagatactactacacacctcttagaatgtctaaaattctaagacatgactgaccatatcaagcattggtaaacaggtagaggaactggtattctcataccctgctggtgggattaagtagtaaaaacgctttgtagaacagtttagaaaacatgcttactccattcgattaaaaaagttaaatatgggctgagtgcagtggctcatatctgtaatcccagtgctttggagggccaaaaaggggaggatagtctgaggccaggaagttcaagaccagcctgggcaacacagcaaaa

SEQ ID NO: 248307 - DNA, 562 bp, Homo sapiens
tatttagtatgtggatggcaggaatccagccccagagagaggatccaaaaccagccttcatggaaatgtgggcttcagctgagaaataagtgccatttgaaatagatatcttagctgcttttaatcagattacactatcattgaagtttatctgtaagtttttgcttttatatagtcttgacatctttttttaaaaaaacattaaaatattgattgggaattttgtactctaatagagagtgcctgcatgtgtgtgctgtgtgtgtggactcatgcaggcatgtgcatttggtctagtgaatggagtatcaacaattttaacctcattttactgaaaagatttaaaaattcataattagcaaacycaaaaggaggaaacaaggggaggtcatatatgatttagaaatacattgtgcatgttataagctaaggaatttgatcacccttttgtaactgagacaacccttttctcctccctgctctccaaatgaaataaaaaaaagatcaatttggtatggaagctttatggagtctcatacattgacaatctattgtatttaac

SEQ ID NO: 248308 - DNA, 562 bp, Homo sapiens
tatttagtatgtggatggcaggaatccagccccagagagaggatccaaaaccagccttcatggaaatgtgggcttcagctgagaaataagtgccatttgaaatagatatcttagctgcttttaatcagattacactatcattgaagtttatctgtaagtttttgcttttatatagtcttgacatctttttttaaaaaaacattaaaatattgattgggaattttgtactctaatagagagtgcctgcatgtgtgtgctgtgtgtgtggactcatgcaggcatgtgcatttggtctagtgaatggagtatcaacaattttaacctcattttactgaaaagatttaaaaattcataattagcaaacccaaaaggaggaaacaaggggaggtcatatatgatttagaaatayattgtgcatgttataagctaaggaatttgatcacccttttgtaactgagacaacccttttctcctccctgctctccaaatgaaataaaaaaaagatcaatttggtatggaagctttatggagtctcatacattgacaatctattgtatttaac

SEQ ID NO: 248309 - DNA, 578 bp, Homo sapiens
tcactgtctagtggagaaggggcaaattcataaggaaaaaccattgtatagtgtgataaatgccactctcaatgaatgcatataatgggatcacatcatacatttaacttacatttaaaaagtcattccctttatttataataaaaaacaaatctaacaacagagattagtttacttgaggcagtttattattaaaatggaatgtaataaaccatgcaaacaatcaggaacactttaaaatctatgtcattagttatttgggaaatgataataaagccacaatgagatactactacacacctcttagaatgtctaaaattctaagacatgactgaccatatcaagcattggtaaacaggtagaggaactggtattctcataccctgctggtgggattaagtagtaaaaacgctttgtagaacagtttagaaaacatgcttactccattygattaaaaaagttaaatatgggctgagtgcagtggctcatatctgtaatcccagtgctttggagggccaaaaaggggaggatagtctgaggccaggaagttcaagaccagcctgggcaacacagcaaaa

SEQ ID NO: 248310 - DNA, 581 bp, Homo sapiens
taaaatatctataatttttaatgaaaaactacattttggtaattgccgtattctgttaaggaataaaataaattaatatgtagtcaaaagactgcttcytatgccaatggttttacatgattctatgctttaaactttatagcctactggcaaaatatggaatctcagagctgagaaaggatttaagtttcgtgttgttcccagcttcttacccagaagtacatacacttctattggatcatggattgatccattcatagcttgaaattgttttcaatttttggcatttgtgtgcaggtatgtgtgtatgtgtgtgttcagttgtgcatttttacgaggaaaaaaaaattcatcaaattctcaaaggagtgtatatagcacaaagtcaatgaccaatggtctaccaactttgttttacagattagttcatgcatgcaaatatattttaagtgatttgcccagttaacagtttcctaaaggctgtcatggatgcagtgccactccactcagcagcctctttcattgccaaaggatttatttctttcctgcttctggaaggtttatcagaaactatctagact

SEQ ID NO: 248311 - DNA, 581 bp, Homo sapiens
taaaatatctataatttttaatgaaaaactacattttggtaattgccgtattctgttaaggaataaaataaattaatatgtagtcaaaagactgcttcttatgccaatggttttacatgattctatgctttaaactttatagcctactggcaaaatatggaatctcagagctgagaaaggatttaagtttcgtgttgttcccagcttcttacccagaagtacatacacttctattggatcatggattgatccattcatagcttgaaattgttttcaatttttggcatttgtgtgcaggtatgtgtgtatgtgtgtgttcagttgtgcatttttacgaggaaaaaaaaattcatcaaattctcaaaggagtgtatatagcacaaagtcaatgaccartggtctaccaactttgttttacagattagttcatgcatgcaaatatattttaagtgatttgcccagttaacagtttcctaaaggctgtcatggatgcagtgccactccactcagcagcctctttcattgccaaaggatttatttctttcctgcttctggaaggtttatcagaaactatctagact

SEQ ID NO: 248312 - DNA, 581 bp, Homo sapiens
taaaatatctataatttttaatgaaaaactacattttggtaattgccgtattctgttaaggaataaaataaattaatatgtagtcaaaagactgcttcttatgccaatggttttacatgattctatgctttaaactttatagcctactggcaaaatatggaatctcagagctgagaaaggatttaagtttcgtgttgttcccagcttcttacccagaagtacatacacttctattggatcatggattgatccattcatagcttgaaattgttttcaatttttggcatttgtgtgcaggtatgtgtgtatgtgtgtgttcagttgtgcatttttacgaggaaaaaaaaattcatcaaattctcaaaggagtgtatatagcacaaagtcaatgaccaatggtctaccaactttrttttacagattagttcatgcatgcaaatatattttaagtgatttgcccagttaacagtttcctaaaggctgtcatggatgcagtgccactccactcagcagcctctttcattgccaaaggatttatttctttcctgcttctggaaggtttatcagaaactatctagact

SEQ ID NO: 248313 - DNA, 554 bp, Homo sapiens
tacaagcatttagattagtgattgtataacgatgaggttgagtaagtygatcctcctagccctaaatgaacttctacacttaatggcaacacaatttacaaaggattttgaggaaattacagaaatgctctgattctcagcttgctcatttctaaaatgtgaatgataatcatagttacctaacagttttttttaggaattgaatgaaagactaaacacaatgtatagcccttactaaggatttaataagggctaactgtaataataatagagttataagtatcattatgttaataatttcagaaatctaagcaaaattctgttcattctgatatttattcatctgtttttagaatttacttgataatatgtttttattgctgtttttagaaaagagaattaaaactataccatatagttttgtgtgggccctgttagtgctttacttttataggccataaaataattagtctctgtagattttctctaataatgtcaacatttaaattcaacctcttttagattcaaaaagtttttaatctaaacttgaaaaa

SEQ ID NO: 248314 - DNA, 453 bp, Homo sapiens
atttactgtatatttcaaaatatctaacagtgaaattgaaatgttcctaacacaaagaaatgacagatccaatgaaattcaagtctatggagagagtgagatatatttaatttaccttattttcttttctgtgactttttttccagcttcaaaatatgtcacacaaatatatcttattatatttaggatatggtttagcttaactagtgtgcttcttctaactgcccatagcatttaccaaaaattcacctagaaaattattgtaaagaatgcctataaatcatattgcccctttgtaatattttaaactattgaaaataggcaaagagttcaattgtttttcatgtacttttgtggagacatttaagagtatttcaattarcagatgtctaacctgagcatttttgattctaaaaatatttcacccatctaggaactttctgtcaaggatgt

SEQ ID NO: 248315 - DNA, 616 bp, Homo sapiens
gtgatctacttcatgtattaatttagagctgagtatgctaaacaaatttcaacagactgaatctatccatgaccaaattaggttttcttcctcagaatacaggtaagtttgatattaggaatttaattaatatacttsggcacattaataacttaaaatctatgatttttatatctgtggatacaaaatatgtgatgcaatttaacattcacttaaaaatcttagcaaactagtcattgaaattaatttctgtataattaaagggcatctaagaaaatctatagcaaatatgtcaaatatggcaagttttcttttcacattaggcacatggcaaagatgacatcttgacatcagtgtaaggaggtgaatttatgatatattcaaagaggcaaaaaagagaaaaaaaaatctgtcaatctacactcctgaactcagctaaaattttattcaggtttgaaggttaaaaacaggccctttcaatgaaacaaacactgagtgtttaccttctatagatctgccccaaagttgcttctaaatgatgttctttaagaaaaagaaataagactttataagaaaggacggaaaagcaatggtaagcaaatagactgataaaaat

SEQ ID NO: 248316 - DNA, 587 bp, Homo sapiens
gtggtggcaggcacctataattccacctactcaggaggctggggaaagagaattgcttgaacctgggagctggaggttgcagtaaggtgagatcatgccactgcactccaacctgggcagcagagcaagactctgtctcaaataataaataaataaataaattgaacgtttaagttcaggggtacatgtgcaggtttgttatacctgaacttgtgtcatgggggtatgatgtatagtttatttcatcacctaggtagtaagcctagaacccattaratatttttcctgatcctttccctcctcccagcctccaccttctaataggctccaatgtgtgttgttcccctctgtgtccatttagctctcatttataagtgagaacatgtggtattcggttttctgttcctgcattagtttgctaataataatggctccacttccatccatgttgctgcaaaagacattatctcattttttatggctgcatagtattccatgatgtatatgttccacattttctttatccagtctatcactgatgaacatttaggttcattccatgtctttgctattgtgaatagtgctgc

SEQ ID NO: 248317 - DNA, 545 bp, Homo sapiens
attatagttcttaccttacaagagggcaaaggtgactagtgggacaaagaatgggttgccagactctcttggtgagagccagaatctcaggtggagaacctgctgtttggtctggatcactctccctgatgcctcctcagagttcttttctctcagggcactttattgtctcttctcccagactggcctcttcctggaaatccctgtccaataggcgaatctgtatcccarttgtagactggcttcaggctcttgaccatagtcctttgttctcagtaaattgagagctgtgctgggtatctgtttattattaacccagaatattctgtgacagtgagcatatatagagacatttgaagaaattttatttagaagtctggacttctgagagcatgaagaaaacttctagtgggaggtatggtcagccataaaagcattctgggaacacagaaaaggaagcagtgacgtatttttaacattataaggtgtatagttttgtggagttttccccacatttaaatatttctaaaatttgcatgggccat

SEQ ID NO: 248318 - DNA, 540 bp, Homo sapiens
tcaataaattataatgtcatatgctttgttcgttataaagcatcttaattatgctgacagttacccaaaacagcattatcctcaacaaagccaaactcctttgaggcattcacagaaactgtggctgggtaaaataggctatgtttcagcgatacttaaccaatttactctcagtgtggttatcagtttattcctgaagtacaatgtgtatgtgtgtgygttaggaagaggcgagaggagatgggcagataggggatgggcagcaggaaagaaaaaaaaaggttactagagcttaaactcttccatcagttaagaaggtcattttgcttcatcctttagattttaaggacctaacactactgttctctctgagtaattactgactactggaatattaatacataaacactgctttaccattatacattttcccttttcttccagtttatgtagaaatgtactctcttaatttttgttcctataaaagatacttctaaaaatttattttcaggattaaaatgtatagttcctcctccacaa

SEQ ID NO: 248319 - DNA, 540 bp, Homo sapiens
tcaataaattataatgtcatatgctttgttcgttataaagcatcttaattatgctgacagttacccaaaacagcattatcctcaacaaagccaaactcctttgaggcattcacagaaactgtggctgggtaaaataggctatgtttcagcgatacttaaccaatttactctcagtgtggttatcagtttattcctgaagtacaatgtgtatgtgtgtgtgttaggaagaggcgagaggagatgggcagataggggatgggcagcaggaaagaaaaaaaaaggttactagagcttaaactcttccatcagttaagaaggtcattttgcttcatcctttagattttawggacctaacactactgttctctctgagtaattactgactactggaatattaatacataaacactgctttaccattatacattttcccttttcttccagtttatgtagaaatgtactctcttaatttttgttcctataaaagatacttctaaaaatttattttcaggattaaaatgtatagttcctcctccacaa

SEQ ID NO: 248320 - DNA, 609 bp, Homo sapiens
gatgtcatcacccaccaagagtgcaatatatatacatacagacacacaatccatctttctatctctatctattcttgtcgactcraaaaccagacaaatgaagtgcagagggaagaaggccagcttgccgtttggaattccaaagatgggtatatcagaaaatgctctatttatgaaacacatgcttctttatttggggtggtagcatcaacaaggtttgtggacaatttcaaagaaaatatgagcagaggttcaagagctgctgaagaaaatcacccaagtttgagagtaggcgtcaatcaatacatagttgatctctaggtgcagttgtaccttcagtgcccagccaatgatcctgccttccatgttacagaataaacttgagctaccaagtgtgcaatatccatccctatgtctagggacccatctgcacaaatgctcagctccaccttatttcctacagtctcaaaagaatttgtgctgcttttcctggaattgttctcttagtcactcccatggcctatttttaaaagttccctcattattcactctttcccagcagccaaagtgtgctcaaaacaactattaagtgaataaatgaatgaatcc

SEQ ID NO: 248321 - DNA, 531 bp, Homo sapiens
ggaggtcaggagattgagaccatcctggctaacacagtgaaaccccgtctctactaaaaatacaaaaaattagccaggtgtggtggcaggtgcctgtagtgccagctacttgggaggctgaggcaggagaatggcatgaaccccagaggcagagctttcagtgagccgagatcatgccactgcactccagcctgggcgacagagcgagactctatctcaaaaaaaaaaaaaaaaaagataaataagacttaaaaactggttctttgaaaagataaataaattgatagacgattagcaagattaaccaagaaaagaggagagaaaatacaaataagctcaataaggaacaaaacaggagayattacaactgacactatataaatacaaaagatcattcaaggctactgtgaacacctttacatgcataaactagaaaacctaaaagacatggataaattcctggaaactagagaggcatcacattacccaacttcaaactatactataaggctatagtcaccaactcagcat

SEQ ID NO: 248322 - DNA, 531 bp, Homo sapiens
ggaggtcaggagattgagaccatcctggctaacacagtgaaaccccgtctctactaaaaatacaaaaaattagccaggtgtggtggcaggtgcctgtagtgccagctacttgggaggctgaggcaggagaatggcatgaaccccagaggcagagctttcagtgagccgagatcatgccactgcactccagcctgggcgacagagcgagactctatctcaaaaaaaaaaaaaaaaaagataaataagacttaaaaactggttctttgaaaagataaataaattgatagacgattagcaagattaaccaagaaaagaggagagaaaatacaaataagctcaataaggaacaaaacaggagacattacaactgacactatataaatacaaaagatcattcaaggctactgtgaacacctttacatgcataaactagaaaacctaaaagacatggataaattcctggaaastagagaggcatcacattacccaacttcaaactatactataaggctatagtcaccaactcagcat

SEQ ID NO: 248323 - DNA, 635 bp, Homo sapiens
taattgtgatcagagagattaaaaaatattattgagatgtgtgatattatgatttccaatttaagtattctgttttctgaaaattaacaattcagtgggtaaaaattgaatcwacagaattcttaaaataagaatttgctcatgttaacatctctcaagattcaaatgcttcagaattctcagtgcagccatctcctgccctccatggtgggtactcacgctggtggaggctactgcttcctgaacactttccataatgaattccttggtgatcctgcgagagggcagctcattgaagagggagttgatcagggccactttagctgcatcccgcctggcctcggctctacttaagcagcacttgagaagggagggagaaaaggagtcatttgagaatttagcatttcaccattccactcctgcatcaatgggtctctggacatttctatttatacatttactgtccgcatctattctgttcatatacattgctaatttccctgaaggtcacgcagattttccttcagctctagagttcgtgcaaatgtcttggttgatcttcaattacttattgtcttattttatagtcattgaatgtctactatatgtcagaagctttgcatactctattaatg

SEQ ID NO: 248324 - DNA, 559 bp, Homo sapiens
tgtttgctgtgctgtaattgggaaaatggtgttttggtgttgcgagagcaaaaggccaaattcaatcttattttgaaatattttttaaagttgattattaggaaaaagtgactgtagattttgaaaaaatactgcagagtatttaaaaaaawtttttttttttagaaacacgtcttgccctgtcacacaggctggtatatgtggtacatatacacaatgcagtgctattcagccataaaaaaaagaatgagatctggttatttgcaacaacatggctcactgcaacaaagatagctcactgcaacctcaaactcctaggctcaagcaatcctcctgccccagcttccccagtaccagggactacagatgcataccaccacacccagttaattctttttttttttttagagatggggtctcactatgctccccaggctgatttcaaactccttaccccaagtgatcctcctgccttggcctcctgaagtgctggggttacaggcaggagccatagtgcccagcccagtgattttattttaatgaggaaggagtggggcta

SEQ ID NO: 248325 - DNA, 535 bp, Homo sapiens
atcactgatgattgctggggaaattcccacctcagtctgaatgaaagggcaacatacttcggtgaattgttgcggggaatgaaggattgggtgaataggtgaactacaaaagataactttcaaagaggaaatcatgcacaaaattcaaaagacagaaatgaatgtcgtgtgtttgctgtgctgtaattgggaaaatggtgttttggtgttgcgagagcaaaaggccaaattcaatcttattttgaaatattttttaaagttgattattaggaaaaagtgactgtagattttgaaaaaatactgcagagtatttaaaaaaaatttttttttttagaaacacgtcttgccctgtcacacaggctggtatatgtggtacatatacacaatgcagtgctattcagcmataaaaaaaagaatgagatctggttatttgcaacaacatggctcactgcaacaaagatagctcactgcaacctcaaactcctaggctcaagcaatcctcctgccccagcttccccagtaccagggactacag

SEQ ID NO: 248326 - DNA, 559 bp, Homo sapiens
tgtttgctgtgctgtaattgggaaaatggtgttttggtgttgcgagagcaaaaggccaaattcaatcttattttgaaatattttttaaagttgattattaggaaaaagtgactgtagattttgaaaaaatactgcagagtatttaaaaaaaatttttttttttagaaacacgtcttgccctgtcacacaggctggtatatgtggtacatatacacaatgcagtgctattcagccataaaaaaaagaatgagatctggttatttgcaacaacatggctcactgcaacaaagatagctcactgcaacctcaaactcctaggctcaagcaatcctcctgccccagcttccccagtaccagggactacagatgcataccaccacacccagttaattctttttttttttttagagatggggtctcactatgctccccaggctgatttcaaactccttaccccaagtgatcctcctgcyttggcctcctgaagtgctggggttacaggcaggagccatagtgcccagcccagtgattttattttaatgaggaaggagtggggcta

SEQ ID NO: 248327 - DNA, 533 bp, Homo sapiens
tcctatgcacccaatgatacaaatttctgtcctggaaagggtgtgtgctatctgagaaaatggagaggaaccaataattagataaacttttatgaaagagaaaatatcattataaaggccactagcaaatccactccaaaaacaaaccgaaattgttttaactatctttttaaaaatacatattaggctggaagtcagccaaccatcgttaataagctcagttatcacaaacgacatccagtgacccaagggcttggcatcrttatctccaatcttgtaagttgaacatccaaattctcccacttaaagtaactctgagtttatccttaaagtgttaacctgtgaactagcaaagcctcccgtcagtatctttgacctctgaagtatttcgtgaataatcaattttactcctctcagagaccaagataccaagacagctctgggtaagtggttatatgagaccatcaagataacatggacctattcagggtccccgtatatataccaatcaaaaagctgacataaatgagagg

SEQ ID NO: 248328 - DNA, 617 bp, Homo sapiens
gtcagttaaccaaaagaacacctattgcacagtttcgttacatgatatggacaaaacagggaaatcaatagagtctatttgaatatacttgaatccaattagtaaattgggaaacacagagagagagagagagaatgaaaaaagataaacagaccagtaacatttgaaatattgtgagagacattatacccacaattgcaattaatgaacttaagtgttagaatgtgtttaagaataaagatatgaacgtgctatcctctcagctctctgttctcacgtgccccataaatgtgaggtgattatagtactatggaatatcctaattttaaaagttgtccttctctcactcatgtaatagaaatataggaacactttactttgcacatattttctctattatattcaatgcattactacttatttatattgcacatagattttaacatttagaggtgcataaacaaaaccatgtaaacaattttcttggaaaataattattttccaaataattattaaattaaataaaatataaataaaaattattttccaaatttcttggaaaatgattttctkggaaaataaattatgtttctttgaaataaataaataaacaaata

SEQ ID NO: 248329 - DNA, 620 bp, Homo sapiens
aattctgaacattagaggtacgactttattaaatctgtactttctgacccatttayccaagtttagtgacagtttgctctaaactgcttttttaaaaacaataatatggtaaatttggattttgtggaaattaaactatctcatgtcaaacacagtgcaattttggatttcaggattatgacagttgtgttagaaacaggctacctgggctatgtctgagttatgttggatccctgatgtaaagtttgacagtgtatgttgtgttcaaaatcaacagttctaaacaagaatctaaagatcccctagggcaatctctggactttggggggtccacatactctggaactgtgtaatgtgaatatgtatgttttgttctattttcctaggagatgatccacagcttttatcagattctcaaagggcttataaccaaaaaaggctaggacccagagcttcatgtgtttaaatagggaatcttccactctagtcccctttatcacagtgtgttgttcagaacaagatatagaaaaggaaaaaaaaaatctgcttggctcttcaaccctcttttctctaggctatagttaaagatgtttatatgatagactgacagcccttatgtc

SEQ ID NO: 248330 - DNA, 620 bp, Homo sapiens
aattctgaacattagaggtacgactttattaaatctgtactttctgacccatttacccaagtttagtgacagtttgctctaaactgcttttttaaaaacaataatatggtaaatttggattttgtggaamttaaactatctcatgtcaaacacagtgcaattttggatttcaggattatgacagttgtgttagaaacaggctacctgggctatgtctgagttatgttggatccctgatgtaaagtttgacagtgtatgttgtgttcaaaatcaacagttctaaacaagaatctaaagatcccctagggcaatctctggactttggggggtccacatactctggaactgtgtaatgtgaatatgtatgttttgttctattttcctaggagatgatccacagcttttatcagattctcaaagggcttataaccaaaaaaggctaggacccagagcttcatgtgtttaaatagggaatcttccactctagtcccctttatcacagtgtgttgttcagaacaagatatagaaaaggaaaaaaaaaatctgcttggctcttcaaccctcttttctctaggctatagttaaagatgtttatatgatagactgacagcccttatgtc

SEQ ID NO: 248331 - DNA, 620 bp, Homo sapiens
aattctgaacattagaggtacgactttattaaatctgtactttctgacccatttacccaagtttagtgacagtttgctctaaactgcttttttaaaaacaataatatggtaaatttggattttgtggaaattaaactatctcatgtcaaacacagtgcaattttggatttcaggattatgacagttgtgttagaaacaggctacctgggctatgtctgagttatgttggatccctgatgtaaagtttgacagtgtatgttgtgttcaaaatcaacagttctaaacaagaatctaaagatcccctagggcaatctctggactttggggggtccacatactctggaactgtgtaatgtgaatatgtatgttttgttctattttcctaggagatgatccacagcttttatcagattctcaaagggcttataaccaaaaaaggctaggacccagagcttcatgtgtttaaatagggaatcttccactctagtcccctttatcacagtgtgttgttcagaacaagatatagaaaaggaaaaaaaaaatctgcttkgctcttcaaccctcttttctctaggctatagttaaagatgtttatatgatagactgacagcccttatgtc

SEQ ID NO: 248332 - DNA, 619 bp, Homo sapiens
gctgtagccagctataaaatatgtgacatgccttttgggattttccttaccagtcctttcccctagctaacatccaggctctttcaactctccttgcctttgtacaggctacttcctctgcctagatcactcccacccccatcttcccttggacagttcctctccctaatttaatactcagctcaggtatcactgrcatacctgatggcttcttggagcagtctccagctccaccctgggttagggatggttcctctgaattctcatagtaatttttgacagccacgatcattccacttgtcataatgtgctataagacctatgtatggggtctctatgtaatctcttcttgatagcagtaattccaaactttggttgcacattagaatgacttgaggaaatgttaaaagtccccatgtcttgtttgtactccaaatcaatagaattttggatgtctaggagtagaacccaggattcgttttttaaaaaaaatgtttcccagttgacttcaatggtggccaaggttgaaaacctctgcattagatgacaaagtcctagagactcagtctttagtatgtcaacccaatgcataagactgatgttaaaattttgctaaatt

SEQ ID NO: 248333 - DNA, 619 bp, Homo sapiens
gctgtagccagctataaaatatgtgacatgccttttgggattttccttaccagtcctttcccctagctaacatccaggctctttcaactctccttgcctttgtacaggctacttcctctgcctagatcactcccacccccatcttcccttggacagttcctctccctaatttaatactcagctcaggtatcactggcatacctgawggcttcttggagcagtctccagctccaccctgggttagggatggttcctctgaattctcatagtaatttttgacagccacgatcattccacttgtcataatgtgctataagacctatgtatggggtctctatgtaatctcttcttgatagcagtaattccaaactttggttgcacattagaatgacttgaggaaatgttaaaagtccccatgtcttgtttgtactccaaatcaatagaattttggatgtctaggagtagaacccaggattcgttttttaaaaaaaatgtttcccagttgacttcaatggtggccaaggttgaaaacctctgcattagatgacaaagtcctagagactcagtctttagtatgtcaacccaatgcataagactgatgttaaaattttgctaaatt

SEQ ID NO: 248334 - DNA, 619 bp, Homo sapiens
gctgtagccagctataaaatatgtgacatgccttttgggattttccttaccagtcctttcccctagctaacatccaggctctttcaactctccttgcctttgtacaggctacttcctctgcctagatcactcccacccccatcttcccttggacagttcctctccctaatttaatactcagctcaggtatcactggcatacctgatggcttcttggagcagtctccagctccaccctgggttagggatggttcctctgaattctcatagtaatttttgacagccacgatcattccacttgtcataatgtgctataagacctatgtatggggtctctatgtaatctcttcttgatagcagtaattccaaactttggttgcacattagaatgacttgaggaaatgttaaaagtccccatgtcttgtttgtactccaaatcaatagaattttggatgtctaggagtagaacccaggattcgttttttaaaaaaaatgtttcccagttgacttcaatggtggccaaggttgaaaacctctgcattrgatgacaaagtcctagagactcagtctttagtatgtcaacccaatgcataagactgatgttaaaattttgctaaatt

SEQ ID NO: 248335 - DNA, 615 bp, Homo sapiens
atattttacattttgtttatccattcatcaattgctggacatttgagttgttaccagttttttgctattgtaaataatgttgccatgaacatttttgtgcaagcttttgtgtggacatatttccattctctgcagtatatacctaggaacagaactgctgggtcatattttaactcttctacctgtattttaaatagggctttcaggtgaacctaagactcactaaatttgagaatcactttattagggtgtcactatttcctccaaggcactgtacctgtaagccaccaactgccaacaggtgtgacattgcacccggtaataggtggaaaagaaagactatcacagcatccaatcaattatgattcataagaaaaatgttaacaatatgaataactaataatatcacattatcacctttgtttgacaaatttaaatccagatatattgaaggacaaggtttaaagaaacaaatagcatggaataagtcaaycattaagaactctaatatttttccagcctacagttgaacttgccttgattttcttttatctgagacccacaaacttactgggtgtgatggaactatagcattctttttgcctgccaaccatc

SEQ ID NO: 248336 - DNA, 560 bp, Homo sapiens
cttgaaacatttatgccagaattcagataagaatagctgctatgtgccctctgttcacagcagaaacaccctgtttagaagcaaaagttctagtggaggcttccagtgcacagagccagaggtaccagctagaactatacagcagtgggaagctacctggggaagttctgtggtgtgatttgaccattgtttcagcttccatttccaaatctggttctctggctctcctggagagtgagagttagccatggccttcacttaatacctattctgcttaaactggtatttctgtaaaacaagaacatgactgatatcacaggactctaccttagaagccccactaaagctaaactaagtacaagcttatcccaaatttgcttattagctttagggtcctagcaaatctctgtctgcctcctttgcagaaaatccccccttttcatggytcaatgagcaaattccctctaaaaagctttactgatgcaatttgaaccctttgtaatgtttaatgctaattataaaatatttatccacacaacagtatgttgatttctaagtca

SEQ ID NO: 248337 - DNA, 555 bp, Homo sapiens
tttttttttttgagactgcgaaaggcatctgtgtattttttgcatgtgagccttgcactgtttttccccctttgctatataaggtgtatcatgacctgacaatgtagactgttttaaaaacagttctaagtcttagaaaataaatttagaatgaatataaagtaggtactaaatatgagytcatgttttatttttcattccatttcacaatgcaaatttttgggaaaatggataatttactaaaaaatagagtacattttttccttcatgactctactcaagccaccggtatgttattctcatttgttaaagatcctttgtctgtgtttgtgttgttattagtaacagttgtgggggctacagttggggaaagatactgccacgtccctgagctgtatttaattgactccataaaaatcaacaaagacacaaaaacactaattctggaaattagtaaactgagaattaagtaacctttaaaaaaatagaccaataaaagcccactaagatgttgtacttcttcatgcatctaattttctttgcaaatattttatg

SEQ ID NO: 248338 - DNA, 543 bp, Homo sapiens
ctcacaataatcctgttgaggtaggttctaccattattccattttacagataatcacgatgctgaacattcagagcattctctcacaaagaatgtggttaaaacttaccactgagcaaaacatggaaatgtatgctggttttgttgttttatttttttgttttgttttattgtttagcaagcacktacataaaattgattgtgttgtaggtaccagtctaaggattttataaaaattaacacatttaaccctcatgacaaatctgtgagctagatacatttagtatccccattttgcagtcgtggaaattaagcctcaggatcaagcaatctactcagacactcagctagtaactggtagagctgggctctaaaccaaagcagtctgtcttgaatgttcagaggggaaaatgttctatacatgcagtttatactcaagaatttcttaaatatttagtcaactcatccaatttactggggcagggagcagtgtgtatggagggtgtgtatagtgtgaggagaggctggggagaggagagacagg

SEQ ID NO: 248339 - DNA, 543 bp, Homo sapiens
ctcacaataatcctgttgaggtaggttctaccattattccattttacagataatcacgatgctgaacattcagagcattctctcacaaagaatgtggttaaaacttaccactgagcaaaacatggaaatgtatgctggttttgttgttttatttttttgttttgttttattgtttagcaagcacgtacataaaattgattgtgttgtaggtaccagtctaaggattttataaaaattaacacatttaaccctcatgacaaatckgtgagctagatacatttagtatccccattttgcagtcgtggaaattaagcctcaggatcaagcaatctactcagacactcagctagtaactggtagagctgggctctaaaccaaagcagtctgtcttgaatgttcagaggggaaaatgttctatacatgcagtttatactcaagaatttcttaaatatttagtcaactcatccaatttactggggcagggagcagtgtgtatggagggtgtgtatagtgtgaggagaggctggggagaggagagacagg

SEQ ID NO: 248340 - DNA, 527 bp, Homo sapiens
tttaaaaatcaacattaaatccaggtatatggcatttatacattctctcacttactccattctcattcattgaacaaggtatttactgagcacctcctgtgtgtcaagaactgtatatgaataaagccaagtcccagaacctggggaactcaactaatggagtagaataaaggcaaaaaagagatccatggaatatgcacaaggagaggttggcttcttactgagaagtcaagaaaggcttgccctttaggggagatgagtgccagttgttgaaagtaagtagtggatggagcagagggaaagactcactctgcaaagggatggaggcctgaacctagaggaattcttagtgaattccaagtcctcaaacgagcaccatcactgggtgtcaactagcagtagaaggtagcgggagagtatcaggagacctrtgggcagccactgagggttttaagtgagaattatgtaactgaatccacagtccatgaaactgactctggaagaaccacttagggtcaatatggatc

SEQ ID NO: 248341 - DNA, 562 bp, Homo sapiens
tgacataattcatccactacacaaatcatgatccattcagcatttccatattatcttcatttgtcatattttaaaaataaatatacacacaagttttactatttgatttcaaaatatctggagaaaagcacactgatgaaaacattgttcctcttttaaaaaattactctattaaacttatcaccaaggcatggtcagaacattggagrtggagaagcttgagagatggtctttattcttgttctccagtaaaatgatttctttctttttaacaaatattttattttattattatttttttcaacttttattttagcttgagggggtacatgtgcaggtttgttacctgggtatattacgtgatgctgaggtttgggatatgaatgatcccatcactgagcatagtacccaatagtttttcagcccttgcccccctccctccctctcccatctagtagcctccacttcaaagtgagaacatgtggtatttgattttctattcctgcattaattcacttaggataatggcctccagcacattttctttatccaatccactgtt

SEQ ID NO: 248342 - DNA, 598 bp, Homo sapiens
caacaaacaagcaaacaacaaacaaaaaaactccaaatctcagactgtaattttagcaagaatactagttaacaattaatayagtgctatgggccaggtattttgctaagcattccatgtctatttaattctaagaataacctctaaggtaagtacatttaagaattccctaagaataagcagaggcttagagatgtgtgttaccttgccactgcacaagcaacacttggagagtcaccctctagagcagccgctgaccataccctagtgtgcctttcccagctttgggagactcagggcattccctctgctatgtcacagtaatatcaaacttcactcctgcctggtgaatctcttgcaaagctgtggttcctgggaaaaatgtcttcctttgatgtgtgccactcttgcaaagccaggaacatgccatcgttcttactctggctttctttattactcatgagtaattgtggaaaaagaggagcaatgcagaatcaaatggaggaggaggaagcaggcgatgtggtagtttcagaaagggagacactcccagcacctgactacatggtaaagcttttcatgtgaatttgatattcat

SEQ ID NO: 248343 - DNA, 598 bp, Homo sapiens
caacaaacaagcaaacaacaaacaaaaaaactccaaatctcagactgtaattttagcaagaatactagttaacaattaatacagtrctatgggccaggtattttgctaagcattccatgtctatttaattctaagaataacctctaaggtaagtacatttaagaattccctaagaataagcagaggcttagagatgtgtgttaccttgccactgcacaagcaacacttggagagtcaccctctagagcagccgctgaccataccctagtgtgcctttcccagctttgggagactcagggcattccctctgctatgtcacagtaatatcaaacttcactcctgcctggtgaatctcttgcaaagctgtggttcctgggaaaaatgtcttcctttgatgtgtgccactcttgcaaagccaggaacatgccatcgttcttactctggctttctttattactcatgagtaattgtggaaaaagaggagcaatgcagaatcaaatggaggaggaggaagcaggcgatgtggtagtttcagaaagggagacactcccagcacctgactacatggtaaagcttttcatgtgaatttgatattcat

SEQ ID NO: 248344 - DNA, 598 bp, Homo sapiens
caacaaacaagcaaacaacaaacaaaaaaactccaaatctcagactgtaattttagcaagaatactagttaacaattaatacagtgctatgggccaggtattttgctaagcattccatgtctatttaattctaagaataacctctaaggtaagtacatttaagaattccctaagaataagcagaggcttagagatgtgtgttaccttgccactgcacaagcaacacttggagagtcaccctctagagcagccgctgaccataccctagtgtgcctttcccagctttgggagactcagggcattmcctctgctatgtcacagtaatatcaaacttcactcctgcctggtgaatctcttgcaaagctgtggttcctgggaaaaatgtcttcctttgatgtgtgccactcttgcaaagccaggaacatgccatcgttcttactctggctttctttattactcatgagtaattgtggaaaaagaggagcaatgcagaatcaaatggaggaggaggaagcaggcgatgtggtagtttcagaaagggagacactcccagcacctgactacatggtaaagcttttcatgtgaatttgatattcat

SEQ ID NO: 248345 - DNA, 548 bp, Homo sapiens
tgttgtcccagaataatattaactggcattctcagaaatctggtcaccttggcctctgaattcacttcagaataaagtgtgaaaagatgtccagtaactttaatacacaatgacccctatttaatcacaggacaatgagggctggcccacccccccacacacatatttctggacctagaacaccaccactcccctgattatcttgtaaaatgtttgttttgggttctcagacctctgtttgcaaatgaaagatgctccagtcataacagcttaaggagaaagggtgatttaccggcacatgtaaacaaaccaagagagagcattgcactagccttggagtaagatggattccagtctaaagtaccatcaggaaacactgtgtcactcatctctgcttctctctaaagatggattccagtctaaagtaccatcaggaaacggtgtcactcayctctgcttctctctgcattgagacttgattctctcaggctagacttcagaagagaatggaaatatggccacaagcagctatgggctgccctccttat

SEQ ID NO: 248346 - DNA, 598 bp, Homo sapiens
ggtgtgtggggaccagaaggaagagtgagcgcaaagaagtgagtggtgggctgctgggattctggggyctgagtgggactggagctggggggccctgagcggcccacccttccaggaatgcgatcggacagcaggagggatttctcagcagccctggcggtgccgctgactcactgccagcgtctgtgatcaactcgcctttggagagagagcattgccaagactcccccaccaccagcctgagctgggttcaatgcgcttcactcccaggacgcgccaagcagtgtcccggcgccctgccctgcctctgtccgggctgttctccccgccaggctctccctcacttggagcccatctgggcaggcgtccccagctcaacctctcagcaggatgactcacccttggccgtggcgcagagatactctcttggcaggagtgtgactggcataacctcttagggagatcgtttgggaacatttacaggattcaaggccagctccttctctgtcttcagggcttgggtcttccctgaccaccttggctaaagcaagagacctcccaccccgtgcacattactgcccatctccgcatcctgctg

SEQ ID NO: 248347 - DNA, 598 bp, Homo sapiens
ggtgtgtggggaccagaaggaagagtgagcgcaaagaagtgagtggtgggctgctgggattctggggcctgagtgggactggagctggggggccctgagcggcccacccttccaggaatgcgatcggacagcaggagggatttctcagcagccctggcggtgccgctgactcactgccagcgtctgtgatcaactcgcctttggagagagagcattgccaagactcccccaccaccagcctgagctgggttcaatgcgcttcactcccaggacgcgccaagcagtgtcccggcgccctgccctgcctctgtccgggctgttctccccgccaggctctccctcacttggagcccatctgggcaggcgtccccagctcaacctctcagcaggatgactcacccttggccgtggcgcagagatactctctyggcaggagtgtgactggcataacctcttagggagatcgtttgggaacatttacaggattcaaggccagctccttctctgtcttcagggcttgggtcttccctgaccaccttggctaaagcaagagacctcccaccccgtgcacattactgcccatctccgcatcctgctg

SEQ ID NO: 248348 - DNA, 584 bp, Homo sapiens
tccatctctctctctctccatctctctgtctctctctctcacacatacacrcaaacacacacacacacacccccccataaacaaatactgaagtagttaataatatgcagcctggaatgtttagggtgaaacattcagatgtctgtaacttactttgaaatgcatcaaaagtaaggattaggccgggcaccgtgactcatgcctgtaatcccagctctttgggaggcctacggaggcgggtcatctgaggtcaggtgtttgagaccagcccgtctaacatggcgaaaccctgtctctactaaaaaaaacaaaaattaggctgggctcagtggcttattcctgtaatcccagcactttgggaggctgaggcaggtgtatcatcagtccaggcattcaagaccagcctgaccaatatagtgaaacacaatctgtactaaaaatacaaaaattagccgggcgtggtggcacgcacctgtagtcccagctactcgggaggctgaggcagaagaatcgcttgaacctggggggcagaggttgcagtgagccaagatcaagccattgcactgtagcctgggcaacagagt

SEQ ID NO: 248349 - DNA, 584 bp, Homo sapiens
tccatctctctctctctccatctctctgtctctctctctcacacatacacacaaacacacacacacacacmcccccataaacaaatactgaagtagttaataatatgcagcctggaatgtttagggtgaaacattcagatgtctgtaacttactttgaaatgcatcaaaagtaaggattaggccgggcaccgtgactcatgcctgtaatcccagctctttgggaggcctacggaggcgggtcatctgaggtcaggtgtttgagaccagcccgtctaacatggcgaaaccctgtctctactaaaaaaaacaaaaattaggctgggctcagtggcttattcctgtaatcccagcactttgggaggctgaggcaggtgtatcatcagtccaggcattcaagaccagcctgaccaatatagtgaaacacaatctgtactaaaaatacaaaaattagccgggcgtggtggcacgcacctgtagtcccagctactcgggaggctgaggcagaagaatcgcttgaacctggggggcagaggttgcagtgagccaagatcaagccattgcactgtagcctgggcaacagagt

SEQ ID NO: 248350 - DNA, 584 bp, Homo sapiens
tccatctctctctctctccatctctctgtctctctctctcacacatacacacaaacacacacacacacacccccccataaacaaatactgaagtagttaataatatgcagcctggaatgtttagggtgaaacattcagatgtctgtaacttactttgaaatgcatcaaaagtaaggattaggccgggcaccgtgactcatgcctgtaatcccagctctttgggaggcctacggaggcgggtcatctgaggtcaggtgtttgagaccagcccgtctaacatggcgaaaccctgtctctactaaaaaaaacaaaaattaggctgggctcagtggcttattcctgtaatcccagcactttgggaggctgaggcaggtgtatcatcagtccaggcattcaagaccagcctgaccaatatagtgaaacacaatctgtactaaaaatacaaaaattagccgggcrtggtggcacgcacctgtagtcccagctactcgggaggctgaggcagaagaatcgcttgaacctggggggcagaggttgcagtgagccaagatcaagccattgcactgtagcctgggcaacagagt

SEQ ID NO: 248351 - DNA, 573 bp, Homo sapiens
ctatctcatgtatcccagagattttaatagtcctgtttttagaaagacatgaaaatagatgcaatgatatccactgtgttttgcatttttctagccatcggaaaatgtgcattatgtgcatattaagaaaggctacaaggtaattagtaaggctgataatcactacattgtgaagaaactagaatatcactttttttttttataaaaggacaatttagaactgtgcagggacaatattcgtaacagaactatttaaacacccatgcaaaataaattaaaaatgctgtgagrtttaaattaaactataggcaactttgttgggattaattatgtttaaaatgacgatggttgaactcaaattattgaaccaaaaacaaaaacaaaaacaaactgatggaactgtcaacttgcttcaaatggcgcaaggacacacacatgggcatcagattagaggatgtgacacggcagtgacatttggtttgggaactcaaaggacatacagttttgtttttcatcatttgaatcatattgatcttcatcacaaataaaacttctttaagcaaattaaaattt

SEQ ID NO: 248352 - DNA, 497 bp, Homo sapiens
gattcattccagatttactcacttaggagtcctgggagtggagaccagacctgttttaacaaggcctccagagtagtctgatatgcattcaagtgtgggaagcactgaaatagactatccctcaccaaaccactacctgagtcaggtttccctggttgattttaagacaggctagaggcaacatggaatattactggattaagataaacatcaacaacccagaattgttaaaatgttctatgacttatttgtcataagattttgggtaattcagttcatttttctgaacttcagtttcctgccctgtcaaatgggaatstatcctgttctgctgctgttctgctgtggtgtagtaggcctccaaaaaagtaaaaattaaaaatagaaagtaccttatgaaaacagatatttcaaaggagaaaaaggaatgataattgctattgaatttaacatctagatttgtaaagtcattttttcttttatataaacagtaaaag

SEQ ID NO: 248353 - DNA, 463 bp, Homo sapiens
tggagatccccttttttcccctctggcattctcctattctcttcagcagcctcagttccctctgctagaaaaaaaaatgcakttttttttcagttgcactctgccactgcatgtgagccatagcgactgcgcttagccctaggctgaaagttgtggtaataagatgttccttgttcaactcctctcttctgctcagaacgtgcactctccacttaagtctgccttctgctcagtctccagtacctcaggtcgctgctctttttattatgtttaggttttataggtttttttttttattatttctggggagtcatcaggtagggtcttactctgccattactactagatgctgttttaaaaacacttcctctatatctcaactatgtgtgattttgttactttgttaactttgctccctaaatacctattgaatccggtcacctctttctagattggctgccac

SEQ ID NO: 248354 - DNA, 586 bp, Homo sapiens
gttccatctgctcttctactacccctcagggatggctcaggcctcctccctttcccacacatcaagctcaaggatttgtccctgcccaagactggcaaattgactttactcacatgccccaagtcagaaaactaaaatacctcttagtctaagtagacactttcactggatgggtagaggcctttcctacagggtctgagaaggccaccacggtcatttcttcccttctgtcagacataattactcagtttgggcttcccacctctacgcagtccgatagtggaccggcctttattagtcaaatcagccaagcagtttttcaggctcttggtattcagtgaaacctttatatcccttacagtcctcagccttcagaaaacgtagaacggactaatagtcttttaaaarcacacctcaccaagctcagccaccaacttaaaaaggactggacaatacttttacctctttcttttctcagaattcaggcctgtccttggaatgctacgggtacagcccatttgagctcctgtatagacgctcctttttattaagcgccagtctcattccagacaccacaccaacttag

SEQ ID NO: 248355 - DNA, 509 bp, Homo sapiens
tatcagaatgaaactggtttaatagaatgagttagaaagaggtaactccttattttttggaagagtttcagtatgattggtaccagctcttcattatatgtctgatagaattcagctgtaaattcatctggtctaggactttttatttgattggtaggtttttaaaattatagattcaattttgttattcattattgatctgtttgggattttacttcctctcctatcttgaaggatatgtagtctttcactgtagatagatagatagatagatagatagatagatagatagatagtattgtctctaaagatttgcatgtatttttaacttattaaactctaacattaataaytatttatcgtcttaaagacctcagaatgtttttatttggtgtaccttgttcttaatttatataattttaacatatttcaattatacatgtattttaaactcaacaaaatattattaacattatgttgcactatcaatgtttatttataattgccca

SEQ ID NO: 248356 - DNA, 509 bp, Homo sapiens
tatcagaatgaaactggtttaatagaatgagttagaaagaggtaactccttattttttggaagagtttcagtatgattggtaccagctcttcattatatgtctgatagaattcagctgtaaattcatctggtctaggactttttatttgattggtaggtttttaaaattatagattcaattttgttattcattattgatctgtttgggattttacttcctctcctatcttgaaggatatgtagtctttcactgtagatagatagatagatagatagatagatagatagatagatagtattgtctctaaagatttgcatgtatttttaacttattaaactctaacattaataactatttatcrtcttaaagacctcagaatgtttttatttggtgtaccttgttcttaatttatataattttaacatatttcaattatacatgtattttaaactcaacaaaatattattaacattatgttgcactatcaatgtttatttataattgccca

SEQ ID NO: 248357 - DNA, 509 bp, Homo sapiens
tatcagaatgaaactggtttaatagaatgagttagaaagaggtaactccttattttttggaagagtttcagtatgattggtaccagctcttcattatatgtctgatagaattcagctgtaaattcatctggtctaggactttttatttgattggtaggtttttaaaattatagattcaattttgttattcattattgatctgtttgggattttacttcctctcctatcttgaaggatatgtagtctttcactgtagatagatagatagatagatagatagatagatagatagatagtattgtctctaaagatttgcatgtatttttaacttattaaactctaacattaataactatttatcgtcttaaagacctcagaatgtttttatttggtgtaccttgttcttaatttatataattttaacatatttcaattmtacatgtattttaaactcaacaaaatattattaacattatgttgcactatcaatgtttatttataattgccca

SEQ ID NO: 248358 - DNA, 509 bp, Homo sapiens
tatcagaatgaaactggtttaatagaatgagttagaaagaggtaactccttattttttggaagagtttcagtatgattggtaccagctcttcattatatgtctgatagaattcagctgtaaattcatctggtctaggactttttatttgattggtaggtttttaaaattatagattcaattttgttattcattattgatctgtttgggattttacttcctctcctatcttgaaggatatgtagtctttcactgtagatagatagatagatagatagatagatagatagatagatagtattgtctctaaagatttgcatgtatttttaacttattaaactctaacattaataactatttatcgtcttaaagacctcagaatgtttttatttggtgtaccttgttcttaatttatataattttaacatatttcaattatacrtgtattttaaactcaacaaaatattattaacattatgttgcactatcaatgtttatttataattgccca

SEQ ID NO: 248359 - DNA, 435 bp, Homo sapiens
ctggattgactatatggaaatcctgaggtaattaacatgagtggctgccacagcatctcatttttgccattacaactacattttgrtgtcaaaagcacatgagtcttctgtatttacattcgttctgttagtgcattataattacagatgtaatcaaaaagagaggtttgatttttcacctaaatgacacctttaatcacttctgaatgaggcatgactccaattagagatatctcaaaaaattatgcctaatagtatcagttatcagaattccaaatagaagacttttatttcaatgccatttccctttattctattttcctagggaaggacagtttcctgcatgtgatggcacagggtaaaatccttatgactgatttttttcttgattaaaataaattcaacaaactgtttttgactccttaccaaatacca

SEQ ID NO: 248360 - DNA, 387 bp, Homo sapiens
ctattttgcggaccccaaagatgagaaacaagaacaggcatcaaggctttttcccctcatctcagattatacaataattctcagattatatgataattgagttacaagatatcaattattatatgataattaaattatgagttatcaattattatatgataattgarttaccatataatctgagatgaatatattcaattactagaagcaagttcctagcttcaaaattgtttaatttttttggttgttgttgttactgaaattttctttctctggcaaagacaaaccagttgatccaataaaaagaaagccactattcctaatgagtgggttctaggggtagaaaaatgaataagaaacaagcctctacctctgatgtaaaaatgg

SEQ ID NO: 248361 - DNA, 387 bp, Homo sapiens
ctattttgcggaccccaaagatgagaaacaagaacaggcatcaaggctttttcccctcatctcagattatacaataattctcagattatatgataattgagttacaagatatcaattattatatgataattaaattatgagttatcaattattatatgataattgagttaycatataatctgagatgaatatattcaattactagaagcaagttcctagcttcaaaattgtttaatttttttggttgttgttgttactgaaattttctttctctggcaaagacaaaccagttgatccaataaaaagaaagccactattcctaatgagtgggttctaggggtagaaaaatgaataagaaacaagcctctacctctgatgtaaaaatgg

SEQ ID NO: 248362 - DNA, 589 bp, Homo sapiens
ataaagatgtctcataccccactataaaatacttggatggaaatcagatgataattcttccagatctgctattgacttttcatatgaccattgacaagctatttaccctctctgggatgctaaatttgctattgaaaatggcctagagagttctgaaggcagagttcaacattagcatttcattttcaattatattcaccagtttgtgagagatatagtaaaatgagcgtagacttttgaatgtagtatcacagattgaatatcttccacatattaggtgggaaaacttgaataaatcactgaagatctttaaggctcagtttcattttctgtaaccaggagatatactaaatacctttcagtaaagatcccggcayatagctatttttttctggttattatattattatgagctctggggaatatttaaatcttttcatggacctgcatgcttccacagtactgatcagccatgagacagtgagggtctttccagagtgagagagttcaatctcccagtaagcctcttagtataaaccaaagacttttctgactatgcatcatgggaaagttatcacccttcgaaaag

SEQ ID NO: 248363 - DNA, 563 bp, Homo sapiens
  misc_feature (1)...(563): n = A,T,C or G
gttgccaaggcaatattcatctagtaagtgacccaatttatgcctggataggtatttgggtattaaacttgtttatttattcattcttcattcagtaaatatttataaaatatctactstacatatttttctacattgggataaatncggtnngaaaaatacaaacaggacacatacccttaaggatctacattctagcaggggagacaggtgacaaagagcataatgaataagttgactatgcaatagcctgggtaaagaaaataacaagtagagcagagaatgaggtaaatattgaggatggtaaatattaaggatggtaaatattgagttagggagtagagggttggtaacaaaaccaagtgaggtggtaaggattgggctccttgaaagttttgaagagggtgagggaactaagcagattccagggagatgggtccaaacagagcgagcagagtgaaagccctggcaggagtgtgtctggcttgttgagctgaacaatgaggccagggtggctggagctcagagtcagggggagtcagcatcagggggccagtgagggg

SEQ ID NO: 248364 - DNA, 589 bp, Homo sapiens
cttatttctaattttactctcaaaggtgctgtatccccagaagctaaacagaagtaagtaatctattgagtagcagtcaagtaaaggggtgaagtgcctgaggcttagagctagccccctgtggcatgcaatgcctgtggttggcattttgtgtcctctgcagcagagatatggcaataattcacaccttgctctagcgtgtgaattaaattcacagctcatgctggggggtggtcaggtgctgaaaatgtttccaaatttcatcttttcctcttccttttctttcttccctcctttgctttctttctccttctttctctggtcttctccagggacaccaatgggggagaccaggttcctcagtccgccacaagagactagcaattttcaaactgttttctttatcagctatacacatatattattatcattagagtcaatttcttcttcctatttgtacactccttccttccctcactgctgatttatcccaaaatttctggataamcttctattagttctgcacttcaggttcatgactaaactccaatctacattgagtctcagggtggtggaaatgtgttagcag

SEQ ID NO: 248365 - DNA, 412 bp, Homo sapiens
gaaccaccatccccatcattatcccagatgcctgttactgagcacccgctcygtgtcaagcacagtactcttcatgcacaatttgttagtcagtatccctacttaacagatgaggaaacttgggctttaagaagtcaagttgcgtacccaaggtcacacaactggaaattgggattcaaatccagactccataactccaaaccctgtgctctcaaccactactgtctaaggatggggcagagagctgggaggaccacagccccatcagcaaatgccacgagagcagcagcaagatggaatcctgagtaggaagggcccgggagagcaagtctgagcacaatgcttggaaaacaatggaaaggctcaacattgcccacactgtgacaggtgggggacacagagtggcctccac

SEQ ID NO: 248366 - DNA, 556 bp, Homo sapiens
caaatgggaagcacaggtaccccagggtgcgtttcctccctgtgccacccccagatgctggcaggctccctctgacctctgtgtaccttcttctccaggaaggcccctcagggtgggtgctgaccttctgtaggagccctcacttgggggtctgggatgttgacccatgacatggctatggggttgcagagtctcctccaatgcagaggacagtctgggggagcaccctggactgagtggccttccccgcagtgccatggaagccacactggagcctgaattgaaggaaacaccagtactaccgatcctgtctttatttaacattttggtattttattcatcatagatttttgcattaattttgatttttagaaataytgtgtggaaatattgtttatcttgattcctgagttttttggctcccttagcttttgtgtttcacttgctcaccctagtcctggtcctgcctcccaggacagagcagggaatctctataccccagagctgactctggcctctggtcctctctccagaggaagaaggcgagagtgagctg

SEQ ID NO: 248367 - DNA, 681 bp, Homo sapiens
tgattaaaaaaaaaatcttcctctaaaatgcaactccctttgacatgcatatgatgaaaataccctttgctcttttcacaactgtttgggctgttcttggctcctgactgtgtgttccataaatgtatgttcattttagatggcaaatacttcaaaggcagaaggtgggtctgtggatcccacttcctgcagagctctgaggaataccatagacaatgaacaatgacggcaatgatggaaagcttgggtctgtgtcttagtcatgggaagaaggaacaaaatgaagaagggccagatgagcccttaatatgagtcagagaatagactgatacttacaatacaccattatccttgactgtctccacaactctggctgttgctatatccatttacrcagtgaatactgaggcttagaaaaacaaaattatggacctatgtggtggaggtgggatatggtagtgtggcttcaaatctgcggtttcccctcttcccactcctagtacacagaaaggttaatgggttaggcaatttgggttatcagcgccaccatctaaattttagcttgagcaaattatttatcatctctgagccccatttcctccataataaaatgaaatggtaatacccatttcccaggataattatgaagattaaaggagattctgaagattatggcattta

SEQ ID NO: 248368 - DNA, 585 bp, Homo sapiens
acgttgccctgtagcaccaaaggggccatatagcatatgtaaatgaataggtgtggcagtgttccaataaaactttatttacaatagcaggtggcagtgggctggactggctcacaggctgtagtctgcccagscttgggtttggagctggtgaagaacatgcccctggtgaagaaaactagagggccaacctccctctttctgccagcaccctcttagaaatccacctcgagggctccagaggcagagcccatgaaagccactgaaatcccccctctgcctttgagaactggaggtttagatttataggcatgacaatttgtttcacataattctgtcagtaattacatcgacttccaccagcagccattaggtaaatgatttggccctttcccctgagtaatattttcccccactgaaataaatggagggtgcatttctctcccataagttaagcatattatttgcctcatcacacaaggcaaatgcagtagctctgagctattagtctatcactgcagcaatcagacggccaggagccagaagtaatttacaacagggaagtaaacagggccccagataaat

SEQ ID NO: 248369 - DNA, 598 bp, Homo sapiens
aatgattctcttcgcatgattgttgtgatggttaagtctaagcattgaggcaaagtgcccagtacagtactgcttcttagatagatgggatatatatatatatatatatatatatatatatatatatatatatatatatatgcagtaatctaaactttgagctttaatttcctcctctataaaataagagcattgattgaggcttaggcagggaactcccagtagagacaaatgcagactctggagtcaggtttaccmaaatgtgaaccaaatgtgaatcctggttctgccgctaagtagttgtatgatattgttcaaattctttaacctttctgcacttgtttcacatctatagaacagtactaaccatagtacctatcccacagagttgttaggagaattaaatgagttaatagacatgaagtgctcagaacagcacctggcactcaacgtgtttactagcgctattatctatctaaaagtgctattgtaaggatccaaagtactcaaagcgcagggaactgcatacagtggatgctcaatacactagcagacatctgttgtttttacatttcacatcccctcttctgtcttctga

SEQ ID NO: 248370 - DNA, 598 bp, Homo sapiens
aatgattctcttcgcatgattgttgtgatggttaagtctaagcattgaggcaaagtgcccagtacagtactgcttcttagatagatgggatatatatatatatatatatatatatatatatatatatatatatatatatatgcagtaatctaaactttgagctttaatttcctcctctataaaataagagcattgattgaggcttaggcagggaactcccagtagagacaaatgcagactctggagtcaggtttaccaaaatgtgaaccaaatgtgaatcctggttctgccgctaagtagttgtatgatattgttcaaattctttaacctttctgcacttgtttcacatctatagaacagtactaaccatagtacctatcccacagagttgttaggagaattaaatgagttaatagacatgaagtgctcagaacagcacctggcactcaacrtgtttactagcgctattatctatctaaaagtgctattgtaaggatccaaagtactcaaagcgcagggaactgcatacagtggatgctcaatacactagcagacatctgttgtttttacatttcacatcccctcttctgtcttctga

SEQ ID NO: 248371 - DNA, 584 bp, Homo sapiens
tcagccagcagcatctagacacagaatgtgatacctgtaagcatgtgggtaygctaacgaggggctttctgctgcagaatggtgaattcctgttgtccagggcttgggagtgtgatgtcaggggcagtggaacatttttttgtgaggctgaagagctaaaaatgaaaacacacttgagagccatcaactacttacaagactcggaggttcttgagcccagcgaagtccatcttggtgatcctggtgatattatttctgtccaggtcactgcaatggagagcaaattcaggtcagatttttgtgggttacaattacggtctatttaatccagactggcttggactgaagggatgttgcttgtccagaaggcggcaattctgatgattaacgatatcccttgagcgtgcccggctaaccttaaggatattgtatggaataaaccattcattatgcacatagcagaactcttttatatgtaactgcctgccttctgtggtcccttctttaggtaacaaatttttctgttgaagtttcccctcccccaactctcagatcatgtcatacaaatggggctgacccctctt

SEQ ID NO: 248372 - DNA, 524 bp, Homo sapiens
aactgattcccctattccacgcttatctgctcaaatcttctctcaacatggtagccaacaggatattttaaagtcataaattagatcatgttacgtccctgctttaagacttctcaatggctactcactgagcttagaatcaagtccaataaggtctaacaggagtgggcccctcggtctctttgcaaccacctggggcctctgtccctctcacatgctgcagccagactggctttctttcagcttaagttcaagtcttcttggacccraggtcttcatgcttgctgctccctttgcccaaaacactcctcccctactcctttgccttctgtcctccctttctcccactcccccatagctgcctcattcttttccataggacttaacttaaactgtgcatcctcagggacacctttcttgaccaccctataaaaagtaggccctgatggcagggaacatcacacactggggcctgtcggagggctgggggctgggggagggatagcattaggagaaatacctaa

SEQ ID NO: 248373 - DNA, 524 bp, Homo sapiens
aactgattcccctattccacgcttatctgctcaaatcttctctcaacatggtagccaacaggatattttaaagtcataaattagatcatgttacgtccctgctttaagacttctcaatggctactcactgagcttagaatcaagtccaataaggtctaacaggagtgggcccctcggtctctttgcaaccacctggggcctctgtccctctcacatgctgcagccagactggctttctttcagcttaagttcaagtcttcttggacccaaggtcttcatgcttgctgctccctttgcccaaaacactcctcccctactcctttgccttctgtcctccctttctcccactcccccatagctgcctcattcttttccataggacttracttaaactgtgcatcctcagggacacctttcttgaccaccctataaaaagtaggccctgatggcagggaacatcacacactggggcctgtcggagggctgggggctgggggagggatagcattaggagaaatacctaa

SEQ ID NO: 248374 - DNA, 524 bp, Homo sapiens
aactgattcccctattccacgcttatctgctcaaatcttctctcaacatggtagccaacaggatattttaaagtcataaattagatcatgttacgtccctgctttaagacttctcaatggctactcactgagcttagaatcaagtccaataaggtctaacaggagtgggcccctcggtctctttgcaaccacctggggcctctgtccctctcacatgctgcagccagactggctttctttcagcttaagttcaagtcttcttggacccaaggtcttcatgcttgctgctccctttgcccaaaacactcctcccctactcctttgccttctgtcctccctttctcccactcccccatagctgcctcattcttttccataggacttaacttaaactgtgcatccwcagggacacctttcttgaccaccctataaaaagtaggccctgatggcagggaacatcacacactggggcctgtcggagggctgggggctgggggagggatagcattaggagaaatacctaa

SEQ ID NO: 248375 - DNA, 524 bp, Homo sapiens
aactgattcccctattccacgcttatctgctcaaatcttctctcaacatggtagccaacaggatattttaaagtcataaattagatcatgttacgtccctgctttaagacttctcaatggctactcactgagcttagaatcaagtccaataaggtctaacaggagtgggcccctcggtctctttgcaaccacctggggcctctgtccctctcacatgctgcagccagactggctttctttcagcttaagttcaagtcttcttggacccaaggtcttcatgcttgctgctccctttgcccaaaacactcctcccctactcctttgccttctgtcctccctttctcccactcccccatagctgcctcattcttttccataggacttaacttaaactgtgcatcctcagggacacctttcttgaccaccctataaaaagtaggccctgatggcrgggaacatcacacactggggcctgtcggagggctgggggctgggggagggatagcattaggagaaatacctaa

SEQ ID NO: 248376 - DNA, 589 bp, Homo sapiens
gctctgactttggtgccctggggaatgacaactgtgattacctttaaactgcctcatacggtgccacatagcgccacagagaccctcacatccttgccttgctcccacccagaaacctagggtgaccaactatccccatttgccaaggactgatggggttcccacgatgtgagactttcagagccaaacacrcagtccctcacaaagcaagatgagttggtcacaccacagcagcctagagtctggtcttgacctgtgggctccttttatgaccttttcctcatctccaggactcctgggcccttgtctcacctctctctcatttactagatctcacctggcccctgagtgggacatgtgatttaacagagaagggagtcatgcaaaaccaaaaactatcaagatagatgcctgggtttggatcctggctcagcacatctgtgggccaattacataaacactctaggcctcagttttctcatctggaaaatggggcaatagcagcagatgctgttggtacaccacccaattccccttttctgtgttggtgcatttgaccctggctgctgtgaagtttggctgctaacag

SEQ ID NO: 248377 - DNA, 589 bp, Homo sapiens
gctctgactttggtgccctggggaatgacaactgtgattacctttaaactgcctcatacggtgccacatagcgccacagagaccctcacatccttgccttgctcccacccagaaacctagggtgaccaactatccccatttgccaaggactgatggggttcccacgatgtgagactttcagagccaaacacgcagtccctcacaaagcaagatgagttggtcacaccacagcagcctagagtctggtcttgacctgtgggctccttttatgaccttttcctcatctccaggactcctgggcccttgtctcacctctctctcatttactagatctcacctggcccctgagtgggacatgtgatttaacagagaagggagtcatgcaaaaccaaaaactatcaagatagatgcctgggtttggatcctggctcagcacatctgtgggccaattacataaacactctaggcctcagtttyctcatctggaaaatggggcaatagcagcagatgctgttggtacaccacccaattccccttttctgtgttggtgcatttgaccctggctgctgtgaagtttggctgctaacag

SEQ ID NO: 248378 - DNA, 397 bp, Homo sapiens
acaatacatcaataaatgagtgtggctgagttccaataaaactttatttataaaagcaggcagtgggccaaatttggcccatggctgctgcttgccatcccctgcccatctccctggcccratcagaatgctttgtacatcaaaggagctcctaaagatttcctgaataaagaaggaaagattgaataaatatttgaataaataaatgatacatttcaaaggccaagtgctaaccttgtttgaaaaacttctttcctagaatgaaattcctattttaggaattgtcttttcttgttccctcatgtctaaagccctttatcatcatcataatatttatggagtaccactcttttaaacattttacattgattaatttatttcatgctcaaaataacct

SEQ ID NO: 248379 - DNA, 397 bp, Homo sapiens
acaatacatcaataaatgagtgtggctgagttccaataaaactttatttataaaagcaggcagtgggccaaatttggcccatggctgctgcttgccatcccctgcccatctccctggcccgatcagaatgctttgtacatcaaaggagctcctaaagatttcctgaataaagaaggaaagattgaataaatatttgaataaataaatgatamatttcaaaggccaagtgctaaccttgtttgaaaaacttctttcctagaatgaaattcctattttaggaattgtcttttcttgttccctcatgtctaaagccctttatcatcatcataatatttatggagtaccactcttttaaacattttacattgattaatttatttcatgctcaaaataacct

SEQ ID NO: 248380 - DNA, 431 bp, Homo sapiens
actcccacaaacttaagtaaagagttggaaaaagacatttcatgcaaatggacaccaaaagcaagcaggagtaactattcttatatcagacaaaacaaatgttaaagcaacagccatttaaaaagacaaagagggagattatataacgataaaagaccttgtccatcaggaaaatatcacaatcctaaacatatatacacctaacactggagctcccaaatttataaaacaattactaatagtcctaagaaatragatagacagcaacacaataatagtggaggacttcaatactccaccaacagcactagacaggtcatcaagacagaaagtcaacaaagaaacaatggatttaactatacctggaacaaattgacttaacagatatatacagaacattctactcaacaaccacagaatatatattcaat

SEQ ID NO: 248381 - DNA, 622 bp, Homo sapiens
tggttggatttttttcatctgagtaactaaaatgtttgctgatattatctacatgtgtccttttttcatgattctaaggtgggggttaagagcattggcctgaagccagactacctagcaatgagtccccgctctgctatttgcttctttgaccttaggcaaggttacctaagcttgccatgagtcaatttccttattggtgaagtgaagatcataattttctaaggttatgagtgtcatgaataaaatatttagacaaatgcccacatagtaaatgcccaataactctttcttattgctattacccattattttctattatgttgatccattcttctctcacctataacatttttccttcacccaaaattattttttaccctcatgcacagctccaattgttctagcttgctccttaagaatttctgtaactcctccttctccctatataccaccttttctttcatccttttrtctctttatatttttctcttgtatcctcagagagtatttccaagagagttcttcaccctagtgattcacctcttatactgaacagacaagccttttcttctgtctccagtaaaaattttgattaccttattataattttagtctcctt

SEQ ID NO: 248382 - DNA, 622 bp, Homo sapiens
tggttggatttttttcatctgagtaactaaaatgtttgctgatattatctacatgtgtccttttttcatgattctaaggtgggggttaagagcattggcctgaagccagactacctagcaatgagtccccgctctgctatttgcttctttgaccttaggcaaggttacctaagcttgccatgagtcaatttccttattggtgaagtgaagatcataattttctaaggttatgagtgtcatgaataaaatatttagacaaatgcccacatagtaaatgcccaataactctttcttattgctattacccattattttctattatgttgatccattcttctctcacctataacatttttccttcacccaaaattattttttaccctcatgcacagctccaattgttctagcttgctccttaagaatttctgtaactcctccttctccctatataccaccttttctttcatccttttgtctctttatatttttctcttgtatcctcagagagtatttccaagagagttcttcaccctagtgattcamctcttatactgaacagacaagccttttcttctgtctccagtaaaaattttgattaccttattataattttagtctcctt

SEQ ID NO: 248383 - DNA, 619 bp, Homo sapiens
gtagtctcagtgactcagaaggctgaggcaagagaattgctttaacctgggaggtggaggtcgcagtaagccaagattatgccactgcactccagcctgggcaacagagcaaggctctatctcataaaaacaacaaacaaacaacaacaacaacaaacaatgaagcatccctatagratctaaaaaatagcatcaaaggggcaaatctaagagttactggccttagagaggaagtagagagagagagggttagaaagtttgttgaaagggatcagagcacttcccaacagatagattgggaagatctcaatacagtaatagctggaaacttcaacacctcactttttccctaatctagagaaacatatcaacattcaagtacaagaaggttatagaacaccaagcagctttaacccaaggaagactactcaaggcatgtaataatcgaacacccaaaggtcaagggtaaagaatggatcttaaaagcagcaagagaaaagaaacaaataatatacaatggagctccaaaacatctggcatcagactttttagtggaaactttacaggctgagagggattaatatgacatatctaaagtgtggaaagaaagaaaactttt

SEQ ID NO: 248384 - DNA, 550 bp, Homo sapiens
cgcagtaagccaagattatgccactgcactccagcctgggcaacagagcaaggctctatctcataaaaacaacaaacaaacaacaacaacaacaaacaatgaagcatccctataggatctaaaaaatagcatcaaaggggcaaatctaagagttactggccttagagaggaagtagagagagagagggttagaaagtttgttgaaagggatcagagcacttcccaacagatagattgggaagatctcaatacagtaatagctggaaacttcaacacctcactttttccctaatctagagaaacatatcaacattcaagtacaagaaggttatagaacaccaagcagctttaacccaargaagactactcaaggcatgtaataatcgaacacccaaaggtcaagggtaaagaatggatcttaaaagcagcaagagaaaagaaacaaataatatacaatggagctccaaaacatctggcatcagactttttagtggaaactttacaggctgagagggattaatatgacatatctaaagtgtggaaagaaaga

SEQ ID NO: 248385 - DNA, 629 bp, Homo sapiens
cttggcttgaatgcagcttgctctggttacagagcctatgtgtttaactccaaattctctgcttcccttgtggccatggcctctaaaatcttaatcttacattttcctttttataggatattattccttacaaaaagccaaagtcatacaagatcagagttaacttacyagcaccagaagatgtggagccagcttatctagaagatgtttttggcatctctggatttaaataaaaaagattacttccaaggaatctcaacaagacacacaaaaaggttgatatcagaactatctcccgccataaaagggtgaagagtttcactctctcttagggccagcatcatgggcatgtgacttggacagtcacacagggccccatgctcagaagaatccacacttggtttcatgctctactgttactatcttgaaattcttaataatcattgagcttgtgttttgtaaacaaagactcatgaggcaatggagtgttcttgagagcagaggagattagtgcaatatgcatgtctgtcattcattttgcactagcctccacaaattatatagctagtcccaccctctccaaatgaaaggtaggctctaatgaataattagcaattaattatccttct

SEQ ID NO: 248386 - DNA, 629 bp, Homo sapiens
cttggcttgaatgcagcttgctctggttacagagcctatgtgtttaactccaaattctctgcttcccttgtggccatggcctctaaaatcttaatcttacattttcctttttataggatattattccttacaaaaagccaaagtcatacaagatcagagttaacttactagcaccagaagatgtggagccagcttatctagaagatgtttttggcatctctggatttaaataaaaaagattacttccaaggaatctcaacaagacacacaaaaaggttgatatcagaactatctcccgccataaaagggtgaagagtttcactctctcttagggccagcatcatgggcatgtgacttggacagtcacacagggccccatgctcagaagaatccacacttggtttcatgctctactgttactatcttgaaattcttaataatcattgagcttgtgttttgtaaacaaagactsatgaggcaatggagtgttcttgagagcagaggagattagtgcaatatgcatgtctgtcattcattttgcactagcctccacaaattatatagctagtcccaccctctccaaatgaaaggtaggctctaatgaataattagcaattaattatccttct

SEQ ID NO: 248387 - DNA, 497 bp, Homo sapiens
aagagctttggtgcatggaatggtaaaatgggagtcaaatgtgaagaattaagtgttgatgtttgtttatttatttatttatttatttatttttactttggctgcttttgtttggctacaaaatcttgtgaggygggaaaatagggtctggaggcagggcaacttgaggccaattcatgctgattcaaggaaaaccaccaaggtttgtggatgggaattaaggccaatttgtgctgtcttcctaaaagagaaaacaccaaggtctgggggcagggaatctaagaccaattcgtgctgacctcctaaagctggagcaaaagaaaaacacttgggtctggggacggaaatcctaaggccaattaatgtcaacttcctaaagctaagccaaaacgaaaaaccccatctccccaccacaccccaatagaaagggatcaaaggtgactctccctacaacctgcccactccaccaagtctcagatggaaagggagagtgcctt

SEQ ID NO: 248388 - DNA, 593 bp, Homo sapiens
taaaagtattgacaaagtacatctgtggtcaaggcaaacccagggactgtgatactgctgaagccctaagccaacatctaaggtaccatgagtcaccccaaaccagagaggatatgcttattactcaggatgtccaaggcatgacatggccagagggacagtctggctgaggctgaagaaaaaagcagagaagatgaagcccggtaagtagtgtcagacatcatgcaaaagagaggagagaaaagtgaggaggacatacagggagtagagcacaggctggggcaggtcagggtgaagaccatggtcaatgtgggtatccgagcatgaccttcatgtaatactgacagcctggtgcaagagtggggcttcaacctaaagagactgggtagtatcagactcaaaatgacytctatacgtttcatgaaattttgaggttcccatttttttgaatgaggtccaagttcagatctggaagtttgtggaaacagaagttctgagaaataattaactaccacatcattcttactttccactgcctcctgcagaacaactagattctaactttgttgaccttcaaagcatatgcgtggtta

SEQ ID NO: 248389 - DNA, 619 bp, Homo sapiens
acagggaccagagtcttggtgaagtaggaccaaattctcactaatctccttttatcaccacctgtgttcatcaccaagccaatggagcacataggaattacctagggagcttcctgggaaccattcaacagagactgattcagtaggtcaagggtcgaaggtggagcccaggattctgcattattaataggcttctacactgttgtaggtggaataatgtcttcttccatcctcccctccaaaaaaaaaaagatggccacatccacatcctaatccctggaatttgtgaatatattactttacacagcaaaggacctcatatatgtgattaaattaaggcttktcaaatgcagagattttactggcttatctggataggcctgatgtaatcacagggtcattaatgtggaagagagaagctaatgcaatcagtgtccgagtgatgtgatgtgagaagacttggctggtcattgccttctttgaagatggaaggggagaccaagccaaggtatgtgaggtatgtgagcagccactaggtgctggaaaggacaagaaaatgagtctctcttagagcctccagaaaggaatacaggcctgcccatattttgactttagccca

SEQ ID NO: 248390 - DNA, 646 bp, Homo sapiens
atgtgagaaacatgaagctcaacattttctgtggagccacggtctataaccccaggagcaactcacttcccttacaacttctcttgggaaaaattcgttagcttgtcctgtgtgaaattaagtcccacagaattagaaaaataaatggagccaaactgttgtcatttgtcctcatttccatattacattaaagtacaggtcaccttaggaactctgacacgtgttcagagagttagaccctcaaagtaacagtgcattcctcggcaaattaattctttcagtatagtcgtttttgtatttacacttcaaactcagagtttagatatatgctagaggcttttaatcttcctcggtgatattgaaaatggtgaaatctaccaaaatgtatttataagataagcatgtttaaggaagatgtcttggtcagtggaacaagataggaaagcatgcagtttccagccttgttttttcctccataacccaactcagaaatatcgattctttttaacagcatttgattctgatgcagttctgagtgyacattcagaggcaaaggccatgtctacaagatgcaagtcatccaactgcagaagtaatggctcaaggcaggttattaaagcagccttgaaatccaatctgaccaaaa

SEQ ID NO: 248391 - DNA, 565 bp, Homo sapiens
tattttgttgatggtttttgygtctatgttcatcagtgatattggcctaaagttttcttttttcattatgtgtctaccagatttggtatcaaaatgatgctggtgccaaagaatgagttagagaggagtttttcctcctcattttaaaaagtaattacagtaggattggtatcagttcttatttatatgtctggtagaatttggctgttcatctatctggtctatggctttttctgattcactggtggaactcattattgatcattcaggtattcattttctttttgttcaatctttggaggttgtatgtttccaggaatttacttatttcttctaggttttctagtttacgtgcataaaggtgttcataatagtctctgagggttttttgtatttctctggggtcagtggtaatgtcaactttgtcatttctgattgtgtttatttggatcttctttttttttctttattaatctagctagtgatctataggtctcttttattctttcaagaaaccaattttggttttcttaatcttttgcatggatttttgcatttcaatttc

SEQ ID NO: 248392 - DNA, 627 bp, Homo sapiens
taaaattcttagaaaaaaaatccttctggatcttcatcccacctacttaaaatttttattgaaagctatgctttcatctgcagctgatatggrcatagagatttttggcacccatcaagtggaaagtttgcttgactttaatatttcagtcagcattgtgtaagctgaaccaaataaaatgtgtgtggtgttgtctattgtttctgctgttaatcaccagttgtcttaaattagggcatgaacaagattaatttttcctcacaaattgatgtgggtggtctgcctctgtgagcttcatcttcaacatcatctcattctttctaaagacaagttatccatttgcaagatgctgattcctttgggggcactatccccataaacttttcatgaagcattgatgatttcaccattcttctgcccaagcttcaccataaacttgatgtttgttcttgcttcagttttagcagaattcatgttgctcggataaaagctaatttaaaactgatgtcttatccttcttagtgcctcaaactagatcctgttcagatatgttatgagaagttagcatgagttaattttggtgcaaaaactttttgaaatccatgcataatttttatacataatgca

SEQ ID NO: 248393 - DNA, 602 bp, Homo sapiens
ctattgtctaagtgataataaatttggatcagagaggttcctagaagatttcaaacatgagtaatttaattggctctgttatcaacttatttctcctgagatgatgaaattagtggctatcttcttttatcttgaatttttaaaaaagttgcaaactttgtagtttttcttttcaaagggaaaattgtgacaattgggatctctgcctgctttcatctattggaattctaaggcaaactgaaggtgcaagagatttagaaggtctaataaagaagaacaacttttcacattccggaagttttggaagatgaagtctttctttctctagttgatgctaaatgtggagctagaaggagaagattcatggaagggaacttgaattcacaccatgaataaattaagcttgattcttttatctgtagacatataaaaaaatcttaagaaatcaaaatgaaacattgatgtggctgctttacaaaaatagtaataattgctgaaacctacaagtcctagaaatagagatttcacaaagyccttccattcctcctcctgcctggttcctttgctgtaactctagttcagagcggtccctctaggcttac

SEQ ID NO: 248394 - DNA, 615 bp, Homo sapiens
cttttgttcatagctaatagttggtgctaaattgacccaacacttggtttgctccaggctctgtgctaagcactctactggcattgaaacctataaaatatcatcttttgccagtcccattttaaggatgagtgaactgaggcacagagaagctaaacaagttgtccaagatgtcaataccaacttcttacagaaaatggaggtgagctatagaaacagctggattggttacaggtgggtatttgccttatttaaaccaggtttgaacagttcgctggctgagattggctaagatttaactacttgttacaagagtaggttacagtgtatttccacatgaagttagattacattcactaagtrtgaagaaatctctaggccaaacttaaaatatttaggcactgctaggtcaagcttaacaattttctcctttggtcaaattctcaatttgaaagattgacaaaaactttaggcatcaacatcactattattatcataaatgggcttattccatctcagtttggagttcacaaatatttggtgttagtttccatcagttttggaatctatctgcttttttaaagcttcagtttgaatatgtggcacttagcatga

SEQ ID NO: 248395 - DNA, 583 bp, Homo sapiens
tcatcttccattcatcaaggcttaagattacccatgtataagactggctgaaaaatcctctataagaaagtacaccctgtgggtggacacaaggcccgttttcaagttctattgttcatagaggcataagcaagtaaaagattaagagagctaagagtttcatgatggcagargagtcttgatctgtgatcttgggaaagctgtgtatgtctaggatgccatctgcttttgaagagaaacttccctatttagctttaccttaaggtcttgaaggagtgtacagttccaagagtctaaaaggtccttctgttttgtaagattatgaacccaagttttgaagttccaaagtctcattgccatatgggtggcaagggcaatctttctctgatgccatttccagaagatccagcatccaggttctagattatgaagggttcaattgtccttagtaggtggagcatgaaaagattccttcacctgttgaaaatatactttggcataatgcattaaaaccttgcaacatttagtcatatcagtgtataggagagtgggagatacatgaggatctactattaggagtata

SEQ ID NO: 248396 - DNA, 583 bp, Homo sapiens
tcatcttccattcatcaaggcttaagattacccatgtataagactggctgaaaaatcctctataagaaagtacaccctgtgggtggacacaaggcccgttttcaagttctattgttcatagaggcataagcaagtaaaagattaagagagctaagagtttcatgatggcagaggagtcttgatctgtgatcttgggaaagctgtgtatgtctaggatgccatctgcttttgaagagaaacttccctatttagctttaccttaaggtcttgaaggagtgtacagttccaagagtctaaaaggtccttctgttttgtaarattatgaacccaagttttgaagttccaaagtctcattgccatatgggtggcaagggcaatctttctctgatgccatttccagaagatccagcatccaggttctagattatgaagggttcaattgtccttagtaggtggagcatgaaaagattccttcacctgttgaaaatatactttggcataatgcattaaaaccttgcaacatttagtcatatcagtgtataggagagtgggagatacatgaggatctactattaggagtata

SEQ ID NO: 248397 - DNA, 588 bp, Homo sapiens
tgctggccaggctctttaccgtgctattggatgtagaattccttatatgccatattcaccatacttcattatgtctcaaaaactcatcttcaaagaagacatactcccaatacaaaggcccattttgttcccygtctttccttagcacttgtttctggattttgaaaatgtgtcatttcagcacagatcatctctacaagcactacatgagtagattttgatttctctagcccatttaattgagagcattttttttttcctgagatggagtctcattctgtcgcccaggctggagtacagtggccatgatcttggctcactgtcacctctgcttcccatgttcaagcaattctcctgcctcggcctcccaagtagctgagattacaggtgcatgccactatgtgcagataattttttgtatttttggtagagacgggcttttgccatgttggccagggtggtctggaactcctgacctgaactccacttgcctcggcctctgaaagtgctgggattacaggcatgagccactgcttctggcctaattgacagcatcttaatagctactggtgatcataggctttgaga

SEQ ID NO: 248398 - DNA, 386 bp, Homo sapiens
ggaacttcctaaaagtcctatacattttttaacagaaagcatcaggctgggcatgttggcttatgcctgtaatcccagcactttgggaggccaaggcaggaagactatttgaggcctgtctggccaaaatagtgatatctgatcgctacaaataataaaaaaattagcagggtgtggaggcacgcatrtgcggtagttctagctactcaggaggctgaggcaagaggatcacttgaggccaggagttagaagttacagtaagctatgatggtgccacttcacctcagcctgggcaacacagtgagaccctgtctcaaaaaaaaaaataagcataaaataaggttttatatctcaagactctgaaattcttgcctgaaaattctcac

SEQ ID NO: 248399 - DNA, 553 bp, Homo sapiens
tcatacacagtcatttctacaatacactattggttaccaggtcagtcctactcactgttggaggggagtaggagcttcagttctccatgtggcctcctatccttccagaatatcaggaattgagaatcaccaaggtccgtcttggaagctggctaccacaggtggccagagtggaactgaattttttctcacactccagtagatggaacaaaatagcaatgctgagagaggaagtacagaaatggaaattagctgggcatggtggcacttagtcccacctacttgggagactgaggtaggaggatcacttgaacccaggaggtccaggctgcagtgagccatgattgcaccaatacactccagcctgggtgacacagaccctgtctccaaamaaaggaaagcagaagaacaagactgctaagataataaagtaataataacagtatgatatcatcagtagctatcacttatcaaatgcttctctggcagtgggcaatggccaagatctttccatactctctcactgaggcaacaaattacactccatggccca

SEQ ID NO: 248400 - DNA, 484 bp, Homo sapiens
ttccatctatatatcttgttttttctcattagggttttcatcatacaaaatattaccagttttagagtttccccaaaatacaaggcacaaagaatatgctttttttttcttacttgcacagacatttgtgtgtgtgtgtrtatatatatatatatatatatatatttatatatatcatcttgagctctgacaatgaacatctaatatggcccacaggcacaagtgctgggtgtgccatatacaagtgagattaatggttgtggaaaattagaacaaaaagcaataattctaaaaacaatttaaaccgactgtttaaaaaaatgcttcctcaatttttttgtgtggttcagagcataaatctgccacaatacttggcattttactatttcactcctccaaaatgttttgctttaacagatttttgtaatctgtacctaacatttacttaaacatatgattttcaattctgatgccagtagcagtt

SEQ ID NO: 248401 - DNA, 596 bp, Homo sapiens
tgacagccctcttcctcagttctcactctacgtcctgggaactgttccttccggtcttagggtgctgacagctcatgctgctttgaaccctaggatgcttcaccatcctgttcgttgttctcaaccctgtgtcatgcttgtaaatagttcctgcactgaactgcttcaattcaattgaagacaattggagtgtatgtcatctatcacctatggcaaccttgactaaaatgaaacatgacctaagaatttcacatctgggcatataccctggagcagtgttgtgcagccgaaatctaaagcaagccacacatgtgagcacacatgtaacttgaaattttccaggagccacatttctaaaagttaaaggaagctggtgaaattaatgttaacaatacttaacctaggatatcaaaaacattaacayttgaacatgtaatccatataaaaattattaatgagatactttacattcttttctttgaggtaaatcttgaaaattgagtgtgtattacataattacagcacatcacattttggaccatgttgtgcacatttcaagcgcagaataagaatagccgcacgtggctagtgactac

SEQ ID NO: 248402 - DNA, 587 bp, Homo sapiens
ttttaagtacaaatcaatagccaatttacaggataaagtgaaggtattttgtaaagtgtaaaaaatgatgctgttgtaagagattaactttattaccagataagatgtggcaagttttacagagagaaatgccacctgttctacccaataccctatattcttcccctattctacccatctaccttccttttcttaccccagctactccaaagaaagaaaaatggccagtttggtcagatatcaagacctttacaggaatatggttggccaatggagggatcagggccaccaagtgtcagaaaagctattctgctttctacctccctctgtcaaagtcacctgtgcaagacttrcctcttggggctaggacagctggcatctctccagtggggcacaggtatattaggggctcagtacccattcagtcccagccagccctcttccctctgacccggcctaaagcccacttccctcctacttgcaagagtggcttattaagggtcccaagatttgaaaacaggaagaatgcaggagccctttatacctcagtcttgagctttgttctccaattcagggagaatgtgaag

SEQ ID NO: 248403 - DNA, 522 bp, Homo sapiens
agcagtacctttcagagcacgcaggacaagaaaataaaatatatattatataattgcagtccctccccctcatgcattttaaggagggagggtgaggtagctacagtgaccttcgctggtgggtgtgggctggcaggttgggaggggctatgtcggagcagggagacattatgaggacagagaagccctgagtctgctgggccggtggcaggtgggcaagggagagcccctgccagcccccactgctccttctggcgtttgggaaggaggtgtgagagtgggggttgggcaaagtcttccgtggggtatgtagtgttttctgtctttactgctaagtcttcagtgatgtttcttaggagatttactcagcgttctcatttcttaaaagggctggcaggtatccctctcattagaaggtgcctattttacagatctattcgatattgctgactccttgaaagtagctgagtactgagattatccccagygggttcagagaaaaggtaactgtaagagattagg

SEQ ID NO: 248404 - DNA, 604 bp, Homo sapiens
ataaagtgcagtggtgcccaaagtcggtgcccaatacttccctctctaagctctattcttcctcttagaaatctctgggctaggccgggcgtggtggctcacacctgtaatctcagcattttagtagaccgaggcgggcagatcacaaggtcaggagatcgagaccatcctggctaacacagtgaaaccctgtctctactaaaaatatacaaaaaattagctgggtgtggtggcrggctcctgtagtcccagctacttgggaggctgaggcaggagaatggcgtgaacccgggaggcggagcttgtagcgagccaagattgcccactgcactccagcctgggcgacagagcaagactctgtctaaaaaaaaaaaaaaagaaaaaaaaaaaaaaatctctgggctgtggcctgcctcagcctcccttcttccagagggaggcaaggaagatcagctagctggttctggaagaaaccgcgcacttcatatcggctcagactcagctgctggttttcctacaatgctgcttctttacaaagctgcttaattttccaaggggctgaaattgcaaagctagtttccatattgacttacgaaatgaaagg

SEQ ID NO: 248405 - DNA, 604 bp, Homo sapiens
ataaagtgcagtggtgcccaaagtcggtgcccaatacttccctctctaagctctattcttcctcttagaaatctctgggctaggccgggcgtggtggctcacacctgtaatctcagcattttagtagaccgaggcgggcagatcacaaggtcaggagatcgagaccatcctggctaacacagtgaaaccctgtctctactaaaaatatacaaaaaattagctgggtgtggtggcgggctcctgtagtcccagctacttgggaggctgaggcaggagaatggcgtgaacccgggaggcggagcttgtagcgagccaagattgcccactgcactccagcctgggcgacagagcaagactctgtctaaaaaaaaaaaaaaagaaaaaaaaaaaraaatctctgggctgtggcctgcctcagcctcccttcttccagagggaggcaaggaagatcagctagctggttctggaagaaaccgcgcacttcatatcggctcagactcagctgctggttttcctacaatgctgcttctttacaaagctgcttaattttccaaggggctgaaattgcaaagctagtttccatattgacttacgaaatgaaagg

SEQ ID NO: 248406 - DNA, 566 bp, Homo sapiens
tgtcaaggcttcatgcaggagaccaaacccacccagctaggggctgccctcagggcgaggctcagggtgagagtttccaggccagaagggcctcagcaggcagtgagctgtggaagggagaggagactggtgaccagggcccggagccaggttcagggctagagagactgggaaaaggctgaaactggccttccaggctacaaaggatttgggagaatgaggctcaaatggggggctgaggcaatctgggggccacatctgtaaatatttaagcttagactgagagtaccttttccctggagaagttgtatgagatgagaatagaattttaaaggacctcagccaaactggagaattcccccgccacccccactttttttccagatcttgtcaacttagaataaatgaagcagatttattatgctggagttattatttatttatgctggagttagttaagacttagggggactgttggaagggcatgattgtgttttgaaacacgaggacatgagatttgggaggggccagggcagaamaatacggtttgactctgtccccaccca

SEQ ID NO: 248407 - DNA, 555 bp, Homo sapiens
agataagcccacaaagatgggaatcaatgcaaacatgctgaaaactcaaaaatccagagtgccccttttcctccaaatgacagcagcgtctctccagcaaggtctcagaactgggctgaggctgagatggctgaaatgacagaagttggcttcagaatgtggataataatgaattttgctgagctaaaggagcatgttgtagcccaatgcaaagaaactaagaattagataaaacaatacaggagctgaaaaccaaaataacagtttagagaggaacacagtcgacctgttagagctgaaaaacacactataaaaacttcacaatgcaatcacaaatattaatagcagaatagaccaagcagaggaaagaatctcagagcttgaagactggctttctgaattaagacaggcacacaagaatagagaaaaaaagactgaaaaggaatgaacaaaacctctgaggaatatgggataatgtaaagagmctgaatctacaactgattggggtacctgaaagagagagagagaatggaaccaaattgaaaacatacttca

SEQ ID NO: 248408 - DNA, 606 bp, Homo sapiens
taacaaatatataagcaatgataagattttgggattagtgctcaagttgataatgtgactgcttttaagaacacattgatataaatgtacaagttctgatatgtttgctttcaaaaatacgcaaataaaccaccctctrtactttccttggctttactataaattcatgaacacacagcaggcaatagagttgtgatatgaccatgactggcagcaaaccactctccttcccttttacacactgtcagaatgagtttttatgaatttcctcctgcatattgtccttgatattatttactgtaactaggatttatctcaataataatgcgaggagaaaatgaaggagcttgtgtagtataacatattctgggtcctatagtcccacaggaatggccttgactaggggcatggttttcttctgggggccagtataaaatcagaagttgtgggttgaaccatgacactgtaatgagaaagttgtgaggagaaagcgtgagaactattgctgtaatgtgggcagattattcttgcgcaatgccaagcacttaattccatgcacacgctatcttccttctcatattgaggaaagatatactggcatcattt

SEQ ID NO: 248409 - DNA, 563 bp, Homo sapiens
taacctcaggaaagttacttaaacctctctgtggcacagttttatcatctgtgagacagctataagcaaacctacagcccacagagtcattatgaggattaacaaaatgacatacataaagcacttcgctccatacttgataataggagcttaggataattaatgccaacatagtacttactatgtgccaggcacatagttctcagagttgtacatatatcaactcatttaaccattacaatcactctaagtacaacaattatctctattttacagatgagaaaacaagcagataaaagttaaatattttgcctaaagttacatagctagtaaattgcaactattatattactattatttctattagtattgaatgtcacctactgccatttatacaattcagatttaacagaggaacaaacatttrtgagggattttcttctgcattgcctcttaactctgcaaacagttctaagtgaatcctgaatctagctaaaataaaactcccgctgtcttaaaccccttttggagtaaatagataaaggctgagtgtggactttgcc

SEQ ID NO: 248410 - DNA, 582 bp, Homo sapiens
cacctacatcattgtcattgctcctgcagaggcaaggaaagaaaaaaatgagagattagaacagaaagttttgagcatgcttttaattataaaagcctgtgataaccctattgaggaattgtttattttataaagtgaacaacattcaaagctaactcaatatactaatgttaaaaattattcacatggcaattagttcatttctgaggttttctattttgcttatttcaatatgaattcactgatgatatctgcatctaagtaaaaatgaatttatcagaagtactatggagtctcaaacaattagtaggaggctggaggacaaaacatggaaattgtcagaaaccaagaagaaagatgcacagtgatcattttgtaactgaaacaatgtgatcaggatgttggatgacatataaggttgaatgacctacatatattcctttctctttggttcaccagagcctcagtgatcaaaagygtttaagctacaagctggccccctagatctcttggggcaggagatgagtaaatggtctcttgaattacaacttaagccatttttattttattttattttatttt

SEQ ID NO: 248411 - DNA, 601 bp, Homo sapiens
cccgtaagaagtttagtctgttatttgcatgttgatctttctaatcattttcttaaagaaagcaaacatatagaagaaaagtacattttgtttgtaatgctagagtttgtcctgacctgaggaattccttcctctgcagaagtaaaaggttcaggagattaatttattcacagaaattcttctcaaacccaaacctctaaggagcaattaattatcttttstatgaaaactgcaaatgaacatatcaacataacattttcaccagagctgtttaaactatgtagaatccaagggtaaaaggtcatttgttacaaaaacaaaaaacaaaaaagtaccacatttcatcaaatcgaatacaacacagactgacagaaaaatcacaatttcaaagatttcaaaatgtgaatctgttctctctctctgtctctatctatctttttctctctttctgtctcctatgacctatgggacttttctttcagtatctttgcagcagcacaaggccaaataataccttatggaagataatgtaacacttttattagtaagcggattgtcttttaatttggggtcattttgtgtctaacaacaagaaaacagt

SEQ ID NO: 248412 - DNA, 549 bp, Homo sapiens
aatatattaaaatttctaaaggatatctaccaaaaaaacctcagcaagtatcttatataataatgaaagattaatccatcatctcgaaatctaataacaagacaaggatatcactatctctttttgaatttaacattggtctggactaaagcatgaaaagcaaacaggtagaaagattgaaatgaataaataaaatcatcactattcacagaaaataattcatgaccatttaatagctatccaggggaaattacacataaaacagtacaaataacaagagttttcattgaggattctggatacacaatcartatatttaaaagctagtagaattctttcccccagcaccaacaattaggaaatatttttataataataaagctccaaaataataatgtacttatgagtaaatggaagtaaaatgtgcaattagataaatggaaacacataccattttcttaaatggtatgactcaaaatcatacagatgtccaattttatacatcaacctataaaattcacagcaattttactaaaactctcctcagat

SEQ ID NO: 248413 - DNA, 562 bp, Homo sapiens
aagttaaccgggcatggaggtgcatgtctgtagtctcagctattttggaggctgaggtgggaggattgcttgagccctggagacggagattgccatgagccaagatcgcaccactgcacttcagcctgggcaacagagggagactctgtctcaaaaaaagaaaaaaaacaaaaagttaacattattattttcatttcacaatacagcaattgagacttggattttttakttaacttttccagagacatttacctagtaaacaggaaactgctctctctgattctgaaacttctgggcacaaatcacattttgggtgacccaacagttctatcaagtttctaggagaccttttggttgatttgtaattcggtgtttcaaagcaataaataattctctaaattctttaactttgctcccaaccatctgtcacattaaactgtagaactgttgctgttcctcagagatatgctaagagtaggaaggatttaaagataaatgcctattagattacatcttatcctttccccaaacctcaacattttagtaaaaagtgtggcatact

SEQ ID NO: 248414 - DNA, 313 bp, Homo sapiens
cttgtgcactgggattaatacttgggtgatgaaataatctgtatcacaaacctccatgatatgagttcatctctgtaacaaaccttctcatgtacccccaaacctaaaataaatgkttttttttttttaattaaaaaaggtgatatatacttttatgtttgaaaagaatgactctggcctctgcaagtactgaatggagaaagcaggaagaccagttaagaggttgtaagtagtttatatataaaatgttagcaccttttaccagtgtggtaatagtagaggcggtaggaaacagagaaattagaaagatttt

SEQ ID NO: 248415 - DNA, 587 bp, Homo sapiens
aatgctgaaggccaactggtaaatgtggaagaaagaccagggttggaaaaaatcmtcattttgcaacaatcatggtgaagtttggatcaggcaaaactatctggatgctaaatctaaggaagaaattttacatggggataggatgtttattttcattatttttaaaattaatttacagaccatttattagttgtaaaggagaaaaaaataacagtatttataaagtggagatatcaggagacaccttgaatgtgtgatcaaaattactatcagtgggggaccgaaggacattatgtgcctgcatatgtgataccttgacatagataaaatattgcctatttcactcaagaaggaggagtgttatattaatgaaaatagtgtgtgttgggtacactttgttttccagaaatatcaatgtcataaaaggcaaagcgaataagtggaaatgtttcagaaagaataagctactacatgaaataactaactgtagactagattttgtacctgagggtggaaggaaggcataaaagacattgttagatcaaatgaaaaaattagaatataaataacaggttagatacaattat

SEQ ID NO: 248416 - DNA, 597 bp, Homo sapiens
tcaacaaagtgcccatcgcagagagaggcagatgtgtagaagcacaggctggggaattgaggacaagtttgcctgatccaatctttcttaaatagggctgagggatgcatctgagtcaactaacacaataatttgtgtattttcattttgtcattaagtaaataggataatcttttcaaaggcgttcttgttttacaaagaggtcattttgtatcattcatctaaggtcatttaccaatgttcattgattcttggtattgggatcagaaccaggcacacatcaggaattttgtggcaaaaataaagtgcttccctcaaataccttctgagattttattacatctttaaaaatgtatgggtatatttattgaagttatgagactgtaacaatataaatcctggagagcgagagttcaatctaaacattagaaacttcttgaccaatttccagtgttattcagaaaccacagcttacacgtttctacttattaaaataatttgttatcttttttctttttgatgaaatggaaatyattttttcttcaatttaattttttaagcaactcgacatataaagcaagaattatagcaattttg

SEQ ID NO: 248417 - DNA, 482 bp, Homo sapiens
gttctgccacatctaggggaatgcagtgcaacttctggacatcaagaactcctgagagtagagtccccacttaggcactgcccagtttctgataacaagggccattttggtggatacagttgatttggacccagtatccactacattttttttttttttttgagacagagtctcgctctgtcatccaggctgcagggcagtggcgtgatctcagctcactgcagcctctgtctctccagttcaagcaattctcctgcctcagcctcccaagtagctgggactacaggcatatgccaccacacccagctaatttttgtatttttagtagagacagggtttcaccatgttggccaggatggtcttgatctcctgacctcgtgttccacctgcctcggcctactaaagtgctgggattacaggygtgacccctcacgcctggtccaaattccttatattatggcttgatttcttatgcagcaaag

SEQ ID NO: 248418 - DNA, 513 bp, Homo sapiens
ttaaaatccaagctccccaaatgcacagtttctgtcccttttaagtgctcacaacactaaagatttcacatgaaagggtcgtgattgatttgagcaagcatgcggtacgtgatggggcagcatgcaccrgtggtcagagagaaacagaacagggcagggagtttcacaatgttcttctatacaatgtctggaatctatgaataacattggtttctaagttatgagttgatttttaactactgggtttaggccaggcaggcccagacctggtttcgggcctggcgcccagctgcctgtcttgggttttacgtccttggttttttttttttttaaaaaaaacaggtactgagtatgaaacaatataaaacaatatgagagggtctctctcttccctcagtactagttcccaccagcagtgtaaaagtgttcctgtttaccatacccatgccaacatctatatttttttttattatggccattcttgcaggagtaaggtggtatcacattgtggat

SEQ ID NO: 248419 - DNA, 513 bp, Homo sapiens
ttaaaatccaagctccccaaatgcacagtttctgtcccttttaagtgctcacaacactaaagatttcacatgaaagggtcgtgattgatttgagcaagcatgcggtacgtgatggggcagcatgcaccggtggtcagagagaaacagaacagggcagggagtttcacaatgttcttctatacaatgtctggaatctatgaataacattggtttctaagttatgagttgatttttaactactgggtttaggccaggcaggcccagacctggtttcgggcytggcgcccagctgcctgtcttgggttttacgtccttggttttttttttttttaaaaaaaacaggtactgagtatgaaacaatataaaacaatatgagagggtctctctcttccctcagtactagttcccaccagcagtgtaaaagtgttcctgtttaccatacccatgccaacatctatatttttttttattatggccattcttgcaggagtaaggtggtatcacattgtggat

SEQ ID NO: 248420 - DNA, 377 bp, Homo sapiens
gtggatttgatatgcatttccctgatcattagtgatgttgaacattttttcatatgtttgttggccattgtatatcttccttggagaattgtctattcatgtctattcatgtctatttttatgggattgtttgtttttttcctgataatttgcttgagttccttgtagattctggatattagtcctttgctggatgtacagattgtgaagattttctcccactcgttgggttgtctgtttactctactgactgttcctttcrccatgcaaaaggtctttagtttaattaagtcccaaatatgtttccccaacttttagatttctcttcttcctcaagaatgccaattattcttaggtttggttgtttaacataatcc

SEQ ID NO: 248421 - DNA, 640 bp, Homo sapiens
atctttaaagtgatagaggaatcaagaaagggaagcagaggaagccaaacagaggtataatttcacataaaatcccagcttcagtctgattcctggggaaacttaaaaatgaaacttaygccttacagtctgtcttgatttgagacaaggtccttcggctttctatctgcagcactagttggccattcgctaaggccgccctggggatataatgtaaactcacacctgggcatctctagctctctgtgcatgagaggaaaagtggtccaggagctcaaaggaaggtctctgaagagagtcacaggtgcaggttgtgagaagcaaggtacacagaagctgcaagatggacttacagaaaggacaaaggggattccaagagatttggccagataatggaacttttacagtctctattaaaatgtagttaggcttgacttgcctttgtcaagtgttttctgccttcttatttctccaggatgatttgttctgcctcctttgcctttcttcaaactgtttctctgaggttggaagtcttttgtaataagtttataaacagccccctgacccccacctcttcttcagaacaacaacaagagaaatagttttcaggaaggcaagataaatatgagaaatatcatct

SEQ ID NO: 248422 - DNA, 571 bp, Homo sapiens
agtaatgccagccagagatcagaggtcttcaacatggagttgaggaaatgagatgagaagggaaaattccagagatagtacaaagtacacaaggacctgagggtcagaacttaaatatattggttcccagcgcactgaaggatgtaagcagtgtagataaggtttatgtggtttctggagggagttatttactccttgactaagcacacctttcagaagagccaattctcatgaaaataacaggagcaaaatacagttttgcaaagggaaactattaatacttacattggacctttgtcttaagacttttgtctttttgaatagattcacataaacagtaaatgcttaatattgacttactattttaaaatgaattgtctagaatcmtaagtgatatttatggcacttaaacaatcaacctgaccagagtttaaacagatatggcaaagtttatcctcatacatgtaatctacattataatttaaaagatcaaatgtttagcaatcaagcacgtttgcagaaaacttagcatgtccagcaacacaaattgaacttctacaaattaaagaga

SEQ ID NO: 248423 - DNA, 629 bp, Homo sapiens
agaattatatataatacatatataatatgtatttgggcataaggtaaagaggattgaagtaatcataaatcastgcataacacattattgttattagcttctctcttgattgactgattaattgatcaattatcttcctgccatagttctctgttttctccctctagacatgcaatgatgctaagaaatttaacacatcgttttgcttatttgtgttcttgcaaaatgtgcattgttgttttatttgtattttgctgcttattgtacttggtatatttgtaaaaagtattttgatagatatttcccactgttccttatgtttaaatcagtgctctgtttctgtatagtgctatgagtctatctaaccttttgtttctaactgctgtatagtactctgtggtggacatccatgacttttcctttattttctcttttagtgatggtgactcaaagtgcctccaactctcctatattatttagccctggtttatggcaccatccaccactgatttcttgattgcaattaatttaggaaagactaattctcctccaagtgatttcatagtaaaatctttatctagatgagtacttctgaaccttggcacttttaacatgtattgtaggatatt

SEQ ID NO: 248424 - DNA, 629 bp, Homo sapiens
agaattatatataatacatatataatatgtatttgggcataaggtaaagaggattgaagtaatcataaatcactgcataacacattattgttattagcttctctcttgattgactgattaattgatcaattatcttcctgccatagttctctgttttctccctctagacatgcaatgatgctaagaaatttaacacatcgttttgcttatttgtrttcttgcaaaatgtgcattgttgttttatttgtattttgctgcttattgtacttggtatatttgtaaaaagtattttgatagatatttcccactgttccttatgtttaaatcagtgctctgtttctgtatagtgctatgagtctatctaaccttttgtttctaactgctgtatagtactctgtggtggacatccatgacttttcctttattttctcttttagtgatggtgactcaaagtgcctccaactctcctatattatttagccctggtttatggcaccatccaccactgatttcttgattgcaattaatttaggaaagactaattctcctccaagtgatttcatagtaaaatctttatctagatgagtacttctgaaccttggcacttttaacatgtattgtaggatatt

SEQ ID NO: 248425 - DNA, 604 bp, Homo sapiens
tttttgcttaacaaatattcaattacaattaaaattgatagttttgtcatgcaggaagcaaatttattttccttggaaagttaaagaatgtatccaaaatagggaattttttaaaaatctcaaaagttttggggtacaggtggtttttggttagatgaataaattatttggcagtgatttctgagattttactgcactgatcacctgagcatctatgccgtacccagtatgttgtcttttatccctcacctgcctcacaaccttccctgccaagtatccaaagtctattaaatgttccttatgcatttgcatcctcatagttagctygcacttgtaactgaaaacatacaatatttggttttctattctttaattatttcacttagaataatggcctccatctccatccaagttgctgcaaaagatattgtttcattcgtttttatgggtgagtagcattccgtggtctatatataccattttatttatccacttgttggttgatgggcacttaagttggttccatatctttgcaattgcgaattctgcagctataaacatgcatttacatgtgtcttttgcatatatataatgactttctttc

SEQ ID NO: 248426 - DNA, 629 bp, Homo sapiens
agaattatatataatacatatataatatgtatttgggcataaggtaaagaggattgaagtaatcataaatcactgcataacacattattgttattagcttctctcttgattgactgattaattgatcaattatcttcctgccatagttctctgttttctccctctagacatgcaatgatgctaagaaatttaacacatcgttttgcttatttgtgttcttgcaaaatgtgcattgttgttttatttgtattttgctgcttattgtacttggtatatttgtaaaaagtattttgatagatatttcccactgttccttatgtttaaatcagtgctctgtttctgtatagtgctatgagtctatctaaccttttgtttctaactgctgtatagtactctgtggtggacatccatgacttttcctttattttctcttttagtgatggtgactcaaagtgcctccaactctcctatattatttagccctggtttatggcaccatccaccactgatttcttgattgcaattaatttaggaaagactaattctcctccaagtgatttcatagtaaaatctttatytagatgagtacttctgaaccttggcacttttaacatgtattgtaggatatt

SEQ ID NO: 248427 - DNA, 604 bp, Homo sapiens
agcatatagcagggaatcttttataacttaattttgkaagtgacataacatcacctctgccatattctattggtcacactgatctggaatctcctggaacaatatacatgggaactacccaaatatataaacatcaggaggtggagatcgttgggggccatttggaagctggttatccaaggatcctagcctagatttgcaattttaacattgtctttgctacttagacacacaaaaatagctagtaaatgtgataaaatagttatatataaaatttaaggacaaaaccaaagaaatattacaatctcaatgcttttaaattatttgtaagaagctaatcatttgctgtggaaagcatccatgagtgatctgtgtccaatgcacgttcaagaattcttgaatctaggcatgaaaaccaagcaatatggcagcagagagccctgtttccctttccactcacatggttacagaatcatgaatgaactcagactaatcaaattcaaagaagaacaatgttagcaagggctagtgtaaccagagaatctgcaaactacaagtacattagagaagttccagtagttgcctatagagatgctgtccctag

SEQ ID NO: 248428 - DNA, 604 bp, Homo sapiens
agcatatagcagggaatcttttataacttaattttgtaagtgacataacatcacctctgccatattctattggtcacactgatctggaatctcctggaacaatatacatggraactacccaaatatataaacatcaggaggtggagatcgttgggggccatttggaagctggttatccaaggatcctagcctagatttgcaattttaacattgtctttgctacttagacacacaaaaatagctagtaaatgtgataaaatagttatatataaaatttaaggacaaaaccaaagaaatattacaatctcaatgcttttaaattatttgtaagaagctaatcatttgctgtggaaagcatccatgagtgatctgtgtccaatgcacgttcaagaattcttgaatctaggcatgaaaaccaagcaatatggcagcagagagccctgtttccctttccactcacatggttacagaatcatgaatgaactcagactaatcaaattcaaagaagaacaatgttagcaagggctagtgtaaccagagaatctgcaaactacaagtacattagagaagttccagtagttgcctatagagatgctgtccctag

SEQ ID NO: 248429 - DNA, 604 bp, Homo sapiens
agcatatagcagggaatcttttataacttaattttgtaagtgacataacatcacctctgccatattctattggtcacactgatctggaatctcctggaacaatatacatgggaactacccaaatatataaacatcaggaggtggagatcrttgggggccatttggaagctggttatccaaggatcctagcctagatttgcaattttaacattgtctttgctacttagacacacaaaaatagctagtaaatgtgataaaatagttatatataaaatttaaggacaaaaccaaagaaatattacaatctcaatgcttttaaattatttgtaagaagctaatcatttgctgtggaaagcatccatgagtgatctgtgtccaatgcacgttcaagaattcttgaatctaggcatgaaaaccaagcaatatggcagcagagagccctgtttccctttccactcacatggttacagaatcatgaatgaactcagactaatcaaattcaaagaagaacaatgttagcaagggctagtgtaaccagagaatctgcaaactacaagtacattagagaagttccagtagttgcctatagagatgctgtccctag

SEQ ID NO: 248430 - DNA, 604 bp, Homo sapiens
agcatatagcagggaatcttttataacttaattttgtaagtgacataacatcacctctgccatattctattggtcacactgatctggaatctcctggaacaatatacatgggaactacccaaatatataaacatcaggaggtggagatcgttgggggccatttggaagctggttatccaaggatcctagcctagatttgcaattktaacattgtctttgctacttagacacacaaaaatagctagtaaatgtgataaaatagttatatataaaatttaaggacaaaaccaaagaaatattacaatctcaatgcttttaaattatttgtaagaagctaatcatttgctgtggaaagcatccatgagtgatctgtgtccaatgcacgttcaagaattcttgaatctaggcatgaaaaccaagcaatatggcagcagagagccctgtttccctttccactcacatggttacagaatcatgaatgaactcagactaatcaaattcaaagaagaacaatgttagcaagggctagtgtaaccagagaatctgcaaactacaagtacattagagaagttccagtagttgcctatagagatgctgtccctag

SEQ ID NO: 248431 - DNA, 505 bp, Homo sapiens
atttggaggatgaggcagagcagcaatcttatcagctttaatttgtcactctacagcttkcctccatattaagtcctcacatccagagatggtccataactttgagattagctaagcctatgagataatgcattttatttcattaaccatctgtggtgtgctgccagggatttataaatgctggtcgatgcttgtgttcccttaaggataattttgcaatcagtctgcaaaagatgtgaatagaaaccacccagccctgaggaaagatgacatcgtcactcagataaataaagatatagggaaaaaatgatgactaaataaaatatatgggatgctaagccaaagtagagaagacaaacttcctagaaggagccatagaaagataaaataatgagaactttaaagacaatctggttctatttcttcactttaatgatgagaaaaaatgtgctccaaaaagagcttcttttcttcttctttttctttctttctttctttttttttt

SEQ ID NO: 248432 - DNA, 505 bp, Homo sapiens
atttggaggatgaggcagagcagcaatcttatcagctttaatttgtcactctacagctttcctccatattaagtcctcacatccagagatggtccataactttgagattagctaagcctatgagataatgcattttatttcattaaccatctgkggtgtgctgccagggatttataaatgctggtcgatgcttgtgttcccttaaggataattttgcaatcagtctgcaaaagatgtgaatagaaaccacccagccctgaggaaagatgacatcgtcactcagataaataaagatatagggaaaaaatgatgactaaataaaatatatgggatgctaagccaaagtagagaagacaaacttcctagaaggagccatagaaagataaaataatgagaactttaaagacaatctggttctatttcttcactttaatgatgagaaaaaatgtgctccaaaaagagcttcttttcttcttctttttctttctttctttctttttttttt

SEQ ID NO: 248433 - DNA, 527 bp, Homo sapiens
gcacagtattccttaaagtcttttttttttagctagtcttatggggttttttgcacctgatttaccttacttaatagattttctcrttttgtcccctttaccaattgtacctttaaaaaatgccatctccttttcctcacccacaatgacctcttttgctttgccagttagccatacagggtttttgtttgagcacctgggttttttgatccttggcacgtattttccctgggcttctaataaggtgttttaaacagtttccaggtttctggtagattatttgcttttttttttttccaactcccttgcattttattctaatattcacattttgatgtaggtctcttttccaaaagtgaattagcatgtgttctatgtttcttggcttttccaccctcagtagaaagtgaaacttaatcatatactaatcactaatatataatgatttgtataattcgtgattcacttcctgtcttttatgcagaacttagtgtacttcctttccatgtgatttctaaaattactta

SEQ ID NO: 248434 - DNA, 414 bp, Homo sapiens
gcttttaaagtattttacatacaattcttaaacagattaaaatacaaatatagatcaagaaggattcacctgatctttgcctgatcccaagctggcttataaaaacctcacttaaattacagtttatcttctactgcccaccagaatcccataggcttcatgtatggaaaatctaattcagaaggatcaaactggggttaggaatgtatgttttaaaaagctctagatatctaagtaatttgtcatatttttaactttaagaacttctgactcacagcaccatcacttcccctaacgcaaatcccaaacataaagtttactgtctcakgcttgaagaatatgagaactgttctgatgaaccaaagctgtgaggacatgggaaagagtagttattctaaagggccagtattaggc

SEQ ID NO: 248435 - DNA, 605 bp, Homo sapiens
aggttaaaactctcaacaaagggttgagagtcaaaatatttgagtttaataactgatttgtccctattcgttttgctttaaagtctctaaattttgttttttcaactgagaaatggcaaaattattttaagataaaattaaattaaagtccattaaactcaaagatgctatcaaatagatgggatcatttmattctttaccgaaattttaacaaaattttgactctgtcatgtatgagaccttatttgtagtggcaggaaattatctagagaaattcatctggactccatgaagctaccaacatcatctggtattggttacatactcatctttgatgctcccacccctctatttctgctgtgacatcataactcaccatttccagtttgtcatttgtttttcctccctatcttatccatctattcttggccaatacaaaagatctgcttacttcttatttttggtccaacattcctccaacctgtccccaacccaactctggctcacaaatatttctcactaaatattccattaatggacctagtcataatccctaaactggtgttcttatacatggaactcaagaatatatattgcccgtaaag

SEQ ID NO: 248436 - DNA, 541 bp, Homo sapiens
aagtcaatgagcattttcagaaacaaattataaagcagactcgcttygaaacccaacctgaaaagagagacacacacaaccatgacaacctgtttacaactggatattctgattttcaacactggaaaatgaggggaaatcgtctatgatactgtaagcaaagctctcctagtgttctctacttgcctgtagatggaaaagcaaatcaatgcaatagccccaggtttctggaagaacgagaaaaaatgtccttgagagatgatacgaaggatattattctttcacgaactaatattctctccttattggtttttaaatgaacaaaggacttaaatcccccaatgggaagctaaataaagcctttgcagtacacagcaataacaagtgaatcactgaaactaattttaaccccagagtgacagaaatggtaaaccgtttccttcccccttgcaccctcccctccctgcacgcaaaattttgctgttagatttcaccacattaaaatgtaatttcatcttattcaatgcctgcctttgttact

SEQ ID NO: 248437 - DNA, 541 bp, Homo sapiens
aagtcaatgagcattttcagaaacaaattataaagcagactcgcttcgaaacccaacctgaaaagagagacacacacaaccatgacaacctgtttayaactggatattctgattttcaacactggaaaatgaggggaaatcgtctatgatactgtaagcaaagctctcctagtgttctctacttgcctgtagatggaaaagcaaatcaatgcaatagccccaggtttctggaagaacgagaaaaaatgtccttgagagatgatacgaaggatattattctttcacgaactaatattctctccttattggtttttaaatgaacaaaggacttaaatcccccaatgggaagctaaataaagcctttgcagtacacagcaataacaagtgaatcactgaaactaattttaaccccagagtgacagaaatggtaaaccgtttccttcccccttgcaccctcccctccctgcacgcaaaattttgctgttagatttcaccacattaaaatgtaatttcatcttattcaatgcctgcctttgttact

SEQ ID NO: 248438 - DNA, 541 bp, Homo sapiens
aagtcaatgagcattttcagaaacaaattataaagcagactcgcttcgaaacccaacctgaaaagagagacacacacaaccatgacaacctgtttacaactggatattctgattttcaacactggaaaatgaggggaaatcrtctatgatactgtaagcaaagctctcctagtgttctctacttgcctgtagatggaaaagcaaatcaatgcaatagccccaggtttctggaagaacgagaaaaaatgtccttgagagatgatacgaaggatattattctttcacgaactaatattctctccttattggtttttaaatgaacaaaggacttaaatcccccaatgggaagctaaataaagcctttgcagtacacagcaataacaagtgaatcactgaaactaattttaaccccagagtgacagaaatggtaaaccgtttccttcccccttgcaccctcccctccctgcacgcaaaattttgctgttagatttcaccacattaaaatgtaatttcatcttattcaatgcctgcctttgttact

SEQ ID NO: 248439 - DNA, 541 bp, Homo sapiens
aagtcaatgagcattttcagaaacaaattataaagcagactcgcttcgaaacccaacctgaaaagagagacacacacaaccatgacaacctgtttacaactggatattctgattttcaacactggaaaatgaggggaaatcgtctatgatactgtaagcaaagctctcctagtgttctctacttgcctgtagatggaaaagcaaatcaatgcaatagccccaggtttctggaagaacgagaaaaaatgtccytgagagatgatacgaaggatattattctttcacgaactaatattctctccttattggtttttaaatgaacaaaggacttaaatcccccaatgggaagctaaataaagcctttgcagtacacagcaataacaagtgaatcactgaaactaattttaaccccagagtgacagaaatggtaaaccgtttccttcccccttgcaccctcccctccctgcacgcaaaattttgctgttagatttcaccacattaaaatgtaatttcatcttattcaatgcctgcctttgttact

SEQ ID NO: 248440 - DNA, 516 bp, Homo sapiens
ttgtcctggaaagtgtggtgacactggcaactgagagtggatctcccctttattaactaaagtccacagtttatattagggtttactctttgtgttatacattctatgggttttgacaaccgcataatggatctgccattatagaatagtttcactgtcctaaaagtccctgttctccacctatttatccttccctccmtacagccttcattgtttttttccattctcattgtcagtctctaatacaaaggtattctaatcccagaacaaaagacaaaccattaaaccaagtattttgagtagtgagggttagcagagaatggagagggtggagaagggcatgtttttatgaagaaatcagttcctgttttggtttccaagtcagaaaatttgagatatgttatacacattatttgtgtggacaccacacataactgtatatggagcgaagcgtgaactgtgtttacaccagtaatagccaaaaagaattataataataaaaataacagggttttt

SEQ ID NO: 248441 - DNA, 555 bp, Homo sapiens
ctagtattatctgatctcagcataaaagtctttactgcagtaaactgacatgggccacccagtccagatatctaccacaagcttaraagtattttcccttttttaaatagagattttattaagaaaagtaaggagttagtttagcatgacacaacctatgttgtgacgagatctgtccacattttaatactcagctcttatgagcagatctctcaaaacaaccatgatacaggctgttatgacatcaatcctggtgcctttcagaggagccctgatgtgccaagactctttttctctatttttatctggattcttcctctcaggttgtcatgtgttctgtatattgttcttttcctgtgctatttctggccacttacaatttatgtgaaactttgtacttttaatcagggttcttactcccatgcttggctcatgaactttattcaaagttcattttaactgtatctattttatcaatttgattgctgatgaaagtttattcctccagtgtgttctgtaggatgcctattgccatttatttgctatttctggaat

SEQ ID NO: 248442 - DNA, 527 bp, Homo sapiens
gcacagtattccttaaagtcttttttttttagctagtcttatggggttttttgcacctgatttaccttacttaatagattttctcgttttgtcccctttaccaattgtacctttaaaaaatgccatctccttttcctcacccacaatgacctcttttgctttgccagttagccatacagggtttttgtttgagcacctgggttttttgatccttggcacgtattttccctgggcttctaataaggtgttttaaacagtttccaggtttctggtagattatttgcttttttttttttccaactcccttgcattttattctaatattcacattttgatgtaggtctcttttccaaaagtgarttagcatgtgttctatgtttcttggcttttccaccctcagtagaaagtgaaacttaatcatatactaatcactaatatataatgatttgtataattcgtgattcacttcctgtcttttatgcagaacttagtgtacttcctttccatgtgatttctaaaattactta

SEQ ID NO: 248443 - DNA, 598 bp, Homo sapiens
ggatggattgagtcagcaacatgaaggggtccttaaagagccacagggaaagagggttcaggcagaagaaatgtcaggtatgaaatacctaatgtaagaaaaatcaagaattcaattaagtaagagtcaaatattcctgaagcagcatttcttaaacttggctgaccattagaatcacctgsggagctttaaaacttctaccaggctttctcaaaccttgaggatttttttttaatgcagattcttatttgcagaatcctactgaattctgacctaaactcagtatttaaaatatcaataatagtcttatagaatagcaacaattataaaaagcaataaaagaggttctattttaaaaaatgacatatttcacaatatctaggaataaatctacaatatatgttgaagaacaatatctaaggataagtctaacaatatttgttgaagaactttagtcacaaaattatataagataccagacatatgcaaaagtggcctgaataaacagagagctattctatgaacttgaatgaaaatgttaaataccacagaggtgtcaatttcctgaaagtcttgtatccaacaagattattggcat

SEQ ID NO: 248444 - DNA, 598 bp, Homo sapiens
ggatggattgagtcagcaacatgaaggggtccttaaagagccacagggaaagagggttcaggcagaagaaatgtcaggtatgaaatacctaatgtaagaaaaatcaagaattcaattaagtaagagtcaaatattcctgaagcagcatttcttaaacttggctgaccattagaatcacctggggagctttaaaacttctaccaggctttctcaaaccttgaggatttttttttaatgcagattcttatttgcagaatcctactgaattctgacctaaactcagtatttaaaatatcaataatagtcttatagaatrgcaacaattataaaaagcaataaaagaggttctattttaaaaaatgacatatttcacaatatctaggaataaatctacaatatatgttgaagaacaatatctaaggataagtctaacaatatttgttgaagaactttagtcacaaaattatataagataccagacatatgcaaaagtggcctgaataaacagagagctattctatgaacttgaatgaaaatgttaaataccacagaggtgtcaatttcctgaaagtcttgtatccaacaagattattggcat

SEQ ID NO: 248445 - DNA, 548 bp, Homo sapiens
tatgcatatttaagtgtaaaataatcttgccttttattgtaattccagacagtcagatatggtagtgtattttaacagtttgtacttttcagggtcttttctgggtgcaaatcacattagctatgagcttgttccagttgttcagcagaatatggatttggatgttgtttcttgacaaatgagctgaataattacttactttagccatgatattgtttatatttaaattctagattgctattagatctggaacagtgattcctaaacaaaccaatcatcaaaatcacatggaaacttatgaaaaatacaatygtaggcccccagatccataattttaaaattttacttttctaattctaagccattgatgaagagaatatttggatttacaaagtatttttattaattatctgtttttttattttttacaattatgtatagctaaatatttagctaactttttcataataaaaatcaaaataaagaatccatttattctatttgttgaattctatttcaaaggtcagcttttcaactaccatcattgt

SEQ ID NO: 248446 - DNA, 548 bp, Homo sapiens
tatgcatatttaagtgtaaaataatcttgccttttattgtaattccagacagtcagatatggtagtgtattttaacagtttgtacttttcagggtcttttctgggtgcaaatcacattagctatgagcttgttccagttgttcagcagaatatggatttggatgttgtttcttgacaaatgagctgaataattacttactttagccatgatattgtttatatttaaattctagattgctattagatctggaacagtgattcctaaacaaaccaatcatcaaaatcacatggaaacttatgaaaaatacaattgtaggcccccagatccataattttaaaattttacttttctaattctaagccattgatgaagagaatatttggatttacaaagtatttttattaattatctgtttttttattttttacaattatgtatagctaawtatttagctaactttttcataataaaaatcaaaataaagaatccatttattctatttgttgaattctatttcaaaggtcagcttttcaactaccatcattgt

SEQ ID NO: 248447 - DNA, 579 bp, Homo sapiens
  misc_feature (1)...(579): n = A,T,C or G
ggctacttcattgttgtcttataagatgttgaagattttcagatcttggcaataaataatgaagaggccaccctgtttccaaatctgaatttgcctcttttttagccatctctgtccaactatyatgcaccgtgacagctttgttctcctagcaaataagaaatattttggtagcctatgttgtgatttacacttggtaagtaggccctttattccttgtgcatagaaatttaggtctttaaacatgagtcaaagcaatgcagcatttttgctaacacttaattctgcttgttcaaatctctcccctatgaatcatctcccactgatatatcacagagctattataaaatggattttanctcatgagatctggctcccattgaaacacttccattgtgtttgaagtcacttaaaacttgaacactgacagcatcagctggtttagaatacttcgcatttggtatgaattaacattagtggttaatgagaaatttgaacaaactccaatccagcaccttttggaagttattttaatcctgcagtctagctgtggggtatgcctgcaagagatatttatgg

SEQ ID NO: 248448 - DNA, 579 bp, Homo sapiens
  misc_feature (1)...(579): n = A,T,C or G
ggctacttcattgttgtcttataagatgttgaagattttcagatcttggcaataaataatgaagaggccaccctgtttccaaatctgaatttgcctcttttttagccatctctgtccaactattatgcaccgtgacagctttgttctcctagcaaataagaaatattttggtagcctatgttgtgatttacacttggtaagtaggccctttattccttgtgcatagaaatttaggtctttaaacatgagtcaaagcaatgcagcatttttgctaacacttaattctgcttgttcaaatctctcccctatgaatcatctcccactgatatatcacagagctattataaaatggattttanctcatgagatctggctcccattgaaacacttccattgtgtttgaagtcacttaaaacttgaacactgacagcatcagctggtttagaatacttygcatttggtatgaattaacattagtggttaatgagaaatttgaacaaactccaatccagcaccttttggaagttattttaatcctgcagtctagctgtggggtatgcctgcaagagatatttatgg

SEQ ID NO: 248449 - DNA, 593 bp, Homo sapiens
acatcacaggcttgaacttccccgagagcaagtgtggtcaggttagcataagggttctgatgaaaagccagctacattcttaaaaccagcactagtttctctttcttcccccgaggaagtatggaggcytactcacaaatttctacctgcatgggcaagatgctgacacatccttggagtgatgctgaatgtggaggggcagaaggggcagtaaagacagtggcaatgggcaaagctaccctcttctatttctgttagaggatcaagcttctgattcttcttgctcagcatgttccatgcttcttgctgagtatggctgttgaaggggcactaaattattgattattcttgagttctaaagacaactgaaaaagaagctggtccctctgaacaccatcatctcattctctccgcttccacaattgcctctaaaatatatcccgtgtttttagacagtttcagttttttccactgaataagaaattcagctcattaccaacttcctcatgtagccccaaaccatggggtgtgattaaataaaacccatgaaatgtctgtaggtcgaggggcctaatttgggctgacatttactc

SEQ ID NO: 248450 - DNA, 591 bp, Homo sapiens
aggttttttggtctcatatatctacacacatacatacaaataatagaacaaaaattaaaagtaatgaaattaattgaaaaaagtgttagttttagaaaaccataaattttacttttatatgttcattttccccaaatgatattgaatctgggcacattttctttattccagaatatttgaaatcctgccaaggtccactggatgggtaagaagctaaggtgggagttaaagaagctatgagatagattatattttaaatgggtattgagcaattaaatccagtaactccattctttcaagtaatgctgaactgtttgtatcagcagcatttagtggcccataattctgaaacccctcagggaagaaartgtgtcactggcttatgtatgaactgaacaactaaaatttgagggaacgagttcaggaccaagaaagctggccttttcacccctggtccctgtgaatccaaatgcagtatagccggcaggcatggaggcgatgtcctgttcctaactcaataacattttttgctacaactcttcctatatttggaaaggggttgagttgtatgaaaacccatcctcagaaata

SEQ ID NO: 248451 - DNA, 591 bp, Homo sapiens
aggttttttggtctcatatatctacacacatacatacaaataatagaacaaaaattaaaagtaatgaaattaattgaaaaaagtgttagttttagaaaaccataaattttacttttatatgttcattttccccaaatgatattgaatctgggcacattttctttattccagaatatttgaaatcctgccaaggtccactggatgggtaagaagctaaggtgggagttaaagaagctatgagatagattatattttaaatgggtattgagcaattaaatccagtaactccattctttcaagtaatgctgaactgtttgtatcagcagcatttagtggcccataattctgaaacccctcagggaagaaagtgygtcactggcttatgtatgaactgaacaactaaaatttgagggaacgagttcaggaccaagaaagctggccttttcacccctggtccctgtgaatccaaatgcagtatagccggcaggcatggaggcgatgtcctgttcctaactcaataacattttttgctacaactcttcctatatttggaaaggggttgagttgtatgaaaacccatcctcagaaata

SEQ ID NO: 248452 - DNA, 591 bp, Homo sapiens
aggttttttggtctcatatatctacacacatacatacaaataatagaacaaaaattaaaagtaatgaaattaattgaaaaaagtgttagttttagaaaaccataaattttacttttatatgttcattttccccaaatgatattgaatctgggcacattttctttattccagaatatttgaaatcctgccaaggtccactggatgggtaagaagctaaggtgggagttaaagaagctatgagatagattatattttaaatgggtattgagcaattaaatccagtaactccattctttcaagtaatgctgaactgtttgtatcagcagcatttagtggcccataattctgaaacccctcagggaagaaagtgtgtcactggcttatgtatgaactgaacaactaaaatttgagggaacgagttcaggaccaagaaagctggccttttcacccctggtccctgtgaatccaaatgcagtrtagccggcaggcatggaggcgatgtcctgttcctaactcaataacattttttgctacaactcttcctatatttggaaaggggttgagttgtatgaaaacccatcctcagaaata

SEQ ID NO: 248453 - DNA, 591 bp, Homo sapiens
aggttttttggtctcatatatctacacacatacatacaaataatagaacaaaaattaaaagtaatgaaattaattgaaaaaagtgttagttttagaaaaccataaattttacttttatatgttcattttccccaaatgatattgaatctgggcacattttctttattccagaatatttgaaatcctgccaaggtccactggatgggtaagaagctaaggtgggagttaaagaagctatgagatagattatattttaaatgggtattgagcaattaaatccagtaactccattctttcaagtaatgctgaactgtttgtatcagcagcatttagtggcccataattctgaaacccctcagggaagaaagtgtgtcactggcttatgtatgaactgaacaactaaaatttgagggaacgagttcaggaccaagaaagctggccttttcacccctggtccctgtgaatccaaatgcagtatagccggcaggcatggaggcgatgtcctgttcctaactcaataacatttttygctacaactcttcctatatttggaaaggggttgagttgtatgaaaacccatcctcagaaata

SEQ ID NO: 248454 - DNA, 481 bp, Homo sapiens
gaagcccggggcgcaccagtccccaggcccaccagggcactgctgtccgcccagccccaggcctcagccaccactgtgagggcgaggggccccggggccgcgatctgccctcctctggtctcacacatgcccttggttttgtatcccaggccacgtgcgccggggcagmcgctgacattgggatctacagggtagtgacattacggacgagtcagcaaaccgcggatctcgcccatagggggacacacccccagtcccagccggccttgggaagtctctgacttctagcgcctagccctcgaaagccgagaactggagaagcaggttccgggagccttagcagcccggggcgcagacacccccgtggaggctgcagtaacctggcgactgggacttgggagtgtagatgtgggttccttgccgaggcgtggcaggcgtggcaagtccgcagccgttggacacacgtgccctttttcataat

SEQ ID NO: 248455 - DNA, 481 bp, Homo sapiens
gaagcccggggcgcaccagtccccaggcccaccagggcactgctgtccgcccagccccaggcctcagccaccactgtgagggcgaggggccccggggccgcgatctgccctcctctggtctcacacatgcccttggttttgtatcccaggccacgtgcgccggggcagccgctgacattgggatctacagggtagtgacattacggacgagtcagcaaaccgcggatctcgcccatagggggacacacccccagtcccagccsgccttgggaagtctctgacttctagcgcctagccctcgaaagccgagaactggagaagcaggttccgggagccttagcagcccggggcgcagacacccccgtggaggctgcagtaacctggcgactgggacttgggagtgtagatgtgggttccttgccgaggcgtggcaggcgtggcaagtccgcagccgttggacacacgtgccctttttcataat

SEQ ID NO: 248456 - DNA, 512 bp, Homo sapiens
tgctctgttgcccaggctagagtgcagtggcagtgcagagctgcagtgcagctcactgcaacctctgcctcctgggttcaaacaactttcctgcttcattctccctagtagcaatggccacctcgctcagctaattttttttttttttttttttaagagtcagggtttgatcatgttggtcaggctcatcttgaatttctgatctcaagtgacctgcccaccttggcctcccaaagtgctgggattacagacctgagccattgtgcccagcctctttggccatctttttgaaaagtctctaaacatatttataatagctgctttaaaactcatgtctgctaattccaacatttatatcatctccaggtcactttctactcacgatatttttcttgagtrtaggtcacctctccagcccccgcatgtccagtatgttttgattttatactggatgttgtggatattatgttataaagattgtattcagagtatttatttgaagtcttaatttt

SEQ ID NO: 248457 - DNA, 597 bp, Homo sapiens
taaatcaaaataccaaatacaactgggccgccccagctaacattacagatggcattagtcagcttgtgatcaaatatatgtgcgattgcaaattttttatcttaaagaagcaaatacatacccatcttcattgccaagagccatgattttgccatctgctttccaacttatctttgtgtgtacaggcaatttgtactagaaagcaaaacaaaccaatcttgactatatacatatctcacaaatcagcaatgacagcatgagaaaaaaaaatccctagagtttaaaaacgttttaattatacaacagctattcttgtaaataatctacataattagtaaaaggattactaagaacatgcattctaattctcatttcctaactgggccaaaaaaacaaaacaaaaaaacccccaaggccaataagtactaaatgtttacartgcttaaccttgtgaaatatatacttaattaaactgatctgtgcccatcagcttggacaatgtggggaccatgaggccttaaagaaaactatatacactctccttgttttctatcccttcaaagcttctttccctgaatcatttccctcccatatcta

SEQ ID NO: 248458 - DNA, 579 bp, Homo sapiens
gttgttttttgtgcatgctggcataagaatgcagctctcatgggcccccagagctcacagtcatggatatttatgtacctgctcaagtatttttagggggtgaggatcccaccccaaatgggaccactcattttccaggatcagactcacattcatatttctggagcactcaataaacagcatctgattatcaaaggaatgatggtttatacttcagaaaaaaataggaaaaccaggtcactgaggatgaagaggagatgaagtcctagccagactttgccaagtgtctgaaagaggaaagagaaatcggtatcttacaagtgtgtatttgggcaggtggggtgcagggaaaggaaggaaatacttcagcctgtgttgctgccaggctcacgtgtagagcctgagacacataatcttcargtcatgggtttgcccccttatggggtacattgttgttaaaagggtcagactgatgtagtggaaaaagaaagtcactgacccaggcaggagtcaggggatgcaactaatcttggcttggccaccacacagtgcattctaaaaccaaataccagtgctctg

SEQ ID NO: 248459 - DNA, 528 bp, Homo sapiens
atagccacaaggttgtctgtcagctcccctctttctgctgcagtctggagaacacctttgagatctcctttccaaagcataagctggtgaaataactcagggtggccattttctaagtgacctttycctgtttgaaagagagataatgtttggaaggtgtttcagaaacatctgttactgacttgtaggaaaagaaaggcaagatagaagagaaagtgagctcctaaaatatgcagtcattctctgatgggtgtcacctaccagagtgattacagtaagatctgaagcccacttggtcactgtacactcccacaccttcacatgtactcagagtgaatgctgtatgtttaggatcctatgatgatgcaagggttgtatcaatatgtaaatcagggagctcaaaacctagttagctgacacgtaaaactaaccattataatatcacaggatgacagccatcaaagaggtgcacacaaaatgttgggaaagtataaagatggatgagattatgttgactggatttgtctc

SEQ ID NO: 248460 - DNA, 528 bp, Homo sapiens
atagccacaaggttgtctgtcagctcccctctttctgctgcagtctggagaacacctttgagatctcctttccaaagcataagctggtgaaataactcagggtggccattttctaagtgaccttttcctgtttsaaagagagataatgtttggaaggtgtttcagaaacatctgttactgacttgtaggaaaagaaaggcaagatagaagagaaagtgagctcctaaaatatgcagtcattctctgatgggtgtcacctaccagagtgattacagtaagatctgaagcccacttggtcactgtacactcccacaccttcacatgtactcagagtgaatgctgtatgtttaggatcctatgatgatgcaagggttgtatcaatatgtaaatcagggagctcaaaacctagttagctgacacgtaaaactaaccattataatatcacaggatgacagccatcaaagaggtgcacacaaaatgttgggaaagtataaagatggatgagattatgttgactggatttgtctc

SEQ ID NO: 248461 - DNA, 528 bp, Homo sapiens
atagccacaaggttgtctgtcagctcccctctttctgctgcagtctggagaacacctttgagatctcctttccaaagcataagctggtgaaataactcagggtggccattttctaagtgaccttttcctgtttgaaagagagataatgtttggaaggtgtttcagaaacatctgttactgacttgtaggaaaagaaaggcaagatagaagagaaagtgagctcctaaaatatgcagtcattctctgatgggtgtcacctaccagagtgattacagtaagatctgaagcccacttggtmactgtacactcccacaccttcacatgtactcagagtgaatgctgtatgtttaggatcctatgatgatgcaagggttgtatcaatatgtaaatcagggagctcaaaacctagttagctgacacgtaaaactaaccattataatatcacaggatgacagccatcaaagaggtgcacacaaaatgttgggaaagtataaagatggatgagattatgttgactggatttgtctc

SEQ ID NO: 248462 - DNA, 578 bp, Homo sapiens
tgatgcctggtctctcttgagccattggagtagcagtggaataaaaacctcctttgtctacactaggaaatcccctgcccaccaacacccttaatgaggtgctactcttgcatttaggacaaaatgccagcattatcgggaaagacctggggctgagggcactcgaggtgggaggctcttctttaggacacacgagtcytctatgtcatggcaggaactgctctgaccaatcacagcagtgaggtgatgaactccaaagagcagtccccagacccatctcagccaggggagaaagcagggggtggaaggcaggtacagcatgtatggcctactgctccaggattggcgcatacactctaaggagggaacccagatttgagtaaagctgcgcaggccctctgaaagcttcagaggcaatgtggctatcactgtccctttctcggcccttatcgggaccctttagagaggggcggtgtacagaaaagggacctcttgcctttcatctcatcctccaagaggtcgaggcaacttgtcatcaagccaaattgaaaagaaagaaatgtgggctgcccggcttt

SEQ ID NO: 248463 - DNA, 578 bp, Homo sapiens
tgatgcctggtctctcttgagccattggagtagcagtggaataaaaacctcctttgtctacactaggaaatcccctgcccaccaacacccttaatgaggtgctactcttgcatttaggacaaaatgccagcattatcgggaaagacctggggctgagggcactcgaggtgggaggctcttctttaggacacacgagtcctctatgtcatggcaggaactgctctgaccaatcacagcagtgaggtgatgaactccaaagagcagtccccagacccrtctcagccaggggagaaagcagggggtggaaggcaggtacagcatgtatggcctactgctccaggattggcgcatacactctaaggagggaacccagatttgagtaaagctgcgcaggccctctgaaagcttcagaggcaatgtggctatcactgtccctttctcggcccttatcgggaccctttagagaggggcggtgtacagaaaagggacctcttgcctttcatctcatcctccaagaggtcgaggcaacttgtcatcaagccaaattgaaaagaaagaaatgtgggctgcccggcttt

SEQ ID NO: 248464 - DNA, 523 bp, Homo sapiens
tgctttttagtgatatcatgtgacactagttcaaaatgtcgccttttgggttgatcttaaggtaactatccatattcatcaaaaaaggagagaggagggaaggagaggagaagagaaaagaaaagaaaatgaaaaattaaacttcaatggggaagtatcttaccttaaagttatcactgctcaatgtggcagytgtcattgtagaacttgtcatcataactggacaaacacctctagtcctatggcatgtcttatcagtagtcattgtaaggcctttatcatttgctgttttgtaccacggttgcttatatgcatgttttattccccatccttccaccctgaaataaattgtaaaacccctaggtcttattcagcttttcatttcctaattaacactgaaatccaggaaatttgggtgttttggaacaatagtttctaactcagcaaatacacatattaaaagtatataatacattatacattaaaagtctgcaaatattatgaaataaccaaaccatgctga

SEQ ID NO: 248465 - DNA, 548 bp, Homo sapiens
atcaagtttttaaaacattaaagtatgctttttagtgatatcatgtgacactagttcaaaatgtcgccttttgggttgatcttaaggtaactatccatattcatcaaaaaaggagagaggagggaaggagaggagaagagaaaagaaaagaaaatgaaaaattaaacttcaatggggaagtatcttaccttaaagttatcactgctcaatgtggcagctgtcattgtagaacttgtcatcataactggmcaaacacctctagtcctatggcatgtcttatcagtagtcattgtaaggcctttatcatttgctgttttgtaccacggttgcttatatgcatgttttattccccatccttccaccctgaaataaattgtaaaacccctaggtcttattcagcttttcatttcctaattaacactgaaatccaggaaatttgggtgttttggaacaatagtttctaactcagcaaatacacatattaaaagtatataatacattatacattaaaagtctgcaaatattatgaaataaccaaaccatgctga

SEQ ID NO: 248466 - DNA, 490 bp, Homo sapiens
tgcgtccattattactaattactagattgtttggtcttggtgagcactcaaaaaaagattctcagatttgcccaaatatgtgattacaggagttcaatgggtaayatattatgggataattcaagtgattgaaaataagacttaaaacataggtttaaaaaagtctagaaagaagataatatatattgccccatagagtttttaaaggcaccgattgacatttttgtccattggcattacctacttagaaggtgagttaggtggtaacttatctgggcgatcctgtctagaactgctattattgtagagcttccctatcttcctgagaactcagagagcactaattaagatgagaacagaagtatagtagagattggtgatgggcaaaaattaaattatttgactggctaaaaatggaaaaataacagaaaaaccagggagagattagaattatgttttgccataaaagtgatacatgtacattaaagtc

SEQ ID NO: 248467 - DNA, 576 bp, Homo sapiens
gcttttggcacttccccttttgatattttttcctcttctacatttgtttttaacgtttttgtcaatcactgcatatgcagttttaaatcttagaacacccaaactctgatgaaatgaatgtaggttaggtggggtgttggtatctggagtctggcttgcatttggatattgttcctatcatttattagctaaacgacttggggcatgttaatctccttgagcctcaatttcctcatctgtaaaatagggattatacttaaatctttttcraagagttgttaggagaattaaagaaagaaatactgcaggtcgaacagccatatgagctgtgcacagtggtatcccccattaaggggtgctgttattaacaatgggtgtaattggaccagcctagccatggcaagcatgtgacagtgggtcgtttggagagggtgggggtaagccaaggaaggcagatattttctctccttaaatgaccaccagagctgaagagccacagtactgtggggccaggccaggtgaatgcttagcattcagtttttggacacattctgtgatgtctcagccactcattca

SEQ ID NO: 248468 - DNA, 576 bp, Homo sapiens
gcttttggcacttccccttttgatattttttcctcttctacatttgtttttaacgtttttgtcaatcactgcatatgcagttttaaatcttagaacacccaaactctgatgaaatgaatgtaggttaggtggggtgttggtatctggagtctggcttgcatttggatattgttcctatcatttattagctaaacgacttggggcatgttaatctccttgagcctcaatttcctcatctgtaaaatagggattatacttaaatctttttcaaagagttgttaggagaattaaagaaagaaatactgcaggtcgaacagccatatgagctgtgcacagtggtatcccccattaaggggtgctgttattaacaatgggtgtaattggaccagcctagccatggcaagcatgtgacagtgggtcgtttggagagggtgggggtaagccaaggaaggcagrtattttctctccttaaatgaccaccagagctgaagagccacagtactgtggggccaggccaggtgaatgcttagcattcagtttttggacacattctgtgatgtctcagccactcattca

SEQ ID NO: 248469 - DNA, 576 bp, Homo sapiens
gcttttggcacttccccttttgatattttttcctcttctacatttgtttttaacgtttttgtcaatcactgcatatgcagttttaaatcttagaacacccaaactctgatgaaatgaatgtaggttaggtggggtgttggtatctggagtctggcttgcatttggatattgttcctatcatttattagctaaacgacttggggcatgttaatctccttgagcctcaatttcctcatctgtaaaatagggattatacttaaatctttttcaaagagttgttaggagaattaaagaaagaaatactgcaggtcgaacagccatatgagctgtgcacagtggtatcccccattaaggggtgctgttattaacaatgggtgtaattggaccagcctagccatggcaagcatgtgacagtgggtcgtttggagagggtgggggtaagccaaggaaggcagatattttctctccttaaatgaccaccagagctgaagagccacagtactgtggggccaggccaggtgaatgcttagcattcaktttttggacacattctgtgatgtctcagccactcattca

SEQ ID NO: 248470 - DNA, 512 bp, Homo sapiens
ccttaaaattcaaaatttagatttatatgaatgagagaaaagtagggaaatcacaagaacactaacataaatttctatattattcctagggaatgtctctaaattaatattactattcagtaaktatatattaatcaaatgtattaactggattataccccccaattatcatttctgtaattcctaagattagaaatttttcttcaatatttatgaatcactatgtaatattttgttttagttggtctaatatattttctcatgggcaaaacagaaattgtagttttcttttctgaaaagtttatgcagatcggtaaagagatgtaagaacttcacaaatgttcaatagtatgtttacatttttgttccatttggaagtctaagtgaatggttaacagaaatcacaaagaaattagttttttacatctgtccattcttttacatttcaaaattccagatcagtaaattttaaaaatacaaagaaagattattaatatcacattttgtgatcg

SEQ ID NO: 248471 - DNA, 452 bp, Homo sapiens
agtccaagtctcttgagttccagtccagggctctttccatttagttacaaaattacttagttataaaaactctcctttataggaaaaaaaaaatcttcaaaaaaatataccttgaagttcagccttgctccaagaaataaattatatacacaaacacacatacatacacacaaatacacacatatacgtaccaagccccaaatcattaaaaataagattcatcacatcataagcagtaaaaaacagataaatatttggtggaaataaaagcacctcaggaaataaaccctaaagcacacaacattcctaaagtatacacatatttaataaactgagaaccctaaatctgtattatataaagtatgcatttacaacagaaaatttagggaattcatgatttaggctaagcttactaataattrcaagacagctgcattccccagttccccatt

SEQ ID NO: 248472 - DNA, 405 bp, Homo sapiens
gttgttggaattcttttattaccatttcaatcctgttgctttttatttgcctgttcagagtttatatttcttcctgttttaatctaggagggttgtatatttccaagagtttatccatctcttccagattttctagtttatgcacataacaatgttcacagtagccctgaatgatcttttttttatttttgtggaattggttgtaatatctcctgtttcttttttaaatgagcctatttgkctcttttctttccttttcttggtaaatctcactaaaggtttatcaattttcattattttttcatagaagcagcattttttttcatttatctattgtatttttgttgcaatttcacttagctctgctctaatcttggttatttcttttcttatgctggatttggg

SEQ ID NO: 248473 - DNA, 405 bp, Homo sapiens
gttgttggaattcttttattaccatttcaatcctgttgctttttatttgcctgttcagagtttatatttcttcctgttttaatctaggagggttgtatatttccaagagtttatccatctcttccagattttctagtttatgcacataacaatgttcacagtagccctgaatgatcttttttttatttttgtggaattggttgtaatatctcctgtttcttttttaaatgagcctatttggctcttttctttccttttcttggtaaatctcactaaaggtttatcaattttcattattttttcatagaagcagcattttytttcatttatctattgtatttttgttgcaatttcacttagctctgctctaatcttggttatttcttttcttatgctggatttggg

SEQ ID NO: 248474 - DNA, 604 bp, Homo sapiens
cattttttgattctttttactttgtctttgttagattgcgttaattcaaaaatcttgtcttcgagctcttcagttctttctttagcttgttcaattctactgctgagacttttctgtgtattttccatttctcaaagtgtgtccttccattccagaagctgtcattgttttttatttatgctatctatttcactgcagatttttcccttcatatcttgtatcattttaaaaatttcattaaattgtgcctcacctctctctgrtgcctccttgattacattaattattgatcttctgaaattttttgacaattcagagatgttttttcttggtttgggtctatttctggtgagctagtgtgatcttttgggggtgttaaagaaccttgttttgtcatattactattttctggttccttctcatttgggtagactatgtcagggagatgtgtctcaagagctgctgttcacattcttttgtcccatggggtgctcccttgatgtagtgctctccccattcccctagtgatgtggcttcttgagagccaaactgcagtgactgttttttcttttctgaatctagccatccagcagagctacagggc

SEQ ID NO: 248475 - DNA, 591 bp, Homo sapiens
gtgtttatttggatcttctctccttttatcagtctagctagtggtgtttctatcttattaattttttcaatgaaccaattcctggattcactgattttttaatgctttcttgtgtccagttttttcagttcagctctgattttataatttcttgtcttctgatagctttgyggttggtttcctctttcttctctagttcttctagttgtgatgggaggttgttaatctgagatctttctaactttttcacgttggcatttagtcttaacactgacttagctatgtctcacagattctggtatttcacatctttgtttgcattcgtttcaagggatttcttgatttctgccttaattttattttcatatacccaaatgtcattcaggagcaggttgtttaatttccatgtaattgtatgatttgaagtgttttttttagtattgatttctttgttgattgtgctgtggtttgagtttggttggtatgttttcagggatctttttttgtaatttgctgagtatcattttatgtctgactccgtggtcaattttagagtatgtgtcatgtggtaacgataggaacgtatgttct

SEQ ID NO: 248476 - DNA, 369 bp, Homo sapiens
gaatggcaataggagatcaccagacactctcctttgtgaaaaatctattgaactggtgaaaatttaaaaataaacaatcaagggagctgctggcaagatgaccaaataggaacagctttggtctgcagctcccattgagaccaacgcagaatgcaggtgatttctgcatttccaactgagtggtacctggaaccccagcgagacagaaccattcactgccctcaaaaggggctaaagccagggagccaagtggkcttgctcagtggatcccactcccacagagcccagcaaactaagaaacactgacttgaaattctggctgccaacacagcagtctgaagtcgacctgggacaattgagcttggtggg

SEQ ID NO: 248477 - DNA, 441 bp, Homo sapiens
aaatgtagctataatatttccttgttgatctggggggtgtattctaacagggaactgccaagcttctaaatcaccctctcgtctagcttgctgaattcctgcctgagctagaactaagagcggtcactcgaggcactgctcaaacagtcactggggcaactacttttcacccagtgkcctccagaaaagaaagatctggagggtctttttcttcaaaataataaggagggggtgcagaagggtagggatgaacctctccttcctttgccgctttagctttagctggcaaataaacctggtctgtaacctcttctgttactttgttatactctcattcctcctcaccatcagagtgaaaaaattccaaggtgaaacgaaccagaccccacacctgtcccattgtcaccctgatgcttccgagctccccttctgactcaccac

SEQ ID NO: 248478 - DNA, 441 bp, Homo sapiens
aaatgtagctataatatttccttgttgatctggggggtgtattctaacagggaactgccaagcttctaaatcaccctctcgtctagcttgctgaattcctgcctgagctagaactaagagcggtcactcgaggcactgctcaaacagtcactggggcaactacttttcacccagtggcctccagaaaagaaagatctggagggtctttttcttcaaaataataaggagggggtgcagaagggtagggatgaacctctccttcctttgccgctttagctttagctggcaaataaacctggtctgtaacctcttctgttactttgttatactctcattcctcctcaccatcagwgtgaaaaaattccaaggtgaaacgaaccagaccccacacctgtcccattgtcaccctgatgcttccgagctccccttctgactcaccac

SEQ ID NO: 248479 - DNA, 518 bp, Homo sapiens
tccgtgttctggtgaatagaatgtatattctgcagttgttgcatagaatgttttgccaatatctgttaagtccatttattctagggtatagtttaagtcaattctttctttgttgactttctgtcttgatgacatgtctagttctgtcaatggagtgttgaatattctcattattattgccttgccatctatctcatttcttagttctaatattaattcttttatgaatttgggagctccagtgtttcatgcatatatatttagaactgtgatattttctttttggacaaatgcttttatcattatgtgatrcccatctttgtttttttaactgctgttgctttaaagtttgttttgtctgatataaaaatagctactcctactcatttttgttgtccatttgaatgaaatatctttccccacccttttacctcaagtttatgtaagtctttatgtgttaggtgagtctcttgaagacagtaaatacttggttggtggattcttatctattttgccat

SEQ ID NO: 248480 - DNA, 576 bp, Homo sapiens
tgcacttccctgtttattacagcattattcataggagctaacatatgagagcaacccaggtgttcattgtcagataaataggtaaagaaaatgtggtatatgtatacaatgaaatactcttcatcctttacaaagatggaaattctgtcatttgtgacaatatggataaacttgaaatggctattatactaagtaatgtaaggcaacacaaaacacaaataatgtgtaatcacttttatatggaatctaaagaaggttaactcatagacagagtgtagaatagtgattattggaggaagatggggaaagagaagatatgggtcaaagyatacaaaatttcagttagataggaggaataagctttagtgatctattgcatgaaacaatgaatataataataatgcacagtatatttcaaaattacttaaaatgtagattttaaatgttttacagaaaaatcatatatttgtattggtcaattagcttgattaaattatttcacaatttaaaaaatttgtgaaaacatgacattgtatcctataaatacatagagttattatttgtcaattaagataa

SEQ ID NO: 248481 - DNA, 645 bp, Homo sapiens
gacttgggtattgtgatctatgttttggtcatttccgtatcttccttagagggcaccctaagcccagtagtgctttggttctttcagactcttaggtaccaccttgtggtcatggataagatccagaagtattcgctggtttatcaagcagagactttttttcccttatgttctttcataaaattggagtctctctctctctgtgctgagctgcctgaagccgagggatgagtaacacaatcaccactgtggccaccactactgtgactgcagtgtggatgacctcaagccagcacagcactgggttttggccaaggcctgctgtaaccactacctggctaccacctatgattacttaaggctgtagggctctacaattaacaggtgatcaagccagccagtgttatgttattctctccagggtggctagtttcctgaaccccamgtgggtccagatatgctttctgggggccaggcctggaattggcaactttagaaagccacctggtcctctattctactgtggcttagttggcaccaaaatcacaagacagtatctttctcttccctttcttccctcccctttctccaggcagaggaatctctccctttgtccaccaccaccatggtctcatgaagattaca

SEQ ID NO: 248482 - DNA, 645 bp, Homo sapiens
gacttgggtattgtgatctatgttttggtcatttccgtatcttccttagagggcaccctaagcccagtagtgctttggttctttcagactcttaggtaccaccttgtggtcatggataagatccagaagtattcgctggtttatcaagcagagactttttttcccttatgttctttcataaaattggagtctctctctctctgtgctgagctgcctgaagccgagggatgagtaacacaatcaccactgtggccaccactactgtgactgcagtgtggatgacctcaagccagcacagcactgggttttggccaaggcctgctgtaaccactacctggctaccacctatgattacttaaggctgtagggctctacaattaacaggtgatcaagccagccagtgttatgttattctctccagggtggctagtttcctgaaccccacgtgggtccagatatgctttctgggggccaggcctggaattggcaactttagaaagccacctggtcctctattctactgtggcttagttggcaccaaaatcacaagacartatctttctcttccctttcttccctcccctttctccaggcagaggaatctctccctttgtccaccaccaccatggtctcatgaagattaca

SEQ ID NO: 248483 - DNA, 367 bp, Homo sapiens
ctgaggatgtggaaatttcccctgtggagttcagtgacagcttctgaagcctcacatcaatttcagtactgagagagatcctagaggaacagaatcttaatgctgaattttctgaattagttatatattttcttggattgactgttttcagtgataaagagggcaatagtccatggcatgatgtgccaatagagatatgtaaagtattgctatgggaaactyttaatcaaatattaacaaaacgcaaagtgattaactactacatgtttgataccttagaacatctttttgaaaataatgagtacaataagattggcttgttgctcctagattaccaggacaaattagggaaagaaaataaagaaaa

SEQ ID NO: 248484 - DNA, 612 bp, Homo sapiens
gcatattgtaatccttggagtaatcaagaaaaarcagtagaaaagtgttaataaagagaattattttcaactttcatttttaattctggggtacatgtgcaggtttgttacatggatatatgagacgattctgtgatttggggtatagatcttgtcacccaggtactaagcatagtacccaatgggtattctctcagaacttgcttgtttttgaagaattttaagtctcctttgctaaagaagcttaatttgatgggaaataaaatcttcattgaaaattcttttctttaaggatgttgaaaataggccccaatcttttctgtcttgtaaagtttctactaagcattctactgctggcttgaagaagtttcctttgtacatggcctgaaccttctctccagcctcctataagattttttaatttcacattgactttcttgaatctgatgactatgtgccttagtgacggttgtcttgtatagtatctagcagggattctctgtatttcttgaatttgcatgtacactgctctagtgacactagataaatttttatggactacgtcctcaatgatatttttcagggtgctcattatctcatctctctcaggaa

SEQ ID NO: 248485 - DNA, 612 bp, Homo sapiens
gcatattgtaatccttggagtaatcaagaaaaagcagtagaaaagtgttaataaagagaattattttcaactttcatttttaattctggggtacatgtgcaggtttgttacatggatatatgagacgattctgtgatttggggtatagatcttgtcacccaggtactaagcatagtacccaatgggtattctctcagaacttgcttgtttttgaagaattttaagtctcctttgctaaagaagcttaatttgatgggaaataaaatcttcattgaaaattcttttctttaaggatgttgaaaataggccccaatcttttctgtcttgtaaagtttctactaagcattctactgctggcttgaagaagtttcctttgtacatggcctgaaccttctctccagcctcctataagattttttaatttcacattgactttcttgaatctgatgactatgygccttagtgacggttgtcttgtatagtatctagcagggattctctgtatttcttgaatttgcatgtacactgctctagtgacactagataaatttttatggactacgtcctcaatgatatttttcagggtgctcattatctcatctctctcaggaa

SEQ ID NO: 248486 - DNA, 608 bp, Homo sapiens
accatacccaaaaaacatagtcatcagatatttaaagatcaacatgaaagaaaaaaaaataaaggcagctagcattcttaaagaaaagaaactccaactaggaattttatatcaagtcaaactaagcttcctaagtgaatgagaaataagatcctttatagagaagcaaatgctgaagaaatttgttaccaccaggactaccttacaaaaggtcctaaatagagtgctaaatatggaaaggaaagacttactggccaccacaaaaacagagtttagtgcatagaccattgacattataaagcaactacacaatgaagtctgcataataaccagctaaaaactcaatggcaggatcgaatccacacatatcaatattaaccttgaatgtaaatgcactaaacatyccaattaaaagacagagtggcaagttgaataaggaagcaagacctaaatgtatgctgtcctcaagagatccatcacacatgcaatgacacccatgggctcaaagaaaaggaatggtaaaaacaaacaaacaaacaaacaaacaaacaaacaaactaccaagcaaatggaatacagaaaaaagcagggattgttattcttatttc

SEQ ID NO: 248487 - DNA, 616 bp, Homo sapiens
gaattagaatactgatccagatttctacattacctatccctcttgttctttctgagatgcagctagggattgctggttggttcacaggagcaagcagggttagattaaaatgtacgtgaaaacttaaatacaactagtgagtttagaatttaatgataaatgtatgataagttttggaacacaatttctgtctctctccagtcctcatttttgttaaaaataaaatcatcataggactgagtggtttacaaaatagactttagttttatacttggcctgattatttgcataaagtgcagcaagaataattatttctacataggccttttggattggctttgatggaattctgttccacaaggaatctcagaaaagaacttttaaatctgagcacaaccatgggattgtatcctcaaacacctgtgagttgggtgattctctcctcttagggtcccaagataaatttggagctcctagacctgctataaggtggaattctttactgaccacaggttagaaaccctgtacagggactgtgtagatgagggtatgaggccagtctcccatkgggcttttatcagctgcaagttgagattgactccttaaagggaagcat

SEQ ID NO: 248488 - DNA, 489 bp, Homo sapiens
atatagccactcctgttctatttcaaattggggtttgcatgcaatacatgttttttccttttgctttcagcctatctacataattgtattataagtaattttttctagtagcaagaatatactgcatctttttcaaaggtccagtcttcttgcattggaaaataagaacgatctcaaattaaaaatttaagctctcatatgaagacactacaaaaagaagaaaaaataaatttgatgcaagcagaagaaagcaaataagaataagaaaaatatcttaatgaatctaaaaccaaaaacaataaagaaaatcaaagcaayagaatgatggcttttgtaaagattgacaaattaataaacttctcatgagactgacaaagatataaagagaaaggacaaaaaatagcaatatcataaatggaacagatcatataactgaagatcctaaagcattttacatcagtggtcccaaacctttttggcaccagagac

SEQ ID NO: 248489 - DNA, 604 bp, Homo sapiens
catggtattggcataaaaacagacacacaaacaatggaaaagaagagagaacacagaaataaatccatgtatttacagtaaaactgatttttgacaaaggcaacaagaatatacattgggaaaagaacagcatctttaataaatggtgctgggaaaactggatatccacatgtggaaaaatcaaactaaacctctccatctcaccatatacaaaaatcaaatcraaatttattaaagatttagatgtaataactgaaactatataactactagaagaaaacgtatgggaaattctttaggatattggtctgggcaaagatttcatgaataagacttcaaaagcacagaaaaaaacaaaaatagacaaattgaattattacaaataaaaagcttctgcacaacaaagtcaacaatctatagaatagacaactcatagaatgggaaaaaaaactatacatatgacaagaattaatatccaaaatctataagcaactctaacaactcaacaacaacaacaaaataatcctatgtaaaaataggcaaagaatttctcaaaagagacaaaaaaaatggccaaaaagtatatgaaaaaatgttcaacatc

SEQ ID NO: 248490 - DNA, 523 bp, Homo sapiens
gtaataataccatctgcaaataatggtaattttgactcctttacaatttttttctctttagttgttgttgttgttgttttctgtttcctagttgcatttccaatactccagaaaaaggttaaataataatagtggctacacacgcctttgttttatttgtgattctgagaacacttcaagtgcttcctcacattttgagatagcatatgttatgatattagacagtaaccatttattcttatcttaataaataatttttgatttttaaagaaataatttttattttgttaaaaagtttttcagcatctatgaagataaatacaattctttttatakatattagacattttaattaatattctaaagtttacctgcactttcattcctggaataagctctgctttgccatgatttataattatttgaatgtatttctggattctgtcacttaatattgtatttatgattttatttatttagaattttaaagtgatatttataagtaagattgacatataggttg

SEQ ID NO: 248491 - DNA, 573 bp, Homo sapiens
atatgcaagtatagttacataaatagatatgattactgaatctcctgtagaaattatttgcttgtatcctttaaaaattaattttagttgtacttacacacatatatttcttgcatatttgtacatttatgcacacacatagacaaatataatgcaaccatttgaaataatatctttgtctaasttatacaataatcagttgccataccattctttatggtgtgtccttgactgcttgcctgaactcatgaagttattacaatatattaccatccagaaatattataacacataaaataagtctgttgacggtttatagaggtaacttgaattcggaagaataaaatatttgatgtatacggatatctgctgcatatgacagtttctaacttagaaatggattaggctttaaaaatttgaaatccagataggaaactactggctgttttattcaacgataaatactacagtactaattatgtgctaggcattacttaaagcactttacaaattttactttatttggtctccataacaactctataaggtaaataatattcccattttattgac

SEQ ID NO: 248492 - DNA, 573 bp, Homo sapiens
atatgcaagtatagttacataaatagatatgattactgaatctcctgtagaaattatttgcttgtatcctttaaaaattaattttagttgtacttacacacatatatttcttgcatatttgtacatttatgcacacacatagacaaatataatgcaaccatttgaaataatatctttgtctaacttatacaataatcagttgccataccattcttkatggtgtgtccttgactgcttgcctgaactcatgaagttattacaatatattaccatccagaaatattataacacataaaataagtctgttgacggtttatagaggtaacttgaattcggaagaataaaatatttgatgtatacggatatctgctgcatatgacagtttctaacttagaaatggattaggctttaaaaatttgaaatccagataggaaactactggctgttttattcaacgataaatactacagtactaattatgtgctaggcattacttaaagcactttacaaattttactttatttggtctccataacaactctataaggtaaataatattcccattttattgac

SEQ ID NO: 248493 - DNA, 560 bp, Homo sapiens
tgaactcagctatgcatttaagatgatttttgttatttttactccgtcatttatatgttcaggtgattcgcaaccagaattttctcactgttggaagtagaatttcaaggaaaactttttaagtactactgtactttatgtatgtatttttatacatacatatgtttatacatcttgcagcaacatttagtcacayaatccagtttgctcaacattcacatgtgttgtgacactaacttggataattggtttatagttaagatgtcaccgcaagtttttttaaaaaaatagttttagaaactgttttagagatgttcagattgtctgtatgcctcaaggtagtaattattaaactttttggtctttgtactcctttacattcttgaattatttaagatcccaaatagatttttatgtaggttacatttatcaattattgctgtattagaaattaaaatagataaattctaaaaacattttgatttatttaaaattaataaaacatcaaatgttagcataaaggacatgcattcataatttttacaaaaattagctatatt

SEQ ID NO: 248494 - DNA, 543 bp, Homo sapiens
attgcttctcatctcttgattccgtctgcttgtacgtggaaacagacacaattatgagaacacagcagagaggtaactaactccatactttctgaaagcaggactgaaatgagaactgcatggaagtggaaggtgcgaaaaagagcatggagagggaagggcttaggaaagtracctcaaagctgtttaccaacttgtgctcaaccttaagctttgtatgtgtggatatgactctaaaatttctttgagaacagagctattacaatagcaatgcaaaggccttgaaaattgacaatttaaccaagacacgcagaagccttgtaagtttggaacttatagcatgaaccaaactaggttgattttatgctaaaaaaattaacattcttcataagatttaaataagtctcctaatgttataggtaaaatgtctagaacacaattcaaaattattttacatataaaaacatgaaaatctcaatttgcatgggaaaagacacccaacagatgccaattctgagatggcacagattttggaactatctt

SEQ ID NO: 248495 - DNA, 510 bp, Homo sapiens
tgtgcttttttctatacataattagtttcagtttgtctgtaggagaggtctgtggcattactaattaagaatctaattcagcaaaacatatgtcttcaattctaaattaatttactctggtacatattgaattaatgagaattgccayatatacatatttctttgggtagctgttgaattaaactgaagtgattcatatccatgtatggatttgaagtctacatgtgggataagttgaataaataataaatcacagataaattgcaagatcaaaagaaagtaacgttgtaactctgtattgtgtgtgtggtacgattttatctctctggttttacttcttttgtgtaagagaccctataaatactcacagcaaagaaaatacaccgagattttatgttgaattgaaaatattaattattcagagataaagtacttgtgcagggctttgtgagatagaacaagaatagtgtaaatttgtacttgtaaataatgtactttctatagagattt

SEQ ID NO: 248496 - DNA, 385 bp, Homo sapiens
tagatgtgagttctactgggagttggtatcttcatggaactcagtgaaagggttctttgtattttctcaagattttaagaatttggttgggggagggcgggtggatttaagattagcttaggttaattttaacctagggtaagattaggttgtgaggggcytagtaccagtgagtgaagagaataagggagatttgacagcatcaaggccaactttctatatggagaagcctggattataaatggcaatatcagcaccaaaacagttgattccacttactctgatgctttgtcatttacctcttctccttctgtccttattctgagaacacaaaagcagtgctctattggtgctagctaccatctggtgacatatatagtgatct

SEQ ID NO: 248497 - DNA, 592 bp, Homo sapiens
atcccatccagatgcactaagtcagagttactgaggccgggacccaagagaatcagcattttaaacatggaccccgaaatgtgatttttgtgcatatttagagaaacatctgagtttatagagatctttcatttctatccctatgtaccatactccttcctgcctctaagtctcctggttttcttcaaaactttctcttcttttcctttaaccttctcatcctccaagacttagtgccttagggaagtccttctgaaccccctggatgctactttccctaagcctttccaagctattgctttgtagtgctaccattgcattttgtgcatgtggtgttacacactagggagcctagtaaaatgctggatataaagtttcttcacgttaattccataaatattatttactgcatgccataccctggacacataaatatgagtaacgtcagcytctaaagacaaaaatatgggaagacacaatcttctttgtgaaacctaagagagtaagatgacatttcaatgataggaaagataaacaatgtttgtaaacaccttgaggaagaatttgtttccactaattattattatttgga

SEQ ID NO: 248498 - DNA, 553 bp, Homo sapiens
cttccaaaaccataaaatacttaagaagaattttagtaaaatatgtgtacaacctctaaaatgagaactatacagcactcttatgagaaattaaatatctaaataaagattaattcattggaatactaaatattattaaatgtcagttttctccaaattgatttatagattcaatatactcccaatgaaacaaccttttcaggcatgttttgtagaaattgacaagctgactccagtactaatttgtaaaggcagaggacctagaagaatcaaaacagttttgaaaaataagaacaaattgaggccaggtgtggtggctcacacctgtaatcccagcactttgggtggctgaggtgggcagactgcctgaggccagggattcaagaccagcctgsctaacatgacagaatctcatctctactaagattacaaaaattagctgggcatggtggtgcatgcctgtagtcccagctacctgggaggctgagccacgagaattgcttgaatctgggaggcagaggttgcagtgagccaagattgcgctactgcacgc

SEQ ID NO: 248499 - DNA, 531 bp, Homo sapiens
atgccaatctctaccccagaggacctgcccttgttaggggagggtgttggaagggaagaggcctccaaggaagccactgcttacatgaaggaaatgagcaaagactggggctaggaagggggagggatttatcaccattgatatgcctgcatattcagtagcttttggacttaacctttcaagtctgagcaggggaggtgctggggtagggcaagcacaggaggcaggttgattgtgagtgtgagagtgggctggaaggaagggtaatggggtgggggcatcagggatattggttttgcctgggcaaagtggctgaagccacagtatagacactgtcaccaaggcgtcaccttcaggagagttccatgctatgccagtgggtgcccagaacagcctagcagagggaaggggtgggagaaagtccagactggaactcccctwcccctcctctcagatctgtgatttgatctggttgaagccactgctattggacaaatcactctgacctgcgagagaagctgcaggcttgtt

SEQ ID NO: 248500 - DNA, 622 bp, Homo sapiens
tgctttcaatgccgattgtgaacaagaaggaagaaattgttggagtggccacattttacaatcgtaaagatgggaagccctttgatgaaatggatgagacgctcatggaggtatggcttgctaggaggccttttgctgttgggattcagagtcagcttgctgggggaggctgggtgtcactgcgctatcacatggggcagcaacctggttgctataaccctgactctgcctcatcaaccactttcttcactctcactgctgtactgcactgatgtgctgtcagagaaatccacatttcctttttaaaaaatgtaattaagctgagcatggtggctctcacctgtaatcccagcactttgagaggttgaggcagatgaatcacttgagcccaggaactcaagaccagcctggccaacagggcaatatcctatttctacaaaaagttaaaaaaagattagccaggcatggtagcgcatayctgtggtcctagttactcaggagactgaagcaagaggatcacttgagcccaagaggtcaaagctgcagtgagccatgattgtgccattgcaatccatcctgggtgacagagcaagaccctgtctcaaaaaaataaaaaataaaa

SEQ ID NO: 248501 - DNA, 507 bp, Homo sapiens
ttttctactcttcaaaccagttatactgatgatgtatagtgtacttaaccttgtgaatcagatatttgacagtaaattaaactagccattataccccactttccaaatacacagaggtgaagtgaagctatcgggataatctattattgggtttggttttttatatggtttggctgggtccccatccaaatctcatcttgaattatagttcccataattcccacgtgttgygggagggacccagtgggaggcacccagtgggaggcagttgaatcatgggggtggtttcttccatattgttctcatggtagtaaataaatctcacaagatctgatggttttataaggggaaatccctttcacttggttctcattctctctcttgcctgctgccatgtaagacgtgccttttgccttccgccatgattgtgaggcctccccagccatgtggaactgtgagtccattaaacctctttttccgtataaattaccaagtctcaggtatgtc

SEQ ID NO: 248502 - DNA, 507 bp, Homo sapiens
ttttctactcttcaaaccagttatactgatgatgtatagtgtacttaaccttgtgaatcagatatttgacagtaaattaaactagccattataccccactttccaaatacacagaggtgaagtgaagctatcgggataatctattattgggtttggttttttatatggtttggctgggtccccatccaaatctcatcttgaattatagttcccataattcccacgtgttgcgggagggacccagtgggaggcacccagtgggaggcagttgaatcatgggggtggtttcttccatattgttctcatggtagtaaataaatctcacaagatctgatggttttataaggggaaatccctttcacttggttctcattctctctcttgcctgctgccatgtaagacgtgccttttgccttccgccatgattgtgaggcctccccagccatgtggaactgtgagtccattaaacctctttttccktataaattaccaagtctcaggtatgtc

SEQ ID NO: 248503 - DNA, 575 bp, Homo sapiens
aactggaggcattctttagagttgaaactgattccaaaaacctgagttctcacctctgggtccctcttaaactcctctacccttcaccttctcagatctcctcctgggccgagattcccatgccacagccttccctaaggaggggctgtagcacgtgakagctcagagacaccgcgggcagaaagaaggcacagggctgtggccagatgtgccagcaggttggtgtttaggaaaagaggaggctaagggaaagcactgttttcccagggagcaggcgccagcccggcttcctagattcctcttccctaagtccctcctggcaacccttcagtttagcaccctctttattctcagatcctcccactctctagatttcatcccttccatccctgggcccaaactctttttcaaaagaagtgccagaaagcccagctctgtctgcctctcccccgttcctacaaactctttccctctattttcctgaacccccagcctgagaaccgcatcctctgccctggcctctccacaggctgcaccttattctctcctggccattgccttcaccactgacatgc

SEQ ID NO: 248504 - DNA, 517 bp, Homo sapiens
attccctctgaaaacaactttaatcttttattcctacatttactctaacgaagagtttagtctattctctccagaccaaataatcagaaattgaaggtactgtcttcacaacacaggcccaaaattccactatgttttataagtaaagttagattccttcctggtccctaaattatgcagataacagtctcaaccctcagttttggctagtcattgggaagtaagcctgatttcaagtagaggagtttagaccacctttcaccaaaaaagactacacttccatttcactctgtttgctggtccatagagaagagaccagaaaaaggctaggttttcccctgctaacctgtgactgcctgctaaccaaatcagcccgagatttattatctgccctaatcctcctgctcagttctatgagggttcatgttccytcttatgcaagtgctggggggtagggaagggaagataatgttggaaatgcaagagtagcaatctttactatctgtaatagtatatg

SEQ ID NO: 248505 - DNA, 542 bp, Homo sapiens
cgttgtttaaattcatgctatttatttttaattaaggctctgctttcacttcggggaaaaaaaaagactattttccgtattttatgttgcaagtgtacacaaagctttgattacagtagcaatactccccaaaatggagttagactaagctgggtcctgaacccagccctatcgcttcttcaatatgtgtcttgcagaaattaatgtcactgacctcgggcatctttatctataaaagagtactagtcatatctacttcacagggtttttgttggaaagaaaatgagatagcaattgtgaagttctggaaacacagagtagggacttcatgtgtgttaatgttttttacctcttttcttcycttgccctcatacctggagcatggacggtcccattctttcaaagggcaagcttacctggatagctaagagaacctactcattttgcaaatggtgaaactgaggccatgcagagacatttccagagaaacatcccacacagacatggacaatgacagtttcctcttatcctcccgaaggagc

SEQ ID NO: 248506 - DNA, 542 bp, Homo sapiens
cgttgtttaaattcatgctatttatttttaattaaggctctgctttcacttcggggaaaaaaaaagactattttccgtattttatgttgcaagtgtacacaaagctttgattacagtagcaatactccccaaaatggagttagactaagctgggtcctgaacccagccctatcgcttcttcaatatgtgtcttgcagaaattaatgtcactgacctcgggcatctttatctataaaagagtactagtcatatctacttcacagggtttttgttggaaagaaaatgagatagcaattgtgaagttctggaaacacagagtagggacttcatgtgtgttaatgttttttacctcttttcttcccttgccctcatacctggagcatggacggtcccattctttcaaagggcaagcttacytggatagctaagagaacctactcattttgcaaatggtgaaactgaggccatgcagagacatttccagagaaacatcccacacagacatggacaatgacagtttcctcttatcctcccgaaggagc

SEQ ID NO: 248507 - DNA, 636 bp, Homo sapiens
atgcagaagaatgaaactaaacccctacctttcactggatacaaaaattaattcaagacggattagattaaagatttaaatgtaagacctcaaactataaaaattccagaataaaatctaggaaatgccattctagacattggcctcagcaaataatttattactaagtcctgaaaagcaattgcagcaaaaagaaaaattgccaagtgggacctaattaaacaatagagtttttgaaaataaaatacttaggaatatacttatgcaagcaggtgaaagacttctgcaagaaaaactrcaaaacactgctgaaatagctcataggcaacacaaacaaatggaaacacatcccatgctcatgggtagctagaatcaatattgtcaaaacggccatactaccaagagtgatccacaaatttaatgcaattcccatcaaaataccatcatcatttttctcagaactagaaaaaaaatcctaaaattcatatgaaaccaaaaaagaccctgcatagccaaagcaagactaagcaaaaagaacaaatctggaggcatcacattacctgacttcaaactatagtataaggctatagtcactaaaacagcatggtattggtataaaaataggcacatacacca

SEQ ID NO: 248508 - DNA, 636 bp, Homo sapiens
atgcagaagaatgaaactaaacccctacctttcactggatacaaaaattaattcaagacggattagattaaagatttaaatgtaagacctcaaactataaaaattccagaataaaatctaggaaatgccattctagacattggcctcagcaaataatttattactaagtcctgaaaagcaattgcagcaaaaagaaaaattgccaagtgggacctaattaaacaatagagtttttgaaaataaaatacttaggaatatacttatgcaagcaggtgaaagacttctgcaagaaaaactgcaaaacactgctgaaatagctcataggcaacacaaacaaatggaaacacatcccatgctcatgggtagctagaatcaatattgtcaaaasggccatactaccaagagtgatccacaaatttaatgcaattcccatcaaaataccatcatcatttttctcagaactagaaaaaaaatcctaaaattcatatgaaaccaaaaaagaccctgcatagccaaagcaagactaagcaaaaagaacaaatctggaggcatcacattacctgacttcaaactatagtataaggctatagtcactaaaacagcatggtattggtataaaaataggcacatacacca

SEQ ID NO: 248509 - DNA, 615 bp, Homo sapiens
ctgaaaagcaattgcagcaaaaagaaaaattgccaagtgggacctaattaaacaatagagtttttgaaaataaaatacttaggaatatacttatgcaagcaggtgaaagacttctgcaagaaaaactgcaaaacactgctgaaatagctcataggcaacacaaacaaatggaaacacatcccatgctcatgggtagctagaatcaatattgtcaaaacggccatactaccaagagtgatccacaaatttaatgcaattcccatcaaaataccatcatcatttttctcagaactagaaaaaaaatcctaaaattcatatgaaaccaaaaaagaccctgcatagccaaagcaagactaagcaaaaagaacaaatctggaggcatcacattacctgacttcaaactatagtataaggctatagtcactaaaacagcatggtattggtataaaaataggcacatacaccaatggaacagaatagagaacccagaaaaaaagccaaacacttacagccaactgatyttcaacaaagcaaacaaaaacataaaatgggaaaagaacaccctattcaacaaatggtcctgggataattggcaagccacatgtagaagaatga

SEQ ID NO: 248510 - DNA, 616 bp, Homo sapiens
gggaggctgaggcacaagaatcgcttgaacccgggaggcagaggttgcaatgagccgagatcctaccacttcactccagcctgagggacagagcaagacattatctcaaaaacaaaaacaaagaatatagtgttgaatcagcacaaagtacacactcaataaatgttagtatcttgccttgcttgatttctcctttttaccctctggctaaatagcttttgtgttttaaagscctcagagctccccttatcaacaattccagactacaagtatcccacttaggtttttcttcaaaaagatagcactagaagaaatctctagtaaaccgtataaagtgcttgccccagtagctggacaaagtagtagatcaacaaatttttattactgtatgtctattcgtctattctaatctttccattttccccaagaaaatgtcagcaagaagaaacagaatacatttggaaactgtgtcctttttttttttttttggtaattatttggcaacagttatgtggacacatcattcagttcccgaatcaatttgaatcaacagctaggttccacacaaaaccttcatttttcagatgatgtatttgaagcacagaaaggtaaaagc

SEQ ID NO: 248511 - DNA, 616 bp, Homo sapiens
gggaggctgaggcacaagaatcgcttgaacccgggaggcagaggttgcaatgagccgagatcctaccacttcactccagcctgagggacagagcaagacattatctcaaaaacaaaaacaaagaatatagtgttgaatcagcacaaagtacacactcaataaatgttagtatcttgccttgcttgatttctcctttttaccctctggctaaatagcttttgtgttttaaagccctcagagctccccttatcaacaattccagactacaagtatcccacttaggtttttcttcaaaaagatagyactagaagaaatctctagtaaaccgtataaagtgcttgccccagtagctggacaaagtagtagatcaacaaatttttattactgtatgtctattcgtctattctaatctttccattttccccaagaaaatgtcagcaagaagaaacagaatacatttggaaactgtgtcctttttttttttttttggtaattatttggcaacagttatgtggacacatcattcagttcccgaatcaatttgaatcaacagctaggttccacacaaaaccttcatttttcagatgatgtatttgaagcacagaaaggtaaaagc

SEQ ID NO: 248512 - DNA, 616 bp, Homo sapiens
gggaggctgaggcacaagaatcgcttgaacccgggaggcagaggttgcaatgagccgagatcctaccacttcactccagcctgagggacagagcaagacattatctcaaaaacaaaaacaaagaatatagtgttgaatcagcacaaagtacacactcaataaatgttagtatcttgccttgcttgatttctcctttttaccctctggctaaatagcttttgtgttttaaagccctcagagctccccttatcaacaattccagactacaagtatcccacttaggtttttcttcaaaaagatagcactagaagaaatctctagtaaaccgtataaagygcttgccccagtagctggacaaagtagtagatcaacaaatttttattactgtatgtctattcgtctattctaatctttccattttccccaagaaaatgtcagcaagaagaaacagaatacatttggaaactgtgtcctttttttttttttttggtaattatttggcaacagttatgtggacacatcattcagttcccgaatcaatttgaatcaacagctaggttccacacaaaaccttcatttttcagatgatgtatttgaagcacagaaaggtaaaagc

SEQ ID NO: 248513 - DNA, 508 bp, Homo sapiens
tttttgtttgtttccctactcttcctgacgctttccttactgtgccgttcaccaaagacagagctgctctttcctacctctcaatctttgcacctgctgttcccctccctggaatgctcttcctcatctcttcaactgactggcttattctcatccctcagttattggcttatgagtcacttcctctgcaggggcatcctggatcayccatcgtgaacccaaacaacttattatcttacaccctggcggctcatttacttgtgcccatcacagtgtgaatgaccagtgctgtgttctacataagctaaataagacaaggaagcttaactaactgactcactgctatatgccaagcattgtgccagcaacttaaaaaaggctcaacaaatatttattgaaaaaaacgagcaaaagaagctaaagcagagaccaagaatgaattttttacctagtattaggaataaaggagctgactcttacttgtcttatgttagaatcagaaaatatg

SEQ ID NO: 248514 - DNA, 508 bp, Homo sapiens
tttttgtttgtttccctactcttcctgacgctttccttactgtgccgttcaccaaagacagagctgctctttcctacctctcaatctttgcacctgctgttcccctccctggaatgctcttcctcatctcttcaactgactggcttattctcatccctcagttattggcttatgagtcacttcctctgcaggggcatcctggatcacccatcgtgaacccaaacaacttattatcttacaccctggcggctcatttacttgtgcccatcacagtgtgaatgaccagtgctgtgttctacataagctaaataagacaaggaagcttaactaactgaytcactgctatatgccaagcattgtgccagcaacttaaaaaaggctcaacaaatatttattgaaaaaaacgagcaaaagaagctaaagcagagaccaagaatgaattttttacctagtattaggaataaaggagctgactcttacttgtcttatgttagaatcagaaaatatg

SEQ ID NO: 248515 - DNA, 508 bp, Homo sapiens
tttttgtttgtttccctactcttcctgacgctttccttactgtgccgttcaccaaagacagagctgctctttcctacctctcaatctttgcacctgctgttcccctccctggaatgctcttcctcatctcttcaactgactggcttattctcatccctcagttattggcttatgagtcacttcctctgcaggggcatcctggatcacccatcgtgaacccaaacaacttattatcttacaccctggcggctcatttacttgtgcccatcacagtgtgaatgaccagtgctgtgttctacataagctaaataagacaaggaagcttaactaactgactcactgctatatgccaagcattgtgccagcaacttaaaaaaggctcaacaaatatttattgaaaaaaacgagcaaaagaagctaaagcagagaccaagaatgaatttttyacctagtattaggaataaaggagctgactcttacttgtcttatgttagaatcagaaaatatg

SEQ ID NO: 248516 - DNA, 594 bp, Homo sapiens
tctgcattcaaatcccagctccaccacagccagctgtgtaacctaggtcgagttacccaacattaytattcctcaattttctcttcagttagttgaaaagaacaacagcatgccaaatttttatgaggattagagctaccatataaaaagaatctggtacaaagtatggatgcatacaagttctttatcatttcagaagaaataggatctcttaggcattttcctcacggtgaacaattattataggcatctcaactttattgaccttggcttttccacttgcccaaacataacaaatttactaccctaaaagaattagctttgaccatgcctgtccccaagtatctaatgaaaatattggtgtaggtacaaaataaatgctcttgttctttcctctcttccacctcctctctctcactctgtctctctctctctctctccctctctctgtctcatacacatacacacacacacacacacacagtgtcttagtgcaagtagaaccatcaatgagattaaaatgtttcactagatggaaacaagagaaaaaatacaaactctaaagaaagatgctgcattgctatctttctaatg

SEQ ID NO: 248517 - DNA, 572 bp, Homo sapiens
ctagtttttctgtatctttggaatccccgtggcccagagaagtgatccattcagtctgttggggggcttagtattttatttttggtttacagcttgaagagtccactgagattatttagccactgcagaaacttctggaatatctgcctagtttttcctcctcttttctgrgaattaacttcccttaaatactggagtagacttctcagccatgtttgtaattcatgacccctctctatttcgtcacaggtatgaattcctggatcaacatgataaatcaggttagtcttgaacttcaaacatgctagttggcctcaggggttaaactagaggctagagaagccatatttaatcaaattcgtcacaaagcaggggaaggaagtatgggagaaaaagaaaatagacttaaatcaagtttagccaaaaactgtctctttacatattttaagtttggcctaaaggtttttctgtacattgtaaactataacaagtaaaggtgtaaacagaccgtagcctacactcgtgctaatcaccaagttttggccaatcaaatatagccaactgtttgaata

SEQ ID NO: 248518 - DNA, 546 bp, Homo sapiens
aaactgtctctttacatattttaagtttggcctaaaggtttttctgtacattgtaaactataacaagtaaaggtgtaaacagaccgtagcctacactcgtgctaatcaccaagttttggccaatcaaatatagccaactgtttgaatagtgttcaaataaggcaaaagccaacctgtaaccaatccagctgtttctgaatttcacttccattttctgtgcataaatcattcattactcaattaaactcctttaaatttaattcagctgaagtttttcttttatcaagacaaacagaaaaaataagaagagaaagtacatggaatgagaaagaggtcagaagagagaaaaaaaataaaatgtcttccttgcattctgacaattttctactcccaagtatcagtaattcatgagactcaatcactttctgctcttggtttacatgtgatgytcttaattattttgtaatccacttcagtcactcttaagttaaagtttttgtttatggcaactgtggaattcaataattcaaacttaaaattaattca

SEQ ID NO: 248519 - DNA, 595 bp, Homo sapiens
gcaactgagttaaatttagaaaacacatacctaggctaggaactactaagcattttcttttttctttcagagacaaggccctgctctgttgcccagtttgcagtgcagtggtgagatcattgctcacagcagcctagaactcctgggctcaagggatccttcttccttaaccttctgactagccaggtatgattacaggctctcgccaccacacccagctctgtgtgtgtgtgtgtgtgtgtgtgtgtgtgtgtgtgtgtgtgtgtgtgtgtagatagggccttgctatgttgtccrggctgatctcaaatttctggcctcaagcaatcttcatgccttggcttcccaaagcacagggattacacacacaaaccactacacccagccaatattttctttaagaaatacttgtacatgtgcaaaacaatgttcaaatatgttcaccacagcattgttataatagagcagggtcgccaacctttttggcacccgggactcgtttaatagaagacatgttttttcatggactaggggtgggagatggtttcaggatgattcaagtgtaatacatttatcgtgcactttatttccatta

SEQ ID NO: 248520 - DNA, 595 bp, Homo sapiens
gcaactgagttaaatttagaaaacacatacctaggctaggaactactaagcattttcttttttctttcagagacaaggccctgctctgttgcccagtttgcagtgcagtggtgagatcattgctcacagcagcctagaactcctgggctcaagggatccttcttccttaaccttctgactagccaggtatgattacaggctctcgccaccacacccagctctgtgtgtgtgtgtgtgtgtgtgtgtgtgtgtgtgtgtgtgtgtgtgtgtgtagatagggccttgctatgttgtccgggctgatctcaaatttctggcctcaagcaatcttcatgccttggcttcccaaagcacagggattacacacacaaaccactacacccagccaatattttctttaagaaatacttgtacatgtgcaaaasaatgttcaaatatgttcaccacagcattgttataatagagcagggtcgccaacctttttggcacccgggactcgtttaatagaagacatgttttttcatggactaggggtgggagatggtttcaggatgattcaagtgtaatacatttatcgtgcactttatttccatta

SEQ ID NO: 248521 - DNA, 574 bp, Homo sapiens
agagctagtctattttgacagatagcatttctcatcagagtctcttgcctggcaagagaacagtcaaggcttgaccggttttattagtaatagtttttaaaacagcttggaaccatatgattcagctgagcatgtagatggaggttcgatatccccatgagccatcttgtgcccaagtggcaggtccatagtattatatgattttttcagggggccaytcatcatctttccaatcacctaaggctatgcttcgtttttcgcaggaagcatagactgggaagccagaagtttacctgtttttataggcagtaagaagaaagatggtttaatggtgccaattacgcagctacctgtccactgatcaggcagcttagcataagctctgtgtccacatatccagtataacctggtgggggccgttccagtcccagtggaattctgggtgggcccaaacagtctgcaactttggaaatttactgaatggatttctttctgtgtaattggaactccaccatgtaactgtttttgtggtaccattatatagcttttgcccaagacaactaagccaccctac

SEQ ID NO: 248522 - DNA, 605 bp, Homo sapiens
tcctacttctgtccctcatggccagtttttctcctactcatcagtcactcctatttactctcccactgaagtttccacctatcagtccctccccactcaaggcagatgatttttagaccaaaaaaaatccccttccagcctcacaggcccatgctattctgtcgtcatttcataaccccttccatgtaagttacaagcygctagcccgcctcttaaaacctctcatttcctttccatggtaaaaatctatcctcaaaaaaatcacttctcagtgttccatctgctattctactactcctcagggatttctcaggccccctcccttccctacacattaagcttgaggagttgcccctgcccaggactggcaaattgactttactcacatgccccgagtcaggaaactaaaatacctcttggtctggaaagacacattcactggataggtagaggcctttcccacagggtctgagaaggccaccatggtcatttctttccttctgtcagacataattcatcttcttgctcagccccaacctcgtcccagacaccagccctctaagcgactctcttccagtcctccagcaggctagacaggaaattcg

SEQ ID NO: 248523 - DNA, 605 bp, Homo sapiens
tcctacttctgtccctcatggccagtttttctcctactcatcagtcactcctatttactctcccactgaagtttccacctatcagtccctccccactcaaggcagatgatttttagaccaaaaaaaatccccttccagcctcacaggcccatgctattctgtcgtcatttcataaccccttccatgtaagttacaagctgctagcccgcctcttaaaacctctcatttcctttccatggtaaaaatctatcctcaaaaaaatcacttctcagtgttccatctgctattctactactcctcagggatttctcaggccccctcccttccctacacattaagcttgaggagttgcccctgcccaggactggcaaattgactttactcacatgccccgagtcaggaaactaaaatacctcttggtctggaaagacacwttcactggataggtagaggcctttcccacagggtctgagaaggccaccatggtcatttctttccttctgtcagacataattcatcttcttgctcagccccaacctcgtcccagacaccagccctctaagcgactctcttccagtcctccagcaggctagacaggaaattcg

SEQ ID NO: 248524 - DNA, 499 bp, Homo sapiens
ggactaagatgtgttttccatcctcaggagccttgcactatggttaatattgacgaagccaacttatttaaaacacagagcaaaatgacagacaagatcgagttgagtctaaattatatagaatggtttrtaagtgcaataaaattccaggagaaaaactgattcacatgggctaaaggagtcaggcaagagcacaggcataaactagaacttgaagaatgaataatatttagatatacaggaagagggtagtgggagccttagaaactgggatgggcagaggcaaaggctagtggccaaagacagtaatcatattagcctggcaccacgcatgggtatgtcagagaccaaagaaagagacaagtgctagaatttaaaagaaaaaaaatagcatagcaaaggttaagcatagatagagacttttggagtcagaatatttggatctagatcaagttctcaccctttgctagctttgtgacgttggacaattcattaaact

SEQ ID NO: 248525 - DNA, 409 bp, Homo sapiens
ttaaggagcatgaaggacattgctcttagcaataggaggcctgagggcgtctgagtgtggagtgacgggtttatgtctcagacagctcaccccttgtgaagatgggtttggtgtggggccacccagaggccaaagccctggtgggagctgggggatgacccaagtcagaggggccgagggtgctgggactttggctttggagcaggggtgggcagaacccggtgactggctgtcgagggatgtattttagacatccacctggttggtaatmgatgcacatacttttacctggacgactcaggatttgaaactcaaggctccggagcacgtgcttgcagaatctccatccctccctccaccccaccccaagcccttgcggcaggcctcacctgccgcctaagtttccatt

SEQ ID NO: 248526 - DNA, 409 bp, Homo sapiens
ttaaggagcatgaaggacattgctcttagcaataggaggcctgagggcgtctgagtgtggagtgacgggtttatgtctcagacagctcaccccttgtgaagatgggtttggtgtggggccacccagaggccaaagccctggtgggagctgggggatgacccaagtcagaggggccgagggtgctgggactttggctttggagcaggggtgggcagaacccggtgactggctgtcgagggatgtattttagacatccacctggttggtaatagatgcacatacttttacctggacgactcaggatttgaaactcaaggctccggagcrcgtgcttgcagaatctccatccctccctccaccccaccccaagcccttgcggcaggcctcacctgccgcctaagtttccatt

SEQ ID NO: 248527 - DNA, 395 bp, Homo sapiens
gatagcaactgggaaccaaaatgacaattatctttcagagcttggtaaggttgggtaagagcatatggttcattcttaaggcctaagaaagacactccctccstacctgcccctcttccccacacatctcagcttctcctcaaaatctggactctctctattccatcccatagagtggaaacaagaaatgcaaaaggagcaccatccatgggcatggtctttttatggttgatctggccatcgataaacatggccaaccaatactttaactgaccaaacatgaatggcaagccattcttccctaaaggatgtgggagaacgagagagagggccaatagggaagtaggcagagaggcagaagcatttcttcctctataacatattcaccctatttc

SEQ ID NO: 248528 - DNA, 395 bp, Homo sapiens
gatagcaactgggaaccaaaatgacaattatctttcagagcttggtaaggttgggtaagagcatatggttcattcttaaggcctaagaaagacactccctccctacctgcccctcttccccacacatctcagcttctcctcaaaatctggactctctctattccawcccatagagtggaaacaagaaatgcaaaaggagcaccatccatgggcatggtctttttatggttgatctggccatcgataaacatggccaaccaatactttaactgaccaaacatgaatggcaagccattcttccctaaaggatgtgggagaacgagagagagggccaatagggaagtaggcagagaggcagaagcatttcttcctctataacatattcaccctatttc

SEQ ID NO: 248529 - DNA, 645 bp, Homo sapiens
gttcccagtaacactgagaatttagcctgaattcgcaggctgcaagcacaaaggttttgttctgttttttaaggtttcccatttcctctttaacatttatatgcattttgccataaaatgtaaatctccattttaaaatatgttktacattactggccaattataataaaattatgttgccaccatattagttaggctacaggcaaacgtgctgtgtatagcctaaactgaccccaaatttaataactcaaacaagatattttatttctgtcaagggcatggagacagctgtgttctataagtatattcagggacccaggttccttccatcttgttgctccctacctcttaagcattagcattcttgtctgctcaaagctgactcagctccaaatctgggtttcaatcacagaaagaggaagacaactggagatgaatgatcacttccattcacaattcattagcaacacttagttccacggctgcagtagctgcaaaagaggatagaaaatgtaatttcttctacttctggcaaaaagtagaagtgatgctattgaaatatatacaacgtccatcttacgactttttgtgttccctaccaactactttatttctctagggatgctccggtttagagagcatagt

SEQ ID NO: 248530 - DNA, 645 bp, Homo sapiens
gttcccagtaacactgagaatttagcctgaattcgcaggctgcaagcacaaaggttttgttctgttttttaaggtttcccatttcctctttaacatttatatgcattttgccataaaatgtaaatctccattttaaaatatgttgtacattactggccaattataataaaattatgttgccaccatattagttaggctacaggcaaacgtgctgtgtatagcctaaactgaccccaaatttaataactcaaacaagatattttatttctgtcaagggcatggagacagctgtgttctataagtatatycagggacccaggttccttccatcttgttgctccctacctcttaagcattagcattcttgtctgctcaaagctgactcagctccaaatctgggtttcaatcacagaaagaggaagacaactggagatgaatgatcacttccattcacaattcattagcaacacttagttccacggctgcagtagctgcaaaagaggatagaaaatgtaatttcttctacttctggcaaaaagtagaagtgatgctattgaaatatatacaacgtccatcttacgactttttgtgttccctaccaactactttatttctctagggatgctccggtttagagagcatagt

SEQ ID NO: 248531 - DNA, 454 bp, Homo sapiens
tatacttaaaagtaatatgactacattgcttcaagtatattcacacrtttcaatcattcaaactagttccaccattttattccgtacttaaacatttttaatctatctatttaattcactaattcatctgaaaacatgtgaagggtattgtgcttggtatcatgaggctacaaagataaataaggcagggaatttgccttcaaggagatttccatgagagaggtgctaaaccaggtagattagaataaatgaatactctccaaagtagaaagtgattaaatagtatacgaaagacacaattaagtgctaggggcttctgagggagggaggttgctttgagctatggatgagagaggactttggaaaggaaattctatctgggaaggcagggcagtggggatgctggtgaagaaggcatagcggatggagtgaacagcaggaggaaagagcatcc

SEQ ID NO: 248532 - DNA, 454 bp, Homo sapiens
tatacttaaaagtaatatgactacattgcttcaagtatattcacacatttcaatcattcaaactagttccaccattttattccgtacttaaacatttttaatctatctatttaattcactaattcatctgaaaacatgtgaagggtattgkgcttggtatcatgaggctacaaagataaataaggcagggaatttgccttcaaggagatttccatgagagaggtgctaaaccaggtagattagaataaatgaatactctccaaagtagaaagtgattaaatagtatacgaaagacacaattaagtgctaggggcttctgagggagggaggttgctttgagctatggatgagagaggactttggaaaggaaattctatctgggaaggcagggcagtggggatgctggtgaagaaggcatagcggatggagtgaacagcaggaggaaagagcatcc

SEQ ID NO: 248533 - DNA, 454 bp, Homo sapiens
tatacttaaaagtaatatgactacattgcttcaagtatattcacacatttcaatcattcaaactagttccaccattttattccgtacttaaacatttttaatctatctatttaattcactaattcatctgaaaacatgtgaagggtattgtgcttggtatcatgaggctacaaagataaataaggcagggaatttgccttcaaggagatttccatgagagaggtgctaaaccaggtagattagaataaatgaatactctccaaagtagaaagtgattaaatagtatacgaaagacacaattaagtgctagggrcttctgagggagggaggttgctttgagctatggatgagagaggactttggaaaggaaattctatctgggaaggcagggcagtggggatgctggtgaagaaggcatagcggatggagtgaacagcaggaggaaagagcatcc

SEQ ID NO: 248534 - DNA, 554 bp, Homo sapiens
cagatgtgagcaataattttggcccctccataatcacagtttctggtcaagaacaagttcccatatccttgtcagctgcagaatctgaaacaagacgtggtaaaatgacacccacttttgcctcatgtggccatgatggaagaatgatagcccttaagcaatccgagctcctctcaaaataaatagtcatgacagcttcatcactgcatgctgaaataataggtattggccttattacaaaacctcagtattctcatggcatcatactctggccatatctctgtgaagtaccagagacatccactgttttcctcatttcattgtatggaytgaaactgaggaaggaaaagtttgaaactgctcagagcccccacctgccttcaggcttaggatttgtatcttgggggtctcatcttaatatcacttcacgctgccccctctatccccccagactctgcagacattctttttctgtcctgtggcaaaatgagactttcttttctcctcttctccttctttccttcttctattcatcccttcacaggaagttagag

SEQ ID NO: 248535 - DNA, 643 bp, Homo sapiens
atcaacaactttttagatttaacttataattttacaagtttgtttaacactttcttgttacttatcgaccactttcttagcttcatttttttctttcgctagaaattctcgagtgtatctgcttagagagggtctgtggttggtaatctttccagtccttgcatgtcagtgattttattttgcccttcaactttaatgctagtttggctcagcatacaatagttttcttgcagctgttctcttttcagcagttgaaaaccagtgaatacccctaaatagctgtcatttttgttctggtgctgcttttcctttgatttcagtttaacaaatttgttgagttcccattatgagttgcacaccttcctaggtgcygcggatacagggatgagtaagacactggtctgcgctctatgtgctgggttcactccccacttctgccctggtcttgctgtgcttctctcagatccccttctccccaaggagccaccttcctcaaagcaagccaatggttggctgtgcagcagcaaatgatgtgatctgacattaaacaaacaaaaaaatccctgcattgtgctgacttatttctcattcttatgcatttgcatgggggaaatgcccaaagaatgaagctgtaaaaatattg

SEQ ID NO: 248536 - DNA, 643 bp, Homo sapiens
atcaacaactttttagatttaacttataattttacaagtttgtttaacactttcttgttacttatcgaccactttcttagcttcatttttttctttcgctagaaattctcgagtgtatctgcttagagagggtctgtggttggtaatctttccagtccttgcatgtcagtgattttattttgcccttcaactttaatgctagtttggctcagcatacaatagttttcttgcagctgttctcttttcagcagttgaaaaccagtgaatacccctaaatagctgtcatttttgttctggtgctgcttttcctttgatttcagtttaacaaatttgttgagttcccattatgagttgcacaccttcctaggtgccgcggatacagggatgagtaagacactggtctgcgctctrtgtgctgggttcactccccacttctgccctggtcttgctgtgcttctctcagatccccttctccccaaggagccaccttcctcaaagcaagccaatggttggctgtgcagcagcaaatgatgtgatctgacattaaacaaacaaaaaaatccctgcattgtgctgacttatttctcattcttatgcatttgcatgggggaaatgcccaaagaatgaagctgtaaaaatattg

SEQ ID NO: 248537 - DNA, 517 bp, Homo sapiens
gttctcaaaaagtctactgtcatatttatctttatttctctgtatataatgtgtatttttactctggatgcttttatttttacttacttcttttctaatgctctttctttccttatatacatccaagtttctgacatgtatcattttccttctcgctgtaaaacttctaacatttcttgcaaaacagttctactgataacaaattccctcaacttttatttgtctgacaaagcctttatttcttcttcactttttgttgtggactgaatgtttgtgacctcccaaaattcatatgttgaaactctaacctcaatgtaatagtttatagagatggtgcttttgggagttaactaggtcatgagggtggagcattcatgaacgggattagtgcccttatgagaaaggccagagaactagttaactctcttacttccctgtgtagatacaagaagttggccatctgcaamgtggaaaagggcccctcaccaaaacatgactattctggcaacctgatgtt

SEQ ID NO: 248538 - DNA, 561 bp, Homo sapiens
cttgtgaatagggcttaaaatttaacctctataactgaattgagccaattcccactacctcatgtcattgaaaaaaatgtgggataacaaaactatactgttcattctctctccttgtctcctaacactctgaacagagatgctcagagaagctatattattacaaagacctctgactatatctacaaatattccctaggctatccaagctttcttatgtcaataacctaacaccctacttttctctgacctgaacagctctggtcaggagtatagcaggatattgggaagagaatacactgacggagggarctcagcagcaatttttgtggttattttttccaataaatggcacagagttgaatcctgatagcatacccagtcctgatctcttttccactgaagataaattgtgaaaaccgtatttcctaaggaactagtggaatagaaaaagtctattcataatcaccttaaatgttgatatcagtatagctggaaaaatcccctgcctaaatcccatggtaaaaattcactaattttgcaggtattaaatcaactgaa

SEQ ID NO: 248539 - DNA, 563 bp, Homo sapiens
attgatcatgagctttatacaaaatgtgcattttaatgagtacatggcactccgattaaaatgctgaaatagataaataatggtttttagtgctaattgcaacaatttaaatcaattaaaatgcctgcaaagaatgatgactggatgaattccaacttacttatgcaaacttggcctgctcctcaagccttcagttccagtgctggagacatctgtagcagcctgtccagatctccccaacttagccaaacctccagcaatttgaaacatcatcagaagccattatcatttcatgaatatttcttaatttttaccgcactctaataaaatttattgttaggattctctatatgcctctatgcttattttcttgcttttttgtttatttgtttaatcaaatgsgaaaacattgggaaatggcaagaaaggtaaatcactaaacccaatgatgaactaggagtagcattttgtaagccaaaatccggaaaccaagataaaaaatgatatcctattaactaatttaccaatacacacttgctttgtgctggccacaaagcccataa

SEQ ID NO: 248540 - DNA, 586 bp, Homo sapiens
taagcttaccaccactaaacaacagcaaactaaagaggtttgctgttgattgttccaatcattcctcataactcatcttacaagttattagaccatttataaaaggatcatgcaaaagcacaatcagggtattttttaaaattatataggctagattgaaggtgaacttgtggctgtatttattcatgttacaggtgttacaataaaatgatgcacttttccacagttttaacagtgtcaatgatgcaaatatttttccccacatcacacttccttctccaaaattatctacattcttatttgacttacattttctaccctgtgactacagttacatatatattaaaaagtaataaaaaattgttcccaattgaaaaaataatacagaaagatacgtttctctcgtcgcttctgattagctctaatctggttctccagaaggaaaggacatgacattgaacattgaatctctctattcaaaaagcygatccttaatagtgctgaggaaaaaaagtgattcttttgatcttgtattttaatcttaaattttaatttgcaccataaaattttaatgactgtcctctag

SEQ ID NO: 248541 - DNA, 587 bp, Homo sapiens
aattttatttagccagcacaatggagtttatttattatttgaatttaaattactttaggcagagcaggcattctcttcaatttgccataggctccactctccatttgaatgaaactgagtttatctgtactgagaggcctatgagtttatgtctacaatgttaatacgtagcaaaaattcagtaaaggagtaacatcagaggctacctgtcccaatactaactgtcctgttcagaaaaaaggaattcaccacctacagtgaaagctcactccgtattttaagataaccccattttctggtaaattattccttccgttcctgtaacttttattcattgaccttagtttttatccctaagacaatattaacgaaatcaaatcctgcctttatttacataaatacatctgctgtgactcctcaatacatgagatttgtrtaacagcattcaaagccatgattataaattacaattagtatacatcatgaagtcattcatctcaatgttgtcaaatattgcccaaggaattttccattccattagataattatactctaagctaataagtaatcagccctcctttactttt

SEQ ID NO: 248542 - DNA, 457 bp, Homo sapiens
caatgaaaagtagtgaactaatgttaaatgctataatgtggatgaatctcaaaacgattatattaagtgaaagaagccagacaagaaagtgcataatcccatttacataaaattacaaaaaatacaaatctatactgacagaagagatgagtgattgcctttgacatgggagataagcagaggtgttgggaagaattacaaaaaaaatgaggaaatgttttagagcaatggaaattttcatatcttgattgtggtgatagcttcactggcccatacaaatgtcaaaatatatcaaattttacactgtaaatatgtgtagtttattttataaacaactatacyttaataaactgttttttaaaaattaaaacaaaagcaaagagaaataagtttatatggaaagagaattagaataattctcatttttttgctcagatgccaagtgcacatttatact

SEQ ID NO: 248543 - DNA, 403 bp, Homo sapiens
tgtcaagcacagaaagatgacaaattattttggagaacaagtatatgtagatcaactacccgtttgtatatgagtattaagtagaaatgtcgaaaatagtcccaggagagatggccatgacaggaaacgtaatttacattttcaaatgaaataaatctggttcagttacaaaaggcttaccttgaaacttttgacaacagcctacctctaacatygtagtaactgaaaagagcatcttgcagggccaaaaatagtatattccagccaatgaatttcttatttcctttgacttttccacattgtccatgagaatataagttgtaagagagcaagagtttgggtgtttgttcatattgctgtattatcagtgcctaaaacttattagatactcagtaaatatttg

SEQ ID NO: 248544 - DNA, 621 bp, Homo sapiens
aagcaaaactaatatttgctttttcattttatgtgaagactaggatttaaaattaaagaatacatctttaagaaattagaccccccatatcccttgagtgcatgtgagagaagatgagtctgagtatgtttatttacaactcaatttggaagcaaacactaaaagatattaatgttcaaaacaattggcaaacttttttttcaaaaaagtctgctgttgtttattggttcacaaggaaaatacacggagcactttctatatgttatgcactgcactaggagctgaggacacataaaatgttacaaarcaaggagttttacccagtaatccatggtttactagagaacagagacatggaatcaaatagccacatgaaagtatgatgtgtgaaagcatggaggaaaggcaataggctagaagaaaggtgcaggggctcttcctcaaggaggtaggatgctccagtgaggacctgaaacataaggaggagctcaccaggcagatggtggggccaaggcattccaagcagacctccagcaaataaaaaaacttacagagcatggaatgtaaggatcattaagggatttgagttattcagtactgatagaggacaagtggtagaaa

SEQ ID NO: 248545 - DNA, 621 bp, Homo sapiens
aagcaaaactaatatttgctttttcattttatgtgaagactaggatttaaaattaaagaatacatctttaagaaattagaccccccatatcccttgagtgcatgtgagagaagatgagtctgagtatgtttatttacaactcaatttggaagcaaacactaaaagatattaatgttcaaaacaattggcaaacttttttttcaaaaaagtctgctgttgtttattggttcacaaggaaaatacacggagcactttctatatgttatgcactgcactaggagctgaggacacataaaatgttacaaagcaaggagttttacccagtaatccatggtttactagagaacagagacatggaatcaaatagccacatgaaagtatgatgtgtgaaagcatggaggaaaggcaataggctagaagaaaggtgcaggggctcttcctcaaggaggtaggatgctccagtraggacctgaaacataaggaggagctcaccaggcagatggtggggccaaggcattccaagcagacctccagcaaataaaaaaacttacagagcatggaatgtaaggatcattaagggatttgagttattcagtactgatagaggacaagtggtagaaa

SEQ ID NO: 248546 - DNA, 593 bp, Homo sapiens
tgtagcacagcctctcaaagggtgctcaactgaaaggaaattttcagatttaaagcctctgttcttaagcaaccgtttttgatagtttaactgcccatatccaaatccccagcaaacttctaactgcaygccatattattttgtgtggtcaaggacataattcatataaaagtcatctctctctttcacaggctgtaattctcctttaattagattgtaattaaaaccaaataaggaaacatgcagatgaataacttcacaagtttttctttctcctggaaaatagttattttttctttattaatcaagcctaaaatagattcagaaaatgattttgtgcattttgatagtaaaccgctaccatgtgtatgtatgtgtgtcttttcccctaaaagactctcgcacagaaagcattttaattttccatgggattgctattttgacctctgagaccttgcaaagtaaagtatttatgatcttgggcttttttatggtattgtttcaatatttttgtaacatttgtatttcttgctgatgtttttggcattaaaaatcactcaagctgtgctgaaatataatggtattcactgaac

SEQ ID NO: 248547 - DNA, 490 bp, Homo sapiens
atccagggaatcaagaattttccaaagatgctgatgtcatcactttttcctatgccttggggtgacagaaggaataatattttgatatctgtattgtcttccccccaaaaatggctttgtagctgaggaataaaaagggacaaacaaagacatggatttkattttattttttagcaagcaagtaacttggtgtcataggttactttgcatagtgcctcttggtaccaagggaacatatagaaatcattcccattagtaaagcacctgaagtggggattgagaaaagtcagatacaaaggagtttttgtttgtgctaccataaagtcatcaactataaaaacttaaaaacactcctctcttcccttacatacttaaaatagcaaaaatgttttcttagaacaatttaaatcaagaagatgtctctatcttttgaaaatttgggagggtctaattgtagtctatgtacactaaatgtttctctttattttac

SEQ ID NO: 248548 - DNA, 608 bp, Homo sapiens
cctctgagaccttgcaaagtaaagtatttatgatcttgggcttttttatggtattgtttcaatatttttgtaacatttgtatttcttgctgatgtttttggcattaaaaatcactcaagctgtgctgaaatataatggtattcactgaaccataccatggaaggataattcagctcagttaggttattctagctcatcatgtacaccaaggattgaaagaaattgtagaagactctcagttctcttcataggcagcattgagtcttttttttyccctctctaataacttgacataggaaaaccttcacttgaatacagaaatacctggtttcgagtctttggagcaaaccaaaataacaacacaatggcccacggtatgaggaagcaaagtactggtgaacagttactctagatcacaaatttcctttacctgtgaccagacaaaaattatacctcaacaaataatgagctttcattatcaatttcaacacatccctatgcaagtgatatagtgctaaacttcattagagtagggaaatatgctattacagatacaaaccagagatgatttagttccagatatttaagttgtccctgactatggatat

SEQ ID NO: 248549 - DNA, 608 bp, Homo sapiens
cctctgagaccttgcaaagtaaagtatttatgatcttgggcttttttatggtattgtttcaatatttttgtaacatttgtatttcttgctgatgtttttggcattaaaaatcactcaagctgtgctgaaatataatggtattcactgaaccataccatggaaggataattcagctcagttaggttattctagctcatcatgtacaccaaggattgaaagaaattgtagaagactctcagttctcttcataggcagcattgagtcttttttttcccctctctaataacttgacataggaaaaccttcacttgaatacagaaatacctggtttcgagtctttggagcaaaccaaaataacaacacaatggcccamggtatgaggaagcaaagtactggtgaacagttactctagatcacaaatttcctttacctgtgaccagacaaaaattatacctcaacaaataatgagctttcattatcaatttcaacacatccctatgcaagtgatatagtgctaaacttcattagagtagggaaatatgctattacagatacaaaccagagatgatttagttccagatatttaagttgtccctgactatggatat

SEQ ID NO: 248550 - DNA, 608 bp, Homo sapiens
cctctgagaccttgcaaagtaaagtatttatgatcttgggcttttttatggtattgtttcaatatttttgtaacatttgtatttcttgctgatgtttttggcattaaaaatcactcaagctgtgctgaaatataatggtattcactgaaccataccatggaaggataattcagctcagttaggttattctagctcatcatgtacaccaaggattgaaagaaattgtagaagactctcagttctcttcataggcagcattgagtcttttttttcccctctctaataacttgacataggaaaaccttcacttgaatacagaaatacctggtttcgagtctttggagcaaaccaaaataacaacacaatggcccacggtatgaggaagcaaagtactggtgaacagttactctagatcacaaatttcctttacctgtgaccagacaaaaattatacctcaacaaataatgagctttcattatcaatttcaacacatccctatgcaagtgatatagtgctaaacttcattagastagggaaatatgctattacagatacaaaccagagatgatttagttccagatatttaagttgtccctgactatggatat

SEQ ID NO: 248551 - DNA, 655 bp, Homo sapiens
tacctaacatgtacagactaagtcatgagaaatggttaagggtagtcaattttctcctctgatagatttctgatctccttataggtaagtaaataatttatggaaaaaaatagcattcatttcatcatattgagttgttagtctataaattaatttcaaataagaactgaagtaaataatatcttgcaatttacataaacatttactaggctctcatgtaggagggaaagtaaaggacagaaataagtgaaaatgtcacccaatccatattcacaagtttagcaatgaaatgatactatatactatacatttcaattaaggcaaagtcttaattagttactggctagcagttgctkttatctagtttaacttcattaatattcttttggacttaactttatatgtggtaatagaaatactctgcaaggaattgttacagaaaaaggttgcaaaggagcaaagtaaaatattttatgaaaagggaaaggagactaaattcatgcattagtgtggcaactatttatagtataattaatgaatctactcatttttaacaattgttcctttataaccatttttacatttgcctttcttcaaaacatacaaaattccttacagacaagccaaagtgtaaaattaaatgatatcatgacat

SEQ ID NO: 248552 - DNA, 573 bp, Homo sapiens
gtaatagaaatactctgcaaggaattgttacagaaaaaggttgcaaaggagcaaagtaaaatattttatgaaaagggaaaggagactaaattcatgcattagtgtggcaactatttatagtataattaatgaatctactcatttttaacaattgttcctttataaccatttttacatttgcctttcttcaaaacatacaaaattccttacagacaagccaaagtgtaaaattaaatgatatcatgacatctaattactaagaataattctgacttaagaagaagagaagatattacagccagtgttcagcactgaatctagacggaagtgttgatgttcttttcttcccaaaattagctggccacacccatttaaagtccctgcctttgttctcttgcttgtcttggaattcacatgtccctagctgctatttgcaggctgagattggactwggaatgcttcgctcaggtttttactctgagaaactcttgatagcatgggttaattatctttcatttcacctcgcattatcactcactcaattaaatacaaatttaaatggaaaaagcagtt

SEQ ID NO: 248553 - DNA, 573 bp, Homo sapiens
gtaatagaaatactctgcaaggaattgttacagaaaaaggttgcaaaggagcaaagtaaaatattttatgaaaagggaaaggagactaaattcatgcattagtgtggcaactatttatagtataattaatgaatctactcatttttaacaattgttcctttataaccatttttacatttgcctttcttcaaaacatacaaaattccttacagacaagccaaagtgtaaaattaaatgatatcatgacatctaattactaagaataattctgacttaagaagaagagaagatattacagccagtgttcagcactgaatctagacggaagtgttgatgttcttttcttcccaaaattagctggccacacccatttaaagtccctgcctttgttctcttgcttgtcttggaattcacatgtccctagctgctatttgcaggctgagattggactaggaatgcttcgctcaggtttttactctgagaaactcttgatagcatgrgttaattatctttcatttcacctcgcattatcactcactcaattaaatacaaatttaaatggaaaaagcagtt

SEQ ID NO: 248554 - DNA, 539 bp, Homo sapiens
aattgcttgatcctcttggttacctgagtaccaattactgctgcctttttagactatccatccagtatctgtcctttcatgggtcagttgtttgtgatatatatgaaaagagtgtagacattggtactttagccatgattagactctgctacttccctcaccaattcaaacctcacgattttatttccagagaaatgtttctatgcacaaagtcacagagacactaccaatttcagtttaacctgtctcttcaattgactacttaaactgacaactctaattgtccactagtggacacatttgtgcattaaaatgtctggttacattgttctaaaccaaaggataatctgacttcaataatcaggtctgaatttagaggctaattgcattgcatcctttaacctttaaaatgagctgcccttataatttagcaaaatcytccacacatttctctaaagccgaggattccaaagaaattaaaatgaaaagagcagattattctacgtgactgaaaagtgacaaagcaatgaccccccaag

SEQ ID NO: 248555 - DNA, 539 bp, Homo sapiens
aattgcttgatcctcttggttacctgagtaccaattactgctgcctttttagactatccatccagtatctgtcctttcatgggtcagttgtttgtgatatatatgaaaagagtgtagacattggtactttagccatgattagactctgctacttccctcaccaattcaaacctcacgattttatttccagagaaatgtttctatgcacaaagtcacagagacactaccaatttcagtttaacctgtctcttcaattgactacttaaactgacaactctaattgtccactagtggacacatttgtgcattaaaatgtctggttacattgttctaaaccaaaggataatctgacttcaataatcaggtctgaatttagaggctaattgcattgcatcctttaacctttaaaatgagctgcccttataatttagcaaaatcctccacacatttstctaaagccgaggattccaaagaaattaaaatgaaaagagcagattattctacgtgactgaaaagtgacaaagcaatgaccccccaag

SEQ ID NO: 248556 - DNA, 590 bp, Homo sapiens
aacatttctatcaattacactgaataaatatgcagtcacaacggctgctggttgatttgacgtttaaaaagatggcatatattaaagccccagtttggctatgcaacacattagattcagttagcaaacatagtgattgtttttcctaagaaaattgttctttttaattaaagcatttgctcttctcttagcactttacaatgtgtgatgcaaaataaacataaaatagttactgcatatttttcctcagctttctcagtccagataccaaataatttgattcagaataatttctgaagggtttatttacttggattgggaaaaaaaaatactactggcaagtttggtaatcagaaaatctacttgatcaataaatcttgctacttagaaaactcctatggaagacatgatgagatgatgtgggatcttatgcctccttttcactcatgactaacaaatgaaatcttyagttaaatgcattgacatataggttgaaaaaactgagtcatatgggaaaattattgtttcaaatactaaagataggtaaaaaataaagaatatgggttttcagcccaaggtaatgatccgaa

SEQ ID NO: 248557 - DNA, 590 bp, Homo sapiens
aacatttctatcaattacactgaataaatatgcagtcacaacggctgctggttgatttgacgtttaaaaagatggcatatattaaagccccagtttggctatgcaacacattagattcagttagcaaacatagtgattgtttttcctaagaaaattgttctttttaattaaagcatttgctcttctcttagcactttacaatgtgtgatgcaaaataaacataaaatagttactgcatatttttcctcagctttctcagtccagataccaaataatttgattcagaataatttctgaagggtttatttacttggattgggaaaaaaaaatactactggcaagtttggtaatcagaaaatctacttgatcaataaatcttgctacttagaaaactcctatggaagacatgatgagatgatgtgggatcttatgcctccttttcactcatgactaacaaatgaaatcttcrgttaaatgcattgacatataggttgaaaaaactgagtcatatgggaaaattattgtttcaaatactaaagataggtaaaaaataaagaatatgggttttcagcccaaggtaatgatccgaa

SEQ ID NO: 248558 - DNA, 521 bp, Homo sapiens
cagggccggccaggttcagtgactcacacctgtaattccagcactttgggaggctgaggcaggtggatcacctgaggttaggagttcgagaccagcctggccaacatggcgaaacctcatctctactaaaagtacaaaaattagctaggtgtggtggtgggcacctgtaatcccagctactcaggaggttaaggcaagagaattgctcaaacccgtgaggcagaggttgcagtgagccaagatcgcgccactggactccagcctgggccacargagcaagattccatctcaaagaaaacaaaaatcagggtcacacttggtggtaataaaaaccactgactaaaaatataaaggcaatattgtagtagtctgcaggcggatacatccatacatcagctccttaggaacttaaatttataaatattatttatccagcttgatgtgaagcaaatatgaataacaacattagcaaattgagtaagccattaggggcatgctttcaaaaaactgttttggcctgt

SEQ ID NO: 248559 - DNA, 564 bp, Homo sapiens
gccttgggtcttaggggtaatgttgccaggatccaccatcttgtctcacagccaccgaagataatggcttttgttccatagtccctatttctttggtctctcagttctcttggcctttgaaggtagatttgtagaggcctgctcatcatagaacataccacgtcaggaaatctttatgtataatttgaataaacagcaattcagaatgactttggamatttttcctctgtctttaaagttctcatgcatagaagaatggaataagagtgtgggttattgatatgaggaatggttcagggaacatttggatttatcagttactgcaatgttcttaactatgccttcctcaaagggcttcgtagttgtgttatccatttaactagcatttaacagtaaaaaaatgatgagcactttgttttctaataatattcctgcaggttattatgcaatgctaaatttatattagaagatttctcaaataattggtggttaaagttggataatacagataccaaaattgtagcacaaaatatcaagtttgaaaactgaaatcattatcattat

SEQ ID NO: 248560 - DNA, 564 bp, Homo sapiens
gccttgggtcttaggggtaatgttgccaggatccaccatcttgtctcacagccaccgaagataatggcttttgttccatagtccctatttctttggtctctcagttctcttggcctttgaaggtagatttgtagaggcctgctcatcatagaacataccacgtcaggaaatctttatgtataatttgaataaacagcaattcagaatgactttggaaatttttcctctgtctttaaagttctcatgcatagaagaatggaataagagtrtgggttattgatatgaggaatggttcagggaacatttggatttatcagttactgcaatgttcttaactatgccttcctcaaagggcttcgtagttgtgttatccatttaactagcatttaacagtaaaaaaatgatgagcactttgttttctaataatattcctgcaggttattatgcaatgctaaatttatattagaagatttctcaaataattggtggttaaagttggataatacagataccaaaattgtagcacaaaatatcaagtttgaaaactgaaatcattatcattat

SEQ ID NO: 248561 - DNA, 458 bp, Homo sapiens
agagagactggaatttccattatgcaaaggaaatgctaaaattgggagcaactgaaggagttcctggaggatatatcctcagatctcatattcagagaagcaagtaagctcaaacaaacaaacaagacaaaacagcattgatcctaatggaacagggtttaaatgtagcaagcaaattctttaacacctcccattgagatttgggactctatgagatctctttaatcagagtaggcttctgatagctttgaccaatacrgcactttaaaagtgactcaatgtgtcttctaaggttttaaaaatgactaaaagaccataaattttatcttcttcaataggacattcactactagaaccctgagacttcatgtaaggagccttctaccctaagaataccatgctgaggaagctatgtctggtcaacacttcagttgagttctgccttcaaccatccctgt

SEQ ID NO: 248562 - DNA, 623 bp, Homo sapiens
acattcactactagaaccctgagacttcatgtaaggagccttctaccctaagaataccatgctgaggaagctatgtctggtcaacacttcagttgagttctgccttcaaccatccctgtaaagacacaagacatgtgactgaagccaatgatcccatccagctcttttgccaggacaatgtcatggaatcacctycctcaaagccaccttgagcagaaaaaacacacagccaaactctctgagtgcttgacccaggaaattgagagatatgttaaaatgactgatattttaagccactaagttttgggatagttcgttatgtaacaacagatgactggaacagaatttgaaaacagaagtggtaaaaccaaaggtataacatgtggcatggatgaagggaacaggcaatggatgaaagcataacagtcttcaatctgactattggatatcagagggcttaatgtaacatgaggaacatatgaaactgtaaaaaaatatatccttgttacatattggaagaaagtttggcaacactgtcacctaaaacaacagggaaaataggaaatatacctaatgaattaaataatctagctaaggaaattttcagggaagtgttagagatg

SEQ ID NO: 248563 - DNA, 356 bp, Homo sapiens
taatttgcctaagccaacacaattccctgatggtagagctgagatttaattccaaatcgaaattatccaaatggtacgytcctaacttctaggctaaattgcttctactagagaactaggttgtaaacgttttgattataaacaactcccaagcaatagctaaaaaacatcagaacatcctccaagaactagcaaggaaagctgattaatttgttcttcatcagcagactcttacacttcctttaaaaaagaatcagtcaaaatttcaattcagcccaatttcaaacaccttatattgagaaaaccttcaccataggcggttagcttaattgtccagaggatttgagactaaatag

SEQ ID NO: 248564 - DNA, 356 bp, Homo sapiens
taatttgcctaagccaacacaattccctgatggtagagctgagatttaattccaaatcgaaattatccaaatggtacgttcctaacttctaggctaaattgcttctactagagaactaggttgtaaacgtttygattataaacaactcccaagcaatagctaaaaaacatcagaacatcctccaagaactagcaaggaaagctgattaatttgttcttcatcagcagactcttacacttcctttaaaaaagaatcagtcaaaatttcaattcagcccaatttcaaacaccttatattgagaaaaccttcaccataggcggttagcttaattgtccagaggatttgagactaaatag

SEQ ID NO: 248565 - DNA, 356 bp, Homo sapiens
taatttgcctaagccaacacaattccctgatggtagagctgagatttaattccaaatcgaaattatccaaatggtacgttcctaacttctaggctaaattgcttctactagagaactaggttgtaaacgttttgattataaacaactcccaagcaatagctaaaaaacatcagaacatcctcyaagaactagcaaggaaagctgattaatttgttcttcatcagcagactcttacacttcctttaaaaaagaatcagtcaaaatttcaattcagcccaatttcaaacaccttatattgagaaaaccttcaccataggcggttagcttaattgtccagaggatttgagactaaatag

SEQ ID NO: 248566 - DNA, 520 bp, Homo sapiens
aaaaataggacattttcctttaagaaaagagagtcagcagcagaagccttcagtccaagctcacagactaatctggggatggtagaggactccrgggtaaaattttaaaaactgtgactctgtgtccttggaacggattgttgagagagtgtaggatttgtctgggagcacagagtcacacatcccccgtcacatgtcaggtatcgctgggcccagcccctgtttcacggctgatctgaagagcaaaaccaagtctctggaagcctctgatcagatgctaaaatctgagctctgtcttcagggaacagagtcctacctgatggggcacatacactcctgtgggctagacattccacacctgtcctcggcagaggaacactgaccagaatctcaatagaagatcatgcacaaaaagcacttctttgagttttccaaaaagggacaatgaaaaatgatttttactctcctaaaaagagtaacaggaaagaaacacagagttgtgtgaatttcagggagaaag

SEQ ID NO: 248567 - DNA, 520 bp, Homo sapiens
aaaaataggacattttcctttaagaaaagagagtcagcagcagaagccttcagtccaagctcacagactaatctggggatggtagaggactccggggtaaaattttaaaaactgtgactctgtgtccttggaacggattgttragagagtgtaggatttgtctgggagcacagagtcacacatcccccgtcacatgtcaggtatcgctgggcccagcccctgtttcacggctgatctgaagagcaaaaccaagtctctggaagcctctgatcagatgctaaaatctgagctctgtcttcagggaacagagtcctacctgatggggcacatacactcctgtgggctagacattccacacctgtcctcggcagaggaacactgaccagaatctcaatagaagatcatgcacaaaaagcacttctttgagttttccaaaaagggacaatgaaaaatgatttttactctcctaaaaagagtaacaggaaagaaacacagagttgtgtgaatttcagggagaaag

SEQ ID NO: 248568 - DNA, 520 bp, Homo sapiens
aaaaataggacattttcctttaagaaaagagagtcagcagcagaagccttcagtccaagctcacagactaatctggggatggtagaggactccggggtaaaattttaaaaactgtgactctgtgtccttggaacggattgttgagagagtgtaggatttgtctgggagcacagagtcacacatcccccgtcacatgtcaggtatckctgggcccagcccctgtttcacggctgatctgaagagcaaaaccaagtctctggaagcctctgatcagatgctaaaatctgagctctgtcttcagggaacagagtcctacctgatggggcacatacactcctgtgggctagacattccacacctgtcctcggcagaggaacactgaccagaatctcaatagaagatcatgcacaaaaagcacttctttgagttttccaaaaagggacaatgaaaaatgatttttactctcctaaaaagagtaacaggaaagaaacacagagttgtgtgaatttcagggagaaag

SEQ ID NO: 248569 - DNA, 520 bp, Homo sapiens
aaaaataggacattttcctttaagaaaagagagtcagcagcagaagccttcagtccaagctcacagactaatctggggatggtagaggactccggggtaaaattttaaaaactgtgactctgtgtccttggaacggattgttgagagagtgtaggatttgtctgggagcacagagtcacacatcccccgtcacatgtcaggtatcgctgggcccagcccctgtttcacggctgatctgaagagcaaaaccaagtctctggaagcctctgatcagatgctaaaatctgagctctgtcttcagggaacagagtcctacctgatggggcacatacactcctgtgggctagacattccacacctgtcctcggcagaggaacactgaccagaatctcaatagaagatcatgcacaaaaagcacttcttygagttttccaaaaagggacaatgaaaaatgatttttactctcctaaaaagagtaacaggaaagaaacacagagttgtgtgaatttcagggagaaag

SEQ ID NO: 248570 - DNA, 586 bp, Homo sapiens
taagcttaccaccactaaacaacagcaaactaaagaggtttgctgttgattgttccaatcattcctcataactcatcttacaagttattagaccatttataaaaggatcatgcaaaagcacaatcagggtattttttaaaattatataggctagattgaaggtgaacttgtggctgtatttattcatgttacaggtgttacaataaaatgatgcacttttccacagttttaacagtgtcaatgatgcaaatatttttccccacatcacacttccttctccaaaattatctacattcttatttgacttacattttmtaccctgtgactacagttacatatatattaaaaagtaataaaaaattgttcccaattgaaaaaataatacagaaagatacgtttctctcgtcgcttctgattagctctaatctggttctccagaaggaaaggacatgacattgaacattgaatctctctattcaaaaagccgatccttaatagtgctgaggaaaaaaagtgattcttttgatcttgtattttaatcttaaattttaatttgcaccataaaattttaatgactgtcctctag

SEQ ID NO: 248571 - DNA, 565 bp, Homo sapiens
aggtaggtatcctttttgctgctgttttttatcttgaaccattctcttcctctcctccctaaaaaacaccagattataacccattctattcagattagccactgtctttcattcatctgataacctcaaaacacttctcttagtacctgaagactttatcttccgctcactagcactctctgcattactacttcttacataacaatggtcccaatttcacttgttgtcctgtggtaattttgactaggtctacatttcactctcaaaagtattccagttccagttaagttatgtattcaccttggtcataatgactcatctttgaaacagacaaataaatgatccttcccatctctcacactctaatccctcatttcttctcatccaatgatactgccctgagcctaccttggttattcattgccaaggtacactgggaaccaccccctagatttttaccctrttaccaaacactaaactccctgccctcaaaatcttaatttcaatcttcccactctctgaccattcctatcttttcaagtcacacctattgttaccctagcca

SEQ ID NO: 248572 - DNA, 607 bp, Homo sapiens
tttaatatttctccttcaacctcactgcatttgttagccttctacctaatgtacttctgagtgggtggtggagaatttcagtcaggtttacattataaatgtgtttctgatttttttcttttatcacgtatattttttccttttatacacaagacaaatgcttttagcctgcaagtagagctaagcactcccagagtaactgactcatttagcagtgtttggcttcctgtgcttgtcagcggcaggtgacatttagcacaggctttatctcagttgtggtaattactgggctgacatgagctctcatacacagcacagattgttttcagcagatgtaaccaagcaactctgctttctctggagcagtttatctggctttcaaattgtggcattccatatagacacacacgcacgcacatacaagcayacaaatagtttaatgtcatttttatggaaatagtcattcttttttgctctgactatattgatttatgccacgaggtgatggaatgagatatcttcattgtatgcaacttctgcattacacgctggtagtgcatcctattaaacagaaaggttattgttattgtaatgtatcttagcgtgc

SEQ ID NO: 248573 - DNA, 583 bp, Homo sapiens
gcaccccatccatatctctgtagagggatgtcctgcctgcacccagacttgtaggcaaagttcagctgaattccatcatctgtggttggtgatccctggggggcatttatttacatgtgctgccatatatggggactttttaaaaaatattccatatttacttccttttacttcctttcttttacttcctcttactttctttccacagctcttgacatcttcatttatttttggcaggtgggtatgtttcactctggtggatctacatattcttatatgcattttttcagacatcaactcacttttttctttataagacattttcatttctcgatgttttggaaattacgaaatggtttattgtagcaagtcgaataatataaaaatacgtaaaataatataaaagacataaaacccaattctagtgacacagcccagggggaaggtttcccccagagaagccccacactggggtggagccttgggaagtttgygccctttgtagtggggcagagcctgacccctcctcttcctgtgtagaacccagaattcaatctgtgaggcaagaagcatatactggaag

SEQ ID NO: 248574 - DNA, 451 bp, Homo sapiens
atagttgctaaaatatatttgcaacaccaaaatcaatactagaggtattttcacagtcatttgtagacatgcacagaaaactgaaaaaattgagttgcctgaagtgcacactcccagctgaggttgcgcaaggctcctgtctgccttctggtttctgctctcatcctgtaaataagtatttttttgtgtgtgttctatttactgctatgttattgcctttttgtgctttttgtggtgattctgcagttttaaatggcccccaaggcatagtgctaaagttctgtctagagttcctaagcacaagaaagctatgatgtgccttacagagaaaatatgtgtgttacctmagcttcatttaggcgtgagttatagatgctgttggctgtgtgctcaatgttaacgaattaaaaataaatattcaacaagatacctctaaacagaaacagacaca

SEQ ID NO: 248575 - DNA, 451 bp, Homo sapiens
atagttgctaaaatatatttgcaacaccaaaatcaatactagaggtattttcacagtcatttgtagacatgcacagaaaactgaaaaaattgagttgcctgaagtgcacactcccagctgaggttgcgcaaggctcctgtctgccttctggtttctgctctcatcctgtaaataagtatttttttgtgtgtgttctatttactgctatgttattgcctttttgtgctttttgtggtgattctgcagttttaaatggcccccaaggcatagtgctaaagttctgtctagagttcctaagcacaagaaagctatgatgtgccttacagagaaaatatgtgtgttacctcagcttcatttaggcgtgagttatagatgctgttggctgtgtgytcaatgttaacgaattaaaaataaatattcaacaagatacctctaaacagaaacagacaca

SEQ ID NO: 248576 - DNA, 626 bp, Homo sapiens
ctagagaaaatactttaaaaccacaaatattatctgaaaaatatgtctgaccaaggggtcatgcccagaatttatttaaaaaactgtctmacaatgacagtagtaaaacaagcaattcaagtagaaagtacgtaaatgacttgaactgacacttctctaaagaagatatatggatggcaaataaatacatcaaacgatgttaaattttgctagccgttaggaaaacacaagttaaaaactcaagataccactgcacacctgttaaaatggtaataaaaacactgataacactgataatactatcatgctaataaatgctagtgaagataggtggaaagtgagtaactcacacattgctggtaggacttaccagtgggtatttatcctagaggagagaaaacttaagtacacataaaaacctgtacatgaatgttcatagcagctttatttgtaacagctaaaaactagaaacaatatgtatatctttccataggttcatgattaaactgtctgtgacatatccataaaatggaatattactcagcaatgtaacagtataaaatactattaatacatgcagcaacttggatgaatcttaaggatattatgctgagtgaagaaaagcc

SEQ ID NO: 248577 - DNA, 626 bp, Homo sapiens
ctagagaaaatactttaaaaccacaaatattatctgaaaaatatgtctgaccaaggggtcatgcccagaatttatttaaaaaactgtctcacaatgacagtagtaaaacaagcaattcaagtagaaartacgtaaatgacttgaactgacacttctctaaagaagatatatggatggcaaataaatacatcaaacgatgttaaattttgctagccgttaggaaaacacaagttaaaaactcaagataccactgcacacctgttaaaatggtaataaaaacactgataacactgataatactatcatgctaataaatgctagtgaagataggtggaaagtgagtaactcacacattgctggtaggacttaccagtgggtatttatcctagaggagagaaaacttaagtacacataaaaacctgtacatgaatgttcatagcagctttatttgtaacagctaaaaactagaaacaatatgtatatctttccataggttcatgattaaactgtctgtgacatatccataaaatggaatattactcagcaatgtaacagtataaaatactattaatacatgcagcaacttggatgaatcttaaggatattatgctgagtgaagaaaagcc

SEQ ID NO: 248578 - DNA, 626 bp, Homo sapiens
ctagagaaaatactttaaaaccacaaatattatctgaaaaatatgtctgaccaaggggtcatgcccagaatttatttaaaaaactgtctcacaatgacagtagtaaaacaagcaattcaagtagaaagtacgtaaatgacttgaactgacacttctctaaagaagatatatggatggcaaataaatacatcaaacgatgttaaattttgctagccgttaggaaaacacaagttaaaaactcaagataccactgcacacctgttaaaatggtaataaaaacactgrtaacactgataatactatcatgctaataaatgctagtgaagataggtggaaagtgagtaactcacacattgctggtaggacttaccagtgggtatttatcctagaggagagaaaacttaagtacacataaaaacctgtacatgaatgttcatagcagctttatttgtaacagctaaaaactagaaacaatatgtatatctttccataggttcatgattaaactgtctgtgacatatccataaaatggaatattactcagcaatgtaacagtataaaatactattaatacatgcagcaacttggatgaatcttaaggatattatgctgagtgaagaaaagcc

SEQ ID NO: 248579 - DNA, 647 bp, Homo sapiens
tttatttaaaaaactgtctcacaatgacagtagtaaaacaagcaattcaagtagaaagtacgtaaatgacttgaactgacacttctctaaagaagatatatggatggcaaataaatacatcaaacgatgttaaattttgctagccgttaggaaaacacaagttaaaaactcaagataccactgcacacctgttaaaatggtaataaaaacactgataacactgataatactatcatgctaataaatgctagtgaagatargtggaaagtgagtaactcacacattgctggtaggacttaccagtgggtatttatcctagaggagagaaaacttaagtacacataaaaacctgtacatgaatgttcatagcagctttatttgtaacagctaaaaactagaaacaatatgtatatctttccataggttcatgattaaactgtctgtgacatatccataaaatggaatattactcagcaatgtaacagtataaaatactattaatacatgcagcaacttggatgaatcttaaggatattatgctgagtgaagaaaagccaatctaaagtagttgcatattttaggattcatttagatagaattataaaatgacaaaattacagcaatggagagtagatacatcttatagt

SEQ ID NO: 248580 - DNA, 537 bp, Homo sapiens
aaactcaggcaacaataacaaaaataaaaatatggaactacaacaaaytaaaaagcatctgtacaagaaaggaaacaacaaaatgaaacagtctacagattaggaaaaaatatttgcaaattctgtatctgatgaaaggttaatatccacaattcatagataacacatacaattcaataataaaaaaaaaatttaaatgggcaaaagacctgaatagacatttctccaaagaagacaaaaaaaaaatggccaacagttatataaaaggtgttccatatcattaatcaaggaaatgcaaaccaaaccactgtgagctgtcacctcacacttgttagggggactactatcaaaaagtcaagagattcgttccaagatggctgaataggagcagctctggtctgcagctcccagcatgattgatgcagaagacgggtgatttctgcatttccatctgggctctgaagagagcagtggttctcccaacatggtgtttgagctctgagaacgaacagactgcctcctcaagtgggtcgctga

SEQ ID NO: 248581 - DNA, 537 bp, Homo sapiens
aaactcaggcaacaataacaaaaataaaaatatggaactacaacaaattaaaaagcatctgtacaagaaaggaaacaacaaaatgaaacagtctacagattaggaaaaaatatttgcaaattctgtatctgatgaaaggttaatatccacaattcatarataacacatacaattcaataataaaaaaaaaatttaaatgggcaaaagacctgaatagacatttctccaaagaagacaaaaaaaaaatggccaacagttatataaaaggtgttccatatcattaatcaaggaaatgcaaaccaaaccactgtgagctgtcacctcacacttgttagggggactactatcaaaaagtcaagagattcgttccaagatggctgaataggagcagctctggtctgcagctcccagcatgattgatgcagaagacgggtgatttctgcatttccatctgggctctgaagagagcagtggttctcccaacatggtgtttgagctctgagaacgaacagactgcctcctcaagtgggtcgctga

SEQ ID NO: 248582 - DNA, 537 bp, Homo sapiens
aaactcaggcaacaataacaaaaataaaaatatggaactacaacaaattaaaaagcatctgtacaagaaaggaaacaacaaaatgaaacagtctacagattaggaaaaaatatttgcaaattctgtatctgatgaaaggttaatatccacaattcatagataacacatacaattcaataataaaaaaaaaatttaaatgggcaaaagacctgaatagacatttctccaaagaagacaaaaaaaaaatggccaacagttatataaaaggtgttccatatcattaatcaaggaaatgcaaaccaaaccactgtgagctgtcacctcacacttgttagggggactactatcaaaaagtcaagagattcgttccaagatggctgaataggagcagctctggtctgcagctcccagcatgattgatgcagaagacgggtgatttctgcatttccatctgggctctgaagaragcagtggttctcccaacatggtgtttgagctctgagaacgaacagactgcctcctcaagtgggtcgctga

SEQ ID NO: 248583 - DNA, 555 bp, Homo sapiens
atacaaaccaaaaccttaacgcagtatctatatatacatatatatatataccagaaagttagaaatggaaaagatgmgacaatgccaattgttggcaaggaagaatgtggaacaactcacatgtactttgaaaaactgcttggcattatcctctgaaattgaatgtatgtatacatattagtcattaattctattcctgtgtatacatgcctaactaccaaccaccaacattcagtcaccaaaagaaacacatgcaaatgttcaccatcaaaaatatgtactgtataactgtcatagaagcaccatttgtaatagccacaaaccagaaaataccccgttattcatcaataatataatggatacataattggtagtatattcaaacagaatactatgtaacaaaaagaatgaacaacagctacacacagcaacatggataaatctcataaacatgatgttgagcaaaaagatcaaacaaaagagtaaataccgtgtgtttctatttttataattggatagacacagagatgcaccactcagatactcttaaggaag

SEQ ID NO: 248584 - DNA, 555 bp, Homo sapiens
atacaaaccaaaaccttaacgcagtatctatatatacatatatatatataccagaaagttagaaatggaaaagatgagacaatgccaattgttggcaaggaagaatgtggaacaactcacatgtactttgaaaaactgcttggcattatcctctgaaattgaatgtatgtatacatattagtcattaattctattcctgtgtatacatgcctaactaccaaccaccaacattcagtcaccaaaagaaacacatgcaaatgttcaccatcaaaaatatgtactgtataactgtcatagaagcaccatttgtaatagccacaaaccagaaaataccccgttattcatcaayaatataatggatacataattggtagtatattcaaacagaatactatgtaacaaaaagaatgaacaacagctacacacagcaacatggataaatctcataaacatgatgttgagcaaaaagatcaaacaaaagagtaaataccgtgtgtttctatttttataattggatagacacagagatgcaccactcagatactcttaaggaag

SEQ ID NO: 248585 - DNA, 555 bp, Homo sapiens
atacaaaccaaaaccttaacgcagtatctatatatacatatatatatataccagaaagttagaaatggaaaagatgagacaatgccaattgttggcaaggaagaatgtggaacaactcacatgtactttgaaaaactgcttggcattatcctctgaaattgaatgtatgtatacatattagtcattaattctattcctgtgtatacatgcctaactaccaaccaccaacattcagtcaccaaaagaaacacatgcaaatgttcaccatcaaaaatatgtactgtataactgtcatagaagcaccatttgtaatagccacaaaccagaaaataccccgttattcatcaataatataatggatacataattggtagtatattcaaacagaatactatgtaacaaaaagaatgaacaacagctacacacagcaacatggataaatctcataarcatgatgttgagcaaaaagatcaaacaaaagagtaaataccgtgtgtttctatttttataattggatagacacagagatgcaccactcagatactcttaaggaag

SEQ ID NO: 248586 - DNA, 555 bp, Homo sapiens
atacaaaccaaaaccttaacgcagtatctatatatacatatatatatataccagaaagttagaaatggaaaagatgagacaatgccaattgttggcaaggaagaatgtggaacaactcacatgtactttgaaaaactgcttggcattatcctctgaaattgaatgtatgtatacatattagtcattaattctattcctgtgtatacatgcctaactaccaaccaccaacattcagtcaccaaaagaaacacatgcaaatgttcaccatcaaaaatatgtactgtataactgtcatagaagcaccatttgtaatagccacaaaccagaaaataccccgttattcatcaataatataatggatacataattggtagtatattcaaacagaatactatgtaacaaaaagaatgaacaacagctacacacagcaacatggataaatctcataaacatgatgttgagcaaaaagatcaaacaaaagagtaaatacygtgtgtttctatttttataattggatagacacagagatgcaccactcagatactcttaaggaag

SEQ ID NO: 248587 - DNA, 568 bp, Homo sapiens
gttaattaactgccatttttccccacgttgtttcaaattaggatcattaagatggaaagcatcccttcagtgattatgagagacgtaagagagaaataaaggttttattacttacasgtcctgcggtacacagcatacctggagcccacatgcagggatgtcagggagtgcatggagagagagaggaagggacccatgggtcaacacctttattgggtccagggtgttagccaaacaggtttcccaaggggagtttgaattggtgagtttaaggcatgggttctaggaggtcacatggtgactaagaggtgaccgctgtggcacatatgcacaatccatgtggggtgtgagtgtcagtggggccagttaagcagggtgtatctagttgttccatagggaagtcaccaggaagcagttacataatgtagatacctggatcgaccaggctgaggaactggggggcggtgtagaactagtagtgtgtcaagggtgactgaatcttgcttctggtatgagaaagtccagcttatattcaaaatggatgctgaggtaacataagattttaaga

SEQ ID NO: 248588 - DNA, 568 bp, Homo sapiens
gttaattaactgccatttttccccacgttgtttcaaattaggatcattaagatggaaagcatcccttcagtgattatgagagacgtaagagagaaataaaggttttattacttacacgtcctgcggtacacagcatacctggagcccacatgcagggatgtcagggagtgcatggagagagagaggaagggacccrtgggtcaacacctttattgggtccagggtgttagccaaacaggtttcccaaggggagtttgaattggtgagtttaaggcatgggttctaggaggtcacatggtgactaagaggtgaccgctgtggcacatatgcacaatccatgtggggtgtgagtgtcagtggggccagttaagcagggtgtatctagttgttccatagggaagtcaccaggaagcagttacataatgtagatacctggatcgaccaggctgaggaactggggggcggtgtagaactagtagtgtgtcaagggtgactgaatcttgcttctggtatgagaaagtccagcttatattcaaaatggatgctgaggtaacataagattttaaga

SEQ ID NO: 248589 - DNA, 568 bp, Homo sapiens
gttaattaactgccatttttccccacgttgtttcaaattaggatcattaagatggaaagcatcccttcagtgattatgagagacgtaagagagaaataaaggttttattacttacacgtcctgcggtacacagcatacctggagcccacatgcagggatgtcagggagtgcatggagagagagaggaagggacccatgggtcaacacctttattgggtccagggtgttagccaaacaggtttcccarggggagtttgaattggtgagtttaaggcatgggttctaggaggtcacatggtgactaagaggtgaccgctgtggcacatatgcacaatccatgtggggtgtgagtgtcagtggggccagttaagcagggtgtatctagttgttccatagggaagtcaccaggaagcagttacataatgtagatacctggatcgaccaggctgaggaactggggggcggtgtagaactagtagtgtgtcaagggtgactgaatcttgcttctggtatgagaaagtccagcttatattcaaaatggatgctgaggtaacataagattttaaga

SEQ ID NO: 248590 - DNA, 520 bp, Homo sapiens
ggattaaaatgtaatgtgatttgtactaggcgtcatgagcataaaaaataatacatagtttctgttaagggaattctctcaaacraaaggaaagcgatttttctcaatgcttctaatatttaacaatctccatgtagtccaaatttgtcattaaaaaaaaatcaaagaaagaaggccacgtatgttggggtaatttttaaaaattttcagattggctaaatattttattaggaaacagttttcaagtcaataatttttttaacatttcatgttaataaatgagattgaaattttttatgatctctaaaccataaaagaaaacaccgacagctgtaaaatgttctaagataaaaaaactcgagctacaaagaaagaatgaactaattctttacaaatgttgactgaagatagataaaactctaattaaaaatttaaaaggttaaacactgtattagaatgggcaactaaaatattcgtggtgtcagtttaattagtgtcaaactggcaagtcagagtttta

SEQ ID NO: 248591 - DNA, 567 bp, Homo sapiens
ataataatctgtcaaattgctatcaaagctttagaagactttctattactggcacacttggtttctcaagccacccacttggccctcttccaagttgtacttttcttttctttttttctttccttactgttctaaagcttttaaataaactttcactcctgctttgaaaaaaagagactgcattactacaagaaacaattcagtaacaaatggttttcctccctggggcaggtgcattgaccaaactttgggaagccctgctctggaggacttagagagcctacaggctcctgtctggggcccaccactatgtgacaggcagggggcacactccctgtgccttggcttccttacctgtagaacargggtcacgacactgcctccctcatagagttgttgtgaagatgaaatgggttagtacgtgtgcctcttagaatagaacacggctactgtgctcaggtgtgagccaaatgtgatcagtcttcatttacaatcagctccttaggctggatgctgtttgtatcactgggataggagctgagccacctgaattttggagccacctga

SEQ ID NO: 248592 - DNA, 571 bp, Homo sapiens
aagtgattggacggtatagtgttaatgactgaagaacatttctatttaatttagctaagttcaacaaattactggttagctgccacattccaggcatttttagccactggaagtaaaaaaagaaatgcaacacagtctctgtccttttcattctaatgggagatgcaaagcactatggccaggggcaggcagagggccaagaatgagtaagtaagttgaccatgaactttttaatcaaaattgagaaattttagaaagtgaaagaggatgctaaaaaattatagtggatcaatggaaaggaggatgccagggtcaygctatcttttcagggccctgtgggagcaacgagaaggggctatttagtacagctcagcctagccagtaggttgtgggtgggggcttagagcagaattgtagaacactacttagtggatattgtgcttgagttgagtcttgagcctgaacttttgcattttaaagcaagaccccctgaaaagaagcagtgttttccccaaatgactctactggtgtaatttaaggtgttatgatccctgggagtgcaaaaggagaa

SEQ ID NO: 248593 - DNA, 513 bp, Homo sapiens
aatataaatattaacttgcttgtgatttactacaattgtttctctgtttcactaccagttgttcgactttatagtgtcttctgtcacatgaaaggcacaaattgtgtgtctaagttatcagttttatcccttgggtttttttttttgtttcctttattttttcttggtttgatatcatgcttacacataaaagcacgagcaggtcctctcccgacacataagttgcttatacggaaacaatgtggtgtagagaaaasaaagtggatcaagcccctaatagacttgagtttaaatgtggtacagccaagttgtggcgcccaacttccatattctgtaacgttaaacacgtcaatctcatcctgtttccttatctgcaaaatagtacccaccccagagggtgatacaagcattaaaatgcccggcacgggcaaggcatccagcaagtgttaattccctttcctctgccccgcagaggggcattattaattgcttaaagtggccaactcccgataa

SEQ ID NO: 248594 - DNA, 610 bp, Homo sapiens
gcagcatggtggatgataaggtaatgtccattctactcctaatgattagaatatgccagaaaacaaccatatgttcaccttatttggctcagtcatgatgatgatctggatgctatgacccactggcccacatcaaatggtctctacctcagtcctagccttttyttgttgttcagaatgagtgccaactgtatttgctctgcccttttctcagaacaagtagagggcaaatgagcaggtattcacagtggcgattgtggatttaaaaatatttattcttttttactcttttgtgttaaattttctacaatacatatacattacttttgttataagaaaataataaagttgttttcatttttttaataaagaaaagaaatttattttttacagttttggaggctggaaattccaggggtccaaggggctgcatctggagggtctcctgctggtggggaccttctgaagagtcctgagatggtacagtgcatcacatggtgaggggacttatgataggcagccacactggctttacagtggactcaccctcttgataaccagtccactcctgtgataacccattcacatatcaacccactaatccattaat

SEQ ID NO: 248595 - DNA, 590 bp, Homo sapiens
tcccgagtgttccacctctcaacactgctgcattggggatcaagcttccaacacatgaacttttgggggacacattatttatttaaaaaatacttttattttagtttcagaggtacatgggcaggtttattgtatgggtaaactcgtgactcaagggtttgtgatgaaataatctgtacagaaagttatttttagttaaaaaaaatgtgkagcaactcttccttttctacgataaaaaacaatggcatgcattcctgattctttttttatttttttgagatggaatctcacttggctagagtgcagtggtgtgatcttggttcactgcaacctccacctcctgggttcaagcggtcctcctgcctcagcctcctgagtagctgggactacaggcaagcaccaccccgtcagactaatttttgtatttttagtagagatggtgtatcaccatattggtcaggctggtctcaaactcctgacctcaggtgatctgcctaccttggtatcccaaagtgctgggattacaggtgtgagccaccacgcccagccacattcctgattcttaatgttacaatttccataacacagaa

SEQ ID NO: 248596 - DNA, 589 bp, Homo sapiens
ggtgatacaaagtaacagatacataggatgaccaagtctagaaatctaatgtacagcaagaggactataggcaataaaactgtactgtctataggactcatactaaatgagtagattttagctgctcttgccacaaaaaaaaaggtgagatgatgtatatgttaatttgtttccctaaagtaayctttaatactatctagatgagtcccataacatcatgatttatacttaaaatttatttaaaaaacagtaagtttaaatgtattttaaactataactgcaattgccatttgaacttaaaatagttatattttttcaaatgttagagaagatggcaaagaaatagaaaacacaataagttaaaagtagaaaaaacaattggtataacaaaagacctaagatgttggcttgatgataaaagtaaatgacaaatgacataataatcaactaagtaaacaaaatggtggtaggaagctttatactaatatcaagcaaagttgaatgcaagctgaaaatcttaaatcagttattgatgcaagttaaaatctataaaagttataattactgtaatttttcattagcaaaaaat

SEQ ID NO: 248597 - DNA, 618 bp, Homo sapiens
atttttttcatacaaacctctcagtatcacttctttttgttgtctttccatagctgttattcagacttccaaagtcacaggtaaaagcatatgtgaagtgaaattatttaccctaggaagtatttcagagaaggaagtggagaagtaaagaaatatgcagtggctccagaatgtctgaagagagttttaggggactggtcttgagttatatttgtatatgcaaacacaatttttactttgatgccaagttgttggaaggaagagcarctttccaaagcttatgagatgttgcctttgatgaatggttttatttagatcggtgccctagaaaactttcatgtgcatatgagtcacctagacacctgataaaatgcagattctgacccactaggttcatgttgggactcaaggcttataatttctcacaagctcccaggtgatattaatgctgcaattccacagatcatatgttgaaatgcaagtatttgtataacaatttcctaacaagtcaagaatcaaatcaaccattttctgcatattttattaaaactggaaatatattaaaatattttcaattattctgggcttatttgtatatgctactatttttctatttag

SEQ ID NO: 248598 - DNA, 618 bp, Homo sapiens
atttttttcatacaaacctctcagtatcacttctttttgttgtctttccatagctgttattcagacttccaaagtcacaggtaaaagcatatgtgaagtgaaattatttaccctaggaagtatttcagagaaggaagtggagaagtaaagaaatatgcagtggctccagaatgtctgaagagagttttaggggactggtcttgagttatatttgtatatgcaaacacaatttttactttgatgccaagttgttggaaggaagagcagctttccaaagcttatgagatgttgcctttgatgaatggttttatttagatcggtgccctagaaaactttcatgtgcatatgagtcacctagacacctgataaaatgcagattctgacccactaggttcatgttgggactcaagkcttataatttctcacaagctcccaggtgatattaatgctgcaattccacagatcatatgttgaaatgcaagtatttgtataacaatttcctaacaagtcaagaatcaaatcaaccattttctgcatattttattaaaactggaaatatattaaaatattttcaattattctgggcttatttgtatatgctactatttttctatttag

SEQ ID NO: 248599 - DNA, 443 bp, Homo sapiens
tgttagttattacccaccttctgaagcctacttctgtcagtttgtcaaacttattctccatccagttttgttcccttgctggcaaggagttgtgatcctttggaagaggagagatgttcaagtttttggaattttcagcctttttgcactggtttttccccatctttgtggatttatctacttttggtctttgatgttggtgacctttggatggggtctttgagtggatgtgctaatcctttctgtttgtttttttccttctaatagtcaggcatctctgctgccagtctgctggagtttgctggaggtccactcccgatcctgtttgcctgagtatcaccagtggaggctgcagagcagcaaagattgctgcctgttctttcctctggaagcttyggcccagcattgcacctgccagatgccagccagagctctcctgtatg

SEQ ID NO: 248600 - DNA, 558 bp, Homo sapiens
tatttacatcaactttgtcaaagatcagttggttgtaggcatgtgagtttatttctggattctccattctgttccactcatgtctgtgtctatttttgtaccagtaccaagcygttttggttactattgacttgtgtagtttgaagtcaagtaatgtgatgcttctggcttttttccttttacttagggttactttggctatttggactgtttttgtgtttccatctgaattttagaatagcgtttttctagttatgtaaaaaatgactttggtaacttgataggaatggtgttgaatctgtggatttctttaggcaatatgggcattttaacaatatttattctttcgctccattaacatggaatgttttttgtcatttgtgatttttcatcagtgttttgttctccttatagaggtatttcacctgcttggttaaatgtattcctaggtattttaattttttatggctattgcaaatggaattgagttcttgattttgttcacagactgagtattgttggtacatagaagtgcaaatgatttttgtacactaattt

SEQ ID NO: 248601 - DNA, 551 bp, Homo sapiens
attgttggtacatagaagtgcaaatgatttttgtacactaattttgaagcctgaaacttcactgaagtcattcatcaaatctaggggttttatggaggaatttttagggtcttctagatagaagattgcatcatcaggaaacagagataatttgacttcatcttttccaatttggatgcttttatttctttctcttgcctgattgctctggctagaacttctggttgaataggagtagtgagagtagacatccttgtctcttccagttcttagaggaattgctttcaacattatcacattcagtttgatgttggctgtgagtttgtcatatatggcttttattattttgagatatattccttcagtgcctaggttgttgagggttttcatcatgaaggwatgttgaattttatcaaatgccttttctgcattgattgagatgcagatgatcatatggtttttgtttttaattctgtttatgtgatgaaacacatttatttatttgcatattttgaaccatccttgcatccctgaataaagcccacttgatt

SEQ ID NO: 248602 - DNA, 441 bp, Homo sapiens
aattgcgttaaattttttcatgaagattttcttttctttctttctttcttgcttkctttctttctttctttctttctttctttctttctttctttctttctttttttctacctcttattgctgcttttttctatgttgctttcattctcaaccagggtgttccttcagggtagcaaagatggcaactgtggctgccctaggcttacatcaccctctgagctaacaaaagtaagagaacaagaaagactacctctttttaaataggtctaaccaatcatctgtccctgtgcaatctttatggccaagaggatgtgaaaccctgattggctagtcgtggtcatgtgcccatccctatactgagggaggcaagtgttcaaccaatctatcaatggggggaaagaagagttctcagaagaaaaaggtaacagctcttacaagaaa

SEQ ID NO: 248603 - DNA, 562 bp, Homo sapiens
gcttatgccataaaagagaaattgcgttaaattttttcatgaagattttcttttctttctttctttcttgctttctttctttctttctttctttctttctttctttctttctttctttctttttttctacctcttattgctgcttttttctatgttgctttcattctcaaccagggtgttccttcagggtagcaaagatggcaactgtggctgccctaggcttacatcaccctctgagctaacaaaagtaagagaacaagaaagactacctctttttaaataggtctaaccaatcatctgtccctgtgcaatctttatggccaagaggatgtgaaaccctgattggctagtcgtggtcatgtgcccatccctatactgagggaggcaagtgttcaaccaatctatcaatggggggaaagaagagttctcagaagaaaaaggtaacagctcttacaagaaaaaagaaggtctgctaaaaggcaaaaacaacatggaacattaagtgtcatayttcatataaagaagtaacagagccaccttcctaaatgttttgagagtttcc

SEQ ID NO: 248604 - DNA, 567 bp, Homo sapiens
tttttactatctctacagttttgccttttccagaatgcatatagttggaaccagagtatgtagccttttcagattcacttctttcacttaataatatgcatttaatatcctccatgtgttttcatggcttgatagcttactttgttttagtgctaaataatattttgttgtttgtatataccacagtttatccattcacctaactgaaaatattttggttgtttccaattttgaacaattatgaataaagctgctataaacatctgtgaatgggtttttcatcaacataaatttttaattcacttgagtaaataccaaggaccatgattgtatggtaagaatatgtytctttaaaaaaaaaaaaaaaactaccaaactgccttacaaaatggccatactattttgcactatcaaactgctttacaaaatggctgtactattttgcattcctacaagcaattaatgagagtacctgttgctctacataatcacagcatttagtgttgtcagtggtgttctggattttggcaattcttgtagatgtaagtggtatctcattgctgcttt

SEQ ID NO: 248605 - DNA, 567 bp, Homo sapiens
tttttactatctctacagttttgccttttccagaatgcatatagttggaaccagagtatgtagccttttcagattcacttctttcacttaataatatgcatttaatatcctccatgtgttttcatggcttgatagcttactttgttttagtgctaaataatattttgttgtttgtatataccacagtttatccattcacctaactgaaaatattttggttgtttccaattttgaacaattatgaataaagctgctataaacatctgtgaatgggtttttcatcaacataaatttttaattcacttgagtaaataccaaggaccatgattgtatggtaagaatatgtctctttaaaaaaaaaaaaaaaactaccaaactgccttacaaaatggccatactattttgcactatcaaactgctttacaaaatggctgtactattttgcattcctacaagcaattaatgagagtacctgttgctctacataatcacagcatttagtgttgtcagtggtgttctggattttggcarttcttgtagatgtaagtggtatctcattgctgcttt

SEQ ID NO: 248606 - DNA, 513 bp, Homo sapiens
gttatacagatgtggaaactaagaggtggggaaattaaggaaactagccaaagtcccawagttgtagtgatagatatgggatgtaaactcaggaaggctgactctagagcagattcttctaacccctccataatgccacaaagtagctctgctctcagaagtcacaggatcaccttaattagttagagttacaaaggacttttaatgagcaggcttttctcataatggccacttggttctcctaattttctcaattacaaattttaatattttcacccttttctcttttacattttttcctcatatgtctgaattcacaaagccttaccagttctaattcttaataaatgtgccaatacaccccttgcagtgtttggcacagggtaaaggcttaagaaatgtttttttactgagcttagaatgcagatcactccaatcatactgcgttcattagtgccaaaaccattcattgcacacattctgccttaggatgttccacctttttttctttcc

SEQ ID NO: 248607 - DNA, 513 bp, Homo sapiens
gttatacagatgtggaaactaagaggtggggaaattaaggaaactagccaaagtcccatagttgtagtgatagatatgggatgtaaactcaggaaggctgactctagagcagattcttctaacccctccataatgccacaaagtagctctgctctcagaagtcacaggatcaccttaattagttagagttacaaaggacttttaatgagcaggcttttctcataatggccacttggttctcctaattttctcaattacaaattttaatattttcacccttttctcttttacattttttcctcatatgtctgaattcacaaagccttaccagttctaattcttaataaatgtgccaatacaccccttgcagtgtttggcacagggtaaaggcttaagaaatgtttttttactgagcttagaatgyagatcactccaatcatactgcgttcattagtgccaaaaccattcattgcacacattctgccttaggatgttccacctttttttctttcc

SEQ ID NO: 248608 - DNA, 565 bp, Homo sapiens
taattgcaaatgacaggatctcattcttgtttatggctgaatagtattctgttgtgtatatgtaccacattttctttatttgttcatttgttgatagacaattaggttgcttcaagtcttgtctattgtgaatagtgctgcaataaacacaggactgcagatatctcttcaatatgctgatttcctttttggggtgtatgtacctaggagtggtattgcttaatcatatgttagcacaacttttagttttttgaagaacctccaaactgttctctgtagcagttgtactaatttacattcccatcaacaatgtaggattcccttttctccacatcctcaccagcttttgttattgcttgtcttttggataaaagctattttactagggtgagataacycataattttgatttgcctttctctgatatcagtgatattgagacctatgcatatacctgcttgccatttctatgtctttttttgagaaatgtctactcagatcttttgttcatttttaatcagattatgaaatttcttttctattgaattgtttgagatccttagat

SEQ ID NO: 248609 - DNA, 544 bp, Homo sapiens
  misc_feature (1)...(544): n = A,T,C or G
tgtcctttctcccagtgagtgttcttggaaactttgttgaaaatgagttcactgtaggtgtgtggatttgtttctgggttctttattatgttccattagtctatgtgtctgtttttatgccagtactatgctgtttggttactatagctctgcagtgtaatttgaagtcaggttatgtgattcctccagttttgttctttttgctaagaatagctttagctgttttgggtcttttgtgattcaatataaattttaggattattttcttctttactttctcttcaagaatgnnacattggtattttgatagagattacattaaatctgtagactgctttgggtagtatggacgttttaacaatattgattcttccaatccmtgaacttggaatatctttctatttttttgtgtgtcgtcttcagtttccttcatcaatgttttaaagttttcattagagagatctgtcacttttttggttaatttctaggtatttaattttatttgtagctatcataaatgggattactttcttgatttcttttt

SEQ ID NO: 248610 - DNA, 576 bp, Homo sapiens
atgtagggctaaatagtacaaaagtggactggggaagagtgaaaactatcattgtgtatcttgtataacatatagaaagcaattaaacaagaatgaaagacaagatctgcctaagtagagaaagaggttgagttgggkattacacgatattgagattaagcttaaaattatgtattgtgcattgtgaaaaaaatttatgtattgtgaagtaatttttaaacagtcaagctgataaagtctttattttcataatttacacttttaagttgctttatacaatgttaatttaattcaaaggtatttaatcttaaagatcagttataaagcatacttttctctcccaggacacagatgtggtcaactaagaacgtgggtagtagtcattaatacagtcaaataataacacttttctcctgtaccacaagatggcagcacatgcaagggtgcctatttacagtaatcatttgtgtatagttttaatgtctctgggttttggatgatttaaagggtagccttctaccttctagaatataagtagtttatattattgcttttttgttgttgcttattattatt

SEQ ID NO: 248611 - DNA, 576 bp, Homo sapiens
atgtagggctaaatagtacaaaagtggactggggaagagtgaaaactatcattgtgtatcttgtataacatatagaaagcaattaaacaagaatgaaagacaagatctgcctaagtagagaaagaggttgagttgggtattacacgatattgagattaagcttaaaattatgtattgtgcattgtgaaaaaaatttatgtattgtgaagtaatttttaaacagtcaagctgataaagtctttattttcataayttacacttttaagttgctttatacaatgttaatttaattcaaaggtatttaatcttaaagatcagttataaagcatacttttctctcccaggacacagatgtggtcaactaagaacgtgggtagtagtcattaatacagtcaaataataacacttttctcctgtaccacaagatggcagcacatgcaagggtgcctatttacagtaatcatttgtgtatagttttaatgtctctgggttttggatgatttaaagggtagccttctaccttctagaatataagtagtttatattattgcttttttgttgttgcttattattatt

SEQ ID NO: 248612 - DNA, 483 bp, Homo sapiens
agagtgtcatctgcttgaggaatagtttacagtaggagaaaatcatgccacttttttcagcttttaagatcaaggaagatcattgtctattaaataaaaaaatagtggagatatgacatgattagaaaaaacaggtttatatttctgttcatagactagacaaaataattctgacctgaaacagaagagggagaattgtccaaaggtagaggaaagtgaagtgcatcatgccttacaagctaccttttgatttggagtggaaattctgccagccaaatctcaaatagaatatgtcacatttaattatatcacccttttgtctcattctagcttttttgcacttgaaagcactcrcagatcatctttttgctattaaatgtcttgactgacttagaatcaactagatcaaagtgattcagaggttaaatatattaatatccatgtcatcttggacaactcatttatcatagtctcaattttcta

SEQ ID NO: 248613 - DNA, 584 bp, Homo sapiens
tcaagactttctccctccactctagacctcaatgccccctcaatattgctatttgaaggtctcataggcttctcaaatttaacattgctaaaactgaactcctggaaattctgtctttctgatgattcaggtcaaagacttggggttgcctatggctgcttctttctctaacatcttaasttctctgtcttcttttctttctttctttttttttctttaaagacaaggtctcactctgtcaccaaggctggagtacaagggtgtgatcacagcttgctgcaaactcaacctccctgggctcaagcattcctcctacctcagcctcccaggttgctgggactacaggcacacaccaccacatccagcaaatttttgtatttttagtatttttgccatgtgcccaggctagtctccaattcctagactcaagagatccactcacttggcctcccaaagtgttgggattacaggtgtgagccaccatgccttgcctgaacttctaatttatcagcatacactgtcagttccattgtcttaaaacatccaaactcctactgcttttctccatcttcactactgtcagc

SEQ ID NO: 248614 - DNA, 508 bp, Homo sapiens
aaatgtttgatagattgctttatggaccacagtagtcacagatgtaaccattgcttccatctgaaagaaaagttgcccagcaaaccaaaagtctgggagaagccatcaagaggtcaaaattgtgcaagactccttgtttacttgacccatcttacagagtcattccttcagattcacataattttcccttagttcaacatacaaagcaagacatttaagttaagtctactcatctatatagcgctctgtgttcctgctcacacctgaccccagatccaccactttaaaatattgtgtgtgtcactggggcctgtcgggcagtggggggctaggggagggatagcattaggagaaatacctaatgtagatgatgggttgatgggcgcagcagaccaccatggcacatgtatacctatgtaacaaacctgcacattctgcacatgtatcccagaacttaaagtataacaaaaaaaattttaaaaaaaatrtatgtgtgtatgtggtgatg

SEQ ID NO: 248615 - DNA, 574 bp, Homo sapiens
cactaaattcttggctctggagctaggagctttggttcatatttttactctatagcaattagtacagtgccagtgttttgcacatagatgatgctaatcactatttgtagctatattaatagctaacagctattgattaataggtaaaatatttatattgygatgaaactcaccatttataattagtgttgccatctttgagtaaggataaacaattgatactatttggtttaacagtaagtgaacggctgtgcacccatattctgatgttaacctgagcctcttgtgacaatatgtggttttttaaaagatggctgcaaattctttgacacttctcccattgaagctgagcacaatgtcccttccccttgaatctgggccagtctttgactgctgtgatcaaggaatattacagacgcgacactgagctagttctaggtctagcctaaaaaggattgacacatttcactttagtctctgggagccctgggccagggcagtaagaaatctgactaacctgaggaagagaatgtgtggagaagcccagaggctacgttggagggggaggaagaaa

SEQ ID NO: 248616 - DNA, 574 bp, Homo sapiens
cactaaattcttggctctggagctaggagctttggttcatatttttactctatagcaattagtacagtgccagtgttttgcacatagatgatgctaatcactatttgtagctatattaatagctaacagctattgattaataggtaaaatatttatattgcgatgaaactcaccatttataattagtgttgccatctttgagtaaggataaacaattgatactatttggtttaacagtaagtgaacggctgtgcacccatattctgatgttaacctgagcctcttgtgacaatatgtggytttttaaaagatggctgcaaattctttgacacttctcccattgaagctgagcacaatgtcccttccccttgaatctgggccagtctttgactgctgtgatcaaggaatattacagacgcgacactgagctagttctaggtctagcctaaaaaggattgacacatttcactttagtctctgggagccctgggccagggcagtaagaaatctgactaacctgaggaagagaatgtgtggagaagcccagaggctacgttggagggggaggaagaaa

SEQ ID NO: 248617 - DNA, 574 bp, Homo sapiens
cactaaattcttggctctggagctaggagctttggttcatatttttactctatagcaattagtacagtgccagtgttttgcacatagatgatgctaatcactatttgtagctatattaatagctaacagctattgattaataggtaaaatatttatattgcgatgaaactcaccatttataattagtgttgccatctttgagtaaggataaacaattgatactatttggtttaacagtaagtgaacggctgtgcacccatattctgatgttaacctgagcctcttgtgacaatatgtggttttttaaaagatggctgcaaattctttgacacttctcccattgaagctgagcacartgtcccttccccttgaatctgggccagtctttgactgctgtgatcaaggaatattacagacgcgacactgagctagttctaggtctagcctaaaaaggattgacacatttcactttagtctctgggagccctgggccagggcagtaagaaatctgactaacctgaggaagagaatgtgtggagaagcccagaggctacgttggagggggaggaagaaa

SEQ ID NO: 248618 - DNA, 511 bp, Homo sapiens
tgttttcaccatccattagttttcatttttattactgttatttccaattctagaacttctatttggttcattatccaatctgctatgtcagttgtttacttgaactatggtaattatttattttgagacataatttgcatactatatgattcatcattttgatgtggttttattcactgggttatgcaaccatcaacactatctcattccagaacattttcattacccccaaaagaaattctatatcagaagcaggcactccccattattcctatatccaccttctgccaacccctaatctatactctttccataggtttgcctattgtgratatttcatataattcaggcatacaccatgcaggcatttgtgtctggcttctttcagttagaataatgctgtcaaggttcatcaatgtagcacgtaagagtacttcattaattttatggatgaataatattctattgcatggataagtcacattttgtttatttcttcatccattgatag

SEQ ID NO: 248619 - DNA, 600 bp, Homo sapiens
ttaaaatctcctataaatcaagttcctttttcttcatggcatttgttggggttgtaattaaatactactctcctataggattatttgattaatattaatattttaagctctacaatgtcaaggccattctagttctgttctgtatgttttgcccaaatacaatgcccagaacagtaagtatttatgaatgtatkatatagctccatatgaagtagactaatacctgatgttatggcatccatacaatttcctttttgcatcaccttcactaacattgacctctcttgcccccagagactgctccacatagcagatatagctatctcaagctgttgggaccaacgaaaacaggactgctcaatcatgtgctcaaagaccagtaataaaaatataactttatcaggcaaacacatggggcaccacatacaaaaaagatagttacatcatgagttactgatatccacaccctcttttatatctgatatgtataaagattatcctatttcctgtaagtaaataaatatatgtatatgtatgtattagaagtatgtttatgtgtctatccagaaaatcagtaataatcagacatgtagtcaagtc

SEQ ID NO: 248620 - DNA, 600 bp, Homo sapiens
ttaaaatctcctataaatcaagttcctttttcttcatggcatttgttggggttgtaattaaatactactctcctataggattatttgattaatattaatattttaagctctacaatgtcaaggccattctagttctgttctgtatgttttgcccaaatacaatgcccagaacagtaagtatttatgaatgtatgatatagctccatatgaagtagactaatacctgatgttatggcatccatacaatttcctttttgcatcaccttcactaacattgacctctcttgcccccagagactgctccacatagcagatatagctatctcaagctgttgggaccaacgaaaacaggactgctcaatcatgtgctcaaagaccagtaataaaaatataactttatcaggcaaacacatggggcaccacatacaaaaaagatagttayatcatgagttactgatatccacaccctcttttatatctgatatgtataaagattatcctatttcctgtaagtaaataaatatatgtatatgtatgtattagaagtatgtttatgtgtctatccagaaaatcagtaataatcagacatgtagtcaagtc

SEQ ID NO: 248621 - DNA, 449 bp, Homo sapiens
cacagtgggagaaaatcttcacaatctgtacctctgacaaaggactagtatccagaatctacaaagaactccaacaaatcagcaagaaaaaaacaaaaaatcccatgacaaagtgggctaaagacatgaatagacattctcaaaagaagatacacaaatgaccaacaagcatatgaaaaaatgctcaacatcactaatgatcaggsaaatgcaaattaaaaccacaatgtgataccacctcactcccacaagaatggtcataatcaaaaaatttaaaaaaatagatgttagcgtagatgtggtgaaaagaaacattttacactattggtgggaatgtaaactagtacaaccactatggaatacagtgtggagattccttaaagaaataaaagtagatctaccatttgatccagcaatcccactactaggtatctacctagaagaaaaga

SEQ ID NO: 248622 - DNA, 611 bp, Homo sapiens
ttttacactattggtgggaatgtaaactagtacaaccactatggaatacagtgtggagattccttaaagaaataaaagtagatctaccatttgatccagcaatcccactactaggtatctacctagaagaaaagaagctattatacaaaaaagatacttggacacacatgtttatagcagcacaatttgcaattgcaaaaatatggaaccagcccaaatacccatcaatcaatgggtggataaagaaagtgtgatattgggaggccgaggcgggtggattacctgaggtcaggagttcaggactagcctgaccaacatggtgaaaccccgtctctactaaaaaatacaaaaattagccaggtgtggtgatgggcacctgtaaccccagctactygagaggctcagacaggagaattgcttgaacccatgaggcagaagttgcagtgagccaagatcacaccattgcacaccagcctgggtgaaaaaagcgaaactccatctcaaaaagaagattatatatatatatgtatacacacacaccatggaatactactcaaccataaaaaggaacaaataatggcatttgcagcaacctagatagtattggagac

SEQ ID NO: 248623 - DNA, 409 bp, Homo sapiens
tctaataagaaaagaaattatctgtacactaggaaagattaatggatcggggcaatgtaaatctactgaggatattctgatagtgagcctggtccaaaatatttgatcagtgaaaccataatatttygatttctttgcagcctgttttgtgcaacttccaagtcaagattatgaacattttcagactttttgcaagacagaattcaatggattaacaatcagccttgtaagtatgtatctcaataggtacatgagttcctgttgattaaaatttcaatttaacatacataaactcttcaatcaaatgcttgaggtataagtggagaagctgtattaagtctaagtgtttaaagttttttgtgtatatatatccaaattaggaaacctttctcctttctcttcaggtgtt

SEQ ID NO: 248624 - DNA, 580 bp, Homo sapiens
ttgactagaagaaataagtcttgggagaagcacacttggggtaggaggacattcaaaacctctcaaaccttaattgtctacaggtaagtcacactcttcatctgagggatgaaggattagtttagaaactgctagtacactatgtgctctattatatggcatgtgttaataattcatattaatcaaagatttaagtcaacaaaactgatatattaataaattataatatttatagtaggtggaactaaaacaaaataaaacatactttactaaatcatcactaattatttttaatcttkttttattttgaaggtactttagggtcttgtaaaacttcaggattctcattaatgaaaaatttttgctgttgtgatctaataaatttgtattagctagtacaaaaattgagttcatttcttagtaattctaccagagatatggattgttgtttgccttttccaaacttccttataacagctgatggagagcaccttgtttgtgcctgtaagatatactctcttagatgagaaaattagagtacattgagcttcttggatgtgtagattcacgttttttgtca

SEQ ID NO: 248625 - DNA, 640 bp, Homo sapiens
tgacaactggggaccctggggaaaatacaaggggtacaatgtggtctaatttggcaataggatgccacaggctgattgattaaaataggtaacgggatatgccagagtgatgaagaaacaggcaagctgggtgcataccagagttatcatggaagtaactggcaaaaataggaacaaggaacaggaaacactttgagcactcattgaatgtcaggtcctttccacatattacccatatatttccatagattaatctttacaaccctgtcaggcactattctctctccttttttcagaaaaggaaactgaggcacacagggcaaaatagagatgaataatctgctcaggtcacagctggtagaggtggcatcagggctttattttagagactgtttttttgttgaccttttgttttagtttttgttgttgktggtggtggtgttttgttttgtttttagagacaggcctcactgtcacccaagctggagtgcagtggtacgatctcggctcactgcaatctccacctcctggctcaagcaatcctcccacctccacctcctgagtagctgggactacaggtgcacactaccacacttggctaattttaaaatttttagtagagacgaggtcttgctatgtt

SEQ ID NO: 248626 - DNA, 507 bp, Homo sapiens
catactgggcactacaggaaccttggaatcatgcagatctgggttcagatctcagctttyccacttaccagctcaatgactttaggcacaagacggagccttgggtttgttatcggtagacagaaccaataacagtatttaccccagccaggggtgtgataggggatgtaagctgcctgggactcgggttctccctaaatggtagctgccccagcagccatgccacttctcaggtctcagatcacaagcctggcccaagatcttctgtccccgagaccacgaggcagccctctctgacccctacgtctgaccttgggtccagcaagggccataccactccattctatccaagataaaggtctggagagctggctttcagctggagccttgagagagaccaacaggtacacctgactgtggttggagggcaagctgcctgctgcagctctgaaagccaagaacctgctggacaagttcagtattcccagaactgcagccccaggccca

SEQ ID NO: 248627 - DNA, 557 bp, Homo sapiens
cttggaactcatccatgactggttggctaattggaatctgctgaactctattcagggcctggcatgtatgtgtacactgtatatagatttcatgtgtctgtgtgtacccttgatttacatgtttgcacacatatgtaaggtatctgtgctcatgcatgtgaattatggttcatgtatggcactatgtgaataaatggtttaattaattcaacaggcatttattgagatcctgtcacagctgggcactgtgccwggcgctggggatatgatggtgagtaagaaatggacagccctagcccctcagagctgggaagagagaccattaaagaagtgataataataagtgagctaagtgccatgatgggggagcacatgccagaggccctgactttaaccagtctagggagacagatcagggaagaactcatggagaaaggaaaagttggcaaagacttagtctgttgagggttaaattgtgtcccactccctccaaaatatattcaagtcctaactcccagtacctgtcaatgtgaccttatatagaaatagggtctttg

SEQ ID NO: 248628 - DNA, 557 bp, Homo sapiens
cttggaactcatccatgactggttggctaattggaatctgctgaactctattcagggcctggcatgtatgtgtacactgtatatagatttcatgtgtctgtgtgtacccttgatttacatgtttgcacacatatgtaaggtatctgtgctcatgcatgtgaattatggttcatgtatggcactatgtgaataaatggtttaattaattcaacaggcatttattgagatcctgtcacagctgggcactgtgcctggygctggggatatgatggtgagtaagaaatggacagccctagcccctcagagctgggaagagagaccattaaagaagtgataataataagtgagctaagtgccatgatgggggagcacatgccagaggccctgactttaaccagtctagggagacagatcagggaagaactcatggagaaaggaaaagttggcaaagacttagtctgttgagggttaaattgtgtcccactccctccaaaatatattcaagtcctaactcccagtacctgtcaatgtgaccttatatagaaatagggtctttg

SEQ ID NO: 248629 - DNA, 587 bp, Homo sapiens
gactctggctgcctggacccaggtctgctccaaggaagcagcacgtttctggaggaggcttagccaagaaaccattacggagtgagagaggagttatctggataaatgcggaactgcccaactcctarcatttgttcctgggacccaggctgtaacatcctctggagccaaactgcctctgttcaaacccttgtccccgcactccacctcctagctgtgtggcactgtgtgcattacttaactttgcatgccttactttttccatttgtaaaatgcatataataataaatcctacctcctagggttgtgtgaggatttaatgatttaataaataaaaaacacttagaacaattcctggcacatggaaagcatgtataaaatgttaagtattattattcattctttcatacattccctcattcatgcatttattagtctttccactcatccactgattcctgcactcatgcatgcatacatccaacattcctatctgaacccttattaacgaatgaggtcatgttaaaagtgaataataaatatcaagtttaggtttgagagacaaagagctaccaagagtagcctgg

SEQ ID NO: 248630 - DNA, 587 bp, Homo sapiens
gactctggctgcctggacccaggtctgctccaaggaagcagcacgtttctggaggaggcttagccaagaaaccattacggagtgagagaggagttatctggataaatgcggaactgcccaactcctagcatttgttcctgggacccaggctgtaacatcctctggagccaaactgcctctgttcaaacccttgtccccgcactccacctcctagctgtgtggcactgtgtgcattacttaactttgcatgccttactttttccatttgtaaaatgcatataataataaatcctacctcctagggttgtgtgaggatttaatgatttaataaataaaaaacacttagaacaattcctggcacatggaaagcatgtataaawtgttaagtattattattcattctttcatacattccctcattcatgcatttattagtctttccactcatccactgattcctgcactcatgcatgcatacatccaacattcctatctgaacccttattaacgaatgaggtcatgttaaaagtgaataataaatatcaagtttaggtttgagagacaaagagctaccaagagtagcctgg

SEQ ID NO: 248631 - DNA, 574 bp, Homo sapiens
ataatgaggaaatgagatttaggaaagaatggaaatctggctctcacttcccacatttcaagtgttagaggcacgatttttatgcagggaaagccggcccaggaggtttggagctactgaccaaggagtaggcgataaaggtgggtaaaaggctggatgggcaaacctcagggattaggtccaagcagatggagcctctgccctggaggaagaackttcctagaattatcctgcctccagatagagaagcaaggaagcctaattggtttcttcagctcctggagttggatccataaatcatggctccattgaaagcacaggtacctcctctctagggacactggtatgacttgatgtgagttcccagtgacatgaagaggcttgcagcctccacgtgcaggtccccatgccaccctgcccagaatagaaggcaccgctcgataaggtctgcccatcagctgcaatgtttgaggtatgcaggtacccaagggaggagcaggggagggaaggggcccaggaacagcagccgaacacagggagggagagtgagtgatgaagacccaaatagccttcc

SEQ ID NO: 248632 - DNA, 379 bp, Homo sapiens
ccacagctcgccccaccccccaacccccggccgaggcggcggaactcacgatcatcttcttatagagaccgtaatgcaggaccaggctatgggtcaatgccaggcgatggggcttcatagggtgtccagctcctgggggtggggagaagagagttcgtcagctctcacccctggagttgcaaccccgcctcaaaacctccgtgtcccaacccctcatgcatakccctgtttcctcaccgtagtggaagttgcccacgtcggggtcgtagaaataggccacggtcttggccatggtgccggcgggagcaggccccgcacctccgccgcccgccgcccgcggccgccgccagcccctccccggccgtgcgtgctgcgcaag

SEQ ID NO: 248633 - DNA, 612 bp, Homo sapiens
tatgtgtctgtggctatgccagtttaatttgcttacattagttcagtgaatccccaccacaactgtgagagatgggcattatcgtacctactttatggatggggaaactgagactcaaagtattttgcttcccttccccttggccttgagaaagtcacttaagcctctttaagactcggtttctttgtgtaaattggagataatttctattccatagaattgtcaggagaattaaacaaggcagggctgcctacatctggaacatattaagagtacaatagattgtaactattattagcagagccccaggccccagagttagtaagaggcggaggcaggctatgagccaccatactgcactgtcccccatcgcacagctgccagctccacggaaggaggckgaattctggcttgttcctgtggattcccggtgagtcccagcccaggcacaaggatcagagcaccctgaccatgcctccaagtcagcatctacaccagacactctgccacacggttgcagtttcagtaggccctctcctcttttctctgaattatgattccccttcacaaataggggcaagtggcttgcccaaaggcataaactaagttaaa

SEQ ID NO: 248634 - DNA, 534 bp, Homo sapiens
ccccttccttccactctgagatcccagctaggccctggggtttacttagtgtgtgacagcgggggagaggctggggctgagaagaaaggcagagggaagagagacaaagtggtgcattgattgtgcagctatcaatgctgggctctgagctagacatrcaagttaactcatgttcttctgacaccccaagaagttcttaaagaacctgaggtttaatgaaatgcagcaactggctcaagatctcacattgagtaacttgtgaagccagaactagaccaagatttttattatctgagcaaaattaaaatgtaaatcagatagtgccatcctctgcccaaatcactctcatggcttcccagtgcttttagcaagaaattctcttcctttccacggccagcaagaccatgtccctttcctccacctcatttctcactctgcctcagcaccaggcctttttatgttcctctagcacatgtgctcattctcttcttaaagctcttgcacttgctgatctgcctgcttggaaacctcttc

SEQ ID NO: 248635 - DNA, 560 bp, Homo sapiens
aatcccagctacttgggaggctgaggcaggagaatcacttgaacccaggagaaggaggtagcagtgagctgagatcgcaccattgcactccagcctgggcaacaggaacgaaactctgtctcaaaaaaaaaaaaaaaattgtgaggtgtaagaggagactctggatttgaaataaaagatctgggtttggccgggcatggtggctcacacctgtaatcccaccactttgggaggccgaggcgggcggatcatgaggtcaggaaatcgagaccatcctggctaacatggtgaaaccctgtctctactaaaaatgcaaaaaaattagccgggcgtggtggcaggcgcctgtagtcccggctactggggaggctgaggcaggagwatggcatgaacctgggaggtggagcttgcagtgagcggagatcacgccactgcactccagcctgggcaacagagcgagactccttctcaaaaataaaagaaaagaaaaagaaataaaaagatctgggttcaatctacttccatcccctatttatttactgtgccatcttgggcaaatc

SEQ ID NO: 248636 - DNA, 514 bp, Homo sapiens
gtcaattgctagaaacccaattcaaagtagttgaagcaaaagggaaaagaagaaaatttttggctcatatatgaaaaatcaaaggtagagctggacttcagcatggctaggtctctgggccttgataatattcttgccatctctcatctattctttccactgtgttaactacatctytgggcagactttcccatcttgttgatgggatggttgctatggcagaggctcctggttgcctgacaacagctgttccccttttcttccaatgtggtagaatattttagttggcaagatggcctttcttgcaattagttgtgctttaggactaaattctggctaatcatacatgagcaaaaatgatgtgtgtaacttttgggctgttcccctaaaagaaattgttgtgcttccccttcctttttattgccttctggctggctgaaatgtggtcatggtggtggtaagtgtcaccccccagagggggcagagcaacaaaatagaaggagcttgggattct

SEQ ID NO: 248637 - DNA, 241 bp, Homo sapiens
tcctccctccctccctccctccsttcctccccctctacttcctcccctcccccccttcctccctctctctcttcctttcatctattcaacaaacttctctggggtgcctgctctattccattctttatgttcagtgtcgaagtcttggaacaggaacttcccacaacaaagggaactgagcccaagaaataataatcataatcatagaactacaattaccattcattgagcgggtgcttac

SEQ ID NO: 248638 - DNA, 450 bp, Homo sapiens
tatggcccaccagctaagaatggctttcacataagtaaatgatgttaaaaatcaaaacaagactggtattttgtggcacataaaaagtatatgaatttcatttggcagcgcctcaaaaagttaaagatagaattatcatatgacccagcaattccaytcctaggtatgtccccaagagaagtggaaacatatgttcatacaaaaacgcatacacggatgtttgtaacagcgttatgcgtaatagccaaaaagcggaaacagcccaaatgcccatcagctgatgaatggataaacaaaatgtggtatatccatatacaggaatactattcagccaaaaaagggaacgatatactgattcatgctaccatagggatgaacctagaaagcaagctaaaagaagccagatgcaaaatatcacatattgtgtgattccatttatatgcaatgtcc

SEQ ID NO: 248639 - DNA, 565 bp, Homo sapiens
aaaaaaaaaatcggacagcacagctaaaggagccaaaatagaacaatttgttatattaagcaaatatttatttgcataattgtcactctcatttctatattagcacagcagcaaaactaacaatattcaattcagaagggcaagacatggtatacaagacgttgtatctcactggggaatagccaggggmctaaacaacaacagacctcaccttctaaggcccatgtctaactgcaagttaggaattttccctactataccactgcccctgaccttattacctcagggaatatcttaacatgttttatagataaaatttaatctgatattatatttaaaatatattgtataaagttaaaaaatgaactgcaagccagaatgtgagaactttcattttccaggaaaatgggtctgcaaaaatagccccaatttattgatcttttagcctcaatttgttgatctctcaacgatctctcccaattcctaacacaaagtagatcaacaatctctcctgattcctaacacaaagtagatcaacaatctctcctgattcctaacacaaagc

SEQ ID NO: 248640 - DNA, 547 bp, Homo sapiens
cctggcgttctgaggccaagcatgtgctggctctccccaacaccacattagagtacagatatctcttcaatatactgatttcctttcttttgaatatttgcccagtaggcggattgctgggatcatataggagctcaatttttagatttttgaagaacctccaaactgttctccatagtgattgaactaatttacattcccaccattctgtgtgggttgctggtttctccgttctrctggatacctcgtggataatgtgatcaatggcatggattgtcttgctgttcccactgcccacaaatcaagctcttaatagcccaataaaatcatgagattcaggctaaaaaagtgattgcattgctcagatgctaatgagacacatatatctgaaacaactgattaaagactgtggaaaggaggtctcagcacaacatgtggggtggctaatttacaaaggtgaggagcattccagataacagaatgtcacgcacctttacttccaaggagatgtatttaaaataggctgatttttcttacatattttccc

SEQ ID NO: 248641 - DNA, 483 bp, Homo sapiens
ttcccacctccgtgaggctggagaagaggccccctggatgagaaggaagaggccggcaggtccggcgggcgcaggcacaggtagacttctggtgggaaaagcgtgactcagcctcctccagcggctgcaggacgtccccccgctagaaagggccgggctccctttgctgacccagagtcaacccagcgattcctcccggggaggcggggggccccggccccggcccagagcgcatgcctatgccgggagctgggcgaggacrgggcacagccacagctgggtgcccaacgggaaaggcggccgttccccctcaagctgcacctgaaggggtccccagggtcgaggccacttctccttcggctcagggttgaccttcagtgaccactgtggcctgcgggcatcccctgggagggacggagggggatggaggaaaactccaaagggaaaggccgaatcctgcagggtctggtcgtcggaaagcca

SEQ ID NO: 248642 - DNA, 509 bp, Homo sapiens
tattacaggagtgagccactgcacccagcatttgccaagacctttgatggcaggctttttccaggtgatcagtccttgtctggtctggctctgccccactctccttctcacctagttggaatccctagctacttttcagtagaggagagtgtgtaccccaatcccagcttggttcagatctgcatttaactcatggaacctggctgctccccaggtcctgaagraaaaaacggtctctctgtgcgtatgataaaggatgggcctgtccccaggaccctgtgagagggaagcccaatgtcccaccaggttggcagggctggggaagggaaagtgttatggcagccccaagaaaaaaaagaggcagcagagggagcaggacagcgctcacatggaactcatgccactgcctgaatgaggggagggaggagtgcacgccagtgacgtcagggggcagagaggcgcagttccagggcggctttccccctcacttcctgccatgttactctgat

SEQ ID NO: 248643 - DNA, 509 bp, Homo sapiens
tattacaggagtgagccactgcacccagcatttgccaagacctttgatggcaggctttttccaggtgatcagtccttgtctggtctggctctgccccactctccttctcacctagttggaatccctagctacttttcagtagaggagagtgtgtaccccaatcccagcttggttcagatctgcatttaactcatggaacctggctgctccccaggtcctgaaggaaaaaacggtctctctgtgsgtatgataaaggatgggcctgtccccaggaccctgtgagagggaagcccaatgtcccaccaggttggcagggctggggaagggaaagtgttatggcagccccaagaaaaaaaagaggcagcagagggagcaggacagcgctcacatggaactcatgccactgcctgaatgaggggagggaggagtgcacgccagtgacgtcagggggcagagaggcgcagttccagggcggctttccccctcacttcctgccatgttactctgat

SEQ ID NO: 248644 - DNA, 577 bp, Homo sapiens
ctggataaaaaaacaagacacttctgctgcctttgagagacccatctcatgtgtaatgatcccaacaggctcaaagtaaatggatggaaaaagattcatcacataaatgaaaaacaaaaaaggagaggtattgctattcttgtatcagataaaacagacattaaaccaacaacagtaaaaaaaaatacaaagaagggcattatataatgataaagtgttcaattcaacaagaagacttaactgtcttaaatatatatgcagccaacattggagcacccagatttttagaataaatattactagacctaagaaaagagatacacagctgtacaataattgtggaggacttcaacaccccaccgacagcagtaagcagattattagttaggcagattattaggcaaaaaactaacawtgaaactgtggactcaaattgggctcttgaccaaacagacctaatagatatctacagaatactccacccagaaaccatagaatgtacatttttctcatttgcacatggaacattctctaaaattgaccacatgctcagtcataaaataagcctcaataaatt

SEQ ID NO: 248645 - DNA, 577 bp, Homo sapiens
ctggataaaaaaacaagacacttctgctgcctttgagagacccatctcatgtgtaatgatcccaacaggctcaaagtaaatggatggaaaaagattcatcacataaatgaaaaacaaaaaaggagaggtattgctattcttgtatcagataaaacagacattaaaccaacaacagtaaaaaaaaatacaaagaagggcattatataatgataaagtgttcaattcaacaagaagacttaactgtcttaaatatatatgcagccaacattggagcacccagatttttagaataaatattactagacctaagaaaagagatacacagctgtacaataattgtggaggacttcaacaccccaccgacagcagtaagcagattattagttaggcagattattaggcaaaaaactaacattgaaactgtggactcaaattgggctcttgaccaaacagacctaatagatatctacagaatactccacccagaaaccatagaatgtacatttttctcatttgcacatggaacwttctctaaaattgaccacatgctcagtcataaaataagcctcaataaatt

SEQ ID NO: 248646 - DNA, 577 bp, Homo sapiens
ctggataaaaaaacaagacacttctgctgcctttgagagacccatctcatgtgtaatgatcccaacaggctcaaagtaaatggatggaaaaagattcatcacataaatgaaaaacaaaaaaggagaggtattgctattcttgtatcagataaaacagacattaaaccaacaacagtaaaaaaaaatacaaagaagggcattatataatgataaagtgttcaattcaacaagaagacttaactgtcttaaatatatatgcagccaacattggagcacccagatttttagaataaatattactagacctaagaaaagagatacacagctgtacaataattgtggaggacttcaacaccccaccgacagcagtaagcagattattagttaggcagattattaggcaaaaaactaacattgaaactgtggactcaaattgggctcttgaccaaacagacctaatagatatctacagaatactccacccagaaaccatagaatgtacatttttctcatttgcacatggaacattctcyaaaattgaccacatgctcagtcataaaataagcctcaataaatt

SEQ ID NO: 248647 - DNA, 562 bp, Homo sapiens
ctggtctcaaacagctggctcaaacaatcctcccatcttggcctcttaaagcactgggattacatgagtgaggcaccacacctggccaagaatttccttaaagcctatgaagtggtgagcctttcatttcatgtggaaggttctggtggctgcaggatggcctgaaatgagagagcaagtgatcctttagagaaatggtttccttttatccagtctgaagctgatgggggtgaaatctggagtggcagaagtaaggctggaaaggaggagctagatyggaggagaaacatcagcaggacttggctgaaatgtgttgggtttgttcattcgtttatttactcagcagatacacagggagtgctcgctgtgtgcttggcactgtggtcaaggaactgagtatgcaacaaagaagagaacacatacagtccttgctctgtgccactcacagtttggcacaggtccggagaggaagaggagggctccaaggtgtgctcaaggttccactgggacagtggtgtcctccccaaaccaatgaccaattagtgaggggtgcagtcatgcc

SEQ ID NO: 248648 - DNA, 641 bp, Homo sapiens
cccttgggtcactggaatacttcctgactggtgtctctgccttatgccttgattccactgctccctgcccatgccctcatatcaggaagtcagatgattgtttttcaaatctaatctgattacaatcacattactcctgcttaaaatctttcaaaacttcctctctttctcagagagaaggccacgacccttacctcaagggcagagctgtgtgatgtgctggctattaattctccctgcagtcactctcatccagccttacatcctctttgctgttctttgaatactccaagtttccacctgtctcaagtacctttgctgcttgctgtccctgtgccaggaacttggttcccattgtatccatttggccttctccctcatcaccatcaggtttctgctcaaatgtcaaactcactgaggmtttcccagtgtgctctattttaaacaagctccctctccttggccccacattttctagactcactttctctttcatttgttgtctagatcactaattgtttcctattttgctttacttagagtactataaactttccttttaagatataaaaaataaacttcatgatagtataatttctatttgattcattatccctacattccatgaaaatgcctcccca

SEQ ID NO: 248649 - DNA, 608 bp, Homo sapiens
atgtgaaacctccctggctgcacgtcccttcataggctctctgcagggggaagcacatcaygtgctgttggctcattctggcagtccaacctggcattgtctttacacaatcctgcatgcaattttgtatttacaataatcaggagcatttcatcttttattccatagcaatagttttcagggggtctccttacatctcctccatttctctgatttaaatgaaccgtagcaatcatagcttggtgctgatcacgattggaatgaagaaaaatttttccaattttacacatgaataataaaccaatagcacaaattatacacagaacaaagttaacagtattggatcctcccaaatgttttacccattgaatggggttgagattagataaaccctcagagataccatctaaaacttcagcactgggtaaagcagttaagtgtgcttgagaggcctcaaaaatctgttcttttagcttgcttatgtctaaacttaaattatcttcacttccttataaatggcgttttactttttcccaattgtgaacagactcattatattggaatggagttacacaaaaatcagaagtattccaatcacattgcatttg

SEQ ID NO: 248650 - DNA, 608 bp, Homo sapiens
atgtgaaacctccctggctgcacgtcccttcataggctctctgcagggggaagcacatcacgtgctgttggctcattctggcagtccaacctggcattgtctttacacaatcctgcatgcaattttgtatttacaataatcaggagcatttcatcttttattccatagcaatagttttcagggggtctccttacatctcctccatttctctgatttaaatgaaccgtagcaatcatagcttggtgctgatcacgattggaatgaagaaaaatttttccaattttacacatgaataataaaccaatagcacaaattatacacagaacaaagttaacagtaktggatcctcccaaatgttttacccattgaatggggttgagattagataaaccctcagagataccatctaaaacttcagcactgggtaaagcagttaagtgtgcttgagaggcctcaaaaatctgttcttttagcttgcttatgtctaaacttaaattatcttcacttccttataaatggcgttttactttttcccaattgtgaacagactcattatattggaatggagttacacaaaaatcagaagtattccaatcacattgcatttg

SEQ ID NO: 248651 - DNA, 487 bp, Homo sapiens
tcccatgggagaagcccccagctatgcctatgtttgtgcacagggatggaaagacttcctctcctccaagacccttcctgtgcaccagggctgtctgactgttgggatacagctgaagactttccctgctgagaccagctcttcaactgtgccactgctgaaggaagctttccaccagtggaaagatctggttctcaaagcttgccatcgagattcttttgtctcacagggttttcccttgatgtggtgcacttccacttcccctargagtgggagtccatgagggctagactactgtgaatgttgttgctcctctgggtctagctgcccagtgagtttgccacactccaggctggtgttggggaatgtctgcaacggatctggtgatgtgacctgtcctgaagtttcccagcagtgggtagcagcaccaactctaatgggggtgtcaggggagtgacagagattctgtgaaattccttggattttg

SEQ ID NO: 248652 - DNA, 544 bp, Homo sapiens
ctgtttgatcctttcttttacctgtgctaacaaaagggaatgagagaatacataacctcagacgtacaacttgcatgcatagaataatttgaactacagaataatctggatttgctttgacaatagacaaatttgcttggtggaaacaagagtttgaaatttgcagtgtttactcatgttactttactttcagagtcaactcaagcaacaatgtatscaatttctttttctattgggaaaaaataatagtccatctcctacaatcaaggatctcctttaaagaggctacatccacacagggccacagtggctgcactacagagcatgagtgtatgcagcctcactgaggacaatacagaaaagaaccagccctagtgacacagccattggaaaatatggggaggtggtaaaataggaatttttagcaactggtctaggcatttatttaaaatgatctggaactttggtcctctggaaagtcctcagagtctgaactgggtggtccatttacctagatacatgcaaattttcttaagttacatct

SEQ ID NO: 248653 - DNA, 630 bp, Homo sapiens
gtccccatacaaattcaagctttagaaaagactatgttcatagtttgtcttaacctgttctcagaggagctcctacatgttttgagaataaaacagtcaaaacagagtaagcaagtcaattttatataatctctatttctattttgaaataacagccaattatttcaatagctaaataatttcctactggctaaacatcttggaaaacttgaataacctcaagccacaaaaatgtctatttattatttgttaacttttattttttattaatttatttttaattgagaaaaataattgtgtgtatttatggggtaaaatgtgatgtttcaatctatttatacattgtaggaagattcaattaagctaaataacatattcatcacctcaccaacttatcttttttttggtgagggtgggaaaaattcttttagcaattttgaaatatgcaaatacattagtattaactgtggtcaccatacagaaataaatggctatatatttawaaatgcctttctcatttggggtgctagtgcttacaaaagaaaattatacctccaaaataacttaaactgattaagatgtaactggagtacaaaaagaaaatgactcaagaataatttgcttaattcc

SEQ ID NO: 248654 - DNA, 527 bp, Homo sapiens
ctgtgtccatattttatgagagaaggaagatgccaggatagtggctggtaccatttccatcactgtactttaaatcacgtaaggtaatataagtgggtatttgcgcatgtgtccacttttacgtatggaatgtatttgtatctatctatacggggtgtgtgtgtgtgtgtgtgtgtgtgtgtgtgtgtgtgtgtgtgtgtgtgtgtagtctctggaagcaagttccattctccatggtccttgataggagctattttgtatccaaaattttttatgctcttatatttaactaagcctaacattttgtaatattcttttcatgcagtttttaaaattttctttctgatcctgattgtgaaaaggagtgtctttcatcttgtcacctgacctctctcttctccactaataaccatctttaaaaagaccccatctgcastcccatgttcaatgcagcactatatgcaatatccaagatttggagtaatctaaatgtctatcaatggatgaatggataaggaaaatgtggt

SEQ ID NO: 248655 - DNA, 446 bp, Homo sapiens
caggctatagagcagtggtgcaatctcagcttactgcaacctctgcctgccgggtccaagcgattctcccatctcagcctcctgagtaactgggattataggtatgcagcaccatgcctggcttttttttttttttttttttaagtagagacagggttttgccatgttggccagtctggtctcaaactcctggcctcaagtgatctgcctgcctcagcctcccaaagtgctgggattacagatgtgagccacygtgcccgagctggactgcatttctttaccttgtttattatccatcttctctgtaatgcaatctaagtgagaaaagaaatttttggccttttgttttttaaatttttatgctgctatctccatggattgcagcacagcactttgcatacaataagtcctcagatatttattaactctgctgcatgtgtagaaaa

SEQ ID NO: 248656 - DNA, 571 bp, Homo sapiens
aacaaatataatggatgtgaacagggatagggatgtagaagacctacaggacagttctgcatagattggtcaattgcttctgagcactgataaatgcatagagggatagaatgtcagaaaaactgaagaagccattcaaaatacatcatctaacttagattccagaatactttgcaattgtatatgatagatctaacctgtatgcccatgtagagattcttactcatattaaagcaagctgaaagcgtacatttgagtagatgggcttattgtttcggttgtattttgggtttcttggttgttgttataatgaaacaaatgttatctgtaaactaatgtgcaaatcgggaaagttaatacatatatacattgtatatagtaaagtatttaaacaaaattttgagtcaatggacaacttcttcccacttctcttggatctgatgtgagtgcttttcacagatataatmcctgaagaaatacatggagctagaaagcacctgagttcagttttattagttgatgatcctaggtaactgatggtaattttacttctggctctgagaaagggaga

SEQ ID NO: 248657 - DNA, 605 bp, Homo sapiens
cgttaacaatgttccatcattcgtatctttgtttctctgtaggtaacatgtcttcctcctcactcccagcttcttttgtgattttctctttatcaatgaatggatcaaattgattatatcatgtcctaatatagttttcatgtttcttgtacttgggaagaycatttgaatttgtcccagaatttactgatgctcttttcttttctttcttttttttttctttttttttgagctggagtctcgccctgtcagcttggctggagtgcagtggcgcaatcactgctcactgcagcctcaacctcccaggcttaagctatcctctcacctcagcctccagagtagctggaagcacaggtgtgtatcaccactcctggctatcgttttaattttgttgtagagacagggacttgctatgctgcccagggtagtctcaaagtcctgggtttaagtgatccttctgcctcagcctcccaaagtactgggattacaggtgtgagccacttcacctagcctgatgctcttttcattgaactatatatacatatatatttttttctctatgttttattttaaattccttctgttgctgtcttcaaatacactaa

SEQ ID NO: 248658 - DNA, 605 bp, Homo sapiens
cgttaacaatgttccatcattcgtatctttgtttctctgtaggtaacatgtcttcctcctcactcccagcttcttttgtgattttctctttatcaatgaatggatcaaattgattatatcatgtcctaatatagttttcatgtttcttgtacttgggaagatcatttgaatttgtcccagaatttactgatgctcttttcttttctttcttttttttttctttttttttgagctggagtctcgccctgtcagcttggctggagtgcagtggcgcaatcactgctcactgcagcctcaacctcccaggcttaagctatcctctcacctcagcctccagagtagctggaagcacaggtgtgtatcaccactcctggctatcrttttaattttgttgtagagacagggacttgctatgctgcccagggtagtctcaaagtcctgggtttaagtgatccttctgcctcagcctcccaaagtactgggattacaggtgtgagccacttcacctagcctgatgctcttttcattgaactatatatacatatatatttttttctctatgttttattttaaattccttctgttgctgtcttcaaatacactaa

SEQ ID NO: 248659 - DNA, 586 bp, Homo sapiens
gggtgaaaaaaagtgaattagtttctgagatattcatgataatttagtggttgaatgaatatattagttggatggaaccatatgaaattgctaatactgaaatgttaaatgataacttgtattgttggaaccatatgaaattgctaatactgaaatgaaaaatgataatttgtattgtttagaaattaagcatggaagagatgcacaagattctcargtttctggtttgagtgagtggttattagaatcattcattatgatcacaaatgcaggggatggaagaagtaattatctgttttctggacctacataattctaagtgtttttgagaaattaagatgcaatattcactcagagtaattcgatgagtagatagggcagtgataagagtaactacatcaggaaaatcatgagttcagtgacaggtgggtgaacatgtataaattaagaagaaaaaaagagtgagaaaaaaatgatcatttagaagaagagagaaaggatgactgaaagagcctgagaagaagtaatcaaggaggtagaaaattttttttacggaagttggtgccaaggaaagggggtcacaaaa

SEQ ID NO: 248660 - DNA, 550 bp, Homo sapiens
aagtcttaacttgaactaagagaatcattcatgtttaatcctgatcttggtcttgattggcttatatttttgatccaacctacttttactaattagtgtgacctctaaatttattggaaaattgattaaatattagctagcactgttcaatttaagatattagtattggagttttggaagataattacaaatttttgacataaaattgtcaatttatttattcatttattttttgagacagggttttgttttgtcacccaggctgcagggcagtggtgtgatcttggctcactgcagcctcactctcctgggctcaagcattcctcctgcctcagtttccacgcctcacgcccttcccacccttccaccagtagctgggactacaggcttgcacaccaccacatctggctaaaaactgtcaatttcttatgtcactttttacttstttatttataacacaggcaaaggattattttactctggcacctgatgaatgtttaatatggagaaaagtttaaccataaggttgttaagtgttaataaattgact

SEQ ID NO: 248661 - DNA, 604 bp, Homo sapiens
taaggtgaattaaaaatacattttgcataaatgagatatttatgttttggagttgctagtactgcattttgtaatgtatttatcttatgaattcaaatccttagataggcatttaactatgtatgaaaaaacaactttttcttttttctgttaagtacccctacgtactggtgctaatgyatgagttagtatacaaggtttctttctacctgtgttctttagttaaagtatattggagacttaagatattctccctacctagtagctttaaattgagagcattttgttttgagaaatagggttgtaagagagcatgagatagcagatggggaaattgaaaatctgattcattccacacaaattgccagtaagtctcttacctggaaagagatttaccttttgaaagtatgaagttgaatgttctgagaaatgtgggatttatttgtaagcaagaaatcccaataagtagaaaaagggggcaagaagatcattttcattagtggaagtttaaaatgggtcaccaagaaaaggctatagaatagtatcatgtaaggttttgccctacatagaggttaagatgcttctttttctttctctctactaa

SEQ ID NO: 248662 - DNA, 604 bp, Homo sapiens
taaggtgaattaaaaatacattttgcataaatgagatatttatgttttggagttgctagtactgcattttgtaatgtatttatcttatgaattcaaatccttagataggcatttaactatgtatgaaaaaacaactttttcttttttctgttaagtacccctacgtactggtgctaatgcatgagttagtatacaaggtttctttctacctgtgttctttagttaaagtatattggagacttaagatattctccctacctagtagctttaaattgagagcattttgttttgagaaatagggttgtaagagagcatgagatagcagatggggaaattgaaaatctgattcattccacacaaattgccagtaagtctcttacctggaaagagatttaccttttgaaagtatgaagttgaatgttctgagaaatgtgggatttayttgtaagcaagaaatcccaataagtagaaaaagggggcaagaagatcattttcattagtggaagtttaaaatgggtcaccaagaaaaggctatagaatagtatcatgtaaggttttgccctacatagaggttaagatgcttctttttctttctctctactaa

SEQ ID NO: 248663 - DNA, 613 bp, Homo sapiens
agtgactatattctggtagttgatccagatgccatcagaaaactatttccagatttttaataatagcagaaaatggaactgggattcattgttttctgcacccataactttggcaatcaatggtgtaggttcttgctacaaaattaaccttgccttgaaagatacttatatatgtagtgcatgacatttctatttttttttttctaaaactagcttcmtggtctaggaaagaggagctttatctacaagagcagatattagagaacacacagaccagtaaaatatttttcaaaataaaaatgtagaagtgattgagtggtgtagtgtagtaacactacaattaagaactatacacactgtttcttattacagttaatgagctacatatatgcatatccacatatttttaactcatatgttctatgttcatgtttcagaagcaataaaatcaaaatatgttttctatttatgtcatacatgtttgaagaaagaaaaagaacacgttacaaaaggcaaagaaaatcacacagaaattctttatcaaagcaaaaaaaaaggctttataacatgcctaatttgagtcagaatggtatagtattaaaaatttgaaggt

SEQ ID NO: 248664 - DNA, 511 bp, Homo sapiens
taagttttactacttaatgtcgtctttcaagggactactatataccaagcattttgctagattttagggataaagatgttctcttcagagaagatacatttaagcaaacaataatataaagtattttargtgattttatagactggtggcagtaaagagtagcctgatgaatttgagtcatttaggggtcagaattgatggaacttggtgtttggttagacattgtaccactgatctactattatgtactatctactattatctactattacgtaatgacataccaagacttagtggcttaaaacaaccacagtcatttcatttttatctcatacagtttagattgttgactaggatcaattatgaagtttctcttagagtctcatgaggttgtagtcagacagtggctgggtctcaaataatctcaagggttttctctcatgtttggtgcttcatgttggctgtcagctgggacctcagctgcggttatcaagcagaacacctacatctg

SEQ ID NO: 248665 - DNA, 511 bp, Homo sapiens
taagttttactacttaatgtcgtctttcaagggactactatataccaagcattttgctagattttagggataaagatgttctcttcagagaagatacatttaagcaaacaataatataaagtattttaggtgattttatagactggtggcagtaaagagtagcctgatgaatttgagtcatttaggggtcagaattgatggaacttggtgtttggttagacattgtaccactgatctactattatgtactatctactattatctactattacgtaatgacataccaagacttagtggcttaaaacaaccacagtcatttcatttttatctcatacagtttagattgttgactaggatcaattatgaagtttctcttagagtctcatgargttgtagtcagacagtggctgggtctcaaataatctcaagggttttctctcatgtttggtgcttcatgttggctgtcagctgggacctcagctgcggttatcaagcagaacacctacatctg

SEQ ID NO: 248666 - DNA, 541 bp, Homo sapiens
ctttcttcacttttgtttcctctaacaaggtaatttcaaaggctctgtctttcggcttgttgattctttattttgcttgatcaagtatgctcttgaagttctttgttgaatttgtcagtgcagttactgtgtttttgagttctaaagtttaattttaaatatgytttctctctttttgttaaacttctcattttcttcatgtaaatttcctgattttggttagttgtctgtgccctcttgtagctcatttggcttgttttagataattgtgttgaattctttctcaggcagtttttagatggcgatttatttatggtcatttactggtgcttttttgttgttgttcttctggtggcatcatgtttccctgattattcaggattcttgcagtctgtgttgctacctgcacattaaaaaaaataggcacctcttccagtcttcatagactggctttggcagagaaagcccttcaccagtctgccagtctagaggttcatggtgggcaatctagtggggtcctcatggggggctggcctgatgc

SEQ ID NO: 248667 - DNA, 589 bp, Homo sapiens
agtgttctaaatgtgtcacatgcagtgtctgatctcagccttacagacagggattctccttgacctttcttttgtcagaggagaaaactgaagctcagagaagtaatttatcaagactgcacagccagtaagagacacgggcaggagtcaaacccagcttgggccctttatgtatgtctcagaaatataccgcctttcttaaaaattagaattgcatacagacaagagccaggccttgctttatcatttaccagttcctattttaagttggaagttgagtgcatgggttgagaaagatgactgggactyattttgaaatgtgccatctttttttagcagattctgaacacaaactcgagacgagttcaggaagagtactgggaagatttagaggtatgcctatgaccttttagaacccttcatgtttggttcaaagtcaacaagcacatgtcttttaaaaagcaaggagatatttcatattttgtctctgaagataaagcaccttgtatgcagcttagcatctcccagagtaaatacagaatgcacaccataaactaaactgaagtgcatgggtctggcagcagatttc

SEQ ID NO: 248668 - DNA, 656 bp, Homo sapiens
cacatatcatctaggttcatgtaggtagagtctgtattcgtgcaatgctgaaactgcctaacaaagcatttctcagaatttattccattgctaagtgactcacgactacagctgcaaatagttatgcagtattttactatgataatcctcacagtacttcatgaagtaggtattagttttatatccattttacaggtaggaaaatggaggttcagagattgtccaatttactcaaggtaataaagtgagtacatgcrctgacacttttaacttggtgtctcttacttcaaatttcacgcttttcccccctgctataccagtaagtcaattacttgttatccttagcttttataatacttggttcaggcctctgttacacaaattataaagtgatttttgtaatcaataatttagattataaatgaggaatggaaagagtttattaattttttatgtttacattgtttaacataatgttcagaacacagtggacactcaactatttgtgaatgaataaagaattacctgcatttcctgaaaggagaattaaaaattatagcaaatattccagaggtaaattatttcacttttgaaaacattacagttcactttcacatacatggcactataagtaaactgtgtctaagaaggtatag

SEQ ID NO: 248669 - DNA, 602 bp, Homo sapiens
tattgagaattcttaaatgaaatagataatttttttgtctcagatagataaaataataacgatagttgccattaactgagtcttatgtgtgccgagtgctttacatagtttgtcatttattmctctcaacaattccaggaggtatgttagattattatcaccattttacagagttagaaatggaggctttgaacagtcaagcaacttgctctattaaacatttgttataagtaaacgtttgaatctgtgttaaaaaccagatctgtctgccttcaaaatctgtattctattgtcctgtcctgttcttcctcgatttcaatttcttcactaacattttcagtgtctgaaagtatccattcatttaaaaaattttggtgtacctacttatatgtctgacaaaagttagacatgatctctgtctttatggagcattgtgatgcagaattaagtagtgcagaacccagaatactgtacttactgcagcacaggtttatttaaagcaaatgactaaactgatttgcagaaaattttaaaatcaaaggttgctgttttaaatgttaaattcatatgactttcagagtagttgttgtgagggtattaaa

SEQ ID NO: 248670 - DNA, 602 bp, Homo sapiens
tattgagaattcttaaatgaaatagataatttttttgtctcagatagataaaataataacgatagttgccattaactgagtcttatgtgtgccgagtgctttacatagtttgtcatttattcctctcaacaattccaggaggtatgttagattattatcaccattttacagagttagaaatggaggctttgaacagtcaagcaacttgctctattaaacatttgttataagtaaacgtttgaatctgtgttaaaaaccagatctgtctgccttcaaaatctgtattctattgtcctgtcctgttcttcctcgatttcaatttcttcactaacattttcagtgtctgaaagtatccattcatttaaaaaattttggtgtacctacttatatgtctgacaaaagttagacatsatctctgtctttatggagcattgtgatgcagaattaagtagtgcagaacccagaatactgtacttactgcagcacaggtttatttaaagcaaatgactaaactgatttgcagaaaattttaaaatcaaaggttgctgttttaaatgttaaattcatatgactttcagagtagttgttgtgagggtattaaa

SEQ ID NO: 248671 - DNA, 519 bp, Homo sapiens
aacaatgtattcagtagcaatgtctttccctccaaactctttaactagagctccctcacccaaacgttttgttttgttttattttgttaggaagggagtgagttcagtgtttcaatgtggcagtaattgttattaattgttatttaaaaaaaatgattccatatatgaacctagctttaagatcagtagacaaacttgagtgcttctactcacattggggaaatttctcacaaaaaaagaaggagacaattcaaattgagtaaaaatttaagcgtggtagtttatttattgaacatagaggtttaatacataatttaaaatcatttaaatgaacatagaagtttttaaacatcagtttatttgtataagaagctgtatgttagtgttcttcagagaaaaaaaaaaacaaaagaggagatagctcccaacacacacacacacacacacacacacacacacacacacacacmccccatcaattatgggaatggactaatgtgctaatagagggttagcagt

SEQ ID NO: 248672 - DNA, 608 bp, Homo sapiens
tggggtgatgagcctagtagagtgaaaagacagaagcagcagaagcttatttggcagagtggaaatgcagcatgagctttgtcctcctattgccatactgcctcttgtttactataattaaatgccattattgtttaggccactgttaataggattttctgtttctcgcaggtgaatatattcttgtctgacacataatgatttataatctgcaaagaatgtayggtattgttattttatattaatcaaatgaactctatttccttttggagattattttgtttgccaaaaacattgtatgtgataaagacaatgtatgccatatattgcatttcatgcccttaattctttctttgacaaaaaccctgtgtttcaataaaatgggtaaaatcccaggttaaaaaacaaaaataactgaatatacctaaaattccagccaaattacaaatcaacatttttgaagttttaaaaattcaattgagacagattttttttcccctgaggtattatttggcattttaaaactcaattttgttgggacattttaacatctcaaggtagcttttgaggtttgcagcctcactaggatcatttcccttgagaaaaat

SEQ ID NO: 248673 - DNA, 651 bp, Homo sapiens
tatgtgataactcactatcctaaaggatgcttctaaagtgccttgmttatagcatgaatttattaaatatttgttatttttagtcaagtaagagaaagagaatcaaattcatcctctttaaactccattcatcaacagacaagcaaaggatcagcacacaaatgaacccaagacactggcttactaatcaagtgtggcaaacagaaaaccaataactgccctcactgccatcccagagacagaaaaaaaagagacacagaaaggctttgtggcttttagaaatcataggcctaattagaattattctagtgatagacataaactccaagagtcttgtgtaaccaagaccagcttagcccaacttggttaagtttgcctttagttctattcacgattctttgagcatcaatcccactgaacttggttaaaaaaaaaatcatgtatttaatttctccaaaaattataattctacaagtttaaacagtgcaatataaaatcattaggtgccttctatttgtttgtatacacatatatcggcagtatgacatcttacacaaatgcactactgatttgaataatctttcttctctttgaggaaattatttaaatcatgaatcataaaaatgtcctcagaagaaaaaaaatcattct

SEQ ID NO: 248674 - DNA, 577 bp, Homo sapiens
gccagcctgtgctctaatgtaccacattatctacattgaccaggtctctgcagaatcttggcaaggattccttcacctgttaggaaactaattcattgcagtcagacacatatctatgcttaacttatgtctattggacaaaaggttattaaacagaatgaatgtgaagattacattaaaaggtctgacagaaggcagaacttcagggttgagacttcatcctcccttgaacaccagccattgcagctacctgaggagccctgagcaaacatagcctgctagcgcagcgatcacctctgttgggcaggagcagagggttaaagacctaaaaaaaatcttgccctatgtcaaacaggagaataaacaaccttatttttgttttgtttcaatacattggtagtgttcctttttctacacagttgctgttctaaaacctgcctgtgctgcaagggtcctgraggaaacctgaggcaactggcctgatttgcattgactcctggtgacctccctgcaggcaaagccctacggacaccctctggaagtacaggcagagtttaaaacacaggttctgcctgta

SEQ ID NO: 248675 - DNA, 562 bp, Homo sapiens
attcctctgacaacaaatcaaaaagattctagattcttctatctgtttgagcaggcagctcccccagtgtttgaccccaggaaaaataaatcaaattatttaaagtcaaaaagtggtatgacctaaaaaaaaaaaaaagggtaagaaaatgtccccagttatgtagtgaaaaacaaatggattgaaaaatatcagaaaaatctctggagagaaatcaaaatgctgagaaatacagagataatattaagccaatgccctttcttctatgagaagctggatgaattggccagcagttgcatctggtggtagtaaaggytttcccctggagaaagcaagctggaggtgacctttcagattcagcagcagcagcagcagcagccaatgcctctggctagaggggtgaatgtaccacagaattgtccctacagggcaggtgccctgaggcttgcaaaagaggaaattcaagagatgctgattccccacccttgacatagaatagccaaaggaatgaatcactgaccctaaaacatttatgaagatgcaagagagaaggagaaggcaa

SEQ ID NO: 248676 - DNA, 592 bp, Homo sapiens
ccattgattcttacagctaattctttaaaagagaaagttgcaggaggtcagtaaatcagtggtgcacctgggttctgtagaaacagggaccacagaaatgttccaacaagagatgaagaagaagtggaggggaatttggaagatggtttgtcttcagggagacgccatgaatcattcacttctcggccaacttgcttagagtgtagttgatggcagtggcttgtyggcatgcctgtttataaaagagcaggacccactgctgagaaggaagtgcaaaatggctcactggagacatcagcaggctataccagacccaagattgctgaccccagatattatcttcaataggctgcctccttagaaggagagcaccttttttgggtatgcagcctccctttcaaggctgccctgaaattgagaaagagtattccaaggtggactggtcagctggtccataaagcgtcccccatgcaccccagccctagtttaggtctggttccacaggggactgtgaggtcatccaggagcaccaggccttggccaccacctccacccccaccaccctacatattttgcaatcagaatttcatac

SEQ ID NO: 248677 - DNA, 537 bp, Homo sapiens
caggttgtaacaggtattgggttctggctactttaaatacaggtccctaaactttctgtaggatttgccgatcctttttgagcttttgttgtagtcggcaagggtttcaagcatattcatctatatcttggagcattttaccagcatagcatttaggcacagagttgcacaccatgcatacgcgagggtggccatggccaagtggaaaggcctaggaatcttaacttcagaagctctgggtctgaagttcaatgctgtatttgccaggtgtgcaacctcacttatcacttctctgagcctcaattctctcatctacaaaaatgtagaaggttctctcaaggtcgatgtggacctaaaaatgacatgtgcaattctggaagaacttacatgcctgggtcctctgctggagattytgtagtctgaaacagagcctgagcgtcagcaatttctgaattttaggtgtgttattctgatggctaagaaccatgatgtgacatgctgtttagctctggagatgggggtttgggaacagccttg

SEQ ID NO: 248678 - DNA, 436 bp, Homo sapiens
tcaatggcttatacactgattacatgatgaaataataatatgtgggatatagtaggttaagtaaaatatatcaattagcacaaatttcacctgctttttgttgtgatgttgttgttaaagyggctccttggaaatctgaaattgcagacgtggctcacattatgtttctattgaatagcactggtttgggcaaagctaaagcttgatcacaggcatgtagctggttctaggaagttcctactagcaaaaagttttcatggtagtaccaaaatgggattctaagagaggttttagcaaaaacatcagactgtgactaaacaaaacagggttaaaagcatagattcaaactactttcatccaagtaacccagcagagtttccttgagagaatcatgagtctggaaggagaattttgatgtcaactctgaactactgct

SEQ ID NO: 248679 - DNA, 436 bp, Homo sapiens
tcaatggcttatacactgattacatgatgaaataataatatgtgggatatagtaggttaagtaaaatatatcaattagcacaaatttcacctgctttttgttgtgatgttgttgttaaagtggctccttggaaatctgaaattgcagacgtggctcacattatgtttctattgaatagcactggtttgggcaaagctaaagcttgatcacaggcatgtagctggttctaggaagttcctactagcaaaaagttttcatggtagtaccaaaatkggattctaagagaggttttagcaaaaacatcagactgtgactaaacaaaacagggttaaaagcatagattcaaactactttcatccaagtaacccagcagagtttccttgagagaatcatgagtctggaaggagaattttgatgtcaactctgaactactgct

SEQ ID NO: 248680 - DNA, 608 bp, Homo sapiens
atgtgctttatttactatcattatcaaccacgagagccattcaatgcaaatagtgccacaaagtgtttaaacagttctcctcatgacctcctggccctgttcagtagtgaaccatttcaactggaagtgcctttctaattccccaggctatttcttcttggaagaagaaagtttagcctggaaagacccaataatgtgtccttatccatttaacaaatatttattgaggacatattatgtaccatgcattatctcaagttctgtgaataagattgaaatgatccttttcatcatggagtctagtggtggatacaggtaaacagttatgacagggatcaaagaatgtagtaaagagaagaattgtatcattgcataaggaaacaaagagaaatcaggtaagataacatctggttggtttctggagagcttatagaagtttcagtgcatggggagataatgagagtaagataaagagaggaagcatttctgagaygttttgctgagagtttagattgtgcaccctctcaggcattttcgattgcagtaaagagacttcagtaaacattaaaacacttaattactttgtgaacttttgaccactgtttctt

SEQ ID NO: 248681 - DNA, 579 bp, Homo sapiens
ttactggtatatcagaacaaaatcrttcaagcccatgaatcagaagataagggaaggagaaaacttcagctgccttgtgtaaccctaaccttgcatgcactggcacaaaaaacaccaaggtgtttgggggaggtctagaggatccccagaagaatgtcaaaggcttttcctatggaagagaagcaatttggatgaagggcctagtaatgccattgcttacagatgtgcatttttttgtttgtttgttttttgttttctttgagatggagtctcgctctgttgcctaggctggagtgcagtggcatgatcttggctcactgcaacctccacctcctgggttcatgagattctcctgcctcagcctccctagtagctgggattacaggcgtgtaccaccacggctggctaatttttttttttttaatagaggcagggtttcacaatgttggccaggctgaccttgaactcctgacctcaagtgatctgccagcctcggcctcccaaagtgctgggattacaggcatgagccaccacaccaggcccaaaagggcattttgcttagtgcataaaaacacccag

SEQ ID NO: 248682 - DNA, 576 bp, Homo sapiens
ctgacactgccaggagggagcgcatccatgcatttgaaggcaaagcaggcccaagtgaggaagagggagggcaggaggaatgaggatggagggtggagcagcatccagaccaagaggcctgtgtcagttatggtgcattcatatgatgtttcaagagtgatgggaagctgtagatgagagaggacctyacctaatttaatgctttgttttaatcaccctcgggagtaagagaggcagcaggggaatcaggtcatcatggtggacaatgatggtgccttggccattggtggtagcacaggaaaaaggacagcctgatctctgatctgtcctccaaaggctacaggccccttgcactagtgtgagctcaggttctcatgtaggttctcttcctcagtgcatcagtccttattggagaagcagatgccaggatgagattagatatgccagagatttattaggggaaagtgtccgtggaggataaaggggaagagggaggacaaggcggacacggccttcagactacaatgcaggcctgactcctgaggaggatgggaggaagactggtcaggggtctca

SEQ ID NO: 248683 - DNA, 576 bp, Homo sapiens
ctgacactgccaggagggagcgcatccatgcatttgaaggcaaagcaggcccaagtgaggaagagggagggcaggaggaatgaggatggagggtggagcagcatccagaccaagaggcctgtgtcagttatggtgcattcatatgatgtttcaagagtgatgggaagctgtagatgagagaggaccttacctaatttaatgctttgttttaatcaccctcgggagtaagagaggcagcaggggaatcaggtcatcatggtggacaatgatggtgccttggccattggtggtagcacaggaaaaaggacagcctgatctctgatctgtcctccaaaggctacaggccccttgcactagtgtgagctcaggttctcatgtaggttctcttcctcagtgcatcagtccttattggagaagcagatgccaggatgagattagatatgccagagatttattaggggaaagtrtccgtggaggataaaggggaagagggaggacaaggcggacacggccttcagactacaatgcaggcctgactcctgaggaggatgggaggaagactggtcaggggtctca

SEQ ID NO: 248684 - DNA, 576 bp, Homo sapiens
ctgacactgccaggagggagcgcatccatgcatttgaaggcaaagcaggcccaagtgaggaagagggagggcaggaggaatgaggatggagggtggagcagcatccagaccaagaggcctgtgtcagttatggtgcattcatatgatgtttcaagagtgatgggaagctgtagatgagagaggaccttacctaatttaatgctttgttttaatcaccctcgggagtaagagaggcagcaggggaatcaggtcatcatggtggacaatgatggtgccttggccattggtggtagcacaggaaaaaggacagcctgatctctgatctgtcctccaaaggctacaggccccttgcactagtgtgagctcaggttctcatgtaggttctcttcctcagtgcatcagtccttattggagaagcagatgccaggatgagattagatatgccagagatttattaggggaaagtgwccgtggaggataaaggggaagagggaggacaaggcggacacggccttcagactacaatgcaggcctgactcctgaggaggatgggaggaagactggtcaggggtctca

SEQ ID NO: 248685 - DNA, 608 bp, Homo sapiens
gttctttaagtatcagaaaaaaatgtatttcctaaccttgggtttttcttcaggctctggcaatagtggttttccatctttatcctgtaaatgaaattaaaattcattggaaatgaaatagaaaattttgctttcatgtcccatcaagtttgtttctgggaattccaggatatgaaatgtcagctaatttttttcttagatttacatgagtttgtgtttcagatttactttttataaagtataaaaaaaggagttgagctataaaaatcgagatgttaccaagcagaatgcacatttactttaagttattaaaaatgtttttaatctgttgggtagagtaataggaaaaaaaagttctttggcaataaagatgtagctatgttaatcgaagcttttaaaaaaccccaattctccaacctagagtgaagaggtggatatcattcctataacackgtttagtttttttggatatgaggtttcataacttagaattgtaactatattccaacatgtgtttatatgcatgatttcaaaagtaaatgacaaatgtaatgacaggagttagtctaccatcctcaccataatcaaaaacaacagcaacaaaacca

SEQ ID NO: 248686 - DNA, 510 bp, Homo sapiens
cacaaacattagttgagagaattttgaaaatgctccctctttaattccctcccctgaaatattcccaagagatacagcttgagctagagtaacttagggagagggtttaaaaggcagctgcagccagctcttcagaacaaagtggacaataccactagaggaaattcttttatttttaattctgaaattcaaaaaaataattttaagaataaatcccaaatagagctcaagaaaggtttgtcaataaaatggtaccccacaagactcaaatttcagaaaaaacaacttgggaaagcatccgaaataaccagtatatttttatgttcatttagtataatctttcatttttatatttatttttaartgctcagaatagtaagaccattttagcaagaattaataatttatattctcatttcaatgtagagaaatgtacttagaggaatatcttcaattaaaaaactcaatcaaatctaggatcaaaaacaaaaacaaaactggccacgggca

SEQ ID NO: 248687 - DNA, 615 bp, Homo sapiens
agatcttaggcaagtttctgaacatttctcaacaccagttttctgagcagggtgaataactctgctcatacctcggaaggtgattttgagggttaaatgagttacaacatatcctgaggactgtgacccacaggttgaaaatcctggctctaaagggagaggcccaaagtccttgcccaggtagcaatggaacagactgamctctgcagggcaaccccagtgggtctggttggtacacatgagaagacttagtggctgctgaaaattttctatgagttttattatgtatacaattataaaaaataataaccttttatgggatagaaaaatgtaattttttccttagaactagctcatgattctaataatgggatactgttaagttacttggaaacagtttgatttttttgagatttgctttcaagctttgttaggttggaccagatcagcttttagagtatgcgatattgtgatataataagaaatctatgtagtcatgtgctgaataagggcgtttcactcaacaacagactgcattttctgtatatggaacagtggtcccataagattataatggagcatatacagaaacttgatgtatggcacatgatattg

SEQ ID NO: 248688 - DNA, 292 bp, Homo sapiens
ctcaatttccttatcaggagaatggggttgccataaggcgcatgtgtgtgctcatgtgtgcacacatgtatttgcatgtgtatataatgcctatttawgtgttagctattttcatcaaatgatctctggtgctctactacctttacagaatctacagaaaaaaaatgcttacggtattctcttcctttcctgccaaactagttctcacaagggcattaatagtgaatatattacctagaaatacctacagtttaaaagaagatgcagaaaaaggcaatgaaagattaaggaa

SEQ ID NO: 248689 - DNA, 576 bp, Homo sapiens
gcagcttttgaacccaggtcttttctggtgtcaaaacctttgctcttgttcactgtgcacagtggcatttatgggaaaagagtgtgtgctgaggaggaggtagagcgaaggaactccattggactggggaatgtaagaagcagaggtgtgagataaggtgggccagagtgccgactgtatgcatgtgtgtttcccagatcccaggcagccagaggaaaagaaaaagagaaagatggaactacagactctgggatcaaactagaacctgttccaggattgccaggaggtgagtgcagactccctgctgacttcagaagctctttctgccctgatgttcctattttggaagatgggacccaggtctggttcatgtygccgctctactctcccagtaggacctctgagaatgtaaaggtggtagaaacagcgttgcacaattgttctcccctctatgtgttgactattttctctcctccagctcttcctcctcctcctgcagcagaagaagaagcctctgccaactacttcaacttgcccccaagtggtcctccagctgtggtgaacattgctctgcca

SEQ ID NO: 248690 - DNA, 550 bp, Homo sapiens
gtatttcctaggttttcttttagagttcttatggtttgaggccttacacttaaatctctgatccagtggcaagacccaccatcttcaaggactcatctcacgtgtaacaacatccacaggctcaaagtaaagggatggagaaatatctaccatgcaaaagtcaccattttttttttttctttttttttggagatgggctctgtcaccgaggctggagtgcactggtgtgattatggctcgctgcactcaacctcccaagtgatcctcccacctcarcctcctgagtagctgggactacaggcatgcaccaccacacctggttaatttttgtattttgtggtagagatggggttttgccacgttgcccaggctgatttccaactcctgtgctcaaacaatccacttgcttcagccttccaaagtgctaggattacaagtctgagccaccgcgtccagcccaggcattgctattcttagataaaacaaatggtaaagcaataaaaattaagtaggacaatgaaggccattatataatgatgaagggtacaat

SEQ ID NO: 248691 - DNA, 587 bp, Homo sapiens
tcatggttctttctgaatttttgtagattttctagaataaatatttcttcatttgctgtatgcccttaggacaatttccagacactttatttatttatttatttatttatttatttatttatttagagacaaagcctcactttrtcaccaggctggagtgtactggcacgatctcggctcagtgcagcctcgaacttctgggctcaaggaatcctcccacctcagccacctgagtagctaggactgcgggtgcatgccaccttgcctggctaatttttaaaaattaggtgcatgccactgtgcccagctaatttttgtatttttagtagagacagggtttcaccatcttggccaggctggtctcgagctcctgacctcgtgatccgcccgcctcggcctcccaaagtgctgagattacaggcgtgagctaccgcacccagcctgcacccagccaattttaaccttttaaagagctggtgagagctgtggctcttgccttttaattttaagttctgctgatacagacaagacttgactctttttagaggcaggtcttcaaaggttgcgtcgtcgtcccccagctcccc

SEQ ID NO: 248692 - DNA, 506 bp, Homo sapiens
ctggaacatcttgtagcaccagaaagtaaggaagtactgaagaaggaaaaccgtatttgatggggttacatgacaggagccractgaaagagctcccaatggtcaaagctggaacaactggagcagcagaataaagagagtagtattggattataacccagagtatacagtaaatatccatgagttcatactcatggatattttggtaaaagtttcttatgcagttggaaagaatgtgtattctgttgtgttggggtggagtattctataaatgtcaggttaagttgtttgataatgctgttcaagtatactatatcctactcattatctggaagacaatgaaatctctggaagattgggagagggagattgaaatcttgttataattataaatgtgtctattcctctgtgctgttctattagatttttcttcatatattttgaagctctgttattagatgtgttgaagtcagataaaataaagagatgaatctctaaatttaaaa

SEQ ID NO: 248693 - DNA, 506 bp, Homo sapiens
ctggaacatcttgtagcaccagaaagtaaggaagtactgaagaaggaaaaccgtatttgatggggttacatgacaggagccaactgaaagagctcccaatggtcaaagctggaacaactggagcagcagaataaagagagtagtattggattataacccagagtatacagtaaatatccatgagttcatactcatggatattttggtaaaagtttcttaygcagttggaaagaatgtgtattctgttgtgttggggtggagtattctataaatgtcaggttaagttgtttgataatgctgttcaagtatactatatcctactcattatctggaagacaatgaaatctctggaagattgggagagggagattgaaatcttgttataattataaatgtgtctattcctctgtgctgttctattagatttttcttcatatattttgaagctctgttattagatgtgttgaagtcagataaaataaagagatgaatctctaaatttaaaa

SEQ ID NO: 248694 - DNA, 502 bp, Homo sapiens
atttatcctatgtcttcttctctagtagtttcatagtttcaggttctacatgtctatctttgagtagatttttgtatatggtaagataaagatctaaatttattctcstacgtgtgggtgttgtgttttcctagcgtttactgaagagattgtccttcccaaaggtgtgttcttggtgcctttgttaaaaatgagttgactgtaaatgcgtgaatttatttctgagttctctacactgtttcatttgtctttgtctctgtcattcatctatgtctgtctgtctgtctctgtctctccttgcccctttttttgccagttccatggtattttggtagtatattttgaaaccaggtattgtgatgcctccagcttttttctttttattcaagattattttatctgaggtattttgcatttccatgtgaattttagaattttttttctatttctatgaagaatgtgttttgtaatttaacgtggattgcattgattctgtagctca

SEQ ID NO: 248695 - DNA, 502 bp, Homo sapiens
atttatcctatgtcttcttctctagtagtttcatagtttcaggttctacatgtctatctttgagtagatttttgtatatggtaagataaagatctaaatttattctcgtacgtgtgggtgttgtgttttcctagcgtttactgaagagattgtccttcycaaaggtgtgttcttggtgcctttgttaaaaatgagttgactgtaaatgcgtgaatttatttctgagttctctacactgtttcatttgtctttgtctctgtcattcatctatgtctgtctgtctgtctctgtctctccttgcccctttttttgccagttccatggtattttggtagtatattttgaaaccaggtattgtgatgcctccagcttttttctttttattcaagattattttatctgaggtattttgcatttccatgtgaattttagaattttttttctatttctatgaagaatgtgttttgtaatttaacgtggattgcattgattctgtagctca

SEQ ID NO: 248696 - DNA, 502 bp, Homo sapiens
atttatcctatgtcttcttctctagtagtttcatagtttcaggttctacatgtctatctttgagtagatttttgtatatggtaagataaagatctaaatttattctcgtacgtgtgggtgttgtgttttcctagcgtttactgaagagattgtccttcccaaaggtgtgttcttggtgcctttgttaaaaatgagttgactgtaaatgcgtgaatttatttctgagttctctacactgtttcatttgtctttgtctctgtcattcatctatgtctgtctgtctgtctctgtctctccttgcccctttttttgccagttccatggtattttggtagtatattttgaaaccaggtattgtgatgcctccagcttttttctttttattcaakattattttatctgaggtattttgcatttccatgtgaattttagaattttttttctatttctatgaagaatgtgttttgtaatttaacgtggattgcattgattctgtagctca

SEQ ID NO: 248697 - DNA, 595 bp, Homo sapiens
atttattgattttgaatgttttttaaaactgtacagatactgtgatgattttaattgcatatgaaattaacttcgttatcttcaggcttatcacatcaaaggtttacttgcaaaattggacctttgttcttattcagtaaatccgtgttacaagatgagccaggatttagatatgtaaatatatgtaactttttagtatctttcatttcaaattagaacyacatatttggaatttactgctgtagtctcgtgataatggctgacatgagaagacattaaaaaaaaatcctgaagttatccatgcttgctgtttatttagtcttcttgtttggaacaaaaagtaaataattcacaaatactaccacctaagcccctgtttcaaatgaaacatcagtcttcagcttgcaaaataatgtctttataattaaggaaatagcagcagaaaacctatgctagttgcttttttcttcctggagaagttgacaggataactgcaaccctaggggcatctctgtgttgaatctgagacgtggaacaaaaagaaaagtggccttttccattccaagccatggaggtaatgtgtagagaagagaca

SEQ ID NO: 248698 - DNA, 595 bp, Homo sapiens
atttattgattttgaatgttttttaaaactgtacagatactgtgatgattttaattgcatatgaaattaacttcgttatcttcaggcttatcacatcaaaggtttacttgcaaaattggacctttgttcttattcagtaaatccgtgttacaagatgagccaggatttagatatgtaaatatatgtaactttttagtatctttcatttcaaattagaaccacatatttggaatttactgctgtagtctcgtgwtaatggctgacatgagaagacattaaaaaaaaatcctgaagttatccatgcttgctgtttatttagtcttcttgtttggaacaaaaagtaaataattcacaaatactaccacctaagcccctgtttcaaatgaaacatcagtcttcagcttgcaaaataatgtctttataattaaggaaatagcagcagaaaacctatgctagttgcttttttcttcctggagaagttgacaggataactgcaaccctaggggcatctctgtgttgaatctgagacgtggaacaaaaagaaaagtggccttttccattccaagccatggaggtaatgtgtagagaagagaca

SEQ ID NO: 248699 - DNA, 595 bp, Homo sapiens
atttattgattttgaatgttttttaaaactgtacagatactgtgatgattttaattgcatatgaaattaacttcgttatcttcaggcttatcacatcaaaggtttacttgcaaaattggacctttgttcttattcagtaaatccgtgttacaagatgagccaggatttagatatgtaaatatatgtaactttttagtatctttcatttcaaattagaaccacatatttggaatttactgctgtagtctcgtgataatggctgacatgagaagacattaaaaaaaaatcctgaagttatccatgcttgctgtttatttagtcttcttgtttggaacaaaaagtaaataattcacaaatactaccacctaagcccctgtttcaaatgaaacatcagtcttcagcttgcaaaataatgtctttataattaaggaaatagcagcagaaaacctatgctagttgcttttttcttcctggagaagttgacaggataactgcaaycctaggggcatctctgtgttgaatctgagacgtggaacaaaaagaaaagtggccttttccattccaagccatggaggtaatgtgtagagaagagaca

SEQ ID NO: 248700 - DNA, 562 bp, Homo sapiens
cttgaaattttcatccccaccacccattctctgggaagcagggagggactggagactgttaataatggatcrtgcctatgtgatgaagtgagatagagggctagcctgattaagcccaccaaatgtaacctgccttgcttgcttttcatcgctgacttctggttgacctgaaaacctatatagctaaaaatcacatagccaaacaatatcttagtaaactcccactagctccttacggataacgtttctaatatacatgtcactatggtaatggctgcttaaagttgtttctcaggagctagggggaagctcttgtccagtttgaaccagttgagaccactgacccttcggctgggcctgcacaagtgtgcgagatgtcaaagggccaaaaattcctccctcagctcatgctaacactgccattttctgaatatgtgtcctctaaactgccaagaaccctggctatgcttgtgcagaccaccgatttcctcatttttcccacctccagtcacctttccccatgccttagaccaccccacttctttatcccatgaatgtcctc

SEQ ID NO: 248701 - DNA, 539 bp, Homo sapiens
gcaaccactattctactttctgtttctatgaattagactattctagaaatctcatataagtggaattatacagcatttctgtttttgtaactggtttatttcactttgcaaaatgtgttcaaagttcaaactcatgttgtagcatgtgtcagaatttctttttaaagctgaataatattctattatatgtatttatcacatcttgtttacccattcatctgtcactgaacacttggatttcttccatcttttccctattgtgaataatgctgctgtgaacatgggtatatggcgatctccttgagaccctgcttttcaattctktttgggtctataccccaaaacagaattgctttatcatatggtaattctatttttaactttttgggaaactgccatactgttttccaatgtgacttcaccattttccattcccaccaatagtgcacaatggtttcaatttctacacacccttgccaacactttttattttctgctcattttttaaatagtagccatcataatgggtatgaagtagc

SEQ ID NO: 248702 - DNA, 640 bp, Homo sapiens
acataaattggaaataattttgtttttaaaacaagtagttaataatactttactttctatttatttatttatttatttattttttggagacagtcttgctctgtcgcccatgctggaatgcagtgttgtgatcttggttcactgcaacccctacctcccaggttcaagccattctctgcctcagcctcctgggtagctgggattacaggcacacaccaccgagcctggctaatttttttgtatttttagtagagacacggggtcttgccacactgcccaggctggtctcaaattccagagcacaatgtgatcctcccaccttggcctcccaaagtgctgggattacagccaggagtcactgcacccagccaggatgtttattttttaaccttctatttgtctgatgtctgggctctatggggagtggcaagggaaagtggtatacacttaatgacacagaggagactttgacctaaatggtgagaccctgaagtgtgaatgctttggaggagaatatagatcagaagtttatgatcaaagtaattatttacaaatagatattttccattactttatttttaatttamagttctatataacattggaagtaatattctttatgtacaactacaatagattt

SEQ ID NO: 248703 - DNA, 537 bp, Homo sapiens
gtacagtggcattttagcagtaaggttggttcatactgaaataatttattatacctcaagacttgaaattttatactgcccaggtggctaatatactacttttattgctaaccctaaagatacctagaacatccaacaaaacaaagaaaagattaaatactgtattttttccccagaaaaaaatgatagtttttattttcagatgcacgaatagctttaattcaatattttgaaatgctggctttaggaatatgttcttctcaatttatttgaagcattttcaagagaagaaagtaaaatcatatgttggtgtttgtctgtattttaagtaatttgagggtttttttttttttttttttttttagttttcttcaggtttttttttccctttaaaggaagtagttgccacttggcacagggtgtttaaacaccaaggtcaggttaggtttaraactctaagcctattaagatcacattaactctaaattaaatgaaatcattgtttaatcctttaatcagatagctcatttggaaaat

SEQ ID NO: 248704 - DNA, 528 bp, Homo sapiens
aattggtagactgaggaaagcagatggccagtgtttttagccttcatccaatctgttggaggcctgaatggaacaaaaggcagggtaagagagaatttgctctctctgcctgacagtttgaattgggatatcagtcttctcctacacttggactgggacttayaccactggcacttctgactttcaggcctttggacttggactagaactacaccaccagctttcttccaccacttacatcatcagttctcctagtcttggaccttcagacttggactggaactataccatcagctttcccgggtctctagtttacagaccgtagaccatgggacttctcagcctccatagccatgtgaagccgttccttataatctctctctctccatatatatatatatatatatatgtgtgtgtgtgtgtgtgtgtgtgtgtgtgtgtgtgtgtgtgtgtgtgtaagatagatatctctcctatatacacatatatatgtatatatctcctattagctctatgtctctggagatc

SEQ ID NO: 248705 - DNA, 575 bp, Homo sapiens
ttcttccaccacttacatcatcagttctcctagtcttggaccttcagacttggactggaactataccatcagctttcccgggtctctagtttacagaccgtagaccatgggacttctcagcctccatagccatgtgaagccgttccttataatctctctctctccatatatatatatatatatatatgtgtgtgtgtgtgtgtgtgtgtgtgtgtgtgtgtgtgtgtgtgtgtgtaagatagatatctctcctatatacacatatatatgtatatatctcctattagctctatgtctctggagatctctgactaatatagttgatcaatttttgcatccattcakcaataaacaaatatttactgaaagttactatgtgccaagtactaccaaaatagatgtgtgttctcctctacctctgtgttttcatttctcttccagtgacttcctctcaagttcctgtccttggggaagcagcttcggactcagatagatcttggtttttatttctacatcactacttactagctttatagccttgaagtagctccttaggtcctttgggtctcaattac

SEQ ID NO: 248706 - DNA, 495 bp, Homo sapiens
atgcctgttctattattcctgccactggggtagcaattagaccatggcaaccagaatctgtgtaggttagggatccccctacacatgaacttaagacaaatttcaaagtggggtgactccatggattcttccttcatccgagttttatttcaggtgtcaatggtccttgaaaatctacaggacatcaaagtcaatccaagcaaaaatctagaatatctacatgcttagcagatttccatgggtccctgtctccttcacaagattagaatcttcctatgcctggaactagacacatcttaaagtttattttgtctgatataatatagccactccagctctcttatggttactatttgcgtagtgtatttttattccatcrtttttctttcaacccacttgcacctttcaagctaaagtctttctcttttagagggcatgtagatcaactttattcttttatcagtctgaaaatctctgctttttgatttgggtgtt

SEQ ID NO: 248707 - DNA, 509 bp, Homo sapiens
aaggttataattttagaaatcaaaattaaagaatgggtgctgtgtagcattatgtttactgggcttgatataatcagtacttttggcataatttaaaacatgattatactgtgtgtcattggatatktatatagacacaacatgttctctatcaatatctatctatctatctatctatctatctatctatctatctatctgtctatcgtgtaatctgtctcagtggtgtgctgaagtcagctcacactggttggtaagaggtggcagatacatttccaggaattttgtaagctgattagggtcactttggtagtttgaaaatggagagagaatatttggaccatggaaattggcaaatgatacaaatcagagactgttttttttttccctcctggacagtgtgttgttaaataatttaccaatataccattgtagtttggtcagaaaagagagtgcatacatggttcagtttacaatgggagcaataatcaattatttagaataccaaa

SEQ ID NO: 248708 - DNA, 593 bp, Homo sapiens
gaactaccgaaagtctgaatccaaccagggaccctcattccaaaaccaaagacagtattatgtgtttaagagagttcatgactctcttgaacaaaacccaactcctggagctccagagtaaagagccctaccctatagcctgcagcagtaggatatattggaaaaagaaagagctctgtagatcattccttgaatccagtcatttactagctagtaatcatgggagagtcactttacctccctttgctttaatgtcctcaggtgtaaaatgtagttaaaatacttggtcgaaaagattgttgcraggacaccagagtgaatggaagcaagagagaacacagagtgataatagtcagtggttttggcacagaattcagatccttactctgaatctcactatgtgtctttgggaaatatacttaaattttatgttcttcacttaaaagaggaggttcatacgacctcataaggttgatatgagtattaagtgggaatgcttaaagcagaaatgtttaaaatagctccctgcacatagtaagcattcgataagagctagtttcttcccttctaccttagaatcacagttctgattg

SEQ ID NO: 248709 - DNA, 502 bp, Homo sapiens
tatatgcatgatactaatcaaaacctctcaaatcactccaggtaggtgacagagctggcaagaatgtagacatatacagcatcagaccattatgacagtttcttaaaacaaaacaaaacaaaacacagatggggtttcactattttgcccaggctgatctcaaactcctgggctaaagtgatccttccatctcagtctcccgagtaggctgggatgacagacatgagccactaagcccagcaaggcagattttaaacatatgtaaaacaattccctgaacttacagatayggaaaccggaatctagataagatcagtgactttcctcagatcacacaattacaaaatgatcacttttagtaattttatcaatatagatataatttttcctttaggatgaatgtagaataaatatttccaggggaatttttaactaatatttagggaaaataaaactcattataaaattttaacacataaatttaggaatcatatgtactttt

SEQ ID NO: 248710 - DNA, 598 bp, Homo sapiens
agaaggggggagatcatgctgaagtgcctgcatgtgtaacaagtacttattttattttatttttttagagatggggtcttactccgtcaccttggcttattaatttataaaaaggacaagagttaaaaactcaaacctttctatttttactgaggactcaagtctgaatttgtattaggaaataccatcacwtttttgtttcaaatttctcaatgaaatttgaaagaaaactttaaaaaatgtacatgttttcctgtacagtataaaggcactttttataaagaagttgttttttgcggctgctcttcagatatcagctgcattttataatgtcagcttttaaggaggaaagttacaactgcatcatttgttatcaaagtgaaagtaaaaacatccatttaccgtgatagttataagtgataaagtcaaatgcggcatgtgaattgtaaatatcatgattttcccagtgtcttacaaggatgaataagactaaaatcacatttgaagctaatgaagtataatttgaagcaaatagtgtctgtcacttaccgagagcaataccagtcactgcttaagggactatcaacaattataaaac

SEQ ID NO: 248711 - DNA, 574 bp, Homo sapiens
taatatacagtctgtgccctggggtactcaaagactttctggtatactatcagttttcccccatataagatccctgtgaaacagggaagggaagacattattawccttcaaattttagaggtaaatcagcagcacaaagaaactaaatgaccgtgactaggaatcagaagggctgatccctagatggctgtcttcccattttatgtataaggctactgtgtctggaagtgttatgccaaatgacaacatggcttgaagctatctgatatacgcacattttgagaagagtaatctgcactgaatcccacttgtgacatttccatctgaaagttgtctcctccttgaacagtacctggaacattcaattttaaaaattgtattactgtcagtaattttaaatcaagttttcaaacacaagcaggcacgtatgtacacacatgcctacaaacacaaacacaaacacacactgttccaatactcacccaaaaatacagagcttgcatattctgggaagaagaaattactaagaaagtgttctagcaggttatggaaataacaacacttccaaggtagt

SEQ ID NO: 248712 - DNA, 577 bp, Homo sapiens
ttgtattactgtcagtaattttaaatcaagttttcaaacacaagcaggcacgtatgtacacacatgcctacaaacacaaacacaaacacacactgttccaatactcacccaaaaatacagagcttgcatattctgggaagaagaaattactaagaaagtgttctagcaggttatggaaataacaacacttccaaggtagtgttcaaagttggcattaacyttaattgaacattaatgtatttagcagaatatgtatgacgttcttgataccaaaggacactcaacaaagggtataaggtaaggtgaaaactgagatgataattttttaaaaacttgatcattactagctaagaaactaactgaatttttagctttgaaatatgggtactgataatgtacacatatatcagatgcagttggaagggctgggcaattgatctgtagtgaagactgctgggagataactgagttagctattaggaatcagaattcaagactgagtaggaattttaccaattgggaagtttgttctggttctgtatatgtgcttgcctgtgtcactaacactgtaagatgc

SEQ ID NO: 248713 - DNA, 558 bp, Homo sapiens
tctgtcataatttgttaatattcatcagagattcagacaaattgagctcatggataacttggtgcaaattaacaaaggccacagaatcttaaacatatgagtttcagtttattataaaactgagcatatcattttatttcctaaaatcttttttgtattctataatgtagactatagaaacatagaaaatattctgcatttttyggccaaatttgaattacactatccacatcagatcctttctgagtgtcacattctctttatgatacactgtaaatttcatgtatgattctaaggtttttgaggacagaaactgtgtctcatttagttttaattacccgcagtgcttaaaacaataaactgcaactgtaggcattgaatgaaatgaggtgaatgaaaacatggcaacaattactgaaataatttcagattatcttcaatgttttaaagaaagagatgagagacagacagagagagagagacaggcaattacattctaggagggatgagtaaaatgttgggtgattctcctagcactgggcagactaaaacctgtta

SEQ ID NO: 248714 - DNA, 558 bp, Homo sapiens
tctgtcataatttgttaatattcatcagagattcagacaaattgagctcatggataacttggtgcaaattaacaaaggccacagaatcttaaacatatgagtttcagtttattataaaactgagcatatcattttatttcctaaaatcttttttgtattctataatgtagactatagaaacatagaaaatattctgcatttttcggccaaatttgaattacactatccacatcagatcctttctgagtgtcacattctctttatgatacactgtaaatttcatgtatgattctaaggtttttgaggacagaaactgtgtctcatttagttttaattacccgcagtgcttaaaacaataaactgcaactgtaggcattgaatgaaatgaggtgaatgaaaacatggcaacawttactgaaataatttcagattatcttcaatgttttaaagaaagagatgagagacagacagagagagagagacaggcaattacattctaggagggatgagtaaaatgttgggtgattctcctagcactgggcagactaaaacctgtta

SEQ ID NO: 248715 - DNA, 579 bp, Homo sapiens
aagctcgccagggccccaggctccttccagggaaaaatgctactcccaccttccctgctgaaaaccgggccgttgcagtttctaactccaggaaagccatttttcatctcaacttctttgtccttttagtccagtttgctgtgtccagaaagggcgcttcacctaatggcagctgacctattgactggccagcagcttatgagatggcctggcccaaaaaacctttattgtccctgaatagagacagtaatgatgaaccaaaccaatcatatcttctcttgtggggaatctgcttttgagasatttgggattgtcaccagttgacggaagtagcaactgaaatacacacacagaaaaagaagacagataaaatgggaaatgcagaaatagaaatgacaggatgtggccactgaccagatgtgtgacataaggaagagtggaaagaataaaggaaaccaaatttttagttcgactgactaggcaagagacagtggcatgaatcaaaatggcaagttcatgaggagtggtagggaaaagaataaggccagtgtgggacagattgaatttggtaagtgagcc

SEQ ID NO: 248716 - DNA, 579 bp, Homo sapiens
aagctcgccagggccccaggctccttccagggaaaaatgctactcccaccttccctgctgaaaaccgggccgttgcagtttctaactccaggaaagccatttttcatctcaacttctttgtccttttagtccagtttgctgtgtccagaaagggcgcttcacctaatggcagctgacctattgactggccagcagcttatgagatggcctggcccaaaaaacctttattgtccctgaatagagacagtaatgatgaaccaaaccaatcatatcttctcttgtggggaatctgcttttgagacatttgggattgtcaccagttgayggaagtagcaactgaaatacacacacagaaaaagaagacagataaaatgggaaatgcagaaatagaaatgacaggatgtggccactgaccagatgtgtgacataaggaagagtggaaagaataaaggaaaccaaatttttagttcgactgactaggcaagagacagtggcatgaatcaaaatggcaagttcatgaggagtggtagggaaaagaataaggccagtgtgggacagattgaatttggtaagtgagcc

SEQ ID NO: 248717 - DNA, 554 bp, Homo sapiens
gtcagtggatctgagaaaatagagaaattgagataagaatcaagagagtcctgtatagttataatttcacatttcccactgattgtaataagcataataaacttaaactcgtatgtttaagattctgtggtctttgttaatttgcaccaagtgatccatgagctcaatttgtctgaatctctgatgaatattaacaaattatgacagattgccccatttcctactgttttaatctaaggtcttctcatttcatttacttcacataaattcatttaaatatcatgtgatatcttataaatatcctaaaatcaaagatttaactttcccagctgccttctyaaagtattcaagacatagaatgctctgatgtttttttctttattagttctgatttaaattaggtaccaggtatattatttttctttgtcttttccttactttttcatatttattacataaatataatgttttacattatgaaaacattggcctattagcaccaaaacttaccttgcatattgaattgctccgaatgtgtttgtgaggtccccacc

SEQ ID NO: 248718 - DNA, 555 bp, Homo sapiens
caatgtagtaaaagtttcaattaactttaaaaactaccatcaaatgcatttaaaatggggatttggcaaatacaaaaattaagacttcatagctaacaatatttttttcagaaagaaagccataagttagttatgcatttctgytagccatacctgtgtctttgtggggcctatatccaggccttgtacaaatttttccaaaaaattctttactgcatcccaaggataaatactatttgattcatcacacacaaccacaacatctatgagggaagggcaggctacacaggaaaagaggaaagaagcagatttccacaggtaagtcatatttcacagccatataaaaatgagacttaaggagggtttgggtgccactagttgataaccttttccccctcctttaactgtaaggcattgctcagaccatctgcacattaataacttacgctgagttgcaggtgagaagctggctgagagctgaaaatcaggactgatgtcagaacacacacccgttgtgtaatactgattcccacattgctgtgcccacagaggacc

SEQ ID NO: 248719 - DNA, 505 bp, Homo sapiens
ggaaactttgggttttttctttttttctttctcctcctctctctctttctgcctctctgcttgctaccyggactgctaattaatctctcaaattctcttgctttttacctttcattttttactttatctggagttatagattaaaaattttgaggcacattctgtaatctctaaatatcagtatgttctttttttaaatttttgcaactttaaaatcaaaaaacaaaaagattaaagcaaccttattgtaaagaccttggaatatcataaaccataaagatccattgcaatattcatttatgcactgatgttaacacatatcacaagcaatatctaattcacttactggcagcacagtcatcagaataataatatccattagtaaaaatagaatgacgttgaaaattgattacatttttagaataatacagttataaaacataggatttttaagaaagcgtgccaatggttcagataaaactagtgtaaagttgaattatgctgt

SEQ ID NO: 248720 - DNA, 505 bp, Homo sapiens
ggaaactttgggttttttctttttttctttctcctcctctctctctttctgcctctctgcttgctacctggactgctaattaatctctcaaattctcttgctttttacctttcattttttactttatctrgagttatagattaaaaattttgaggcacattctgtaatctctaaatatcagtatgttctttttttaaatttttgcaactttaaaatcaaaaaacaaaaagattaaagcaaccttattgtaaagaccttggaatatcataaaccataaagatccattgcaatattcatttatgcactgatgttaacacatatcacaagcaatatctaattcacttactggcagcacagtcatcagaataataatatccattagtaaaaatagaatgacgttgaaaattgattacatttttagaataatacagttataaaacataggatttttaagaaagcgtgccaatggttcagataaaactagtgtaaagttgaattatgctgt

SEQ ID NO: 248721 - DNA, 505 bp, Homo sapiens
ggaaactttgggttttttctttttttctttctcctcctctctctctttctgcctctctgcttgctacctggactgctaattaatctctcaaattctcttgctttttacctttcattttttactttatctggagttatagattaaaaattttgaggcacattctgtaatctctaaatatcagtatgttctttttttaaatttttgcaactttaaaatcaaaaaacaaaaagattaaagcaaccttattgtaaagaccttggaatatcataaaccataaagatccattgcaatattsatttatgcactgatgttaacacatatcacaagcaatatctaattcacttactggcagcacagtcatcagaataataatatccattagtaaaaatagaatgacgttgaaaattgattacatttttagaataatacagttataaaacataggatttttaagaaagcgtgccaatggttcagataaaactagtgtaaagttgaattatgctgt

SEQ ID NO: 248722 - DNA, 569 bp, Homo sapiens
atcaacaaatactcagcacactttccaagggcaaagaatcagggttctttttgttcccttttcttcaaaacattcagtagcagtggttttgctgaatatcctaaaaagtctacacatcaacattattttgaatattcaacaytggatagccaaataaatagcataatttatcaaaaagcaagttctaaacatctaaatcctcagattgggagggatggtgagaagacactactgtctatgtactttcttgagaggaataatgatttgtaaagtaaacactcacgagaaaacctccagttcccatgttcctggtgaggatcaagccgaggctcatgttggttttcatctcagtaacatttggaatgcttgttgaagctttcaaagggaaaacaatttttaaaagtgattaaaaattcctcgtttacttaaagatattaaaagaaaacaggcacacccatgtttgcatgtagcattgaatttagtgtcatcaatataggtacttgagttatataatgaagtgtggggaaacgcgatgctttcagtgatctggtaacgcacattaatgtgtg

SEQ ID NO: 248723 - DNA, 599 bp, Homo sapiens
gtacatgtatatagctttaaaaataataaaaatatatacattaagaatgagtgttcagaagttaagggtgatatgaaatgttaggggtgatatactaaaatttttggactatataataaagctttgaacactccaaatgtatatatttgtgttattagaaatatatatatatatatactgagtgttcaaaaaatttggagatcactgatctagatcacccacaacctgcttaaataagctgaagacatttactcagtcctcatccccttcaacttctgtagcatttgacactactgatattccttctacttcactgaaaatatgtttattgagccctattatgtgccataaattattctagatattaggtctacagagatatgcaagaaacaccactkcccttgtttccaagtcttaatcactatttttgaaactcttctttcccttgattttcacaacactcttttctaattcatgcctcaattcttcagaggaactccgtgattcctcagggctgtttttttaggctgctgctgctgatgatgtaatgatgatcaaattgagtgactttttacttgtatcagcatattacatggaaa

SEQ ID NO: 248724 - DNA, 599 bp, Homo sapiens
gtacatgtatatagctttaaaaataataaaaatatatacattaagaatgagtgttcagaagttaagggtgatatgaaatgttaggggtgatatactaaaatttttggactatataataaagctttgaacactccaaatgtatatatttgtgttattagaaatatatatatatatatactgagtgttcaaaaaatttggagatcactgatctagatcacccacaacctgcttaaataagctgaagacatttactcagtcctcatccccttcaacttctgtagcatttgacactactgatattccttctacttcactgaaaatatgtttattgagccctattatgtgccataaattattctagatattaggtctacagagatatgcaagaaacaccacttcccttgtttccaagtcttaatcactatttttgaaactcttctttcccttgattttcacaacactcttttctaattcatgcctcaattcttcagaggaactccgtgattcctcagggctgtttttttaggctgctgctgmtgatgatgtaatgatgatcaaattgagtgactttttacttgtatcagcatattacatggaaa

SEQ ID NO: 248725 - DNA, 565 bp, Homo sapiens
tggtgccttgcttcccagacctattgtcctgtgtttatacatcattcagggatgtcatgagaaggtccaggcaggatttagaaatgtccagtgtccctggtcttaccagcactaggatctcactataaactacaaatatacttgtctttcaacaaygtcttggatacttagaggtaatcctggacagagaaaggagatatggctgcctctcatgttcccagaactctgcctggtgggatcctctcaactctgtgtcccttttcgtcttgttcaacttccaaccagcagcatggccagtggttgagccccttacaatccttgaaaggcttatcacttcaataatgtctattactgatggtggctcttagatttactctgtccaggaaagctgttacttaaaagaattgcttcaaactcggtgccagatgtcctcagctaggccatgtctatgaactagaacagtggagttcatctgaagctccctttcagctcaaacatcttaagtcagtctactatagctcactttgtatagcacttgggatgaatcatttagaattgggacttc

SEQ ID NO: 248726 - DNA, 550 bp, Homo sapiens
acaagacgaggatgctgaccctcaccagtcctatttatcatattactggtagtcacagccaaagcaatcaaacaagagaaagaaataaaggcatccaaatagaaaaagaggaagtcaaactatttgtttgcagatgatatgattctatacctagaaaatgccatagtctctgctcaaagctcctagatttgataagcaacttcaacaaagtttcaggatacaagattgacatacaaaaatcagtagcattcctatacaccaataacgtccaagctgagggccaaaacaagaaaataatcccattcacaaaagccacaaaaagaataaaayacctaggagtacagataaccagggaagtgaaagatctctacagagactgataaaacacttctgaaataaatcctagatgatacaaacaaatggaaaaacatttcatgcttgtggctaggaagaatcaatattgttaaaatggccatacttcccaatccaatttatagattcaatgctattcctatcaaactattaatgacattcttcacagaattagaaa

SEQ ID NO: 248727 - DNA, 559 bp, Homo sapiens
ataatcctctgttgttcgagcctctgttctctgggctgtcaaccataggcctctgggctctcaacagctcctctggcctctgcctctctatcaccttcagtcaaagatggcaatgcttctgctgagataacatttttttaaaaatttgcaggtttcttatgtaggtaatkcaggattcatgccactaaacaaaagagctctccacaggaaatctttcctggataacctcatcactattttgattgttgctgagatggttgagaggatctggcaaccacatacctaatcttttccacaaaaggatgtctagccacaccctttgctttcagaggatgcttttctaacagtgaaactcctaatatgagtgtcttcattccgcctgttataacaaagtaccatagactgggtggccaacaacagaagtttatttcttaacagttctggagatggaagtctaaaatcattgtgcagcatggtcaagttctggtgagagccttcttccaagtttcaggctgctgacttcttgttgcatcctcacaaggcaggaagacagctctat

SEQ ID NO: 248728 - DNA, 578 bp, Homo sapiens
aagacccaattaggtcaaatattctgccgctgtataatgaggacattttctgcagtttccaacagcatattcctggtttccttctgagccctcaccagaagtagcttgagccttcatgtttttaccatcagtctcctcaaggcaatctacagaaaccctctttccagataaggtaatactcataggtgttggggattagaatagagacatatttgggggagactaccattcaacttaatacaatgggtatatcaagaatgcaaggccctgactactatttacctgggccatttcttagcattgygtttatgatgaataatattgaggggtgagataatctcttcccccaggtcaaagagaaggcttgctgactgcttgctataaagcagcaggtccaccaagctcattgtttctttcctgtcttgcaccccactgtgtgcaggtgtctgtctgggccccttcatgtaacactatgagactagagtggggaaaggggaactgatagacacatgctcatactcgtgctgcctgctgtgctgtgagtaataaagtccttctctgactcatgcatgtcatgg

SEQ ID NO: 248729 - DNA, 510 bp, Homo sapiens
aggaagtggggttactcagaccctgactctgaacctaagcaaatagacttcaaactctaaagtgtatctcatcattactcagaatgtgtatggcaacgggaaatgatcataggtcacattagatcttttgaacacatacatcaccacaggaaatctcattttccaatagcattgtcttcatgttgaaaggacagtaatgcaagtagaaagtcctctcctccccctccaaaaaaaaaaaaaaaaaaaaaaaaamaaacaaagcaactaaacttagaagttgtaggccttttggaaatgaccacacactgtgtaaagatttaagttctgcaatgtttggtttatggctctagtccttaaacaaaacattagagcaaaaaccaaaagcacaaaaggacccttacaactgcttttggaatgcagtggcataacatttccccttacttttattaaaaaaagaaagatgcaattttcttagaaagtccttgctttaagtgtcaaactttacagtca

SEQ ID NO: 248730 - DNA, 494 bp, Homo sapiens
atttcaatggacacatttacttcacagttaaagaaaagggagtaattaatacaagcaaatatacagatatatattaaaaagtgagttgaatttattggtcaaaaatgttttatactataaaattaaaattttagaatactaaccaatattgaatattgttttaatctattttgaaaaaatctaaytttctatcagttaaaatgccacatcaataaatagtatgaggagaatttggaaaattaaaaatcaatatttttttaaaaggggactctaaaacactactccagattttctcctttggcaataaaagactttgttattttaaccaactctcccactgaagatcactgaaaaattgcaagaaatataaaacaagatatttaagatgtcttctaaagcatcaaattgctaagaagatggggtgaagaaagaagttcagagaaatgactcaggcagacagttggatcacttttttttttttttttttttttaga

SEQ ID NO: 248731 - DNA, 612 bp, Homo sapiens
gagttatatatggcttctgtagcaaaaactgtctctagacactttaataaatggaagaatttcagtcaccttttcagaacaagataataatgcaggaatctttgctgacagaattgcaargtttctgttacctatttgggcaacagaacagacaagtctctcaaaggaagtaaatatattttgaaaatcattaactgtcccaacagtctatggagctgaaaacattagccaaatatgcagttcaagtttatactggttctaaaatgtaaattacgtgttcaagagttagcaggcatagactggataaaacacttgaatataagcactttaattatgactaacaaaattaagaatagacatcaacttcttttctaatttatgattcaatgaaaatgttttgaaatgctttgaaaacaacactaagttacagggcaaacagctttcacattttactagcaaaatctttcagagacaacactatttctctgtgatatatgagactgttatttctaacaagattattttggggatctttattaaactagatagaaataaggggaattgaaggcttaactggagaaacataaatctatatttctaaaagaacttgtt

SEQ ID NO: 248732 - DNA, 549 bp, Homo sapiens
gaaaaaaatccaactatgatataaacaaaatctcttccaactcaccacacatacaaatattacagacaagaaaacaaactaataaacattaatcacaaaatatatccataggatggaatactacttagtaataaaaaggaatgaacaattgatacattcaacaacgtgcatgaatcacgatcacaaatgaatgctaaatgaaaaaaggcagatacaaaaggtgatgtactttatgactctatccatatgacaatctcaaaaagccaaarctaaagcaacagaaatcagatcagttgcagaggctgggaatggggagaggaagttgacaaaaggggcatgaggaaacttttagaagtgatagtaagattttatatcttgattgtggtggtggtacatgactatatcaatttttcaaaactcattgaactgttgacttgaaaaggataacctttgctatgtataaattataccccaataattatggctggagtttgaaaagtgcaaactaaaaagaaaataaaagtctttagaaaaggagacaagcagggt

SEQ ID NO: 248733 - DNA, 549 bp, Homo sapiens
gaaaaaaatccaactatgatataaacaaaatctcttccaactcaccacacatacaaatattacagacaagaaaacaaactaataaacattaatcacaaaatatatccataggatggaatactacttagtaataaaaaggaatgaacaattgatacattcaacaacgtgcatgaatcacgatcacaaatgaatgctaaatgaaaaaaggcagatacaaaaggtgatgtactttatgactctatccatatgacaatctcaaaaagccaaagctaaagcaacagaaatcagatcagttgcagaggctgggaatggggagaggaagttgacaaaaggggcatgaggaaacttttagaagtgatagtaagattttatatcttgattgtggtggtggtacatgactatatcaatttttcaaaactcattgaactgttgacttgaaaaggataacctttgctatgtataaattrtaccccaataattatggctggagtttgaaaagtgcaaactaaaaagaaaataaaagtctttagaaaaggagacaagcagggt

SEQ ID NO: 248734 - DNA, 608 bp, Homo sapiens
ggcttctgttggtgagctacaacaaagagcagaaagaattggaagaggttatttctaagggccaggagcagggagactgcagttcatagagtgtccatatatccaaggatgtttgtgactgttcatatgagcccagttttaccttcacatgggcctataatagatattatatgggtaaatgcagataaataaaatacaattatgccataaggactggggcagactgtaattgccactgaaattcagaggagggagaagtcatagactamcctgctttaggacttccctgagaaagagaagatctgagctctagagttgacatttaacttaaatctctgcaaaaagcaccttccaaagaattgtcagaaaagaattttgcactaataaagtatcctatgatatctcgttgagggaatagtgacattcaggttcattatcacactttgagctgatgattttcgtagatgtgtaggtacttagaatttcctttcgaaaattctttttttttttttttggtcagctttgtagggatcagctttgtgtccacaaaataaaatttactaatttttagtgcaaatttagagagttttgacttgtatacagtcatg

SEQ ID NO: 248735 - DNA, 614 bp, Homo sapiens
aattcttcctttaaaaaaattacagactggatttttttcatccagcaaaaataagaaatggacaaattcacaatcatagtttgatattttcatacaactatataagaaactggtatagatcaaatagatgaaaaaatagaaggggtatagaaacttttaataaattgtttgacctaatatataaaactttgctcaaaacagataacattttttcaaacatacacaaaccagttaccagagagacaattctaaatcacaaaggaatttgaaagaaaaaaaaaatcataaagtttatgttctctgacaagttatttaaattagaaaccagcaataaacaggtagccacataaaacctaacaarcttagaaatttcaaaatgtacttctaaacaacttatgaaataaagagtaagtcatgatggaaattctaaataccttttgctcaatgtctataaaaatactagcacttttaatggcaaaatccacgattacttatgtaccaacctaaggattagaaatcccctaggacgcggtgctctccagccccagaaaatcaataatgatctgtcttaagtaggagcagtaattcctttaccttcagcagtgattggtcca

SEQ ID NO: 248736 - DNA, 540 bp, Homo sapiens
acatgaaaactaaatgtaatatttgaccctaaactggattctgtgctgaagggaaaaaaaacacaccattaggacattattggatcaattaacaaaatatgaatgtaaaaaaattttagctatgttaaattaattttagcaatgttaagtttggtaaaatttaccaaaatccagtcaagatcactcagcaagcctgaataagccaaatcctatccccaaaaacattagacccaaaggatttaaagtttgatcaaacttgtaaagaacagttaatctctattatatcaattttttcatggaataaaaaaatagaaaaagataagtgtcttagtcagtttatgctattgcaacagaacacctgagactgggtaatttacaaagaatagaaatatatttctcatagctctaggggctgataastctaagaccaaagcaccagcaggttcagagtctggtgagcactgctccctgcttcaaatggtgtcctcttgctgcatctttgggaagggcacaaaaaaaaaaaaaagatgaatgctgtgt

SEQ ID NO: 248737 - DNA, 531 bp, Homo sapiens
atgtacaggaatgttacatcgttcttaatagccaaaagggggcctaaatattcatcgatcagaaaaataagttgcggcctgttcataccatgtaatagttaaaatgaacctactagagctatgtctttcaacatagataaaattttaaagcagtggtccccaacctttttggcacsagggaccacagaagacaatttttccatagaattgaggggtggaggtggtttggaatgaaactgttccacctcagatcatcaggcatttgagtctcataaggagcatgcaacctagatccctcacatccacagttcacaatagagttctcgtgctcctatgagaatctaatgtcaccactaatctgacaggagttggagctcaggcagtaatgctcactcaccagccactcatctcctgctgtgcagcccagttcctaatgggctatggactggtactagtccatggcccaggagctggggacccctcttctttaaagtataaaagcaagcgaaaaaagctgcagaattgtctgcg

SEQ ID NO: 248738 - DNA, 531 bp, Homo sapiens
atgtacaggaatgttacatcgttcttaatagccaaaagggggcctaaatattcatcgatcagaaaaataagttgcggcctgttcataccatgtaatagttaaaatgaacctactagagctatgtctttcaacatagataaaattttaaagcagtggtccccaacctttttggcaccagggaccacagaagacaatttttccatagaattgaggggtggaggtggtttggaatgaaactgttccacctcagatcatcaggcatttgagtctcataaggagcatgcaacctagatccctcacatccacagttcacaatagagttctcgtgctcctatgagaatctaatgtcaccactaatctgacaggagttggagctcaggcagtaatgctcactcaccagccactcatctcctgctgtgcagcmcagttcctaatgggctatggactggtactagtccatggcccaggagctggggacccctcttctttaaagtataaaagcaagcgaaaaaagctgcagaattgtctgcg

SEQ ID NO: 248739 - DNA, 561 bp, Homo sapiens
tctggggaagtcttgggcccagcctgatctttttgtggctgctatcactgcagttactgtttgtagaagggatggagtagggagatatcattattttatttcagggaagctgttcagttctctacagtgagctttatagtctacaatccagaaaaaaggaggattgagtcagtcttttaaaattaggaggtctttatcatgtagcattttcttcactatttcaaatgtgtctaacatttaacagttttgcatatattctcatctcctcttaacccagtgtggccatgagcacatttaaggctggttgaggacactgggagggaagaggcatcactgtatttgggggagcaatggagtattgtgttaggagaagcacaacaggagacmcactgcctgagttgaacagcctccagtacttactaactgcctgactttagacaagcaatataacctctgaaattcattttgtaattcctaaaatttgaacaattcctgaggtggttgtgagagttgcaggagataattcttagaaaatacttagcacagtgtatgacatacaac

SEQ ID NO: 248740 - DNA, 580 bp, Homo sapiens
ctgtgctgggagctggcaggacctaggccaggctgctgytgttgtttccaaaatagcttccagggaacatcggaaaaccaagatgataacaatctagaaaaaagaaacattagtccaccagctcactggcagggaggagcatggagttttcatagcagtatttcccaaagtgtattcagtggaataacagtgacaaagaaatagtctccgaaaaaatacgtgcatggccaaattatatatgctggccctcctccaatggacccatagcccatgaaggactaagaaaagacacagcaaagaaacctgttcatctttgattaactcagtgttgctttacatttactgggctttggaaatattttttaatatctaagtttgggaatttttactttttcaagtatacaaaaataattggctacagggaccagataggtaattaaatggactgaatagtttataaaaagcagtattactcatggactgataaatggccaatgacagttggcatcagtgttaggaggcaatagggaatggtggtgactatggcaaagtggggaggccatgcatttatcctaggagg

SEQ ID NO: 248741 - DNA, 580 bp, Homo sapiens
ctgtgctgggagctggcaggacctaggccaggctgctgttgttgtttccaaaatagcttccagggaacatcggaaaaccaagatgataacaatctagaaaaaagaaacattagtccaccagctcactggcagggaggagcatggagttttcatagcagtatttcccaaagtgtattcagtggaataacagtgacaaagaaatagtctccgaaaaaatacgtgcatggccaaattatatatgctggccctcctccaatggacccatagcccatgaaggactaagaaaagacacagcaaagaaacctgttcrtctttgattaactcagtgttgctttacatttactgggctttggaaatattttttaatatctaagtttgggaatttttactttttcaagtatacaaaaataattggctacagggaccagataggtaattaaatggactgaatagtttataaaaagcagtattactcatggactgataaatggccaatgacagttggcatcagtgttaggaggcaatagggaatggtggtgactatggcaaagtggggaggccatgcatttatcctaggagg

SEQ ID NO: 248742 - DNA, 580 bp, Homo sapiens
ctgtgctgggagctggcaggacctaggccaggctgctgttgttgtttccaaaatagcttccagggaacatcggaaaaccaagatgataacaatctagaaaaaagaaacattagtccaccagctcactggcagggaggagcatggagttttcatagcagtatttcccaaagtgtattcagtggaataacagtgacaaagaaatagtctccgaaaaaatacgtgcatggccaaattatatatgctggccctcctccaatggacccatagcccatgaaggactaagaaaagacacagcaaagaaacctgttcatctttgattaactcagtgttgctttacatttactgggctttggaaatattttttaatatctaagtttgggaatttttactttttcaagtatacaaaaataattggctacagggaccagataggtaattaaatggactgaatagtttataaaaagcagtattactcayggactgataaatggccaatgacagttggcatcagtgttaggaggcaatagggaatggtggtgactatggcaaagtggggaggccatgcatttatcctaggagg

SEQ ID NO: 248743 - DNA, 636 bp, Homo sapiens
tgattccatacaagcagctatatgtagatgcctgtagctgagtacagtgcaaatgggaatgctaaagttcggccttccccaagtcttctagcctatccaaactccactgcagaataaggtctccgctaagactattcctttcccacgaaggcctcactgaattttcctgggcaggtccacactacaaaacttatggagggtctttcaaatggcaatttctgttttctggcatatttgtctgcaactagatatcttttttgaatctaaaatgtcatcaatttaataatactttgtgagtgtaagtaaataaacactaacatagcaattgtgtgaaacaatctagtttcaaaaatttattaaaatgtggaaaaaggacattttgtattctaataaatawagcttttactgaaatggattaggaagaaatgacaagttctacagagaaatcactctattccccttatctttgtttcttcctctgtaaatgggtttcggtaaaatcagtaaaagactaagtgatggtcattcctcaagcaaatccaatcaaaataagtagaaaaagcaaaatggataagaaatttatgatgagattgttttactgcaaatcattccttgatctactacaatgcttgggtg

SEQ ID NO: 248744 - DNA, 578 bp, Homo sapiens
tatgaaagaccccaacagaggaagctaagacatgctattaaatagataagtgttagttattatcttaactgatggatgctaaaagacatatccttttgccatatcaaggacacatgacagatgtcaggaaaagaatacaagatttaagaggacaatttttttttttctgggaagcaacataagaaattacatctcatgccctagccctatccattttatttatttcacctcaaatttacacatttgagcaactgatgcttttttttttcatttttgtgcaattgaatactagagcccttggaattttgctcatgacctaagcccatgcatcatccaccctagacttgtttatactgtgaggaaatgtctttttrcaaacagcagaagccttgttgacagaattacaatcccgttagagcattttcttttaatatagcaaccgtgtttgtggtctaaaggtgacccattaatcagatttatggaatgacttcgaggagagattagcttcagaattgtattagtttagcttctcccagggctcagtttaatgaatctagaaaccataccagccacagatt

SEQ ID NO: 248745 - DNA, 581 bp, Homo sapiens
gcatcacccccagaatcctcagaaggggtctcaatagtcatttggatgacatttmaccgtgtctgctgcactgagctcccagagccacagagcacttccacagaaccctgtggttctttcgagttctaaagttgctccccaattccaatgtccctgtttattttatagacttggccttccaaatggaagcacctttatttcaggtggctggggaagtcttctgagaagatcttttataaccaggaagattggatcttaggaagacttgtctgagattctccagagggcctccaggaggggaggaagacaccaaaaccctcttcctcctcagggacttttgtgatgtcaaaggagaaaactggaattctattcacaactctttctctgtggaagagtagatgtgtcatgcccagtgcagctcagattccagcagaaacagaaacaagaacatgcccagaggggctcagcatcagtgaagaagcccagcaaaggaaagcttgcttctcccggtctggctgccttcagaggcacccagcttcaagccagctgggctcagttagaaagaccacatgtgggatatt

SEQ ID NO: 248746 - DNA, 581 bp, Homo sapiens
gcatcacccccagaatcctcagaaggggtctcaatagtcatttggatgacatttaaccgtgtctgctgcactgagctcccagagccacagagcacttccacagaaccctgtggttctttcgagttctaaagttgctccccaattccaatgtccctgtttattttatagacttggycttccaaatggaagcacctttatttcaggtggctggggaagtcttctgagaagatcttttataaccaggaagattggatcttaggaagacttgtctgagattctccagagggcctccaggaggggaggaagacaccaaaaccctcttcctcctcagggacttttgtgatgtcaaaggagaaaactggaattctattcacaactctttctctgtggaagagtagatgtgtcatgcccagtgcagctcagattccagcagaaacagaaacaagaacatgcccagaggggctcagcatcagtgaagaagcccagcaaaggaaagcttgcttctcccggtctggctgccttcagaggcacccagcttcaagccagctgggctcagttagaaagaccacatgtgggatatt

SEQ ID NO: 248747 - DNA, 581 bp, Homo sapiens
gcatcacccccagaatcctcagaaggggtctcaatagtcatttggatgacatttaaccgtgtctgctgcactgagctcccagagccacagagcacttccacagaaccctgtggttctttcgagttctaaagttgctccccaattccaatgtccctgtttattttatagacttggccttccaaatggaagcacctttatttcaggtggctggggaagtcttctgagaagatcttttataaccaggaagattggatcttaggaagacttgtctgagattctccagagggcctccaggmggggaggaagacaccaaaaccctcttcctcctcagggacttttgtgatgtcaaaggagaaaactggaattctattcacaactctttctctgtggaagagtagatgtgtcatgcccagtgcagctcagattccagcagaaacagaaacaagaacatgcccagaggggctcagcatcagtgaagaagcccagcaaaggaaagcttgcttctcccggtctggctgccttcagaggcacccagcttcaagccagctgggctcagttagaaagaccacatgtgggatatt

SEQ ID NO: 248748 - DNA, 581 bp, Homo sapiens
gcatcacccccagaatcctcagaaggggtctcaatagtcatttggatgacatttaaccgtgtctgctgcactgagctcccagagccacagagcacttccacagaaccctgtggttctttcgagttctaaagttgctccccaattccaatgtccctgtttattttatagacttggccttccaaatggaagcacctttatttcaggtggctggggaagtcttctgagaagatcttttataaccaggaagattggatcttaggaagacttgtctgagattctccagagggcctccaggaggggaggaagacaccaaaaccctcttcctcctcagggacttttgtgatgtcaaaggagaaaactggaattctattcacaactctttctctgtggaagagtagaygtgtcatgcccagtgcagctcagattccagcagaaacagaaacaagaacatgcccagaggggctcagcatcagtgaagaagcccagcaaaggaaagcttgcttctcccggtctggctgccttcagaggcacccagcttcaagccagctgggctcagttagaaagaccacatgtgggatatt

SEQ ID NO: 248749 - DNA, 633 bp, Homo sapiens
ctttgctcaagagtgtttttttcattttagtaataataatagacttttattgattccatactaagggctttgcatgattatctcgtctatcctcaaaacaacccaatgagatgggcactattattgtctccattttatacaaaacgaaactggggcatacagaggtcctgtaacttgcccaaggtcactgagccgggaagtgttgaagcaggattcaaagccaggtttgtccagagcctcagttttttgttttgttttgttttgttttttgtttttgttttgagacagagtcttgctctgtcgcccaagctggagtgcagtggcacgatctctgctcactgcaagctccgcctcccgggttcacgccattctcctgcctcagcctcccgagtagctgggactacaggtgccggccaccacgcccggctaattttttgtatttttagtagagacgaggtttcaccgtgttagccaggatggtctcgayttcctgacctcatgatccgcctgcctcagcctcccaaaatgctggaattacaggcgtgagccactgtgcccggtcccagagcctcagtttttaaggctcagtacttcatctccctggccctttaactgttaccttgcgttcacaca

SEQ ID NO: 248750 - DNA, 583 bp, Homo sapiens
tcataatcatcacacgggaagtttttaacaatatatatgcatccttctgtatcaccaccagtaaattatgactcactaggactgagtagggacttgagtgtgcatatttttaaaaattttctcccagacaatctcgatataaacctaccaccacctccttgaaaacctgtacaaccaaggagaggcgccatctccagtgcttccagaaacacttatcctaataatggggagaaaactaccatctaggtactttttactatatactagttcttttacatgcattgtctattttaagcctaagaycaccatgggaggtgggcattactatccctattttacacatgaaacctctgaggcactgaaagagcaaatctcactaatcatctcagagattttgaacacctacaaatatggtttgtttggaaatttaatatcttacataataagtattaatggctcttgatagtttattctccctctaagtccctactgtctttgagaccttcaccttgccaaaagggtttttactaaccacagagattactaggaacatctaaccccacatatatacccacactcattt

SEQ ID NO: 248751 - DNA, 545 bp, Homo sapiens
acccatctgcactagatagggaaagggattcacactcaatcatcccggtggttttgtgctactaactaaagccagaatgaagtgtatcttcttaagcctgtggaataacctcaccaaacttaacaacttcccctttggagcctcaatttcctcatttgtacagtggggagaatatttgtatctgcctcatagagtgtttgtaaggatcaaattactcagcacatgaaaagcatccagcactgcctatagcaaagagagggctcagtgggttttagttgtttttgcagttatgtttttactattacctttatttattttatggctccatatatggaggcctatctctccttcccactttgatcctgctttccaatgaaaaaagataatagcagcgcttctcacaatgraatctaaagtcttggagggcaatcttggagctgctgtatctctagtacttaacaccagtgctcgtaggtacgcaacgcacctgttgttacatgaacacctgaagacttcagccacaacagaggaaacatggtctctct

SEQ ID NO: 248752 - DNA, 587 bp, Homo sapiens
tgatttattttcccacttcatacaccacaatcatctcccattttttagatgaggaattgaagtacaaagaggatcactcacccaaagtcacatgcctcctgagttgaactctmtgcaacccaaggtcaagtatccacagagctgagctccgactctagagcccacactcttatccactgccccatacttcctccccttgaacccaactctttccaaaagaacagaggggtctcagaaggcaaggatcaggtgggtgaaggggatagtcccaggatccctgaatggagtgaggctgagaggcaggcagaaattctacaggcccaggagtactgctggaacccctgctcacaactgcagcaacttgagtctaattttaaaagcctagagtttttttgctcctactgttttgttgctactttaaatccacaagacaaccagctaaacagcataaaagccgtttgcttctggagctgatgtattggttttcttcaattttgcacagaaaatatgcaactgatgtgtttttcatttgactgctgaggagtatggcactgtagttaacattcagcagccccaaaggagaggct

SEQ ID NO: 248753 - DNA, 507 bp, Homo sapiens
cctcatttataaagtagggctaataaaatgtaaagcctaccctgcccactttaacgggatgccaatgaaatgaaaatgcaagagaaaatctcctaaaagtagtatgtgttctttaactattcagaatatcatctgatatttatttggtcaagaaatatttactgaacacaggcactctcgtagcatggaatgaaaacaagacgaatcagactgtatttgtttcccattgctgctgtaaaacatgaacacacagtcatttagaacaacacaaatttattctgttacagctctggagatcagaagttcaaaatcaatttcagtaggttaaggcaggagtctcaaacccctgggccaagggccagtacctcctgtcagatcagtggtggcattagattctcacaggagtgcaaaacctattgtgaactgcacatgcaagggatctaggttgtgtgcttcttatgagaatcaaatgcttgatgatctgtygctgtctcccattatccctac

SEQ ID NO: 248754 - DNA, 604 bp, Homo sapiens
tatggccttattctaaaaatgattctcaggatgctaaaggagatctcagaaagaaccagggacaatcaagagaaaaactcatgtcctgagtccagaaatatgcagacccgaaaccaatgagcagcagtggtgtttgctgtttacttgcattagtcagaaatcgtagccattgctgttgttagaaagatggtgtctgaaaggctgagagcttcataggggctcagagagactttgtgtgccactacagtgatgaagatgggattgagtcttgtgggtggcctggagttcccaggtatgtctaatagcactccacttgaggctggctcacagctgtaaggagagcacctgggggaggggaagcagggaaacaagaaagccattgtccccgctcccaccctctccccagcccatttggccacctgtgtccccaagatgctgcaggaactgttgtttctgcttcaggacaggtttttcagggcatatcagcgtgaaaaagacatttgagatcatctcactgtgtctccagaaaaagaaagttaatgattaaaaggtcacaggacaagawaaggcacagggaaaccagaatctgcttggcagattcccc

SEQ ID NO: 248755 - DNA, 544 bp, Homo sapiens
taggaatggtcttatgtgaaagcattgtgcaaaatggcttttgtcatatctaaccattgagagctggcatttgttgagcttctgcttcaaaaaagctgtagttagagctctaggaaatacagcctcatggaaaactcaacctctctatttttgaggctcttaccttatctctagagagattaaacaaggacataagaaaagtgaatttaaaatacaggccaaagcaagatgccagcagggagatagacaaaaccagacaccaccactgccattgccaccaccacctctgctctggttaagatctcactgcctgagagaagcttttctggcatcagatccctggggtaaaatagaggagccagagcaagagaaaataagccaacaaataacatataggtcaatatgtagtgaattccaaagggatggttcaagtggtaacttctasaaagatgtgaaaatctggaaatccatgggtcagatccagcccgtcctcttttttcttccaaagaagaataggaggaaaagaaaaaaaaaaaataggtca

SEQ ID NO: 248756 - DNA, 649 bp, Homo sapiens
gtccaattttggaacagcatgaattagtgtgcagccgcttcctgattgctaacaaggagaagacagttatggggctatgattctcccaggatagtagattccagccaagcttcagaattgcccaggcagccctgtgcctcctgcattatcagccatggatcagggccaagaggtttatggggattgattagtgtgtagaatgggaagggagctaattagttctctttatycccagactctggcagacaagtgaattcagtacttctgagtcaagggagccacggcactctatccctcagcagccagtcatccaagctgccctggagatgtctctttatttgctcctcacctgattgaaaaatggattagagatgccttcaatagaagtcacacacacaatgttactataagaattgagaagcaaaactttgaaaggagggagaaaatgacctcaggtttaataatatttatggtgtttaaatgttcaatttgatgctgaggttcctggcagccttagcaagaaggtaaactccaaggcttacaagtaaaagacaaacaggtttaatctcaggagctggtgtctttaaaaataaaatattgtaaatagtgccgaatcaggcgatgcacaaatgaagactatgcttaaggc

SEQ ID NO: 248757 - DNA, 649 bp, Homo sapiens
gtccaattttggaacagcatgaattagtgtgcagccgcttcctgattgctaacaaggagaagacagttatggggctatgattctcccaggatagtagattccagccaagcttcagaattgcccaggcagccctgtgcctcctgcattatcagccatggatcagggccaagaggtttatggggattgattagtgtgtagaatgggaagggagctaattagttctctttattcccagactctggcagacaagtgaattcagtacttctgagtcaagggagccacggcactctatccctcagcagccagtcatccaagctgccctggagatgtctctttatttgctcctcacctgattgaaaaatggattagagatgccttcaatagaagwcacacacacaatgttactataagaattgagaagcaaaactttgaaaggagggagaaaatgacctcaggtttaataatatttatggtgtttaaatgttcaatttgatgctgaggttcctggcagccttagcaagaaggtaaactccaaggcttacaagtaaaagacaaacaggtttaatctcaggagctggtgtctttaaaaataaaatattgtaaatagtgccgaatcaggcgatgcacaaatgaagactatgcttaaggc

SEQ ID NO: 248758 - DNA, 649 bp, Homo sapiens
gtccaattttggaacagcatgaattagtgtgcagccgcttcctgattgctaacaaggagaagacagttatggggctatgattctcccaggatagtagattccagccaagcttcagaattgcccaggcagccctgtgcctcctgcattatcagccatggatcagggccaagaggtttatggggattgattagtgtgtagaatgggaagggagctaattagttctctttattcccagactctggcagacaagtgaattcagtacttctgagtcaagggagccacggcactctatccctcagcagccagtcatccaagctgccctggagatgtctctttatttgctcctcacctgattgaaaaatggattagagatgccttcaatagaagtcacacacacaatgttactataagaattgagaagcaaaactttgaaaggagggagaaaatracctcaggtttaataatatttatggtgtttaaatgttcaatttgatgctgaggttcctggcagccttagcaagaaggtaaactccaaggcttacaagtaaaagacaaacaggtttaatctcaggagctggtgtctttaaaaataaaatattgtaaatagtgccgaatcaggcgatgcacaaatgaagactatgcttaaggc

SEQ ID NO: 248759 - DNA, 649 bp, Homo sapiens
gtccaattttggaacagcatgaattagtgtgcagccgcttcctgattgctaacaaggagaagacagttatggggctatgattctcccaggatagtagattccagccaagcttcagaattgcccaggcagccctgtgcctcctgcattatcagccatggatcagggccaagaggtttatggggattgattagtgtgtagaatgggaagggagctaattagttctctttattcccagactctggcagacaagtgaattcagtacttctgagtcaagggagccacggcactctatccctcagcagccagtcatccaagctgccctggagatgtctctttatttgctcctcacctgattgaaaaatggattagagatgccttcaatagaagtcacacacacaatgttactataagaattgagaagcaaaactttgaaaggagggagaaaatgacctcaggtttaataatatttatggtgtttaaatgttcaatttgatgctgaggttcctggcagcctwagcaagaaggtaaactccaaggcttacaagtaaaagacaaacaggtttaatctcaggagctggtgtctttaaaaataaaatattgtaaatagtgccgaatcaggcgatgcacaaatgaagactatgcttaaggc

SEQ ID NO: 248760 - DNA, 661 bp, Homo sapiens
tgtctgtccagatcatctccagtgatctgagcacaatagatttttagtgataatggaacacaaggataaatcttcattaatttacatatttaaaaaaaagtctttgagaagaaagccccatctaattatgtagggaagttcaaacaggccaatasgagacccagcaggtgggaagagagaggaaattatcttgttggtccacccaagattgttaaggagccttttcccatcccataggttgtaagcgaagaggacttccggagatgggccagtttccggcgtgaggctgaggcatccctcgacaaccgagatgagcttctcatggaaactgcacagcatctggagaatcaactcaccttacttggtagctaaaaataagtcattattataggaaaaaaggaatgcagccagttgagaagggagctcttggccccgattctgacactactaatatgtctccattagcagccttccctggggttcccttccaggtatttggcacaaatgggccatgccaatacccaacccagacaccacacacagcttcctgaggatgctctgggagcattcctgcattccctgctggaagaagcctctgagtttggctgcttttccaacagcacactcttcccttcattcaaatgtttgctaagcacctact

SEQ ID NO: 248761 - DNA, 587 bp, Homo sapiens
atttgcccactgtcaccttgggcattttcagaaccttcccacattcctttatgttatttcagtgaaacaggacattctatctttcatatcaaaggaacatgccactcattggccaaggagcctgagccaggatgaagcaggggccatccattctgaggagcactaccccagtccctgctatgccatggctaaagcaccttcctcatgggagatgttcttggcagttaatttacgcgaggttggcttgggataaactgggacaggacaagtcaaccagttagtcctgtcttccggaaatggaaaaattttgcttgggatcagggagcaagagaaacctaggacacggttatttgtcaagtaaatttccaagtaatgattggatttgaaccatgtatgaggcaccaggcaagtttctgactttctaaccaaactatgttagaaatataggacatccacccacacagaaaggtgactggcagcacaggaccctgccaatgagtggaacatccaacarttgtgataggcttcagagaagtgaggggttcacttctggctcttttggaaagaaaggtttcacctagaagtct

SEQ ID NO: 248762 - DNA, 587 bp, Homo sapiens
gtaccatacggacctataaatactaaagagaacataaatcrtcatagctttattaagatagtttatgaagattctatacttaaaatttcaattttcagcaatgaaagagagtgataaactttctttagtctattaatactgataaaagaatgttattcatttgacctaaatcaaatactaattggaaggaactggaggatttctcagaaccaggagaagaaagagaagacaatgtagactagaaccaacacttcttttagccctttctagcgaaacttttcaccaggactttgtcaagaattggtgtcaaataccagttggctctacctttaaatatatccagaatctgagcaatccttattaccaccactgccttcactcaatgcaagttctcaactacatcaccgcaacagcctcttagtgatctatttccaatccttagtctctgcagcctagtctcaacccaacagagtaatcattttaaaagttaaagcagttagtttatttctcatctgctcaaacccttgcaatggctcctagtttcacttaaaaaaaaaaaaaaaagaagaagagaagagaagagggga

SEQ ID NO: 248763 - DNA, 580 bp, Homo sapiens
  misc_feature (1)...(580): n = A,T,C or G
ttaaaacttaacactgaattcctttttaccatttactcaggctaaggctgtttttttttttttttttttaaatcctagctttctataaagtatttgaagatgattattttattaaaaagaaagaaaaaagggattcaaatgcaaatgatctttcattacatctctcactaagtnnctgacaaactctagcttattaagcaattttttgcttaagtttgagatttttgtcaaaggtcatgcattcttccagaagaaggaaataaaatgctattttcccagtggaaaatttgcataaatattttccttgttttttacattgaaaatacacttggagaaattaatgatgatttctgtggtgttttggacatgtcttgcgctcagtaagaactcattacaaatatttcctataagccctcatgacacattcctggttttacagataagaaaacaggattggaaaattcaaacacttacctgaggtacacagtaagtggcagaacyagcacggagagacagtttagtctggggaggcagtacagtactatgcggtagtcaataggatgggactttgggtccagtc

SEQ ID NO: 248764 - DNA, 578 bp, Homo sapiens
gctaatatttaggttaaattgtagtatttgattttttgaagcaaagatcttggcatgtatatttttcagattgtaatttgttcagatgtagtaggatgggtatataactttattaatgaagaaagttaataaaagcagattggcagaaccagagaagatacagcaggtagagaatactaaagccccaagtttacataaaatgtaaatacatctgtttgagtacctcagtgtggccttaccattagttctgtcaataaacattccaaacttactgggttttacaaacatttcttagcactacagcttcatctgaaaaataataataaattatagtttctaaaatgcctactgcatacccgacactatattaaacacctacacatgttaccacattttatccttaggacaacttggtgccatagatattattattgtcatcttaaaaaatatatatctagggctgtggttagagaaattaggtaacttgccargttatatggcagtttaagccagagtttgagtgcatttctttcaggctagagaccttgtcctcaagtatgttgttaatttggaggaaa

SEQ ID NO: 248765 - DNA, 545 bp, Homo sapiens
cgtgactttctaggagcaggagctgtgtggcttgttgcatccacaggctggctgccagtgcttagatttatcatgccttgaaaatggaccatttaaaatgttttcttacagttcccattctctttttatcatgttatactctaatctgagtgttccatttaggaacattaagaacatcagaaaataaaatagtatctccaacgacaggagattcatttccctccgagaactgataatacgtgtgtttacaatttcaactcagtcttggattaaaacataactgttttatcagattctcaagtgccatacaaaatacatacttaagtcttttcagratatacactgtacctaaattctggcatgtttagtgagagagacagcagagaattgggatatgcaggaatggaaggaaaactggaataagtcttagaagaccagcctccttatgctgacaaatatttcttcagctcccaccacagtgtgttgaaatgagattttaataaacatgaaaaaagtattatacttaatcctcccaaagataatag

SEQ ID NO: 248766 - DNA, 388 bp, Homo sapiens
gttgaaatgagattttaataaacatgaaaaaagtattatacttaatcctcccaaagataatagacaagtaattttaactctgartttatctgtgcttatcaagaataaagtggggagagtgaattgaaagttgttttttattgaccaaatagagattatctcactttagggaaaaaacaccccctagactatgatcatttccttccccatctcccatccccacacccagtggctggatatgcttagggaaaacaaaactgttcacaaaaccaccatttccaatggcaaaatttatattttgatttctaacgaaaaattccaatgaactaaaacattttcattcttttgtttaattcaattaattcaaacttcttagccttggaggcat

SEQ ID NO: 248767 - DNA, 388 bp, Homo sapiens
gttgaaatgagattttaataaacatgaaaaaagtattatacttaatcctcccaaagataatagacaagtaattttaactctgagtttatctgtgcttatcaagaataaagtggggagagtgaattgaaagttgttttttattgaccaaatagagattatctcactttagggaaaaaacamcccctagactatgatcatttccttccccatctcccatccccacacccagtggctggatatgcttagggaaaacaaaactgttcacaaaaccaccatttccaatggcaaaatttatattttgatttctaacgaaaaattccaatgaactaaaacattttcattcttttgtttaattcaattaattcaaacttcttagccttggaggcat

SEQ ID NO: 248768 - DNA, 608 bp, Homo sapiens
tgatagtcaccttgctgtacaataaatcaccaaatctcacagaagcaaaaatagaatagtggttgccagaggctggggaggaggatgggggaagtagaagaggttggtaaacaggtagttttttttttttatttgtaagtttgatcagatgtaatcatcccaaagtcacagataagggagcaggctcagaggagacatgcagattgtcagggatcacagagatwacagaatggctctaaatattttcttatttagactagattggggtcagcaaatgttttctgaaaaaggaaagatagtaaatattttagtctttgtgggccgcatatggcttctgttgcctattcttctttattatatttttcacaatctcttaagaacgtaaaaataattcttggctcacatgccatattaaaaacaggcagtgggctggatttgcctgcaggccagagtttgtcgacccctgaactagaacaattttgctgatccattatttgcattttatttttcaccctgttctataaaccaaaaaaaatttaaaatgccttcaggttttataactagtttttgtttttgattacagagacgaggagtgggtagtgtttgtt

SEQ ID NO: 248769 - DNA, 631 bp, Homo sapiens
ttacaaattggctagatgaagataaatgcaaggagacaagagtggtctttgacattctaataatggtgtaaaattgattgtataataaaaattttagtgaggcttcagataacagtatcttaggtaaattttcccaaatgcagtaatagatgaatgaattacacatttctaagggcaaaacgaaaacgtggtattttcattgtcatgcaacagaaaggattttattatgcaagtattttgtgaccaaaatctagaccattctattgtgccaaaaggcatattacacattctttcattgttcataaagcttgtgcactggaatttacttgatatcattaataaatggatagacagttgtatatacaaagttgagtagtaagaaatagatgctgtagtaatgaaaaaattaattgtatccatcattctaattggtatttataaatctaaaaattaaaatatattawaattacagagaaaataagatgaccctttccttttcaataaaattatgtaccattgaagtttataaagtatcacattttgatgatacaacggcatgaagcagaattagaagtaatgacaagacagagcctagcagagatatatttgaaatctgagaacagaatttata

SEQ ID NO: 248770 - DNA, 610 bp, Homo sapiens
aatatagaccataatccataaaaagtaattaaaaccttcctggtatactccaaagtggtcagaagaattcaattacaaacttcatagttacattatgaagatttacaccaaagctagaagcaagaagtgaccaagccaggaaagacttaatcacagaggatcttaattatgtctttcccaaggaatcaatactctcctctttcacagaaacatttttcaccgtttctaaatagtatttacattaacttttcaaatgccctatcaagttcacaagagacacaccaatggggagtggcgaagctgtcatgttcagattttcaatgagggaagataatgggagtatccatgtctagagtgctcagtagtcatcaaaacaccaatcagagtacacaaccagtaaaacacactgtgcctggctgtatgagcaaggtgagcagcttctaacacaatgacagtttgtattaacccattctcakgctgttatgaagaaatacctgagactgggtaactgattaaaagagaggtttaattgacttacagttccacatggctggggaggcctgaggaaacttacaattgtggtagaaggcacctcttcacagggcaggcg

SEQ ID NO: 248771 - DNA, 560 bp, Homo sapiens
tgtcacatggacctactgtaaaaacataagtcatatactccctggaagagcagaggaagaaaaaagagaagaaccaaggtgtcattctcctggagaaaatttaccagagtaattctctgacctcttgtacttcataactgtgtgaaacttatattgaatacaagttataatgcagctccaaatgacttctgcaaactgttgttagaaaagggttcataggtatcctttccacccaccacaaatcaataaatactcattacatgcaatatgtaaaaatatataattataatagcataagcaagtgagatctatagttcatgtttttactcccatgggaagactcttcataatttcagtaagggaaataatttttaaacattttccatgtacagttccttcctgatacaagagagtacacggcaagtaatttaagaaaggcaagtctggasagactgcagtatattctctcagttgaataatttcatgagtctgacctttaataacatgtatattcgatacaacccatttagcactcgaaacattataagataacattgtta

SEQ ID NO: 248772 - DNA, 643 bp, Homo sapiens
ttagtgaggacaatagttttcaaagtattgacacacccactgaaagtataccaactacaaatatttgagtttactctggttttaagtgctgtttctacagtcttttgttgaaaggcttctcacttaatcttaggatcgagtctcatgactacccaaccaattttctctcttctcttggcaatatatctattataggtaaagaaataactataatatttcattctttgcctctgattagcaacttaaaactagttcttagagtaaaatttaagtcttcatgctgaaggggagttgcttactccctgcagctctcctgcagtcttacaattaacataattagtcaactgtggctaaatggggaaatcatatcatttgctttccawgaacatgccctgggctgcctcgtcattcttcccactaatggagagagcagagatttggtaaaccttgctcttcagttggattcaaagcagagagttcatttccaatatccaaattacttatactttaaaagtagctaagggttgattccttattcaccaatatgtctgattaaaacacacaaaacaaaattactctctaggtgatattttgtctaagcacaaattctttgcaatcaccatacttaaagcaataaacaaat

SEQ ID NO: 248773 - DNA, 568 bp, Homo sapiens
gaaaaccattaacactgatgaaagaaataaacacaaatagaaagaaagatacctcaggttcatagattgcaataatattgttcaaatgtccatactacccaaagtaatctgtatattcaatgcaatcattatcaaaattccaatggcatttttacagaaataataaaagctatcctaaaatttgtattggataaccacaaatcaacctaatagccaaagcaatctggagcaaaaaaagatcaaaactggaggcatcatactaccttatttgaaaatctactacaaagctatagtaagtaaaacaacatggttactaacataaaaacagacacatagaccaatgaaacaggagagaaacgcccraaataaatcaatacatttggtcagttgattttcaacaaagatgtgaagaatacaaaatggggaaaggatagtcttatcaataaatggtgctggaaaaactgaatatccacatgcagaagaaagaaatgagacatgcttatcacactatacacaaaaatcaactgcaaccagattaaagacttaaatgtaagacctaaaattaaaa

SEQ ID NO: 248774 - DNA, 595 bp, Homo sapiens
gagctataaatcagagaggaaatgaactctgcattatctcacaactcatgcaaaacacctcaactcagtgtcaccattccttccaacacagagtgaccaaaggacaagaaatctcattaatttagtgtatttcatgttgaaccactgactttccgcttggaactgtggcgaattcacctcccatctcttcccatcccttaggatgtaggaagtgcctttttccttccgctatccttgctgaaaagacagaacatttttttgtgatcattaatttttttctatttttatatatatttgcatatatatttctatttctwtatgtatatatatctatttttatatatgtgtatatatctttttaaaaaatatttgagatggagtttcgcttgttgcccaggctggaatgcaatggcacgatctcagctcactgcaacctccacctcctgggttcaagcaattctcctgccccagcctcccaagtagctgggactacaggtgcccgccaccatgccttgctaatttttgtatttttagtagagacagggtttcatcatgttggccaggcgggtctcaaactcctgacctcaggtgatcc

SEQ ID NO: 248775 - DNA, 595 bp, Homo sapiens
gagctataaatcagagaggaaatgaactctgcattatctcacaactcatgcaaaacacctcaactcagtgtcaccattccttccaacacagagtgaccaaaggacaagaaatctcattaatttagtgtatttcatgttgaaccactgactttccgcttggaactgtggcgaattcacctcccatctcttcccatcccttaggatgtaggaagtgcctttttccttccgctatccttgctgaaaagacagaacatttttttgtgatcattaatttttttctatttttatatatatttgcatatatatttctatttctatatgtatatatatctatttttatatatgtgtatatatctttttaaaaaatatttgagatggagtttcgcttgttgcccaggctggaatgcaatggcacgatytcagctcactgcaacctccacctcctgggttcaagcaattctcctgccccagcctcccaagtagctgggactacaggtgcccgccaccatgccttgctaatttttgtatttttagtagagacagggtttcatcatgttggccaggcgggtctcaaactcctgacctcaggtgatcc

SEQ ID NO: 248776 - DNA, 544 bp, Homo sapiens
gctctcatgcctgtttcttttcttttgagacagagtctcgctctatattgcccaggctggagtgcagtgtcgtaatctcagttcactgcaaccgccatccctggccgcccccacccccgccaaattcaagcaattctcctgcctcagcctccctagtagctgggattacaggcgtgtgccaccacgcctgagtaattttagtatttttagtagagatgyggttttgccatgttagccaggctgatcttgaactcctgacctcaggtgatccacctgtctcagcctcccaaagtactgggattacaggcgtgagctaccacacctggccaagccctcatgtcttaattgcctcctaaaggcaccactatttaatactaatacattgggtattaggtcccaacatatggatgttgggggaacacaacattcagaccatagcagtcaccttcattttaactattctccatacctcttgtaactcttatgctccctagccagagttattttttaaaatacaggttcatctatttagcaaaaatcaaat

SEQ ID NO: 248777 - DNA, 527 bp, Homo sapiens
gctaaaatgaataaaatggtagaacttacttmaaagcatagtgtcttgggtctttaagagtaggaggaaataaaaatactcctggggagattagagaagctccatgaaacatcttaaaaacaaagccagaaaaactacaggtaaataaataaaataatgaaagacaacacaaagagaataattttagtggaaataaagagtaaatttatgtaaaaatttcctaagatgtttgaggatatggattacatcaatctgacgtagaagaggaaaggttttgcttagcaattttaggtgccctggctaggtctaaaaatcaaactgaacctaatgtaggtcacaggttgatgggtgcagcaaaccactgtgtcacgtgtatacctatgtaacaaacctgcacattctgcttaaaatataataaaatatattaaacttaaaacattatatgttatatataatatattaataaatatattaaacatattaaacttaaaatacaattaaaaaaaacaaactgatgaagagacatt

SEQ ID NO: 248778 - DNA, 580 bp, Homo sapiens
aggccagagattttgatgtaattgatctggggtaggaatctagtagtatattttaaaatatcccctgctgacatttaccctcatgtgtgtagccagggtagaaattcactgagtacagaattgaggacatgcattaagaaacttttaaactgggcacagtggctcacatctattatcctagaacttgggaggctgaggtgggaatattgtttgaggccaggagttagagaccagcctgtgcaacatagtgacatcctctatttacaaaaaaaacaacaaaaaagtccaacatggtagcgcatgcctacagtcccagctactcaggaggcrgagttgggataattgcttgagccccagagcttgaggctgcagtgagctgtaattgtgccactgcactccagcctggatgacaaagcaagaccatgtgtcaataaaaaagagagattgctggcaagatggctgaataggaacagctccagtctgcagcttccagcgagatcgattcagaaagcgaatgatttctgcatttccaactaaggtacccagttcatctcactgggactggttggacagtgggtgc

SEQ ID NO: 248779 - DNA, 565 bp, Homo sapiens
gctgtgttacaatcacagctcactgcagccttgaactccctgggctcaggtgatcctcctacctcagcttcccgagtagttgggactacaggcatgcaccaccatgcccagctaatttttgtatttttttgccgagatggggttttgccatgttgcgcaggctgttctcaaagtcctgggctcaagcaatccacccacctcagcctcccaaagygctaggattacaggtgtgagccactgcatccaactaccataaaaagtattacggatccaagtaatagttgatgtgatatcagaagtgtagtcaggaattaactacactgaggggtgaggaccatagcatgggcaaaggccctgaagtaggagagtgcatagccatagaagacaccagaggtggtccaaaaggcaggaagagaaaatggtcaatatatttacctctgactggtcacagtggattagctgtgtccctctgtggaaggccccatctactgtctatgttatctatctcctggatttacccctcaggcctagagattataaccaatctctatggttactatccctg

SEQ ID NO: 248780 - DNA, 662 bp, Homo sapiens
atgtccctcagcgtggattagtccagtatttcattatgtatgattactttggagttatgcatttttggccaaaaaccacagaaatgaatttgtgctgttttcagtgaatcatatcaggaggtacatgatgttagtgtatcatattaccagggacgacattacctttcatcacctgattaacatggtgtctgcagggtttttccatgtacactttctatttttctattttcaattaataaatatcttggaaggagagtctttgagactgtcttatttctcattacattttgcccactaattttaacacccatttatgattcttgcctgccacgttattactgtgtatttgcctaatgggctgcttttcaataacctgttggtttgcactaattacaaggatgggctgatcataatgcaattctattcctgcatacatgtggaagctggagtatccttcttctgaattttagggcattgtaatgaccatgagaattcatsggtagatctgtgagagaatggagcatcaagagggagatactgaacttccttttaataaagcaattagggaactcaataattaaatgaaagaaataggatactaaacatatatatagatgatttttgtggagtagcttattctggttacattaatttttatctgt

SEQ ID NO: 248781 - DNA, 447 bp, Homo sapiens
catgtcacatcacagagaggcagacttttgtgagttgtttcatgttcaygtccctgatttgattactcttactatcattcagttaatgcatttgcttttttttttttgctgctatgggcccttgtgcgtttattatttcattcaccattcccaccacaaacatttattgcaggcttattatatgccaggatatatatcctggggatgtaaacatgaataggacaaggttccagcatttggaggctgtcactatgggagaaacagatataaaaaatatttaattatgatacaatttgatcaagctgttatagagatagcaactatatgtatgtattccatattatggaagatgaaaaatggtggctcattgactagaaccagtccacagaatttgggatgttttattttgggcttgtgttcctcagtttgtcaaagactccaccatat

SEQ ID NO: 248782 - DNA, 612 bp, Homo sapiens
actttggtaggctgaggcaggaggattgcttgagctcaagaaccagcctaggaaacagcaagaccccatctctactaaaaaaaaaaaaaaaaaaaaaaaaattaactgtgtgtagtggtatgtacctgtagtcccagctactcaggaggctgatgtgggaggatcacttgagcccgggaagtcaaggttgcagcgaggtgtgatcaacccactgcattccagcctgggtgacagagcaagactgtctcaaacacacacacacacacacacacacacacacacacacacacacacatctttaaaactcatttaaaaraaaattgtgtaattgtgtggtgtgttaaaatattgtcactcacactcctctcagctgtggaaaaaaatgtctcacaagccacctaagttgcataatagggaaactaagcgatatttaaactttgcttatcaatagtatctcaatttatttccatttaagtagtcttttagggatactcattcccttttgggtcactaccagtatttgtctcttccctcctacctgcttttctccagaaacttttagatgtggcagggaaggggctttctcatttctagggatgttggggagaaaag

SEQ ID NO: 248783 - DNA, 501 bp, Homo sapiens
cacctacaatgctgtggggtttttgtttgttgtttgtttttttagaaatgggatcactctatgttgctcaggttgggtttgaactcctgggttcaagctatcttcctgcctcagcctcttgagtagctgggaccataggctagaactatcgcacccagctcgaatgctgtgtttttagttaaaatgattttttaagatgagaagaaacaatcagaagcagttgagggatgagaaagtgggtcccttaggaakgaggaggcattctgctggatggctttttaaaatgtttcctccagtcatctgcctcattaacaacttttgttcttttgttggcttagaaggcttttattttattttcggttttgattttttttttttttttttttggacagggtcttgctctgtcaccaggctgcagtgcagtggtgtgatcatggcttactgcagcctcaacctcccaagctcaattgatcctcccacatcagcctcccaagtagctgg

SEQ ID NO: 248784 - DNA, 531 bp, Homo sapiens
tcccaccactttttgtgaataatacgttaccttatagattctcagcagagatttgaaactttcaagggaaaatgctatatagtaggaaagttcagattcttttaaaaaaatcaactttttattctattatattaatacttaaagcaacttttgrgatcctgtcattttttcgatgtctgctggagaattactgcctatacattaaccatagtgctcagattgtgtgctcacttccgactcttcagttatcatccacttgtccgttaatcttttgtttgtgatggaattattgttccacaattactgaagaagcagtttattgtaacatcatttcagtgtcgtcacacattaatgaaagctctcttattgaaaatttgtatgacttgttaagaaaagtatctacttgcacaagattattctatcaacaatttgggtgtctcactgacattaattattccaattttacatttttaattttagatttatttttaataaacaatacatacacataggaaaggtttcaagaattat

SEQ ID NO: 248785 - DNA, 620 bp, Homo sapiens
cctgtgagagcagatttggtggctgcactctacaaagccacaggggcagagctgcccaaggccttaggagcccaccctttgcaccagtgtcccctagatgtgggacaaggagtcaaagggaattattttggaactttaagatttaatgactgccctgctgggttttgagcttgcatgggccctatagctccagttttttggctggtttctcccttttcgaagaggaatgtttacccaatgcccataccctcattgtgtctttggaaataactaactagttttttattttacggcttgcaggtggaaaggatttgccttgtctcagatgagactttggacttttcagttaatgctgggaagagctaagagttcgggggactgttgggaaggcatgattgtattttgcagtgtgagaaggacatgagatttgggaggggccagaggctggatgatatagtttggatatttgtccctgctcaaatctcatgttraatcataatccccaatcctggaggtgagatctggtgggaggttttggattatgggggtggatccctcatagcttgctgctgtctttgtgatcatgagttcttgcaagacctggtcatttaagagtgtgt

SEQ ID NO: 248786 - DNA, 589 bp, Homo sapiens
ctagcacaattagtactctatctaaaaaccatagaaatagaatacaattcttttttgttgttgttttgttttttgagacrgagtttcgctctttcgcccaggctggagtgcagtggtgtgatctcggctcactgcaaactccaccttctggtttcaagcgattctcctgcctcagcctcccgagtagctgggactacaggcacccgccatgactcccagctaatttttgtatttttagtagacacggagtttcactatgttggccaggctggtctcgaactcctgacctcatgatccgcccgcctcagcctcccaaagtgctgggattacaggcgtgagccactgcgcctggacgaatataattcttctaaataaaaaattatctgtccaggaagacagtgctagagacactggagctctactctgtcaaaagggagaaatcctgtgaagtgccctggcatccagctgagacaccaaaaagatggtaccttgggagcaagaactatgccctagaataaggcctattctagatgatccaagttagagggatttgggaaacaccttgggctttccacataataaagcataa

SEQ ID NO: 248787 - DNA, 608 bp, Homo sapiens
ttctgtcagccttctgagtagactgagacatgcattggggcttggttatattttctcagccaaaagagagaaggcttgaaagggggaaacaaagacaatggagaaatgactttaatatttcactggggtagagtcgttctaatagcagtcagcttaaaaactatcccttcctgacctagaaacatagagttcaacataattgttcatgagagtagtacaaattaaagccataatgagacaccatcacacaactatttagaatggcgaaatgaaagactgacatagcaagtgttggcaagaatgtggaacaactaaaaatctcataggctggctttgaactcctggcctcaagtgatccttctgcctcatcyccacaaggtactgggttataggcatgagccaccatacccagccaggctcatatactgatgatggaaatgtagaatggtacagccacttgggaaaacatgttgctggtttcttatacaagttaacatacagttacaatatgattccccaatctcaattctagctgtttaccaatgagaaatgaaaacatgtttacacaaaagcctgtatacaagtatttatggaggttttatccacaa

SEQ ID NO: 248788 - DNA, 636 bp, Homo sapiens
ctatgttgcaatttctaatgtattccactatatgaacacagtcagattctatttattcatcaaaaagtgttaagttgtcagatgtatttcartatagaacccccattcaatggctatgacatgagagagcagcagagatggaaaagaaacttttataaaattcctctgaaaatatgccccattttttcataatgctcatatgtttctcatgctatgtacattgggtgtttagagagaaatttcttttaggggaatattttctggctgacataatcaatcttatatctaatctaagctttttcttaagatctttttaactttcttctttcaaaataatcttgctcagatggagatctgtttttctctccagtgctttgtctgtttcagaagccctattagtatcccatggtgcctgaatgaggtgggctgtcacagtgagaacttttggagctatctctatctggactcatgctggaaactcagcagtattttttccatgtcaccattataagtagaagctggggctgaaacactgctcccattcccattatcaggctacaacatatgcagagccatggccacaactatatttacctgtaaaatgtgttactggagtagagtatttttgttctttcc

SEQ ID NO: 248789 - DNA, 636 bp, Homo sapiens
ctatgttgcaatttctaatgtattccactatatgaacacagtcagattctatttattcatcaaaaagtgttaagttgtcagatgtatttcaatatagaacccccattcaayggctatgacatgagagagcagcagagatggaaaagaaacttttataaaattcctctgaaaatatgccccattttttcataatgctcatatgtttctcatgctatgtacattgggtgtttagagagaaatttcttttaggggaatattttctggctgacataatcaatcttatatctaatctaagctttttcttaagatctttttaactttcttctttcaaaataatcttgctcagatggagatctgtttttctctccagtgctttgtctgtttcagaagccctattagtatcccatggtgcctgaatgaggtgggctgtcacagtgagaacttttggagctatctctatctggactcatgctggaaactcagcagtattttttccatgtcaccattataagtagaagctggggctgaaacactgctcccattcccattatcaggctacaacatatgcagagccatggccacaactatatttacctgtaaaatgtgttactggagtagagtatttttgttctttcc

SEQ ID NO: 248790 - DNA, 636 bp, Homo sapiens
ctatgttgcaatttctaatgtattccactatatgaacacagtcagattctatttattcatcaaaaagtgttaagttgtcagatgtatttcaatatagaacccccattcaatggctatgacatgagagagcagcagagatggaaaagaaacttytataaaattcctctgaaaatatgccccattttttcataatgctcatatgtttctcatgctatgtacattgggtgtttagagagaaatttcttttaggggaatattttctggctgacataatcaatcttatatctaatctaagctttttcttaagatctttttaactttcttctttcaaaataatcttgctcagatggagatctgtttttctctccagtgctttgtctgtttcagaagccctattagtatcccatggtgcctgaatgaggtgggctgtcacagtgagaacttttggagctatctctatctggactcatgctggaaactcagcagtattttttccatgtcaccattataagtagaagctggggctgaaacactgctcccattcccattatcaggctacaacatatgcagagccatggccacaactatatttacctgtaaaatgtgttactggagtagagtatttttgttctttcc

SEQ ID NO: 248791 - DNA, 636 bp, Homo sapiens
ctatgttgcaatttctaatgtattccactatatgaacacagtcagattctatttattcatcaaaaagtgttaagttgtcagatgtatttcaatatagaacccccattcaatggctatgacatgagagagcagcagagatggaaaagaaacttttataaaattcctctgaaaatatgccccattttttcataatgctcatatgtttctcatgctatgtacattgggtgtttagagagaaatttcttttaggggaatattttctggctgacataatcaatcttatatctaatctaagctttttcttaagatctttttaactttcttctttcaaaataatcttgctcagatggagatctgtttttctctccagtgctttgtctgtttcagaagccctattagtatcccatggtgcctgaatgaggtgggctgtcrcagtgagaacttttggagctatctctatctggactcatgctggaaactcagcagtattttttccatgtcaccattataagtagaagctggggctgaaacactgctcccattcccattatcaggctacaacatatgcagagccatggccacaactatatttacctgtaaaatgtgttactggagtagagtatttttgttctttcc

SEQ ID NO: 248792 - DNA, 540 bp, Homo sapiens
atttttgtatgaaactgaagttgattttttaccacatttaaatatattgttggatcttttagaggttttatgtaatcccagaaggtaccacttagaaaatgtctgtacagatacacaaaagaaaataagaaagaaactgaaagcatgtcaatacaaagatttaaaaaaaagaaagagaaaatgagagacaaagacacaagaataaaataaaacaataaaataagtttttcttttgcagaaaactatttaaatatatataattatctctccaaatcaagagacatactttaaataaaaaggtttattaaaaaattttaaaaatcaagattcaacttgcctttttacaagagtcagttgagatctaataataaaaaargactgaaagtggcaagatggaagtagaaatttcatgtaaatattaaccaaattagagcaaaagagctcaaaataatattacacaagctgcatcttaagtaagaaaatgtcatattttataaaatgtactttaagtcaaaacttcaagaaggcaaagaagggctt

SEQ ID NO: 248793 - DNA, 577 bp, Homo sapiens
tatactccctgaattaaagtcagcctcttaacaagacccccaggtggtacataactgtttgagaaatgagaaaaacaaactatgatagacgggaagccagacaggaagagagaagttcttaatgtatctcagggagggtgctcgatgggaggcatgacagaaattatattaataataaaaataaaacaatgaaaatcatggttaatgtttattaagcacttatgaacagacattgtacaaagattacttgacctcatgaaatcttcatgaagacagccctgtgrgaatactagtattaccccaactttacaaatacaaagatgaaggctgagaggattatagaactttctctggctaccaaagcttgcaagtagcagagccaggatgcacaatcacacttatctgatttcttacacatttcagtgaagtctcatgagtcagaaactctagtggacagggccagccatattggagggaaatgttgaaatatcaagaaaaaagagtcatgaagtaggaactgtctttgtacataaggagaaaaggaaaactggcaaaatggtcttttaggttctactag

SEQ ID NO: 248794 - DNA, 508 bp, Homo sapiens
atctgggggtggtggcagaggggataaactgtgagagagagccaattttatctcagtttgtcctctgactcatgaattctgagtcctgcaatggagttttttgccttgcaagaaaagctagattaatgcttgtgtgcayagtcattgactttataaaaaatcagattacaaggaataattttagtgtatatttatatatccaaatttatcataatcaccaaggattttaagcaagatttttcacggtttcatgcactattgaaatatttggtaaggggagaaagagctgttatccatatcctttctagatgttattcatcttcttgttttaaggtataaaaattttccctgaaagcctctggtttgggccttggatgtagcaataccagagcccgagggtagacttttgactataaagaataaaaaagttccagggcttaagctttgattgaggacattcctgtctttgtgggaaacagcaacagaaaaaagaagtcctgtagccaag

SEQ ID NO: 248795 - DNA, 508 bp, Homo sapiens
atctgggggtggtggcagaggggataaactgtgagagagagccaattttatctcagtttgtcctctgactcatgaattctgagtcctgcaatggagttttttgccttgcaagaaaagctagattaatgcttgtgtgcatagtcattgactttataaaaaatcagattacaaggaataattttagtgtatatttatatatccaaatttatcataatcaccaaggattttaagcaagatttttcacggtttcatgcactattgaaatatttggtaaggggagaaagagctgttatccatatcctttctagatgttattcatcttcttgttttaaggtataaaaattttccctgaaagcctctggtttgggccttggatgtagcaataccagagcccgagggtagacytttgactataaagaataaaaaagttccagggcttaagctttgattgaggacattcctgtctttgtgggaaacagcaacagaaaaaagaagtcctgtagccaag

SEQ ID NO: 248796 - DNA, 610 bp, Homo sapiens
aaacatttacatgagattgggcaggcaaaacacttagtacaatgttaaaaccccaaaatagtagctgtttacttctctcaaatatattcttattcaacaagtatgtattgatcagggccgatgtgtttgaaatgacatcaggtgctgtgaacctcagtagttaggcattggagcacttgcgtcaaacccacagatgggtctgtatctgcctctgttgattagggagccctgtggagttgttggggctttagctctttttcccaacacagcttaggatggcatgagaacagagaagatatcatgactactattcctcctcatttctaatccagtgtccatctaagcacaggtaccatcatttcctcagagctttcccaaccaacactgcccaactagaacttccctttttcagaattacagaacagctttatagtctgccttattcaatttagcacctcattgcattctgatttgtaatattctcttggcatttcatgcatgtaagtcacttgtgtcwacattaaattgtcaccacttaaagacaagggtcatttctttggtctttttgtgtcccttagcacatggtgcaggtagagatacgctcaagagc

SEQ ID NO: 248797 - DNA, 607 bp, Homo sapiens
tgaaagttcttttccaactttcaaatatcatgattctaggaaaagactgagaactaggcacgacacattattccacttccaatgatgtgctgagtcgccgaatctgtcgcctctctttaaaaacacacagaaccaattttttcctcccaaagggaggaaactaaagctgtgccccctttctggattggtgatgataatgatattaaataataatcatcatcacttatgtttgtgtaatattttctatttcaaggaacaagatcatgtcctttcctttaggttgcaaacatctgacctttggtcaaaggagcttgcaaaccagtttgatttgtcctgcttggtattatttttaaaattatgctttatttaggtgacaatgttgaaaacccaagagaygtacataaacattcataattctatccttcctgaaataataacatgcctagtaatacctacctgcattatgtcatggccacaaatcactagagtccagtagagactgcccgtttgagatcaggcatgatcttttaatttattcatgtatgagatttgcatggcctttgtagcatttgtatcttcaatctcagttatctagcttgttggcatc

SEQ ID NO: 248798 - DNA, 607 bp, Homo sapiens
tgaaagttcttttccaactttcaaatatcatgattctaggaaaagactgagaactaggcacgacacattattccacttccaatgatgtgctgagtcgccgaatctgtcgcctctctttaaaaacacacagaaccaattttttcctcccaaagggaggaaactaaagctgtgccccctttctggattggtgatgataatgatattaaataataatcatcatcacttatgtttgtgtaatattttctatttcaaggaacaagatcatgtcctttcctttaggttgcaaacatctgacctttggtcaaaggagcttgcaaaccagtttgatttgtcctgcttggtattatttttaaaattatgctttatttaggtgacaatgttgaaaacccaagagacgtacataaacattcataattctatccttcctgaaataataacatgcctagtaatacctacctgcattatgtcatggccacaaatcacyagagtccagtagagactgcccgtttgagatcaggcatgatcttttaatttattcatgtatgagatttgcatggcctttgtagcatttgtatcttcaatctcagttatctagcttgttggcatc

SEQ ID NO: 248799 - DNA, 609 bp, Homo sapiens
aatatgtccaaattacccaaactgaaatctaaagggtaagtgtaaagtgttgcacttaggttaaaagaaaaataaaactgttagtagtagatgggaaaatatgactgaacggaagcaaatataaaaaaaggctttggagttttatatcagtataatctctgcakgagacacagattaatatgtttggcccaaataaaccacgaatagaagtcaaagttctaatgaaaagaagctgtacttcttccagttttgctctgagatttagtcagaacatactcatagatacagaaacatttcaaaatgaacatctgtattgaaggtgttcagaagtaaatgggcaaatggtggagatgcgctaactttcagtgaggtgaaggtatgaaggaatctaggattctcaggagaactggagacttggacagacagggtcttgtgtgtacaggggaaggttcaattcaggctatgcagtccagtcctgtgcaaggaggttggcatttgatttgtttatttgcagagggcataacagagaccaaggaatagaagtgatagaaaaaatgagtttgggttaatagaatagtagattttctagtgatttgatcagtacacaaa

SEQ ID NO: 248800 - DNA, 527 bp, Homo sapiens
gaggtagaatgtacacaatgcctatcgaccctgagaattttgtcaatatcaagattatttgctgagaaagagcagttctctgccgtctgtcacttccrtgctgtgcatctccaaaggaattacctgtccatcttgattgtgtgctcatttgcaccatggtgcagaagagtggtcctgaccctagttgggctggaaattgctggacctacaaactacacatttacgtgtgtgtgtgtgtgcgtgtgcacacacgtgcacatgtgcagtatttgtctgtttcaagaaggcacaagggaaaagaaggaaaagtctgatctctatttggtacattgctaggcaagttaacaatgccgagagagtcctgaggactatttgttcccaattattgaggtgggagaccttgtttaggaggccagggtgagggtctttgggagcccaggtttgtgttggtggagctgtactttctctccttgatgggattgccatcaacattttcagccaagtgttatagcataccaaaaccactc

SEQ ID NO: 248801 - DNA, 527 bp, Homo sapiens
gaggtagaatgtacacaatgcctatcgaccctgagaattttgtcaatatcaagattatttgctgagaaagagcagttctctgccgtctgtcacttccatgctgtgcatctccaaaggaattacctgtccatcttgattgtgtgctcatttgcaccatggtgcagaagagtggtcctgaccctagttgggctggaaattgctggacctacraactacacatttacgtgtgtgtgtgtgtgcgtgtgcacacacgtgcacatgtgcagtatttgtctgtttcaagaaggcacaagggaaaagaaggaaaagtctgatctctatttggtacattgctaggcaagttaacaatgccgagagagtcctgaggactatttgttcccaattattgaggtgggagaccttgtttaggaggccagggtgagggtctttgggagcccaggtttgtgttggtggagctgtactttctctccttgatgggattgccatcaacattttcagccaagtgttatagcataccaaaaccactc

SEQ ID NO: 248802 - DNA, 527 bp, Homo sapiens
gaggtagaatgtacacaatgcctatcgaccctgagaattttgtcaatatcaagattatttgctgagaaagagcagttctctgccgtctgtcacttccatgctgtgcatctccaaaggaattacctgtccatcttgattgtgtgctcatttgcaccatggtgcagaagagtggtcctgaccctagttgggctggaaattgctggacctacaaactacacatttacgtgtgtgtgtgtgtgcgtgtgcacacacgtgcacatgtgcagtatttgtctgtttcaagaaggcacaarggaaaagaaggaaaagtctgatctctatttggtacattgctaggcaagttaacaatgccgagagagtcctgaggactatttgttcccaattattgaggtgggagaccttgtttaggaggccagggtgagggtctttgggagcccaggtttgtgttggtggagctgtactttctctccttgatgggattgccatcaacattttcagccaagtgttatagcataccaaaaccactc

SEQ ID NO: 248803 - DNA, 544 bp, Homo sapiens
tttccctttttgctttggttgctaggaagcttaaaatcaagttctctatcttaaataatggaataggactttatacatttgagcatatatgtatactttctcccttaaatttttcctttacctttattgtatcatctaattatagctgaaaaaaattttttttaacaactgttggccaggrgtgatggctcatacttataatcctaccactttgggaggctgaggcgggtgggtcatttgaggccaggagttcgagaccagcctggccaacatggtgaaaccccatttctactaaaaatacaaaaattagccaagtatggtggtgtgcacctgtaatcccagctactagggaggctgaggcatgagaatcacttgaacctggggggcggaggttgcagtgagccaagatcacgccactccagcctggatcagcaagactttgtctcaaaaataaaaaaagtaccgatttttataagctgttacatattatgagggaggtgcaaaaaaggaatgaatgaatgaatctcatttgttttatgatgcc

SEQ ID NO: 248804 - DNA, 568 bp, Homo sapiens
agatttatggtagattaaaggccttcataatatcaacaatggattgctcatttgatgagagatttgattaggtaattttttttgaaaaagaatatgagtttactaaatatatcacgcctggctatgaagaagggcatgggccatcctaagtagcagtccatcattccatttccagaatgagtcatcttaaatgtatttgggaggtcctctctaattgtagaggttgaggccagtggtgggtggcatatactcctgratggagcctaaacacaatcgcatcaagacccactctcggcatggaaagctctgtattgctttggatgggatatgctaattaacctcatgactgaccagttcagaagataactcccaagcctttaggtcaggagtaattaatttttgcaaatgtctctccctgggccatggacacttatactctagttattgcccgttcctacgttcagatgttcacaggaacataacaccaacaggagaaatcaaaataaggcatgattatcgctgggcccagggcaattccacccaagattcagagattgggagctaagac

SEQ ID NO: 248805 - DNA, 568 bp, Homo sapiens
agatttatggtagattaaaggccttcataatatcaacaatggattgctcatttgatgagagatttgattaggtaattttttttgaaaaagaatatgagtttactaaatatatcacgcctggctatgaagaagggcatgggccatcctaagtagcagtccatcattccatttccagaatgagtcatcttaaatgtatttgggaggtcctctctaattgtagaggttgaggccagtggtgggtggcatatactcctggatggagcctaaacacaatckcatcaagacccactctcggcatggaaagctctgtattgctttggatgggatatgctaattaacctcatgactgaccagttcagaagataactcccaagcctttaggtcaggagtaattaatttttgcaaatgtctctccctgggccatggacacttatactctagttattgcccgttcctacgttcagatgttcacaggaacataacaccaacaggagaaatcaaaataaggcatgattatcgctgggcccagggcaattccacccaagattcagagattgggagctaagac

SEQ ID NO: 248806 - DNA, 545 bp, Homo sapiens
ccccagcccttgtttcagcattgtcattttggtggagaatcaagaatgtcactcaygaaacaccacacattcagacaccacggagtttccttaccactgctggaggcttgctggggccctgagcatgctctgagcaggtatgaattgggggagaattcctcatcagggttggtgtccatgatttgatgggaggtgttgctgtctagcaatggcatctggcagctaactggtggaggattatgggagctaggcagctgaacaaatgggaggagactacgcgaggatgtacgtggaatgggacgacctgggaaagaagacagaggggtcaaaggtcagcaatgagtgtcgacgagagcaccccaggaaagttacattgaaaccagctcacaatataagatattttagaaaaaatgttcgaggaaatgaacctgcgtccagatgtgcttgttttaaaaagagtggagtgtgaggtttctgcgacaagtctaaattcatatattaggtagttgcatatttcagaaaaaagacatgagcagaaatatcca

SEQ ID NO: 248807 - DNA, 546 bp, Homo sapiens
catttcatccttatgcagcaaattgttgttgttgttgttgtttcctcccattaaggctattatatgacactgacagatgcttaaaagcatttagacctgaaagaactgttgggaaaattgctgcaaaaggattgacaaatgatgatctttctgtccrcaaggttcttatttcctgtgcaaaatggaccaaaagaataaaagaaaggagaaagattcattaatgtgggaacttggtattgttttctgacatgagtttatactttttattgcattggggccaaaacgtgactctgtttatgaaaggctgcagtattcttaaaaaaaaaaaaacaaaaaaaagtgctgacatcttttgcagctgatttaggcttgcttggtggtcgtcttctttcctggcatgctctgcaaccactaggaatataacatgggccctataagacctcagaggacctgaagatatgcatgagtgggtcttccatttggctactttatttaattgtctacccagagtccaaagtgttttgtgagacatgatcaattgtgagg

SEQ ID NO: 248808 - DNA, 547 bp, Homo sapiens
gagctgagatctgagggatgagagtagccggtcctacaaagatgcagcagaactttggtggtgaagagaacttcaagtcagcaggacctatggyaagccccttagcccttcactgacttcttttcctcatctgtaaaacggtgatgataatgggatctaatctgtaaggctttcctgaggattaaattagatagtatttaacatttgtctaggacaaagcctggccaagtgctattgaagtggttgcaaaataaatgtcatgtagaggcaaaagtatgtgctgaggccctgaggttggataagggattgtttgagcaactgcaaggtgggtgtggcatttgggtggggcaggtgtgggaaggcagtggaaactgaagttggcaaagtggcagacatcacagggatcctacagggcacagcaggggaagagggattccatggtaagttcaaagggaaaaaggtggagagttttgctatgaccccagtagacctctgaagttcattgtccagaggttggaaaattatccctgattaactttttgtatag

SEQ ID NO: 248809 - DNA, 458 bp, Homo sapiens
taggaatatgaacatatatatttgcctccctcccaaccagatttccaagtggggacgcttgaaaatttgtctccaaacacactctttctgtatttgtcaaagctcttctccaaaatcttttcagrtaagaagcaagttagtggtagggtgagttccctttgcaggcgcctgttgactatttgcagaggttgcaaactggtagcccccagactccatctgaaacatgcacatggcgttagtttggctcacacaggggtagccagcattttttgaaacgttgaattagttgtggacattgtaaaacttaggtgtgttcacataaaccatactgttgttttgatatgctcaaccctcactttccttacggctatgagctggctgtctgtctcagatttatgaggatgtggcagattagagaagacttagacttgatgatatggaaagccattcaccacagg

SEQ ID NO: 248810 - DNA, 560 bp, Homo sapiens
gatgtccctgtgttagtctcttcgcaggtgcctggtggagatgtccrgactaatgtcactaatagtgaaaagactcagagcctgagtaacacctctgcaattccgaaatggaaggaaagaacagctcaaatggaaatctgttcagaaattaaatgtgcatcatatggctaagaatgaaggttctagggggactaaatttatcccttcacactccgttgagaagattggttcctgcaaaggactaagttcctagtttgttcatgtgcatggacattttccagggaacatgataacctccgtacctacctttagccacctcttgggcttaaaattacactcacacctgtaatctcagctacatgtgaggctgaggtgggaggatctcttgagctcatgagtgtaaggcctcagtgagctatgatcacacctgtgtacttcacctgggcaagacaatgagaccccatctgtggagaaaaacaagactgtaacccgttattcctatctgtaaattcctttcatctctccttctttccttcctttgttatttttagcattaacat

SEQ ID NO: 248811 - DNA, 672 bp, Homo sapiens
ggtacaggaggcagagagaagaaaacggagttattgtaccagtcagatgaaagttttaggctgaattgcagaatcttggcaggaattgcgaggcagaaataacacaatgaagtaacagtaaaccacccaaagaagagaataatctggacaaaaatatgccttgttaatgaggtattcattcaaggaatccatcgctactaaaacaacagagcctggcttacaacccagatctcatgtaaaggcgccacagtcagccggtgccctctgaagttactccagtgtcagccagcacaacgyagggctcagcctggagactggggggtctcctgaagagtttctcaacctcaacactgttgatattttggaccagagaattttttattgtggaagactttcctgtacgttgtagaatgtttagcagtagcccaggtctctacctgctggaggcaagtatcctcccagttttgatcaaccagtaatgcctttaggcattgccaatattccctggagaacaaaatagcccttagttgagaacatctggtctaattcatcttgaaaagtgctagaatattctagctgccccagtgcatgggatctggtaaagcatgtgtgtgcgtgtgtgtgtaggcactagggagcagtgagggtaactctagatcactactgtttcat

SEQ ID NO: 248812 - DNA, 518 bp, Homo sapiens
acacacacacacacatattttgttatacacatatatacaccattgaatactatgcagccatagaaaagaatgagatatgtcctttgcagctacatggatggagccagaggccattatccttagcaaactaatgcagaaacagaaaaccaaatactgcatgatctcacttataagtagaagctaatcattgagtacacatgggtacaaagaacagaacaactgacatcagggcctacttgagggtagagggtgggaggaggctgaagatcgaaaaatgacctatcaagtgcttatcatctgggtaatgaaatcatcagtaccccaaatccctgtgacacacaacttacctatataacaaacctgctcatgtacccrtgaacctacaagttaaaaaaaaaaaaagccaaaagctgaaaatctttctaaattatacgttcagaactatcactgagccccttctaccatattctattaggcaagcagtcacagggcagtccagattcaaaggggtggaagaa

SEQ ID NO: 248813 - DNA, 332 bp, Homo sapiens
gcttcctggaagacattttaccatgaaaaaattgtgtcttttattgcctggaataattggcatcaaagtaaattgaaatctttgtgttctcagcaaaaccgggagaagaaaacaagttcacttacttttatttttaagaaaatatttggagtaaaactcagcgactacagtctgggaggcaggggtggattttaaatttataaaaytttattctctggagatggtattatcagatgccttttatttaaatatcaaaatcaagggtatacttattctttgccatatgataaacttgtcatccaacaattctgaaatatggaataaatcataat

SEQ ID NO: 248814 - DNA, 566 bp, Homo sapiens
acgaaggacagggcctcaggaaagcctccctttgtctgaccatgttgtggcctacctttctgttgacattgacatgggaggagcaagtctgagaggtccaaagtaaggctgtggagtcagcaggagggtcatccagaggcttctgtttctaggatttttccaactaccttgtttcaccctgtgttgtgtctgatgacttggctgkctgtctggctgtctctgtcgcaccctattttcccacttttcttttcctacaatccttcgggccagaaaaggataggcttttctacactttaatatcttttaacaatcacagggtagacccagaggttaggtgctttggctttggcccttgatatactaaacagggatggggagcacacgtaccatctcctttgtatcagaagctgaatattactccattctttctctttactatccttctaggacattttctaagtttagacgaatgcatgccatgatcaactagagctttgtgtctgaactttaaaatgtattttcacatttccaaagtaggtaacttgttatcattattaatgtcatta

SEQ ID NO: 248815 - DNA, 591 bp, Homo sapiens
ttacattgattgagttgattttttgtatatatatcagttatgaaaacaaaaacataacaaccacacttcrtgagtatttgctgggaaataacatagagatgatttatttaaaccttccatagtcaatgggaagatcccattcagtcaaataccataatccatagtcaataggaaggtcccattcagtcaaataccataatccatagtcaataggaaggtcccattcagtcaaataccctaatccatagtcaatgggaaggtcccattcagacaaataccataatccaaagtcaatgggaaggtcctattcagacaaataccataatccatagtcaatgggaaggtcccattcagtcaaatacccaataatcagggacgggtgtcctactgggtacagaactgtaaagactggtaggaatgaaataatccacctccaacaactatcagggaggctcccctcaggactcagttagaggaatatcaggaactacaaaagagtaatgtcagatgcttggaggaatttgggacagataagagctgagatgtcaggtagagaagaaaaaaagtattttggaacctcactagagaata

SEQ ID NO: 248816 - DNA, 591 bp, Homo sapiens
ttacattgattgagttgattttttgtatatatatcagttatgaaaacaaaaacataacaaccacacttcatgagtatwtgctgggaaataacatagagatgatttatttaaaccttccatagtcaatgggaagatcccattcagtcaaataccataatccatagtcaataggaaggtcccattcagtcaaataccataatccatagtcaataggaaggtcccattcagtcaaataccctaatccatagtcaatgggaaggtcccattcagacaaataccataatccaaagtcaatgggaaggtcctattcagacaaataccataatccatagtcaatgggaaggtcccattcagtcaaatacccaataatcagggacgggtgtcctactgggtacagaactgtaaagactggtaggaatgaaataatccacctccaacaactatcagggaggctcccctcaggactcagttagaggaatatcaggaactacaaaagagtaatgtcagatgcttggaggaatttgggacagataagagctgagatgtcaggtagagaagaaaaaaagtattttggaacctcactagagaata

SEQ ID NO: 248817 - DNA, 591 bp, Homo sapiens
ttacattgattgagttgattttttgtatatatatcagttatgaaaacaaaaacataacaaccacacttcatgagtatttgctgggaaataacatagagatgatttatttaaaccttccatagtcaatgggaagatcccattcagtcaaataccataatccatagtcaataggaaggtcccattcagtcaaataccataatccatagtcaataggaaggtcccattcagtcaaataccctaatccatagtcaatgggaaggtcccattcagacaaataccataatccaaagtcaatgggaaggtcctattcagacaaataccataatccatagtcaatgggaaggtcccattcagtcaaatacccaataatcagggacgggtgtcctactgggtacagaactgtaaagaytggtaggaatgaaataatccacctccaacaactatcagggaggctcccctcaggactcagttagaggaatatcaggaactacaaaagagtaatgtcagatgcttggaggaatttgggacagataagagctgagatgtcaggtagagaagaaaaaaagtattttggaacctcactagagaata

SEQ ID NO: 248818 - DNA, 525 bp, Homo sapiens
tctattcatttatcttacaggcaataaccctcgagcactgttcacaactacactgttaattcacattcacgttccactttataaagaggaaataaattcttcaatttgtgcagtataaaatttccacttctctgtttaattgtttcagaggagttgcagatgagaacattgattctgaactctatttctttttatgtrttgggttatctttcctaatgacaaacaaaaatgtatatatatttatggtgtgcaatgtgatgtttttatacatgtatacattaagaaatgggtaagtcaagttatttaacatacatgttacttatcacgcattatttttttctggtgagaactcttataatcccctttcttagaaattttcaagaatacagtatgttgttattaactatagtcactgtgatgtacaatacatctcttaaatttatttcttttgtctaactaaaattttgtgtcctgtgatgaaaatctctccagtcccctcattccctagcctctggtaactatcat

SEQ ID NO: 248819 - DNA, 525 bp, Homo sapiens
tctattcatttatcttacaggcaataaccctcgagcactgttcacaactacactgttaattcacattcacgttccactttataaagaggaaataaattcttcaatttgtgcagtataaaatttccacttctctgtttaattgtttcagaggagttgcagatgagaacattgattctgaactctatttctttttatgtattgggttatctttcytaatgacaaacaaaaatgtatatatatttatggtgtgcaatgtgatgtttttatacatgtatacattaagaaatgggtaagtcaagttatttaacatacatgttacttatcacgcattatttttttctggtgagaactcttataatcccctttcttagaaattttcaagaatacagtatgttgttattaactatagtcactgtgatgtacaatacatctcttaaatttatttcttttgtctaactaaaattttgtgtcctgtgatgaaaatctctccagtcccctcattccctagcctctggtaactatcat

SEQ ID NO: 248820 - DNA, 525 bp, Homo sapiens
tctattcatttatcttacaggcaataaccctcgagcactgttcacaactacactgttaattcacattcacgttccactttataaagaggaaataaattcttcaatttgtgcagtataaaatttccacttctctgtttaattgtttcagaggagttgcagatgagaacattgattctgaactctatttctttttatgtattgggttatctttcctaatgacaaacaaaaatgtatatatatttatggtgtgcaatgtgatgtttttatacatgtatacattaagaaatgggtaagtcaagttatttaacatacatgttacttatcacrcattatttttttctggtgagaactcttataatcccctttcttagaaattttcaagaatacagtatgttgttattaactatagtcactgtgatgtacaatacatctcttaaatttatttcttttgtctaactaaaattttgtgtcctgtgatgaaaatctctccagtcccctcattccctagcctctggtaactatcat

SEQ ID NO: 248821 - DNA, 525 bp, Homo sapiens
tctattcatttatcttacaggcaataaccctcgagcactgttcacaactacactgttaattcacattcacgttccactttataaagaggaaataaattcttcaatttgtgcagtataaaatttccacttctctgtttaattgtttcagaggagttgcagatgagaacattgattctgaactctatttctttttatgtattgggttatctttcctaatgacaaacaaaaatgtatatatatttatggtgtgcaatgtgatgtttttatacatgtatacattaagaaatgggtaagtcaagttatttaacatacatgttacttatcacgcattatttttttctggtgagaactcttataatcccctttcttagaaattttcaagaatacagtatgttgttattaactatagtcactgtgatgtacaatacatctcttaaatttatttcttttktctaactaaaattttgtgtcctgtgatgaaaatctctccagtcccctcattccctagcctctggtaactatcat

SEQ ID NO: 248822 - DNA, 598 bp, Homo sapiens
ggaaactgttttatgtgcacttgagaagaatgtgtatgatgttgttgagtagagtgttctatatatgtctgttagatctagttagtttatcatgtttaacttctctattttcttacttatcctccgtctggttgtatctccattattgagaatagggtactgaagtcatcaaccrttactgtacaactagctatttctccctttaattttatcagtttttgattcatatatttgattgtctgtcattaggtacataaatgtttataattattacatcttgctgtattgaattttttattaatatataatgcttttttttctcttttaaacttttcaaaagtctattttgtctgatattagcatagctactcctgctctatttggattactatttgtatggaatatctttttccatcttttcacttttaatcaatttgtgttgttggatctaaaagtagtccttgtatgtagcatatggttggatgatgtatttttatcagttttgctaatcattgtcttttgattggaaattttattccacttacatttaaagtaattaatgataaagaggaacttactttgttctcttattatttgt

SEQ ID NO: 248823 - DNA, 626 bp, Homo sapiens
gaggtggctctcagcaggatgaatgggtaactagaagggggatggagggggaagatgatcttcccctggagtttggtcatccagcggctgaactcctctctgacctcccttagtcaaattcttcttggcattcagacactctttgtcttctttctctgccctgccattcgtctgcttgtctccttgtcttctcatctgcttctaaagtctgaggttcagggtttatataggtataggatagggggcgtagcaggccataagacagctttttgggtgagaaaacaggaaatcctatcctcatttagggctgtgggtatccaggcttgagggtgaggcctttgccagggaaccaccctcttctacccagtattttcctatctcctgtckatcaaaggtagataccaggtggagataattgaatcaagatgcagttcccccatgctgttctcgtgatagtgagtgagttctcatgagatctgatcgttttataaggggctcttcccacttcgcatcgcccttcctttcctgacgtcttctgaagaaagtgcttgctgccccttcacctgccaccatgattgtaagtttcctgaggcttctctatccatgctgaaccgtgagtcaattaa

SEQ ID NO: 248824 - DNA, 626 bp, Homo sapiens
gaggtggctctcagcaggatgaatgggtaactagaagggggatggagggggaagatgatcttcccctggagtttggtcatccagcggctgaactcctctctgacctcccttagtcaaattcttcttggcattcagacactctttgtcttctttctctgccctgccattcgtctgcttgtctccttgtcttctcatctgcttctaaagtctgaggttcagggtttatataggtataggatagggggcgtagcaggccataagacagctttttgggtgagaaaacaggaaatcctatcctcatttagggctgtgggtatccaggcttgagggtgaggcctttgccagggaaccaccctcttctacccagtattttcctatctcctgtcgatcaaaggtagataccaggtggagataattgaatcaagatgcagttcccccatgctgttctcgtgatagtgagtgagttctcatgagatctgatcgttttataaggggctcttcccacttcgcaycgcccttcctttcctgacgtcttctgaagaaagtgcttgctgccccttcacctgccaccatgattgtaagtttcctgaggcttctctatccatgctgaaccgtgagtcaattaa

SEQ ID NO: 248825 - DNA, 573 bp, Homo sapiens
tgggggtgggttcccgcgatagaattcatttgtcaaatctaggagtcttttgagaggagtctttagggttttctaggtatagtgttatatcactggtgaacagcaatagtttgacttcctctttgccaatttggatgccctttatatctttctcttgctctattgctctggctaggacttttagtactatattgaaggaaagtagtgaaagtaggcatccttgtcttgttccacttcttggggaatggtttcaactctttcccattcagtatgatgttagctgtgggtttgtcatatgacttttcttattttgaggtaagtcccttctatgtctagtttgttgagtgtttttatcaaaaatgkttgctggattttatcaatcctttttctgcatatattgaaatggttttacagtttttgtttttaatcctgtttgtgatgtatcacaattatttttgactcacatgttaaaccgtctctgcattcctgggatgaaacccacttgatcatggtgtattgtcttcttgatatgctgttggattcagttattttgttgaggatttttgcatctat

SEQ ID NO: 248826 - DNA, 573 bp, Homo sapiens
tgggggtgggttcccgcgatagaattcatttgtcaaatctaggagtcttttgagaggagtctttagggttttctaggtatagtgttatatcactggtgaacagcaatagtttgacttcctctttgccaatttggatgccctttatatctttctcttgctctattgctctggctaggacttttagtactatattgaaggaaagtagtgaaagtaggcatccttgtcttgttccacttcttggggaatggtttcaactctttcccattcagtatgatgttagctgtgggtttgtcatatgacttttcttattttgaggtaagtcccttctatgtctagtttgttgagtgtttttatcaaaaatgtttgctggattttatcaatcctttttctgcatatattgaaatggttttacagtttttgtttttaatcctgtttgtgatgtatcacaattatttttgactcrcatgttaaaccgtctctgcattcctgggatgaaacccacttgatcatggtgtattgtcttcttgatatgctgttggattcagttattttgttgaggatttttgcatctat

SEQ ID NO: 248827 - DNA, 590 bp, Homo sapiens
gtgttgttttataggccctctgagttttatgctttcatgagattttattctggtgcgtattgaccttctgtttcagggtttagaactccttttagcatttcttttagggctggcctggyagtgacaattccctcagcatttgtttgtctgaaaatgtctttatttctctttcatttatgaaacttatatttgcttgatttaaaaaattcttggctgacagttattctgttttagggggctaatgatgggaccccaatctcttctggcttttaaggtttctagtgagaagtctgctgtaagtctgataagttttccattttaggttacctggtgcttttatcttactgctctcagaattctttccttcatgttgacttaaatggcttgatgactatatgccttagtgaagtcctttttgtaatgaatctcccaggaattctttgagtgtcttgtatttggatatctaaatctctagcaaggccagtgtgatggttaatattgagtgtcaacttgattggattgaaggatgcaaagtattgttcctgggtgttgccatagaggattaacatttgagacagtgaactgggaga

SEQ ID NO: 248828 - DNA, 467 bp, Homo sapiens
tgctaacactacctctaatctgccatctttaaaattgttttagtaaatgaatcccacgttattcatctgttgatggatacttaggttgcttccaaatcttggctattgtgaacagtgctgcracaaacataggggtgcagatattgttttgatacactaatttctcttcttttcggtatatacccagccgtgggactgctggatcatatggtagcaatgtgtttttagtttttttaagaatatccaaactgttccccatggtaattatactactttatgttcccaccaacagggtagaagggttctcttttctccacaacttcaccagcatttcttattgcctgtcttttggatgaaagccattttaactgaagtgagatgatatctcattgtagttttgatttgcatttctctgatgttcagtgatgttgagaacctttttacacacctgtttgtcatttatgtct

SEQ ID NO: 248829 - DNA, 467 bp, Homo sapiens
tgctaacactacctctaatctgccatctttaaaattgttttagtaaatgaatcccacgttattcatctgttgatggatacttaggttgcttccaaatcttggctattgtgaacagtgctgcgacaaacatagggrtgcagatattgttttgatacactaatttctcttcttttcggtatatacccagccgtgggactgctggatcatatggtagcaatgtgtttttagtttttttaagaatatccaaactgttccccatggtaattatactactttatgttcccaccaacagggtagaagggttctcttttctccacaacttcaccagcatttcttattgcctgtcttttggatgaaagccattttaactgaagtgagatgatatctcattgtagttttgatttgcatttctctgatgttcagtgatgttgagaacctttttacacacctgtttgtcatttatgtct

SEQ ID NO: 248830 - DNA, 528 bp, Homo sapiens
atataacaattttaaatatatatgcatctaacattagagtacctatayataaaacaaatattaatagctattaagggaaacagatgataatccaactgtaggggacttcagtactccactttcagcaatggacaggtcatccaaatgaaataaaaaaatcaaactttagaaaaaatggaactaacagacatgaacaagaacattccatccaacacattcttctcaagtgcaaatgatacattctctaggatagatcatgttaggccacaaaacaagtcttaaagaagattgaaatatcaagtatttttccaatcacaatggtataaaactagaaatcaatatcatgaaaatttttggaaaactcacaaatacatggaaattaaactccaaccaaccaatgggtcaatgaagaaattaaaatatcttgagacaaacaaaaatggaaacacaacataccaaaacttataggatgcaacaatagaaatttcaagaggaaagtttatagcaataaacatctacatcaaaaaa

SEQ ID NO: 248831 - DNA, 520 bp, Homo sapiens
cacactctccaacttcaaaatattctgtagacatacagtgatcaaaacagcatgatactggcataaaaataggtacatacaccaacagaacagaatagagaacccagaaataaacccacacatttatagtcaattttttcaaacaaagttgccaagaacagataataggsaaaggacagtctctgaaataaatagtgttgggaaaactagatgtccatgtgcagaagaaaactagacctcatctcatagcatataaaaaaacctgcaaatgaattaaagacttaaacataaggcctagaaactatagaaaactatgagaaaacagaggaaaagctctatgagattggcctgggcattgagtcttttggatacaaccccaaaatcataggcaattaaagcaaaagtagacaaatgggattatgccaaactaaaaacctcctgtagatcaaaggaaataaaagtgaagagacaacctaaagaatggaagaaaatattcacaaaatatacatctgataaggag

SEQ ID NO: 248832 - DNA, 520 bp, Homo sapiens
cacactctccaacttcaaaatattctgtagacatacagtgatcaaaacagcatgatactggcataaaaataggtacatacaccaacagaacagaatagagaacccagaaataaacccacacatttatagtcaattttttcaaacaaagttgccaagaacagataatagggaaaggacagtctctgaaataaatagtgttgggaaaactagatgtccatgtgmagaagaaaactagacctcatctcatagcatataaaaaaacctgcaaatgaattaaagacttaaacataaggcctagaaactatagaaaactatgagaaaacagaggaaaagctctatgagattggcctgggcattgagtcttttggatacaaccccaaaatcataggcaattaaagcaaaagtagacaaatgggattatgccaaactaaaaacctcctgtagatcaaaggaaataaaagtgaagagacaacctaaagaatggaagaaaatattcacaaaatatacatctgataaggag

SEQ ID NO: 248833 - DNA, 520 bp, Homo sapiens
cacactctccaacttcaaaatattctgtagacatacagtgatcaaaacagcatgatactggcataaaaataggtacatacaccaacagaacagaatagagaacccagaaataaacccacacatttatagtcaattttttcaaacaaagttgccaagaacagataatagggaaaggacagtctctgaaataaatagtgttgggaaaactagatgtccatgtgcagaagaaaactagacctcatctcatagcatataaaaaaayctgcaaatgaattaaagacttaaacataaggcctagaaactatagaaaactatgagaaaacagaggaaaagctctatgagattggcctgggcattgagtcttttggatacaaccccaaaatcataggcaattaaagcaaaagtagacaaatgggattatgccaaactaaaaacctcctgtagatcaaaggaaataaaagtgaagagacaacctaaagaatggaagaaaatattcacaaaatatacatctgataaggag

SEQ ID NO: 248834 - DNA, 520 bp, Homo sapiens
cacactctccaacttcaaaatattctgtagacatacagtgatcaaaacagcatgatactggcataaaaataggtacatacaccaacagaacagaatagagaacccagaaataaacccacacatttatagtcaattttttcaaacaaagttgccaagaacagataatagggaaaggacagtctctgaaataaatagtgttgggaaaactagatgtccatgtgcagaagaaaactagacctcatctcatagcatataaaaaaacctgcaaatgaattaaagacttaaacataaggcctagaaactatagaaaactatgagaaaacagaggaaaagctctatgagattggcctgggcattgagtcttttggatacaaccccaaaatcataggcaatkaaagcaaaagtagacaaatgggattatgccaaactaaaaacctcctgtagatcaaaggaaataaaagtgaagagacaacctaaagaatggaagaaaatattcacaaaatatacatctgataaggag

SEQ ID NO: 248835 - DNA, 528 bp, Homo sapiens
atataacaattttaaatatatatgcatctaacattagagtacctatatataaaacaaatattaatagctattaagggaaacagaygataatccaactgtaggggacttcagtactccactttcagcaatggacaggtcatccaaatgaaataaaaaaatcaaactttagaaaaaatggaactaacagacatgaacaagaacattccatccaacacattcttctcaagtgcaaatgatacattctctaggatagatcatgttaggccacaaaacaagtcttaaagaagattgaaatatcaagtatttttccaatcacaatggtataaaactagaaatcaatatcatgaaaatttttggaaaactcacaaatacatggaaattaaactccaaccaaccaatgggtcaatgaagaaattaaaatatcttgagacaaacaaaaatggaaacacaacataccaaaacttataggatgcaacaatagaaatttcaagaggaaagtttatagcaataaacatctacatcaaaaaa

SEQ ID NO: 248836 - DNA, 528 bp, Homo sapiens
atataacaattttaaatatatatgcatctaacattagagtacctatatataaaacaaatattaatagctattaagggaaacagatkataatccaactgtaggggacttcagtactccactttcagcaatggacaggtcatccaaatgaaataaaaaaatcaaactttagaaaaaatggaactaacagacatgaacaagaacattccatccaacacattcttctcaagtgcaaatgatacattctctaggatagatcatgttaggccacaaaacaagtcttaaagaagattgaaatatcaagtatttttccaatcacaatggtataaaactagaaatcaatatcatgaaaatttttggaaaactcacaaatacatggaaattaaactccaaccaaccaatgggtcaatgaagaaattaaaatatcttgagacaaacaaaaatggaaacacaacataccaaaacttataggatgcaacaatagaaatttcaagaggaaagtttatagcaataaacatctacatcaaaaaa

SEQ ID NO: 248837 - DNA, 475 bp, Homo sapiens
ggaggcgggtaggagtggttatggagaagcacctttgtgttggggtagacacaggagcacgtggccctcccctgccacattggtgcctgctgygccatacattacctggctgtgcctgctggccaggccacactggaatgttaccacgttcctcttgttcctgtcggaaaggcacctgcaggcctagagatgtgggtactacatgtccttcacagcctactccccctgtgcacccctagctcatcctctgatatggtttggctgtgtccccaccccaaatcttatattgaattatagttcctataatccctacatgtggtgggaaggagctggtgggaggtaatgtaatcatgggagcatttaccctcatgctgttctcgtgatagtgagttctcatgagatctgatggttttataaggggcttttcctccttttgcttggcacttcttgctgccaccgtgtgaagaaagacctg

SEQ ID NO: 248838 - DNA, 619 bp, Homo sapiens
caaacaatcagatatctaagcagctccttttccttcttcctccaggctgtccaccatcgcctttcccttagcttccatctttccttgtgacatgaggaattgctgaggatttagatcactacaaactcagcacttcaactttcctcaggggacaatttggcaggttgagccctttttgacccatttttagccattgatttctgatgcatcctttcttcttgtcataactggggaaatgtcaggacctttgttttgaaatctaaatggcactatctttcaaggttgataatatcttcaaggtggaattgggaacaytgcgtgcttgccttaattgtacccagactcccaggttggcatataacctggaggctctttcttggaaagaacactttttgtggaaatgatgccaaggaagaataaaagtagtttatcagagggaagtgtttcatgctaatgaagaattagaatcaacttctcccaagtttatcacagcaccatcaacccaggctgacacagagtaggtgctggctgagtgttacctgaacaagtctaacccgcaggaaagttgggctcttgttaccactgacatgaattgtccagtgctggaccagagcaccca

SEQ ID NO: 248839 - DNA, 528 bp, Homo sapiens
atataacaattttaaatatatatgcatctaacattagagtacctatatataaaacaaatattaatagctattaagggaaacagatgataatccaactgtaggggacttcagtactccactttcagcaatggacaggtcatccaaatgaaataaaaaaatcaaactttagaaaaaatggaactaacagacatgaacaagaacattccatccaacacattcttctcargtgcaaatgatacattctctaggatagatcatgttaggccacaaaacaagtcttaaagaagattgaaatatcaagtatttttccaatcacaatggtataaaactagaaatcaatatcatgaaaatttttggaaaactcacaaatacatggaaattaaactccaaccaaccaatgggtcaatgaagaaattaaaatatcttgagacaaacaaaaatggaaacacaacataccaaaacttataggatgcaacaatagaaatttcaagaggaaagtttatagcaataaacatctacatcaaaaaa

SEQ ID NO: 248840 - DNA, 586 bp, Homo sapiens
atgtgatgggtgttttgatatgtcaacttggccagcccagtctccaattattcaatcaagttgctattctgggaggactggcatcaggwagatggcagaataggactctctcgtgcttgtcccccacaattcgaacaactactcatgcacaaacatgccttcacaagaactaaggaatcaggagagagattacagcatctgggggtaacacagaaataagagaagatgcattgaagagtgcaggaagaacagttttacattaccctcaccacgttcctcccaaccccaggcagcacaacatgtagacagaaacctcctgtgttggggaagaagagggaggtgagcactggactttgccattgactccaacaccaggcccacctcagtaaaaaccaacatggggacatggcagatccccatggccccaggcttcagactggcacccatggactgagcttccaagttccccccagttgccatgggggatcccacagtttcaggcctgccctgtgattttcatctccaggcctttcccaccttcaggctgaccttggcagcctcaggttccaaaccaacctcagcattg

SEQ ID NO: 248841 - DNA, 298 bp, Homo sapiens
ttagattaaaactgaacataaagtaactgacaataggaattactttctattgaactgccatgagattaaaatcagattttcaaaaattacactgaagtgaaagtaaattaacagtctcagaagacatctgsaggttctaatggctatgtaaggatggacatttttgttacttgcttccccagcatttatttctccctttttagtagtagctcccatttttcattgggatccatcccttctccattatcggcctgtgggacaccatccaaggctccatggggtggactctgctcaaaca

SEQ ID NO: 248842 - DNA, 657 bp, Homo sapiens
tcatgtcctttgcagggacatggatggagctggaggccctcatacttagcaaatacagaacagaaaaccaaatactgcatgttctcacttgtaagtgggagctaaaygatgagaacacagagacacacagaggagaacagacactggggatccttggagggtgggaggagggaaaggatcaggaaaaacaactaatgaatactacgcttaatacctggatgatgaaataatctgtaaacaaactgccaagacacaaatgtacctatgtaacaaacctgcacatatacccctgaacttaaaaaagaaaatgtatatatacactatgtaacactactcagtcataaaaaagaatggaataatgtcttttgcaggaacttggttggagctggaagccattattctaagtgaagtaactaaggaatggaacatcaaatactgcacattctcacttacaagggggagctaagctatgggtacacaaagcctagagtgatataatgaaatatggagactcagaagggggagataggagggggagtaaggaataaaaacctacatattgggtgcaacatacaccactcgagtgatgggtgcactaaaatgttgaacttcaccactatacaattcatctatgtaaccaaaaaccacttgtacccc

SEQ ID NO: 248843 - DNA, 657 bp, Homo sapiens
tcatgtcctttgcagggacatggatggagctggaggccctcatacttagcaaatacagaacagaaaaccaaatactgcatgttctcacttgtaagtgggagctaaatgatgagaacacagagacacacagaggagaacagacactggggatccttggagggtgggaggagggaaaggatcaggaaaaacaactaatgaatactacgcttaatacctggatgatgaaataatctgtaaacaaactgccaagacacaaatgtacctatgtaacaaacctgcacatrtacccctgaacttaaaaaagaaaatgtatatatacactatgtaacactactcagtcataaaaaagaatggaataatgtcttttgcaggaacttggttggagctggaagccattattctaagtgaagtaactaaggaatggaacatcaaatactgcacattctcacttacaagggggagctaagctatgggtacacaaagcctagagtgatataatgaaatatggagactcagaagggggagataggagggggagtaaggaataaaaacctacatattgggtgcaacatacaccactcgagtgatgggtgcactaaaatgttgaacttcaccactatacaattcatctatgtaaccaaaaaccacttgtacccc

SEQ ID NO: 248844 - DNA, 657 bp, Homo sapiens
tcatgtcctttgcagggacatggatggagctggaggccctcatacttagcaaatacagaacagaaaaccaaatactgcatgttctcacttgtaagtgggagctaaatgatgagaacacagagacacacagaggagaacagacactggggatccttggagggtgggaggagggaaaggatcaggaaaaacaactaatgaatactacgcttaatacctggatgatgaaataatctgtaaacaaactgccaagacacaaatgtacctatgtaacaaacctgcacatatacccctgaacttaaaaaagaaaatgtatatatacactatgtaacactactcagtcataaaaaagaatggaataatgtcttttgcaggaacttggttggagctggaagccattattctaagtgaagtaactaaggaatggaacatcaaatactgcacattctcacttacaagggggagctaagctatgggtacacaaagcctagagtgatayaatgaaatatggagactcagaagggggagataggagggggagtaaggaataaaaacctacatattgggtgcaacatacaccactcgagtgatgggtgcactaaaatgttgaacttcaccactatacaattcatctatgtaaccaaaaaccacttgtacccc

SEQ ID NO: 248845 - DNA, 448 bp, Homo sapiens
ggttctctagttcttttagatgtgatgttaggttgttagcttgatctttctactttttgatgtgggcacttagtgctataagtttccctcttagtattgctttagctgtgtcccagagattctggtatgttgtatttttattcttattagtttcaaagaacttcttgacttctgccttaatttcattatttacctaaaagtcattcrggagcaagttattcacttttcatgtaattgtatggttttcagtaaatttcttagtcctgatttctaatttgagtgtgctgtgatctgagagacttaggatttcagtccttttgcatttggtgaggagtgttttacttctgattatgtaatcacctttagggtatgtgccatgtggcaatgagaagaatgcatattctgttgttttggggtgaagaattctgtagatatcttctatcaggcc

SEQ ID NO: 248846 - DNA, 616 bp, Homo sapiens
ccgggaaagcctgggtcgggagaggggcagggcagtggtggctctctgggcaactggcctgcccatgtcttccaaggtcttcccaggcagccacagggcctgtgttctctcacattgmtgaaaatggccagaaagagggtctgggttcaagagggacctcctgacctggggcctgggctgtgtcctgcccatggaagtctcactcctcccttttctgtaccactgaggagtcccaccagggagagggaagaaagcgtggaaggccatgagaaagaacagtggggagcagcccagtgtcatggggacaggcccttgggcatagggccgggcccgggggctagcctggggagggagcaaccatggtagcgatggctgagttcagcctgcccagagctcagatcattgatcatcaaaagcaatcgcagcttaaaggagacaagaagcatcagggaaaattgggtcagacagtgcttccctccactcagtctctcttcccagagatgggtcaggagcaattcccgctaagaggctcctaggccagagctagagacgccgcctacagcccaggtgccaaggagggcacatctggaggggggtgcctcttgcttttttaacc

SEQ ID NO: 248847 - DNA, 537 bp, Homo sapiens
ttaaactacagtgtttctaatatatatcaccataattctgtatatacagggcttttgattttcaggcaaaaaaaaattactggatagacaagggtcatgaaatraatattataaagatatcaaagttcaattaacctggttaatatatcaaaagttgtcataacctcaaggagaaattgacaaagcctccatcctagggaaaaagtttaacatgtctctcagtaattgatagctcagcagaaaaaataataatatataatttgaataatacaacaaacaagcttgatctaaggaaaacacatatatctctgagcctccaacaattgaacaactcacattcttttcaaacacatacaaaatatttatgacaactgacaacatattggacaattaaagaataataataaattgaaatgattttttacttaatgtaacttaactacaaaattaaattagaaatcaatattttaaaatttagctaaaatatatttttgaaatttaaaaatcatacctctaaataaatcacaggtcaaaaaa

SEQ ID NO: 248848 - DNA, 628 bp, Homo sapiens
taaaggaatataccccaaatggacatctttacaaaacaactagatgttcagaaaagaatttgttttcctgtccaaagatcataactcctagactaaatatggaatgtatagcattatttttcagaggagtttaacaacatgatttgaagtcatgatacatgtatagaactcacaagaagaaagatctgaaaatattcacttatgaggtctcaaaactgagcctgcaaataaacaaactaacccactctcattcactggaaacttttcttcaactaatggtggcaccttcctctagccttctctccaaaacaatggaaagacctatcagcaaggctggtgataagggacagwcagactcaatcacaaatcatgggtttgggtaccaagcatgtatttagcactggtgtggtgatgtggcctcactaatggtgaagcagtgggtagcctggaaattatggccttggtagcaatcagatgtctgtcaatatctagctttgccacttactaaatatggacaaaaccaggactgccgaaaagttacttagcctctctaagaatttcccatacataaaatgcaactaacactatctctttgtcaaaactgctgtgaggtttaagtgagacaatg

SEQ ID NO: 248849 - DNA, 628 bp, Homo sapiens
taaaggaatataccccaaatggacatctttacaaaacaactagatgttcagaaaagaatttgttttcctgtccaaagatcataactcctagactaaatatggaatgtatagcattatttttcagaggagtttaacaacatgatttgaagtcatgatacatgtatagaactcacaagaagaaagatctgaaaatattcacttatgaggtctcaaaactgagcctgcaaataaacaaactaacccactctcattcactggaaacttttcttcaactaatggtggcaccttcctctagccttctctccaaaacaatggaaagacctatcagcaaggctggtgataagggacagacagactcaatcacaaatcatgggtttgggtaccaagcatgtatttagcactggygtggtgatgtggcctcactaatggtgaagcagtgggtagcctggaaattatggccttggtagcaatcagatgtctgtcaatatctagctttgccacttactaaatatggacaaaaccaggactgccgaaaagttacttagcctctctaagaatttcccatacataaaatgcaactaacactatctctttgtcaaaactgctgtgaggtttaagtgagacaatg

SEQ ID NO: 248850 - DNA, 628 bp, Homo sapiens
taaaggaatataccccaaatggacatctttacaaaacaactagatgttcagaaaagaatttgttttcctgtccaaagatcataactcctagactaaatatggaatgtatagcattatttttcagaggagtttaacaacatgatttgaagtcatgatacatgtatagaactcacaagaagaaagatctgaaaatattcacttatgaggtctcaaaactgagcctgcaaataaacaaactaacccactctcattcactggaaacttttcttcaactaatggtggcaccttcctctagccttctctccaaaacaatggaaagacctatcagcaaggctggtgataagggacagacagactcaatcacaaatcatgggtttgggtaccaagcatgtatttagcactggtgtggtgatgtggcctcactaatggtgaagcagtgggtagcctggaaattatggccttggtagcaatcagatgtctgtcaatatctagctttgccacttactaamtatggacaaaaccaggactgccgaaaagttacttagcctctctaagaatttcccatacataaaatgcaactaacactatctctttgtcaaaactgctgtgaggtttaagtgagacaatg

SEQ ID NO: 248851 - DNA, 569 bp, Homo sapiens
tttttcaaccacacacttatttgtaatagcagcaattgcaaaacttcagtatactttccaataataataacaagcacagcagcaattgctaatgtttaytgaacacttgctatagtttaagccaatctctcataacatctacatgctaacacttccatttatgcaagattcatagttcaactcaaatttgccagacacttattatagcaagtaaaggttaaagggaaatatgtcatcctctttactccctttctttggaataagctgatgatccgagcacttttcatgaatgctatcacacatcaaactccactttccaccctgctccaaaatgtcctaaggtctcatctaccctctctcactttcaatatgaaaggggtcatttctgaagctagaccagtataaagctactaacattgttttaggggcttgattttgatattattagttttcttcagtgactttagtcgtttataataggaattatgtttttaaatctgtgccttctttaagatggagttgtgttctttgaagtcatagtaaaaacatctgaaaaattgcaaaaatca

SEQ ID NO: 248852 - DNA, 597 bp, Homo sapiens
aaatgtaacaaattgggatttatttacaaaattctatgtagcagtcaaaaagaaagggatggtttgatatttttatataaaaatgtttactaaaacattgttgagccaaaaaaagcaagctacaaattgatatttacattgtaatagcccactggtattaataaatacataaatttgcaaatgagaaattattggtacaataaaaaataatamaccagaacacattgagattcatctccacggtggcaaaatagttcgacattaggaaatttattaaaataatatcccctattaattgctcaaattatatccagtaatactcagaagacatggaacagattcaacattatttcctaatttaaaatttaaaatctttgtagatagagatggataattccttaacatgatatgataatatatgtataagaccccaaagccagtaatatccttcatagcaaagcaataagagaagcaatcttgtgcgtgtcaagaacaagacatatcattagggagactagatgtcaaataaggaaatggctacttaaaagtgtctacatgagtgagccaatgcatttacataagaaaatgaagtaagat

SEQ ID NO: 248853 - DNA, 597 bp, Homo sapiens
aaatgtaacaaattgggatttatttacaaaattctatgtagcagtcaaaaagaaagggatggtttgatatttttatataaaaatgtttactaaaacattgttgagccaaaaaaagcaagctacaaattgatatttacattgtaatagcccactggtattaataaatacataaatttgcaaatgagaaattattggtacaataaaaaataatacaccagaacacattgagattcatctccacggtggcaaaatagttcgacattaggaaatttattaaaataatatcccctattaattgctcaaattatatccagtaatactcagaagacatggaacagattcaacattatttcctaatttaaaatttaaaatctttgtagatagagatggataattccttaacatgatatgataatatatgtrtaagaccccaaagccagtaatatccttcatagcaaagcaataagagaagcaatcttgtgcgtgtcaagaacaagacatatcattagggagactagatgtcaaataaggaaatggctacttaaaagtgtctacatgagtgagccaatgcatttacataagaaaatgaagtaagat

SEQ ID NO: 248854 - DNA, 581 bp, Homo sapiens
cattccaaggcttggccttacacatagggactggtctgatgtcagaggagaacaagaacttcaaggaatttctagtcctccaaatgagttacactatattgggacagcaatgagataagagctgggatgaaaagaatttgacagagcaagagtagatgcatgatagaataggttacaaggaagaaaagatccgtgttcaatggttaagtcaatgggggcaggaatttggtttttgttgttcaacactacatacccagtttcaggcccataacaagagaaatgaatgaatgggagagtgagtgaggctatttgatcctttctctttgtttctttaatctagtatttcccaatgtatggaatgcttcaactagtaatctgggacatcattttaggtggtaatggtacattaaacactctaaatcaggtagagacaaagtgtttccccttttaatttcctagtatcaaggagaaaaatttcagtttrgtactagtaggcctttaacatctttctattcttgtttaaacaggagacatgttctcagggactgagctccaggtaactttatttagttaaaactata

SEQ ID NO: 248855 - DNA, 521 bp, Homo sapiens
tctttcccagtccttctgatttccataaaggagaaatgctcactttagtgcaagtggtcttacgtcctttctaacactgtcaacctctgctttcaacaaagagagcatgttcagggcctgttgcacacatttgtgtctggctggagtttgagaacattgtttttattgccatttgtgagtggttgccttctatatatgacaacagtgcagcagcgtgatcttggctcactgcaacctccaccccccgrgtttaagcgattctcgtgcctcagccttccgagtagctgggaccacaggtgtgcaccaccatgccagctaatttttgtatttttagtagagacggggtttcgccacattggccagctggtctcgaactcctgacctcaagtgatccacccaccccagcctcccaaaattctgggattacaggcatgagccaccatgcctggcatcaggaaaccctgatttcgtccagttcccgtatttcaaagatggagaagttggggctctgggaccagtgg

SEQ ID NO: 248856 - DNA, 582 bp, Homo sapiens
atgagtttagtttaggctaagtcctccctacccctgacccccctgtgtgcgtctgtgtgtgttggggcagggggatgaaaaggaacaaagtgatagagcaagtcagagaagtaaaaaagagtacatagcttagtgagctgagagagaggttgtgttttcattcagttgatttagtttaaaaagcatgtatgtattttctttatgtattaatattttcttttaaattaaaattttagtgttaaaggtaaaaacaacagtacactattctcattctatccctattgtacaaaattccagcaaaattatattttgytgggggggggtttgtgaggggagacagaaaatatataaagaattaaagaacattaaattataagagcctttttagatatacctagagaaaagggttaagctccaaaatcataccccattcctatcatttgagggaggtgtgtgaatcagatatttatagctacaagtagaagatcatgcaagtgtggtacaattttatttacttttatttattgaagtacaatttttaagtggcatagtatgagacacagtaatggctcactgtctatc

SEQ ID NO: 248857 - DNA, 509 bp, Homo sapiens
ggcttgttggggatgtcacaggggactctgacgtgtcagaggcgaccaaggggagggaacctgggcatcacctgagggaaaagggagatgggcaccaaaatggagggacaaggatgtagagaaaatggcggcccttcaccctctgcccaggaccagttctagttacagatcatggccctaaccatgycccaagatgttgccaacagctctgtcctcaggaagaaagggcttctcaggaccaaactcctgctttgtgtgtttcagatacattcctcattttctgtgcaacagactaaacgatttttaccagccacctcctccagctcatgtatgattagtgagatacgctgagggtacccgtattgtttctcaaataatagtctgcaaagcacctggaacttcagagaaaagcagcctaattctccactgatgtgagcacatggggagggttcaggtagtccttccctatactcttggtgtgaggcttcttttttccttttttttttttt

SEQ ID NO: 248858 - DNA, 509 bp, Homo sapiens
ggcttgttggggatgtcacaggggactctgacgtgtcagaggcgaccaaggggagggaacctgggcatcacctgagggaaaagggagatgggcaccaaaatggagggacaaggatgtagagaaaatggcggcccttcaccctctgcccaggaccagttctagttacagatcatggccctaaccatgccccaagatgttgccaacagctctgtcctcaggaagaaagggcttctcaggaccaaactcctgctttgtgtgtttcagatacattcctcattttctgtgcaacagactaaacgatttttaccagccacctcctccagctcatgtatgattagtgagatacgctgagggtaccygtattgtttctcaaataatagtctgcaaagcacctggaacttcagagaaaagcagcctaattctccactgatgtgagcacatggggagggttcaggtagtccttccctatactcttggtgtgaggcttcttttttccttttttttttttt

SEQ ID NO: 248859 - DNA, 483 bp, Homo sapiens
attccagctttgttcactggatgtataaggaatgtcagagcagagaaaactcatgacaggtcaggggtcagaggaacactgccacgaacactccttttgcagtgtttaatttcctgtttaaagaatgtagtagaaatattgggttgactatcatcttaattctttactcttayaagggtatctctctatcttgaggccattacagtcaggtctgaaatttaaggaagttggaactttggccattttagttagacccccaaagtctttgacagtacttccagtgacaacacaataatcatttgaccaaagtgagtttcaggatattttccccaaattcaacttcttgacccattaagctctgtgattctttgcaagatcttctgttattaggatgatggtattgccatgtgctatcaagaaacattgaaaagaatgaagacatactggtaagtttacaaacaaagctatgttgtagttaagatc

SEQ ID NO: 248860 - DNA, 572 bp, Homo sapiens
gcaagtttacacgatacctgtaacagccatgatcttaatctcagaygcttcttccagctaccaagtgtgttctggatacagagcacaccatggcttctggggtcacactcagctgaggctgtggcccacagagcactcatctctctgggctgtggtggtggtggctctactgaagaagcaaaactgttaccagcacattcaaaaagcgtgttgaacatcttttaaatatcaaagtgagaaacaagaaggcaaaataatagtgttatcagaaagatgttaggaagcaaggacagctgtgtaaagctcgaggctggaaggtgacttgccaacttcatttaccatctggcttcttgggtagcgggcactggaatagtaagatgtgaggctctggttcatggttcatataatggactcatccctgactctgctgaatgccaagattcctccattcagattcatactctgctgaactccaagattcctccattcaattcaagtgggttttagggaccagcttggctatgtccttgggcaacatgacatgccaatactcaaacccctcatcattgtat

SEQ ID NO: 248861 - DNA, 592 bp, Homo sapiens
gtcaggggtcagaggaacactgccacgaacactccttttgcagtgtttaatttcctgtttaaagaatgtagtagaaatattgggttgactatcatcttaattctttactcttacaagggtatctctctatcttgaggccattacagtcaggtctgaaatttaaggaagttggaactttggccattttagttagacccccaaagtctttgacagtacttccagtgacaacacaataatcatttgaccaaagtgagtttcaggatattttccccaaattcaacttcttgacccattaagctctgtgattctttgcaagatcttctgttattaggatgatggtattgccatgtgctatcaagaaacattgaaaagaatgaagacatactggtaagtttacaaacaaagctatgttgtagttaagatcaaatatctgctaatatattaatacagaaaagaataccacttaaattcayaaattataattctcttgacaactcaactcccaagataaactttctttttcacttatgtaaaactttcaactccattcaaaccttcaggacaaggaaacattagctgagtctgtcatcct

SEQ ID NO: 248862 - DNA, 547 bp, Homo sapiens
caaaaaagcattttataagcaataaatgttacccagagcccttcatggtagggcaaaaatgtatcttcaatcaggaagtttgacactgatgcccttacttggtccagtaaggagatgtgggaacaaaatcagaaaaaaagaagggtacttcatccccaaagttatgctagcacacaccttgctcttccagctcctccccgggatttacagaaagtcaggagaaatgcagtcagaacaggtggcagagtgaaagaagcccatttctgggacctagattcatattttgctattatctcatgtgtttacaccaagtgcatcaatagtaccaaccttaagaaaaagtattatatagggagaaagaaggcgagaggaactgaaatcttccaaacacgttgtatataattgataaaagctggccaaagcattttcttccttctctgagatcagttttackgccacaattttaaaaattcaagagtgtatctaagtgtatcatctactaattgttcatgttgtggaaaagtttatgtcaactcttagaagcaaa

SEQ ID NO: 248863 - DNA, 533 bp, Homo sapiens
tactgttcagccttaaaaaagaagaaatcctgtcatttatgacaacatggatgaacctggagaacattatattaagtgaaataagccaggcacagaaagacaaacaccacatgatctcactcgtatgtgtagtaaaaaagctgaactcagaaatgagtaaartggaggtgactagaggttgaaggttgggggatggggagatgttgctcaaaagacataaaatttcaattagacaggaggaacaagttcaaaaggatctactgtacatcacagtagcagcagttaataacaatctattgtacatttgaaaactactagaagagtagatttttcagtattggcaccacatatgaaaaaaaagggatgtgacgtaatgcatgtgttaaatggcttgatttagccattccacaacatgcatatatatcaaaaatcatgttgtacacacatgtatatacagtttttagttgtcaattaaagtaaaatttaaaaacaaaattaaaaaggactcctgccattggtgacaacacagatga

SEQ ID NO: 248864 - DNA, 556 bp, Homo sapiens
gacactattcaacaatatagcttatgcatttgataaatgtttttgttttttccttcaaagttgaacataggcaaaaggtataagttattgagattccaattaagttttaagattcactggttttgttatgttctctccaaaaatattgtttattgagaactatgtattttaatattcatactttcagcttttctattttctaatttttttatattctcaatatttataaaataaaaaggtaaatacaacygtgtttccatacagtattcctcaattcaaaggcacagcatttttcatgttgtaacctcctgtattcactggtgtcttaggatcacttaccaaaaatctgtggcatcttagatttggtaacaaagcctaaatatttccatcctacaaacgtggtcatgcttctaaaaaaccacatgaagtagctcaagatgtttggccagccaatgcgcagaagccctaattgaacatgtaaaaggcagatgagatgtgttaaggtattatcttagatacagattatgtggagctcaaagaccttgttgggaacaac

SEQ ID NO: 248865 - DNA, 448 bp, Homo sapiens
aacttgaaatcaggttttttagtgaatttaagaatataatttcttcatatgatagagagggctgatgaggggagcataaaacttggactgtccattccaatagacctgagtttgaatctggccttttccacttattctgtcttgtctttgacaagttacttatctgtagcccacatagaaatagtgataatagtaacaagctcgattttattatgtagatggaataagataatgcatataaataaagcatttggttcaaatctttgcatactcaagtattaacttytgttattgtcattattttatactgttgacattttgatgaatataaatttgtgatgaacataaaattgtgatgaacatgttgatgaacataaaattgacaaacataaaggtgtataggcagcatgtttatcttccattaaaagcatatgtgtcattcaccttt

SEQ ID NO: 248866 - DNA, 521 bp, Homo sapiens
atgaagtctgaggcttaagtattgtatttgaccatatgaaggttactggttactttgacracagcacatgtaatgaaggattggagaccacagactgttaggaaggaatcaataaaaaatgaatgggaagacattggaaaaagagagtagataaaatgttcagagagttttgatgtcaataagaatgaaatattggtgtgagatggagaggaaaatgaggtcaagagaggatttgctttatatgacggtagaaattacaatgtatgtgtaagctgagggaaaatatctagaagagagagaagaaattatggtgtcaggatgatgtgagtaaaccactggatccacatctttgaataggcaaaagaacatggcatctagtgcatgaatggaagagttggatttcagtgacaatgtgaacagcatatttgtagaattgggaaaaaacaaaaggagcatgtgggccaaagtagtctctgttacataactgaatctttctttcattttatacaagttatataatc

SEQ ID NO: 248867 - DNA, 576 bp, Homo sapiens
aaccatctgtgacttcccccatagtttaatcctttctgcttttagcttctagaacacttaggacatatttctactataccaattctccatcttcattataaatattcttgctgatcttccttatggagtcttttgagtagggattttatgttatttgtatttacattgtcatcctaggcagatcgtcttgtgcatcataggtgccgaaattgtgaatgaagaaataaaacaaaatgctagcattatgtttggatatgagtatgtgctgattgacttacactaaattattgtaccacacaatttaaaaacattattacttatgggtaytaaaagtagtgattccatttccttaaaaaaattattaaatggaattgagacataggaaggaagaccacttactcctgacatgaggcagagtatgtgtattattgtttattatggtaaatacaagtcttattgataatggccttagtctagaaatgtttcaacctgaggcattcatgaagagtgtttcattttcattgatgcttacgttttattctcttctttagagtcctttacttaactcctctcatt

SEQ ID NO: 248868 - DNA, 517 bp, Homo sapiens
tcttaccttaactcttccttttgctggaaaattctacattttcatattttggtttagatgtcatctcctctaatcaaaattgcacccctcatccactcctttctcattccttattttatctcagtcaccatgttttctcaaaatttctacagcaaatagagactagcatgtatttctgtgcttaagtcagctttatctagcacagtacttggcatacagtttgcaattaatacayatttgttaaggaatgaatgaatattacatgggtgcatggatgaatgcatgcatggaaggatggacggtgaatgtgtgtgtgtaaaacttgggcctattattttttattgtggacttagaatatctaatattatggtgttaggccattcttgcattgttataaatacctgagattgtgtaatttataaggaaagggtttaactggctcacatttctgcaggctgtgcaggaagcatggtgccaacatgtgctcagcttttggtgatagcctccggaagcttac

SEQ ID NO: 248869 - DNA, 600 bp, Homo sapiens
tgatgatcaaaacaagtctgtaagtttgccttcaatcttttaaagattgaggaaaaaacaataaatacacaaataatgaatctgtaatattcatgtaaccatgcaaaaaaaataatatctgttactctggcctcctttatttaaaaaaggcaaaagataagccaataggatgaaaattgtcctttagaaagctgacaaacttcaataccatagttaaaccagacttccttcaaatgtagggtttttatatatctaaccttgaaatgtaatcataagatctaaatctaccacatgcaactaactatttgagcatgtgtatcaatgtcatctgagccctcttgattataaaaaaacagtacctgctagccaatactttaaatagaactttaccagcattattttattattcaattaatttacaactacacaggtctggacataaaaaatacaaagattttccacagatatccagataatcattgtatatttacatgaaatgctaccattgtatacaaacaccttcargattcaaataatatcatagcttaaaatgtttaaaaactactactgtcaggagtgataatcttaagaattttgtag

SEQ ID NO: 248870 - DNA, 622 bp, Homo sapiens
tctgcctttctaattaacattttgcattaactgccaatatcaacctcttctattggtttatgtcaatatgaagctaattcctttcagcaaagtaggtcttgaagcagttctaaccaaccatagtgaactctaaagagatggcttgtttagacgtaagtcaatgtttttgttcagttcctcaatttttaaaatagaaacatcattgttttattcacaactgtttaatgtggtcaaatcaagggatgttgcaggtgaaacttctgttccaataactttctgtagtaatgcatgataataattattgagacaaatagactaaaagaccattctcacattgacctttgggaactaactttggatcatgcttactggttttaaagaatcttctataaaaatataacctaggaatgggattaaaacagacgtggctcctacaagaactcatttctaccatgaccctgacaatttaaaccacacagaaatacaattaatcagcattgggaaactgttcaggattataagatcaaatgaaaattgttttcctctaaaacagsgtttctcaaccataacagaatacaaaaaacccatgaggagcttttaacaaagtactcacgtccagatc

SEQ ID NO: 248871 - DNA, 504 bp, Homo sapiens
tagtcatttcaagattccagtgaattggattaaaatttattccctgagtttctaagattcatagatagagatgttccctaaaccatagtggcaaaatttctcatggatattttgctgaataagaaatgcacacgttttccaaaatacattagttggctgataaagattgaaaaagacttcaaagaggatagagttgagcacagcattcctcagttcagaactattgggggaaattcataagacttcaagaaccaagaactgtgtttatcagaaataaattctttaatactatggttgcttttatgtttttcttagaactgctaaacaaatttatgggaggccattgttttaggctcctacactaggccycatcagaccagattacacctgaatggaatcacttgtataaagtgccacgtaatgaaccagaactatgaaaggggctagttttccccaaatccacagattccaggaaacatgagtcattgtaacaaggaagtccac

SEQ ID NO: 248872 - DNA, 651 bp, Homo sapiens
actcaattgatctacttcataaccttggggaggaaataatttttaacaaaagagcaaggattaagcattgaaaggggtagaagagtcacatagaagttagtcaactcagcacggaaggcaagaatcaattatgtaaaaattgcccttaaattacctgtaaaatgtagttcacataattctgtgtactcaacctagtccataaaataatttgcttactaaaagttgagaaacactgaagtagacaaaggaaagaaaaatagaaagtctatatgcagatgtataaaaatctaatcattttgctttaaatacaattatgaagttcctagaggtaaggggtggagggtgagtgaaggattctaaagtgtttgtccttgcacattggttgaccagttttaatattgtcttcatatmttaatatatttaatagattaactattgtaagaatttaagttctaaagtaaagacataatgtaaatctgctagtatatgattccactgtatcatagaaggaccccttgcttccaaactctcccctactgccctttcagggtacctgattatcacacataacttaccagtgtagatgatggtttgacaataaccactgtcaactaaaggaaaaagtgaggcaaaattaacataagtagagag

SEQ ID NO: 248873 - DNA, 605 bp, Homo sapiens
aacattaggtatgcaacaagatgcaaaatccaggctcttattttctaaaactcactatttgtatgagcttcatgacttaaagtatgacaggaagttattggttttgaaattctgatactagaaattacaaatatccagtagaacttaataacacatatgtattagtccatttttgcactgccraaaagaaatatctaagtctggataatttataaagaaaagagatttaattggctcatggttccacaggctgtacatgaagcatggctgaggaggcctcaggagacttacaatcatggcagaaggtgaagaggaagaaggcacctcttcacatggtcagagcagaggaagagtgagaaaggggaggtgctacacacttttaaataaccagatctcatgaaaactcactcactatcacagggagagcaaggagaagttctgccctcgggatccaatcacttcccaccaggcccctccttcaacactggagattacaatttgaaatgagatttgggtggggacacaaatccaaaccatatcattctgcccgtggcccctcccaaatctcatgtccttctcacattacaaaagacaatcattccttc

SEQ ID NO: 248874 - DNA, 612 bp, Homo sapiens
ctgcaacttgttttgcaaacttatgcgtataatattttgaatcctggccctcataatctatgcaactgggcttttccttgggctccatcaatgtgccattgtaggtaacaaatacttccactgcctgtcgtatctcctcagaactcatcttaaccaggtgagttcacccaatttttcaacaaccaaagagaatgagattaagagctcactcttgagaaaacagccaggtatggttgtgggcaatggtttatgagtttctgaaaaaaagaagcttttcagaaggaaaaaaagaaaagtatgtgactacttctactctaagtgaaaagaaaacagataaatgattcgtcccacataaacatcataggatctctctgctgatgcagttttcatcttgcacagtacgttattgtactaacgatgtctcttactctgctcccaactttctagtgaggaagsaactatgtttaaaattgcttcccacctgggatggccattctcctgcggaaattccttcattttgggggcttggaaaaacctgctcaaaatatgtaattcttatgcaagtacagtctgtgcactgcacaccaggcctatggttcctcaccaaagccc

SEQ ID NO: 248875 - DNA, 610 bp, Homo sapiens
caaacagaaggaaaataatgggcagcaagggtcaatgcataatgaagataatctaaatgaaatgactaaaaaaattaacaagatcaatataaaaaaacaactgcatttctaaattcaaacagcagtttgaaaatcaactttataaaaagatgccattyataatagattttaaaatatcaagtttgtaacaatgaatctgacaaatatctgcaaaacctcctcacggaaaattatatgagagaattttttaaaaaatcctaaacagatggagatataccttgattgtgaattagaagattcattattgcaaaaatgttcaattctccccagattgattttgcattaaaaaaaatccaaactgtttgctgtggaaattttaaatatgattttaaaatataaatagaatttcaaagggacaagaagagtaagacaacttacagaaggaaaataaaatggaaagacttgctctattggacattaagacttattgtaacgttacagtaattaagataatgttttgggccaggcgcggtggctcacacctgtaatcccaacactttgggaggccgaggcaggcagatccctttaggccaggagtttgagaccagcc

SEQ ID NO: 248876 - DNA, 602 bp, Homo sapiens
actcaatatacgttagattatgcatcattctagcagatcttagtaatgaagtaaaggaatggcattccacttcaagggaaagaaaggggcttccataatgggaatgaaaagatatcaaaagaaatgatagattagggaaagcaagattgcttgaatttacaatttttttctaagtagacccaaagctggttgaccttaatgactcagttctgcttcaaggatgtaattttttaaaaatctgacattgggaaatatatcttcttctttactatacttaagaaaaatactacttcctaagagctgcacctgaacaaaacctkgagaaatcttgctcttcctgtcacccaacttatctgtaagccataagcattattgtttttatcttaaaaaaaaaaacttccagggaggtggttcttcagcactcttcaacgttccatatggagaactatttttcaaccaataccactctgcagaatccattttatgactcccaggataaatgcacggcattttgcctaattcttcagcccacattggaaagttgggttgaaaaatcccatataagtaaatactccatgagtttatacaggctgaagtcacta

SEQ ID NO: 248877 - DNA, 591 bp, Homo sapiens
aatcatttttaatgcaagcagctgttgggctggcttccccaagatgctttgcccagggactcaggttctgctgtattccccttcatcaagtgatttctgattgtttttctgctctgttgcataccacacacatggtggtgggggtrggggtatacatcttccttgcagagatttgtttggatgcaggatttctaaaaatatccaaaagaaattgatgagggaggggagtgcaagttaagttgtatgaaatttgatgacttgagccctaatcatagtctctattaaaaaaaaaaaatagagcacaaacccattttctgacctccagccataaaatatgggatcttgaattctacttattgaagataaattcatatatatttattgaagatacacttatatatctttgtatatttattgaagatatatattttgcaattatattcatttgagattttggattatatttttacttgtaaagtatttatgagggtctataatgtactagggcaccatgctagatattaaggacataaaggtgagtcaaaattgacatggtgcctgctttcctgtctctttgtctagtagaagaga

SEQ ID NO: 248878 - DNA, 569 bp, Homo sapiens
cttcagtctcctttgctgcctccccagccagcttgagttgaagctccttaaggctcagatctagaaacaatggtcttcacccttgatattcttttcatgggcaattctgcccatactatacccattcttactccactggaaggagtggggagatggttttcccattacttcatcgaatggcaccaagggaaagaaaatatatagcaatattttggcatatggtttgcatgtttgggatttttgttcagaagacttcattctacgtaggtcagagcctaccagaggagcagtgagggttgactggatgggaacatgcccagctgacaaaacctgtattcatgacagcaacatcccaagaayatggaattctcatgagacactgctattgactcccaggaataatcaagagagactctgaagctctgtttctttgcaaggggtggtggggacactgagttgcagatgtggctgcgaatgttaacatggccacatctgtactcccaggctggtgagcttaagaacactagagtggtagagcgcttagcctatttaggttcttaatgcatttt

SEQ ID NO: 248879 - DNA, 569 bp, Homo sapiens
cttcagtctcctttgctgcctccccagccagcttgagttgaagctccttaaggctcagatctagaaacaatggtcttcacccttgatattcttttcatgggcaattctgcccatactatacccattcttactccactggaaggagtggggagatggttttcccattacttcatcgaatggcaccaagggaaagaaaatatatagcaatattttggcatatggtttgcatgtttgggatttttgttcagaagacttcattctacgtaggtcagagcctaccagaggagcagtgagggttgactggatgggaacatgcccagctgacaaaacctgtattcatgacagcaacatcccaagaacatggaattctcatgagacactgctattgactcccaggaataatcaagagagactctgaagctctgtttctttgcaaggggtggtggggacactgagttgcagatgtggctgcgaatgtyaacatggccacatctgtactcccaggctggtgagcttaagaacactagagtggtagagcgcttagcctatttaggttcttaatgcatttt

SEQ ID NO: 248880 - DNA, 357 bp, Homo sapiens
gagactcagtaggctggagctaagttaaagtaaactatttattgcactaactaagccatagtggggctgctgccaactggtcacaactgcakttttttggttttgtttttttcttaaaggcctcagtctctgtaagatgcacgttgagtagttggaaaagaaagggtcctaatgctcggaattttcttgggcatcctcaactctttaaggccttacctatcagtgtttaggttggattgttctctgcctgtccctgtaaccagacagaaaagaatgagaagggagataagtcaaacgtatgccttgttacttgagcaagcagcttgtagagtgggacacacgcactccctgcttgga

SEQ ID NO: 248881 - DNA, 619 bp, Homo sapiens
aaaacagggagaatttgacttcctcttttccaattaaagtgccttttatttctttgtcttgcctgacttttctggttaggacttgtagtcctatgttgaataggagtggtaaaagtgggcatccttgtcttgttttagttcctagaggaaatatattcaactttccccattcagtatgatgtaggctgtgggcttgtgatatatgggttttattatgttgaagtatattccttctatgcctagtttgttgagagtttttatcataaatgaacgctgaattttatcaaatgctttttctgcatctattgagataatcatgttttttgaccctacttctgtttatgtaatgtatcacttttattggtttgcatatgttgaagcatmcttgcatccctagtataaaactcacttgatcgtggtgcattctcttttttgataggctgttagatttgatttgccagtattttattgaggatttttgcatttatgttaatcagggatattggtctgtagttttctttttttgttacgtccttctctggttttggtaacagggtggatttactggccttgtggaataagttagggataaatccctcctcttcaattttttggaaca

SEQ ID NO: 248882 - DNA, 619 bp, Homo sapiens
aaaacagggagaatttgacttcctcttttccaattaaagtgccttttatttctttgtcttgcctgacttttctggttaggacttgtagtcctatgttgaataggagtggtaaaagtgggcatccttgtcttgttttagttcctagaggaaatatattcaactttccccattcagtatgatgtaggctgtgggcttgtgatatatgggttttattatgttgaagtatattccttctatgcctagtttgttgagagtttttatcataaatgaacgctgaattttatcaaatgctttttctgcatctattgagataatcatgttttttgaccctacttctgtttatgtaatgtatcacttttattggtttgcatatgttgaagcatacttgcatccctagtataaaactcacttgatcgtggtgcattctcttttttgataggctgttagatttgatttgcyagtattttattgaggatttttgcatttatgttaatcagggatattggtctgtagttttctttttttgttacgtccttctctggttttggtaacagggtggatttactggccttgtggaataagttagggataaatccctcctcttcaattttttggaaca

SEQ ID NO: 248883 - DNA, 619 bp, Homo sapiens
aaaacagggagaatttgacttcctcttttccaattaaagtgccttttatttctttgtcttgcctgacttttctggttaggacttgtagtcctatgttgaataggagtggtaaaagtgggcatccttgtcttgttttagttcctagaggaaatatattcaactttccccattcagtatgatgtaggctgtgggcttgtgatatatgggttttattatgttgaagtatattccttctatgcctagtttgttgagagtttttatcataaatgaacgctgaattttatcaaatgctttttctgcatctattgagataatcatgttttttgaccctacttctgtttatgtaatgtatcacttttattggtttgcatatgttgaagcatacttgcatccctagtataaaactcacttgatcgtggtgcattctcttttttgataggctgttagatttgatttgccagtattttrttgaggatttttgcatttatgttaatcagggatattggtctgtagttttctttttttgttacgtccttctctggttttggtaacagggtggatttactggccttgtggaataagttagggataaatccctcctcttcaattttttggaaca

SEQ ID NO: 248884 - DNA, 630 bp, Homo sapiens
attttgtgggggacacaattctacccataatacagcccatgccttgctcccaacttctggttaacatcagacctgcacaaactttccttggttaatagatttcttgagccttcrgttttctgactctaatttaggtctgtgtgccttccaggcacattcctcagtacttcctacctggagaagaataagggactactgcagcttcctgcaggagttctctccagcaaagaaaggcctcaaagacatcttcctagagattattgtcagacagctattgcatggagaagcagcagagctgggaggaccctcaggggtcatatggccattttacagaggaatggactgggtcccaaaacaattaagtcattcttgtccaggtatgtgtcagaaccaggctgccaactcagtcttctcatttgaagtctggtacttttctcattccacttaagacaagctcagctctgtcctagacattataagggaatcaaaaaaatatataatatttcattgagttaaaaatgcacatatttcacatttttgaatctccaaaatagagatgctatttccatttgatggcatgtctaatcggcagcattttctcttttttagtagaacataacaacaaacaca

SEQ ID NO: 248885 - DNA, 525 bp, Homo sapiens
tcacccctgttgcctttttataaccacatccatctcccttctgtcccactttatactttgtgtttttgttatagttgttgttgtttgtttttttgagacagagtctcactctgtctcccaggctggagtgcaatggcgtgatcttggctcactgcaacctctgtctcccgggttcaagtgattctcctgcatcagcctctaagtaactgggattacaggcacctgccatcatgcccagctaatttttgtatttttgtagagacagggtttcaccgtgttgtccaggctgatcttgacctcaggtgatctgcccacctcagcctaccaaagtgctggaattacaggtgagccgccakgcccgacccccaacttcacactttgctctttttctctgcattaaaattttgtatttgtcaactctattattgacttgattttctgcaatattaattctgacctttactgcctctagtaaaaatggtaattctactgtcatactttgtttcctcacaatccttttttaaa

SEQ ID NO: 248886 - DNA, 586 bp, Homo sapiens
gctgctggagatgagatggttggattcagagatagtgaaaaaggagaccttcagcgactttctcttcctgtttggatccacatagaacctcaaagaggcaaatttcatcctcctggctccactgtgactccttaggcgggagtcaggcacgctggggcagcagatggtctatctcccctaaacagtgtgacagaagtggggcatgctcatttcttggcatctgctggtggaagtcagttttgctgcaatgcgatggcaactttctatcaaccatgcagagactggcttgggaagaagtgagcccccagtcactggygattctcagggcttgtttccccagagctagctccatgttgaagcatggtgttggagtttgccaggcaaatggcaactcttcacgagcacatgctcttgctgggcacagaggtagctgcatatcggttgtctcttttcatcctgactttattttatatatacagaagctgaggctcagagaatttcaatgaccttcccaaagtcacataaccagtaaatcctagagccggaatttgaacccagaatcccaaatcccctgttgttgatggca

SEQ ID NO: 248887 - DNA, 618 bp, Homo sapiens
tgatgtctaaaataccttcagtaggtaacagagccaatattccaacttagataaggcttaaagcttccaggggtactttgtgatttcccacagatgtgccatatgagaggaacctcctttctgtgtttagtagatgtaacttgggatggtataaaatagtgagcaaataagagcactggaaagagattcttttctttgstagtaactagctgtggaacttcaggcaagtcactttactctctgtgcctttcttaagctttaaaataaaggagttggacaagatggtttctaaggctcttttgggctgcaaaattaaattcttaactcgccctaccatcacagagaggtctttaacactgtttccagcatgtggagtaataatttcacctgttattctttaataacatgatgatcccacagttaggtggatttactgcttactgcagccacctcctggcgtattgcagtgcaacgcagggcacatgagcatatcaaggcctctggggtgtcctgcagagaaacaatgaatttaattgtattagctctctcttcccaggttttgaccacagaaaacttgtggtcaaagttttgaccacagaatcatatgtttcactgaac

SEQ ID NO: 248888 - DNA, 649 bp, Homo sapiens
actggaaagagattcttttctttggtagtaactagctgtggaacttcaggcaagtcactttactctctgtgcctttcttaagctttaaaataaaggagttggacaagatggtttctaaggctcttttgggctgcaaaattaaattcttaactcgccctaccatcacagagaggtctttaacastgtttccagcatgtggagtaataatttcacctgttattctttaataacatgatgatcccacagttaggtggatttactgcttactgcagccacctcctggcgtattgcagtgcaacgcagggcacatgagcatatcaaggcctctggggtgtcctgcagagaaacaatgaatttaattgtattagctctctcttcccaggttttgaccacagaaaacttgtggtcaaagttttgaccacagaatcatatgtttcactgaacacttaataaatatctcatgatccagggaacactgatgttgcaggttgtcttctagagagcaagaattaatgtggggagggtgctcttggagggctgctggtatgccagccatttgggaccaggaaagggagaagttgaaaaggacgtgcatgagagtgaccaaggatgtggaaagggacagctgaaggatcccaaaaatgagtag

SEQ ID NO: 248889 - DNA, 572 bp, Homo sapiens
gctttggctcactatctcctattgtgtacagaagaagagtgtttggcgggagggggttctagtcagtacaaagttcctctgaggctgctactgccgtctctcacagacctttcagatccagtgcttcagatacttgagggagctcaggtctcacaccccactaaaattgatgattttcaccaatgaaacaaaattcgttgctttttgctgtacataaatttgcttttttatttatttatgtatttatttatttatttttgaggcagagtgctgctcggttacccaggctggagtgtagtggctcaatcacggctcactgcagcttcaatctcctgggctcaagggatcctcccaccttagcctcctgagtagctgggattacaggcatgcaccaccacatccagctaagktttttatttttttttttgtagagctgaggtcttgatacgttgcctaggctggtctcaaactcctgggcaaaatagcaagcaattctcccacctcagcctcccaaagtgctgggattgcagatgtgatccactgcgcttggccagatttacaaatattcaaac

SEQ ID NO: 248890 - DNA, 598 bp, Homo sapiens
gatgatataacagaccctctttattgagctcttgttatgtctcagtcgttttaaatcagagaggtcatggagtgcagtggttgggagtgtggactgtgcagtcagatgccttgacttcaaggccttcaaggagctggcctttccagctcctaacttggaagcatctcttaaatgctctgtttctgatttctcacctgggacccggggctaaaaaagtagtacccattcccatagagatgcttggagcagttaatacgataataggtggaaagaacttagaaaaagtgtttagaaaacacgcaaagtatgttagcagttgatgctaatcctcataaccttcttggaaaggaggtatcttatctgcattttggaaatgagagaagttattctctgggaccaaaataataactagtctggatcacaagaaatctaagtgatagagccagaattcatattcttccttccaaatggcaaagctgacccaaaaaaggggggacctcttaacatkcatgagcttttgggaaggctcattcctagctacaagactttgagcaaaatatcatacataacctctctgactctgtttcctcatttgtgt

SEQ ID NO: 248891 - DNA, 505 bp, Homo sapiens
tgttttctttcctcttgggtacacagctggatgttaatactcaacttttttttaagtttggttcagacatatgactgagttctgccaatgaaatctgagtggaagtgatgtgaacctccaaaccaaggtgattaagagagggttactttgtctatgtcctctgcagtgctccagaatcttaggcractatgtgcaaggaggctgggtccctgaatgactgcgtggagcagagctcttccttccaccaccattctgtttttgaactgtgacacaagcaagaaataaactgttggtgtgttttctacagatatttgggtgtttatttgttatagcagttaatgtaccctgactaatacaaagtaagcctctttgcataaaatttatgtgggaatcacagctttgttttcccttcttctttcctgaaggaaaataagttttctttttctcacatgtctgttttcttaatttttttttacaaggaaacgctttctgaagagtaggcaca

SEQ ID NO: 248892 - DNA, 505 bp, Homo sapiens
tgttttctttcctcttgggtacacagctggatgttaatactcaacttttttttaagtttggttcagacatatgactgagttctgccaatgaaatctgagtggaagtgatgtgaacctccaaaccaaggtgattaagagagggttactttgtctatgtcctctgcagtgctccagaatcttaggcgactatgtgcaaggaggctgggtccctgaatgactgcgtggagcagagctcttccttccaccaccattctgtttttgaactgtgacacaagcaagaaataaactgttggtgtgttttctacagatatttgggtgtttatttgttatagcagttaatgtaccctgactaatacaaagtaagcctctttgcwtaaaatttatgtgggaatcacagctttgttttcccttcttctttcctgaaggaaaataagttttctttttctcacatgtctgttttcttaatttttttttacaaggaaacgctttctgaagagtaggcaca

SEQ ID NO: 248893 - DNA, 569 bp, Homo sapiens
tttcattatatctgcagaaaactcaggaaatataaatttagttgtgactgtagtggggatagtggtggtggcagattactgggtgtgtactaggctggggaggaagctctccctttcttagggctgtatgttktcttaatcaatttgggctgctataccagaacaccatagactagggggcttaaacaacaaacatttatttctcacagttctggaggctgggaagtccaagatcaaggtgctagcagatccagtgtttggtgagagccctcttcttggtttgtggacagctgcattctcattgcgtcctcatgtatcagaaagcagagaggagaaaaaagcaagcactcttgtgtgtgtcttcttgggttgatggtttgagtttatgagctcataagcttataaggacatttatcccattcaagaaggattgctccaccttcatgaactaatcccctcccaaaggttctgcctcctaacatcatcatacctgggcttaggatctcaaaatatgactaaacggggaacatgttcaatttacagcatgtgtcttgtctagaatatcgagt

SEQ ID NO: 248894 - DNA, 707 bp, Homo sapiens
atattcagcatcaaatcttgcacatatttagttttcccctaaatatttcatgtcctttaatgctattgtaaatgatactgttttgtaatttcgatttccagttattcactcccaatatctaagacggcaatttattttcatacattgaccgtatcttcttatatacgacaactttactaaactcaattagtagaatcttttcaaaaagttttatttggataattttaatgagcacaagagccgttttgttacatggagatattgtatagtggtgaagtctgggcttatagtataaccattacttgaacaatgtacccattaatatctcatccctcttcctgcttgcaccctggacccttcygagtctccagtgcctactatttcatactctatgtccacatgtactcattatttagcttccacctgtaagtgagaacatgcagtatttaactttctgtttctgagttgtttctttaagataatggtctccagttccatccttgtcactgcagaaaatacatgctttcattctttttgtatagctgtcacctagcagattctttgggatttcctatgcagataactgtgttgtttgtaaatagagatttatgtcttcctttcaaatctgtatgtctttttactttttctcatattattacactgggtagaacctgaagtatgtgttgaaaatgagtggtgaaattaga

SEQ ID NO: 248895 - DNA, 707 bp, Homo sapiens
atattcagcatcaaatcttgcacatatttagttttcccctaaatatttcatgtcctttaatgctattgtaaatgatactgttttgtaatttcgatttccagttattcactcccaatatctaagacggcaatttattttcatacattgaccgtatcttcttatatacgacaactttactaaactcaattagtagaatcttttcaaaaagttttatttggataattttaatgagcacaagagccgttttgttacatggagatattgtatagtggtgaagtctgggcttatagtataaccattacttgaacaatgtacccattaatatctcatccctcttcctgcttgcaccctggacccttccgagtctccagtgcctactatttcatactctatgtccacawgtactcattatttagcttccacctgtaagtgagaacatgcagtatttaactttctgtttctgagttgtttctttaagataatggtctccagttccatccttgtcactgcagaaaatacatgctttcattctttttgtatagctgtcacctagcagattctttgggatttcctatgcagataactgtgttgtttgtaaatagagatttatgtcttcctttcaaatctgtatgtctttttactttttctcatattattacactgggtagaacctgaagtatgtgttgaaaatgagtggtgaaattaga

SEQ ID NO: 248896 - DNA, 707 bp, Homo sapiens
atattcagcatcaaatcttgcacatatttagttttcccctaaatatttcatgtcctttaatgctattgtaaatgatactgttttgtaatttcgatttccagttattcactcccaatatctaagacggcaatttattttcatacattgaccgtatcttcttatatacgacaactttactaaactcaattagtagaatcttttcaaaaagttttatttggataattttaatgagcacaagagccgttttgttacatggagatattgtatagtggtgaagtctgggcttatagtataaccattacttgaacaatgtacccattaatatctcatccctcttcctgcttgcaccctggacccttccgagtctccagtgcctactatttcatactctatgtccacatgtactcattatttagcttccaccygtaagtgagaacatgcagtatttaactttctgtttctgagttgtttctttaagataatggtctccagttccatccttgtcactgcagaaaatacatgctttcattctttttgtatagctgtcacctagcagattctttgggatttcctatgcagataactgtgttgtttgtaaatagagatttatgtcttcctttcaaatctgtatgtctttttactttttctcatattattacactgggtagaacctgaagtatgtgttgaaaatgagtggtgaaattaga

SEQ ID NO: 248897 - DNA, 557 bp, Homo sapiens
aactatatgtccttgttttattttattttattttttttggggggtggtttccatagggtttaccacatatgtctttaactaaccatagtctactttcaaataatatcataccattttacctacagcataagaaccttacaacagtatacagtatacttccattactgttctcccattctttgtgctgttcttttcatatacttkaacacctattataacccccttggtacattattactttactttaaacagttatctttttaaacacctttattgtgaggtacaatttacatgtaacacaagtcactcattttaagatgagtttgatgagttttgggaaatttttatagttgtgtgactatcaccacaatctagccttagaacacttgtgttgccccaaagagtgcactcatgcctgttagcagtttccactatctgtcccaccatccccttggcctcaggcaaccactgatctgctctctgtctccatagttttgccttttctttacatttcaaataaatggaattctatggcctgtagtcttgtctttgtgtct

SEQ ID NO: 248898 - DNA, 606 bp, Homo sapiens
  misc_feature (1)...(606): n = A,T,C or G
catactttgagaacccaaatatagttcaactcttgtattttacngnnaacaaggaagctgagtttcagagaaaggcgggcatttatgtagggtcacctagctattagtgaaataaccagagccaggactccgggcttccaatgctgaasatgtggctctgtccacttcctcagctgattctggggcatctgcagaaggcggtagccaccccatggagcaattaccctccttggagaagactgggtaaatcactaggaggtcaggctattgtttagaactttctatgtccaagggccagaggtggctttacactctgtggtgtcatttttagagttgcgtaaaagtccctggacacttttgaattttcccctttacttttccataggcttttcaaaagcaaactactcgcccattcctgcaggaaaccccatctcaaactttctcctcaacctgtgtttctcaaaagcaaactactcacccattcctgcaagaaaccccatctcaaactttctcgtcaacctgtgtatatttccctgtgtgagatactacccttcatgtggccaccacagtcagcggaggttttctgtttccaaccagccagactaa

SEQ ID NO: 248899 - DNA, 606 bp, Homo sapiens
  misc_feature (1)...(606): n = A,T,C or G
catactttgagaacccaaatatagttcaactcttgtattttacngnnaacaaggaagctgagtttcagagaaaggcgggcatttatgtagggtcacctagctattagtgaaataaccagagccaggactccgggcttccaatgctgaacatgtggctctgtccacttcctcagctgattctggggcatctgcagaaggcggtagccaccccatggagsaattaccctccttggagaagactgggtaaatcactaggaggtcaggctattgtttagaactttctatgtccaagggccagaggtggctttacactctgtggtgtcatttttagagttgcgtaaaagtccctggacacttttgaattttcccctttacttttccataggcttttcaaaagcaaactactcgcccattcctgcaggaaaccccatctcaaactttctcctcaacctgtgtttctcaaaagcaaactactcacccattcctgcaagaaaccccatctcaaactttctcgtcaacctgtgtatatttccctgtgtgagatactacccttcatgtggccaccacagtcagcggaggttttctgtttccaaccagccagactaa

SEQ ID NO: 248900 - DNA, 606 bp, Homo sapiens
  misc_feature (1)...(606): n = A,T,C or G
catactttgagaacccaaatatagttcaactcttgtattttacngnnaacaaggaagctgagtttcagagaaaggcgggcatttatgtagggtcacctagctattagtgaaataaccagagccaggactccgggcttccaatgctgaacatgtggctctgtccacttcctcagctgattctggggcatctgcagaaggcggtagccaccccatggagcaattaccctccttggagaagactgggtaaatcactaggaggtcaggctattgtttagaactttctatgtccaagggccagaggtggctttacactctgtggtgtcatttttagagttgcrtaaaagtccctggacacttttgaattttcccctttacttttccataggcttttcaaaagcaaactactcgcccattcctgcaggaaaccccatctcaaactttctcctcaacctgtgtttctcaaaagcaaactactcacccattcctgcaagaaaccccatctcaaactttctcgtcaacctgtgtatatttccctgtgtgagatactacccttcatgtggccaccacagtcagcggaggttttctgtttccaaccagccagactaa

SEQ ID NO: 248901 - DNA, 571 bp, Homo sapiens
atttctctaatgactaatgatgttaacatcttttcaaatgctaatgggcctttgaaaagcttcttttcygaagtgcctacttgaatcttttgcccatttttttattgagttttatatctttattatcaatgtgtatgagttccttaggtattatgaatactaatcaattgtgagatatatgtactataaatatcttctctcaccgtataacttgtcttttcactctcaaagtgttgtcttttgacaaatagaaattcttaattttaatgtagcccaactttcttttattgttagtattttatgattattctatctaagaaatcttcgcctacagatattcttctgtgttttcctttagaaaacttaatttttatatgtagatctataatacatttggactttcttttataatacaaagtataaattaaaattcagttttctcatatgggtatccaactgatgaaaaattaatttttgaaaatacacttcaattcctactgcatttcagttttatctttgccataaaggggtaaacatagatgtgtgtatctttcactgacttttcaatttg

SEQ ID NO: 248902 - DNA, 548 bp, Homo sapiens
tggctacatattaatatttagcaaaaatgatcaatcagttcaagagtgtttycatattatgtttacatttttatatgtgacaaactacttcaacatagacattactctgtgtgctattaagatcaaatgagatgtatgaaaagtcatttgcacagtgcaccataactggcagccaataattggtcattaaatggtagacagctgaattatgaattcatcaattatgcttaaatatgctcaaaacattcataataatatattttaataacatttgaagtaatttaaatgtccaataataaattgttgtgtagcatatagtacatttattcacataaatggacaaatgaaaaattatgcaacaattgaaatgatggttttggagattaactttatggaaaatgcttaatgcttaatattaaatgaaggaaacaatatgtaatattggatggagatgtgatatctaattatgaggaaactactataaaaattaacataaagcagaactccaggagaggtgagagaattatgaattatgggtggtttgtctt

SEQ ID NO: 248903 - DNA, 548 bp, Homo sapiens
tggctacatattaatatttagcaaaaatgatcaatcagttcaagagtgtttccatattatgtttacatttttatatgtgacaaactacttcaacatagacattactctgtgtgctattaagatcaaatgagatgtatgaaaagtyatttgcacagtgcaccataactggcagccaataattggtcattaaatggtagacagctgaattatgaattcatcaattatgcttaaatatgctcaaaacattcataataatatattttaataacatttgaagtaatttaaatgtccaataataaattgttgtgtagcatatagtacatttattcacataaatggacaaatgaaaaattatgcaacaattgaaatgatggttttggagattaactttatggaaaatgcttaatgcttaatattaaatgaaggaaacaatatgtaatattggatggagatgtgatatctaattatgaggaaactactataaaaattaacataaagcagaactccaggagaggtgagagaattatgaattatgggtggtttgtctt

SEQ ID NO: 248904 - DNA, 607 bp, Homo sapiens
aattgccactctgtcttccacaatggctgaactaatttacactcccaccaacagtgtataagtgttcctttttctccacaayctcggcagcatctgttattttttgacttttgaatagtagccataatgactggtgttagatgaccggtgtcattgtggttttgatttgcatttatctaatgatcagtgatgtttagcttcttttcgtatgtttgttggctgcatgtatgtcttcttttgaaaggtgtctgttcataaatgtatctgcctttgtagccaagtaacgatattgagtactactgcatgccaggcatattgcataattaccttatccaatcatcccatcaaagctaattactatttaccattttacagatggagaatataaagtttaaaagctatgtaagaacttactaaatgtgtcaatgtggatgactaattaaactttctttgcatctattacttcatggatttgttgtgatcatagcgagtttaaacatgtaaagtatttaataattcatgtcagtgattataattatattttactactgtcattattgcatagttttaatagtgaaacttaaatggaacataagcctaatgcgtt

SEQ ID NO: 248905 - DNA, 521 bp, Homo sapiens
aattttggcagtgattcctccctagatgatgcacttagacaagaggagacagaaaaataccattctcagcagccacgtctctttctcttaatgaatctgcacacttgattccttttttttttttttttttttgagatggagtcttgctctgtggtccaggctggagtgcagtggygcaacctcagctcactacaacctctacctcctgggttcaagtgattctcctgcctcagcctcctgagtagctgggactacaggtgcccgccaccattcctggctaattttgtgtattcttagtagagacagggtttcaccgtgttagccaggctggtctcgatctcctgacctcgtgatctgcccacctcggcctcccaataattctttttaaccactttcgtgtgtgtgtcagttctctctggtttgggttaattttgtccctcacccaaaatgcagacactaaatagtcattctgaaataaaactttaggctaaacagaccaagactttattaaaagcctgctg

SEQ ID NO: 248906 - DNA, 521 bp, Homo sapiens
aattttggcagtgattcctccctagatgatgcacttagacaagaggagacagaaaaataccattctcagcagccacgtctctttctcttaatgaatctgcacacttgattccttttttttttttttttttttgagatggagtcttgctctgtggtccaggctggagtgcagtggtgcaacctcagctcactacaacctctacctcctgggttcaagtgattctcctgcctcagcctcctgagtagctgggactacaggygcccgccaccattcctggctaattttgtgtattcttagtagagacagggtttcaccgtgttagccaggctggtctcgatctcctgacctcgtgatctgcccacctcggcctcccaataattctttttaaccactttcgtgtgtgtgtcagttctctctggtttgggttaattttgtccctcacccaaaatgcagacactaaatagtcattctgaaataaaactttaggctaaacagaccaagactttattaaaagcctgctg

SEQ ID NO: 248907 - DNA, 541 bp, Homo sapiens
acgtggtccccagattcccctggctgacattccacagctccaggtccagcagaaggtgagactgtgctctcccaccactcaaccaagtcccgtgatgtgtctcgctagaccaagcttaatcacttccattctcctgaaccaatagctgtggccagtacctgctcaattgtttgactggcaaagcctgggccacgagtccacttctggagccaggggtgaggaactgtcaccagcagtagatgctgattaggaaaagaataccctcagtcacactctgcttattcatcttcattcattcattttgcagagatgaactgaggacttatttgtgctagaaactagagacagaatcccagataacttctgctcttccttcacaatgtcactcaggagtcatcagttctatgatkaatttgttcatttccgccccctcggcagagtcagttattccctccttgatgctcttgctcttcgcaggattatgttgctatctccccatctttctccctaacttactgtgagctcctggaggacaggtatt

SEQ ID NO: 248908 - DNA, 583 bp, Homo sapiens
aacagacatttttccagagaagacataaaaatggttaacatggatataaaaaaagtgatcaatattattaatcttcaagaaaatgcaaatgaaaaccttgtaaggtaccacctgacacccattaggatggctattatcaaaaagtcaaatgataacaaatactggcaagaaaatgtggagaaaagggaacccttgtacacttttggtgggactgttgagtggtacagctattatggaaaacagtaaagagacttctacagaaattaaaaatataaccaccacataacctagtaattcctcttctgggcatatccccaaagcaaatgaaatcaccatctcataaagatacctgcactcccatgttcattgcgcattattcaaacagtcaaaatgtggaaacaacccaagtgttcatcaatgaatggattaaaaaaatgtggtatatatagacaccatggaatattactcagccttagataaggagatcttgccatttgccacaacaaggatgaatctgaaagatataacgcyaagtgaaataagccagacacagaaagaaaaatcctgcatgatctcactcata

SEQ ID NO: 248909 - DNA, 362 bp, Homo sapiens
gctgcaatctagtcctgcctcttatctgccatttttctcccatctcgcaaatatttctttatgctgcattgtaatccttccctgttaccctcctgacccctcacgctcaggyaaccactcatctgtttcctatcactgtagattagtttgcattttcaggagttttgtataaatggaaacatacaaggtacttattttctagtcttgctttttttactcagcacagctattttgaaacctatcagtactgtttcctgtatcaatagtttactcccatttattgataattagtattccactgtatgtacatatgacaatttgtttatccatccacctgttgatgaactttggggctgtttcca

SEQ ID NO: 248910 - DNA, 362 bp, Homo sapiens
gctgcaatctagtcctgcctcttatctgccatttttctcccatctcgcaaatatttctttatgctgcattgtaatccttccctgttaccctcctgacccctcacgctcaggcaaccactcatctgtttcctatcactgtagattagtttgcattttcaggagttttgtataaatggaaacatrcaaggtacttattttctagtcttgctttttttactcagcacagctattttgaaacctatcagtactgtttcctgtatcaatagtttactcccatttattgataattagtattccactgtatgtacatatgacaatttgtttatccatccacctgttgatgaactttggggctgtttcca

SEQ ID NO: 248911 - DNA, 569 bp, Homo sapiens
cctgacccctcacgctcaggcaaccactcatctgtttcctatcactgtagattagtttgcattttcaggagttttgtataaatggaaacatacaaggtacttattttctagtcttgctttttttactcagcacagctattttgaaacctatcagtactgtttcctgtatcaatagtttactcccatttattgataattagtattccactgtatgtacatatgacaatttgtttatccatccacctgttgatgaactttggggctgtttccagtttggggatattacaaatgaagctgctatgaacattcatgttcaggtccttatatgaacatatgcttttatgtcttggggaaaaacttaggaataaaatagcttaatatttaagttatatatttgactttttaagaacatgccaaakgttttcctgaagtgattgtagcattttgcattttgcaacaagagtgtgtgacagttccagttcctctacattcttggcaacacttaacaaggtttagtcttcttaattttagtcattctaataggggtatatcaattatgggtttaattt

SEQ ID NO: 248912 - DNA, 582 bp, Homo sapiens
cttaggacccaacaatctatgactctaggataagtggattgtgaaggattttgaagcagtgattttttccccctttaaccataaagttataaattgcctgagcgtatgtgtgttatttgatgatgctatctagttctatatctgaaaaagctaaatggaaaattgctggcttcttycaggctgtgtgttctattaattaacctgcatgtggtgttgagtagtgaatggcaacctatattttcattagtgtcagttcttcttctaacaaaatatccaatttccaaaatgacagataaacacaggacctgtctaggcctaacacttgcatgcctagcacttgataacacccaggacaggaagagagtctgtatgggggaatggaatgcatgtataatattgctcttctggctgaaattgaccagccacagcctaaaatgaaacctatttagtctatgtatttgtatatattgtatttttgtatctcacagggcacaaattatgcctttgcaaacataattatagatagttttctctagacatgaatatgtaaataattgcagaaaactgaaggaaaatattagc

SEQ ID NO: 248913 - DNA, 548 bp, Homo sapiens
ggctcttatgtccaggaagattctaagcatgaaaaataatccagaagtctcaaagggaaaagactagtgtacctctcttacaatgaaaatttctgtatcaaaaacaaactcaaaagaaatcaaagtatgaaaaatgtttgtgcccatgactgattgccagtttacatgaagaaattgtgtaaattgatatgaaatggtgaatgcaccaatagaaaaatgggcaaaaggtgcaaayagcatgacataaggaaaaaatagccaacaaaacatgaaatgatatgtcattgcaattataaaaaaaaaaaaaaagtggccaggcacagtggtcacacttgtgattgcagcactgtgggagactgaggcaggaggattgcttgagcccaggagtttgagcctagatgacatagtgagacctcatctctacaaaatttctaaaaattacccaggcatggtggcacatgcctgtggtcccagctactcaggaggctgaggtgagaggatcgcctgagctggggagatctagtctgcagtgagctataatggtgcca

SEQ ID NO: 248914 - DNA, 548 bp, Homo sapiens
ggctcttatgtccaggaagattctaagcatgaaaaataatccagaagtctcaaagggaaaagactagtgtacctctcttacaatgaaaatttctgtatcaaaaacaaactcaaaagaaatcaaagtatgaaaaatgtttgtgcccatgactgattgccagtttacatgaagaaattgtgtaaattgatatgaaatggtgaatgcaccaatagaaaaatgggcaaaaggtgcaaatagcatgacataaggaaaaaatagccaacaaaacatgaaatgatatgtcattgcaattataaaaaaaaaaaaaaagtggccaggcacagtggtcacacttgtgattgcagcactgtgggagactgaggcaggaggwttgcttgagcccaggagtttgagcctagatgacatagtgagacctcatctctacaaaatttctaaaaattacccaggcatggtggcacatgcctgtggtcccagctactcaggaggctgaggtgagaggatcgcctgagctggggagatctagtctgcagtgagctataatggtgcca

SEQ ID NO: 248915 - DNA, 521 bp, Homo sapiens
atggtgatttatgcctagttgttaaggaagaaccagtaagtaaggaaacatttattccaagtgtgtttctcatgttaatgagttaagaaattttacataaaagtcattgagggaaaaaacttgctttgttgtgattacttctttgaattttgtttaccataattgcaggaaacctargtaattttttatttttaaggcatgtgcacaataagcataataggaagtatagcattaatttaattctaagtttttaaagtgagatggcttcactatgtgtttttttttttttcaagagctctacctctgttttgaaatgtcattagtttggatatgttaccaggatgcagcaaagaagagtatgtggcaatattatcttcttgatgtatttcctttccatttgaattctcactgattctatttttaatctttactttttttctctttgaaaatgcttattaagggaaaatagatttcactaaaatttaaaataagactcgtgtttattaaatttaaaatatttt

SEQ ID NO: 248916 - DNA, 457 bp, Homo sapiens
gttttaatacatatctctgggcctatcaaaatactcccattgaaaataagagtcatcagttgatcagtttcttactcatgtagtgtatgggaatggtagatagttccagattgatcaatggcaaatgccctgctcttcttgtttgacaaacaaattctccttctgtacacaagaatgacctattggccctcatsatatttatatagcacgtacctttggacacatttcagtgactcagggtatttcgagcataaatatcccataattggttgaaatttctctcatactttttttttttttgtagagacaggagtcttgctatgttgcccaggctggtctcaaactcctggcctcaagctatcctcctgccatggcttcccaaagggctgggattgtaggcgtgagctgccatgcccaactttcactaatactttctagttcacaataatatatttca

SEQ ID NO: 248917 - DNA, 457 bp, Homo sapiens
gttttaatacatatctctgggcctatcaaaatactcccattgaaaataagagtcatcagttgatcagtttcttactcatgtagtgtatgggaatggtagatagttccagattgatcaatggcaaatgccctgctcttcttgtttgacaaacaaattctccttctgtacacaagaatgacctattggccctcatgatatttatatagcacgtacctttggacacatttcagtgactcagggtatttcgagcataaatatcccataattggttsaaatttctctcatactttttttttttttgtagagacaggagtcttgctatgttgcccaggctggtctcaaactcctggcctcaagctatcctcctgccatggcttcccaaagggctgggattgtaggcgtgagctgccatgcccaactttcactaatactttctagttcacaataatatatttca

SEQ ID NO: 248918 - DNA, 561 bp, Homo sapiens
agacaggatttaagagattgtttggctgaggagtagagtggggtaagggataaagcagacaaattaaaacagtgcccaaacttccatgttargcaatattataataatacaggaatatagaatcaggaagatgcttggggaaagataatttaattttagacatgcagtatttgggaggctctgggacatctaagcaggtgtgttggacagttggacagagaaatgtgggatccaaagaatgtcctgcagaaatgtgtagagtaacaagagaagactcaacctgaaaaataagcaaaatttaggagactaaagaaggaaactgagactggaagtgcttttgtcaatgcagttattagaaaacgtctttaagatagctctggtaagaaaggaaaggatctggagtaaagtatttgggcttaagctttggctgtcctattaacaccatgactttggaagttaccccatcttagccaactgtaaaatgggaataataatactaatattcattttatggggttaaggataaaataactgtcaaccttctatatatagagtcatgtg

SEQ ID NO: 248919 - DNA, 465 bp, Homo sapiens
gctgcccttgttttccaagaagctcaaggactattccgagaaatcatttaaaagaatattagatgtaaagggacataaatttttaacaaaccaacatccacttttactgacatgtaacccggggcccatgacttccgcatgctcacacagaccgaatgggacaggacaggaccttaaatatcgctctgtcactgaaatcactgaccatcaattaacgaatttcatccactccctgggcactcaagaccmattaagtgccacccgtgcacggtctctgaaaatggtaaaatgccttaagatattttactttcttgccactactgtgagattccttctttcgaggtgaaatcacaccctaagtagcgcttccttttccccatctcagcttgggcaggaaactctacgacctcagtaccgccgcacctccgccctgtcgcgggagcccctgcaaatgcgtccgtggct

SEQ ID NO: 248920 - DNA, 580 bp, Homo sapiens
agcattctttctgtgtactcaagttaattggtgcagtaatttaatcattgagcctctgttcacatttcatgtgtaagtcacttaaacttttttttttttgcttttttagaatgtctaggttgatgagcatttaaataaatttgtagcatttaaaaatgtcctcaaaactgattgcagcatgacatccctcagattttgtattcagttttagtttagttaytttgaagctttcagatgaaaaaaacacctaaatttaatattctgcaacaggtttttccatcactatgctgaagcccagaggaacgcagtgtattttttgagttttagtcttcaattttttccttagggtatttttgaccccagatactttttcctttaaatttgactgagctgtgatcatgactctgacctctagccttgaaagaagaggagttatacctctcaggagcgatgcctcaggcactttgcaagtcggctggcagggattatttcctaggctgtgaagtgatgaccttctatggagagtgaaagtctgcaatgcaggtaaattccttcagccaggattgagagccttaggttt

SEQ ID NO: 248921 - DNA, 580 bp, Homo sapiens
agcattctttctgtgtactcaagttaattggtgcagtaatttaatcattgagcctctgttcacatttcatgtgtaagtcacttaaacttttttttttttgcttttttagaatgtctaggttgatgagcatttaaataaatttgtagcatttaaaaatgtcctcaaaactgattgcagcatgacatccctcagattttgtattcagttttagtttagttactttgaagctttcagatgaaaaaaacacctaaatttaatattctgcaacaggtttttccatcactatgctgaagcccagaggaacgcagtgtattttttgagttttagtcttcaattttttccttaggrtatttttgaccccagatactttttcctttaaatttgactgagctgtgatcatgactctgacctctagccttgaaagaagaggagttatacctctcaggagcgatgcctcaggcactttgcaagtcggctggcagggattatttcctaggctgtgaagtgatgaccttctatggagagtgaaagtctgcaatgcaggtaaattccttcagccaggattgagagccttaggttt

SEQ ID NO: 248922 - DNA, 547 bp, Homo sapiens
tcactgaaggccatgtgaaatacttggaaagccaggataaggaactattaccagacacaaaatgtcactacagatatcttataaaatattccattttgttctacttaaaaagttatctgcaatgggtgaaaacatttccaatttaaatcacacacaatttttctggtaataggaccatcaatgtggtacttcttgtgtaggactaggccctttggtctagaataaaatttcaacagtgattcattcattcatytattctttcaaaaatggataagggcttcttaaagtgtggtaaataatactggaaggtacaacttagtcaaattctatgttaaatatttctgtttgcagagttgaaacaaaatggagaaagtttctcaaaatataactaattgtcctaaattcaactgtttaagatccagtagataaagcataatctacctatgttatgtctcactattctctttcgcttggcttcttgtttttgtttgtttgttttttagcaaaggaaatctgtgatatatttggatgcagatttatttaaaag

SEQ ID NO: 248923 - DNA, 547 bp, Homo sapiens
tcactgaaggccatgtgaaatacttggaaagccaggataaggaactattaccagacacaaaatgtcactacagatatcttataaaatattccattttgttctacttaaaaagttatctgcaatgggtgaaaacatttccaatttaaatcacacacaatttttctggtaataggaccatcaatgtggtacttcttgtgtaggactaggccctttggtctagaataaaatttcaacagtgattcattcattcatctattctttcaaaaatggataagggcttcttaaagtgtggtaaataatactggaaggtacaacttagtcaaattctatgttaaatatttctgtttgcagagttgaaacaaaatggagaaagtttctcaaaatataactaattgtcctaaattcaactgtttaagatccagtagataaagcataatctacctatgttatgtctcactattctctttcgcttggcttcttktttttgtttgtttgttttttagcaaaggaaatctgtgatatatttggatgcagatttatttaaaag

SEQ ID NO: 248924 - DNA, 537 bp, Homo sapiens
ttgactcttttctcttgaaaattatggatttttgtcaccttcatcttatattagggctaggatactttgttttttatttctttaaatttaaaagctccaagtttttgaatatgtcaaatttatttaaatgaaactgaatcttgtgattctttcttgacattttcaaatatgattcaaatttgggaaaattttttttgccagctagtaaatgattgctgaaatcatgaattgaaatttctctatttaaatggaatgccatatttataaaagtaatagcttgcaagagattgtcagtggcattcaaatcagaatctaaaatatatttctttcattaaatatttgcacaaagttgttatatatttatataggtcattccctgggaygttttatacattgtcatttaaaaatattcattcttaaagagatacaatagaaacatgctttatgtatacattccaggtgcatgcttgtatagtactgtgctgtatccattatctgcttttgaggctgtagctgttatttatagtgttacagtta

SEQ ID NO: 248925 - DNA, 630 bp, Homo sapiens
  misc_feature (1)...(630): n = A,T,C or G
tgaattttgttatcattgtgagatcaaataactgagaaaaataggtttgttttatccttgtttctggtttattccataaccagaaaaaaaaatgtgaatacttaaaattagaaagataaggtagtttgaatcctgttaaaatttgctggaaaaatgtcacagcaacatttatttctattgatgaaaaggtagttatgtattttgaaattttgtggcaaactttaagaaagctcttataaagcaaaactactctgattcaccagggtaaccaattttagaaagcttaaattgctcttgacatttatggaaataatttcaaaaatgctctttagttataatttgtttcagagaccrtaatttgttgcnattctcttctttcatttcatagaaaaggaaactggacaagcaaggaatttttgttttcattgaggtatttgatttttcacaacttttgtgtcattttaccagaaacaataaagactttttaggaagtcatatcaacaactgttttatgttcttggattttaatagttcttctgtacatgtgtttcaataacttacatatggcttatttaaatatttgtatatttataggttcatatatcatctagatatcagataatagcagag

SEQ ID NO: 248926 - DNA, 583 bp, Homo sapiens
gttgcatggcggattttgaagggcctggaaatttatgctcaatagcttgggactcctgggttactcggctttcaaacaaccctcatgaytagtttcctaaatggttgttggtgctagtggatttaatatttaatgtctttgaatatacatttgaatgctttgaaactccaaattattgaaaattagtaattatctaagttttattcccccaaacttttgtagctcaggatacattttaacaggagttatttgctattctcattaacaaagcatattgttttatattttaaatttactcacacttacacagtagatttcagttgtcaataatcattattgtaaaagaatccatacaagatgaagtactggtagtattcacttggcaactttatatcacattttccagggtttatgaaatataaacgggattttagacagtgtacatggctgcattataagagagatgaattttaggagtttagattttttaaaaatataattgtagacaaagaatatttttggagctgttaataaccttaatgtttttaagtatatatttgctgtcatttcatctgacacattg

SEQ ID NO: 248927 - DNA, 564 bp, Homo sapiens
ttgccacctaccagttgtcacgtgctagagatataaaaatgaataaactcagttcctgccttcaagaaattcataagggtggtctattgggaaagaatgccattcaaacagtttacattatcatgtgataaatcgcagtacctaatgatgtactatggtaaggagggaattatttctgataatgggagctaaatgcataatcattgagatatgagaaggttatagtgcggaagaagttaaaagtagtgttgcatggcggattttgaagggcctggaaatttatgctcaatagcttgggactcctgggttactcggctttcaaacaaccctcatgactagtttcytaaatggttgttggtgctagtggatttaatatttaatgtctttgaatatacatttgaatgctttgaaactccaaattattgaaaattagtaattatctaagttttattcccccaaacttttgtagctcaggatacattttaacaggagttatttgctattctcattaacaaagcatattgttttatattttaaatttactcacacttacacagtagattt

SEQ ID NO: 248928 - DNA, 531 bp, Homo sapiens
tccagttatcatgtgtgtgtcttctttggtgagatgtcttttcagatcttttgcscattttaaaattgggttgttttcttttcttttctttttttctttctttcttttttttttttattctaagagttgtttgtacatttcagataccggcaaagattctctcctaacatgtggcttgtctttcattttcttaacactctgtttcataaaggtttacaatgttaatgaagtccagcatctcaattttttctttcatggatcatgattttggtgttgtacctaagaaatcattgccaaatccaatttcatataggttttcctatatgttattttctagaagttttatagtttgtgttttacatttaggtctttgatctattttgagttaatttttgtgaagtgtgtaaagcctgtgctagattcttcttgttttttacatgtgcatgtccagtacttccaacaccatttgtagaaaaccccatgttttctccttttatttgcctttcctcctttctaaaaaatcaattgatt

SEQ ID NO: 248929 - DNA, 588 bp, Homo sapiens
cccttgtttacctaagtcacttttggaagcccaagaatctcagttcatacattatcacctgggctcatgtcccataaaccttgaatatcccctaatatgaccacagcattcactcccaccccatattccaaactctttcactgtgctctgtttatcatcaaaatctaacctctctggtatcttcaactgtcttctcatcattcccttcaccttttttctttaactgaaatctggtcatccttgaaaacactgattactttctagttctttccattaatggctatttttattaaccctctttyggtttcattgttccttcagacaaccgtatctccctgtcccccacaaaagacaagatcctctgaagtccatcgtcctttcttgggaatctaccagcctccccctcattcactgaagagttgagcatctagatcactcttcatttttggagacttcaatatccatgaggatgaccacgcctgagaccactgagctcctagacctcacttttcctggccccactttagtccatgtcataccacagactttgaattactaacagttataccaccttcaagataaggactt

SEQ ID NO: 248930 - DNA, 442 bp, Homo sapiens
gccacagtgaacatgggaatgcagatatctctttgagatagtgattttatttcctttgcatcaatacctagaagtgagattcctgcatcatatggtagttctctttttaattttttgaggactttttctgctattttccacagtggctacaacattttgcrttcccaccctcagtgtgcaaatgttccaatttccccacatcctcaccaacatttgttgtctattgtttttttaatagtagtcattctggtaggtgtgtggtgatatctcattaaggttttgatttgcatttccatgataactagtaacattgagtattttttcatatacctattggacatttgtatgtcttcttgggagaaattccctagcctattttgaatcaggctgttagtgtgttttgctattaatttgtatgagttttttctatgtttggagatta

SEQ ID NO: 248931 - DNA, 387 bp, Homo sapiens
aacctgcactcctctgttttatattaaaatacattcctatgagaagcttgtgaacctgagcatgaggcaccagagcttgtgtaaaaaacagtggacaaaaatatctcaaattctattttaaactacatctgagattatttrttaagaaagaagaataggcaacaagtgaatacttatatcataaagattgatgaaccaggtgtcaaaaaggacattttaaaaaagttaagtttaaaattggaatggattatttatacatttattttaaatgtttttaacttaaaatgatttttatttatacttataaatttttacataaaatgcttataattatataaatacttatatagagaataaattctcttcaacaggaaaaagaacagcatc

SEQ ID NO: 248932 - DNA, 387 bp, Homo sapiens
aacctgcactcctctgttttatattaaaatacattcctatgagaagcttgtgaacctgagcatgaggcaccagagcttgtgtaaaaaacagtggacaaaaatatctcaaattctattttaaactacatctgagattatttattaagaaagaagaataggcaacaagtgaatacttatatcataaagattgatgaaccaggtgtcaaaaaggacattttwaaaaagttaagtttaaaattggaatggattatttatacatttattttaaatgtttttaacttaaaatgatttttatttatacttataaatttttacataaaatgcttataattatataaatacttatatagagaataaattctcttcaacaggaaaaagaacagcatc

SEQ ID NO: 248933 - DNA, 600 bp, Homo sapiens
acaataacagtttatagactgatggactgccttccagaactggactttattctttaaataacatcttcatgccaagagccattctgtttatacccctttcaattttataattttatattttatagcccctttgaattgactacattttaatttctgcaaaaagggatatagagcagagaaagttacataataatgcattgataacagattctaagaataatgggtcctaatagtccatatctgaatatttttatttagatttttattagttataatacatatcattaatgcagaagtatataaatagtaactatagaccaagcttcaaaatcattttatatgtttttatcttcctagttttatagacagtcctgtgataaagaagaaagtacataaactaagcagttcattttttacatacttagaaaatcrttgaattggacttacatactgtggtattcaagatttcccattttttacagccttttcttcttttcctcatcattttggggagttgtgggtcttcagttttcactgccctttgaaaacatcaaataaatttgaaattattttcccatcagaatttaggtttagtcaaat

SEQ ID NO: 248934 - DNA, 398 bp, Homo sapiens
cctgtctttactttaatctcttaatcctgtcatttttgtaagctgaggaggatgtatgtcrcctcaggaccctgtgatgattgcgttaactgcacaaattgtttgtaaagcatgtgtgtttgaacaatatgaaatctgggcaccttgaaaaaagaacaggataacagcaatgttcagggaacaagagagataaccttaaactctgaccgccggtgagccgggtggaacagagccatatttctcttctttcaaaagcaaatgggagaaatatcgctgaattctttttctcagcaaggacatccctgagaaagagaatgcatccctgagggtagacctctaaaatggcccccttgggtgcggccgtcttctatggttgaaactgtagggatgaaataagc

SEQ ID NO: 248935 - DNA, 582 bp, Homo sapiens
ataaccttaaactctgaccgccggtgagccgggtggaacagagccatatttctcttctttcaaaagcaaatgggagaaatatcgctgaattctttttctcagcaaggacatccctgagaaagagaatgcatccctgagggtagacctctaaaatggcccccttgggtgcggccgtcttctatggttgaaactgtagggatgaaataagccccagtctcccatagcactcccaggcttattaggatgaggaaattcccrcctaataaattttggtcagaccagttgtctgcttcaaaccctgtctcctgataagatgttatcaatgacaatgcgtgcctgaaacttcattaacaattttaatttcgccccggtcctgtggtcctgtgatcttgccctgcctccatttgcctcatgatatcttattaccttgtgaagcatgtgatctctgtgacccacaccctattaatacactccctccccttttgaaaatcactaataaaaacttgctggttttatggctcagggggcatcacagaacctgccaacatgtgatgtctctcccagacacccagctttaaaatt

SEQ ID NO: 248936 - DNA, 532 bp, Homo sapiens
gagcaatgtagcaacaccaaagaaagttttggactattaaataatttgatatttgatttttcaaaamattttaaaatagtcactgttagaaaaagtagaatattgttgaacttcctcacacatggtttagaatttgtcattttaatttcacatggagacaccaaaattattttaaagcttttctacaatgatttcataatatttacatattttctatctctaaaactattttacactgtctcttctccaacctcctatctgtcctcctctttccacactctcaacgatgggcttgacacattcctcataggaaacagaagctgaatgaaactctttctgctttccaatactaattaattattaattaatacaaactgatttcgttgaatttatatcatagtctatgaaatctcttttattttgtggaaaaagtaaatgtacctgaaccattttaatgcaattatcctctcctctcctgcaatatccatttctgtctttcactgcatcactccatctaccatcacatgtcact

SEQ ID NO: 248937 - DNA, 508 bp, Homo sapiens
aaacttagaggctcttcctgacatgcttcatgaacagcccctttcctctttcactttattatggaatgataaattaaaattgggaaaatccagtgtacttaacaacagagatagcctttgaatttggcactgtgcactgtgggcttaaagttccgagctgaacttgatgtaaaaatgtaaatataatgtacatttcaaggagtttactgtttagcacaggaattctcaaatttgaatgtggttgagaatcactgagcaacttgctgaaaatgtagattttgaccttcactttagagatttggagtctgattggtgatccaggtgtatgcaattttaatgagtgcccactctcccacacccttatacacacaccaagcgattttgattagaaatcccactgaagcagatccaattgaataggtagaatggaacttcattcaaaaaatctttgaaagccttaagattttaggstagggctgccctgaggaaacttgctatgaattgtttc

SEQ ID NO: 248938 - DNA, 529 bp, Homo sapiens
ttgagtacaggtgattgtaatctgacttgctctctgggatacattaaagtttcctctccttctaatgcttcaacatgaataacagcttgaaaaagctcagaaacaacagaatgggaattacagtactgttggtcttctgaattcttactatggtagtatatttgcccattttcatgctgctaataaggatgtacccaagactggataatttataaaggaaaagaggcttaatggtctcagagttccacatggttggggaggtctcgcaatcatggcagaaggtgaaaggcacatcttacatggtggcaggtaaaggtagaatgagagccaagcgaaaggggaaaccccttataaaaccatcaaatcttgtgagacttattcactaccacgagaacagtatgggggaaaccacccccrtgatgtaattatctcccactgcgtccctcccacaacatgtgggaattatgggagctataattcaaaatgagatttgggtggggacacagccaaaccatatcattcaacccct

SEQ ID NO: 248939 - DNA, 621 bp, Homo sapiens
tcatgagaactcactcgctatcacgagaacagcatgagggtaactgccctcatgatttgattaccaggcccctcccacaacacgtgaggaatatgggaattacaattcaagatgagttttggatggggacacagccaaaccatatcatcttataagtaaagtaatacattttctggtactttcattcaatattcatttcatcttaaataaatccagagaaattcaacaaaaattcacaattcagtcactggcttaagccacatatcttatttatgtggaataagccagatttacataagcaaatccaaatttctagcttagtattatattctattacatggaacactgcatatttggaatgagcaatttttaaatagattttagccaatctattaatactctgtcactaatggtttttactgtatcagtcccattggttactgagttaacttggttttattttttcttgttttarttcattttcaatttagtcccattggagaccatacaaaaacacaaaaatgttaatgtttttatgctgaaaactacattgatgagaatgctagaaggtgtatgttattcttcatccagtgcctgatgttaggtcacttataaaataaa

SEQ ID NO: 248940 - DNA, 515 bp, Homo sapiens
aggtaatcttccctgaagtcaggttgwctcttctccaaagtcaggccatattcctctctaccaactgagtctggggcctttacaggcacaggatggagtgtgcatgatgattgttttgtgagtatgcaaaaaagcttaaagtgaaagcaccatttaaaggtgggtagggcagtgtagaaagccaattagaaaaggttaggtgtatgtaaaataggtgaagagtggggatcagaggaaagcaagccaaataggaggacaagttctcaatccggtgcttgtagtttagctttcaggctttaaactgtctttggcttggaggtgggttttcaaagggtacctgcccctacctacctaggcacttggcttccttctgtccctatcaaattgacactggataaacttaagggtatggatggaagagccaggcatttgatcaggatcaagacataaactaaaatttctagtggccatgttactggatctgtgaaagtcctcaaatagcaacagactatctt

SEQ ID NO: 248941 - DNA, 621 bp, Homo sapiens
tgggcgtggatgggagaactaccagtcatcagtagaccaaaaaattcgcatggctcacaaagggttaggaacagtttgctgtcagcagctgtggagaagaggcccacccctcctgaggtattggatagattcctcagaaggatctaatcttagtagctgtgctaacttagctacaacataaagactgtagacacaccatggcaaagcttaagagcaagcctttaaaagggccaaactgattcacaatttacttgactacacattagaacaatatttagttttctttataagaatataatctatcacctaaaaaaacaaaattcaacaataaaaacttactaggcatgaaatatgccaggaaaacatgatccttaagcaggagaaaaatcaatcatagaatcagtcagaaatacagatgattgaattagttrgacaagaatctttaaacactattataaatcttacaaatacgtttaagaatttaaatatacaaagatgattaggagataaatgaaatttattttaaaagatccaaattgaacttccagaaaagaaaaaaacctgatctctgaaataaaataatgtactggataggattaaaagcatattagaataaaggag

SEQ ID NO: 248942 - DNA, 643 bp, Homo sapiens
tcactattttactataaaacttstagtggcttcacttagcccttcctttacctgaatgttctctccaaaaagtccctcaacttcttgttgttgctcaaattacatgttttcaatgaagcccactctaactaccgcccttgccccatgtatccactactttaagtcttgcttactctagttctacattttttcataacattcatcatttgtagcaaagtgacctacaaatatgtattcacctgtttagtatttaatatctgcatattctatttcactggggcaagaaaagtattgttttttcactggtataagaacctacaacattgcctcagatatgataacccttctataaatatttataaaatgaataaagcattcattttaaaaattgggtctcataattcacggttaaagcattttgactacagatttaattctttaaactgtgatggatacattcatttaacaatgtcttcatgagccagtttggatttttaagacatttgtctatttcatttagattgcaaattattggcatgaaaatttccataattttattgtctacaatatttataaaattcatatttccatcttttttctatgatcagtttcatcagatattactttctgctttctctctata

SEQ ID NO: 248943 - DNA, 643 bp, Homo sapiens
tcactattttactataaaacttgtrgtggcttcacttagcccttcctttacctgaatgttctctccaaaaagtccctcaacttcttgttgttgctcaaattacatgttttcaatgaagcccactctaactaccgcccttgccccatgtatccactactttaagtcttgcttactctagttctacattttttcataacattcatcatttgtagcaaagtgacctacaaatatgtattcacctgtttagtatttaatatctgcatattctatttcactggggcaagaaaagtattgttttttcactggtataagaacctacaacattgcctcagatatgataacccttctataaatatttataaaatgaataaagcattcattttaaaaattgggtctcataattcacggttaaagcattttgactacagatttaattctttaaactgtgatggatacattcatttaacaatgtcttcatgagccagtttggatttttaagacatttgtctatttcatttagattgcaaattattggcatgaaaatttccataattttattgtctacaatatttataaaattcatatttccatcttttttctatgatcagtttcatcagatattactttctgctttctctctata

SEQ ID NO: 248944 - DNA, 616 bp, Homo sapiens
caaatttaatttactgaaagagtcatacatttccatcatgagtctgtactgacactattaacctctgcagtcccctttgctaagcttattaggttgggagtaattacttttgcaccaacctaataattttacataagcgttcccgtatttttcatttgtacaatgtcacttcagcttgcaaaaaaataaggccatatagaaccgatccagtatataggtaggcaaggttctgcacaattccattttcattgatgtttaatagattaaatgttcattaatgaatggtggtaccttggttatattttcattgttctaatagttatacttcccgtttcactcagtaratatttattgagaatctactatgtatcttacaatgcgcaaacatttagggatacaatggtaaccaaggtaaatttcctttcttcatgaccatcaggcttaaagtgtgcataggcaagtaaacaggcccttagaaagtgagatgatttaaggtaaaatttgagtaggtactttgcacacaaaagggatatgtactctagttttggcactaagtattatttaaaataagcctgaaggaaaaagtcatagataaagaaggagcagttgtcagacc

SEQ ID NO: 248945 - DNA, 616 bp, Homo sapiens
caaatttaatttactgaaagagtcatacatttccatcatgagtctgtactgacactattaacctctgcagtcccctttgctaagcttattaggttgggagtaattacttttgcaccaacctaataattttacataagcgttcccgtatttttcatttgtacaatgtcacttcagcttgcaaaaaaataaggccatatagaaccgatccagtatataggtaggcaaggttctgcacaattccattttcattgatgtttaatagattaaatgttcattaatgaatggtggtaccttggttatattttcattgttctaatagttatacttcccgtttcactcagtagatatttattgagaatctactatgtatcttacaatgcgcaaayatttagggatacaatggtaaccaaggtaaatttcctttcttcatgaccatcaggcttaaagtgtgcataggcaagtaaacaggcccttagaaagtgagatgatttaaggtaaaatttgagtaggtactttgcacacaaaagggatatgtactctagttttggcactaagtattatttaaaataagcctgaaggaaaaagtcatagataaagaaggagcagttgtcagacc

SEQ ID NO: 248946 - DNA, 527 bp, Homo sapiens
tttagggcttttgaagtataactccaaaagtaactgaagccttctgatgtttttatatcattctgtgagcagaagtctcaaagtagagatacagatcacctgtaaacatkctagttaaggacagaaggaattaatctgaagttaattataaaagaaaaaaactacatttatatgccaagcttatgttatgggtttctccagatacatattgacatggttaggctttgtgttcccacccaaatctcatcttgacttgtaattcccataatcccaataatccccataggtcaagggagagaccaggtggaggtaattgaatcacaggccggggagagaccaggtggaggtaattgaatcacagggcggggagagatcaggtagaggtaattgaatcaagggagagaccaggcggaggtaattgaatcacaggggcggtttcccccatgctgttctcataataatgagtgagttctcatgtgatctgatggctttataaggggctcttcctccctttgcttggcacttct

SEQ ID NO: 248947 - DNA, 617 bp, Homo sapiens
attcacatcccattcaatgacatgtgtcattaactctttaggaattttgagccctttttaatctatgaaattgttcttctcaaatatcataagtcaattctgaaaatactattttatgatagtcatatcaaatatttcataaatgagattttacatgagataatacttgtgatacctgaaacatctgattaattttctcaggaaataatctatagctatacaggctcatctatattttaagctgctcagcagtcattttgaaatatcaagtaagcagagatataagtagttccttacaaatttagtcagtgtcatcgtatagawgtatatacgtacaattacacatgtatatgtgtacatcatatatatgtacaattgtatgtgtgcagacacacacacacatatgcttcgatagcttctagtttaataatcccatttgaaatatagtaccaaaaatattctgattcattttttcactcaaatatatcccccatcaaaaatgtaggcaatagagcccattcctattaaaacaatattgatatccagaatacaatatatttgctaatttctttcagtttccttaaattatgtaaagcactttttataatatgttttct

SEQ ID NO: 248948 - DNA, 527 bp, Homo sapiens
tttagggcttttgaagtataactccaaaagtaactgaagccttctgatgtttttatatcattctgtgagcagaagtctcaaagtagagatacagatcacctgtaaacattctagttaaggacagaaggaattaatctgaagttaattataaaagaaaaaaactacatttatatgccaagcttatgttatgggtttctccagatacatattgacatggttaggctttgtgttcccacccaaatctcatcttgacttgtaattcccataatcccaataatccccataggtcaagggagagaccaggtggaggtaattgaatcacaggccggggagagaccaggtggaggtaattgaatcacagggcggggagagaycaggtagaggtaattgaatcaagggagagaccaggcggaggtaattgaatcacaggggcggtttcccccatgctgttctcataataatgagtgagttctcatgtgatctgatggctttataaggggctcttcctccctttgcttggcacttct

SEQ ID NO: 248949 - DNA, 578 bp, Homo sapiens
agttgacttgcttgttgatatttaaaagtgaaactagaaacactatttcccacatcatctaatcragcacaaataattagcttcttcatttgaaaagtagtccttccttcagcttacttttgaagctggccatgaacttaagcatttcaatccattatacagtatctgattcttctcccatgagggaaaattcagtctgccatgttagtgccttgtcatcataatcatccaaagtattcattaagtctctgcatgcagcatttagttgcaccaaatgagttcaacatgtgggaaatggaatccaagaaagacaacatcaccttcatttcaaagtggtcatgtctagccatatggtgtggacaagagaacgaggagaaaagtggaaaatttagggacaaaagtttttcttccttctattcctctcagaattataaccttatgtttggaactttagaagcaaccactgttaaaggttaatgtttccttgagaatttagcacttccacttattttaccatgaaattctgtttccataatccttatgaggtcctccgattatgaattccagaggttagggct

SEQ ID NO: 248950 - DNA, 549 bp, Homo sapiens
gacttgtagaatctcacctaaaaaaactaaggtggaattagttaactacgtttaaaaataaaaataattataaatacaacaaattataacaaattcctgtccatacaggtaaaagtgggtacacaatggatatcttgctgctagtgaggaatctgccttttgagttcatttctcaaaatgttgataaatttttcccccagccatttgtttttatctttttgtccttgactaacatgccaaagttgctggctaatgttagtgtccacagagaaatcactggctccccacgtgttagctaaatgcagatgtactcasttaatgtcatctataagttcttggaaactataacttaaatgacatataacaaactctgttttacaataggctaattgatttgaccaacagttaagtttttatagcatatttctggtcacaaaacatcaccaaacttctaaacaaagacgcaaaaaacttctaatattacatattgaaataaatgtgagctgtatatacatttaagaaagattaatagaaacaataatataatta

SEQ ID NO: 248951 - DNA, 244 bp, Homo sapiens
gaagcacttcctatcaccatacatttcaaaactcaaatatggcaggctcactgatgctctcttactgtattgtctattgtgcatttgcatgattattgtctacataatgaatttttatttggcaatcatttgtattatttcattcatttatttttcaacctgctcattccagttcaggtttgtgttggcaggagtctatcccagcagctcagggcrcaaggtgggaacaaacttttcaaaagac

SEQ ID NO: 248952 - DNA, 573 bp, Homo sapiens
ctgctatgtgcagcctagagatttggtgccctgtgttcyagctgctccagtcctgtctaaaagagaccaaaatacagctcaggccattgcttcagagagcgcaagccccaagcattggcagcttccacatggtgttgagcttgaacatgcaagaagtcaagaattgaggtttaggaacctctgcctatattccagaggatgtatggaacacctagatgtcaaggcagaagtctgctgcaggggcagaactctcataaaaacaatctctgctagggcagtgcagaagggaaatgtggggttggggcccacacacaaagtccccactggggcactgcctagtggagctatgagaagagggccactacccgcaatggtagatccacctactgcttgcaccgagctcctggaaaagccacagacactcaacaccagcccatgaaaaaagccaggagggtggctgtaccctgcaaagccacagggacggagctgcccaaggccatgggagcccacctcttgcatcagcatgacctggatgtgagacatggcgtcaaaggatatcattttggattttta

SEQ ID NO: 248953 - DNA, 573 bp, Homo sapiens
ctgctatgtgcagcctagagatttggtgccctgtgttccagctgctccagtcctgtctaaaagagaccaaaatacagctcaggccattgcttcagagagcgcaagccccaagcattggcagcttccacatggtgttgagcttgaacatgcaagaagtcaagaattgaggtttaggaacctctgcctatattccagaggatgtatggaacacctagatgtcaaggcagaagtctgctgcaggggcagaactctcataaaaacwatctctgctagggcagtgcagaagggaaatgtggggttggggcccacacacaaagtccccactggggcactgcctagtggagctatgagaagagggccactacccgcaatggtagatccacctactgcttgcaccgagctcctggaaaagccacagacactcaacaccagcccatgaaaaaagccaggagggtggctgtaccctgcaaagccacagggacggagctgcccaaggccatgggagcccacctcttgcatcagcatgacctggatgtgagacatggcgtcaaaggatatcattttggattttta

SEQ ID NO: 248954 - DNA, 613 bp, Homo sapiens
aagaaagaaataggaaagacctaagagtccttggctcactgtagtactgaaatccatctgggcacatgtgtccagctctctctccttcaaacacaaggaatgttctttgactatggcccagttctgctacctggaagttgttcccttaatgcactgttctccacatctcttggcaagccatctgagaatatcttccttttcaatgagaaatagcycatgtttggactgggcagtcttctcagcctgctttctggctgtaggaagttggcatttcaggcctatttttcattttgaactgtcttgggccctgaagaggccaagttggtagtgctttggccaggacaagcctcttaaaaatgttatttttggaaataaatctctatgtcccaaaattaacatctgcaatccttactgagatttatctctctctacattgggtgtggtggcctgctgtgtaggacaatgttttaagattctcctgaccccttttgtccaagtaagagtgcataagcaatgcatccagccattcttatttctgaacaaatttttgttacaaccaaagctttgattttttaccttagtgtatttctttgagaaatttttgaagttttgg

SEQ ID NO: 248955 - DNA, 583 bp, Homo sapiens
ggctagtcaggaatacaatttggaatttcttataaagttaaacatatacttcccatatgatccagcaatgctactcctggatatttatcctagrgaagcgaaaacttatgttaaacaaaacccagtacacaaattattcatagcagctttatttctaataggcaaaaagtagaaacaacacaaacgtccttcaacaagtgaatgaataaacaaacaaactgtggtatatctatatacgcaaatactgctcagacaaaaaataaaaagaatgcatgtaacaacttgaatggatgtcaaaggtatcaggctgagagaaaaaaaaagtcaatttcaaaaagctacctaccatatgattcaatttatatgacattctcaatatgacacaattatagagatgtggaatggatcagtggttgccaggggttggggttggaggggagagggcatgagggagcttgtttggggtaaaggaataattctatatactgattgtatctactgctggttacaaatatctcaacatgtaacaacatttcttaaaacatttcatacatcaagaaaaaaagtgcatataaaaactggt

SEQ ID NO: 248956 - DNA, 530 bp, Homo sapiens
acccctgcagagctcaggcccttcccttgcacagcatgtctgctcctgcacactctctctcagagcaaggagcctgtagtgaagtcctgttgggaaccacagaggctttgtggctccctatcccggtacttcccccaacacctctctaggctgagatatgcagtgagtatttatcaaatgaataatcctggcccagggatgcaaacttccctcagagtrgcttccttgagactggagtggcagaatgaatggtgcatgcttgctgctcagagtggggaatatggagcagcagtggcagcagcacccgggagtttgttagatgcatggattcttaccccagacctactgaatccaaacttgcattttagtaagatacccaggtgaaataagcactgtgagtttgaagagcactggtctatgagaagttgcatatttcattaaaattgttccccctgggcaggcaccacagctgtcctctctcttgtacactcctttgggtgtgtgccaagcatagcaggtgcatagcacag

SEQ ID NO: 248957 - DNA, 575 bp, Homo sapiens
gatatatgaaataatgattaacaatatttacctctgggtcactggattatggtgaaatcaagatttttacctgaatttttgttacatgtatgcattattttacaatcaagatataatgcacttataaaaataaaaatcaaactcagataccacatgctcacaaataatgcattctttttcaatactgtcgtgyatgagaagttctaatacagtcttcaaactgtagcattctcttctgacaaaatacaaaatgtaaacatacacaacaaaaaaaccaaacatgttcacatgttcttaatttcaatgggtttttcaagggagggttgagctgctattgcttttgttaaaagcatttactgaaaaaaaataaaattaaaaaaaatttgagattcgaaggaaagattcttctagatgtatctacttttaaaaatgggttcctaatatattagggacaaaaaaattgtcttgctgacaattacatgtctttgcctttccttccaaggaaataaccacattgttaacctagaataccatgtaacacatcatgtttcttttcacatggatggaaaaatata

SEQ ID NO: 248958 - DNA, 599 bp, Homo sapiens
ctttacttacatatttgttactgcttgtgtctgctttttaaaaaaatataagtcagttttttgttattcactgatgtatgttttattcactttctagaaaggtcctgacatggaaaaaactcccagtaaatattgttaggacgaatgaatgaatgaatgccaaagtaataccactttaacatggtccattgacatcccaaattaatttatcctaatactctgctcaagttgcacaaaaatacacacattccctgttatgacttttcttgtctctgacttttatacctgctgctctcacttccttttacactcttattcattcttctctccagtcccacttctgtagtccttgtagctctccttaatgggttaaccatgctttgagacatagcatacatgctaactcctctaggaagaattttctgacatccattaaccacccaccactcctacctcccactaaagctaggtttgacacccacccacctgtaatgccagtaaaaccctacacttatccttaatgctataataactgsatagcaatcagttcttactgtgccaggtagctctgctaaacgttttaggtggatagttttatt

SEQ ID NO: 248959 - DNA, 606 bp, Homo sapiens
tatatttttctgaaatgccaatatttcatctgagatcatttcgcttatatctgaagcactttctataacttttgttgcagtgcaagtctgctaggggcaaattatattagttttatctcatcagcataggtatttgttttgatttcatttttgaagaacatattttttctatrtattattctcaattaacagctcttttccttcactacttttagatgttaatttactgccttccgtctgccacagtctctagtaaaatgttggcatcatttcattcattgttttcttttatgtaatgtttcatttttctctgattaatttcaagattttctttgtttaatttgcattagtttgactatgggtctagatagtatttttttatagtctgtctgtttgatgctgcctgatcttttttgaattaaaaaatttatatctctaactatataagaaaaaaatttcagccactctttcttcaactatattttttgcttcattttctatttcttctctttctgccaaatcatagacattttgatattgtcccatattgcttatattttctatcttgttactctttctaaagtatggatatttatttctgtcaat

SEQ ID NO: 248960 - DNA, 559 bp, Homo sapiens
gatgggtgcagcataaccaccatgacactgtatacctatgtaacaaaactgcatattctgcacatgtaacccagaacttgaagtattaataagaaaaaaaaacctttcaattgtcaacacagcctcatttcaaggagttaacagcaactccttggaaagaataatgaatatgcctttgtttctattgaactcactccatcaggctttcaccactgtcatgaacactgggttaactcttgtcactgtcaccatatagcaagttctccacattgctaaatccaatgcaagccttccagggctcatcttatttgatggactgcatttcttagggctgattcctccctgcctcaaaacccttgccttccatgaaatcagaataccctgactcttccccttcttcatcggacactcwgtctcaatctctttgaatggtttctcttccttaccccagcaattaaatgtagaagtgcctaacagtttcacttttcagtttcagctcttctttctctgcattctcttcttaggtgatcttgtatagtcttgggggctttttcatact

SEQ ID NO: 248961 - DNA, 567 bp, Homo sapiens
caacacctaccattaacgtgaatatttcaattaccccaagctcattaggctcttaaaaatgggagacctgatgagaatgtacccttttaaaaacttttaagggtctattttccatttgtatgtggggtttagattttgcccggatttctgtgtctggaatagctccccaagaaagtttaagaagtcagtgataacttcattaggtacatggsaagttcattgacttaattaatgaaattactattgagatctaaatttgaaagttaccaaatacttgacaggttatttgaattactacatttgcaagtcctaataagcatagtaattcttcacaaaagcatgaggagaatgatttgggagtttgggcttaaaattgataggtacagatgatataaagtaagtaaaaaaaaatagtattagaaatttcaacaacaatactgtcttccaggacattactcattcctgtattttttccataactggattctcctttccagaccatttgctcattcttttccatttccgcagcatccaaagtttcatgaccctcagttctcagaccgtgaa

SEQ ID NO: 248962 - DNA, 598 bp, Homo sapiens
gctgttcaaaacattggtttggcaatactttttcagagggaccccaagccaggcaacaaaaaatatgaaacacaagttaggctttataaaaataaaatgtgtgtatcaaaagacactaccaatagagtacacagtctacccacatgtgggcaaaaattttgcaatataatatatytgataaaggaattatagccaggatatacagagaaatcctaaaactcaacaccaaaaacaatcaattaaaaaactgggaacaatactgaaatagacatgtctccgagatacagagatggccaataagcccatgcaaatatgctcaacattgttatcattagggaaatgcaaatcaaaacaatgagataccactttttacccattagaatggccactatcaagaaaacaaaataacaagtgttgatgaggcatgtgagaaaattggaaactgtgcactgtaggtgggaatgttaaatagtgcagctgctttggaaaataatatgttagtttctaaacaataatgagaaaagtcttatatgatatagcatttccatttcttaagtatattattgaaaatgaactgagagctaaaatctcagaagat

SEQ ID NO: 248963 - DNA, 553 bp, Homo sapiens
aatttttcagaatttctggttttaagattttagttacattctgttgtggttgggaaaggtactttgtattatatctatcttttaaaattgatttagactaaatttgtagtttatcataggtatattcctggaaaatgtcctgtgtgcatttgagaagaatgtacatgccgaagttatgggtagagtgttstatatatgtctgttacatttggttggtttattgtgtcaagttctctatttccttacttatttgtgtgttctatccattgttgataatagagtattggagtctgcaactattattgtagaactgtctattttttttaatgctgtttatttttgtttcttatatttttatggtctgttactaaatgtgtagatattagataattgttatatattcttgcctttattaaaattgtcattcatagcaactgaaagaaaagacctaaatgtttaaaaaggaatagcctggtgtttattctaaatgctatattttaataaatgtagttatatattgtaaaaaatttttaaagtacaaaagatgaaatta

SEQ ID NO: 248964 - DNA, 564 bp, Homo sapiens
cttgcatgtgaatcttcatagtagyattattcataatagttttcataacagccaataagtggatacaaatcaatgtgtactgattggcttttgagatttgataataaggttaaaaagagatagttttttttaaaagataacataaaaaagaaaatcaaatgcaatctaaatattctagaacttcattaaaatggatataggatgaatgagagtaagaatatttttgcatattaacttctgggataaatggacctgcaaagaggtagatggaagaggacattctttgcaatggtgttgcttgttatgtaatgtaacttcccttagcactttttaaagtgacctaatggtaagtcttacattgctttacaagactagtttctaccttaaaatgtagacaagttgtttatatcagtctcagaggttttaatgagataatatacgtaaagtgattatcagatactattatattataatcacatattagtattcatttatattatcatcatcatatatactgtagcagaaacaacagacataagtctcatacagaatcttacaaaggga

SEQ ID NO: 248965 - DNA, 599 bp, Homo sapiens
tcttacattgctttacaagactagtttctaccttaaaatgtagacaagttgtttatatcagtctcagaggttttaatgagataatatacgtaaagtgattatcagatactattatattataatcacatattagtattcatttatattatcatcatcatatatactgtagcagaaacaacagacataagtctcatacagaatcttacaaagggatctgatctgtgatatttctgatacctttgtatcaaccataacctttgcaatccagaagtcaaactagttattgaatttcatggtattttctgacatagcacttgtcagaataaaataaaatataatgttgagacaaggatatagggacagtggaagtctccatgaggtgaacaaaaattaaatcctgcacattgccaggtagtccagcactagtccttccctggacattaattatccacaaggttgaatgcttattaggaccttcttgaaaagaactttttgtcaacatcagtggggtcgcataatgaacaaggactcytggacatttctcttatttttggcactgttactagattggaacctgtaagaattccaagaaaatgtgt

SEQ ID NO: 248966 - DNA, 496 bp, Homo sapiens
tttttcaaatgtagtgtgatttagttctggaaatgtcttctttgaagcctcagttaaaaggaattacctctcttttaagaccacatgtgagaaagtaaattatcattaaaaatcactacgataagcaggtaaaacaagagaaatgaaaaatagatgaatttaccatgaagaaacctaattaattacagcaactaacatttacacttttctcacagttctagacacaacacccttccaaaagtataggtgccaaatatttagcaatcgcatgttacataaattttggcatcccattcagaagacctaactcattctgctccacaatagtaaacmgccaatgtttatactttgttctcccaggacaaacatggaagactcaacagtgcttgatttgttacctagatcttaaatcctagatcttttcatgaaattggacaatagctagcttgactcccaattttgagccaaaattttgtaatagtattctaatatttta

SEQ ID NO: 248967 - DNA, 553 bp, Homo sapiens
aatttttcagaatttctggttttaagattttagttacattctgttgtggttgggaaaggtactttgtattatatctatcttttaaaattgatttagactaaatttgtagtttatcataggtatattcctggaaaatgtcctgtgtgcatttgagaagaatgtacatgccgaagttatgggtagagtgttctatatatgtctgttacatttggttggtttattgtgtcaagttctctatttccttacttatttgtgtgttctatccattgttgataatagagtattggagtctgcaactattattgtagaactgtctattttttttaatgctgtttatttttgtttcttatatttttatggtctgttactaaatgtgtagatattagataattgttatatattcttgcctttattaaaattgtcattcatagcaactgaaagaaaagacctaaatgtttaaaaaggaatagcctggtgtttattctaaatgctayattttaataaatgtagttatatattgtaaaaaatttttaaagtacaaaagatgaaatta

SEQ ID NO: 248968 - DNA, 671 bp, Homo sapiens
ttacttaacattaagtgccaactgtacataacttataactagcattaattctttgcccttgagaatcctatgtttaaaaataaaagttacaacattagaagagacagaaaagagatgaaaattcattagttcacatctcctattcattgaaatacgtatgaaatgcctgttacaagttaggaactgtgctagactctggcgatggctggggggaawtagcctggaaagcaagatctctgctttcatgcagcttatagtctggcaaaagaataaaaagtagaaataattttcatttatgtgcttttctctgtgctaaccattttgaatgtgtttatttaattatcatatcagtcagatgagacagatatcactattattcccatatcacaaataaggaagaggctgaaacttcattcagatactaaaaatacacttacatgattttcctatgtaaatttctgaacttctagggagcagggaacaggtcttaatacttctgtgtatgttcctcagtatccagcactatgctgggaacatagtagggtgaaactattgtctgactatggtgatggtagttgacctacaattcttttcttgttcttcagaaataggaaaaggaggaatatttatttcctgtgtaagagatatatagtcatattaaattctatgtt

SEQ ID NO: 248969 - DNA, 537 bp, Homo sapiens
aacttttaaataagaccatttgaagttgcaaacttctgggccacagctgagtctagtccacaaagctgttttgtttggcatatacagtatttaaaaattttgaattagttgccagcactttaaaaattggtatagttcacataaatattctgaattcaggcttttggaaaagttgtggacccaagaatactaggcccgcattttcttaygtcaacattctttccaggatgatgaatggactgttctctttggccccctttccatttatccactcttcccaccaaactgaattatccttccttaaaattgagatgcagagaattttagatatttcatatttaaatcatatggttctttttaaattgagtctggtaaaatatattaaaaaataatagttcattagtctacctaaattagttatttactatttcaggcactggcatgttagtcaacaggtggaagttatagacggagacagaatgcagcttaaaataagttaaaaccttgattttcattgtctgccttccaaaatagaga

SEQ ID NO: 248970 - DNA, 617 bp, Homo sapiens
gtgatttttaggtagaaaatagaagtgtgggggacagtaatatgaggattatcaaatttaagagtgactcagatccttgacacatacaaattcatctttgctcaatcaaaaacaagagaacttgaccagtgaaaccattttatccacctatctagccctaatgcaaaatcttgtgaaaaataaaactttagggaacataaaaagacagttaacctgtgttaagatatatatggaagcatgtgactattgacaagtatgaattgagtaaaagccagaagctgtgcaagtattttcataaagtgtttccattaaacccatcttcccatgagtaagggttggtttaagaaatttaggaagacctccccactttctagatatctctgtctgtctctktctcagactctctgtctctctctatttctctttcttctgacaagagtggccacatcaaaactgactgttttctaggaagtattttcttggaagctgaagacaagcctagaggagaagactgaatggactaagcctctcactctgtgcttttgtgagcataagtatctgaagagggacagagagcttcagcatttaaagtgggcaaggatattccccttgtcttg

SEQ ID NO: 248971 - DNA, 645 bp, Homo sapiens
gaataaacagtatgattaaataaagtttatttcaaacagaaacacacataaaacaggtcatatgttaactggttgataaaatattgtgaccagacgcttacaaaaatctaatcctatattttctcctgggagcagtggtttggtactctctaattcagggtctgtggtgacttcataaaatgtacctactggaaataataarcatcaattatatatatacatatgtgtatataatagatatatacatgtacataattgtctatgtgtaaatttaatgattactaatagaggttagtgccatttctttaatttgttctaaggcaccagcagtttattcatcgttgcctttgtaccatcagtacaaatgtcaaacactatagaaaataacatcttactatcactattaaaatactaaagatgtccctctcaggggttaaaaatgttttcattaccaaacagactactttaaagtacgaagttagtctgggtgaggtggcttacacctataatcctagcactttgggaggtcaaggtgggtggatgatttgaggtcaggagtttgagaccagcctggacaacatggtgaaaccccatctctggaaaaatacaaaaattagctgctgtggcagtgcatgcctgtaatcc

SEQ ID NO: 248972 - DNA, 645 bp, Homo sapiens
gaataaacagtatgattaaataaagtttatttcaaacagaaacacacataaaacaggtcatatgttaactggttgataaaatattgtgaccagacgcttacaaaaatctaatcctatattttctcctgggagcagtggtttggtactctctaattcagggtctgtggtgacttcataaaatgtacctactggaaataataaacatcaattatatatatacatatgtgtatataatagatatatacatgtacataattgtctatgtgtaaatttaatgattactaatagaggttagtgccatttctttaatttgttctaargcaccagcagtttattcatcgttgcctttgtaccatcagtacaaatgtcaaacactatagaaaataacatcttactatcactattaaaatactaaagatgtccctctcaggggttaaaaatgttttcattaccaaacagactactttaaagtacgaagttagtctgggtgaggtggcttacacctataatcctagcactttgggaggtcaaggtgggtggatgatttgaggtcaggagtttgagaccagcctggacaacatggtgaaaccccatctctggaaaaatacaaaaattagctgctgtggcagtgcatgcctgtaatcc

SEQ ID NO: 248973 - DNA, 645 bp, Homo sapiens
gaataaacagtatgattaaataaagtttatttcaaacagaaacacacataaaacaggtcatatgttaactggttgataaaatattgtgaccagacgcttacaaaaatctaatcctatattttctcctgggagcagtggtttggtactctctaattcagggtctgtggtgacttcataaaatgtacctactggaaataataaacatcaattatatatatacatatgtgtatataatagatatatacatgtacataattgtctatgtgtaaatttaatgattactaatagaggttagtgccatttctttaatttgttctaaggcaccagcagtttattcatcgttgcctttgtaccatcagtacaaatgtcaaacactatagaaaataacatcttactatcactattaaaatactaaagatgtccctctcaggggttaaaaatgttttcattaccaaacagactactttaaagtacgaagttagtctgggtgmggtggcttacacctataatcctagcactttgggaggtcaaggtgggtggatgatttgaggtcaggagtttgagaccagcctggacaacatggtgaaaccccatctctggaaaaatacaaaaattagctgctgtggcagtgcatgcctgtaatcc

SEQ ID NO: 248974 - DNA, 645 bp, Homo sapiens
gaataaacagtatgattaaataaagtttatttcaaacagaaacacacataaaacaggtcatatgttaactggttgataaaatattgtgaccagacgcttacaaaaatctaatcctatattttctcctgggagcagtggtttggtactctctaattcagggtctgtggtgacttcataaaatgtacctactggaaataataaacatcaattatatatatacatatgtgtatataatagatatatacatgtacataattgtctatgtgtaaatttaatgattactaatagaggttagtgccatttctttaatttgttctaaggcaccagcagtttattcatcgttgcctttgtaccatcagtacaaatgtcaaacactatagaaaataacatcttactatcactattaaaatactaaagatgtccctctcaggggttaaaaatgttttcattaccaaacagactactttaaagtacgaagttagtctgggtgaggtggcttacacctataatcctagcactttgggaggtcaaggtgggtggatgatttgaggtcaggagtttgagaccagcctggacaacayggtgaaaccccatctctggaaaaatacaaaaattagctgctgtggcagtgcatgcctgtaatcc

SEQ ID NO: 248975 - DNA, 534 bp, Homo sapiens
actgtgctccagcctgggcaacagagtgagtcactgtctttaaaaaataaattaataaaataaaaataaaagaattcttcaagcttggrggcagaaaatgaactcaaaacctctagtaatctataacccctccttaaaataaagagaaaaaattgtttgttgaaataatgaaatccagccaagaaatcaaaataaagacctcagctgtagagtagcccagatgaaacaacttggagtgagcattgatcaatttaaatatagtattaatcaaaattacatggggagttaggactggaaagtaaaataggagtattataaacctggataatgtataaaaaaaagcaactcataatatttcaagaaataagcaggtgccaataaatactggttaaaatttaaaggcagtttaaaaaataatgagaccaacctgttaaatgtttgacctcatttttcttaacattcaacatacttaaacagtgataaacatcttcatgggagccactgtgctagacactgggaatccagtatgaataa

SEQ ID NO: 248976 - DNA, 597 bp, Homo sapiens
ccaaaccatatcagggtgtttattattttcacctaagaagtcaggaggtggggctagtgtagttgtttaaggatgtcttcaagaacataggctccttctctatttctgttctcatccttagtgtgaggctttcaaggtcagggttacaaaacgacagctgcatctctgagcatcacatctgcattccagtcaagaaggcaagtgagagcaaagggcaaaagataaaagctccagtgtctagctgctttaaaggaggctcaggaagcgccatcagtgacttctgctcatctcattggccaggactgggtcacatgactcctttcagctgtaagggaggatgggaaataagtaatagaaacattattatactgaacaaaattagagttstgtttgaaagtaaaaatgggaaatgatattggatagcaccggacagagatgtgtatttgttcttgctgttttgtggctaaaaacaaaaatggtctctgggcagcttaagaaaaagacacagagacagctcacagaatgggtaaagcctcagaagggcggatatcagggaactctgggaactttgacagcagaaatccacgtgctttctct

SEQ ID NO: 248977 - DNA, 570 bp, Homo sapiens
attaaataagaaacaatatgaaaaccaaggtatgtaactatttgattccaactggaatggctacttgtaaggtggtaaaatacttaattactccttttaaaaagctgggacacgtaagtcaacttccctctttgaaaaaccagtttaaatatagagggatactttttataaaataattcctcctagaaaaactgatattagtgtacacagaatatttacttaataactcactattaaaaggaattatatttcttataaaactatttaaaagagaaatgaagtcattatttataagaataagacagttttcatctattgcccagtttaaatgttagaataaagtcagaacgcttaaaattatttagtaaataaggtctacaaaaatataaactttaatataaaacttgcttttgagagcagatgaatgagtagaaagcatgctgttcttatatatttatatatgygaatcatttatatttcctaagagataaattttaagcacattagaaatggcaacatcttgtcataattttttagataacatatattttggagttatattctgataat

SEQ ID NO: 248978 - DNA, 585 bp, Homo sapiens
acaaatcgcatgtcattttcactgccttcaggtactgcacaaaaactgaaaataataacaacaatatgattttctattaacactggactctgatttttttgcatgggggttagaaacacctcctgcttgtctttactaacagaaaaatctgttgattattctacttttattattcaatattctacttttattattcaataaagaataagactactaacttgaataatataaaactttctctaaatcatcattctactacaaacttttgactwcttggtatttttacacactaccatgttactccctcctggatgcttactcagcataagcttatttgatcctagccagggacagctgcagtatactggcttgagaatggcagaaaaagtaaaaggtaaaacctgagacctactgggtatacgaaatttccaagcccaagtttttctatgtgaaatttcttctaaatgtatacacagataaccatttaatcgattgatcatattgtattttaattttacatattagttgtagagaggcagcaatctatgttgtgtatgtatttataaacaagaataaggaagcaat

SEQ ID NO: 248979 - DNA, 616 bp, Homo sapiens
tgtacttctttctctcataaacatgcttgtgacactcattcaaataactgaatgtagttgtagactgttcattcccattactgtattattttccatggtgtgaatatgctaatatatcctttatccattatactgaagatgggtagtctgtataattactagttgtaggctcttataaaaaatactgttataaacatgctagaacatatcttttggggaacatgttttaatttctgctgagtatacactagaactgttgggtcatagaacatacatatgttcagctttagtaaatataaccaaatagttttccaaagcagctataaaactcctttagcagtgaatgagagttccagtttgctacatttttgtgaacmcttgttattttccacctttttaatttttagccattctgttgattatgtaacaaacaaaattattatggataatatgaaactccagataatagcaaatctctcacaagattaaataatgagaagaagtatgtagctttttaaaacaacatagatataatagcgttataaaaaactcatttcactaataaaatggtagggggaagtaaacacttattaaagaacagaccaaaaaattgctc

SEQ ID NO: 248980 - DNA, 631 bp, Homo sapiens
tggttttcttacagtagttgagctaaagggaaaatcaaatatttattgtctccatatttacagcgaaaaactaaaatgaaggagagtcctatatttattatgcctggggctctcttcattaatgcacccgtttggccctgcagcatctaaatttgacacctgatgtaaacacatttagtggcagaagtctgatatacttagcccatttcatttctggacagccttagtggggtgtgtgtgygcgtgtgtcttctttcatgctaagttaaatctgccttcctattccatctactcattgacctggaacctctgctagagatatccagcatactcattctatccataagaaaactatcatattctgcagtcaccccttctcatctcctgtaactgttctttacagagaaaagttttcaaactccaccattctaagtttcccctctcaggacataatctaacttcgtagggttcttcctaaagaagagggagaaacatcccagtaatgctatttcggatctagacagtgaaatgtatggtgtaatggagctcatattccaaaagacaaatgccattattactgaatataagccattgtggcactctctgtacaaatcctgtggcagaggtttct

SEQ ID NO: 248981 - DNA, 563 bp, Homo sapiens
ctctttcctctccttattccccaatgtataagcatttctgtgtatgctgcatttatacaactgaatgttatgcagccataatgagatctggaaarttattcaaaatacattttaaaatttaaaaaaaaagttaaagattaacaaatagtatgtcgcctaccccatactctttttctttctttttttgaaacatagcttactaaaaaaaaaaaaatgcatgtagcaaaaaatgaggggaagatccatcagccagaagctaggtgactactatcccattctcatccacctgttttattggttccttgctatacagtggtataacccaggataacccaccctcaaccttacctttccagcaaccattttgggatccacagggagggaggacctaggactcacaagtaagcaaatatctatttgtatatatactattcaagcatacattttggaaacacagtatagtgtatgaaatacaatcagcattttaagtgatgacaaatatctatttgaaaaaataagacggtcatagtaagtaagtatcagattcaggtatagatttgaaa

SEQ ID NO: 248982 - DNA, 563 bp, Homo sapiens
ctctttcctctccttattccccaatgtataagcatttctgtgtatgctgcatttatacaactgaatgttatgcagccataatgagatctggaaagttattcaaaatacattttaaaatttaaaaaaaaagttamagattaacaaatagtatgtcgcctaccccatactctttttctttctttttttgaaacatagcttactaaaaaaaaaaaaatgcatgtagcaaaaaatgaggggaagatccatcagccagaagctaggtgactactatcccattctcatccacctgttttattggttccttgctatacagtggtataacccaggataacccaccctcaaccttacctttccagcaaccattttgggatccacagggagggaggacctaggactcacaagtaagcaaatatctatttgtatatatactattcaagcatacattttggaaacacagtatagtgtatgaaatacaatcagcattttaagtgatgacaaatatctatttgaaaaaataagacggtcatagtaagtaagtatcagattcaggtatagatttgaaa

SEQ ID NO: 248983 - DNA, 563 bp, Homo sapiens
ctctttcctctccttattccccaatgtataagcatttctgtgtatgctgcatttatacaactgaatgttatgcagccataatgagatctggaaagttattcaaaatacattttaaaatttaaaaaaaaagttaaagattaacaaatagtatgtcrcctaccccatactctttttctttctttttttgaaacatagcttactaaaaaaaaaaaaatgcatgtagcaaaaaatgaggggaagatccatcagccagaagctaggtgactactatcccattctcatccacctgttttattggttccttgctatacagtggtataacccaggataacccaccctcaaccttacctttccagcaaccattttgggatccacagggagggaggacctaggactcacaagtaagcaaatatctatttgtatatatactattcaagcatacattttggaaacacagtatagtgtatgaaatacaatcagcattttaagtgatgacaaatatctatttgaaaaaataagacggtcatagtaagtaagtatcagattcaggtatagatttgaaa

SEQ ID NO: 248984 - DNA, 563 bp, Homo sapiens
ctctttcctctccttattccccaatgtataagcatttctgtgtatgctgcatttatacaactgaatgttatgcagccataatgagatctggaaagttattcaaaatacattttaaaatttaaaaaaaaagttaaagattaacaaatagtatgtcgcctaccccayactctttttctttctttttttgaaacatagcttactaaaaaaaaaaaaatgcatgtagcaaaaaatgaggggaagatccatcagccagaagctaggtgactactatcccattctcatccacctgttttattggttccttgctatacagtggtataacccaggataacccaccctcaaccttacctttccagcaaccattttgggatccacagggagggaggacctaggactcacaagtaagcaaatatctatttgtatatatactattcaagcatacattttggaaacacagtatagtgtatgaaatacaatcagcattttaagtgatgacaaatatctatttgaaaaaataagacggtcatagtaagtaagtatcagattcaggtatagatttgaaa

SEQ ID NO: 248985 - DNA, 510 bp, Homo sapiens
actttacaatgggagaaactgaggtcaaaagaaaagtattagccacaatctagtatactataatccaactaaaaactatctaactatctaattcaagtattgttttcccttgttttatttagaagacaaatgaaagctttagtactgaacattttgaaacagaaacccgagaataatgccttgcggggagaaaagcttcagattaaaatttcggaataaaaataaggagaaaaataattttacccaaacaccactttgcctttcctttactcgtaaattcaagagtctcaaataaccatttaaatactgtgaagttaaagaattttyttaattataaataaattgtgcttaagggaaacctggaagctttagtaagtttctaatttttaaaattatgtgcaccaccttatttatattttctaaatgactattccaagtgggaaataaatacagtaatacagttatgtcttcacctgccaaccaacaccacagttatggtccaatgaactg

SEQ ID NO: 248986 - DNA, 608 bp, Homo sapiens
tgcccaacttaaaaagaaaaggaaaactccttttgcagcttgctttgcagaaagggttgaccaatgaggtatcaatgggagtttttatgtccagcttctgggagrgctcttttgccctctctttcctttccttctaactgaaatacagttctgatacgtggcatccaaccaccatcttggactactgaggagaacctgaggatagaagtcattcactaaaatggctggagaggaaagagggaagagcctgaatctaaggatggtggagcttccattccaactgttgaccacctaccttctatcttcatttactccagagacaattaaactataacttgattaattgattaaaccatgttatttgagttttctcttacatacaaccaagcctagtcacaactaatatagccatgttatagctgtgagacttttagcaactcatttctctatacctcagtttactcatctgtaaaaatggacccaataacagtattgactcagagagctgttataaggattaaatgagttaatatatgtaaacagcttagaattgtagccaacacagactaaagactcaatgaatcctctattgttactattcacttgta

SEQ ID NO: 248987 - DNA, 585 bp, Homo sapiens
tagatctccaaggccttttaaagcatgccacggaggtagacattacctgtagaccaacacttcttaaattttaatgctcatatgactcatttggggaccttgttaaaatatagatgctagctgggcacagtcgcttgcacctgtagtcccagctactcaggaggctgaggcaggaggagtgcttgagcccaggagttcaaggctgtattacactatgatcatgcctgtgaatagccactgcactccagcctgggcagcatagataggtctcaggtggggcctgagcgtcagcttttctaaaatgccccagatgatgtsctgctacaataaagttggtctacagaccatgtgttaagtagcaaatatttacaaattacaaattctattacctggaatgaattctatatactaagacataccttcagcccttgaaaggaactgggacacgattcaactagagcttccaggatggtgaattctgcctataagttgcctcctgggtttactgcgggtgccctacaaatgcaataatttttttcgacatgttctatgatgtgaagacagtggggaagcaatgtagcacaa

SEQ ID NO: 248988 - DNA, 585 bp, Homo sapiens
tagatctccaaggccttttaaagcatgccacggaggtagacattacctgtagaccaacacttcttaaattttaatgctcatatgactcatttggggaccttgttaaaatatagatgctagctgggcacagtcgcttgcacctgtagtcccagctactcaggaggctgaggcaggaggagtgcttgagcccaggagttcaaggctgtattacactatgatcatgcctgtgaatagccactgcactccagcctgggcagcatagataggtctcaggtggggcctgagcgtcagcttttctaaaatgccccagatgatgtcctgctacaataaagttggtctacagaccatgtgttaagtagcaaatatttacaaattacaaattctattacctggaatgaattctatatactaagacataccttcagcccttgaaaggaactgggacacgattcaactagagcttccaggatggtgaattctgcctataagttgcctcctgggtttastgcgggtgccctacaaatgcaataatttttttcgacatgttctatgatgtgaagacagtggggaagcaatgtagcacaa

SEQ ID NO: 248989 - DNA, 385 bp, Homo sapiens
tgtccccactatcccaaggaatcagtgtctacatgaatacttgacacctaagttcctcaatttttaacctattgatgacaaaccccaaaacagactctgggtcttcatttcagaagtgaagagcagcaggactgagaggaccaacaaacaaggctattaataaaatgaccaaagatgcaacatttgaagcaacctactraggtgatcatctgctttgtgttgagacagtctgtcacttaatccaacaaaaatatgaaaaagaaaaccccaaactgcatggaaaaatgactgacttagggtggtgaatcagtaaagatcaggaaaataatattaaaaacaaaagcactgctggtagtggtgttaattttcgtgatttctcaataat

SEQ ID NO: 248990 - DNA, 506 bp, Homo sapiens
aagcatctgtttccactagaatttcaaatttgttgcaatgtttcatgtgtaattttctctagattttcaaattaaccattagagttgcaaagtaatttaataagctttagagttgcaagtataaccagataagaaatacaagaatatcttcaaaaaatccagtttctttatgcacatatttatatgtacttttacataagtgcctctgtaggatgacatacatcatattgagtgtttcyggcaggggaactgtgtgaatgagggcccctagaagggaagaggccctggaaggtagaccatgtggctgaggcatagttggtaatgaggaggaacagcatgagatgaggttggtcaaccaagcaggggccagagacacctgcaggtaaggatttgggattttatcttgagggcaaaagacacaaaagtaaatagaatattttatcaaatacaaacatgccttacatgtagggctgcatgcttttatgacatataactaatcaaaatcc

SEQ ID NO: 248991 - DNA, 605 bp, Homo sapiens
tgagggcccctagaagggaagaggccctggaaggtagaccatgtggctgaggcatagttggtaatgaggaggaacagcatgagatgaggttggtcaaccaagcaggggccagagacacctgcaggtaaggatttgggattttatcttgagggcaaaagacacaaaagtaaatagaatattttatcaaatacaaacatgccttacatgtagggctgcatgcttttatgacatataactaatcaaaatccattaatagttaagttgtatcagttttgcatcttaatatgaggaatatctgtgtatatagttttgtaaatttgtgtgaatattacgctaagataaattccttgagttgggttggtcaattgatatgcagattttcagtgatcacggttttatcttagtggaaaccctgccaggaagaggatgagtttgcactgcctttctagaaggaactagtctcattgactgagagccctcagcatcttgtaagtgagctgtgattggcatcgtgtcattgttttaaggtgcaaccttctgttgcattcagcaactttccttcccctmcccccgacccgcctctattctccctatttcacagggac

SEQ ID NO: 248992 - DNA, 539 bp, Homo sapiens
atgtttaatccatgatgcagtgtgcctttgagggggtactgctttatcctggaggatggctgaatcctcagatgtctgacccatgttcaggtggtacctctcacaggaaacttgtctatcctgacagacacctttgcaactcttgtttgacctgtgtccagtttatttctaccactacggccactcacagaaagaaggaaagcaccaactcaggaagaagttagatttggatgtgtgcatcaggcaaggcatagaggtggcaactcgacaaaacatgagatcacagaggtaatttatttacagatccaggaagagagcagtgtgcctcacagggccatgggagtagcagggaagccatctgggaaatgcatgctcagctagttctgaagaatgaaagtgatggtggggggacttgagggccaaagcctttttkggggtccaggtggcacccagttaggtttcccgtggaaagtgctgactggtgggttcagagcaagcaggtgtgagttccatgggatcacgctgtgaccgagaggtag

SEQ ID NO: 248993 - DNA, 612 bp, Homo sapiens
ggaacttctcagctggaaaagaatgctagaatcagcatggaggtcaagagggatagagagagaatgttacaccttgtagaaaaatggaattagctgattttggcaaggaagaatttgtgcataagcagaaaactctccattcacttcagccagtggtatcttacctacccaggggacatacagtgctttcagagactcatcctatttcctggaaggggaagaacacaatataaaacaagcaagtcatcaatatggcttatggtaatagccccatggctcaccattgacgacggmggttaatgccaaaccctgtagctgaaggcatcagagtggggatgggggggtggggatgggacacaggagcctccagcatcatgcttatcttttagtcatgcacatttcagattccactcacctattctctagacattgaacaaatgatcaacaggtcatttcttacatgttataaatatcctgagactgcataatttacataaagaaaggagacttaattgtttcatgattctgcaaaccattcaggaagcgtggagccggcatctgctcagcctttgcgaggaggcctcaggaagtttttactcctggcagaaggca

SEQ ID NO: 248994 - DNA, 538 bp, Homo sapiens
agcctactggccttcagaccagaaccatagtatcggctctcctgggtctccaaggttttttctcacccggcagatcccaaaacttggcctctgtagtcatgtgagccaatttcttataggtctacacacacacaaattggttccatttctctggagagccccaatgcagcatgtttgctggcgagtggcattttcagctagtgtcacaaataatccacttctaacaaagcccagkacatggccaactcagctcctgtgttcaaccttgactacatcacccatggaggcaagatcttataaaaccttcagaatacatcctcatttgcagatgtgagaaactcagtaccacatcacttaggagaccagcacaaggttacaaggttcacagtaagtctggggctatagcttcatcccactgattcccagcactatgtgatgaaggtctttcaacctaattggaagacctgggcatcagttccttctccactggtaactggctgtgttgctttgagcaagttaaatagcaagctagtttctt

SEQ ID NO: 248995 - DNA, 538 bp, Homo sapiens
agcctactggccttcagaccagaaccatagtatcggctctcctgggtctccaaggttttttctcacccggcagatcccaaaacttggcctctgtagtcatgtgagccaatttcttataggtctacacacacacaaattggttccatttctctggagagccccaatgcagcatgtttgctggcgagtggcattttcagctagtgtcacaaataatccacttctaacaaagcccagtacatggccaactcagctcctgtgttcaaccttgactacatcacccatggaggcaagatcttataaaaccttcagaatacatcctcatttgcagatgtgagaaactcagtaccacatcacttaggagaycagcacaaggttacaaggttcacagtaagtctggggctatagcttcatcccactgattcccagcactatgtgatgaaggtctttcaacctaattggaagacctgggcatcagttccttctccactggtaactggctgtgttgctttgagcaagttaaatagcaagctagtttctt

SEQ ID NO: 248996 - DNA, 537 bp, Homo sapiens
tccttcaggtgccgcctgggatcagtagccgaattcagaagtcaggagcctaccggttcatttctgagtgctgccsccaaaagcattaatgtcccccaccttttctagcctataaagcccagtggtctctgggcactggagaaagccttgaggcaaaactgaaagctgcaagcctgctgaaggtggaggctcacagggggaggagctgtccagcacagatgtggctagagtcaagagttgtggtgggggtttgactcaaggttcaagtgtgcctgccccagtgagggcactgggtagccaaaataaactgcttgtttccatggtttcttcttcagccctgtgacctggcctcatgggagtgggagactgggagtggataattgagcatgtcatgattggagagagaggaaattgaaaggactccatggagaaaacagaccctatggagggcttgacggagggtcaggaggactcctctacacccttaatgtagaagaaacatgcctgcttggtaaggggtggaacaaatgtggccaa

SEQ ID NO: 248997 - DNA, 584 bp, Homo sapiens
cccatgggagctcaagtcatggctgctgcttggatactttggggtacagggtgtctatgaccaccaggcaagaaaagggttcatcaccttggtaggaacattggccctgtcaaaatgagatagttttgctgtgacacaaggtggaagagtggagatactgcacactcagttagccctccgagacacttggttcttccttgtttggctgtgactgaatggagtacagcaacaccagcctgagagagaaaggccagcaggggctccggcccctcaagaacgagggtctaggtaagccacagagagaaatacaggtgtcagagaagtgagtttggaataattaactatagcctggttccagaagttgatcgtgggccacaagaggtgatcaccttcctcctcctccattgttcttccttaattmtaaggttccaccactcaccaccctccagaagaaaggcccacaagtggctgcaaaaactgatgctccgcacatgtggagagatggacccatgtggcacaaagtgattggctgtgacagccacagaagtgtacaccttgggatcaccctttaagaaggtgtgtgt

SEQ ID NO: 248998 - DNA, 598 bp, Homo sapiens
aattcttgtagaatttctcccccaccctacccttgaggtccaggttttttatgccaaggcctcccccatgctgacccccctcttgctcatctttcacaatcagcatattgttaaagtaatggactactgtgacattctacaggattctcagacaattcagtcttcttgaactatgatagagcagggacacttatacagtcttggaacaaaacaacgcatattgttgaatgttctatgtgaatgcaagcaattctgtttacccccgtactgagacttcaagtagtgcatttggcaagtcagcatgtgcatakcatgtacccgatactgcacagcaccaatctgtgctagcaacaatgctatgtctggcacagcagctaggatcatttctactttcttgagctcatggtggcccacagtccttttgcaggctctttccagtttctgtggaggaaagacaggtagcaaaaatggagatgtgggaaggatagccacacccacacatcctttatcaccctcaagagtggggtaaatctttgctgtcactgtgcccctcgccccagcatacaatctgtttttgatttgttatcctgttgaaaaa

SEQ ID NO: 248999 - DNA, 598 bp, Homo sapiens
gaacatgaacttggagatgagctgtcttggacctgcctcctcctccacttgctctgtggctctcaggccctctggaggccccatggatgtctctccctgccagtggytggggtacagttccccagatcctgggggaaggggacagggacgggaggaaaagatgttaatcaagaagaacaaattttctgttaggtgggagggacaactcttagtctactgtactacatagatgaacagttaccatactgtatatttcaagatttttcatagatttaacatttttgttgcaaaaatgagttagtgaagtgacattggttagcttgaaactttctgcaatgtatatgtagatcaaaacatcacatcgttccccataaatatacgatgaaaaagcaggtgcccagaggttcaactgcccctctcacacaactcactgttgcatgtggactagcttccaacactatcaagaacagtagagggaaaaagtccacaggcacagaggccctgttaagatctagaagcttaggtagcagtgtctggtagcagcagccacagcagcagagagaggcccttaggcaagccaagcccctgccctgggtct

SEQ ID NO: 249000 - DNA, 592 bp, Homo sapiens
gacaaacagggactaaatgactgggtaatggcatacagagattctcacctctaggttattcattcaaattcagctggtcagcatggaccagattatattagtttgtctgcactttgtggtataagggaaatcaatttaacagtctgagtgctatgccccacctcccacaattgacacagtgatttgaaatcttcaaaaagaaggcatggattcaaactcttccctcccctctagaggtggcctctccaagtcggggcgacgcatgtggcaggggcagtgtggggatgttggcactgtcactacctgtggtgcatctgtgctgtgggtatacgggaagaggctgcagggctgccagtccagcccttttcaagagcactaaattcacactacaggagagaagtaaacaacagaaaaaatcatgaatgtatagaaaaatagtatgcagcacagtggaacgattccttacagtcctatcattacccttgtccaatgtctggtctgtttagtgtacctcaaamttagcaatgctttcaatatattgacgtttttacattcatcttctctaagaaatgtcagagagctatagacactg

SEQ ID NO: 249001 - DNA, 576 bp, Homo sapiens
tggggtccagtggttgacagtaactataaggaatactgatgatgtaatctgatagcttgaatttcaaagctggaatttttagggaaatgtaaagaaggataatctgaattgagtattgagaacaagaagggcacctgtctcatgtgtagtacaggaaaatgcaggcaggragagtgcaacccactagggtaagtagcatcctcaggggagggccgggtaataaaaagaggtaatgggaccatcaaaaacaaaacaaaaaaccttgttggtagaatttgaatattctaactcagatttagaacgtattagaacaattgtgccttctgtgttattttcctttatatgaattcatagttcattgatggattgatttcactcaatgaatttaaataacagagcaatattgtcagatactagagttattgtaatccttaactctcaatgacacaccaagagaaaaattaataaacctcaggtaaaataggtgcaccatttaaaatgggtcttctgttttgattctctcttctttgagcagatgagaaaatgcaatgaatggtgttcttgttgtgtggaaga

SEQ ID NO: 249002 - DNA, 564 bp, Homo sapiens
cttcatacttgtatatgcttcacgaagttctcattctgtgttttatcatctccatcaggtcatttatgttcttctctaaactgattattctagttagcagttcctattaccttttgtcaaggtttttaggttctttgcattgggttcgaacaagcttctttagttcagaggagtttgttattacccaccttctgaagcctgcttctgtgatttcatcaaattcattctttgtccagtgttgtacccttgctggagaggagttgtgatcatttggaggagaagagrtattctggtttttggaattttcagcatttgtgctccggtttttcttcatctttgtggatttatctacctttgatctttgaggctgatgagctttggatggggttctgtgtgggggtactttttgttgatgttgatgttattgctttctgttcattagtttttcttctaacagtcaggcccctcttctttagtctgttgcagtttgttggaggtccactccagatcctatttgcctgggtatcaccaatggaggcttcagaacagcaaagattgctgcct

SEQ ID NO: 249003 - DNA, 564 bp, Homo sapiens
cttcatacttgtatatgcttcacgaagttctcattctgtgttttatcatctccatcaggtcatttatgttcttctctaaactgattattctagttagcagttcctattaccttttgtcaaggtttttaggttctttgcattgggttcgaacaagcttctttagttcagaggagtttgttattacccaccttctgaagcctgcttctgtgatttcatcaaattcattctttgtccagtgttgtacccttgctggagaggagttgtgatcatttggaggagaagaggtattctggtttttggaattttcagcatttgtgctcyggtttttcttcatctttgtggatttatctacctttgatctttgaggctgatgagctttggatggggttctgtgtgggggtactttttgttgatgttgatgttattgctttctgttcattagtttttcttctaacagtcaggcccctcttctttagtctgttgcagtttgttggaggtccactccagatcctatttgcctgggtatcaccaatggaggcttcagaacagcaaagattgctgcct

SEQ ID NO: 249004 - DNA, 579 bp, Homo sapiens
ttgggttcccatgactttcagaaacaaattcatttgaaagtgtgaaaaatgctatttttctgcacaattgtgttttgcatgtggattgctgcatggatcccattcacaagtcttttgaactctaagtgttctatctctcatagtagggcccaagatcactctcatcagcaagtttcccagagagagaaaatcatgttcctaccagtttcctgtctttttttgtccactgccagcaacaggaatagttaagaaacattwaattgttttgcatggtaacaattttttaaacaataataatggtgaccaagtgagagtgtaggactggctcatcaagggaactttgttggtctgctgtctcttgctcaatcaaggagaataccactttctagtttaggagcccggtgattttaatggggcatgtcagaatcccatgggaaattttccaaaatgcaagccctcaacccacacctttagagcatcagattcaattggtttgtgtaagatttgatcaatttaaaaaaaaaaaattaaacttgctagaacatgacaatagagattgctgcttacaaatcactagcc

SEQ ID NO: 249005 - DNA, 579 bp, Homo sapiens
ttgggttcccatgactttcagaaacaaattcatttgaaagtgtgaaaaatgctatttttctgcacaattgtgttttgcatgtggattgctgcatggatcccattcacaagtcttttgaactctaagtgttctatctctcatagtagggcccaagatcactctcatcagcaagtttcccagagagagaaaatcatgttcctaccagtttcctgtctttttttgtccactgccagcaacaggaatagttaagaaacattaaattgttttgcatggtawcaattttttaaacaataataatggtgaccaagtgagagtgtaggactggctcatcaagggaactttgttggtctgctgtctcttgctcaatcaaggagaataccactttctagtttaggagcccggtgattttaatggggcatgtcagaatcccatgggaaattttccaaaatgcaagccctcaacccacacctttagagcatcagattcaattggtttgtgtaagatttgatcaatttaaaaaaaaaaaattaaacttgctagaacatgacaatagagattgctgcttacaaatcactagcc

SEQ ID NO: 249006 - DNA, 552 bp, Homo sapiens
ctataacccctactatatagttttgtaattccagcactttgggaggctgaggcaggcggatcacctgaggtcaggagttcgagaccagccwggccaacatagtgaaaccctgtgtttaccaaaaatacaaaaataaattagcctggcatggtggcacatacctttagtcacagctacgtgagagggtgaggcaggagaatcgctggaacccaggaggcggaggttgcagtgagccaagatcgcaacactgcactcctgcctgggcaatagagcaagactctgtctcaaaaaacaaaaaaaaaactatacagcaaccacgaatgtacagttcttcactacatgacaattacatttattcactacttaaatagttttatttgctatggagggtaagagagtatttattttaactctgttgaaatcatgattcatagtctaatcactgataatgtcttgatcagaagcttgcaacaagtaagttatcacatcctttaattgctttcatgtattattatcaagggtatacctactgcaaagcagtattataaaact

SEQ ID NO: 249007 - DNA, 552 bp, Homo sapiens
ctataacccctactatatagttttgtaattccagcactttgggaggctgaggcaggcggatcacctgaggtcaggagttcgagaccagcctggccaacatagtgaaaccctgtgtttaccaaaaatacaaaaataaattagcctggcatggtggcacatacctttagtcacagctacgtgagagggtgaggcaggagaatcgctggaacccaggaggcggaggttgcagtgagccaagatcgcaacactgcactcctgcctgggcaatagagcaagactctgtctcaaaaaacaaaaaaaaaactatasagcaaccacgaatgtacagttcttcactacatgacaattacatttattcactacttaaatagttttatttgctatggagggtaagagagtatttattttaactctgttgaaatcatgattcatagtctaatcactgataatgtcttgatcagaagcttgcaacaagtaagttatcacatcctttaattgctttcatgtattattatcaagggtatacctactgcaaagcagtattataaaact

SEQ ID NO: 249008 - DNA, 631 bp, Homo sapiens
tctatctagttttgcttcacgtattttgcaaatctgctattactgcgtaagaatttatgattgctgtttccctgatgaatttaccttttttatcattatgggatgaytttcataggtttttataataatcttgactttgaatatcttatacaatgtagctacaccagccttctcatgttcattgtgcagagtatgcctgcttgctttctttaatatgcgatctgcaccttcatttcaaagtgcctgactcttctatggttttatggaaaatccagcatgcatcttctgcccttctaaccaaatggattccagtctctgccctagcaattgaagtacctgcctagatttctcagccttctagcgttctgccttttagggattttctggaatatttcctattcgtattcagcttagaggtcagtcaagtatttgataggagttcaaactcaaagtgagagcttcttcggctgagaggttgtccctggattccatctctttccatttctagcctttctgggagccctgagttccttcctctgacactcaagccactaagcagtagagttttctgtttgagttttagcaggcttgtacctcatgcagtgaggattgcccttgggatatataaatc

SEQ ID NO: 249009 - DNA, 630 bp, Homo sapiens
aatcctttttattttgtaaagtcagtagtaatatcatcctccttactatttttagtaattcgagacttctaaaaaatttttttgttagtctagctacaaaggttttgtcaattttgttgatttttttttttgaaagaaccaatttttgggtttgttgagttactctattgcttttctattctcttttcattaactttccagtttaatctcttactacttgcttgccctgcttgttcttgggatttagtttcgctcttcttctttactatgtgtctatggtgaaagattaggttattgatttgaaatttgttttattttattttatttttttttttgagatagagtctcactctgtcaccaggctggagtgcagtggctcactgcaacctctgtctctcaggttcacgccattctcctgcctcagcctcccgagtagctgagactacaggcgcaagccaccacacccagctaatttttgtatatttagtagagatgaggtttcaccatgttggccaggatggtctcgatmtcttgaccttgtgatccgcctgcctcagcctcccaaaatgctgagattacaggcatgagccactgtgcctggcctgtttcttttttaatgtaagcattaat

SEQ ID NO: 249010 - DNA, 554 bp, Homo sapiens
aagtatatagttatataatttgtatgttaaccttcttatttaccattgctggttttcttcagtgtttttgtagattcaagttatcatttgatatcatttccttactccaatacagttttgcacccacctacatcctttgtgctattattttcaagtatgttatatttctgtatgttataggcacaattgtacagttataaacatattattttatacaattgcttttaaaatcagctaacaagaaaggagaataaatgtatatttatactgtctgctataattacatagttatctttgccagtgctctttttttttggtgtagatgtgattaccatctggggtcacttgctttcagcctaaaaagcttctttcaccttttgtagagtgrgtatgtagcaatgaattatctgtttttgtttatctgagaatgtccttattttgccttcgtttttgaaaagtggttttgttggatatacgattctttgtttacagttttgttttttagcacattgaatatgtcattccactgtctgctggcttctttagcttctgac

SEQ ID NO: 249011 - DNA, 497 bp, Homo sapiens
attgcatatgggagggatgtgaattgtggccagagggtggatcatagcagattgattttccaaagatggcagcagcaatatctctcatcacgcatatccttataacatgaatttgacctttcttccatgtagagatgggatctatttcccctcttgaatctgggcaggttgtaactgtggcagatgtgattctatatgacttctaaagctttgtcatacaaatgacaaatcatcaccttgcyggctagattgctcacggtggatccccgaaccaccatataaacagtgccctgaggttaccatcttgtgaaggagcccaagtgagccaacatgtagagaccacgtggagatgctctgaggccacacgaagagaaagagagacgctcaacaagcccccagctggctagccccccgctctcccagctctggctgttgtctgactctaaccacatgagggacccagagccagaatcacttagctgagtccatcccaaatt

SEQ ID NO: 249012 - DNA, 497 bp, Homo sapiens
attgcatatgggagggatgtgaattgtggccagagggtggatcatagcagattgattttccaaagatggcagcagcaatatctctcatcacgcatatccttataacatgaatttgacctttcttccatgtagagatgggatctatttcccctcttgaatctgggcaggttgtaactgtggcagatgtgattctatatgacttctaaagctttgtcatacaaatgacaaatcatcaccttgccggctagattgctcacggtggatccccraaccaccatataaacagtgccctgaggttaccatcttgtgaaggagcccaagtgagccaacatgtagagaccacgtggagatgctctgaggccacacgaagagaaagagagacgctcaacaagcccccagctggctagccccccgctctcccagctctggctgttgtctgactctaaccacatgagggacccagagccagaatcacttagctgagtccatcccaaatt

SEQ ID NO: 249013 - DNA, 593 bp, Homo sapiens
gatgggcttactgccttaaagaacagtcaaaggtgggggaggcacagctgccaacactaaacctttaggggcttagatagctgagggagtttgataaaggccaggggtccctgcacctttcagccagccctgcctaggagttgcccaatcagcagaggctgagcttgcctttctcatcttcccagaagaccagatgtgaaggggagagggctgggcatggccatataggcaaagaatgtgcaagtctcctttgagcccacgagttygagaccagcctgggcaacatagtgaaacccccctctctacaaaaaaatatgaaaattagctgggcatggtggtgcctacctgtagtcccagatacttgtgaggctgaggtgggaggatcacctgagcccagggaggtagaggctgcaatggagcgccactgcactccaacctgggtgatagcgtaagactctgtctcaaaacaaacaaacaaacaaacaaaacagtgcaagtctccagcactttggggctgaaacagagatagcacagcaagcaagctcgatgtcccctctattgcctatcttacaataaatgacaataaatggatc

SEQ ID NO: 249014 - DNA, 462 bp, Homo sapiens
ctatgaccctagggatccagcaccatggacagcagcacactaccagctggactcaatatagtgtgaaaagtttgtgttaccaaggtcccaggcatgaatatccatgtatcaamgcatgttgataacatagccattctatgtcttttgctgtgttgcataacacaagaactaatcaggaggcaaagcaatgttagatttagtagtcaatatagaatttgctaatttcttttagattgtctccctctttggagacagtaccacagagaaggatgtggtgaagggtaaaaccaaagccacattctagaccaggaactcattttcgtttctgatctcatcattctatccatgtaataaaaagatgattgttaatgattccacaaatcatacaaaaggcatcccttattagagactaggtattactgaaaatgaataagggaaacttcaatttccactaaaagattt

SEQ ID NO: 249015 - DNA, 480 bp, Homo sapiens
ctcactgcagcttcaaactccttggctcaagtgatcctcccacctcagcctcctgagtagctgggacttcaggtgtgtgctatcatgcctggttaatttttttatctttttgtagagacagggtcccactgtgttgctcaggcttgtctccaactcctggcctcaagcaatcatcccacctcagcctcccaaagagttgggattayaggcatgagccaccatgcctagcctctttcttctcttctaatggaattatttaagattatgtaatagctcccattgtgatcatgagcttatctatttctccttataagtctgtcaatttttactttacatgttaatctgatcttactcggtaaatacatacttggaatagttattatcttcctggtgaatttaatctattattacttagtggtcctcttactctctagttatgctttatgcctctattatattgtgtttcactttattatacct

SEQ ID NO: 249016 - DNA, 580 bp, Homo sapiens
tgcagtgtttccttttccaccttcttaatcctttaatatctgtttaaccaatttcctgtaattaaattatgttaaaataactattgtgacatctatgttcctgacccaacaatttaactcctaagtaaatgtccaacagaagtacattcatgtgagcaccaaaatgcatgtataagaaggctgaatgcagcatgatatgtaatgcaaatgtccaccaatggtggaacagataaactgtggcatatccatacaatggaaaacttcactgcagtgcaaaagaaaaaactctgcaacatgtgataatgtagctgaatctcattgtcatagcgctgagggaaagaaagcagaaacaaatagtacagtttataagattttatttttataaatctcagaaacaagcaaaaccaatctctgatgayagatgagtagtaacctttgcgaggataatgaccgggggacacagaatggtttgtgggatgctggaaatgttctatattatcatcttggtggtggtcacatagatatgttcacttacaaaatattaacccaagtgctacactcagaatatgtgtctttacta

SEQ ID NO: 249017 - DNA, 566 bp, Homo sapiens
gttcaacctcaatcatttcaaagatgctttcacaaaggcggcgtccgaccgtgggaacggggaggccaggagggttttccagggctgccttccctgttccctgtaccgtgcctccccctcccctgccacaaccctcctgtcagaaagctattttatctctggagaagttttatgccagggatatatgaccagaatacatgaaggtcttttgaatttattttcaatagccctgctactctcttctctatgaaatatttagcayttaactcgttatttctgctgctggcaaagtctcaggtgcaggtggctttgtagacatggcagaatgtcacaccaaggtaattgtttctctttatttcctctagataaagaataagtaataggcaagtcggaattatcgggtggtgcttccatcatgagctcctgtgataacataaactgggagattgaatttggagtggtctgcataatcagccctccccgctacttcaacaatttgcctgtgagtgaatctgcattcgtgagccacctctgctaccctgctctcacgcgtgtgtgagagttcc

SEQ ID NO: 249018 - DNA, 566 bp, Homo sapiens
gttcaacctcaatcatttcaaagatgctttcacaaaggcggcgtccgaccgtgggaacggggaggccaggagggttttccagggctgccttccctgttccctgtaccgtgcctccccctcccctgccacaaccctcctgtcagaaagctattttatctctggagaagttttatgccagggatatatgaccagaatacatgaaggtcttttgaatttattttcaatagccctgctactctcttctctatgaaatatttagcacttaactckttatttctgctgctggcaaagtctcaggtgcaggtggctttgtagacatggcagaatgtcacaccaaggtaattgtttctctttatttcctctagataaagaataagtaataggcaagtcggaattatcgggtggtgcttccatcatgagctcctgtgataacataaactgggagattgaatttggagtggtctgcataatcagccctccccgctacttcaacaatttgcctgtgagtgaatctgcattcgtgagccacctctgctaccctgctctcacgcgtgtgtgagagttcc

SEQ ID NO: 249019 - DNA, 566 bp, Homo sapiens
gttcaacctcaatcatttcaaagatgctttcacaaaggcggcgtccgaccgtgggaacggggaggccaggagggttttccagggctgccttccctgttccctgtaccgtgcctccccctcccctgccacaaccctcctgtcagaaagctattttatctctggagaagttttatgccagggatatatgaccagaatacatgaaggtcttttgaatttattttcaatagccctgctactctcttctctatgaaatatttagcacttaactcgttatttctgctgctggcaaagtctcaggtgcaggtggctttgtagasatggcagaatgtcacaccaaggtaattgtttctctttatttcctctagataaagaataagtaataggcaagtcggaattatcgggtggtgcttccatcatgagctcctgtgataacataaactgggagattgaatttggagtggtctgcataatcagccctccccgctacttcaacaatttgcctgtgagtgaatctgcattcgtgagccacctctgctaccctgctctcacgcgtgtgtgagagttcc

SEQ ID NO: 249020 - DNA, 567 bp, Homo sapiens
ttccccccttgcacccacacaccttagatttcaggtttccttggcaccgtaagcttggaaaaatttaggtatcactgttgtaagctctcatatgaccctgtcctcctccttgtacagtacttattacaaaagtcactaacgtttggtattcattaccttaaactctgattacttttgtgctgttcactttctgaggacaggtaccrtctctgtcttatctaaccagatattcccagcagagaatgtagcctcttccatattaagggtgagtcatacatatatgtagaattgaattaaaaatatactcaacgtatttgttgaattgaattgatgttaacatttatgtgaaacatgactttgtgtcagtcactggcgggcatttactatatattatctcatttaattcacacaaaatcatttgggaatacatgcttttagataggcaaactttattattgttgttattcgtttactaggaatttttaggcaaagcaagtgcataaacaccaggtgagtggtcttaaatgccatgttaaggatttggaactttttactaaacaccagtga

SEQ ID NO: 249021 - DNA, 483 bp, Homo sapiens
ccatatagatattgaatttactgaattgctggtacaggtgatccagtagtcaaataaatgttttcaattgttaggtctaagctaattgttgcagctcttctgataggcagcaggcctgtcactcttaagacagaattgatttcactttggytgtatttaattaacctggacccagaaaaaataaatcttttgtgtgtgtttgtccaagagctaattttgggagaagagctctgactcagaatggcttccaaatgatacatagcctgggtgtacctcagaagggagattcaagcaaaatcctcatctgtctcagaggccttaccagttctggacaagtgtgtgatgtctaacagatccaccagtagtaattcttgaaaaggtaaatgcccctctcctaacctttctctagcacaaggagatagtttcagtggtctctgtctcagtcaccaaaccctcttcctgattactgtgctggatgatggt

SEQ ID NO: 249022 - DNA, 556 bp, Homo sapiens
ccagtagtggttaacgaacacaggagtagcctgctggcattctcatcaagaagtcaatactccagaaaagctattacaagcacttctgttatgtgtatcttgctcaataacttccattttgctaattagcatactaaatgtcagaaaagggcttttagtgataaaaatagcagcctgttgactaccatgatgaatgttaaaatcgggctctcactggtaaaattaaaggtattcaacttgtgtgaattagttaaattattttatagtcacccctactcttgcatgaatagagaataagaatctatcaggtcaaaaacttgtactccttgggattttgccccaggctaaattcctaaacatgctagtctctagccatrggatttagaattctgattgcctgagatcagctgtaaagatggcaggatcctgcttcgggaatcttggcaattgctttcaccagttcaccagttatctctgcaatttatgttgtagtttgaggaccatatgttatacgaaaggctttttactcaatcaaatgtgtggtagaagaaaaagc

SEQ ID NO: 249023 - DNA, 548 bp, Homo sapiens
aagctgcattttttctgagcctgggaggtccttacttacgagaccaacatctcaaatcatgctactcacaacagtagacagaaaatatacggccttaagctgtacttcctgctaagaaggcttttcagaaacatattcctgaacataggrgagtcttccacaatgcagggctttgagaattgagaatcgtcttttttattcctggaattcagaagcattatcattgtttcacagcctagctaagcaaggtaaggcttcatttcacaattcaagtggagaaataccattaagtgaaggaaaaataattcagagtattctaacaatgttcttctaaggtggtctccaacttttgctctttcttaattgaatattgaaaaatctgaaaaaaaaaacacagctagaagaaaataagttttatctgtttactaactttaggtgtttctctcgggaaaagagagaaattgttggcagaaaataatgaaaacacaaggacttgtgctatgtgctgaaagaattgctcctgaaacgataaaggtgaaatgcagata

SEQ ID NO: 249024 - DNA, 608 bp, Homo sapiens
tcatgctactcacaacagtagacagaaaatatacggccttaagctgtacttcctgctaagaaggcttttcagaaacatattcctgaacataggagagtcttccacaatgcagggctttgagaattgagaatcgtcttttttattcctggaattcagaagcattatcattgtttcacagcctagctaagcaaggtaaggcttcatttcacaattcaagtggagaaataccattaagtgaaggaaaaataattcagagtattctaacaatgttcttctaaggtggtctccaacttttgctctttcttaattgaatattgaaaaatctgaaaaaaaaaacacagctagaagaaaataagttttatctgtttactaactttaggtgtttctctcgggaaaagagagaaattgttggcagaaaataatgaaaacacaaggacttgtgctatgtgctgaaagaattgctcctgaaacgataaaggtgaaatgcagataaagacaatcaagatacagccttttttwaaaaattatttccattccagtcctatccatcctggctataaagtgactctcaacccaaagatctggaaactccagttaaataatgcaca

SEQ ID NO: 249025 - DNA, 545 bp, Homo sapiens
tgcctgctgcaacccagctgtgctggtgtggtctcacagaaaggatggaggacaggaacaagatttccagatggctcttgttcagggagtttaagagggtagcttcaagaaaggagggarctggactcaaaaaatataaaacataatactttaaagtacaactttaaatgacaccgcagaattaaggaaacaatcaaagcagcagatctgcttccctatcagataggagaagctcattttgtagagagtgtgggccacaagtactgggaagcaaatgcacaaagaataataggtccagccaacagttgcagtaacaaaggacggtttttacctgcattgagtgtacagttcactgctgcatgtacaacataagcaaaacaaaaacagtggtagaaataaataaaagtaaagtctgaggcccttatggaagaatcatactactacctgctttttccgtggctaaaaatgccttataaatttcatatcttgagaatttcacttatttatgccaaagtaagtttgttttaaaatagtactcatttgta

SEQ ID NO: 249026 - DNA, 477 bp, Homo sapiens
agaacagcttcctttaccacaacagcaaaccgtgctcaaaaactgtcagtggtaactgcttgtctgtcttgtcartgacaatcccttcatcagcccagctaaaagtccccaatcttaacttcaaccccacatgctgttgcaaccctttctgtacttcttattcagttgaaggcttccctttaatgtttgtttaggctttccacataatttattcttttcttttttggcattgtttttattcatcatgaagcctcttttctttctattggcctatttccatcacttccttcaagagttattttttccaccagtttcttctgatttattccagcttacctggatcacagaacccctcagcctactcagtctatgtgatgttatttttgtccttccttgagtcacttgaagaagctctacttttaaagtgccaccattgttccaagttaaaatattcatgattgtattcatttttcctag

SEQ ID NO: 249027 - DNA, 610 bp, Homo sapiens
gctgttgcaaccctttctgtacttcttattcagttgaaggcttccctttaatgtttgtttaggctttccacataatttattcttttcttttttggcattgtttttattcatcatgaagcctcttttctttctattggcctatttccatcacttccttcaagagttattttttccaccagtttcttctgatttattccagcttacctggatcacagaacccctcagcctactcagtctatgtgatgttatttttgtccttccttgagtcacttgawgaagctctacttttaaagtgccaccattgttccaagttaaaatattcatgattgtattcatttttcctagaaaagatttggcaccagtagttgccctgccatgtatatatgtgacattggccaaaacagtcaacgttcaggtttcttgtcaataagatgaagataccaagcctcccttctttcattcagtgtagttgtgaagaaaaagtgaaataaaacatgtacaaagtgttttaagcaaatgtacgacattatttttaatattttaggtgggtgtagtccatatcctcatctaaattgcaggttcttcacaccatttcacatagtgtagagtc

SEQ ID NO: 249028 - DNA, 539 bp, Homo sapiens
atatttaagaagcctattgtaggaattcacccagatttagtgaatagaaattgaatacttgacctttatctagaaaagttgctgttttgttgtcaaccagaagaactttcttagtacagcccctatattccaaatagctagattcttaattgctgtactttcattaaattgcttcattattattgctgcatcaagattttcactaaacgaaaaacagccatagattgtttatttctgcttattgttttttgtagaaaaaattaaggaagaagacatattagatttcactgctgttgtagaaataaatttcctcttggtgtactctcaagtagatgttggaaaatgaggctcacagaggttaaagtagttkgcccaaggtcatataggttgtaagtgctgggaccaggatttgaatccacagactctggcttggggacctgtgtcactctggcaagcttgtcgtgtgggaattaataagctcatcgatgtaatgcacttagagtggagaccagtgcacagcaagcactcagtctactact

SEQ ID NO: 249029 - DNA, 591 bp, Homo sapiens
gattttaaaaaatttcttcttcagattgtttggctgttggtatatagaaatgctactgatttttgtatgttggtcttttgtatattgatttgtattctgcaactttactgaatttgtttattagatctattagktttttggtggagtctttaggtttttccaagtataaggtcatatcatctgcaaacaaggataatttgacttctttcttttcaatttggatgccctttatttctgcctcttgtctgattgttctagttaggacttccagtactgcgttgaataacaatagtgacagtgggcctccttgtcataaagatcttagaggaaaggctttcagttttttcccatccagtaagatactagctgtgggtctgtcacatatggcttttattatgttgaagtgtgttccttctagacccagttttctgtgagtttttatcatgaaagtacattgaattttatcatatgcttttccagcatcaatcatgatgatcatatggtttttgtccttcattctgttaagatgatatatcacattgattgatttgtgtatgttaaatcttctgtgcatccctggaataaatccca

SEQ ID NO: 249030 - DNA, 585 bp, Homo sapiens
taccaataacagtggataaaacaaaagctgacataataacaagattccagaaatctgtgagaggcagtcacaggattttgcatcccaattccttgccaccttcttagaacctccctcattttcattctcttcccctccactgccccttcccatgccatttggacagctggtgctcagagagaggaaacaattgacatttcaccagacagaagcaaagtggtaggattatgctgtgtgttccctaatatacctttcagatcaaaacattttcaagccatagtgttgaagccttgttatcttatgggagcccataagataacaaagcacaacaaaaatataaatggctcacacgtcattttgaaatccaaatatttgtcatgattgcaatgtatctaaatgtcacatctgaaaactrcaactttgattatgacctaattaacaacaacaataatatatatatgtatacatatatataaatatatatatatatatactactgccagcacagttacataaaaaacataacaagggtcacttaaatgagatatgacttgctactaacttttatttggataaaataattca

SEQ ID NO: 249031 - DNA, 611 bp, Homo sapiens
gcttccagactgctttctgatgttcccaaactgcttgctctgactctgatatgggtgccacccacatgcattctgctttctatgagaagctcctcactttactttaagggctgccaatgctgactatagtagaccagctmtgtcctttacaacacaggtatagaataaacctctctagaccaagagaccaagggttaattggccagtcaggccttaatctctgcatgtgactgcaccaagtcattgaggcccatcaccagaacaatacaaggctgctctaaacagtacatcctgcctatgaattctactgaccttaatctataattttttgttactactaggtttgaactgaggtatgattgaaagagatgggagtcagtgagctactgctgcttttgaaaatgatagcttctgtaatatttctttattcatttatttcaatgtttaaaacccaactactttgtagttcgtcaacttcacatggaattcttgagagcaggatcaaatgtcatgcagacttttaccttttctgccagtgaggacaatatggaaagcaaggtaaacggcaatggctgggtgtgggggagggagtcatctattaaaaaataacc

SEQ ID NO: 249032 - DNA, 574 bp, Homo sapiens
cactgctcccggtccattgaacgtgtgtatatatagttgaataaagaagacactggagtttgttctgtatcttctcctttcaaattctacgccatttgaattttttcctcttccttttatatatttttaattgacaaattgtacatatttatcatgtacatattgttttgaaatatgtatataccgtagaatggctaaatcaagatcattaacatatgtattactttacctattttccttttttcgttgtgtctctgccaggtttcggtatcagaatgactctgacctcatagaatgagttagagagcagttgctcctcctcaattgtgtggaataatttcagtaggattggtgccggcttttctttacacatctggtagaattcgactgtgaatccgtctagtctaaggttttttgcgctggttggtaggtcttgtatgactaactcaattttggaactcatcgttggtttgttcaggctttccatttcttcctggttcaatcttgagaggttttatgtttccaggaatttmtctatttcttctagttttctagtttgtgtgcatagaggcat

SEQ ID NO: 249033 - DNA, 415 bp, Homo sapiens
cccttcaaataaattaagaatttgtaaatctttcttgagataaataaacaaataagtacaggagaatgtaaaggtcttccttagactgacaattaataagatagaaggaatgatggagttagaaaattcattcctggatgctaaataatggatrgcataacggatgctaactagtgcttcccctggtctccttaacaaacctctccctctctcaggagcctctactacctcaaaaagtccagtgactgatgtcaaaccatcctatattccagtggctccaaatctttcactcatacatttacacccaatacaaagtttggaatataaccactaaaatacgtgtatttctttccttacatgtgatatgtaaatattaatagagatcataaacacacaaaacaactgagaataagtg

SEQ ID NO: 249034 - DNA, 389 bp, Homo sapiens
ttacgttattttgagactgctttcaatggtggtatagctgcagaagacaccgctcagtgaggcacacacccaagtgagagaagtgcacgattggctgtgtctctgcatcctgacaccccttcctctacctcagtcaacacccatatgaaggtttctcttcacatttgactatgacatttcatgttcttgtgtctgcctgttgttacaaactagttggaaggtattgcattttttgtattttaagtaaatgggaacaaatcctgttgaaactcctcatttagaaaaaawttgaaatggattaaaagtttatttctcacatatatgagagtttttctatgtgatacatatcattttggggcagaaaacctaataataataccaacatttcc

SEQ ID NO: 249035 - DNA, 557 bp, Homo sapiens
taagtgtaagcaacatgattgtttatcagtagcatataaattcgtagtcaggaatcatggtgaagccaaacaaccacagactgcccacacaggtggctgagattgacacctttgctttttaatgtctgataggcaactttgtgtgctgcrtgaaattatttaaaatattatataatttttaaatggttccatgatataaagaccaaagctaggggaggagtctgttgtctggtgtcatgtgttttgttcacacagggccaggaaggaatactgggagaatcttcggatagcctcaggccggccatacaacccttcaatgtcaaagccagatggctggggagtgaccaaaggaacagccgagctgatgcagcagaaagaagccacaactgagcagcagctgaaagagctctttgaaaaacaaaaattcaaatcacagtagcctcgatagaagctatttttgatgaatttctaggtgtttgggtcacagttcctacaaatacggaaaagggggttaaaaagcagtgctttcatgaatgccatcctacacatattattgc

SEQ ID NO: 249036 - DNA, 555 bp, Homo sapiens
agaaagcacctttggttctaatttgttgaaatgaacatgaagatggtagctctctttcaaaaaattgactgttctcctcacaagtattataattgtattaacatgatggatctttagcaaattaataatgtttaatctccagtattcttgaagggaacattttaagtcaaagaaataaaacaaaacaaacaaaatagcaccctattccccctgaaaagagatcctctaagtaggtggttttgattagagctagcagtaatttcaaaagtgatacatctcttaaaatggaaaagaaatttccccagattaaagcaacactgtgatccttttaaaaaagaggacatgttggcccttagaaagaaaagaatgctctattcacagtttgaatgtcttggcccttcatagagtattaatagtatgaatgagggarggtgacccagtgataaggagtaaggctgtgaaatcttaaccacactttgcagctgtttgatcatgggtaagttaacttatttgtgcttaagatttctatttgttaaaatgaaatattgtaatagt

SEQ ID NO: 249037 - DNA, 546 bp, Homo sapiens
ttttgaatttcaaataggttaaaattaaagtatgttttctgggtctcttctctatcttttccctgggtgatctaccacctcaccaactatgtacacactgagctgttacatatatgtatcttcaaaactatatatctttctgcctgctggaaatcttcaacatgtctaaagttgaatatccaaaatcaacattccccaaagtgaataccagagtttttctgtcatacacactcactttcttatgttctctatctcagaaaggacaccttcacccaaaccagaaatcttgctttcatcccagttaccttcctctctmtacttaattccttctcccatatcctattagtcatcaaactttaatccccctaaacatattctttctccttatagaccatcagttctcactagattttgacagtggtttcctgatttatctcatctgctcttcccacagaccctaccaatccaccctccatatagtgtgaaaatcatcttttaacaggcaaatctgatcatgttaactctcaaagggctatggggaccatc

SEQ ID NO: 249038 - DNA, 620 bp, Homo sapiens
aaatgtctccagggcatgtcagagaccttcacagcagcccgtcccatcacaggcccagatccctagggtgaaaaaatggtctcctgggctaggtccagggctcccctgctgtgtgcagccttgggacttggtgacctgcattccrtccaccccagccatggctaaaaggggccaatgtacagcttaggcctttgcttcagagggtgaaagccccaagccttggcagcttccatgtggtattggtcctgcaggtgcatagaagacaagaattaaggtttgggaacctttgcctagatttcagaggatgtatggaaacacctggttgtccaggcagaggtgtgctggagggtcagagccctaaaggagaacctctgatagggtggtacagcagggaaatgtgaggttggagccccccacacagagtccccactggggccctgcctagaagaggtgtgagaagaggaccattgtcctccagaccccggaatggtagatccactgacagcttgtaccgtgtacctggaaaagctgcagacactcaacaccagcctgtgaatgcagtctggacagggggctgtaccctgtaaagccacaggatggagctgtccaaggccctggga

SEQ ID NO: 249039 - DNA, 578 bp, Homo sapiens
taatctagccttggagtaggcaactacaagactttaagaaaagactgctgtaacttcttctttgtttacatgggtttacaatttttaatgcaatgcatacttaacctgcaaaacccatgccctttcactaagagcatgcatccatgcattcatgtaaagttrttgatgattcaatgagaaatcattttgcttttgtatatatattagtcaattgggtgggagataattcaaacacataaacagttaaaatattgcttcagtatgactggtgacatttacaaaatattatggcagcaaggaataagggttttggggtttagatgttggggttagtgcagagtgtgtatggggctaaggatatgtacatggagaactaggttcttgaattaaagtcttgaagggttgatgaagagttatgcagccagggagtcaggtgaggacaatctaggaagaggaagcagtttgttccaagatttgaaggtatgacaaagcatgatgtccatgaatatgatgtaactggaatgagatgccaaagtgatgagaggtggggctagaagaatgagtagggatcagaccat

SEQ ID NO: 249040 - DNA, 555 bp, Homo sapiens
ctgaacatgaagtagtggggcagtacagtctgggtaggtccccaccaagaaatataaagaaggcaaagaccttgtagtctggggtgtaagccttgtggtaggagcctctcaaaatgtcatgggaaggtaaacaggctgtgaaaatccagatagggtattccctagggttgctctgtttcacacaaagtttagccatttcactaagtgttaattctttaatctgatctttactcttccccattttggaactttacagacattgagattgtcagttagaatttgatataggcccatgtattcttcacttcttatgtttattgcctttccacatgacctcaggtactcttagatgcctacaactggtatgattcatgaggtatcagtgacacataaatcactctatgtttctattacagttcaactattttcctcrtggtgtgactcactgggaattatccctcatgaacagagttttgccaacattttgcatgataggctttgggggctgagacccagaaacagaggagtcataaagcctgcatttgagtgattggt

SEQ ID NO: 249041 - DNA, 601 bp, Homo sapiens
agggtagattaatcagtctgcaagtctacccagaggctgcatgataagcattgcatcatggtktatttatatctgtggaaaaagaaattatgattttaataataatacattttctgttttcataatttcattttctagttcaagtttttttttctctctttctgcattcattgtgtcatgagcatcctgtgagagtggcccagttggctaaacagcagtctgaaaactcaggtgctgtgtaacctattccctgctgggcttttaacttgctgtgtaaccttgaacatacttcttaatatctctgtgctccaacgtcaggatttgtaaaatagtggaaaaaggtattaaactgcaggcatatttgtgaagaaacactagtaaatgtggttgaaaagctctttgaaaatataaagtcctaaccataagaaaaagaggaaatcagccaaaagcacaactgagaatgcccttaaatgtacttagctgttgatggagagatttaggtctgatgtgcggaaaattttcctgacagcgggttgttaaaataggctacctctttggcttataatattttcctgctgtttcacattttattatgtcaatg

SEQ ID NO: 249042 - DNA, 392 bp, Homo sapiens
tacccagaggctgcatgataagcattgcatcatggtttatttatatctgtggaaaaagaaattatgattttaataataatacattttctgttttcataatttcattttctagttcaagtttttttttctctctttctgcattcattgtgtcatgagcatcctgtgagagtggcccagttggctaaacagcagtctgaaaactcaggtgctgtgtaacctattccctgctgggcttttaacttgctgtgtaaccttgaacatacttcttaatatctctgtgctccaacgtcaggatttgtaaaatartggaaaaaggtattaaactgcaggcatatttgtgaagaaacactagtaaatgtggttgaaaagctctttgaaaatataaagtccta

SEQ ID NO: 249043 - DNA, 638 bp, Homo sapiens
ttttaagaacttaaccatatcttctgtatctttttctagtttgtgtaacctcactagaatatgaactccagtgggaagatacttgtgcaaattttgttttctgttgcctccccaactcctagaagaatgccaagcacatagtgagctactgaataaatatttcataaatgatagggtaactgataaattcactaaataagctmtaatgggtcaatagtaaaatgcatcagttcagtgcttagatttgctgagtatgagttgccttcagacatttcataataggtgtccaatatatactagagatgtggatatggagttcagatgatatctctggtatagaaatagagcttcacagggggtcctcaaaatacaggcaaactttgaaacaatgagagtgaatgagatattcattttgtaattcagctcttggttatataaaatatcctaccagtattctttgtagctacttttgtttctaatagaaatctccctttttcatcagtgagtcaatggaaaaattatctttgtagtcactttccctacatttcactctctgaatatctttctcatcaggaatgttgcttcttctttaaggaatgtagttccttctttatttcatctgatatatatcatcttat

SEQ ID NO: 249044 - DNA, 599 bp, Homo sapiens
aaactttgtctcacattttataaacatatcaacggtagaagataatgcttttttaccttataaaatayacaattttcatttctggatggtcttataattttctttggtgccataactattgttggcttactgaatagaaacttcatatccctctgaatcctctttcactctactatggattattttcaagggcattgtaactcaggctttagagggcaagcaggagaattgactgatagtcccaagttttacttctgtggtcgattgcagctttttgaacttgaagatacactactctggattctcttaagtgcttttgagaagtaatatattttataacacaggaagaccaacttacatctgcattactttactctatggaagagtggatctaataatattaattcattgattttgttttcaacaaatatttgccatgttcctatcatctaccaggtgttgttctaggaaatggggatacagagataattacaacaatgtccatgtttttacagtgctctccctttttactactgaattaatatgttattagtgttacatattgagattgtctctgaacacttcagtttctattaccg

SEQ ID NO: 249045 - DNA, 598 bp, Homo sapiens
gctgggttctgtggctcatgcctataatcctagcactttgggaggttgaggtgggtggatcacttgagaccaggtgtttgagaccagccgggccaacatggtgaaaccttgtctctactaaaaatacaaaaatcagctgggtgtggtggtgcacacctgtagtctcagctacttgggaggctaaggcaggggcattgcttgaacctgggcggtggaggttgcagtgagccaagatggcaccactgcactccagcctggatgacagagtgagactgtcttgaacaaaacaaaacaaaaatctgttcttctgacattagggtgactgaaaaccctgagtattttaccaaagttttgagtggaaggggacccgagcaggttgccgctgctagctgggggtggccagcttttatccccttgtttgtcccctcccatgtcctgtttctgtcctatcagaatgcccttttctcaatcctccccrcgattggttacttttagaatcttgctgataggtcagttttacagagtgctgattgttccatttacagagtgctgattggtgcattttacaaacctcttgctagctacacaacactgattg

SEQ ID NO: 249046 - DNA, 537 bp, Homo sapiens
gtggagtaggcagcaagctggaatgggataataaatggcagagaggcaaagaggctgctgctacaggtagccacctatgccagttgccaaaggaaaatggctgtgaaaagcgagcacatttatttccatgagcaaaagatgagaatttaatagtaaaacagtaaattgagtgtctgtccttttacctcttactagaatttctttgttgtcctttgcatggggaaggttaacaactcaacttaattcttcgcgccaaggaactttacaggctgtcatttggttaaggtctaatgggccttcagggatttgataactgaatgctgygctcactggagcagactgctccacagagggcctggaaaagaatgtttgagttggagaaaaggtgccgctgctccgactgcttttccacctgcaaaaacagaacctttggggacagtagcactgtagttaacgggaggccagattcaatcacccgggatcctaggaatgagaaaggtgttaaagtagccagctcttctgttttgccaaggattt

SEQ ID NO: 249047 - DNA, 585 bp, Homo sapiens
actcatacatccatctaaagtttatttttgtatatggtgaaatgaaggggtccataaaatcagatggttttaggtgtgtggctctgttaatgtattatctaacctctttcattggtctatgtgtctatttttgtaccagtaccatgttatttcagttcctgtagccttgtagtacagtttgaagtccagytgtttgatgcctctagattccagctttgttctttttgtttagagttgctttggctatttgggccctttttttgttccatatgaattttagaatagttgtttataagtctgtaaaaaatgtcattgttactttgataggaataacattgaatatgtaaattgctttcagtagtagggccattttaacaatattgattattcctatccatgagcatggaatgtttttacattggtttgtctcatctctgatttctttcagtagtgatttgtatttctctgaagagacatttcacctcgctggttagctgtattcctaggtattttattctttttgcctttcattcatctcttagcaactcagccccattattattcttctttttcactttgccattt

SEQ ID NO: 249048 - DNA, 576 bp, Homo sapiens
ggagagggctgtttttttttttcttttttaagtgaaaagttaacttagaaataatttcatcccactcctaaatcagaattaatactcacagttgggagttatactgtcatatttgagagccactgatttgaacatactatttctggaaatgatttctttttagtaattactaacagtttatgaaaagatctgcaattttatttttccaagtgttcaagtaatcttaactcatcaaaatgctaaaatcttgtatatcaaaggcatctaagacttactcatgtaaatggcctgcctgttctctgacagctggaacctcttagtacagctctgcagcctcagccccacccccagcactggcactgatctactttctaagcaggaattcttagctcattgtccaactttaacctccaccctgacctggcagccaggttttcctagctgagcatctgtactttacctagtcccaggsttttctcatactaggctcttcaggaatccttccacagaatactgctgagtccccatcaagactgagaattaatcttccattaataggaacccactaccttacca

SEQ ID NO: 249049 - DNA, 538 bp, Homo sapiens
caggaaatgtttcccatttcaaatcataacagataggaaaaattgcataggtgatgtatcatacaaactgaacttgagcactttttcttttctctaaacgcagttcaaaatggtctcatctttattatagtctttaaataattattaggcttaattgccacagttcatagaaattttaaaattagcaagtggtgcttatctctccgcagtgctcagtgttaataaaacatrctgctccataaacacatttcacatcatatttgtccatgattatttcattgcttttccaagtacagatgccagcaaacaaagtgttgctgaattcctgtaattaccagcatttgcctcgatttgggtccatgaagtatgtagtcaatctctattgtcttctgcctctgttttgaatctgtccccagtgcaggaatgtcaaaaacaccatttagcaacacagcctgctcaattttaaaaagggaaaatcacattcaagctactaattaagaaaagaagagaagtgagctgtgaattaaaaaaaaaaaac

SEQ ID NO: 249050 - DNA, 538 bp, Homo sapiens
caggaaatgtttcccatttcaaatcataacagataggaaaaattgcataggtgatgtatcatacaaactgaacttgagcactttttcttttctctaaacgcagttcaaaatggtctcatctttattatagtctttaaataattattaggcttaattgccacagttcatagaaattttaaaattagcaagtggtgcttatctctccgcagtgctcagtgttaataaaacatgctgctccataaacacatttcacatcatatttgtccatgattatttcattgcttttccaagtacagatgccagcaaacaaagtgttgcygaattcctgtaattaccagcatttgcctcgatttgggtccatgaagtatgtagtcaatctctattgtcttctgcctctgttttgaatctgtccccagtgcaggaatgtcaaaaacaccatttagcaacacagcctgctcaattttaaaaagggaaaatcacattcaagctactaattaagaaaagaagagaagtgagctgtgaattaaaaaaaaaaaac

SEQ ID NO: 249051 - DNA, 636 bp, Homo sapiens
tgggtccatgaagtatgtagtcaatctctattgtcttctgcctctgttttgaatctgtccccagtgcaggaatgtcaaaaacaccatttagcaacacagcctgctcaattttaaaaagggaaaatcacattcaagctactaattaagaaaagaagagaagtgagctgtgaattaaaaaaaaaaaactaccttctaaaaggctttaacaagaaacttgcaactctgctgcattcagaaaaagaatgatccttatttatcaaagctaaattctaatatagcagttagaggtgagatttaactgacttgttaatattttaaaaacagccaagtaaatgaaaattcargtaatttctatttcttttctatctttaaaggggagcttaattaactgatttttttcagctatctaacactcctttgttagaagattcttccatccacttaagatccttttgatattttgttaaatgtgcattcctttgaaaaactacactgatgccctatcatgcccagatatttggcaaaattgtcatagagttgtttcttcaatagaatacttctaccaaataatttgtcttaatgattctcagaacatttaggataaatcatgttgatcaccatttgattttgatcaaa

SEQ ID NO: 249052 - DNA, 470 bp, Homo sapiens
actacagtggttgaactctggctttttgtcccatttcyttcaaatttagataagaatagcctcatatttctgactgagtcaaagagaaactgacagtaaatggcactttggtgtaagaaaactattggctatgttgatcaaaaggatcatagatccaaagccacaacttgacaatggatattgggcagttggaggctgttgcaaaacttaccatcaaaggttggggctcctgtggttggcaagctagtcacaaagtaaattgattgatgttggatggcccattcagtctcagggggagtatccttgtggtgaggtgtactgtgagagcacagcacagcccatccctgtggtctttccattttggacatttttctggactctggtagatctgaaattcaacataaaaatgtgattcttaatttctagagatctggatgctctgccttccagctatgcctgttttttatatg

SEQ ID NO: 249053 - DNA, 470 bp, Homo sapiens
aatagcctcatatttctgactgagtcaaagagaaactgacagtaaatggcactttggtgtaagaaaactattggctatgttgatcaaaaggatcatagakccaaagccacaacttgacaatggatattgggcagttggaggctgttgcaaaacttaccatcaaaggttggggctcctgtggttggcaagctagtcacaaagtaaattgattgatgttggatggcccattcagtctcagggggagtatccttgtggtgaggtgtactgtgagagcacagcacagcccatccctgtggtctttccattttggacatttttctggactctggtagatctgaaattcaacataaaaatgtgattcttaatttctagagatctggatgctctgccttccagctatgcctgttttttatatgtgtaagtattaggcagtgggagctacaaatgctttgtcagtcctattcattaat

SEQ ID NO: 249054 - DNA, 620 bp, Homo sapiens
attccatttttttttcttttacactatgtcagaatgtggtgccttcagcaatgacgagaaaaacgtggcaaagagctaaattacattgtctactacttttttttgtctgtctgatcattcaggttaatgaagatccctttgggttatcagaggactcctaacaataatgttcagcaattttttttttttttttttgwgacggagtctcattctgtcgcccaggctggagagtggcgtgatctcagctcactacaacctctgcctcctggggtcaagcgattctccttcctcagcctcccgtgtagctgggaatacaggcacacaccaccatgcccagctaatttttgtattcttagtagagacggggtttcaccatgctggccaggctggtctcaaactcctgacctcaggtgatccacccgccttggcctcccaaaatgctgggattacaggcatcagccaccgtgcccagacaaagttcagcaattttataaattcaacagaatcagtgtcaaaccatgattataaaacggtgctctttctttcttgcttgcttgttttctcttattctttctttcgttttacccttcaagtcattttattctctgtttatggaaaat

SEQ ID NO: 249055 - DNA, 528 bp, Homo sapiens
acagggaaaacagccaatttactgatatgcacaacaacatgaatgattcttaacacatgttgagtgaaaaaagccagacacaaaatgagtataatttcacttatataatattagagaatagacaamattaatccatggtaactgtagtcattggctaggtctgcaaacactacaggttggatggattaaataacagaaatttattttctcacatttctggaggttagaaattcaagatcaaggtgtcagcaggctttctttctgaggtctctttccttggcttgcagatggctgctggctttttgctatgccctcacatggtcattattccatctatgttagctgtgtcctaatctcctcctcttctagtattatatttgagcccaccatgtgacctcatgttatcttaattcctttttgagggattctatctccaaatacagtcacattctgaggttctagggatcacaagttcaatatataaatttggtggaggtgaggattcagcccataacaggaacagaagtc

SEQ ID NO: 249056 - DNA, 528 bp, Homo sapiens
acagggaaaacagccaatttactgatatgcacaacaacatgaatgattcttaacacatgttgagtgaaaaaagccagacacaaaatgagtataatttcacttatataatattagagaatagacaaaattaatccatggtaactgtagtcattkgctaggtctgcaaacactacaggttggatggattaaataacagaaatttattttctcacatttctggaggttagaaattcaagatcaaggtgtcagcaggctttctttctgaggtctctttccttggcttgcagatggctgctggctttttgctatgccctcacatggtcattattccatctatgttagctgtgtcctaatctcctcctcttctagtattatatttgagcccaccatgtgacctcatgttatcttaattcctttttgagggattctatctccaaatacagtcacattctgaggttctagggatcacaagttcaatatataaatttggtggaggtgaggattcagcccataacaggaacagaagtc

SEQ ID NO: 249057 - DNA, 528 bp, Homo sapiens
acagggaaaacagccaatttactgatatgcacaacaacatgaatgattcttaacacatgttgagtgaaaaaagccagacacaaaatgagtataatttcacttatataatattagagaatagacaaaattaatccatggtaactgtagtcattggctaggtctgcaaacactacaggttggatggattaaataacagaaatttattttctcacatttctggaggttagaaattcaagatcaaggtgtcagcaggctttctttctgaggtctctttccttggcttgcagatggctgctggctttttgctatgycctcacatggtcattattccatctatgttagctgtgtcctaatctcctcctcttctagtattatatttgagcccaccatgtgacctcatgttatcttaattcctttttgagggattctatctccaaatacagtcacattctgaggttctagggatcacaagttcaatatataaatttggtggaggtgaggattcagcccataacaggaacagaagtc

SEQ ID NO: 249058 - DNA, 580 bp, Homo sapiens
agccacaatccagaccaatggttttcttctgtcaccctgaatttggggaaaamaaaaaaaaaaaaggttgggggtggtggggaataaagagcaacttttaccttccattcttgattgggcactacagagatcctggagaactgatcttgatacaaattcctatcttttttgccagctttttataagttgtcttaaaattttatctgcatagtttggaatgagtcaggtgtcaccaccatctcacctttgttgccagaattgcaagggttgaaatggaataatccctttcctctctatcctaagggacacagccaacacccctatgacaaagacagattaataagagaaaagtataacaaatttatttgatcatagttttatgagatacaggagtcttcagaatgaagacataaagatacaaggaaaactatttttatgcttaggttcaatgaagaatgggcagccctttagaaatatgactggaagtaaagggtatgatctaatgccaatagactgagtaggggggctcaccaaggcctgtctctcagatttttcttggcctctctgtgtagcattccta

SEQ ID NO: 249059 - DNA, 503 bp, Homo sapiens
ggtgacagacagtaaagcaggagaaggtcatagagaaagtttgcttctgagactgcttcttaagcctttagtttgaagtatagtattctgaatcccaaaatggccatattgctgcttggtgctactgagaagaaaaaaaacctgcaaatcaggaatttggtagtaacaatttagaggtaaaactatatataaagataaaggctgtgccagttatcaacttattgttccctcaactccaaatacatccttcatttcctgctgtatraaaaataagggttctttaaatattttttcctttgctagctagatgatgttaagctttgtcaagagggctctaagggcactgcatgagaaaggttttctttccaggttctggtgtgttcactggcagcctcctgcagcacttgcagcttctctagtaccaagcacctacagcacagaagattccaacacacctgactcctgctgtgtatgggattcagctacacccaggggccagtcag

SEQ ID NO: 249060 - DNA, 628 bp, Homo sapiens
ttattgatgttggtaaggaacactgagaagtagggcacagcagaagtataaaatgctgtcattatttcctgacagtcaggtcaagctctataaataatatggtcaggctctgagaaccayattatggtctataatgacttgcaggtgggcctcactcgagaaacttggagctctcattcgaaagtgtcgtgtcactgaggctgggtaaatgtcatcatgcacattttgtggtggtagcctttcaactccataactctgaaaattaagattttactatcccaacaccaatgagaatgtactgtggtgaggatacaaactccattttattttattttattttatttttattcaacatagacttaatggagaacaattatcctaaaggttcattacttcattcaacacatatttattgtgcactttctttgttctgttccttttctaatggcagcatacaagaaaatcatttaaactgaaacctctaaaaccacttaatcaaatcttacctataaaatggagtctgtggccgggcgcggtggctcatgcctgtaatcccagcattttgggaggccgaggcaggtggatcacctgaggtcaggagttcaagaccagcctggccgacatggtg

SEQ ID NO: 249061 - DNA, 628 bp, Homo sapiens
ttattgatgttggtaaggaacactgagaagtagggcacagcagaagtataaaatgctgtcattatttcctgacagtcaggtcaagctctataaataatatggtcaggctctgagaaccacattatggtctataatgacttgcaggtgggcctcactygagaaacttggagctctcattcgaaagtgtcgtgtcactgaggctgggtaaatgtcatcatgcacattttgtggtggtagcctttcaactccataactctgaaaattaagattttactatcccaacaccaatgagaatgtactgtggtgaggatacaaactccattttattttattttattttatttttattcaacatagacttaatggagaacaattatcctaaaggttcattacttcattcaacacatatttattgtgcactttctttgttctgttccttttctaatggcagcatacaagaaaatcatttaaactgaaacctctaaaaccacttaatcaaatcttacctataaaatggagtctgtggccgggcgcggtggctcatgcctgtaatcccagcattttgggaggccgaggcaggtggatcacctgaggtcaggagttcaagaccagcctggccgacatggtg

SEQ ID NO: 249062 - DNA, 605 bp, Homo sapiens
cacctaaatgtcctgctcttgttcacatactctatttatatctgcaaatgtcaaaaattctaaatgaagtctatgagccttgcttgataaagcaagatggctctctttygtagcaagcaaaaaatagttaataatatcctagcacctacttaaaactgatctctaagattctttaaaaaatattctttagttaattcaggtgatgcacatttgtatcctggttcaggaatagttttttaatgtatgattatttggtagagaatattagatttattacctttgctaatgaacacttagataaaagtggtattctcaaggtaagtattctcagagatgaacttatattaccatatattaattttcattttagttcagaattatataaagaatgaacctagtggcttttacatatagaaaatgggacccctccaaagtacactctgccataatttccaagtgttcctgtcacttttataatgtcacatatcaatagaaacagaattcatcatcatggaagaaatttcagagctttcgagaagtactggatgaaactaaaagacacagtaattaaacctcagttctttcaaatatgtgttagtcctgtt

SEQ ID NO: 249063 - DNA, 301 bp, Homo sapiens
tggtaatctgaaggttgacttcagtattcatttgggattccaaatttccaacaggctagtactgttcctctttgtcccatgagacatttggacagcttttgtcctcttgccagagatactaaaacagtaaggattrcagccctatttctctttattgtggtcttcaagaatgggcaaggggtgggaagataggtatgtgagcaatgccctatgggcttaaggcctttcttagtcccagcagagtcagatggccccttgcattggatctttcatcccaggcattatcagctgccttaggctt

SEQ ID NO: 249064 - DNA, 615 bp, Homo sapiens
taactttgataacacctgcacatttgtataaaatgctcaatttaaaaagcaaataattattgagccagccaaaggttgtcagtctcattaataattgtatttttaattttctcttcacttaatgatttactttcttgagcttctaatcttgaaagtgcactttaatagarccatagagagtggtgttaaagagatggcacatttaccattgtgcagtaacataaaatcaatggcagctagtcatacaggctttttcaatttccatcacacatggtacgcagaccttggttcagtggataatccaattgtaaacagggactcaccgttaacaactttaggaaataggattagcaatttctaatttcaaagcaaacctatttcatttttgtcctctaaataaaaacaatgtgttcagagatttagcttttcagctttcagagctcctcagaaacaaaaatgttgcgaacacattatttattgtactgatgccactaatagaaaccatccagtatatgtttctaatagccttttaattgtttggtactaaaaaaataaaataataacagattgaagcttaactgatgaaacttaaaatttgaattgaaaagtaaaatt

SEQ ID NO: 249065 - DNA, 499 bp, Homo sapiens
catggaaatgagctgccttcttcctctacaagcccttcgcctcccagatgatctaagaattaagcgtgggaatatgtgtttcattgccagtaaacagaccagtcttctggatctcttcttatgtcctaagtaaaattagatgtagcattttcagcctggtttcyaaacgctttgtctgccagccggcagcttgtcactttgagcagacttaaccaattcgtttatttctctggttcttagctagatttgaatcaggtgacgctttaataccatctcagcaaaaatgtaaactgtgacctctatgatgagtaagtattgtctgggctctggaaatttattttgtgaaaaactggtagcacctgtgctacgttttatggaagacataataatgttaactcgcatttcactaagtgcctttactctgggaacctctgactgttttcctgatgaagaagcgcaattttccttcttttttacctagagacagtgtaagacagac

SEQ ID NO: 249066 - DNA, 568 bp, Homo sapiens
caaaatttcaaagggatgccatgcttgaagcagacagctttagactctacctatcatttcaaaggacttgttcacaaactgatgcgcagcttagtagtcaagatttcagttgttggcatcagacaaattttgtttgagatctgattgcattcttaactagctgcaaagctgtggcaatatacttaatttctttaaaccttagcttcattgtctgtaaaatgggagaataataatatttacttcacagcattgctacaaagatgaaataaaatattattatgtgtaaaatacttagcaagggcttgtcacrtaattagtggtgcatgtatggtctcctgtgttaattcatagctgcttttgcattttattttagtagtcataccagaaggtacttatttgatcttgtcaattttaaaacaccttcctaggaaacctcaggaattgaatagctattttcctcttcactgctgtggaaacattatgcaccttcctttattacctgatacatttctgcattatcattgtggtttaattatttggttacttttattcctccagggaaactgtg

SEQ ID NO: 249067 - DNA, 335 bp, Homo sapiens
aatttacagtaataatagccacattaccctctgtgaggtaaaattcatattgttgaatgcatgactttcctctgcagtaccattatagtcatacattttatgatyccattgactcatgccttcaatggctgtggtataatctgactgacatgcacaaatagatcaatttctcaatgtgattattcttccactttaccagatttttggtgactattttactgttaactaaatgtcttctgattctgggcatattaaagagattatcaactcacataatttttgcaaaatttcttggttgcttatcttccaacattgtttcttctaagttttggata

SEQ ID NO: 249068 - DNA, 598 bp, Homo sapiens
taatgacatagtgttactcaaagactgacttcatacctaaattataaggtaactcccagaccaccattggtttgattatcatctggtgtcctgtggttttattctctactaagacccaataaaaatccaaaagttgtttcttaaaaagagaactgatgttttccaaagaagaaatgtctttgctctaaagctctaagactgtaagttttcttagagtgttttataatccccactacagcatcccagtttcccattggctccagagattcaaaatgtccaagtgacagaactgctttacttctagattagaaaagtgtaaatattttttttattttcccttggatctgttaaatgtcagcaaatttatatcacccaggagataaatcagagtactacaaataactatgagaatactaaakattgtgctaccttcttagtgttagaggacaatttctaataactttcactttgaggggatagatggacatgacccaaaccaccacaatgcataatcattattgagatctcaggacactaaattttcatggaatttatctcacacgttctggcatgcatgtaactcatcaaggtgtagagt

SEQ ID NO: 249069 - DNA, 590 bp, Homo sapiens
catgtaactcatcaaggtgtagagttacctaacattgcgtgtttcccagcccagtgaatataataccattattataaaaaattagtattaggccctatagatggtgatggtgggatgctcaatttttctgatagatttaattgtagtactaagctagaaaacatatatatcccaagaggcaaggtagtcaattttaaactacagccctgtcagataaaagtctttattgtgttgggaaataaaatacattactgagatgaatatctggagagcagataccagaatatccattttctttagtaaagaacagtctctgcaaatgtactatattcatccataatttttttaaccttgtaaggtatattccctgtaatmttgtaaggtgtaatatattaccaaagattttagttgttatcatcaggagaaacagacagcaaaaactctgagagaaactccatctttctggccaatctaccacttttgattactgttcagtagtctcaggtagtagaaatttaatgaagactttgagcaaacaaccaccattcaagttaccacccaatcctagacttaacctctgtggcatgagt

SEQ ID NO: 249070 - DNA, 544 bp, Homo sapiens
aacattgcgtgtttcccagcccagtgaatataataccattattataaaaaattagtattaggccctatagatggtgatggtgggatgctcaatttttctgatagatttaattgtagtactaagctagaaaacatatatatcccaagaggcaaggtagtcaattttaaactacagccctgtcagataaaagtctttattgtgttgggaaataaaatacattactgagatgaatatctggagagcagataccagaatatccattttctttagtaaagaacagtctctgcaaatgtactatattcatccataatttttttaaccttgtaaggtatattccctgtaatattgtaaggtgtaatatrttaccaaagattttagttgttatcatcaggagaaacagacagcaaaaactctgagagaaactccatctttctggccaatctaccacttttgattactgttcagtagtctcaggtagtagaaatttaatgaagactttgagcaaacaaccaccattcaagttaccacccaatcctagacttaa

SEQ ID NO: 249071 - DNA, 530 bp, Homo sapiens
acatgttacagtgctcttttagctctgccaattgtggacagcttaaatgttaaaagctcaktgggccctttgcctcgtggtttggggcaggtgccatctgccaacaagggcaaagggccagtgtgacagcctttcatatttgcacggctcccaagctcttgtccagtgtttgtaaaaatgaagtcacatgaatgaattgaagaatggtaaatgtgagggattttattgccaatgaaactggccctcagtggggaggagagctgaaaaggggagtgaaggggttaggtaatcctcccctgaattctggctgtctccagccagattcttctccaaagttatgccatcaattgtcccctaaattcaagccacttctcttcaatgtccagctgctgcttctccctgctggctgagtctggagtctttataggcacaggatggggctgggcagaaccatgggtggtttaggaaaaaacaacattcaagagggaaaacagggatatatattctcactttggcctgtggtttcaggc

SEQ ID NO: 249072 - DNA, 530 bp, Homo sapiens
acatgttacagtgctcttttagctctgccaattgtggacagcttaaatgttaaaagctcagtgggccctttgcctcgtggtttggggcaggtgccatctgccaacaagggcaaagggccagtgtgacagcctttcatatttgcacggctcccaagctcttgtccagtgtttgtaaaaatgaagtcacatgaatgaattgaagaatggtaaatgtgagggattttattgccaatgaaactggccctcaktggggaggagagctgaaaaggggagtgaaggggttaggtaatcctcccctgaattctggctgtctccagccagattcttctccaaagttatgccatcaattgtcccctaaattcaagccacttctcttcaatgtccagctgctgcttctccctgctggctgagtctggagtctttataggcacaggatggggctgggcagaaccatgggtggtttaggaaaaaacaacattcaagagggaaaacagggatatatattctcactttggcctgtggtttcaggc

SEQ ID NO: 249073 - DNA, 298 bp, Homo sapiens
aaatgaggcttttaatagtagagaggtgctttcctagtcactagagcaactgaacaactgcagaatactgaaataggcagaaaagctttcttgtcactcttaactatatacagagagttaccagaatgtccaygttgtgggtcagcacatctgaaaataggaagtgcagagaaagctgaacaaagcgttatcagttccttattacaattccaccactggggaggagtaaatgagcagtgaaagacacaattacattggagttctctcatggaaacatgaggtcacaggaaaggaggtg

SEQ ID NO: 249074 - DNA, 568 bp, Homo sapiens
agttatatatgttcacatgcaataataatgcatttgcttcttgcctatcttatttttgtcaaaygtccaagctgccagtattttacaaaaattattatactaaaattaaaaatgaactaagaagcgagacagttgagtgaaacatttgtgattcaaagcaattatagatgatgcatttgaagggagtgttgagacctcagtattgtattccattgatttcctgatattaagagtaatgattctgactggtatatatttttccataagaaaattaggtttactacatctcactataatcattgaaaacatgagattctacagttgaaatatacatattgggcaaccttattttagggaaaacctgttacttatttcagcttacattactgcaaataaggaattctctctctcttctctatctggttaggaaatatggaaggaaaaaacttctgtctccttttgttatttgttcttttctaagagagaagggaaatgttactaatcaaaaaaacgacagatattgagctgtcttggtttaaagcctatcctcaaagtctggcaaagattt

SEQ ID NO: 249075 - DNA, 568 bp, Homo sapiens
agttatatatgttcacatgcaataataatgcatttgcttcttgcctatcttatttttgtcaaacgtccaagctgccagtattttacaaaaattattatactaaaattaaaaatsaactaagaagcgagacagttgagtgaaacatttgtgattcaaagcaattatagatgatgcatttgaagggagtgttgagacctcagtattgtattccattgatttcctgatattaagagtaatgattctgactggtatatatttttccataagaaaattaggtttactacatctcactataatcattgaaaacatgagattctacagttgaaatatacatattgggcaaccttattttagggaaaacctgttacttatttcagcttacattactgcaaataaggaattctctctctcttctctatctggttaggaaatatggaaggaaaaaacttctgtctccttttgttatttgttcttttctaagagagaagggaaatgttactaatcaaaaaaacgacagatattgagctgtcttggtttaaagcctatcctcaaagtctggcaaagattt

SEQ ID NO: 249076 - DNA, 568 bp, Homo sapiens
agttatatatgttcacatgcaataataatgcatttgcttcttgcctatcttatttttgtcaaacgtccaagctgccagtattttacaaaaattattatactaaaattaaaaatgaactaagaagcgagacagttgagygaaacatttgtgattcaaagcaattatagatgatgcatttgaagggagtgttgagacctcagtattgtattccattgatttcctgatattaagagtaatgattctgactggtatatatttttccataagaaaattaggtttactacatctcactataatcattgaaaacatgagattctacagttgaaatatacatattgggcaaccttattttagggaaaacctgttacttatttcagcttacattactgcaaataaggaattctctctctcttctctatctggttaggaaatatggaaggaaaaaacttctgtctccttttgttatttgttcttttctaagagagaagggaaatgttactaatcaaaaaaacgacagatattgagctgtcttggtttaaagcctatcctcaaagtctggcaaagattt

SEQ ID NO: 249077 - DNA, 552 bp, Homo sapiens
aattgcctgattttaactttagttttaattaatttatatgcttatattctgttatatatttattataaatatattatactaatatgagatacacaataacttatatatgaactaggtttatgatgagctaagtttgtgatgaagttgcacaaaattgtggcttagaagcaatataatrttgtctctctaacataaatgtcagaacgttaatagtccagggctggacagcaactgtgacccataaagacctctcaagttccattctctcacttcttgcattatactggactttcatttctaagatcactttatgggctaagacaattcctccaaattgagtcttcataaacatactctatgcaacagaaaggagaagagacaaagaagcagggttaaaggcttatgctagctattgtatgagaaagattcacacagtaatcacgtttgtataccaatgtttgatggtttgtcactcagtcatgtcttagctgtcaatgaggctaggaaatgtagattttactttggggagtaatgttccctgtgagtatttca

SEQ ID NO: 249078 - DNA, 467 bp, Homo sapiens
acaacactaccttctcatctcaagttcagtcatgatgtattttgcttctttagcagggttaactcaatgtgaaagacctaagtagcaggttcttcaagttgtcatcacagcagaaatctcactgggagtcctgttttctattataagcctaatttggcatattgattaatttaatttaattcattaataattaaattggccacctacactatatgaggtgctgaggtagatgctttgggaaatgcaagatttatattgctctcaatatcccacactctagggcacaccttatttgaccacatttcctgtctcagattgtgatatgtctttactccaacttrccaagtcagattcttcaatgcacagccttggggctcaatagttctgtgtgtaccaattcattttttgcttttgtcagcaataaaccttaaaaaaattatctgaagtctaaaataattacttttgtt

SEQ ID NO: 249079 - DNA, 467 bp, Homo sapiens
acaacactaccttctcatctcaagttcagtcatgatgtattttgcttctttagcagggttaactcaatgtgaaagacctaagtagcaggttcttcaagttgtcatcacagcagaaatctcactgggagtcctgttttctattataagcctaatttggcatattgattaatttaatttaattcattaataattaaattggccacctacactatatgaggtgctgaggtagatgctttgggaaatgcaagatttatattgctctcaatatcccacactctagggcacaccttatttgaccacatttcctgtctcagattgtgatatgtctttactccaacttaccaagtcagattcttcaatgcacagccttggggctcaatagttctgtgtgtaccaattcattttttgyttttgtcagcaataaaccttaaaaaaattatctgaagtctaaaataattacttttgtt

SEQ ID NO: 249080 - DNA, 568 bp, Homo sapiens
acatcacacactggggcctgtcaggggatggggggctgacattaggagaaatacctaatgtagatgatgggttaatgggtgcatcaaaccaccatggcactatgtaacaaatctgaatgttctgcacatgtattccagaacttaaagtataattaaaaaaaaaacaaatttgtggtatgtagctaaaatagggcttgtagatgatttttatcaktaagtgcttatgtaagaaaaagaagaaaagtccaaaatacatttttaaacacaatagattttttccattttgttatatactctgattagaaataaataaaatatttgtatctttttacatctctgaaatgcagatttctttgcatgtcaacagtttatatcaatattaatcatctataatgtcttttaccttctctgtgtgcataattttcatttttctctgatcgtcaccttccaaagcgcataaatattcaaagcactgtagcttcctgtgccagctttccccactccccatcatttccccattttacttaactctttcaaatacattgttaatgatattaaatagtaccct

SEQ ID NO: 249081 - DNA, 585 bp, Homo sapiens
cactgcaaaaacattttctcacctgctttctcaaacactgaagaaactgagacagaataaacagagcaaggtgtttgttacagatttgtaccagtgaaaggtccccagaaagcaggattacatcaaaggcagcggtttgaaatgggtctgcctgggagagaattccagagtatgcagtgcccatttgagttgccttgtgtcagacaaaaatgtcctgtcctttacaccttaccttgccctgtcaccagatgcaggttgtatcaggaaaggcatgacctcaggcaaggtagctctgtggcacagacataccttgaaggggctggctgctatagccagtatttccttgagtggggyacaggtagcacacttctgtgcataccacacttcaatctacttccttttaaaaatgtgcatattttacaaacaatataaaaaattccataaaaacatcgaacagtcctctgctcctcctttccctacccttgaggggaaaccattgtctctcagcacttatttgtatatttccaaataaattatttatagtatattgtcttatttaattatgttggtattaacttactgcca

SEQ ID NO: 249082 - DNA, 623 bp, Homo sapiens
tgtgtgtgtgtgtgtgtgtgtgtgtgtgtgtgtttaaatacacaagtcgtggtttacttgagaaatagaaaaattaatctrctattttaatataaagtgaagaattttgtaatatagtttttcacctaaatataggaggaaatgtctgcaaaaaccttatcaagtaggtgttatatgagttgagtcttaccggccgtggacgagttattgtgttacacttgtccctttattacatcagttatactggggaatggagcaaaataaaatcagggagagagactggaatgagaccacgaatggcattgtatattatgcaggtattttaaacagtattttctagaaaatggaggccattaaaggatttttaggcaagaaagtaacaggacaatattttcagcaatgtggaagatggttgctgggaaggctaaacaagagatgctaatagggagaacattacattactacaagcaagagatgataaggatgtgaattaaaataatggcattaaacatccagaaattcaggcacaaatataagataaatattatagaagccggtgactaattggttgtggggaacaaagagaagggacaaacagttccagaagcaagtgtctgagtaaa

SEQ ID NO: 249083 - DNA, 446 bp, Homo sapiens
gctgagttaaagatgaatatttaaacaggactttaatttcactgtggcctccacaaggcaaggagagcaggagaaatttagataactctcaccatcaggcttctgggctctcctggcttctgactttccctttcatagaaatttccattttaatctttactacctgagggctctcaaacatttaaaaacaaatcctcatagtttgtgcctgagaaatcatgatcccacaaggcagttagacttttctctcaaatgccaaagctgaaatttgtatttcagttttgtgcttgagaaattctacaaaattgaccccaggaatatccatctcctcaagatatttccttaaatgtttaaaactttccccatgaaaagtaaaayggagtgcatttgtggttaataaaatataatagcccagttggataaaatgttatgttggataagtgtta

SEQ ID NO: 249084 - DNA, 553 bp, Homo sapiens
tgagttttagaaattaagggattgtttaatcttttattggaaagttaataaacagtacctatctctctgtatctatttctagctcaatttctatctgctcctgaatttggctcattcatgatcatgtcttcctttacagcatgatacccagaactactcagggcattccaactgttaagtagaggaaaagcatcatacaatgtaattcattcaccatatttatcatatgttttatgagagcttattatataataggcagtgttttaggctatacagatccaaaaacaaacatatgtcgatgttgaaaactaaataggtttaaaaatatatttcttttcaaaatttgagtgcttgaaatgcttccataataacacagcagatatttaacatcaaaattcataacatatggtatatttattcagcataatcayattaattacataggtagtagggtgacagaattcatcagtgacaaggccagagtactgaataatttgaatgagaatttaaaaattagatcattaacagtctgcctttatgcctgacaaggtat

SEQ ID NO: 249085 - DNA, 616 bp, Homo sapiens
tcctttcaaaaaaggtatttaggtaatggtgtgctggagctgactcgcacaagygcttcagatacaactgtgtatatctcttttcaattgtgtgtagtgtcaccatgttgatggtttgaagtcagccacagtatttataccgtgtaaactacagaaatttttaaatgctgcaaaacacagcttcattccccagcacaacagtgccagttttaaagcacttcccagtacagcactatatttaatccaggagttcaattatcttctcatcgatggcagacaaaggcaaaaggacaaattaacagaattgtatatgcagataatcattgaaaactatgcacactgttttcaaatctccagtatttaaagacaaattaacaatctgtggaggagaatacaaaaatctcacttattctttgcttaatatcaatttctataatattttctatcaaatcggggcaggaaggggctggagaagatggaaagaacacatagagtagtttgcatgtggggacacacagaaaagcacaaaaggctttataaaacaaggaccatgtaattctgtaagtagatgtaatgtggctcttccttaattccacacactagagttaccggccta

SEQ ID NO: 249086 - DNA, 583 bp, Homo sapiens
tattctttgcttaatatcaatttctataatattttctatcaaatcggggcaggaaggggctggagaagatggaaagaasacatagagtagtttgcatgtggggacacacagaaaagcacaaaaggctttataaaacaaggaccatgtaattctgtaagtagatgtaatgtggctcttccttaattccacacactagagttaccggcctacccagtgcctccttattatgcagttgtatccttaattaacacactataaacacaagctttttaattcacagttttacttcttgctatttgctttctttaaacctgtatttctggctattatatatcttgaatatcttaatcgtaaagaactagtaaactttttcgagttgcttctcttttagcaagagtaaacattaactgccttagaagtctattccttgtcagacttcgtattatctgaactgctacaaagttttctcaagtagactcttccttccatggttaggagatgtggaacattcgcactggccacattgccaagatttccatattctataataatgtctctgctacaattctgtgctaggcaatat

SEQ ID NO: 249087 - DNA, 583 bp, Homo sapiens
tattctttgcttaatatcaatttctataatattttctatcaaatcggggcaggaaggggctggagaagatggaaagaacacatagagtagtttgcatgtggggacacacagaaaagcacaaaaggctttataaaacaaggaccatgtaattctgtaagtagatgtaatgtggctcttccttaattccacacactagagttaccggcctacccagtgcctccttatyatgcagttgtatccttaattaacacactataaacacaagctttttaattcacagttttacttcttgctatttgctttctttaaacctgtatttctggctattatatatcttgaatatcttaatcgtaaagaactagtaaactttttcgagttgcttctcttttagcaagagtaaacattaactgccttagaagtctattccttgtcagacttcgtattatctgaactgctacaaagttttctcaagtagactcttccttccatggttaggagatgtggaacattcgcactggccacattgccaagatttccatattctataataatgtctctgctacaattctgtgctaggcaatat

SEQ ID NO: 249088 - DNA, 509 bp, Homo sapiens
tctttctttatgttaaccaggaattgtttgttaggaattttacatgtttcaagcatatttaaaatatcctagaattcggtgctctttgttacactacagagaccttgagaaaagatgattgaacactacttcctttgctatcctatttcattgtttaattacttttactttccattcagtraacacatttgtataattctactaaccaaagtgctacaaaattattcaattgagtgcatttgaatttaagaaaaattaacataatttcattttaaattgcttggtaggaaaaggtgttgtggcaaacaggattgaaatgtatatggcaatcttaagtatgtttttcctcacaagtttataataggctgactagcatgcttcaagagctctcaagtgttccaggtgctctggatcacaaatttattctccttatacttgtgtgtttcaattcactaagtaacagttttataactagaaaagttgagtttcaacgttatgcatgcaaaatg

SEQ ID NO: 249089 - DNA, 564 bp, Homo sapiens
cctttacaaacatcgttctagttatttaccataatccaaatgaaatttgaattcaagatattttaatgacacaatattaattgaaaaccaattcacacaaatataataatgttttgaatacaaggtgccactgacatagtgggaatatagatttttatagtctttggcaaagtagaatgtagctaggttctctatagatatgtggggatgttaccyttctttattgaacatgtgtgaaaaaattaattatcttccatgcaaaataattcatctatagcatatagaaaaagatgaaattcatcttctgtctgcacacttatgttcattcatctcatctccaagctagtcatagactgaacacaaagcaaagacaagtgtactcaatctctgaaagcaaacagctgcaccagagacggggtcaaggacatgtgcataagcatgcatgcagcaattagtattacattggacccatttccttctttgagtggtagctaaaacaacacaaatctggatgacacaaattttaatgaaaaaattatttactgtaatcttcaaactcctagt

SEQ ID NO: 249090 - DNA, 559 bp, Homo sapiens
tacaggtttggtaatagaaaatggactctctatataaaattgccactaatatcaaatgcagatttttcaaaacatttaccacttgatggctttcaaaacaataataagaaaacagagatcaagggacgattcatataaagcttatctcactattcacctttgattttctaatttgattccattagtagaacctatgcctgtttttggaaatcaatgtgatggaaaagttgaaaaacrtatccatggagaaacacaaacacatgaaaagcatcagagttatttatcaaacatgtgatccagaaggtgtataaggttaattttttagttcttttttttgcataatcctatgctatttcttttattattattattattatactttaagttctgggggccataggcagaatgtgaagatttgttacataggtatacacatgccatggtggtgtgctgcacccatcaacccattgtctacattagttatttgtctacattagttatttcttctaatgctatccctcccccagtccccacccctataggcgcctgtgtgtgatgt

SEQ ID NO: 249091 - DNA, 597 bp, Homo sapiens
agaaaatcttaatagaaacactcaatatttattatgtagacacatatacacatagatatacacacaagctatcacatattctatataactgttcatgtattttgcctaagtatacaaaactgttttctttttggactcaactgactttcatttcaccaaagatgccaacacacctcctactgcagagctttgtcatttgttgacactttgcctacaattcattttccactcatttgcatcatctcatttttatatgactagatagattccatctttcatgattcaaggtaagcatcatatccttaggaaagtcttacctggctagcaatctagacacttgtccttactattcaacatttcagcacaagatttgttttcttcatagtatctrttaaagtagattatcatgtgtttgtattttcacctacagagttgctgtagtcactaatatatagtcagcatcttgtacggaatctgttacctagtaggctctgaataagcattaattgcacaaacaaaaatgttaattgtgtatatattatgttatatatcacagatgtgtaataattctttgtcatttagggagtgacaagggat

SEQ ID NO: 249092 - DNA, 619 bp, Homo sapiens
gtactcagtaaagaatatttagaaacaaaataactccataaaacatctgttcgtatcttagtgttgttctactcagtgttgattggcttgtccttaattcgttgtgatcaggcctcatgcagagaactgagaacaaacaaaaatgaaatatatttcaccaagtcatgagcaagtttttacatatttaatgaataaaaatcatacttgtacatgtgtactcaattttgtcaaagtgaactcaagatttgtcttattgagccttacaagtataataaagaaaactgtgacattatcaaattgatttatttttttctcagttgcttttcttaactctgcattgaattttaattgtttaatttgtgcaattgggaaagatgttgaatgttaggcaaataatttaaaagtggccaaatctgacatgttcttttccatttatttcatagtattggtaaaaattacaattaaygccattgcttgttatcattataaattaatttattttgttatgatagccaagttaatagcaaaataattgcagaaatatttttaatccagtatgctaattatcattgtgaagaataacaagagtttgccccagaatatgttcaaatttttaagc

SEQ ID NO: 249093 - DNA, 591 bp, Homo sapiens
aaacaaatttagagaggaacttaagaagtatggggttaccacaatagtaagagtatgtgaagcaatttatgacactactcttgtggagaggaaggtatccatgttctcaattggccttttgatgatggtgcaccaccatccaactagattgttgatgactggttaagtattgtaaaaatcaagttttgtgaagaacctggttgatgtattgctattcattgtgttgcaggccttcagagagctccaatacttgttgcttagcattaattgaaggtggaatgaaatatgaagatgcagtacaatttataagacaaaaccagcatgaagcatttaacagcaagaaacttttgtagttggagaagtatcctcctaaaatacagctgctcttcaaagactccaaaggtcatagaaacaactgttgcattcagtaaaactggggtgcctcatgctattgccttggaagtggaacttgagacgaccttttgttatacatattagacaacatgtcggcttagtgaataagtctaatgaatcttccataggagtaytgaaaggcagttttaccagaccacaagctagacagatttgaca

SEQ ID NO: 249094 - DNA, 563 bp, Homo sapiens
tacttttgtttgaattgtgattttttttcccttttcttcttgacttctcctgagaaaaaagaagtgggtttctgctaataaattgagcaaacatctaatattttgtatgtcttttgagctgtgtaacttaatatttggatacctgataatttgtttyactatgtacttgataaatggtgatgtgcattagtattcgttcaactatatatttatactgtctggggacatgttttatagttctttgggagaaataatttgtcagtgtgtaccaaattgtaaaaacctagtgtgagagcttaaacatctaaataaataatgaaattgaaatgcagaaaaaagggagtgggaatttttacacgttttctgtgaggtagttagtcaacacatttaacctgatgacacaggttttttctgaataatgtgtttctaatattttcttcatattttctccctctactttgtatgttttcactttaatagttggacatacttagattgaactttacatcaatcaattttctatgatattttctatctaactgactttcgcattatcaatgtta

SEQ ID NO: 249095 - DNA, 539 bp, Homo sapiens
tttttggccatttctgtttcatcagtgcctaaggagctaaatcaagtggaaagctttatctgaaatccagaagtcttatccattgagcacataaagtgtaayacattttacatttaatgaagacatacatggattgccatcctagagccctggctaaattatctgactctcagatgactgtgttctgcctacttaacttctctatgcagcaactattacttttaatgtttttctccatcctttaactaacatttaaaattattttgcactttcatttgtaactacctaggggtgaaatgcaacagttatttttgtggtggttagagtggtccctgaagaaatgcatttaaatttgcaaagtactttagttgcttttgagacttaaattactgctctgtaaatgtagcatattgcaactgccaatgctgctataaaataatgtattgagaaagattatagacttgtctaagattaccttctttgttgtcatttttgccatccactttctaccaattttcttttttctgtattaagtgaaa

SEQ ID NO: 249096 - DNA, 539 bp, Homo sapiens
tttttggccatttctgtttcatcagtgcctaaggagctaaatcaagtggaaagctttatctgaaatccagaagtcttatccattgagcacataaagtgtaatacattttacatttaatgaagacatacatggattgccatcctagagccctggctaaattatctgactctcagatgactgtgttctgcctacttaacttctctatgcagcaactattacttttaatgtttttctccatcctttaactaacatttaaaattattttgcactttcatttgtaactacctaggggtgaaatgcaacagytatttttgtggtggttagagtggtccctgaagaaatgcatttaaatttgcaaagtactttagttgcttttgagacttaaattactgctctgtaaatgtagcatattgcaactgccaatgctgctataaaataatgtattgagaaagattatagacttgtctaagattaccttctttgttgtcatttttgccatccactttctaccaattttcttttttctgtattaagtgaaa

SEQ ID NO: 249097 - DNA, 575 bp, Homo sapiens
ggatgtggcaggtggttcccctacccgaaggtgggaaagttccctgtgtggctgggtcagggaccttttatggactcagcatggggagtgtgtgctgattggtttgtgagtatgcaaaaaaagttgaagcgaagacaccattcaaaggtgggcacgacagtgtagaaaaaacarttacaaaagggtaggtatgtgtaaaaacaggtgaagggtggggacagtcagaggaaagtgcaccaaatgggacgataagttctcaatctggtcagaggattttacctgtagcttggctttcaggctttaaactgtccttggcttggaggtggggtttcaccgggagcccgcccctatctacctaggcttttggctgcctcctgccactgtcattattatgttttagtctctgtgttcttttcattactttaatcatcacatgaaattttttagttaataatattattatttttatcttacatttaggattcactgaggctcacaggttaaagaattgacaaagttcaggatggcaaagttagattgaaacgtcacttgtcagatgcaaaaatcattgtatt

SEQ ID NO: 249098 - DNA, 575 bp, Homo sapiens
ggatgtggcaggtggttcccctacccgaaggtgggaaagttccctgtgtggctgggtcagggaccttttatggactcagcatggggagtgtgtgctgattggtttgtgagtatgcaaaaaaagttgaagcgaagacaccattcaaaggtgggcacgacagtgtagaaaaaacaattasaaaagggtaggtatgtgtaaaaacaggtgaagggtggggacagtcagaggaaagtgcaccaaatgggacgataagttctcaatctggtcagaggattttacctgtagcttggctttcaggctttaaactgtccttggcttggaggtggggtttcaccgggagcccgcccctatctacctaggcttttggctgcctcctgccactgtcattattatgttttagtctctgtgttcttttcattactttaatcatcacatgaaattttttagttaataatattattatttttatcttacatttaggattcactgaggctcacaggttaaagaattgacaaagttcaggatggcaaagttagattgaaacgtcacttgtcagatgcaaaaatcattgtatt

SEQ ID NO: 249099 - DNA, 608 bp, Homo sapiens
agctggagtgcaatggagcgatctcggctcattgcaacctctacctccctggttcaagtgattttcctgcctcagcttctccactagatgggattataggcacctgacaccatgcccagctaatttttttttttttttttttttttttagtagaaatggcatttcaccatgttggccaggctagtctcaaactgttgacctcaggtgctctgcccgcctcagcttcccaaaatgctgggattacaggtgtgagccaccacacccagcctcttgtatctttttgataggaggtggctttataattttggaacaaagtgcccactggtgttaggctttcactcawctagaaaactaggagataaaactgttatctttttgtaactgctttttaaagggatgactccaaggtctttgaggaaaacattcttgtatagtaaaatggacaaaaggttttcgaataggtttacatacaactgaaatggctgagaaagaatttatacttttttgttgttgttgtttttaaagtaaatgttcaaagaaaagtgagatcagtgtcaagagttagaaagaagcccgtctaaagtttagcccagctgagggtagtatta

SEQ ID NO: 249100 - DNA, 548 bp, Homo sapiens
tctatgacagtactgttagttgtcaatgcttaaatcaaaatgaagtgaattttttcctgaaagaaattttaccagaagtctttgtgttaaacaatggcgttagatacgggcatacctgttttgcaaagagaattcaactgttggttttggaaatattatgtatgtatacacaccatatatatgtgtatatgtactgtatatatagagatgcacacaaatatatgtgtgtctgtgtgtgtgtgtgtatatatatgtatatatatatatrtgtgtatatatatatatatatgtttctcattcagagtttagattccctctcctgttcctaattggcattctgatgaggcaaataaaattaactaattccttaaaataaaccaacagacaccttctggttcactgttttcttgaatggtttaacctctaaagaatagtgttgtaattttataattgtagctggtttaattgaacaagttaagattggaattatgcattttaaatatgtgacaagactcatcagtgaagtttgtatttaataatgatttgtg

SEQ ID NO: 249101 - DNA, 570 bp, Homo sapiens
gaatatacatttatgtgtctgcttattaaaaactcatgagttttgtactgatacttctgattctaatttaacaccacaggattaatttctggttttccttatttgttattttttccaatatgggtaacctgcctcttgtctgcagtgtatttacttactgtttttttgttgttgtgtcagtgtaatatacatgtagtttcagaagagctaattcataccctaggagaaacacattaactacattgcactgttctgcaattctttttgggttttgcctcatatatcagtcaagaaacagtttttcaaagttactgacgttcttttctttcccaccctctctgatctgtggactgatttgtactcttggtccwttttttactgtttgagcgttctctccacagcctggttgattttaatggtttattttttcagtatgtgaaacgtggttttcagagtgtgagctttgtaaaaggatatacatggagaagtgttgttcgtacctcattcctaccaccccattcccgttcccagctgctttctctcactttcccaccgtgcccatagtaagta

SEQ ID NO: 249102 - DNA, 532 bp, Homo sapiens
ttccagtggtcttaattactgtggctttacttacaacaaactttcaaatatggaactgttaaacccttcaattttgttctttttcaaaatttttttggggtattctgagccctttccatatccacataaattttaaggtcagcttacccacttctgcaaaaatgccttttgggatttttacagggattgtgttaaatctgtagatgaatttggggagaattgccatgcttatattgagtctgcgaatctgtgaacatggaatgtttatttgtttatatcttgattagtttctctcagtgtgtataaaagattactttcaaaacattgttttcagtttacaaatctttcgttaaatttattcctaaatttttaattctttcaggtgcagttgtaaatggagttttttccttaatgtcatttttgaattgttcrttgataatatatgtataattaatttttgtatattggctttgtatcctgcaaccttcctgagctcatttattagttcttgtcaagggggtgtgtgtgagag

SEQ ID NO: 249103 - DNA, 610 bp, Homo sapiens
tactgagtatttttttttttatactagataagccatactttcctgtttaaaactggacattttaaataataccattgtaacagcatttatttctgatactctcctgccaggggttattgtccctttttttgtttgttttatgacttggcccaagattaataatgagtttttctctacagcgtgtggcctctgatgtctctcctcagttatgtttgactacttatgggtcaccttggatcaatatatcttagtgatcagctggtgactggtcagagattgtacttaggcatcttgttttggtaagactttcatcctttgtcaaagtctctgttttgtttgaggaacacactgaaaatttatgcagtttacgagtcttycctgggggtatgtatatagttagagccttctctggtctctcagcatgttcataccctaatatgcccattacctttcaaaatgtaagcttatcaaggactatgattgtctcacttcctgattgtttctgttaaatctccaggcagaaaatttttttcttctgatctcttttttggcccagctatagtatttcagcttcaggtcatctatgatgtatgtggacctctcctatgtt

SEQ ID NO: 249104 - DNA, 583 bp, Homo sapiens
acttacaaccaaaggagtcttggctcatagagaagataaacaggaaagacactatccaatgccacttcctccatgaagtcttccctgattcttgccagctccattggatattttcctgcttagaagcctggcgggggaggagggattgttcttatggatctctcatgaccttagctttttatgccttggagtataaaggggaaatctgggtgcaaagcctgtatatgcatttgagtggggacaaagcagcagaaagaaagatacagagttaagcacaagatcttagcggaagatgaaaacctcagccaaatataagtgggggactctgcagtgaggcaagtggacacctcagaggacatgggagtgagagtggtgttgaaatcacccagttctaagctacagggagagggtagtgctcttggccttggtgcatatctgtgacccaggtcccctatccaaccatgagcctccaacgcaggcaagaagcyggcctcttccttccagcctcctggcaccatcaggaagggttgcttggcaggccacctccggactttgatgcagaatgtctccaggttctataagc

SEQ ID NO: 249105 - DNA, 523 bp, Homo sapiens
tggagtccagcctgggcaacaaagtggtaaggtcctgtctctaaaaacacacacacacatacacgcgtgattacatagatgatgatgactttccattgcatcacatcaggagacacataatgtcatttttgtcccattattagtgttgctaaccacttgtttaagatgtcaagtctctccatcataaagttacctttaaatggtatagtacttgaagacagtgtaaatatcctattcctcaaaagccttttgccatggatgatccttgcctaaatcagttatattggtgtttgctaattagtgattttctaacaatgtatttattagtttatgtttttcgagcaacaagaactctagcrcccccccctttagtttcacaataaactcatttttttgttgtttcaagttgagagtgatgtgatttcttcattccttttgatgttcaaattgttctaaatttggccaatgggagccccttcaagctggctcaagcatgcattctttttttttttttttgagacag

SEQ ID NO: 249106 - DNA, 531 bp, Homo sapiens
agtttgtttcaacttcacagtatagttttccctatagttagagaaactgatccatctctaatggcaagtttttcaaaataagagtaacaaaattaaggagacacagtgagctggagttcttcctggagaagaaaaaccataacgttcaaggcaggggtcaaaaattcagatggttttaaggggccagtgggcaattaggagtatatgaatcagctacagtaacatggttaggaagtcgtgtgctggctgactggaggaggcacagccttcttgcatgtctaaaaaacaccatactggctgaacctggatggctaaattcatccaccacgacacccatttgtggctcttttttcaaaaaagtcctacttcaaagggagaaaaagggatagagcttatttaactgggggagaagatmcctaagagttttactttcttctttcttacttttcctaagtagatattaaaaataaagcttaaggaatggccagtctagtaaatagacaagtgtaattatctatttatttgaagctt

SEQ ID NO: 249107 - DNA, 605 bp, Homo sapiens
gtgcaaaaatgaggtgaatttggaggctactgtagtatctatgcaagaaatactgtggactcgaatgaggaggatggcggtggaaatggtgaaaagtagaaagatgggaaatgccatcaaatatttttggtacctgtgatagacaggctaccaatgtgtttccatcacccatgcytcctggtgttgtcttcatgtgatcccctcctcttgactgcaggtggcatctgccacttatttcctccaaatggaatatgacaaaggtgacaggatgtgtatgattatatgactgtatttcataagattgtaaggctcaccctaatggagtctctgtctcccttgcttccttgaggaagcaggcagccacgctgggggatcccacatggtaaagaactgcaggtggcctctaggagatgagggcggactccagtcaacagccagcaagaaactgaagtgctctgtcctacaaccttgtgtaactgaattctgccaacaacctgagtgagactgaaagtggatccctctccagtcatgcctcaggtgagactgtatccctggatgacaccttgattcagcctcatgtgaccctaaggagacgacccatataa

SEQ ID NO: 249108 - DNA, 605 bp, Homo sapiens
gtgcaaaaatgaggtgaatttggaggctactgtagtatctatgcaagaaatactgtggactcgaatgaggaggatggcggtggaaatggtgaaaagtagaaagatgggaaatgccatcaaatatttttggtacctgtgatagacaggctaccaatgtgtttccatcacccatgcttcctggtgttgtcttcatgtgatcccctcctcttgactgcaggtggcatctgccacttatttcctccaaatggaatatgacaaaggtgacaggatgtgtatgattatatgactgtatttcataagattgtaaggctcaccctaatggagtctctgtctcccttgcttccttgaggaagcaggcagccacgctgggggatcccacatggtaaagaactgcaggtggcctctaggagatgagggcggmctccagtcaacagccagcaagaaactgaagtgctctgtcctacaaccttgtgtaactgaattctgccaacaacctgagtgagactgaaagtggatccctctccagtcatgcctcaggtgagactgtatccctggatgacaccttgattcagcctcatgtgaccctaaggagacgacccatataa

SEQ ID NO: 249109 - DNA, 578 bp, Homo sapiens
attactaaacaatattctttgtctggcttgctttcgacttcatattattggtatcacactatatataatctgctacatgctcgtttgctgaattatatttgcaagatttatctatattgatgtagcaatgttcattttttactgtagcaatagttcacttatttttactgctctrtagtgtccaatcatatgaatattccatcttgttgatgaacatttgagttgtttccagttttcagtcactgccataatgcaatgagcatccttgctcacgttccctggtgcaccatgctacagttttttgaagttacaaacctggagtgggggaatcattgggtacgcacatcttcaaatttcctagagacatttcgaggcctaaggtattattttcctccaaagaggatttttaaattaccttttgtcaagtacccaaaggcatcagccctctcgaatcatcatgtaatttctggagccagcttggggaccacaagctggtctgcagtctgtacataggctactttccttctaggtttatccttacagctgggatgcagtcccataggctctcatctcacagt

SEQ ID NO: 249110 - DNA, 578 bp, Homo sapiens
attactaaacaatattctttgtctggcttgctttcgacttcatattattggtatcacactatatataatctgctacatgctcgtttgctgaattatatttgcaagatttatctatattgatgtagcaatgttcattttttactgtagcaatagttcacttatttttactgctctatagtgtccaatcatatgaatattccatcttgytgatgaacatttgagttgtttccagttttcagtcactgccataatgcaatgagcatccttgctcacgttccctggtgcaccatgctacagttttttgaagttacaaacctggagtgggggaatcattgggtacgcacatcttcaaatttcctagagacatttcgaggcctaaggtattattttcctccaaagaggatttttaaattaccttttgtcaagtacccaaaggcatcagccctctcgaatcatcatgtaatttctggagccagcttggggaccacaagctggtctgcagtctgtacataggctactttccttctaggtttatccttacagctgggatgcagtcccataggctctcatctcacagt

SEQ ID NO: 249111 - DNA, 578 bp, Homo sapiens
attactaaacaatattctttgtctggcttgctttcgacttcatattattggtatcacactatatataatctgctacatgctcgtttgctgaattatatttgcaagatttatctatattgatgtagcaatgttcattttttactgtagcaatagttcacttatttttactgctctatagtgtccaatcatatgaatattccatcttgttgatgaacatttgagttgtttccagttttcagtcactgccataatgcaatgagcatccttgctcacgttccctggtgcaccatgctacagttttttgaagttacaaacctggagtgggggaatcattgggtacrcacatcttcaaatttcctagagacatttcgaggcctaaggtattattttcctccaaagaggatttttaaattaccttttgtcaagtacccaaaggcatcagccctctcgaatcatcatgtaatttctggagccagcttggggaccacaagctggtctgcagtctgtacataggctactttccttctaggtttatccttacagctgggatgcagtcccataggctctcatctcacagt

SEQ ID NO: 249112 - DNA, 498 bp, Homo sapiens
tggtttgtatctgggtgtattcagtttttcactacattcctgaaatggttcccaaatctaccctcgcagattctattaaatggtgtttgtaacccgctgaatcaaaagaaaggtttaagcttgtgatttgaatccaaacattacaaagctgtttcacagatagcytctttctagtttttatctgggtatacttggttttttacataggcatctaagggctccgaaatgtcccttgaaagattctaccataagagtgtttccaatttacagaatcaaaaggattgtttaaatctgtgaaatgaatgcacacatcacaaggcagtttcacagctaggttatttctagtatttatctagaaatattcggtttttcaccataaacctcaatgggcttccaaatgtcccttcacagatcctatgaaaagagggtctcacacctgttgaatcaaaacaacgtttaattctgtgaggtgaatccacacatcacaaaacagtttca

SEQ ID NO: 249113 - DNA, 630 bp, Homo sapiens
ttctagtttttaccttgaaatatttgttttttttccatagactacagtgggctcacaaatctcctttcacagattctaccaaaagagtctttccaacatgctgagtcaaaagaaaggttgaagtctttgagatgaatctacacatcacaaagcagtttcaaagagagcttctttctgatttttatctggggatatttgatttttcaccataggcttttatgggctcccaaatgtcactatgcagattacaaaacataaatatttgcagcctgctgaaacaaaagaaaagtttaactctgtgagrtgaatccacacataacaaagtagttacacagatagctactttgtagtttttatctgtggatatgctgttttcaaccataggcctcaaaaagcttccaatgctcagtcggcttcaaaatgtcccttctcaggttctacaaaacgagtgtttccaaagtgctgaatcaaaggaaaggcttatctctgggagatgagtccacacaccacaaagcagtttcacagatagctactttgtagtttttatctgtggatattctgtttttcaccataggcctcaaaaatcttctaaatctccctttgcagattctgccaagaaagtgtttccaa

SEQ ID NO: 249114 - DNA, 586 bp, Homo sapiens
tcaaaagaaagttttaactctgagaaatgaatatgcacatcacaaagctgtttttcagaaatttctttatagttttttatgtaaagatatttcctttttcaccataggcatcaatgcactccaaaatatgcattcacagattgtagaaaaacagttttcaaactgatcaaccaaaagaaaggatttagtctgttagacaaaatcacacatcacaaagctgtttctcagaaatctttctagattgtatctraggatatttcctttttcaccataggactcaaagccctcccaaatatcccttggagaattttacagaaacagtgtttccaaactgctcaatcaaaaaaaggtttaactgtgtgagatgaatgcacacatcacaaagcagtttcccagaaaactccttgtactttttatctgatgatatttcctttttcaccctagatcttgaaacactcccaaatatcccttctcagattccacaaaaagagtgttgccaaactgctcaatcaaaagaaaggtttaaacctttgaaacgaatgcactaatcacaaggcagtttctcagaaagcttctttgtagcttt

SEQ ID NO: 249115 - DNA, 473 bp, Homo sapiens
gaatgcactcatcacagagccgtttctcagaaagtttctttcaagtttttatctgaagacatttcctttttcaccataggccacaatatgctcccaaatatccctttgcagattctacaaaaacagtgtttctaacctgctcaatcaaaacacagatttaattctgtgagatgaatgcacacatcacaaagctgttacccagaaagcttctttctaggaaatattctttctgaatatgtttcctttttcaccctagkctttaaagtgatcccaaatatccctttggggattgtaccataacagtgttcacaaactgctcaatcaaaaagaaggtttaactccgttagatgaatgcgcatgtcccaaagcagtttctcagacagcttctttctagtttttctcagaagatatttcctcgtttaccataggcctcaatgtgctcctatatatccctgtgtaggttcttctaaaac

SEQ ID NO: 249116 - DNA, 573 bp, Homo sapiens
agagctcaatacgctcccaaatatctcttcattgattctaccaaaagagtgtttccaaactgatcaatcaaaaaataatgtttaactctgtgacatgagtgyacacatcacaaggcagtcacccagaaagcttctttctagtatttatctgaagacattttgtttttcaccataggcctcaaaccctcccacatatcccttctcacattctacaaaaactgtgtttctaaactgctcaatgaaaagaaaggtttaactctatgagacgaatgctgtcatcacatagtagtttctcagaaagcttctttccagtttttatctgaagatatttcctttttgatcataggtgtcaatgggctcccatatatccctttgtagattctacgaaaacagtgtttccatactattcaatcaaaagaaagttttaactctgtgagaagaatgaacacaacaaaaagtggttcctaagaaagcttctttctagtttttatctgaagatttttcctttttcaccataggcctcaatgtgctccagaatgtcccttcacagaatctacaaaaacagtgtttcca

SEQ ID NO: 249117 - DNA, 607 bp, Homo sapiens
ggtctgtaagtgctccaaaatatccctttgcagatcctaccaaaacagtgtttccaaactgctcaatcaaaagaatgctttaactctgtgagatgaatgcacacatccagaggtggtttctgaaaaggcttctttctagttttcatctgaagatatttcctttttcaccataggcctcaaagcacttccaaatatcccttcacagcatctaaaaaaactgtgttgacaaactactcaatcacaagaaagttttaactgtgtgagatgaatgcactcagtgccatgcagtttctcagaaagtgtctttctagcttttatctaaaggtatttcctttttcactacaggcctcagtgcactctcatatatccgttcttagattctaaaaagacastgtttccagactgctgaatgaaaagaaaagtttaactctgggacaagaatgcacacatcacaaagaagtttctcagaaatcttctttttagttttgatttgaagatatttcctttttcaccatagaccttggcagattatccaacagtgtttccaaactgctcaatcaaacaaaaggtttaactgtgtgagaagaatgcacacatcatgaagcag

SEQ ID NO: 249118 - DNA, 523 bp, Homo sapiens
tcacaaatctccttttgcagattgtagccaaagagtatttccaacatgctgagtcaaaagaaaggtttaagtctttcagatgatccacacatcacaaagcagtttcaaagatagcttctttctggtttttatctggggatatttggtttttcaccataggaccccatgggctcccaaatgtcccttcacagattctaacaacatagtatttccaacttgttaaatcaaaagaaaggtatgacactgtgaaaggaatccacacaactcaaagcagtttcacagatcacttttttctagtgctttctggggatattcagtttttcaccataggctcaatggtctcccaaaagtttattcrcagattctacaaaaagagtgtatgcaacttgctgattcaatagacaggtttagctctgtgagatgattccacagatcacaaagctgtttcacagatagcttctttccagttttcatgtgtgaacattcagtttttctccatactccacaaaaagctcctaaattt

SEQ ID NO: 249119 - DNA, 404 bp, Homo sapiens
tttagtttttatgtgaagagatttcctttttcaccatagtcctccaagcactcacaaatatccttttgcagattctacaaaaaaactgtttccaaacttctcaatcaaaataagggttcaactctgtsagaataatacacccataaaaaagaagtttctcaaaaaacatctgtctagttttatgtgaagatatttcctttttcaacatagtccttactgtgctcaaaaatatccgtttgcatattctacaagaaaagagtttctaatctgctcagtgaaaagaaacttttacttctgttagaagaattcacacatcagaaagtagtttctcagataccatctttctagtttttatgtgaagatttttatttttcaccatcggcctcaaagtgaacacaaatatc

SEQ ID NO: 249120 - DNA, 494 bp, Homo sapiens
attcaattgtgtatataaaccacattttctttatccattcacctgtggttggacacgtargttgattctatatccaggctattgtgaatagtatgcagccttttaaaaggtatttctgggccggacacagtggctcacacctgtaatcccagccctttgggagaccaaggcaggtggatcacctgaggtcaggagaccagcctgatcaacatggtgaaaccccatctctactaaaaatacaaaaattagccaggcctggtggcgcatgcctgtaatcccagctacttgggaggctgaggcaggacaatcgcttgaatctgggaggcagaggttgcagtgagctgaaatcatgccattgcactccagcctgggcaacaagagcaaaactccatctcaaaataaataaataaaaggtacttctgaagaacacgtgataactttttgttgaacgaacacttacatggcactgtctaccaggtcctgttcaatgtact

SEQ ID NO: 249121 - DNA, 586 bp, Homo sapiens
tcaactttatgattcacttaaaaaacatgtttttcatattataaaccatgctgtttcatttttgtcttgctttgagcagaaatagtgtatggtaaaagctaagagaaaaaacaggagaaatttggtaagtggcagtctttagatgatcttggcctatttcaaaatttttatctcaaccttgttatattaatttcactttatgtgcatatttgagttaaaaaatgtcttggtatcaatgttatgttcatatatttctttttaaatttggttatgtaaaacatgtaaaatatatggatatttgagcagtaaaaacattttgaacctttaattcaactttttccacagaattttgactgccttatctcataaaasaagtatgtgtgttcatcttattttcactattgagataaatcacacaaaaaacccaacagtgagcagtaaagattcacttatacatgacctgaaggttggagaattaccaggccccatgtagtttacattgtccaaaaccaccctgacgagagttacaaggggagtcataggggaagttctaactctcagacaaatgttgcaggaaacactgact

SEQ ID NO: 249122 - DNA, 481 bp, Homo sapiens
ttcaaattaatttgtcctgcagtttagatgccagaattgcaaaattctgaatcttttgtagtgacatttaggatgctttgtataatgcccaaattgaaaaactctgagttctgtgccacgaagtttagaaagcaagaaattgattccaaaaaagttttaagagttgttgtcctcaacaaaatataacacagcctcaataagaatgtagaaaacgtaatttgaatttataggtaaatatactcaatatattatgtcaaacaaaggttgccttggaaacwtaacaaagttatgaggaaaaaggaacaaaacacaataatttttaaggctagttgtaagatttctgttagatttaacataaatggtaatttacatgcatatatttaagttgcaccatttgaaatggacagtttcatatagttcaattaaacaataaggtagaaaaaagtccacgttgcactatattttaaaaagccccaaccat

SEQ ID NO: 249123 - DNA, 570 bp, Homo sapiens
atagtgaagccaatacttttatagattaaaagcaaattaccttttaaaaaacacatttttaaaagacaaacaatatttctggtttattttttaatctatatatagtcaaataaaactgtcttttctttttaaagcttctgattttcctttyaaggagtttttttctaggccctcagttatacatgtagtctctctaattttcttctgtttcttttctttaaaaattcatttattggtgaaaccccatctctactaaaaatataaaaaattagctgggcctggtggcgggcgcctgtagtaccagctacttgggaggctgaggcaggagaacggcgtgaacccgggagggggagcttgcagtgagccgagatcgtgccactgcactccagcctgggcgacagagcaagactccgtctcaaaaaaaaaaaaaaaaattcatttattatttcaacatttccttccattaacgctttatttttaataggctgttactttcatccatctgaatatccaattgttttagtaccacagattaaataaactcttgttttctcattgatacgaaatacc

SEQ ID NO: 249124 - DNA, 570 bp, Homo sapiens
atagtgaagccaatacttttatagattaaaagcaaattaccttttaaaaaacacatttttaaaagacaaacaatatttctggtttattttttaatctatatatagtcaaataaaactgtcttttctttttaaagcttctgattttcctttcaaggagtttttttctaggccctcagttatacatgtagtctctctaattttcttctgtttcttttctttaaaaattcatttattggtgaaaccccatctctactaaaaatataaaaaattagctgggcctggtggcgggcgcctgtagtaccagctactygggaggctgaggcaggagaacggcgtgaacccgggagggggagcttgcagtgagccgagatcgtgccactgcactccagcctgggcgacagagcaagactccgtctcaaaaaaaaaaaaaaaaattcatttattatttcaacatttccttccattaacgctttatttttaataggctgttactttcatccatctgaatatccaattgttttagtaccacagattaaataaactcttgttttctcattgatacgaaatacc

SEQ ID NO: 249125 - DNA, 570 bp, Homo sapiens
atagtgaagccaatacttttatagattaaaagcaaattaccttttaaaaaacacatttttaaaagacaaacaatatttctggtttattttttaatctatatatagtcaaataaaactgtcttttctttttaaagcttctgattttcctttcaaggagtttttttctaggccctcagttatacatgtagtctctctaattttcttctgtttcttttctttaaaaattcatttattggtgaaaccccatctctactaaaaatataaaaaattagctgggcctggtggcgggcgcctgtagtaccagctacttgggaggctgaggcaggagaacggcgtgaacccgggagggggagcttgcagtgagccgagatcgtgccactgcactccagcctgggcgacagagcaagactccgtctcaaaaaaaaaaaaaaaaattcatttattatttcaacatttccttccattaacrctttatttttaataggctgttactttcatccatctgaatatccaattgttttagtaccacagattaaataaactcttgttttctcattgatacgaaatacc

SEQ ID NO: 249126 - DNA, 570 bp, Homo sapiens
atagtgaagccaatacttttatagattaaaagcaaattaccttttaaaaaacacatttttaaaagacaaacaatatttctggtttattttttaatctatatatagtcaaataaaactgtcttttctttttaaagcttctgattttcctttcaaggagtttttttctaggccctcagttatacatgtagtctctctaattttcttctgtttcttttctttaaaaattcatttattggtgaaaccccatctctactaaaaatataaaaaattagctgggcctggtggcgggcgcctgtagtaccagctacttgggaggctgaggcaggagaacggcgtgaacccgggagggggagcttgcagtgagccgagatcgtgccactgcactccagcctgggcgacagagcaagactccgtctcaaaaaaaaaaaaaaaaattcatttattatttcaacatttccttccattaacgctttatttttaataggctgttactttcatccatctgaatatccaattgttttagtaccacagattaaataaactsttgttttctcattgatacgaaatacc

SEQ ID NO: 249127 - DNA, 600 bp, Homo sapiens
aaaaagtagcctggtatagcgtcacacacctgtagtcctagctactctggaggctgaggtgggaggaacacttgagcccaggaggtcaaggctgcagtgacccatgctcacaccactacactccagcctgggaaagagagcaagacctagtctcaaaaaaaaggcaaataaataagtattacatacattttaagtatatatatgtaagtacatataagcttcatatattgttatgatctttagttagaagtcttagatttatctacttagatggtaacctctgcagagcatgacttaaaagtacagattttgtattttaatcccttcagctatggtcatagagtatattacttaattacctagctacttaagcaaatttccttggtcaaaccaacaatgttgaaacataaggaaaaagaaaactggtcattttatgtaaatctacataactataaaaaagaaaagtatcatgttcattcaacagtgctaaaaataaaaatgctaaaggatgcatcccaccctttcttttaaacccaacaytgccagcaagttgatgatgatacctcttcaggagggagcccagacatgacataattcact

SEQ ID NO: 249128 - DNA, 578 bp, Homo sapiens
ggatcatgtgataagacaatgtttagctttgtaaaaaactaccaaactctaatccaaagtataaaatgttgcatttgtaccagcaataaaataagtatccctattactctatatccttgccagcattttgtattaacaattttatggattttagccattctaataattgtataagtggtatctcctcattrttttaatttgcagccatctaataacatgtgatgttgagcatgttgtcatatgcttatttgttgtatatttatcattggtgtggtatgtgctcagctcttttacccattttgtaattggattatttgctttcttattgttgaattttaagagttctttggatattttgtacacaagtcctttatcagatatgtggtttacaagtatctttttttcccaatcagtggcctgtctctttagtctctcaacagtgcagaagttttagtgcaacttattaatttttcctttcatgaattatacttttggtattacatccccatactcatcaccaacccccctcctcactccaagatggagcacatagcctagggttctggggattgcccaac

SEQ ID NO: 249129 - DNA, 588 bp, Homo sapiens
taaagacatgggaaacagaaaagcaaagaaatatgacacctccaaagaaacacaataactctcctgcaatatatcttaatcaaaaagaaaatttttaaatcccagaaaaagaaatcaaaatataaattttaaaggagctcagtgagatacaagtgaattctgtaagacaatacaatgaaatctataaagcggttcaggatttgaatgagaaatttgccaaagagatagctattttgaaaaagaatcaaatagaaattctggaacaaaaaatgttttggaggaaatacaaaaaaatatatatataagcttcaacaatagattagatcaagcagaagaaaaaaaaaatctcagaacttgaggacaaatcttttgaaataatccagccaagaaaaataaagaatgaacaaagcctttgkgacatttgggacaacataaaatgactgaatatttaatttttttgtatcactgaggacatagagaaaatgaagggattaaaaaacttatttaaaaaataataaatctttccaagactagctagagatgtagacactcagatacagatggctcagtgttccccaggtagttata

SEQ ID NO: 249130 - DNA, 551 bp, Homo sapiens
ctcctgggcttagagatataggtgagtctccttctaggtccttgtacaagcagctatgagcttagacctcaataaagggaggctggaacaaagccatgggggaacttttaggttcgatgcgaagaacaatatcagcaggtaaaggagcctttccacaaaggcactagtgtgttggattccttctagaccccttggcagacagtggttttggttrcaggctcaaggccaaacagggctctagccaagcccctaggaggattgggccatttctggccttgaatctgagagcaagctcagtggatcagtcacctgggttttggtgtgcattctcaaacaaccctccaaggtcttggaacccaccacagcttcataaactcctacctgaatcctgaggctactgtagaaagacttttgattgtgaatgggtatagaaatcttattgttatggagggggatattagtggtttaccttctattccaccatcatgctgacatcattccttataaataatttcatatcttaaaacatgatccagacagatatggttaaa

SEQ ID NO: 249131 - DNA, 573 bp, Homo sapiens
ctccattttaaggtgatcaagggacccacacttagccagttggcatagtctatcttcctggctagtatgactagttcaagggtgagcacatgccccaagtttgttcactgagactgaatcctggatttttcccagagcaatttttcagtagcacctgctgaaccatgaggctgtcagctcagacagrgtgaatgcctgcctgagaatgaagccaacccagaggaaagcagagccaagcatcatatttctcccagcatcactggagcatctggatgcagccatgcctaaagattggtcctgcctccacccacaacttcttagttttgtctgccaaacaattccttttctggctgaatgccagtctgagttagatttctattacttggtaactaaagagtcctggagagtatagagcacatctttctagttgatatggcagtccctgggtgcctacttcaaatgtgatcctgcacctggagttgggatacaaatattgagtaaggcagggtccatgaggctcaaccttattcccaccattcttccagtggaattcctcatgatgccatttgatta

SEQ ID NO: 249132 - DNA, 577 bp, Homo sapiens
gttaacagctgtgtgcaaaatcactrcatacttttaggcttaaggtcctgacaaaatctaatcagcatcaaattgcattttgtcatactcatataaaattttagggctttgtgtttctttaaatagttctgaaattcagaaataatcccctgagagactggcataataaggctgtctaccaaccacagactttctggcacgcaatgaaattcaaaaagggtaacactattgtttttctccagccttctcacctccagataaacaatctggccattcagaagcaaaaaaatacccagggcactaagttcacgacagggttattctgaagctcgagcaatcccaaggcagaaatgccctgattttgacccagaattaaatactgggccttggtagacttacacgacagacctccttcagtcactctggagtaaggtcataccagtttttctgtcaacaaagcaagttaacagataagcttaagagctcatgatgatacaaaatataattcaacatgtgaatttctgatttctatcagcaaagagtctaagacccaatggtgtgttgataaatacttaac

SEQ ID NO: 249133 - DNA, 577 bp, Homo sapiens
gttaacagctgtgtgcaaaatcactacatacttttaggcttaaggtcctgacaaaatctaatcagcatcaaattgcattttgtcatactcatataaaattttagggctttgtgtttctttaaatagttctgaaattcagaaataatcccctgagagactggcataataaggctgtctaccaaccacagactttctggcacgcaatgaaattcaaaaaggrtaacactattgtttttctccagccttctcacctccagataaacaatctggccattcagaagcaaaaaaatacccagggcactaagttcacgacagggttattctgaagctcgagcaatcccaaggcagaaatgccctgattttgacccagaattaaatactgggccttggtagacttacacgacagacctccttcagtcactctggagtaaggtcataccagtttttctgtcaacaaagcaagttaacagataagcttaagagctcatgatgatacaaaatataattcaacatgtgaatttctgatttctatcagcaaagagtctaagacccaatggtgtgttgataaatacttaac

SEQ ID NO: 249134 - DNA, 577 bp, Homo sapiens
gttaacagctgtgtgcaaaatcactacatacttttaggcttaaggtcctgacaaaatctaatcagcatcaaattgcattttgtcatactcatataaaattttagggctttgtgtttctttaaatagttctgaaattcagaaataatcccctgagagactggcataataaggctgtctaccaaccacagactttctggcacgcaatgaaattcaaaaagggtaacactattgtttttctccagccttctcacctccagataaacaatctggccattcagaagcaaaaaaatacccagggcactaagttcacgacagggttattctgaagctcgagcaatcccaaggcagaaatgccctgattttgacccagaattaaatactgggccttggtagacttacacgacagacctccttcagtcactctggagtaaggtcataycagtttttctgtcaacaaagcaagttaacagataagcttaagagctcatgatgatacaaaatataattcaacatgtgaatttctgatttctatcagcaaagagtctaagacccaatggtgtgttgataaatacttaac

SEQ ID NO: 249135 - DNA, 547 bp, Homo sapiens
gagcttttgattaagggtatcatccaacgtagatcaaagtggaaatgacttttgacacttgggttctttttaagaaagaggagtttgattagtcactcataaacttgactgaccacatagaagggcataaattacttggtgaaacaggttcctgtttagtatcatagggattccaagaacaatctcaccagttaaaggtttgtgctagcagctacattccagatttattttcctcaggttttcaaatttagcaaatacaagtgtttggagtgcccaattaaatgtgaacttcacacaaacaacaaataatttttaatacaattaagtcctaaagattgaatgaggtattcttattctaaaaaaaatttatttttaactgaaattcacatttmactgggcatccaatatcttacctggcaaatttaaatgttactccatcctccaaggagtttttggcagagctgaataaaaagaaaaggactctcttgaaacctctatcttagaaacattaaatctaagtctcactcagactctcaatccctttgca

SEQ ID NO: 249136 - DNA, 547 bp, Homo sapiens
gagcttttgattaagggtatcatccaacgtagatcaaagtggaaatgacttttgacacttgggttctttttaagaaagaggagtttgattagtcactcataaacttgactgaccacatagaagggcataaattacttggtgaaacaggttcctgtttagtatcatagggattccaagaacaatctcaccagttaaaggtttgtgctagcagctacattccagatttattttcctcaggttttcaaatttagcaaatacaagtgtttggagtgcccaattaaatgtgaacttcacacaaacaacaaataatttttaatacaattaagtcctaaagattgaatgaggtattcttattctaaaaaaaatttatttttaactgaaattcacatttcactgggcatccaatatcttacctggcaaatttaaatsttactccatcctccaaggagtttttggcagagctgaataaaaagaaaaggactctcttgaaacctctatcttagaaacattaaatctaagtctcactcagactctcaatccctttgca

SEQ ID NO: 249137 - DNA, 573 bp, Homo sapiens
atagagcagaacttcttgatctggatcaagaacatataccccccaaagcccccacacctaacatcatacttgatggtaaagcaaacagaaaaccactattttccctttaatttcaggaataaaggaatgatgccccttctagccattcctattcaacatgctggaagtcctagctaatacaataagacatgaaaagaaaagyatacagattgggaaggaagaaataaaactgtctttgttcacagatggcatgattgtctattaaggaaatcccaaagaatcaacaacaacaagaacaaaaacttttggaactaataagtggatataacaaggttgcaggataaaaggttagtatacaaagtaaattgccttcttatgtaccatcaatcaacaatcaaaatttgaagtttaaattactataccatttacattagcaccaaaaatttaaatacagttgggaaccacaaaatgatgttttagtcaataaaagactgcatgtatgtcagtggtaccataagattatagtggagttgaaaagtacctattgcctaggatttacttactatgttttat

SEQ ID NO: 249138 - DNA, 573 bp, Homo sapiens
atagagcagaacttcttgatctggatcaagaacatataccccccaaagcccccacacctaacatcatacttgatggtaaagcaaacagaaaaccactattttccctttaatttcaggaataaaggaatgatgccccttctagccattcctattcaacatgctggaagtcctagctaatacaataagacatgaaaagaaaagtatacagattgggaaggaagaaataaaactgtctttgttcacagatggcatgattgtctattaaggaaatcccaaagaatcaacaacaacaagaacaaaaacttttggaactaataagtggatataacaaggttgcaggataaaaggttagtatacaaagtaaattgccttcttatrtaccatcaatcaacaatcaaaatttgaagtttaaattactataccatttacattagcaccaaaaatttaaatacagttgggaaccacaaaatgatgttttagtcaataaaagactgcatgtatgtcagtggtaccataagattatagtggagttgaaaagtacctattgcctaggatttacttactatgttttat

SEQ ID NO: 249139 - DNA, 550 bp, Homo sapiens
ctctccttttttttcagtcttggtgagatttccccatattagtcttctttgtggatatcaagtgcagatactttttgtagacatacaaccaaatgtttctcattgcctctccaccttctttttaaaataaactcactttacttgttgaattgagcacagtcattgtgtggccttgtatctaatgcatatcctttttccttccagttgagagcctgcacaatacttagtgctgccaataaggggaaagtgactgttttgcaaaataatcaaattggattatccagtgtgtaaataggcactcagtctttttttcccatgtaaatcaggaaaagcaatttgtttttgcagaaaaaaacctgcaacgctgctcacggctcccccatcttggctggcattgggagttcattataggtgaggaaaaagaatttgttagcacccatacagctgaagacagtaattaactaatttgcttccatttttctgcagtttaaacataggtattatgaaaaatattctgttgagtracttgaaatcttgtgattcatattaa

SEQ ID NO: 249140 - DNA, 620 bp, Homo sapiens
aattaaaaatgaagatgtataaaccgaggagagacgtgaagcacgttatgtttatgacagaacacacaggcaatgcaaactgccatttagtgtgttggcaagggccattagagctttctcaggaaatcaaaacatacgccttgtaaagagttttagaatatgcatattgcctctgttttgtcagtaaatttagggtagtagaatattaatttttaaaaatgttaaataattcactgcagtggtcattcgcattttatctgtttcaacagcatcttttcctttcagtagttgttcctcccttatccagggaggctagaaaccacatggccccctatcccatgccccaggaatgggcatggtacccggcctggctatcacagtacaccattcccctggctacagtgattgagtcaggtacggacatgtgacccaacaggcccattcgaacatttcctgagagtattactggagcttttgaaagagggctccgtgtcattgaggactgctagctctagtgctctgagctgccatgggctgtctttgaccccaggtcgaaagagcttgtcaaaaaacaaattcratgcagagaaaaactgaaaagagagacagagaaatgagtg

SEQ ID NO: 249141 - DNA, 631 bp, Homo sapiens
gctgttgaggtagtttcctaagcaaaaaagtaattgtctctctcagaggaatgctttagtgctttttagccaagtgattccaatcatagccacagtttacaacatttgtatctttatctgtatccttatttatacctctatctatctatctatctatctatctatctatctatctatctatcttcaaaatattacrtaaggataccaaagaggaaaatcacccttgtcacatacttgctattaaaatatacttttattagtacagattatctgggacaccactttaattagaagctttaaaagcatatgcatgtctcagtatttaattttaaaattattacataattatatactcctttgaattagaaaattacaaatgtggctatgtattattttctcccatgtattttcaaaatgagggggtaagccagaccctctccctctcccatgcctaatagctcaaagttaaaggtaaagaaacaagaaaatatggtgaaagttaaccagcttcacttcagaggaaaggcgtgttgtgtagttcaaagttagaaaattccctgttgtcaataagtattcaaacacaattttgaaactgcaggattactttagggaagttgcatatagaaattgc

SEQ ID NO: 249142 - DNA, 631 bp, Homo sapiens
gctgttgaggtagtttcctaagcaaaaaagtaattgtctctctcagaggaatgctttagtgctttttagccaagtgattccaatcatagccacagtttacaacatttgtatctttatctgtatccttatttatacctctatctatctatctatctatctatctatctatctatctatctatcttcaaaatattacataaggataccaaagaggaaaatcacccttgtcacatacttgctattaaaatatacttttattagtacagattatctgggacaccactttaattagaagctttaaaagcataygcatgtctcagtatttaattttaaaattattacataattatatactcctttgaattagaaaattacaaatgtggctatgtattattttctcccatgtattttcaaaatgagggggtaagccagaccctctccctctcccatgcctaatagctcaaagttaaaggtaaagaaacaagaaaatatggtgaaagttaaccagcttcacttcagaggaaaggcgtgttgtgtagttcaaagttagaaaattccctgttgtcaataagtattcaaacacaattttgaaactgcaggattactttagggaagttgcatatagaaattgc

SEQ ID NO: 249143 - DNA, 429 bp, Homo sapiens
tacattttacagatctaagaagcaacttacacagtattgtgcagcttcccttatttattcaaaaactgaggcttctatttcaactcaattgcttggcatttggaattgagtgaatgcagcgtgagaaatctcaatgagcagactgatgttactaaatgagataaacaatttcattgaaagagtatcaaagaagactctggcactggatgttactgaagtccatcattttttaaaaaaactttatattgataactaattttaaagagacatgtctttggtcatttttttagactttaamaaaattagttgttcacatggataggagttacagagatatattgatgaattgggtgtgttctaaggtttttttgaactactactagctaagatttttagtttttgatcattgtgttgttattttagacttag

SEQ ID NO: 249144 - DNA, 594 bp, Homo sapiens
aaatgttttacattctgtcacactaaaacaagaagttgggtcatattcacaattctaaattgtgacagaaatataatatggcttaarcaactagttggggacttatgttctgagattatatgatttagtagctatacattgggtttcattacacacgatgtactttgaaaagtcagccaataaaaagaaaaaataggataacttacatttttgtctatggtttctatttcattatgcctagtaactttaagaatacagaagcacacgtgttaaaatgaagaaattaatattatggagaacgctgaaatagttgtactattttggaaaatcaagttcagagtatcaactgcggaaattcaataaaacttttggccttcaatataagatagaccataaatcaatgaagtttaaatagttctgctctcttgaacacctgcttatctgtcttgagaaaattctgtagtgttttaaccatcattttataacattaaaaagtaatgcttactattgcagtacttggaaaggccattaaagttaagggtctgtcagccattccattataaaccctgatttccaggagtttaatataaccta

SEQ ID NO: 249145 - DNA, 594 bp, Homo sapiens
aaatgttttacattctgtcacactaaaacaagaagttgggtcatattcacaattctaaattgtgacagaaatataatatggcttaagcaactagttggggacttatgttctgagattatatgatttagtagctatacattgggtttcattacacacgatgtactttgaaaagtcagccaataaaaagaaaaaataggataacttacatttttgtctatggtttctatttcattatgcctagtaactttaagaatacagaagcacacgtgttaaaatgaagaaattaatattatggagaacgctgaaatagttgtactattttggaaaatcaagttcagagtatcaactgcggaaattcaataaaacttttggccttcaatataagatagaccataaatcaatgaagtttaaatagttctgctctcttgaacamctgcttatctgtcttgagaaaattctgtagtgttttaaccatcattttataacattaaaaagtaatgcttactattgcagtacttggaaaggccattaaagttaagggtctgtcagccattccattataaaccctgatttccaggagtttaatataaccta

SEQ ID NO: 249146 - DNA, 545 bp, Homo sapiens
acctgtgggcccataaatatggcatattagttttctattttgctgtaacaaattgctacaaacttagtggcttataataccataaatttattctcttaaagttctggaggacagaaatctgaaattagttacactgggctaaagtcaaggtgtcagcagggctgaatccttctgaatccttctgacagagaatgtttctttgtctttctgagcttcctctaaagcagytgagggtgaggtcccttcttccatttttaatgtgtatcactccaatatctgcttccgtcagagggtactggagcaatcagtatttcttaatgaaatgggagagtttccagattcccctcacagaatgtgcaacagggatgtcgctcgactgtttggtcgccccacagctcaaaccccttacaggaccgggagcaggcagatggacaggtgcaggaaccgaggttaatgcttctgggctctgtccccatggcagtgcctaggggtgggtgtctgcaactcctgaagcccaagtgggcgtgtgttactatgtgttcttt

SEQ ID NO: 249147 - DNA, 472 bp, Homo sapiens
ggtgggtgtctgcaactcctgaagcccaagtgggcgtgtgttactatgtgttcttttagctttgctgtctgcagacagcttgtgtgttcatcagcctaatggaccgtctgctttatcgcaatggcagggggccattgtgacagccttctgtatcccaagctcttgcccagtatcctgaaagaactggatccaatgtgggctcaaaggatgagtgcaaggttttattgagtggtggaggtggctctcagcgagatggatggggagctgcaaaaggggatggagtgggaaagtggtcttcycctggagttgggctacccagtgctggactcttctctgactgccccagccaaactcccctcggcatccatacatccctcctcttctttctctgccgcatttttctgccatcactggtctgctgatgtgccggtccactggtctgcttgccttctcatctccttgcttgcaggtc

SEQ ID NO: 249148 - DNA, 595 bp, Homo sapiens
atttaaaatatttcttagattatttttaatgtacagaggctgaagaccatgcaattgatcagaaggggatagaattaggggaattctggtcttcactaagccagtggttctccactctccctggatgttagattcacctggggaaggggtttgacttgtaaaaagatggattcctatgctctcctaccagagattcttgtctagttggtctagatgaatcctgggcattgtaaattctaatatasagtcagaggtgagactgactggtctaaacaattcatgttcttgtggtctctctattgtgctcacttgaacaccatattatctaattaagttataagaagtaggttaccatctttaggaatctcagggagcaagcaatgcacactgatatggtttggctctgtgtccccacccatatctcatgtcaaactgtaatcttgagtgttggagatggggcctggtgggagatgactggatcaggggaagacttcccttttgctcttcttgtgatagtgagtgagttctcatgagatctggttgtttaaaagtgtgtagcacctcccgcttctctctcttcctttttctcagccca

SEQ ID NO: 249149 - DNA, 555 bp, Homo sapiens
ggcattgtaaattctaatatagagtcagaggtgagactgactggtctaaacaattcatgttcttgtggtctctctattgtgctcacttgaacaccatattatctaattaagttataagaagtaggttaccatctttaggaatctcagggagcaagcaatgcacactgatatggtttggctctgtgtccccacccatatctcatgtcaaactgtaatcttgagtgttggagatggggcctggtgggagatgactggatcaggggaagacttcccttttgctcttcttgtgatagtgagtgagttctcatgagatctggtygtttaaaagtgtgtagcacctcccgcttctctctcttcctttttctcagcccatgtaagacatgccttcttcctcttcaccttctgccatgattgtaagtttcctgcgacctccctagccatgcttcctgtatagccacggaattgtgagtcaattaaacctcttttctttataaattacccagtgttaggtatgtctttattgcagtgtgagaacaaactaatacatacacattg

SEQ ID NO: 249150 - DNA, 660 bp, Homo sapiens
ttcaccttctgccatgattgtaagtttcctgcgacctccctagccatgcttcctgtatagccacggaattgtgagtcaattaaacctcttttctttataaattacccagtgttaggtatgtctttattgcmgtgtgagaacaaactaatacatacacattgaatacacacggtctctgtaggtgatatttcagctgcgatatgaaagataagatgaagccagttatagaaagatttaggagaagggcataccatacagaagaaatggcaggtgcaaaggtgagagattgttactttatgaatggaaaggaggacatatggttagaagtgtggcaagcgagagaaagaagtggtacaagttgaaattggaaaggaaatcaggagctccatcatgcaggcccctgttattttaagttattttaaggagttcagaatttattcttaggttaatgggaagtattgaaaggtttagggcttgtagtaacataatttgcattgtaaaaaatctttctgtctacaaggtggggagcagataagggtcaagagtgaaaggagaaagacaagttagagccatggtaatggtctgagcaggaagaaagaaagtttggacccgatggggacagttggggtggaaggaaaggaaccaattcaagatagattc

SEQ ID NO: 249151 - DNA, 604 bp, Homo sapiens
cagcttggttaacaacatggtgaaagagtgagcaacatcagtgggtgtacagagggcagagtctcctgctctgaatgctggcatcccaggtagctttacagaggacatacactggggctgagaaggctgaattatgctgttacagactaaggaaatgaattctgccttgtaactgcctcacatggcctgggggacactattgctataagcgttttttttttgtttgttttgttttgttttttaaagaattgggctaggctgtttgtgttctattttattactgtgagatgtatgcctgcacattaattcaatcaattaattcaraatttattcactataaattgtaagactactctttctacctagctaacttaatgaatttaacacatttatatataattaatacaattatatattaaatgtagaggcgtaaatgtcatttatgtgctgctggctcctaaatttatttgacatctctacttggttatctaggcatctcaagcatagcatattcaaaacaaaactatcttttctgcctgcccccaaattgtctttgttagttgcaacaatattttctgattgctcaaaccaaaactcttggaat

SEQ ID NO: 249152 - DNA, 412 bp, Homo sapiens
aaacattaacatttaaaccctttcttaaaggtgacatttttttttcagagatggagtctcacagtgtttcctaggtacaattcctgggctcaagcaatacttctgcctcagcctcccaagcagctgggactacaggcatacaccactgcgcctatattagcccattctagcattaccrtaaagaactaccttagactgggtaatttataaagacaagaggtttaattcacagttctgcaggctgtacaggaagtatggctggagaagcctcaggaaactgacaagcatggcaaaaagcagatacctcttacatggctagagaaggaaggaaaagagtgaagtgggaggtactacacatttttagacatccagttcttgtgcgaactcattatcaggagaacagcaaggggta

SEQ ID NO: 249153 - DNA, 603 bp, Homo sapiens
atagactagtttttctagcgcctctgaggtatttttctggattgtagttttaatcaggtgtttaagtgaactttctgagtagcctatacagcaaaacagacatgaaggctgcttatatgtaagttggtgtgcgttctcctgaagttcatttaagttgtttagcttccattttcagggctttaagaaaagcacagttttaatttcttagtgattcttagtgattctaagttagaagaaatggaagaaaaatttgaaaatgttaatttggagacttgtacccaggaaacaattcaggattcagtccaaattgtagacaaayaataaaaactcaaaaacaacggacaatccaaaaatgggtatactatcattttcatttttttcatttttttttttttttgagataggatcttgccttgttaaccaggctggagtgcagtggtatgaacatggctcactgcatcctcaacctcctgggctcaagggatcctcctgcctcagcctcatatgtagctgggaccataggcacatgctaccacatctggttaattttttgattttttgtagagatggggtttcatttgttacctaggctggtctaaaact

SEQ ID NO: 249154 - DNA, 622 bp, Homo sapiens
caaataataaaaactcaaaaacaacggacaatccaaaaatgggtatactatcattttcatttttttcatttttttttttttttgagataggatcttgccttgttaaccaggctggagtgcagtggtatgaacatggctcactgcatcctcaacctcctgggctcaagggatcctcctgcctcagcctcatatgtagctgggaccataggcacatgctaccacatctggttaattttttgattttttgtagagatggggtttcatttgttacctaggctggtctaaaactcctgggctcaagtgatcctcttgccttggcctcccagtgttctgggattacaggcatgagccatcattcctagcctataattttcttttgaaacacaattttttcctccagccccccatttctaccagagaaaatcatagtaggattaacttatttgcaaaataaattttagtcttatcatacttggcctatttgcatcaagaatattgattgatcrtgtgggctcttttaaatcagctttactaaaagattttcataaggaaaatgcgtaaggaatctcagattagacttttgatatcagtgaggctaggaagtcaagccaagtatttacca

SEQ ID NO: 249155 - DNA, 561 bp, Homo sapiens
gattcttctgttctactattagaaataaaatcacaataaaatcctaataggatccaatcccttccttgccctttgtatgtttggaaatctctccgaagtcagccttatgaagtcagatttggaggtttgaagtccagagatgtgtctctggtgttctgaggagcaggcacttgtatagggagcaactcacaaccaagctgcgcgcatccagaatgatattttctgaatatgctagaagatggtatatttgaaactttaaattatttctatcttatagtaaccaattaacttttaatgaataatacatattattacacamatttatattatagtagcatacctatatatgtgcatcaataataaataagatttaagctgccaatgttgaacagcaataaggaacttaaaatttctgccctacaaaataaatgaagagtttgaaatttaatcagtcctattttatgttgaggcaaatgtacttcagcttttttctgagaatcatcccttctgctctggtttacataagaaattggttgaaatcctctaaagcattcgttttca

SEQ ID NO: 249156 - DNA, 582 bp, Homo sapiens
aacatgctgattctagagctggaggaggtccttgaggacaaataggacaccaaacagcacaaacctgatgacgctctcacatactctacattatgtggaaaggtacagcctttctatcgttatgctgtcttttgcatgaagttcatgcttcatcttcgttcctagacttcatttgaaatctacgctctcagatttatgaaaaaatatactttttaaatattgttcataagtgtggtcttgatatttagtagcctacataccgtatactcggcatttaacttagaaacctactataatttcccaagtttttctggtaatgggaaggtcctttaagacattttttacgtgcagtgggctctacaaatatttacttttttttttcacctttaagaaactggttgaaaattgtagaattagactttgaagctgtgtagtgtatttttggactattacatwtctatctaaatctacaacctgctaggaaagatcggatcccttccagcttgtgattgtaatatatgatttgtgtggactctagtctgtctcacaaatgcgtttagtattttctgaactgagcttctg

SEQ ID NO: 249157 - DNA, 589 bp, Homo sapiens
tcttttttttttttttttttttcagctgtgatcctttccacactgttttctttttttcctcctctgaatttacgtgtctctrttttctgtaatatccctttctctcctctctctctctctcattctcccattttgaagataatcttgttcttcactatccaaattcaatgtttgctgtttgatggaaggtggaacacagttgagtaaagtaacccaccatttacctgatgtcccagttagcagatttgaggagtgggctcatttgggctatttgttggcagatttgaggcagatttgttggcagagtgagctcatttgggctatgtgacagttcctatatagccacaagaaagaaacacttcctgcaagaaggaaaattgtacaggttaattgggccctggacacctagttggttcatagatacaggtataaacggtgtttgagcattttggatgttttaaaaacagtttttaaacacagttttgcacaataattaatcatctgtaaccagtcctgacaacagtgtagagagtgttctcatggattgaaccctgtgtcagaggatggttctgactttaaatgaagctcc

SEQ ID NO: 249158 - DNA, 505 bp, Homo sapiens
ttgttgacactcagttatctttcctatgatgaaggactgaactggcacaagcagctttatattttcttctctacacaatttttattatatgctctcaccatcttcttgttgatatgtgatatttttattgtggtaaaatgtacataacatagaatgtgctattttaaccatgtaaaatgtacagtttagtggcattaagtacatttaaactgttgtgatggagagataacattacaatgaaggaaggcaagagatgggtaagaattcacatagaaactctgtgtcagaagctgtgctagaaccccaaatatgcatgtgtaggagatatttatgtagctggataaaatttttgtgacttcgaatcttcctagaaactatggtaaaggataaattgggaaaataaagtcatgctatatgtgtattytgcatggttctattcagtagttcacatatgcatatagctacaagtagcaaaattaatccttaatgtttataggtttaagag

SEQ ID NO: 249159 - DNA, 434 bp, Homo sapiens
cagaggcagtgctgtctgggcagttcctcgtgggcattttctgtaaagctttttgcagataaataattcagtagacaatattaagagtcatttgcatttgcctccctgactttgagtatatgttactcaatgtcttgcttttgtgtgaatacacaattggcattcrttttacatttctgtaatgttggttttctaattatactcatttctctctagagattatttctgtttctttcctgctgtatgcattcacctcccattcatggtaaaataagttaccataaaacataagtccatattttaagggaaattcataaatggatttattaaaagattgtaaattatctttacattttgtaacaatatacttaatttgtgatattttcacaaaaaattaaaatgtatttctttatgaagtatagtactgtggttaa

SEQ ID NO: 249160 - DNA, 617 bp, Homo sapiens
cctccttggcctcccaaagtgctgggattacaggtgtgagccactgcacatgaccctattttattatttttaattgcccgatttgaattaatgatattcactaccctcccatggattgcatattaacctcktaactacctaacttgattctccatctgctttatattttgttgttctttctcctagaccactattctttagtaattttacgtatataaggcagagaaacccttactatgctccttattatatgctttcttaactttagtgtttttcttgtttctgttttcttttttgtttactacattctttctatggggattttgttcactgtcacctttatttcaaaatttttgttagatcttttcatcttttctcaggccatgacttattcagtaaaatttccaagccaatggttatttagcttaaaaacaaacaaaaacagtcatggaaggtggtcagcctgttatgttatttactttcagtgtgattttggacaagctcattttaatctctttgagccttgactgcctcagcttttaaagtagatgaatatcttacctgtctgcaggcagggggccagatgagaagatatcttggggccttctctttgatct

SEQ ID NO: 249161 - DNA, 594 bp, Homo sapiens
caatccatttgtaaacatttattgagagttaattatgtaataggattttattaattattggaaatacagagatgaatcaagtgtggtcccgtagcctagttgaaaaagctagcatgtacagacagttttttacactgactgagattaaaagattattataattggggattatcctgagagatcagaaggtcttagaaactttgtgtttgcaggatgtagcatgtaactagatcttgtatacagcattcaataaatacttaagaatgaatgatagtgtagctaatttataagcatattctgctaagaaatgcttacagccttttctcttagttcccaagatagcttaaataaataagaatatgatgatgtgttttagagaaaaataatctgacttyagtttgaactatcatgaatattatttattgacaattccaaaaaactttaaatgtaacattgatatctaagttatatagtcttgttttgtttccaattatcatatcaaacaattgaaaaataccaatccaatcaaacctttatttgtaactgctgctccctctttcttctttttcttttcttttctttcttttttttttc

SEQ ID NO: 249162 - DNA, 459 bp, Homo sapiens
ttatttacctgtaacctagaagagaatgaaggtatgtgactcagtcatatggcagacttttaaatggaaatattcattataaggaaaaggaattctttctctgattttaatagaatggaagtgttctctccctcaaccccatgaccccaccttctgtggactgaatgaatttgatgtttgaaaagtgattcmgataaaatgtagtattgtgatcaaagatgtctcagaacatcttaatcatgtattgctcttgtattgatatacattgtttacattgagctaatgcaataatgtaattaaatattcccatagtacagtatgggaatctgggagtggggcactaactggtattccattctgtgggggaaagaaatttctcttcttatcccttactaggttcatggctcagacccctataacaagacagataatcaagaaaaaaaacatacaaatgtattt

SEQ ID NO: 249163 - DNA, 459 bp, Homo sapiens
ttatttacctgtaacctagaagagaatgaaggtatgtgactcagtcatatggcagacttttaaatggaaatattcattataaggaaaaggaattctttctctgattttaatagaatggaagtgttctctccctcaaccccatgaccccaccttctgtggactgaatgaatttgatgtttgaaaagtgattcagataaaatgtagtattgtgatcaaagatgtctcagaacatcttaatcatgtattgctcttgtattgatatacattgtttacattgagctaatgcaataatgtaattaaatattcccatagtacagtatgggaatctgggagtggggcactaactggtattccattctgtgggggaaagaaatttctcttcttatcccttactrggttcatggctcagacccctataacaagacagataatcaagaaaaaaaacatacaaatgtattt

SEQ ID NO: 249164 - DNA, 541 bp, Homo sapiens
gtgtgcctgtagtcccagctacttaggaggctgaggtagggggatcacttgagcttaggggttctgggctgtattgtagtgtgctccaccgatcaagtgtctccactaagttcatcagtaatattgacctcccatcaatatgggaatgggggaccaccaggttgcttaaggaacgatgaactggcccaggtcagagacagagctggtcaaaactctagtgctgatctgtagtgggaccatgcccttgcatagctattgcacaccagcctgggcaacatrgcaagaccctgtctcttgaagtatagactaggacatcatctccaggtcgatgatgatggaaataaagagtggcaatttgggcaggttgggggagacaacatgtatttggggtctgtagacttgtatttgactcagaatttgattatttatcattaatcttgaggaatttatgtatatttgatctcagctttagttttttaaatctgtagaataaatatactgaaaatacatacttcacaagagcctatttttcaggattggt

SEQ ID NO: 249165 - DNA, 504 bp, Homo sapiens
tccactctctttgtctctttcaggtacttcaatcagtcataggtttggtctttttacgtagtcccatagttctcagaggtttgttcatttcttctcattcttttttctctcctgccttatttcagcaaggtagtcttcaagctctgatactttttcttctgctggattgatttggctattgatacttgtgtatgcttcacaaagttctcgtgctgtgtttttcagctccatygggttatttatgttcctctctcaactggttattctagttagcgctcctgtagccttttattatggttctgagcttctgaagcctacttctgtcagtttgtccatctcatcctctgtccaattctctgcccttcctggagaggtgttgctatcatttggagaagaagcactctggccttttgggttttcagcattctttcattgattctttctcatcttcatgagtttgtctagtttcgatctttgaggctgctcacccttggatgaggtttt

SEQ ID NO: 249166 - DNA, 500 bp, Homo sapiens
agttccaaagccatttcgtgttgaacaatggtgacttggttgttctgaatgagacattcagaaaaattttagccttatccctgagctaaaaaaatagcagtaaaaayttatcactgataagctattaaactattgtgtgaggagacaagtaaggatattgtttccaacacagaatattcagatactgcttctctatcttacagaaattaacagagctaaagttcacaaaagtgaatgaagtccactgttaacactactgatttattaacttacaatagattcatatatttaccacacagtatctgctgatgaataatatggtgaataaccatagactttaaacatcttacatttttcacaagctttgtaaatttgttcagctaagcccttttccgctccatatgttttaccactagtgtgacatatcgtagcagattctacttcagtttatattgaattaatgtgtcctcaacttctttggaaatattctgtcctgtagt

SEQ ID NO: 249167 - DNA, 430 bp, Homo sapiens
tgtatccaccaatatagtattatacagaatagttttactgcactaaaaattcgctcttctctgcctrttcatcccaccctcccccaaccctgatctttttactgtctccatagctttgccttttccagaatatgatatagttggaatcatacagcctgaggtatcaatcatacatgtaggcttttcacattggcttctttcacttagtaatatgcatttaaggttcctccatgtttttttcatggcttgatacctcatttctttttagcgctgaataattctttgttgtctgggtataccgcagtttatccattcacttactgaagggcatcttggttgcttccaagttttgacaattatgaataaagctgctatcaacatacatatgtgggtttttgtgtgcccaaacattttcagctcccttggataa

SEQ ID NO: 249168 - DNA, 616 bp, Homo sapiens
ttaagactcatgtctatgacttttactcgaagaacagcagtaaagtacagaagttttctatatttagccaagatttatttcagtagaagataatcttctctgactaatctttgagattggaataagcctttaaagataaacctcagaattctcattttggggtaatatcrtccatttcagttccctaggtttggcataggagatagtgactacactggtgtgtgactcttttcctggagatttcttcctgaaaaatgcaagagctgttggtgagagcaggcttgcagtgataatagttgagtctggtctacaaagattttgtaactccttggaaagcctcttataatcattcttaacctctttgtagctaaaagtttagagtagttgaaatctgtaggaatgcacttctgagggccaaaaatgtgactgacttgggaacaattcttaaactgattaactagctgtaatatagttttgtgaatttattgcactgatcctgtaccttgtggtgtatttgtccctattaaataagtgttgttttgtcctctttaatgttgcttgtaaacagtagtgcccattgaaacatatatttgatttttaaaaaatgtttcatatg

SEQ ID NO: 249169 - DNA, 504 bp, Homo sapiens
tatttagccaagatttatttcagtagaagataatcttctctgactaatctttgagattggaataagcctttaaagataaacctcagaattctcattttggggtaatatcatccatttcagttccctaggtttggcataggagatagtgactacactggtgtgtgactcttttcctggagatttcttcctgaaaaatgcaagagctgttggtgagagcaggcttgcagtgataatagttgagtctggtctacaaagattttgwaactccttggaaagcctcttataatcattcttaacctctttgtagctaaaagtttagagtagttgaaatctgtaggaatgcacttctgagggccaaaaatgtgactgacttgggaacaattcttaaactgattaactagctgtaatatagttttgtgaatttattgcactgatcctgtaccttgtggtgtatttgtccctattaaataagtgttgttttgtcctctttaatgttgcttgtaa

SEQ ID NO: 249170 - DNA, 616 bp, Homo sapiens
ttaagactcatgtctatgacttttactcgaagaacagcagtaaagtacagaagttttctatatttagccaagatttatttcagtagaagataatcttctctgactaatctttgagattggaataagcctttaaagataaacctcagaattctcattttggggtaatatcatccatttcagttccctaggtttggcataggagatagtgactacactggtgtgtgactcttttcctggagatttcttcctgaaaaatgcaagagctgttggtgagagcaggcttgcagtgataatagttgagtctggtctacaaagattttgtaactccttggaaagcctcttataatcattcttaacctctttgtagctaaaagtttagagtagttgaaatctgtaggaatgcacttctgagggccaaaaatgtgactgacttgggaacaattcttaaactgattaactagctgtaatatagttttgtgaatttattgcactgatcctgtaccttgtggtgtatttgtccctattaaataagtgttgttttgtcctctttaatrttgcttgtaaacagtagtgcccattgaaacatatatttgatttttaaaaaatgtttcatatg

SEQ ID NO: 249171 - DNA, 626 bp, Homo sapiens
tgcacaacatctggacagagcttcctccagcaggaatttattgtttcaggcttgatggctctcatggctttttctataacaacaatggcatcctcagtggtaaaatccttccagactttcatgaatgttctctctgtgggggttctcttccatagtgttgacaatcctttttatacagtaccgtgtgtaccgtgtatgacccctaattcagaggctaaattagagatgtgtttaggggcacatagaccactttaatgtcctcattgaactcatggggttctgagtggccagggacattgtccaatatgaaragaactttaaaaggtattcccttaccggcaaggtacttagtaacttcagggacaaagcatctatgaaaccaatccagaaaaaggttctcttctaggccttgttatacagccagaagactggcagctggtatttattttttcccttcaaggctaggagattagcagctttgtagataagggcagtcctgatcataaacctgactacataaaccttgactgtggttggaacatgtacaatctaagcgtgtgtgtaagttttgataaattttaactttttataatagatttgtgtatattttatgatagtaaatgata

SEQ ID NO: 249172 - DNA, 488 bp, Homo sapiens
aggtctgtgaaccattttaagttaatttttgtgaagggcatgtagtctatgtcaagattccttttttccatgtggatgtccagttgttccagcactatttgctgaraagacttttctcatatttaaaagattcataacatattttgttactccctttgctcctttgtcagagatcaattgactgtatttatatgggtctatttctaggtttttttattctgttctgttgattggcatcttagttggttttgtgctgctgtcacagaatagctgagactgggtaatttatcaaaaaagaaatgtatttcttacagttctggaggatggaaagttcaagatcaaggggctggcatctggtgagggccgtcttggtgcattatcccatggtgggagggcaaagagaaggcaaaagagagtgacaaaagggggctgaaatcgtcctttttaaaggacctactcctgaaataatgacattaaaccattcatat

SEQ ID NO: 249173 - DNA, 558 bp, Homo sapiens
atcttcccaaacatttccatttcttcttagtatggcttttctctattaattgtaccagtgaggaggagattgctgatgttttaaatgattgtaattattggtgcttactaaattggaacattcttatagtttgtgtaaaaagcataacatgagaatattttgtgtaaaacattcagctaaagtaacagaaacatattctagtgattttttttccctgccttagataatgaatttattagccctaggtacctttgtttgggcaatctgggaacatgtccttgttggtatctagctttaaatgtgaaacttgggttgtctcctatttgtttgttttattattattttgagattaccctcctcctagtggtcactactacccacatagggtttgcctgtatccactgcaagatgaacattttcaggatattaaaaataaaagtgtaattgaagtaaatacactggattttcttttatattcaggaagcagtgtcatcttcttawgttttgttattgaaataaaagattacatgcaacaaagcttagaaccatattactgtg

SEQ ID NO: 249174 - DNA, 475 bp, Homo sapiens
gcctgtatccactgcaagatgaacattttcaggatattaaaaataaaagtgtaattgaagtaaatacactggattttcttttatattcaggaagcagtgtcatcttcttatgttttgttattgaaataaaagattacatgcaacaaagcttagaamcatattactgtgattcgtaggagaaacttctctgatatttgtcctaatgctaaggaaattatgctttttttcaaaatgtattttatcttttttattgtataactattttaatattaataaaaattaaggttgaagtataatagttacaagaacttttttaaatatcaagaatcttactacaattatcaagaatgcttgttgcatacattcttggattttggagttgtttccatcaaagctgtttttaattaaatattgaggtatttaccttttctttactattttcccaaatggcatgctggcctttcaggccaaagtg

SEQ ID NO: 249175 - DNA, 624 bp, Homo sapiens
ccaaatggcatgctggcctttcaggccaaagtggaaatggagttttttctcttttaaaaattcttcttgtagttttccgagagacttcttggtgtatttgttatctgacttcatgagtcaactagaaagctcataactgaatttgctatccacttttaacagttttggtgtattaactttattacaagcttgactttactattctacttatgctttcttgaatttatatatttattttatcatattrtactgtttatgtttgtttttggtgggacgggatctcactctgtcacccaggctggagtgcagtggcatagtcattctcagtgtcccaagtaggtaggactgtaggcgcatgtcacaatacccagctaatgttttaacaattttttgtagagatggggtttatttgtatttttaatgctacctcaagaagacagtgtatagtcacttttgctataacatgacatgttcctaaaagtgactgtgctatgcaatgctacataataaaaagcacagggcttatgagagaaatcagattatgaaaataaaatttaaaagttttgtcagtgacatatttagaaaaagatacaaatcaaatcaaaggttagtagagttttacac

SEQ ID NO: 249176 - DNA, 624 bp, Homo sapiens
ccaaatggcatgctggcctttcaggccaaagtggaaatggagttttttctcttttaaaaattcttcttgtagttttccgagagacttcttggtgtatttgttatctgacttcatgagtcaactagaaagctcataactgaatttgctatccacttttaacagttttggtgtattaactttattacaagcttgactttactattctacttatgctttcttgaatttatatatttattttatcatattatactgtttatgtttgtttttggtgggacrggatctcactctgtcacccaggctggagtgcagtggcatagtcattctcagtgtcccaagtaggtaggactgtaggcgcatgtcacaatacccagctaatgttttaacaattttttgtagagatggggtttatttgtatttttaatgctacctcaagaagacagtgtatagtcacttttgctataacatgacatgttcctaaaagtgactgtgctatgcaatgctacataataaaaagcacagggcttatgagagaaatcagattatgaaaataaaatttaaaagttttgtcagtgacatatttagaaaaagatacaaatcaaatcaaaggttagtagagttttacac

SEQ ID NO: 249177 - DNA, 614 bp, Homo sapiens
tcatccaagctcttattcaagtcattgctaaaatcactaagttggggtggtttgaggttcagaaagaccaatttgtcttcagagaaattattgctgatgtgaagaagtttctccaggtaagaagtcattgctacatggttagaacatcactacttgctttttttggtttagaatactgctcttcttaaagcgatatagtttgttttgtgactaccagtaccatgttaattatgatttattatttatcctctggatcctttatcatttattgttagtaaatgaggatcgtgctgttacataatttccaaatcagaagaatgtaaataatcatgttttctaatttcaaartgtgtgtacatttatgacacatatgtctatgtactgtatatataaaacatgtatataatgcttttcatagattatgtaattaaatgttcatcacaacctaaaatgaaatagattttattttgtaaacaagaaaacaggcttagaggggttaaataatttctgtaagattgcatagtgactgattaacgcatacagctagcatttaataagcctccaacttacgataaattttttaattttttaatttttacactataccacattga

SEQ ID NO: 249178 - DNA, 596 bp, Homo sapiens
gtgattttggctttatatggtgaaaaatatagatggcttctgtggagacagttcattcagcctaattttatgacatttacagtttcaactagcatttattaagcatttctgaaccaggaagtagggagatctataatgcatgagggtaattaaatattctagttatcagatgtgagccagataaattcaygtagtatccataacaggatgtgtctcttaagaaaaagaactacacttgagttttcctaaaagttaggaggattatataagttatcctgctgttttagaagctagagtttctgttcctggagtatattcactatccagtcattaagaagtaaaatatcctgtgcctccaaggtagaggcatatatatgcaatagaaaatggatgtgcaatccttcgtctcaaaatattggatatctaaatgagtaacccaagtaaaataagcatgcagtcctttaatataactctggaataaaacatggagttgtattttcgctctatttttaccttttacaaacttcttagcttctttaaaacttacatattgttacctgtaaagtgagaatgacaactacttatatggatcttaa

SEQ ID NO: 249179 - DNA, 596 bp, Homo sapiens
gtgattttggctttatatggtgaaaaatatagatggcttctgtggagacagttcattcagcctaattttatgacatttacagtttcaactagcatttattaagcatttctgaaccaggaagtagggagatctataatgcatgagggtaattaaatattctagttatcagatgtgagccagataaattcatgtagtatccataacaggatgtgtctcttaagaaaaagaactacacttgagttttcctaaaagttaggaggattatataagttatcctgctgttttagaagctagagtttctgttcctggagtatattcactatccagtcattaagaagtaaaatatcctgtgcctccaaggtagaggcatatatatgcaatagaaaatggatgtgcaatccttcgtctcaaaatattggatatctaaatgagtaacccaagtaaaataagcatgcagtcctttaatataactctggaataaaacatggagttgtattttcgctctatttttaccttttacaaacttcttarcttctttaaaacttacatattgttacctgtaaagtgagaatgacaactacttatatggatcttaa

SEQ ID NO: 249180 - DNA, 293 bp, Homo sapiens
gttgtttatactgcctctgaaagtgtgatgaactttggtttttagtattgggatcagtacgggttgtaggaagaacattaaattgaaacagtctagaaacttgggttctactcaagtttatttccttttttttttttttttttttagtaaattttgstttgctttttcataggtctggttaaactaatttcatctttatctttttaggttgattattctagaccttcagcaaaacacaggaaaatagctacctcatttcgtgatacttctctcaaagacgttttagtgctagc

SEQ ID NO: 249181 - DNA, 646 bp, Homo sapiens
tactacccttctctaactcttcctcaaccttgcctggctccatgtcttaggtttgacaggctgtccccttcagatctctgaataagaaatgaaggggatctactcacttgaattgtgttcatcaagccagttatttatttattttttgaatcagtgtaaattctattgcatgcttaaaaagttcttgatactctgtagttgtatacarctttgagactcttagctccatctttgcggagcctaaaacaaatctgtcaaggttattaaaaattgtaagtttaagtttaaacttgtaaagctggggagttctaatattgccattttctgaaaaacatattgcatatttaaagtatatatcagtgatgtgtttgtttaggtatcttattgcctaaaagggaggaaagcattcacagaaatgtcctttttaaaaaaacatgtcttctcttgaatctagagtttaaggtagtgctttttaaactgggtttctcagggtacctcatgtttccagttggggccacagccttctgtcttttagtcgcaacagtcttgcttttagttgtgtaaaaaccatggtttcatgtaattatgttttgggataaaacaaaaaaggtactagtgcttaaaaaataaagtagaaaacaactgc

SEQ ID NO: 249182 - DNA, 648 bp, Homo sapiens
atgtgtttgtttaggtatcttattgcctaaaagggaggaaagcattcacagaaatgtcctttttaaaaaaacatgtcttctcttgaatctagagtttaagktagtgctttttaaactgggtttctcagggtacctcatgtttccagttggggccacagccttctgtcttttagtcgcaacagtcttgcttttagttgtgtaaaaaccatggtttcatgtaattatgttttgggataaaacaaaaaaggtactagtgcttaaaaaataaagtagaaaacaactgctttgagagatagtaatgaacatttattggacatgtcctatttattgtatgatacttatctcacttaatcctcaaagtggccctgaaaggtaaatgataaaaatccctactatgtagacccagaaaaacagaaaacagacccagattgactaagtgacttcccccagggcaacaaagaaaatattggcattgagattgaaacacaggtcttttttgcccccaaccccaggtgtttttagtacgctagtggttcctatacttgtacttctgagtttcctaaggagttttttgtttttgtttttgtttttaatttgggttttaggttctcatggtaggggctgtggcaaactggagcacatctaaaa

SEQ ID NO: 249183 - DNA, 648 bp, Homo sapiens
atgtgtttgtttaggtatcttattgcctaaaagggaggaaagcattcacagaaatgtcctttttaaaaaaacatgtcttctcttgaatctagagtttaaggtagtgctttttaaactgggtttctcagggtacctcatgtttccagttggggccacagccttctgtctttyagtcgcaacagtcttgcttttagttgtgtaaaaaccatggtttcatgtaattatgttttgggataaaacaaaaaaggtactagtgcttaaaaaataaagtagaaaacaactgctttgagagatagtaatgaacatttattggacatgtcctatttattgtatgatacttatctcacttaatcctcaaagtggccctgaaaggtaaatgataaaaatccctactatgtagacccagaaaaacagaaaacagacccagattgactaagtgacttcccccagggcaacaaagaaaatattggcattgagattgaaacacaggtcttttttgcccccaaccccaggtgtttttagtacgctagtggttcctatacttgtacttctgagtttcctaaggagttttttgtttttgtttttgtttttaatttgggttttaggttctcatggtaggggctgtggcaaactggagcacatctaaaa

SEQ ID NO: 249184 - DNA, 648 bp, Homo sapiens
atgtgtttgtttaggtatcttattgcctaaaagggaggaaagcattcacagaaatgtcctttttaaaaaaacatgtcttctcttgaatctagagtttaaggtagtgctttttaaactgggtttctcagggtacctcatgtttccagttggggccacagccttctgtcttttagtcgcaacagtcttgcttttagttgtgtaaaaacsatggtttcatgtaattatgttttgggataaaacaaaaaaggtactagtgcttaaaaaataaagtagaaaacaactgctttgagagatagtaatgaacatttattggacatgtcctatttattgtatgatacttatctcacttaatcctcaaagtggccctgaaaggtaaatgataaaaatccctactatgtagacccagaaaaacagaaaacagacccagattgactaagtgacttcccccagggcaacaaagaaaatattggcattgagattgaaacacaggtcttttttgcccccaaccccaggtgtttttagtacgctagtggttcctatacttgtacttctgagtttcctaaggagttttttgtttttgtttttgtttttaatttgggttttaggttctcatggtaggggctgtggcaaactggagcacatctaaaa

SEQ ID NO: 249185 - DNA, 618 bp, Homo sapiens
tctgtgttgcagctttggggacaacccttaggacactgctctctggtggctcagtacctctccactaaattccatcccccagcacctgtaccagaactggtggcctgagcctccattgaggctggccgacacataaatagccacttaacgattggctcgtctaccacagggagtgatggcatcagctgcacttgtcacttgggatgtgctgcggatgcaacactccatcccccagatgggtttggtataaaaaggacaagattcaagtggaatccagttcagcttgggggtgctgaaggccctcctcctaaatgcagggcaaagaaaagggacttggaaaacagatttaaatcatgccacttaactgtgtgacctcagccaaatccccttgcaaatctaagatttgactctaaaaattaacascttctgggccagcagccatgagaattaaatgaaattaagcaccagacatggcttctaacaattcatgggcatttagaagcctttttcttctcttttcttcccttataaaatgagacgtgtttagcaacttaaccaagcaaacacggtaggatgggattacatttctggctctagcctgggtgaagcttctcagat

SEQ ID NO: 249186 - DNA, 604 bp, Homo sapiens
agtgatttaaataatagaaaacaagtccaacaagaaggagcttttgtaccttggaaagtaagctgagtraatgactgtcattattaggttcaagagaaattttgtgcaagggacatgctgttccactattcacctgaataagtgaactgaataaaagtaaataggcataaaagcacttcagagaaagcctaattgtttagaaggaagaaaatgtgcaggttgaataatgaaatgctcagattctccatctggaaatttcccatgagaataaagaatcatctctccctttgattttgccatacagctgcctgaaagcagacagctctattttaccaggtaatcttggaaggttgtagatgcagggagatgcctctggctgcagaaaattaaagtgtcaacgtattgctaacataaaacaaatgcctaagaatattcctggtggcccacaaggttgaacttcaaaattatgatttcttttgggggatctgaaggggaatcatgtgattcatagctttcagtgacttggctatgatatgaaacttaaccactcaatatcatttcttctaactgtgccttcccagacattagataaaatgcaatccca

SEQ ID NO: 249187 - DNA, 571 bp, Homo sapiens
tgcagaagcagggctgcaagattacaacatctatagaacaacagcaagccgcgacctcataaagattgaatggcattatctgtggcctgtgtcttgatgatctctctcaatctgccagaactgttccacaccctaacccacccaccagaaatttgaggcaggggcatctctggaatctttactagcaaatcagatcattcttccccagaaaagacttaaagtmatttgttagcctagaggaccctgcttttcacctcttccatctaaaagttcctgcaaaggagatcacaaaagctggcatcttgcccacagtgcatattggagcagcctggctcactgctccaagaacacagttaacaagaacatcctatttcatctctacaaaggtgaaagatctcagctcatgattcctctcagcactccactggtgattgttttaaaaatgcatttgtatgtatacacaatgccttctattgcaatgaatctttcacatttttaaaggcaagttgtatgttctgacactataaatggtagtaaaggtatttcaaattatctcccatttgcttactat

SEQ ID NO: 249188 - DNA, 574 bp, Homo sapiens
tttagtcctcagcaataatccaaagaaatatctgatgctactgaaagactactgtcatccctggtagatactcatcaattattattaagtattgcatagttcaggtcaagatataatatgtctgagaaaaaccatggcacctccttttaatcttgcatagaaaacaattaaagtatataaagcacattattaaaatatgtaaaatttataatttaattataagattgcatggctttatgatctaatagttctgctgtattttgcatattagtgaacaattgctttcttaaagcacacwgtagaatcatttacttgatgctggagaataagttaattatggattccttgtatatgactaatggatttaataatcactttactgtagaattaacttatacttccctgtgcttatagcactaatgatgatattcataaaagttatattctttaaaaaatgtaagattggcacaaaaagagaaaccagtgtacaacttggttttcgagccagcagttgtaaatagatagttcagagtcatcaaggccctcctcttgctctgtaataaatcacacatac

SEQ ID NO: 249189 - DNA, 587 bp, Homo sapiens
ttcaacaattttttgtagttttctgcatataaggcttgcatttgtttcattaaatttattcctaagtattttatcatttttattytattgtaaatattgttttttaattatattttgggattgtttattgctagtttatagatatacaattgactttttattgagaaataatttatatgccataaaattgtccttttaaggtatgtaattaagaggtttttagtatattcacaaggttgtacatccaacacctctagttaattccagaacattttcatcacaccaaaacaaaacccaatacttattagcagtaaatccccatcacccactccccagctccaggcaactactaatctactttctgtctttggcctattttggacatttcatgtaaacagaattatacaatacatagccttttgtgcctggcttcttttacctagcataatattttcagagttcattcatgtagcattagtcagttcgtccttttttgtggctaatattccattgtatgaatatgccacattttgtttacccagccatcaactgatggaacctgtattctgcgccaccccctcccccca

SEQ ID NO: 249190 - DNA, 586 bp, Homo sapiens
actcacgttagctaatgcagtttggcatctgaagtgtgcagcatagcgaagacctgttgaataatagtgacttgaagactcgaatattctagactaggatccatctcccactatctaaacccgcaactgaaatatctacataatgtttgcatatctttggccagtaccctttgggggagcttccaggtgctgagctttcttccatctttggataaattcgttctagccttccggagttcaggagcaagcaaagggaatcaggtgcagagaaggacgtgaggttttcctctgtcggggctaggggagttgtggagatttggggtggaagggacagcgcttattgaacttctgggtgcctaaggtttactctctcagtctgggttttgggaatcgctttctttcacaagggatttcctttatgacttggaggaaaggggtagttaagatctgcatttcattaatcaagaatttcttacttttttwaaaaaagtatgctcctaatccagtttcagaatgacttttctggattattgtaagtacgtcagaaactcccagacctgagtagaaatttcagaaccacttttgc

SEQ ID NO: 249191 - DNA, 590 bp, Homo sapiens
  misc_feature (1)...(590): n = A,T,C or G
tcttgtaacagtaataagagatataatcagctctttatttcaggaaaactacattgccttnttaaaaaaattgaaatgcacnttgctaacattttaacaacacaatgtaattcctrccttcggatttcagggtggaatccacagtgatgatgttatttttcagattaaaaaaagtctttagaatgattttctgacaggcataaaactgttgatatcagttctataggctgcctgggcagttgcctgagcctagttgcaaaacagttagattttctcttcttcttatttaaaaaatgcgtgatagagaaattgtgcatttttaaaacattttccttggaaggaaatgtagttttccctaaatacccaatttgcaatgaggccatgatgttgcaaacttaaaaatgtggagcattctaatggttattaatagggagggtctctttttgagtagggaaaagggcccatagtgacctgaatcttgagtatttccattcgttaaaccgaatgaagggggtcaactctgctttcaaatatattctgctctcttttgacttaataagaattcttcatgcataactctactggcaact

SEQ ID NO: 249192 - DNA, 608 bp, Homo sapiens
attattgccaacacttggaataatctgttcctttcctctcyttgggaactctaactgcatgcatattaggtggattaacattgtcacatggcttattgaggttttgtttattttttaaattattttttcagtactttcatcttagtaagtttagttcaggtcttttatatcatcatatctctacttacctttttaaacatgtgtaatacagttataataaactatcttaatatccctatgtgctaattttagtacctttgtcagctctgggttgacttcaatcatatttttttttcctctttatgagtcttattttcctgcttttttgcatggctggtattttttaattagatgctagaggtaattataccttattagctgctgcatatttttgtattcttataaatatttttgtgccttgtattacttaaaaatagtttgatccttttgggttcagcttttaagatttattaaagcagaacgcaaataatgctaagtttaaggagctccactactgaggcaaaacccttctaattattctactcaatgccttgtgaattttgaattttccatcacctggttttgtgggcgttccaggcacaattatc

SEQ ID NO: 249193 - DNA, 608 bp, Homo sapiens
attattgccaacacttggaataatctgttcctttcctctccttgggaactctaactgcatgcatattaggtggattaacattgtcacatggcttattgaggttttgtttattttttaaattattttttcagtactttcatcttagtaagtttagttcaggtcttttatatcatcatatctctacttacctttttaaacatgtgtaatacagttataataaactatcttaatatccctatgtgctaattttagtacctttgtcagctctgggttgacttcaatcatatttttttttcctctttatgagtcttattttcctgcttttttgcatggctggtattttttaattagatgctagasgtaattataccttattagctgctgcatatttttgtattcttataaatatttttgtgccttgtattacttaaaaatagtttgatccttttgggttcagcttttaagatttattaaagcagaacgcaaataatgctaagtttaaggagctccactactgaggcaaaacccttctaattattctactcaatgccttgtgaattttgaattttccatcacctggttttgtgggcgttccaggcacaattatc

SEQ ID NO: 249194 - DNA, 608 bp, Homo sapiens
attattgccaacacttggaataatctgttcctttcctctccttgggaactctaactgcatgcatattaggtggattaacattgtcacatggcttattgaggttttgtttattttttaaattattttttcagtactttcatcttagtaagtttagttcaggtcttttatatcatcatatctctacttacctttttaaacatgtgtaatacagttataataaactatcttaatatccctatgtgctaattttagtacctttgtcagctctgggttgacttcaatcatatttttttttcctctttatgagtcttattttcctgcttttttgcatggctggtattttttaattagatgctagaggtaattataccttattagctgctgcatatttttgtattcttataaatatttttgtgccttgtattacttaaaaatagtttgatccttttgggttcagcttttaagatttattaaagcagaacgcaaataatgctaagtttaaggagctccactactgaggcaaaacccttctaattattctactcaatgccttgtgaatttkgaattttccatcacctggttttgtgggcgttccaggcacaattatc

SEQ ID NO: 249195 - DNA, 495 bp, Homo sapiens
tttaaaaactccccacaaagaaatgcccaggcccagatagcttcactgtttaattctaccaaacattagaaaataattaatatcaattcttcataaactcttccaaaaaacagaagaggaggataaatattctaactcattacataaggccaatattactctgataccaaaactagacaaagatatcacaagaaaactacagaccaacatctcttatgagtatagatgcaaaaattctccacaaaattacaagcaaaccaaacccaacaacctatataaaaggattacacaacattcacratcaagtagcatttatcacagcaatgtgaagttggtttaacaaccaaaaatccattaattagttatactacagtcataaaatttggggaaaaatataagtatctcaacagataaaagtaacacatttgagaaaattcaacaccatctcataagaacacttaacaagttacaaataaaagagaactttcacaaact

SEQ ID NO: 249196 - DNA, 579 bp, Homo sapiens
ccaattctattagattagtagtaattgcttagaaagctgtgctatgaagtcagattggaaatttcattgtcagtgaggtttgttgttttacttgataggaagaaagagttatggctctcttggtctgtatgcaccatctctggccactggcacaaaaccataagttaataatttttaagtaggtggcacatggcttccrtaggcctgtcttagctgtgcactttctaaattagtcaatccctacaactatgtgtatataattttaataacatattaaatactattaatatataattatatatcatataattgcttatttaaacaaataattttaacttgattttagttctttccaacaaaagaaaacatttttatttaatttttattttattttaaaattttattactatcatttttgagacagggtctctctctctttctctctctctctctgttgcccagaggtcttgatgtcctgagctcaagtgatccatccacctcagcccccgcagtagctgggactacaggtgtgtgccacattgtccagttcagaaaacacctttaatttccagtaactag

SEQ ID NO: 249197 - DNA, 579 bp, Homo sapiens
ccaattctattagattagtagtaattgcttagaaagctgtgctatgaagtcagattggaaatttcattgtcagtgaggtttgttgttttacttgataggaagaaagagttatggctctcttggtctgtatgcaccatctctggccactggcacaaaaccataagttaataatttttaagtaggtggcacatggcttccgtaggcctgtcttagctgtgcactttctaaattagtcaatccctacaactatgtgtatataattttaataacatattaaatactattaatatataattatatatcatataattgcttatttaaacaaataattttaacttgattttagttctttccaacaaaagaaaacatytttatttaatttttattttattttaaaattttattactatcatttttgagacagggtctctctctctttctctctctctctctgttgcccagaggtcttgatgtcctgagctcaagtgatccatccacctcagcccccgcagtagctgggactacaggtgtgtgccacattgtccagttcagaaaacacctttaatttccagtaactag

SEQ ID NO: 249198 - DNA, 579 bp, Homo sapiens
ccaattctattagattagtagtaattgcttagaaagctgtgctatgaagtcagattggaaatttcattgtcagtgaggtttgttgttttacttgataggaagaaagagttatggctctcttggtctgtatgcaccatctctggccactggcacaaaaccataagttaataatttttaagtaggtggcacatggcttccgtaggcctgtcttagctgtgcactttctaaattagtcaatccctacaactatgtgtatataattttaataacatattaaatactattaatatataattatatatcatataattgcttatttaaacaaataattttaacttgattttagttctttccaacaaaagaaaacatttttatttaatttttattttattttaaaattttattactatcatttttgagacagggtctctctctctttctctctctctctctgttgcccagaggtcttgatgtcctgagctcaagtgatccatccacctcagcccccrcagtagctgggactacaggtgtgtgccacattgtccagttcagaaaacacctttaatttccagtaactag

SEQ ID NO: 249199 - DNA, 513 bp, Homo sapiens
catggtgaaacctcgccgctattaaaaatacaaaaaattagccaagtgtggtggcacacacctgtaatcccagctactcggcaggctgaggcaggagaatcacttgaacctgggaagtggaggttgcagtggccgagatcgcgccacctcactccagcctgggggacagagagagactccatctcaagacaaacaaacaaacaaacaaaataatgaaccagattcttcttcayaggttaatatgagttggtagaaaaggtttgaaaacaaacattgttgttagaatatatttatggaaagaagagagaagtcacttatgcctgcatatccatgccaactgcatattttgagtaatggcaagttattgtctcatatggcttagaaagcacaacctaggcttcctaggctgccatgtccagaaaatactgcctggtatggcaagagaatttacttttgaatatacaccgcagtccatccaggaaacagacatttatggaaatttgaacccagtta

SEQ ID NO: 249200 - DNA, 575 bp, Homo sapiens
ggtggggggagagctttagagtttttcttcagctagtctccaaaggaaggctatttgcttattttcaccagaatatgagatgagagtggctatagtagagaaggtttattttctcttttttaagcattaaacatggggcactcatgtcccaaatctgggcagaaagaatcagctttccacttcgccattttytccttccagacttccagtattttggggaaagagcaaccagtagcctttatttttatgatccatagctattgttagaattaaaaatgaaaaaatctgtatagtaatctgtttaatccaatttaaaagtatttggttgagaaatttctggggagggtgatattttgaagattggaatagaatgggataatattctcattttgcctctatctactaaataagtgttctacctcctaagtcccccattcttttatactgtcaacattattggacatgggttttccaaaaaaataataaatggattcctgaagcacagccaattaaccactagggacttataggatagtccttgttaatgctcataatttatgattttttaaaaagga

SEQ ID NO: 249201 - DNA, 558 bp, Homo sapiens
ttgttattactactctatttttcattacttgcaaggaatctgattttagcagaatacatatctgcttatgctttgggtacactaagcatacaggatgaagttgaattaartctctcaaaaccagcttgtttacttcttatggcaatgggactgactgatcctacactctttatagctcttgactattacatctgagtaactatataatcattcctattggtttttggagaaagactaacaacttggatttagtggattatacaagaatacatgcaaggaggaagaaaatatatttttacatattaaagttttcattgagaaaaggaagtccacaaagtcaaatcgaaagccatctaaaaggcagtagttatctcctctttacaaaaacacgcctggaggaaaagtacatccttgaaatttaagagttggttgcatcctaagtagtattaggctgtgtcagtagtctacaaggtgtttgcccaaggacgttttgccatctcttccatgattttcacaggcttctgatgtacttttgaaaaatcaaagttctgttcagta

SEQ ID NO: 249202 - DNA, 558 bp, Homo sapiens
ttgttattactactctatttttcattacttgcaaggaatctgattttagcagaatacatatctgcttatgctttgggtacactaagcatacaggatgaagttgaattaagtctctcaaaaccagcttgtttacttcttatggcaatgggactgactgatcctacactctttatagctcttgactattacatctgagtaactatataatcattcctattggtttttggagaaagactaacaacttggatttagtggattatacaagaatacatgcaaggaggaagaaaatatatttttacatattaaagttttcattgagaaaaggaagtccacaaagtcaaakcgaaagccatctaaaaggcagtagttatctcctctttacaaaaacacgcctggaggaaaagtacatccttgaaatttaagagttggttgcatcctaagtagtattaggctgtgtcagtagtctacaaggtgtttgcccaaggacgttttgccatctcttccatgattttcacaggcttctgatgtacttttgaaaaatcaaagttctgttcagta

SEQ ID NO: 249203 - DNA, 622 bp, Homo sapiens
tgccttttctaatttttttttccatttcagtgtgtagaatacaatctcactgctacaaaagttgtacaatatattttattaatcttgaggaggataactaggaaggtagaaacaaatgccagtagagtaatggtttttttcagcaaagaggattactaatgataaatttcttttctaggggacacttaacagaaataaaaatgtgagtatgtctgccaagatatcagaaatgctgaaggaccagaaaaaggggatgtctgttagccccagaatcagcccaagtaccatcattctggtcatttcaacagagaattggcatgggaagagaggagtaggattggaggtggatgtacatatgttttgagaaacagtaaagtagataagaggagaagttcatcaaagattaaaactcgttctccactacagcaaatgatcctgaaactttaatcagatttgtctttaggttctcttccaaatgcccacagaaccactgtcaaacaatgtaaccaatcaaacaaaagcatttctgcccctctacttaaggatgccctgaactttattatgggggaatcaaaaaaattgtgggttcaagcccagctytgatagctccaagaccttggga

SEQ ID NO: 249204 - DNA, 587 bp, Homo sapiens
tgacatattctattcttttacttttaaacggaagataaaatgatagggaggagctgaaaagagaaatatgtaaatgtgtttcagattattttatgattactatgcctatgaaatattcagaaagaattacatcaatatgtttattctattatttaggaaccacrattaatatttctaaaatgtactttttcttgtaataccttttccagtacattgtcttttaatctcaaaaatgcattttatttgtaaatcaaaatggtgacagagattgcttttctttcattgtgattgttcagaaactagaagttacctgatgggtctggtgactaagagacaaagaagtaaatatgatcaaagtttcctttcttaaagtttgctttccagctatgtattctgattcctctagtcaaaagttcattttacagtgatagaggggtgggccatatctagtgggtggtcatttgctaaagcaagctgttttgtgacaggagagtatttgctataaaagagtctgtaggtggggagatggtttcatttattggcctatttgtagttttcaatggaaaaaaatgtgtaggcagttgttt

SEQ ID NO: 249205 - DNA, 520 bp, Homo sapiens
ttgacatttgccatcaaccatcatcaggagacataattgaacatatgtaaatagaagatgacaaatttgctaaggcagcatcattgtgtactacaaaagttaatacatctctttcagagattgtgtccaaagaaaactccttaacattagcccatgcagtcgagtgtgtttttgtatcactctttgaaaagtgacatttcatttagattagatgactgctcatcccaattaatttmacttattttgatcccaacattccttttgcttataaaataaagtgatagctattatctttgacccattagtagaagcaaaattgtacaaacaattaaataatgtcaattttatgtcatgtcatcagatacttcaaatagaaaattcattccaaaagtggtttgattgttttttcattcaattcatggaatctaagtgaagcttttggaagtacttttgtcatagatgaaacacatgacattattggaaatgcaattgttaatattttacaaagaacaacaatatt

SEQ ID NO: 249206 - DNA, 520 bp, Homo sapiens
ttgacatttgccatcaaccatcatcaggagacataattgaacatatgtaaatagaagatgacaaatttgctaaggcagcatcattgtgtactacaaaagttaatacatctctttcagagattgtgtccaaagaaaactccttaacattagcccatgcagtcgagtgtgtttttgtatcactctttgaaaagtgacatttcatttagattagatgactgctcatcccaattaatttaacttattttgatcccaacattccttttgcktataaaataaagtgatagctattatctttgacccattagtagaagcaaaattgtacaaacaattaaataatgtcaattttatgtcatgtcatcagatacttcaaatagaaaattcattccaaaagtggtttgattgttttttcattcaattcatggaatctaagtgaagcttttggaagtacttttgtcatagatgaaacacatgacattattggaaatgcaattgttaatattttacaaagaacaacaatatt

SEQ ID NO: 249207 - DNA, 520 bp, Homo sapiens
ttgacatttgccatcaaccatcatcaggagacataattgaacatatgtaaatagaagatgacaaatttgctaaggcagcatcattgtgtactacaaaagttaatacatctctttcagagattgtgtccaaagaaaactccttaacattagcccatgcagtcgagtgtgtttttgtatcactctttgaaaagtgacatttcatttagattagatgactgctcatcccaattaatttaacttattttgatcccaacattccttttgcttataaaataaagtgatagctattatctttgacccattagtagaagcaaaattgtacaaacaattaaataatgtcaattttatgtcatgtcatcagwtacttcaaatagaaaattcattccaaaagtggtttgattgttttttcattcaattcatggaatctaagtgaagcttttggaagtacttttgtcatagatgaaacacatgacattattggaaatgcaattgttaatattttacaaagaacaacaatatt

SEQ ID NO: 249208 - DNA, 470 bp, Homo sapiens
aggaatcaggttatccatctttgcattacttagcattctgtaaagagtacacacttcataaacagacacagttgtagattagccatactgtagtacaatgaaatgcactgaagaagaacaaatccaatgttataaaataattatgctcctcactaggactacaatcaatgtcatatttcctgtttcaccactaaggttaaaagaggaggaattgacatagaaagataggcattttatgtctgttttagtcattcatcatttacttaacatttaaattatatatagtgtttcccatgggccagacactattctaggcactttgcatacaatgacttactatttcccacaattactctgaaaagtagatgccaccaatatctctgctttatagatgagaaaastaaggtacagatgggcccaagctcacgtaggtaataggtggaggaggtaggatttataccagatttgcc

SEQ ID NO: 249209 - DNA, 535 bp, Homo sapiens
tggtttcctcatttaggccaagttagaggttatgcttcatccccctctactgcagggcgtgtcatccacaaaactattgatactttggatcaaataactcttttgttttgggggctgtcgtctgcattgtaggatgtttggcctcatccttgacttctactcaccagatgccagtagcaccaccctatccagttgtgacaagcaattatgttcccatgggagcaaaatcactcccagttgagagccagtgaatcttagacaaatcttaacaactgtggatagtaaaatggattttcaatgaatgtttatcagtaacattcaataagtgtcaggtattatctccattcccaaacttcctagaaaacttaacatcttgattttatcaaggatgatcctgggaaatgcagattgaccataagaattagtcattttagtgttrtaacttctcatgatgatgttgcaggtgatgggtggcctccctgttttttatgaattcacatctctgacatatcttatttttcacttgtgactatat

SEQ ID NO: 249210 - DNA, 378 bp, Homo sapiens
gtgggtgcagggcactgtggattgytgggtagccaggacacagagaagagaggacaagcagctggccactaaataagcttcttaaatgatgtccacaccagttatcctgttggaagagggaactgatagtcctcaaggcatcccccagcttgtgagtaacatcagtgcctaacaggtgattgctgagggtagaagaaccaccctgggttctcatggcacagacatgcttattatggatggcagaggcaagcaacaatcttcttgaagcttcttcaatttgtccatcctgcagcaaagacttcaatggacattgccaaataccaagatgccaaggtgggtgatagcaccacctcagtgaccttactggctgcagagttt

SEQ ID NO: 249211 - DNA, 559 bp, Homo sapiens
tctgaaaaggccatagaaaaaagccaaattttctgaaaaagttttaggtatttactaaattgattaatgactaattagtatatttcattttcccacagaccataatgcaattacttatatatgactcacattatatagaaatracatttgtctttcggattagtgcattctccttaaaatttgatgaaagaatatataaagtgtctgtattaaatctgcaaatagatatattctaaaaatgattttttttggaaacaagattgcccaagctggagttcagtggctcaatcatggctcaccgcagccttgacctcttgggctcaagcaatcttcccccctcagcctcccaagtggatggtactacagtctcccatcaccatgattagctactaaaaagggactctagaggaagaaaatatattgtaacattttgatacatctactattagctaccttcctaaccaccacctccctagttctgatttatctgatccatttgatgctttcctttttacttacccagagactataacttggagacagaacttatggtacaaca

SEQ ID NO: 249212 - DNA, 626 bp, Homo sapiens
actctaattaaggctacgtttccaataggtaattggcatcttatttaactcactctcagtgcgatgtcttaaagggaaaacaatcacagtaatgtgtggacagtgccatggaatttacaaaatattttcacctactttattacttttacatagtgtctgatatagacacatatgaatcaatatgtttttattggtcaccatgatttaagatgtagattttatttcagtctttattccatttgcctgcatatccattaagttattgcatacaattaactaagcccatttccaatatatataaaagggagttaacatctttattgtttgtcacacttctagaaaatgagctcactgagagatatactatatggattggtcctcattgataaagcaagcctaagtggttactgggaagaaaagtcaccaccttcaaagaagacttgaattagttatgaaagagcaaytagttatgggaaaagagcaagagaggctttgttctgtgaatatagaaataaacgtataagtgaaaaagagactatagatataggtcagatcccaagattttcaaaagtaagatgagaatttgaaaaaaatgtgagtctagaaaattatttagtgttttagca

SEQ ID NO: 249213 - DNA, 626 bp, Homo sapiens
actctaattaaggctacgtttccaataggtaattggcatcttatttaactcactctcagtgcgatgtcttaaagggaaaacaatcacagtaatgtgtggacagtgccatggaatttacaaaatattttcacctactttattacttttacatagtgtctgatatagacacatatgaatcaatatgtttttattggtcaccatgatttaagatgtagattttatttcagtctttattccatttgcctgcatatccattaagttattgcatacaattaactaagcccatttccaatatatataaaagggagttaacatctttattgtttgtcacacttctagaaaatgagctcactgagagatatactatatggattggtcctcattgataaagcaagcctaagtggttactgggaagaaaagtcaccaccttcaaagaagacttgaattagttatgaaagagcaattagttatgggaaaagagcaagagaggctttgytctgtgaatatagaaataaacgtataagtgaaaaagagactatagatataggtcagatcccaagattttcaaaagtaagatgagaatttgaaaaaaatgtgagtctagaaaattatttagtgttttagca

SEQ ID NO: 249214 - DNA, 477 bp, Homo sapiens
aaaccatctttttattctagtccccttaacttatcctgtaataccttttatattttttaaatacaggcactcttttctattctgttgttttaagtcattgtattatatttggtgaagtaaacttgaacctcttctgccattctaaaagacagaatggttaagaatttgcacatcccaaatttcctctgctcatcacagcttctggagctgacagctaaatctgcaggctgaccaagagtagaattatttcargctgtgtgttgctgaaaacttggaaatagtgaattatgtttatgagattcatttctaaactgtaccagagcttataaaatattagtatttataataacttgtaacaacaaacacagcatggaggcagctgtttcatcagagaatgagccacagtgatctcagacatttgtctatttatcatggattggatttccttggcaaacagttcaataaggaagacaagca

SEQ ID NO: 249215 - DNA, 560 bp, Homo sapiens
gttgaaattttcccctaccgtcacccaaaacccttagtacctatatttggtaagcctgttgcctttcaatagaaatctgaagactcttaatgtgaaactgaggttaaacgaagtaaggcttttgataaaatgcaaataggaggtattttggagagaacgcagatatttttctttttggtcactataggcagtatatacgaataaatccccaaaggagcagacgcatgcttacagaaaggatttgaaagaaatgtcattacaaattattttgctttagcaatctaaaaaaaaccctgttcctataaaagatgagttattaactctgggaaccctggagctttttttctcccattatrtgattatagagtatcccattttatgtagattatgcgtttgaatttttccaatgaattctcttccctaaataaaaatgtaacaatctcctggaagaagcatgataatactgtaatttctatgaacgactcatctattgaaagattttatttttctagatcaaacaaaaaaatgaagcactttacttagtgtctttcacatactag

SEQ ID NO: 249216 - DNA, 652 bp, Homo sapiens
aaattgtctcaaagagtcttgttacatgtttagttctttaatctcatgtcagactgaaggttagtttgacccatattaaataagggtagaaaaatagaagagaagacattggtgataaacagtgtttaattccattttggaggaaacaatcaactctctttccataggataaagctgaaaatggcaaaagctcacacaaatatacagtgctgtatcattctcaggttaataaaaacaatttatatgcagggtagtgaacaagagaaaagttatggaaaacatttctcaaccaaggacagtgtaccagatgtgctaagacttatgggagcaatcagaggtgaccaactctctgtggcrggccttattaagttagactgtgacccagcaccttcaacttattaaaacgtcgagaacttcagtgattaaaaccaagataggtcagatacaaccttcagaatgtccccgctctgatattttcttataggcattaggccctcatggagatgcttctcttgatccctggattttaaaaaactagatatttgaactggagttacccataatttgaaggtaattttagtacaagatgcttcttcagtttttctcaatagtttcactacctaaagaaatatacttacaaggtagttttgca

SEQ ID NO: 249217 - DNA, 591 bp, Homo sapiens
cattcaaaaatccatttgaattatttctttgttctatattccactctacatcttcaacaatgaatatctctgggtatttgagcagagaacagtaagaaaaatgagagaaagcatctacagattttatcctgctacatagaaatcaggactgartaccacagaatttttaaatgtcacaggaatctagagagattaattttcctaactgagcagttcacaaaggacactgagattcagagtggttgtctaacttgcccaatgccacagagcttgttagagcccaaattcagacttttcactttggctgtcatgtcaccattctttccacttgatactatttcagtctcttcttaaaattagaaaattctgcaaatgacatataatgtactaacatggggtggggatgatttgcatgatgtttttaataattgttagctccttttttcttcctgatcttaaaggatttgtggttgaagtatttattacatcagatgcagttcctaattttctacgtttccattctctccttttttcttccttccttcaaatttagggtgctgagagaagagcaccctgttttctgctcacata

SEQ ID NO: 249218 - DNA, 621 bp, Homo sapiens
aacttcctttcttatatattcagtcttgaaaacatcacatttaaacaaaaaacaaacctttaagtaccctcctgattcttccatatgcctatatttaaaagattacatatccgagtaaaataattcatggtaactgtgcaaattcttaagwtgtagcctggctaagtgacttctgttcaacataaaatatttcttaataaactgcttgaggcaaaatagaaatttcacaggtgttaagtctgttttcctctcttctgatataactgttgatttcaaacatgtagatttgggatccatgcacaatgaaattactgtcctgcaggtgcatagtaacaaataaacataaaagatggaaagtatatgcaagggatatgtgaaaccaagtgttaaccagcctttagaactgagaaaagactccctagtatttggtgcagtagaaaggatctagatattttggggttttatcccgcagctgctaattttagtccgtgaggtactctctcctctcctttcctctctctctccctccatcccaccttcctttcttcctttagtctaccctgtccttcctttgtaaattgagtgcctactgtgtgccagttactatacaagctgctgcga

SEQ ID NO: 249219 - DNA, 529 bp, Homo sapiens
ttttttttaacacaacaaaaaactgctcttggtggtggttgtaggggttgaggggggcatagaaggtatggttgatagctggagtgtaacactaaggtttgccttagtttatggaagtgtcataccacctgctgacacgacatctgagaacatgatacactagggagggctccacactttttgattgttgcaggaaaatgcttggagtatgtggtatgccaaatctccaaaggaactagccccagaaacttctgtcatgagtgaaccgttactgtaaagagtagctatcaatactgaaaaccaacttgaatgccaccttttaatttaktcaaatgaatatttttattgaacaatcactatgtcttaggctccaaacaatagatataaaagatgaaaaagaatcttatcctcaaatagtcaaagtttagtgggagaaatcactataaaataattgtaactctactgataaatactagtagatgtatatatatatatgtattatatatacacacatacatatatatatgtt

SEQ ID NO: 249220 - DNA, 622 bp, Homo sapiens
acaaatattaaatattttgacattgatcgaatattgactataagggtaactgaaaataagactgaagagaatacaatgtgtgctgtgctggatctgagggtaaggagtgtgaacttggcttttaatctgatggtgaggaatgtgaacttctttccatgctcctctaattgagaaacagatacttcagggaatatgtggttgtcgctaagtggtacagaggtcaatatataaacccagcacctctctgtaataccaactttttcttgattaccttgaagaaaaaaagaacacctgatttaaaaataataaccatggagccggaagtggtggctcacacctgtaatcccagcactttgggaggccgaggtgggaggatcacaaagtcaggagttcaagaccagcctgaccaagatggtgaaaccccgactctactaaaaatacaaaaattagcctggcgtggtggcaggtgcctgtaatcccagctactcaggaagctgaggcagagaattgcttgaaccygggagatggaggttgcagtgagccgatatcgtgccaccgcactccagcccgggtgacacagcgagactccgtttcaacaaaacaaacaacaacaacaaaaaaa

SEQ ID NO: 249221 - DNA, 541 bp, Homo sapiens
tacagtcagccttcgattatgtaagggagcaatggtgtgtataattagctaagagaggagagttccctacccttttctattaatttgagcaaggagggagttgattccggttgcttagtagacaggagaggagaggatctcttttctcttcaaatcttcaacacttcttccttccttctattcattttaagctataattttgtttcacggaagagaaataatcagaaaagaatttcctgtctttctgtcttcgcatcccttcaaccctctgcatctgcgtacatacactctgccttcctccttcactgtggaggaaatgtgtgtctagctatggcaacaccctccactcacccaccctccaacccctactatttgctcttaagtctgtatccctctggcctaaccaaggccattactgcagcatatctcttttctcttgcttcatcayttcctcctttttttttttaccagatcttttcaatgaacaaatatataagctttctgaacaaatatacaagctttgtctcatcttaaaatcaaa

SEQ ID NO: 249222 - DNA, 561 bp, Homo sapiens
tactggcaggctccacattttgttcgtctttcttttcacacagcatcttggacagggctttctaccctgtaggctcatacttgagatacaggttaaggggctttgctataaattaggccctcaactatgtggttctaatatgaattgctctagagtcttagttgaatcacgttggatattctcttcagctctttcaaagccttctcaagctttgaccatttttgaagacctcrtgttatggggacttcatctaatatctgggatgtttttgacagttgcaaaatactctaatgttccaaggccattattttcttttgcatttcttagatttactgcaactccaaaattactttttattgagtctcactcatgcttatagatgaaaatttctgaataaatggtacattcaggagatttagggagtttgactgcaaatttccttttgtcagtgactacccaatacagaggaaaaataattatggtatttatgaacacttaaaaatgcagaaatgagaattttatagtaaccctaaggaattcaaaactagatgtagataagcc

SEQ ID NO: 249223 - DNA, 561 bp, Homo sapiens
tactggcaggctccacattttgttcgtctttcttttcacacagcatcttggacagggctttctaccctgtaggctcatacttgagatacaggttaaggggctttgctataaattaggccctcaactatgtggttctaatatgaattgctctagagtcttagttgaatcacgttggatattctcttcagctctttcaaagccttctcaagctttgaccatttttgaagacctcgtgttatggggacttcatctaatatctgggatgtttttgacagttgcaaaatactctaatgttccaaggccattattttcttttgcatttcttagatttaytgcaactccaaaattactttttattgagtctcactcatgcttatagatgaaaatttctgaataaatggtacattcaggagatttagggagtttgactgcaaatttccttttgtcagtgactacccaatacagaggaaaaataattatggtatttatgaacacttaaaaatgcagaaatgagaattttatagtaaccctaaggaattcaaaactagatgtagataagcc

SEQ ID NO: 249224 - DNA, 565 bp, Homo sapiens
taaagacaagaaagaaacatatatttttagcatggtatgctttggtaggcagcaaatcatagggctgtgatccgctagaccttcagagagaaatgaagccaattaatgtacaattaccggcagcagtgctttacttgaagggtcttttacaatgaaactttttaacaggctaattgtagacatctgcttcatgtaccttagcgtcatagccagtatttgctaagatcttctgagcttttacagctttacacaaaaggacatattgacaattccattttcctatataataaggagactatgcaaaatactaagctgggattcagcattgttgtagaaatgctcartgtcaccagagtgattgacttgttccacctggctttcagacatttggagaagtaaaacatatgtaccttaattgcaaaatgtaggcttaatgaacatgcaggcgttatgttataccaaatgcaacaattgacatgatggcaagctacttaagaacatgtcacaatgtttggcttttaagaggtttgcttttggcaatgtttcagagaagaatatgttcctt

SEQ ID NO: 249225 - DNA, 461 bp, Homo sapiens
aaatgatatttccagcccagggcataggaagggtacagatgctaaaacagatttatataagatgcacctagaaccatactaaacatttaggtgaagttgaatatctgtgaaagccagtggtggaagacagggaaatctgaacacaatgtactaaacatatgaactggatccctggaaggagcagaattgttagagatgaaagtgggagaaaaatagtgcaaggatacaaagtttagcaaccaaaatgcctgactactaatgattagccatggaaaggtccaarttagcaatgaagaaacgtacataaagtcattctttttttcattctgagtaaggtttcttattcatagggaaaaaggatatactaaaaaccaatggcaccatcaagtttatcccaaaccacgttaacacatagacaaaacaatacatgggccatatgttttgccaaatgcatctaatag

SEQ ID NO: 249226 - DNA, 552 bp, Homo sapiens
gaatctttctgttattttgattcacaaggaaccattgttggatactcaggtgctcaggtattagtggtagaagtgcaaaggcagagtttgagaagaagccccagtggccctaagactcctattcactgcctttatggcctgttgggctgatcagaggaggatgagaggagagtacaagttagaagctacgagttggggactcctaaggtgggtttgtgagcaggacatgatgttgggcatccagaaaagtagtctagtcctagcccctgccttagtccatgatgcttacacttcaagttacgttttttttttgtttgttttttttttgttgttttttttttttttggttcatactatgaaagattttaacacaatttgtgattaagacttttgctgtcaagtgtcaaatagtttatgcacctcagggaatgtctgccaaccaaatartttcaatggaatacttttttaaaaatattcagtgtctataatcacctctaattacaattttctgcacagtctactccgaaaaaaaaaatggaaacatattaagag

SEQ ID NO: 249227 - DNA, 658 bp, Homo sapiens
atgtgtgcaaacacaatctgattagtatttgttataagttcgtcttgtctgcttttattacagacatcaccttcagatgtgggaccactgcagctattaaatcaggaatatttagctattatttgtaataaatgtcagcagggctgaactgaagccagcaggaaatgttcagggcagaaaacacactgacattcattcatgcaaatttgtaccackggtagaattaatcataaagagggagggtagagcatacaatgcatttatattactggtttggccaattcccttcttcctgaatatgagagttataatgtacagaaagcaatctgctgacagtcccatgtgaagtgcaggcagcgagattaactttcccaagcaggcatgtctgggtctattgcagaccatccctccttccccacactgtccgtggtcctctgaggcagcattgcaatgtcctttttcctctttaaaagagatctagatttatcatccacataactcttccctcttaaaattacagggacactctaaaaaacattccctgcatactactgagggtgggaccagcttaccctattataaattagagtgcttatgtcacatggggaagatgtggcctcaggaactaggttgttgactattaagaaactcatttacc

SEQ ID NO: 249228 - DNA, 658 bp, Homo sapiens
atgtgtgcaaacacaatctgattagtatttgttataagttcgtcttgtctgcttttattacagacatcaccttcagatgtgggaccactgcagctattaaatcaggaatatttagctattatttgtaataaatgtcagcagggctgaactgaagccagcaggaaatgttcagggcagaaaacacactgacattcattcatgcaaatttgtaccacgggtagaattaatcataaagagggagggtagagcatacaatgcatttatattactggtttggccaattcccttcttcctgaatatgagagttataatgtacagaaagcaatctgctgacagtcccatgtgaagtgcaggcagcgagattaactttcccaagcaggcatgtctgggtctattgcagaccatccctccttccccacactgtccgtggtcctctgaggcagcattgcratgtcctttttcctctttaaaagagatctagatttatcatccacataactcttccctcttaaaattacagggacactctaaaaaacattccctgcatactactgagggtgggaccagcttaccctattataaattagagtgcttatgtcacatggggaagatgtggcctcaggaactaggttgttgactattaagaaactcatttacc

SEQ ID NO: 249229 - DNA, 658 bp, Homo sapiens
atgtgtgcaaacacaatctgattagtatttgttataagttcgtcttgtctgcttttattacagacatcaccttcagatgtgggaccactgcagctattaaatcaggaatatttagctattatttgtaataaatgtcagcagggctgaactgaagccagcaggaaatgttcagggcagaaaacacactgacattcattcatgcaaatttgtaccacgggtagaattaatcataaagagggagggtagagcatacaatgcatttatattactggtttggccaattcccttcttcctgaatatgagagttataatgtacagaaagcaatctgctgacagtcccatgtgaagtgcaggcagcgagattaactttcccaagcaggcatgtctgggtctattgcagaccatccctccttccccacactgtccgtggtcctctgaggcagcattgcaatgtcctttttcctctttaaaagagatctagatttatcatccacataactcttccctcttaaaattacagggacactctaaaraacattccctgcatactactgagggtgggaccagcttaccctattataaattagagtgcttatgtcacatggggaagatgtggcctcaggaactaggttgttgactattaagaaactcatttacc

SEQ ID NO: 249230 - DNA, 658 bp, Homo sapiens
atgtgtgcaaacacaatctgattagtatttgttataagttcgtcttgtctgcttttattacagacatcaccttcagatgtgggaccactgcagctattaaatcaggaatatttagctattatttgtaataaatgtcagcagggctgaactgaagccagcaggaaatgttcagggcagaaaacacactgacattcattcatgcaaatttgtaccacgggtagaattaatcataaagagggagggtagagcatacaatgcatttatattactggtttggccaattcccttcttcctgaatatgagagttataatgtacagaaagcaatctgctgacagtcccatgtgaagtgcaggcagcgagattaactttcccaagcaggcatgtctgggtctattgcagaccatccctccttccccacactgtccgtggtcctctgaggcagcattgcaatgtcctttttcctctttaaaagagatctagatttatcatccacataactcttccctcttaaaattacagggacactctaaaaaacattccctgcatactactgagkgtgggaccagcttaccctattataaattagagtgcttatgtcacatggggaagatgtggcctcaggaactaggttgttgactattaagaaactcatttacc

SEQ ID NO: 249231 - DNA, 561 bp, Homo sapiens
actagttaatgttttcccttccccttttaaaagactgtgattctgctttaaataataagcatagcccaatttacaaagtaaaaattttataagggagatgatatgaaacacattttatacagaagtgtcaggctctgttctaaacgcctccgtgttcacttatttacattaatacacaacatttttacgagaaaatgggagcacagagagggcaaataactttctcaagcttacacatttgttaagtgcatactggaatcaaattcccagcgatttggtttcagaatctgtactcttaactactatgctatgctgcctctcaaatgctctttgcagggtaatacagcaactagagtgaatgcgattactgaataaaactgaatctaaatttcctggtggtgctagcaaatgatgaaatgcactgtcacttaattttcgttgtgcttgaagaatgattttatgaaatgggcaatgaatcaacctccayattataacagaagattcaaagagttgtttttgaagacactttagcttcccaagttgggcagatggcctaaatca

SEQ ID NO: 249232 - DNA, 599 bp, Homo sapiens
gctggtaacatatatatgttgaatctggtaatttggctaaagcaaagcatcatagatgttacaaattaatgttaattttcatatgttgatttatagctctgatcatatttaattcacagttttggtttatatttatatttattaatataacaagtttatatatcaatttatgttttaaatatttaaataactctaaaataaaatgtatccwtgagaacccttgacagacaccattatcacatgttaacattatatgttattcacagaatagccttttctctgcaagcatcttaataacaaaatttttttaattagacatttttagaatgggagctgcatgattttgttgaataaagcaggataaattcatgacacttctttgatgtatcaaggtagaaaagcaatttttaaaaccaaacaaagtgtatacaaatattccttccaccccctttatttctaactcttaccaagtcttggaaggcaaaggttatgattagaatgtttattggggagttatttggcaatataaataaaaaagctaaaaggttaattttggagaatgtaacaacttcaaaaatgttgatttgctgaaaatagtt

SEQ ID NO: 249233 - DNA, 593 bp, Homo sapiens
caaatacttcttttgttgatccagatggattaatatgagtgaaccagagcacctttttttttttttccttaggacaatcccagtgtgagaagagcttggcttcgttttttgtttttagaagttttctattcagtaatgtctttttatgcatgggtgggatgttttttcctactgcagttaagactccggaaaaggttcaatgtacaatattttcagctcagtgggggctaaaacagaaaaaaagaaggcaattattcccttgcttatcaaagagtcatttatctagtatctcttctattaggatcacaatagagaaagaggaaataaatatataaggctcgtggtctgccarcacatattcctatatactaaactatgaatcgtgctcataagaaaccttcttaggtttttatagcaattgtttgagcttacgttataaaaatttaataaggttattttctgattaccccgcatctatttcaaaaataaagaaagggagagggaggtacaggaacagacccaggtaaagtgaagggcttttgcactctgcaggtgaggcaggatacagactgataatctccatgatctctgag

SEQ ID NO: 249234 - DNA, 465 bp, Homo sapiens; identical to SEQ ID NO: 248919

SEQ ID NO: 249235 - DNA, 522 bp, Homo sapiens
acttccaggccactctctataaaataacaaygttccccacttcctccttatcttatttgatttttcttcatcttatactattgatgactgccaaatacttaattttgactttccttttaagcttcttgataaacatttacacttaattgtcccacaggcaccatgaatgcacatgtccaaaactgaagctcattgtaagtgctggaaatacccagctgcttgtaacctgaacaaaacctgtggcttcatgtttctatgcaattactcatattaatttttcacctgtaacactcttattcacctcctaatttgtactcatgctacaagatcagatttcatttcttcttgtagccttttattaacataattcccacccacagagtggtgagttgttcctcctctctgcttccataacactttaagcttatctttaaccactgtatgtattgaattatagtgatatgtttcctttaattatctctcttctctaataaactgtaatcttaaggataaagactgtgc

SEQ ID NO: 249236 - DNA, 601 bp, Homo sapiens
caagagtgtccggttggtttcctcaaagactagtgtcatatcatgaaatcaacatttgcttttgttgctggcggattggatattcaaaatcagtgaccactcccttcatgtgtacataatgctatttctgggatgatcaatgatgaatgctagttaacataaactgactgagttattttctctatttacttgtttagtccctcttctatggtgggtgctttcagtgagtgttattaattttagtagttcccccttatccacaaaggataagttctagggccccagttgatacctcaaactgtggatagtactaaaccctatatataccatgtatttttcatatatatatacacctctgataaagtttaacttccaagttaggtatgggaagagtttagcaacactaataataaaatagaagaattataacaatatgccagcatgtcttcccttgtgctttggggccattattaaataaaacaagggttacttaaatacaagcactgtggtaccgtgcaatccgataacctagaaagctgcaaagtgactattggggaggtrgcatagaaaatacagacctgctgcacaaagggatgattca

SEQ ID NO: 249237 - DNA, 580 bp, Homo sapiens
ttagaccagtggttcttaattggaaatgactttgctctccagtggacatttggcaattgctggagatatttttcgttgtcacacagcggatagaagcaagagatgctgtaaaatagcctgcaatgcacaggacagtccctcccaaccaagaattatctggccctgaatgtcaagagtgctgaggttgagaaactcttgatacagttgcatctcatgcaaacaatagcatgagactataaaatataaaaggtctccataaatttctctctcctgcaaaaacacacattaaaagtaatgtgacatcagtaaaatgagggaataaaaaataaaaggcgaaagttatgtgaatagtttttcagtttttttcataaatattcaaacatgcatatataataatttttcagactatgatattgatatgctatttgcttttttccatgcttaatgatatatcatggactcgcmatatataatttattcaccaagtccttaaggacagacattttggttatttccattttattttatgttattgatatcataaacaatacaaaaaactctgtaaagagtctccaaagat

SEQ ID NO: 249238 - DNA, 532 bp, Homo sapiens
gtggcagtgtctgtagtcctagctactcaagaggcttgaagcaggaggaatgcttgagcccaggagttcaagcctgcagtgagctatgactgtgccactgcactccagcctgggtgacagagtcagaccctgtgtctacacatacatacrtacatacacatataacatatatatatatacacacacacatacatatatatatttactgaataacattaaaaaattaacacatagtaattataattagcgtatttataatcttatttgcatttatcatttctttctattggggacattcagttttctctttctgttttgttttgtttttaaacagagtctcccgctgtcacccaggctaaagtgcaatggtcagaactcactgcagcctggacctcttgagctcaagcaatcttcctgccacagctgtcaagtggtagctgggaccacaggtgtgcactaccacgaccactaattaaaaaaaaaaaatagtagagatgaggtctttctatgttgctcaggctggttttgaact

SEQ ID NO: 249239 - DNA, 532 bp, Homo sapiens
gtggcagtgtctgtagtcctagctactcaagaggcttgaagcaggaggaatgcttgagcccaggagttcaagcctgcagtgagctatgactgtgccactgcactccagcctgggtgacagagtcagaccctgtgtctacacatacatacatacatacacatataacatatatatatatacacacacacatacatatatatatttactgaataacattaaaaaattaacacatagtaattataattagcrtatttataatcttatttgcatttatcatttctttctattggggacattcagttttctctttctgttttgttttgtttttaaacagagtctcccgctgtcacccaggctaaagtgcaatggtcagaactcactgcagcctggacctcttgagctcaagcaatcttcctgccacagctgtcaagtggtagctgggaccacaggtgtgcactaccacgaccactaattaaaaaaaaaaaatagtagagatgaggtctttctatgttgctcaggctggttttgaact

SEQ ID NO: 249240 - DNA, 539 bp, Homo sapiens
ctatgtgtctgtttttgtgtcagtaccatgctgtttggttactgtagccctgtagcatagtttgaagtcagctagcactatgcctccaactttttctttttgcttaggattgccttagctattgggtcccatttgtggttcatatacatttttaaatagttttttctagttatgtgaagaatgtcattggtaatttaatasgcacagcattcaatctataaattgccctgggcagtatggccattttaatgatgttgattcttcctatccatgagcatggaatatttttccatttgtatgaatcatctctgatttcttccagcagtgttttgtagttctccttgtaggtatctttcacctctctggttagctgtattcctagatatttaattccttttgtagcaattatgaaaaagattgtgttcctgaattggcccttggcatgactattgttagtgtataggaatgatggtgatttttgtatgttaattttgtatcctgagactttgctgaagtttcttatcagtttcaggagcttt

SEQ ID NO: 249241 - DNA, 581 bp, Homo sapiens
gaccaggggagcccattaattagtgtccccttctctctcccctcctttctccctcccactttscagattcccaccccacatctaagctaaaggttttagtgaattacttgctcatgctttccatgtgcatttccctggcactagtgattcccaccagctgaagcccaccgagtgcttgctaccagctcagctcctgcctccttgacattgagagagtgctcttacctagctacccttccaaaatgcccaaggtaggatgtgtatgtagggggaatgggagtggggtgggtaatggaggtggctcactgaaccaaatccataaattttcgatcataaaaagaggcaccctgcattctttcagatctcagtttgggagctcatcccacactgcaggagcccagcttgagctgacccacaggctcctcatagcagaccacctgtccttgggaagagctataagacacacttgtctggcagaaatgggcaaagagcttttctcttaaaaagaaggagaacacagttctggcctttaagtttccttaactgcttctctctaccctgctggaaatagtgtttgacgc

SEQ ID NO: 249242 - DNA, 609 bp, Homo sapiens
atctctaccaaaaatttaaaaaagaaaaaaattagcggggcatggtggcctgggtctgtagtcctagctgctcaggaagctgaagtgggaggactgtttgagcccgggagataaaggctgcagtgagctatgatcaagccactgcactccagcctgggagacagaacaagaccctgtctcaaaaaaaaaaaagtattgaaatcaggtagtgtaaggtctccaactttttcttttacaaaattgcttttggctattctgggtccattgcatttccacatacattttataattagcttatcaatttctactaaaaagcctgctgggatttgattagatttcattgaacccacagatgaatttagagaaaagttacagcttagtattgagtcttctcatccatgaacacgtatttccatttatttagatcttactttttctcaccaatatttcatagttttgttattattattttttcrtagacaaggtgtcactctgtcctctagcctggagtgcagaggcacaatcatagctcactgtagcctcaaactcctgggctcaagcaatcctcctgccttatcctccctgagtagctgggattacaggtgcaca

SEQ ID NO: 249243 - DNA, 575 bp, Homo sapiens
cttgagggatttagattaataagagctgccggttattaagctatctctgtttcaggcactgtgcaaacttcttgacatacattaccctcatttaattctctccacaatcttaaaagtggatgagaytgtccctgtttcacagacaaggaatgaaggctcagagagtttaagtaacttgcctagttatacaagtgctgggcagagccagaatgcacagtggcatccgtctgaccccacagcttgcatgtctgaccctctcaactcggcttcctgtgtgagggatggcatttaggggaagcaggagcagagggcatggaggcagggcagaataggcatgggcaagtttggggagcaatcggtgatttggtttgcctggaatatacgattcctgaagggaagtggtaggggaatgtagagaggcaagtttgggaaggaagcccattcactgacccagcaaacatcccctgagggccctggctgccaggtaaggaaggtgggcggcctttctctacagacatcacagagccaaggaaggtttctgaatggccgtgaggcacattgaggtggaactgcca

SEQ ID NO: 249244 - DNA, 575 bp, Homo sapiens
cttgagggatttagattaataagagctgccggttattaagctatctctgtttcaggcactgtgcaaacttcttgacatacattaccctcatttaattctctccacaatcttaaaagtggatgagactgtccctgtttcacagacaaggaatgaaggctcagagagtttaagtaacttgcctagttatacaagtgctgggcagagccagaatgcacagtggcatccgtctgaccccacagcytgcatgtctgaccctctcaactcggcttcctgtgtgagggatggcatttaggggaagcaggagcagagggcatggaggcagggcagaataggcatgggcaagtttggggagcaatcggtgatttggtttgcctggaatatacgattcctgaagggaagtggtaggggaatgtagagaggcaagtttgggaaggaagcccattcactgacccagcaaacatcccctgagggccctggctgccaggtaaggaaggtgggcggcctttctctacagacatcacagagccaaggaaggtttctgaatggccgtgaggcacattgaggtggaactgcca

SEQ ID NO: 249245 - DNA, 575 bp, Homo sapiens
cttgagggatttagattaataagagctgccggttattaagctatctctgtttcaggcactgtgcaaacttcttgacatacattaccctcatttaattctctccacaatcttaaaagtggatgagactgtccctgtttcacagacaaggaatgaaggctcagagagtttaagtaacttgcctagttatacaagtgctgggcagagccagaatgcacagtggcatccgtctgaccccacagcttgcatgtctgaccctctcaactcggcttcctgtgtgagggatggcatttaggggaagcaggagcagagggcatggaggcagggmagaataggcatgggcaagtttggggagcaatcggtgatttggtttgcctggaatatacgattcctgaagggaagtggtaggggaatgtagagaggcaagtttgggaaggaagcccattcactgacccagcaaacatcccctgagggccctggctgccaggtaaggaaggtgggcggcctttctctacagacatcacagagccaaggaaggtttctgaatggccgtgaggcacattgaggtggaactgcca

SEQ ID NO: 249246 - DNA, 192 bp, Homo sapiens
tttataaagcccaaacattaaatatatattgcaacagaaatacaatcttaatggagataactgaattgtaatagtttaagaaacggtcttttcagaaaactaaacagygagcaaaacaatgttcaattttaaaacgcccagacgtgactcacacacagcaaccgcctatgggagagcagtagttttccttga

SEQ ID NO: 249247 - DNA, 596 bp, Homo sapiens
accacatttgtattttaaaaatagaatctgtaataatctgaaagagctttgtttctatattcgtttacacttttaaatatacttctattacaggaaccaccaagaggtcagggactttgcctgccttactcattacacagcagatactcagtaaatattgaataaatgattaaatatgtctatttgtgatataggtcatcttttggatatctcgatcattagccattcttcatttgtatatattatgcatacaaaaaaagcaccagttctgttttgttttctagtaacaatacatttcttaaccagaagctaaagtggtttgggakaaggcagaacctggtttagaaattaatgcagagaaatagctagttggaaagaatacttgctacgtacaccatttcttttagaagacaacttgctagtagcaagggattgtgttatgcatagattttacaaaatatcaagactacagtaatcactgaatacttgcattcatttattcattaattcagcaaacatccatagtatggcactctatggttggtgctgtgcacacaaaaataattaacatgattctctcacaagttagaggtaca

SEQ ID NO: 249248 - DNA, 405 bp, Homo sapiens
gctttttttcagctcagttttatcataaagtgtagcatctttcccatccagtgcctgagccatccttttctcatcataccatcatccagtaagtttctagaacatcctaattcatctccctgctttatattgcatcctgcttcagtctycccaggactgcttgttctttcttaaaaccttaagctaactgtaggtcatcattcacatgccaaaaatccagccatggcttctctttgaaaattaacagtgaatatcttatccctaggcccattcctactctccagccttaaccttcttcccttctgccactgctatcaagaacccggccctccagctctactaacagtagacatctaaactgctcttactgtgcactctacaaaaagcatcattctcataatagtc

SEQ ID NO: 249249 - DNA, 405 bp, Homo sapiens
gctttttttcagctcagttttatcataaagtgtagcatctttcccatccagtgcctgagccatccttttctcatcataccatcatccagtaagtttctagaacatcctaattcatctccctgctttatattgcatcctgcttcagtctccccaggactgcttgttctttcttaaaaccttaagctaactgtaggtcatcattcacatgccaaaaatccagccatggcttctctttsaaaattaacagtgaatatcttatccctaggcccattcctactctccagccttaaccttcttcccttctgccactgctatcaagaacccggccctccagctctactaacagtagacatctaaactgctcttactgtgcactctacaaaaagcatcattctcataatagtc

SEQ ID NO: 249250 - DNA, 611 bp, Homo sapiens
tatgttatgaacttagtttgaattaatagattytacgggataaaaagagaataagaacatcaaggtcaattctgctctatactttgctgtcagctgaaggtcagatggacacactgaagacatatgtcacttatctattaagcctgtgtgagatctggtttatataaacaatcaaatggaaaattagctgggtaatttcaaaagaagggggagaaaaaagtctgttaagcagtgcaatgaagcttgaatagatcagaagaaactaaaaccccagctcggtagatgccgatactggtttgcatggaggagttattttgctaaaaggaagtaaaaccgcttcgtgaaatgtgttgtcctgtgatatgacaagcactgggccagtgtgcgaaaatggaaatgcttcacggaggccttgagaaaagtttgtttttttttttttttttttttttttttttttttagcattttctacagtaaactctctgagaaattccaacaaagcctatgtctttttgcccacattttaaacagtgattcagggcagcagtaggggaaaaaaaagtaaatatacattgtagcttttcattcagtaaatacctcaaaactaaaaaa

SEQ ID NO: 249251 - DNA, 500 bp, Homo sapiens
aaatttgtaattgatttcctcatatttatctttacctttaatgtagtaaaaagcggtatggccacttgtacattagaggtttcttttgtaattaaaagacaaaagcctaaaagtgacccagatatttartctgaattttctgctttattttataataaagtctgttgacaatagcagtgtggatccaaattttacgagagtccagggtcagttacaatgttcatgacaggtgacttgccaagcccattatatctcccagggtatcatttagtacctttttgcatcaaaagagaattcactgtagcttcaaaaaatgcattcatagactaaaatagtaccttaataatcttgaaagagttaatgaggtcaatcaaatgcttagcccaactttcaacttccaaatcaagaacattccctctcaatggtacagaaatagaaaaggtctgcacgttttgatgactcacttttctaccacctggtcttatgaatatatttgtttg

SEQ ID NO: 249252 - DNA, 598 bp, Homo sapiens
gatttacacacatcatgagggggaaaaagttagaaagtagggggaggggcataacataaaaaggaagtgtattcctgggcacrccagaatccacctagggaggtgccagaatattcttaaatattttgggaaatgatgttcttttgcaatgtcaatcacagtggcaaactttgaaagagcagtgtgccataatttaaagcaaaatttaagctagattcacactaacaattctatgcaggactaaagtagtaaaacccacatagagtccatttatatttaagaatagagaacttcaggtggggctaggtgtttgttttatggtattttaattgcagaagcagaatttttgtaatttgaactcgccagtactgaattccacctctcatcccagcctgaagcctgaattgaagttcccatcagaaaattaaaatgtttgtctggataaaataacttctaaatgaactatttcttttcgtttctttttgtattttctgcaatgtagcccctcgcaatgatattagttctagtgtgggaaaatattataattgagatttggtaagttatttgcagacttttctttacagtttttctttacact

SEQ ID NO: 249253 - DNA, 560 bp, Homo sapiens
tttttaaaataaaagtctgtacaagtcattgtcttatttcaagctcctcaatagctttccattgttcaaaaaagacaatgctttgactcctttttgcaggttacatgatctgcttctaygtattcattctcttttaattggcaagatttttttacttgttctcttcagtttagccatggtgctgtagtttgaatattctttccaaaactcattgaaacttaattgacattataacattaagagatgattaatgccattgtcaagggaatgggttagttgtcacaggagtgggttcctgatgaaagggtaaatttagcccccattcttcctctgtcctgtactcttgctcactgttgtcctctctcaccatgtgatgccttccaccatgttatgatgcaatacgaaaagccttaccaggtgtggcccttgatcttgaacttccctgcctccagacagtgagccaaataaatctcttttctttctaaagtgtccagtctatgacattccgttatagcagcaaaacacaaaataaaacagaaaattagtactgtgaatggaat

SEQ ID NO: 249254 - DNA, 560 bp, Homo sapiens
tttttaaaataaaagtctgtacaagtcattgtcttatttcaagctcctcaatagctttccattgttcaaaaaagacaatgctttgactcctttttgcaggttacatgatctgcttctatgtattcattctcttttaattggcaagatttttttacttgttctcttcagtttagccatggtgctgtagtttgaatattctttccaaaactcattgaaacttaattgacattataacattaagagatgattaatgccattgtcaagggaatgggttagttgtcacaggagtgggttcctgatgaaagggtaaatttagcccccattcttcctctgtcctgtactcttgctcactgttgtcctctctcaccatgtgatgccttccaccatgttatgatgcaatacgaaaagccttaccaggtgtggcccttgatcttgaacttccctgcctccagacagtgagccaaataaatctcttttctttctaaagtgtccagtctatgrcattccgttatagcagcaaaacacaaaataaaacagaaaattagtactgtgaatggaat

SEQ ID NO: 249255 - DNA, 606 bp, Homo sapiens
gaatgagcaagggttttccagtcacagagtgtgggaaatgcattcattgagtggtaataatgatgaaagttcaggggagagacgacttcctcgctaccctctgagggttcaataactgagtctatgatataaaccgacaacaggcagatcaatgggagaagtatacaaatttataatgtgcacaggacatcacagaaaagaaaagcgaatatacccaaaacagtgagattcactagcttatatactgtctttataggggagggggttatagaaaacttaggggagaataaataattttsaggaaagatgaatgggatcttaaaagaacaggcgacagtctgtgatgaagtctgagtgtggtgttgatttccagcctcctctcctgggatacgagttaatcttccctggttgatgagactcccagggaggggattcatgatagttgagtttcttttggactatctgtctttaggcagataagggaagcccagagaaagcctctccctatatttgctgctttatcaaatgccttcagtttgaagtaatcagtctacaaagcagcatattttgaggtagcatttcctagactccttaagaaagactaac

SEQ ID NO: 249256 - DNA, 630 bp, Homo sapiens
ctggggcatgcctaaggcctgtgtgtgccctgccctgcctgccactgaggtttgtttagagcccaaggccactacagtaggcctgcagtgagtttagtctatcatgctgagtttagtccgtattgactggaacataagtccattccactggggctgcagtttcctgtctagtgctagggtgggtctggaggttctgtccatgggtaccagcctgatgtcaggtgccaagaggttctgtctggtgctagtcttctggctggcctagtactgttcygcaaagcaaagttttatgctcatttctctcctcttcccccaaatggacaatgtctctgcactgtggtgcgtagggttaggggaggggtagcataggtaatattaaactgttctttctatcctcttcaatgtgtcttgtcttattattatgctaaaaccaagtactggtatacaaggcgatctcttaccttgttgtccgatctcctgtgaaggctttttcatgtatggatagttgtacacatggatgtttttgtggggggatgatcctggagagttctactgtgccatcatgctgagtttagttctggggttgttttcttaatttcttttttgaaaagtttgtttcagagtatggag

SEQ ID NO: 249257 - DNA, 565 bp, Homo sapiens
tttatgctcatttctctcctcttcccccaaatggacaatgtctctgcactgtggtgcgtagggttaggggaggggtagcataggtaatattaaactgttctttctatcctcttcaatgtgtcttgtcttattattatgctaaaaccaagtactggtatacaaggcgatctcttaccttgttgtccgatctcctgtgaaggctttttcatgtatggatagttgtacacatkgatgtttttgtggggggatgatcctggagagttctactgtgccatcatgctgagtttagttctggggttgttttcttaatttcttttttgaaaagtttgtttcagagtatggagactagcaacattattgatttttatatgttgattttatagcctgcaaatttactgatttgtttattagtttttagggcttttttggtgggattactatggttttctataaataagatcatgtcatctgcaaacagacaatattacttctttctttccaaaggaacaccttttcttttcttgcctagttgagaaatctcacaatttctcacaaataaagtata

SEQ ID NO: 249258 - DNA, 584 bp, Homo sapiens
ttaaccatttctttgggtcttcatttgcttaagaagggttctatgtcacataaagcttattaaatamatttgtatgcttttctcttgtaatctgtcttttgttataacatcctcagccatgaacccaggacaaatatttttctcctgttcagagtacataagaatgccaatactggcaaacatgagagaagcgccagggttttgctgagaggaaaggtctctggtaggaaataagcttgctaaagaccgactttgcctattctgcagagatgttgaggtctctatcactttatctctctttcacttgaaaaaataagacagaattgacatcaagacattactatcagtgcacttttggtttgaaaaaatagtttcttggctgaactagaggcttatgttaacctgatttaaaataatttatggaagggtgtgtgtctgtgtgttttaagactccaataccactagagtgttgacatctttgtttactcttgactctagagcagtcaccactggagactaataaaaatcacatttttgtttcaatagctaaccttctttgccttctttagcttcttgtaaaatga

SEQ ID NO: 249259 - DNA, 584 bp, Homo sapiens
ttaaccatttctttgggtcttcatttgcttaagaagggttctatgtcacataaagcttattaaataaatttgtatgcttttctcttgtaatctgtcttttgttataacatcctcagccatgaacccaggacaaatatttttctcctgttcagagtacataagaatgccaatactggcaaacatgagagaagcgccagggttttgctgagaggaaaggtctctggtaggaaataagcttgctaaagaccgactttgcctattctgcagagatgttgaggtctctatcactttatctctctttcacttgaaaaaataagacagaattgacatcaagacattactatcagtgcacttttggtttgaaaaaatagtttcttggctgaactagaggcttatgttaacctgatttaaaataatttatggaagggtgtgtgtctgtgtgttttaagactccaataccactagagtgttgacatctttgtttactcttgactctagagcagycaccactggagactaataaaaatcacatttttgtttcaatagctaaccttctttgccttctttagcttcttgtaaaatga

SEQ ID NO: 249260 - DNA, 443 bp, Homo sapiens
acaggcctacagtctttggggcacacaggcgagggttcaccactctgggctaaggtatttccctctgctctgaacatcctggatagcctgtactgagaccccaggcctcagtgacatccacacgtcagacaggtgctgcctgggactggggccctccaaaccaggctcacaacagctctcatggacatcaggccaaatatggcccaggaaaaaacaggagtgctcaggaaccagaacgaattgtgccaaatgtggaatatttgtctccaaactctgattactgtaatccctagtcaccacctaaaactctttgaataggcttgctgagttgtctgggtaatcttatttrtacttgttgtcctggcataattatcaacagggtctccattcactctcaaaaatgtcaccctatccaagatgcaaggccacatgtaccctcccta

SEQ ID NO: 249261 - DNA, 528 bp, Homo sapiens
gcctctctgtgtgcaagattcacgttacgcactctttgttctaaagcattctactgtgtagtgctcacaatcaactgaggcgccttagtggctggtgttaaaagtaggtcatcgtggcctaatctttatcactcccttcttctgcttcaccaaacccttagtaagtaaacccactgctcctgtcaggattctatactctgcctccctacacctcatggcatggagggcaggacactggccggtcacctgggaggtgttagctcctctccttagactactattcctgatttaatgataccacgttgaaaagtaatgccatgccaatgactgttaagatgattaaggatacattttagaggcagcaacgtgagatataaaattgaaacaatctgaggtcaggtttgcagtgaaagtgtagtaccttataatttttagatgcccatttcccatcaagttttgccagccctgtcaccatcttctcacctggtctcacccccargactacttaccttgacattagaacatgtt

SEQ ID NO: 249262 - DNA, 655 bp, Homo sapiens
ctcaacatcactaatgatcagggaaatgcaaatcaaaaccacaatgccataccaccttacccatgcaagaatggccataatcaaaaaataaaaaaatagtagatgttggcatggatgtggtgaacaaggaaaacttctacactgctggtgggaatgtaaactagtacaaccactatggaaaacagtgtggygattccttaaagaactaaaagtataactaccatttgatccagcaatctcactactgggtatctacccagaggaaaagaagttattttacgaaaaagatacttgcacacacatgtttatagcagcacaatttgcaattgcaaaaatgtggaagcaacccaaatgcccatcaatcattaagtggataaagaaacagtagcatagatatacaacagagcactactcagccagccattaaaaaggaatgaattaatggcattcacagccacctggatgagattggagatgattattctaagtgaagtaactcaggatgtaagctatgaggatacaaaggcataagaatgacacagtggactttgggaactcagtaggaaagggtgggaagggggtgagggataaaagactacaaattggatgcagtgtatactgctcaggtgatgggtgcaccaaaatctcacaaatc

SEQ ID NO: 249263 - DNA, 543 bp, Homo sapiens
ataagaaagctgcaaatgaacgtacctattctttaaaagtgtcaaaaattttctttgagaggagaaytacaacaaaaattatgtcaacactaataacatcatacaattagtcgcttgattttgtaaacactttaattgctttgacaatgcttgacttacatattaagagtagttgttatccataagaactataaccatgtgcttgccctacaacagggagtaacatatatacagaaatcaacaatgaaaatattaacaaatcaccaaactagaagaagaaaattcactaaaggaagacagaattaagagaggtaccaaagaactgggtgtggtggcacatgcttgtaatcccaactacttgtggggctgaggcaggaggatcacttgagcccaggagttccaggccagcctgggcaatatagtgagacccatctcttaaaagagagagagaaagtgattgagaaagagagagggatagaaagtggcatcaaaatttgacctgtggccctaacattgaacttaatgctccgcaaccatcactct

SEQ ID NO: 249264 - DNA, 543 bp, Homo sapiens
ataagaaagctgcaaatgaacgtacctattctttaaaagtgtcaaaaattttctttgagaggagaattacaacaaaaattatgtcaacactaataacatcmtacaattagtcgcttgattttgtaaacactttaattgctttgacaatgcttgacttacatattaagagtagttgttatccataagaactataaccatgtgcttgccctacaacagggagtaacatatatacagaaatcaacaatgaaaatattaacaaatcaccaaactagaagaagaaaattcactaaaggaagacagaattaagagaggtaccaaagaactgggtgtggtggcacatgcttgtaatcccaactacttgtggggctgaggcaggaggatcacttgagcccaggagttccaggccagcctgggcaatatagtgagacccatctcttaaaagagagagagaaagtgattgagaaagagagagggatagaaagtggcatcaaaatttgacctgtggccctaacattgaacttaatgctccgcaaccatcactct

SEQ ID NO: 249265 - DNA, 543 bp, Homo sapiens
ataagaaagctgcaaatgaacgtacctattctttaaaagtgtcaaaaattttctttgagaggagaattacaacaaaaattatgtcaacactaataacatcatacaattagtcgcttgattttgtaaacactttaattgctttgacaatgcttgacttacatattaagagtagttgttatccataaraactataaccatgtgcttgccctacaacagggagtaacatatatacagaaatcaacaatgaaaatattaacaaatcaccaaactagaagaagaaaattcactaaaggaagacagaattaagagaggtaccaaagaactgggtgtggtggcacatgcttgtaatcccaactacttgtggggctgaggcaggaggatcacttgagcccaggagttccaggccagcctgggcaatatagtgagacccatctcttaaaagagagagagaaagtgattgagaaagagagagggatagaaagtggcatcaaaatttgacctgtggccctaacattgaacttaatgctccgcaaccatcactct

SEQ ID NO: 249266 - DNA, 543 bp, Homo sapiens
ataagaaagctgcaaatgaacgtacctattctttaaaagtgtcaaaaattttctttgagaggagaattacaacaaaaattatgtcaacactaataacatcatacaattagtcgcttgattttgtaaacactttaattgctttgacaatgcttgacttacatattaagagtagttgttatccataagaactataaccatgtgcttgccctacaacagggagtaacatatatacagaaatcaacaatgaaaatattaacaaatcaccaaactagaagaagaaaattcactaaaggaagacagaattaagagaggtaccaaagaactgggtgtggtggcacatgcttgtaatcccaactacttgtggggctgaggcaggaggatcacttgagcccaggagttccaggccagcctgggcaatatagtgagacccatctcttaaaagagagagagaaagtgattgagaaagagagagggatagaragtggcatcaaaatttgacctgtggccctaacattgaacttaatgctccgcaaccatcactct

SEQ ID NO: 249267 - DNA, 522 bp, Homo sapiens
tgtctgtttttatgccagtatcatgcagtttgggttactatatggctttgtagtgtagtatattttgaagtaagaaagtgtgatacctccagctttgttctttttgctcaggattgcattggctagttgggagtcttttgtgattctgtatgcattttaagattgttttttctatttctgtgaagaagttattggtattttgatagagattgcattgaatctgcaarttgctttggatagtgtggacatcttaaacaatattagttcttccaacccatgaacataggatatcttttcattaataaagcattcatcaatgttttatagttttcactgtaacaatcttttaccttctgagttaaatgtatttctaggtattttattttttgtaagtattgtaaatgggattgctttcttgatttatttttcaggtaatttgctattggtgtatagaaatgctactgattattgtatattgattttgtattctgcaactttactaaatttatttattgatcctaa

SEQ ID NO: 249268 - DNA, 522 bp, Homo sapiens
tgtctgtttttatgccagtatcatgcagtttgggttactatatggctttgtagtgtagtatattttgaagtaagaaagtgtgatacctccagctttgttctttttgctcaggattgcattggctagttgggagtcttttgtgattctgtatgcattttaagattgttttttctatttctgtgaagaagttattggtattttgatagagattgcattgaatctgcaagttgctttggatagtgtggacatcttaaacaatattagttcttccaacccatgaacataggatatcttttcattaataaagcattcatcaatgttttatagttttcactgtaacaatcttttaccttctgagttaaatgtatttctaggtattttattttttgtaagtattgtaaatgggattgctttcttgatttwtttttcaggtaatttgctattggtgtatagaaatgctactgattattgtatattgattttgtattctgcaactttactaaatttatttattgatcctaa

SEQ ID NO: 249269 - DNA, 478 bp, Homo sapiens
gtccgttatattatgttcgttaaacaaatcactaaagtcagcctaagcctaagttcaattacgatgtaattatccccttttgatgtgagaagtagcctgcttgtccagacaaggtaggaattgatggctccttctctgggcatcatctaccatgcaggctataccttcttccacccttttactttcaacctgcctgtgcttcataaccaaaatatgtttcttataagcagcataaagttgggtcataattttttaatccaatctaataatatctatctttcaatgactatgtttagttcatttatatttagtgcaattatcggtatagttgtatttaagatttccatgttcctgtttgttttatatttcatccatgtattctttgctytactgttcctcctttcctaacttctcttgagtgaattgcattagttttagtattccattttcttttatgtattatctttataatttttgt

SEQ ID NO: 249270 - DNA, 616 bp, Homo sapiens
agagaaagaaagttggaaaccatctggagcagaagaacatagcattagctgaattacatcatggaaacaaggtacccttgatggaacattggatggaataaacaatcttcagaagaaacatgagcaagatagtaaaggcaaggatttaatatgtatagaaaaataaagtaatagttgcacacatatacatacatatacacatatacacacacaaaaatacaaaaacatgtataagacgatcatatatcaagtgaatatttaagagtgtttatttgcaaatccagtgtgtccttccctgaatgtgcttatccagcatccaggacaatggctacctagataatacagtatttcccctctttttattctgatttggaaaaaaatattaattctttgaggtcagatagtgcaatagaatgtgtatttgaaatcaacacctcaggccaggatgctcacacctttaatcccaggagtttrggaggctgaggtgggtggattgcttgagcccaggagttcaagacaacctgggcaacataatgagaccctgtctctacaaaaattttttaaaaaaattatctgggcctggtggcatgtacctgtggtcccagctactcaaaag

SEQ ID NO: 249271 - DNA, 482 bp, Homo sapiens
ccagattccagacagatagaaagtagagtcaagaggatttgcagttggttggacttgggatataagagaaagagaagagctgtgaatgttgttaatgtttgagaataagaagtgaatttttccagaattttccagaataagaagtgaagaatactgtaggaggtgcagatttgggcaagggggagtatgatggggagttcattttggacatgtaaattttgaatatgtaaagttagaaacacatgtggagtataytgtggaatatgtgagtttggagttgaaggccaatattttaatatttaatttgatacatcctcatcggttgctcaatatcatctcaattatgtagtcattttggagtaatgaccagtgtcaacctcttattgacagacactgctacaaaaattactaggagctaaaatattataagttttaaataaatgtaaagtgctttgaaaaactaccaggttattttaagctag

SEQ ID NO: 249272 - DNA, 595 bp, Homo sapiens
ccatgtaatttttaacccttaacgttttcctataaagaaaaacttaattataaattacgtaaacctgccagatttgccatttgcttttagctcctcactgctgcattttgtatttagatcctatagccaacaaaacgagacaatagacatcaaagtccaggacaagttttgaggagaatgcctatgcgtggtgccaaaatagaggatattctacttctccctgtacctttatctgaggaaagtgaagtgtcattatttagttgtctcaagtgttgcaatgtttattagcaatatatatgatgtctgtgcatccccttgtataagactggaatcaaaacatttcagttccagatttcactgaatgagaagttattctcttttttaaaagataacagcatggacttccactttcaaattgaaagactaacctctatcagatttgcccacacatggtaagcaactataaaactgaatgaaatacatgatatgactattatctgtcacagtgcaatyggtagcacaggacagtaatctctgaatgaagggaaacacaagaggtgagtttcatcatcacctcggctttctcctcaggggc

SEQ ID NO: 249273 - DNA, 468 bp, Homo sapiens
gatttaaaaaaaacaaacatatagtcttagttgccttttagctttttctgacaaaagtatatgattggaattcaaatttgttaataatttgtgccttgtatgctattgaatttgaaaacatttatctgatgtctgaaaaatagctagtgtagtcattttctgaagacattctgcaactctttctttgatcttcaagtctgsccaaagatagatcaattatttttactatttgacaggctactattctgctgatcactttttcagctctctagatataaaaaaatctgccttttctgcttaaagtttatctatattatgtatttttttttttttttttttgagatggagtctcgctctgctgcccaggctggagtgcagtggtacaatcttggctcactgcaagctccgtctcccaggttcacaccattctcctgcctcagcctcccgaatagctgggactaaaggcgc

SEQ ID NO: 249274 - DNA, 522 bp, Homo sapiens
aaggattacattgtgaatagctttgactgttgatatagactttttcctgtggacaacagaaacataattccgcaactgagcagaaaggacatgactgcagggttttatggctcctaggaggcggtgaactactttttacagactcacacatatttgcaaggtcctagacatcagtagagagagtaaaatatatgttaatatttcataatcacaaaatgtagacctcgttactgtgctctgtattaagtataatggtgcttctcccaaacaagggggagaggaaagcgccagaaatacttacatgaacagtgaagacagagatgtggagtgagacgagaagctgagaaaccaggtaaaactgcccaatctagttgagataaaataaaggccagggcaagcaaaggcagtagaaatagagcaaaaaggagtggagagatttgcaatgaaccaacacatgctggtgatgagttggcgggagaagaggaagaggtaatcatcraggatggcagctaggggaaaaat

SEQ ID NO: 249275 - DNA, 537 bp, Homo sapiens
tcatccatctcctcttcttctgaatatatccatctattgtcccaaaatctgtatctttcaataactttacattgacttttcttttttttttttttttttttttttttgtttgtgaaagagcacgctttattgggragcagactgctgcacagtgaccaacaggccacccaatgggcacttacacatcgtactccaaaagacacaggatgttttgctaataaaaatcagtgggaacagggattcctctgggcaactcccccaacctcatccctttcagggattgagaaatctcccaaccattttcctgatgacagccatggttcattagagatacagcccctcaggggtgccttcctgtttcttataaagaacattttctttagattttttgaagaagcgcatctttcagattcacacaagcaggatgacgctggctgatgatgtaaccctggacgacctgatcatggctaaagatgacctctctggtgctgacatcaaggcaatctgtacagaagctggtctgatggccttaagaga

SEQ ID NO: 249276 - DNA, 537 bp, Homo sapiens
tcatccatctcctcttcttctgaatatatccatctattgtcccaaaatctgtatctttcaataactttacattgacttttcttttttttttttttttttttttttttgtttgtgaaagagcacgctttattggggagcagactgctgcacagtgaccaacaggccacccaatgggcacttacacatcgtactccaaaagacacaggatgtttkgctaataaaaatcagtgggaacagggattcctctgggcaactcccccaacctcatccctttcagggattgagaaatctcccaaccattttcctgatgacagccatggttcattagagatacagcccctcaggggtgccttcctgtttcttataaagaacattttctttagattttttgaagaagcgcatctttcagattcacacaagcaggatgacgctggctgatgatgtaaccctggacgacctgatcatggctaaagatgacctctctggtgctgacatcaaggcaatctgtacagaagctggtctgatggccttaagaga

SEQ ID NO: 249277 - DNA, 416 bp, Homo sapiens
gatacttaagccttcataaagaatatcattttaatattcattcactgatccattcatgcattcagcaaacatttattatctgttatgagctagatagtatgtgatgctgataaatgaataaaaagaagactctacccatatggaytgcacattgtaactgaggagaccaacacactcacaaatatttagtacacactataataagtgcttatcatagtatttgccagatgcctgagcaacatattaagaaaatggattctcgcacaaggtaagggagtagtggagaaatggcttggaaggggagaaagggcttagaaaacttcatggagagggtaacatttaaacaaggccatcaaaagtgagcagttctccaaggtggagaaggcactacgagtacccagagaaaacgaaacatc

SEQ ID NO: 249278 - DNA, 592 bp, Homo sapiens
ataagtgcttatcatagtatttgccagatgcctgagcaacatattaagaaaatggattctcgcacaaggtaagggagtagtggagaaatggcttggaaggggagaaagggcttagaaaacttcatggagagggtaacatttaaacaaggccatcaaaagtgagcagttctccaaggtggagaaggcactacgagtacccagagaaaacgaaacatcacaaagaagggctgaatgatggacatgcatttagaggagtgcrggtgctccagtttcctgaacctgggggcaaaagtatgtgaattatgttcgttgcaacttctttccttcagttcaaagtagatgtcacgaacttatgtcccttggaacatttttggccctggatatgtgcttgatataggcaatgtttgaattcatggacaatatttcaacatgggaagaattcacaaaaaatcagattttgagctccttttggaaaagtcagtgtttagcagatctgggccagaatgtatatgtaaaataatttcctggagacgagcagtgattgccccatttctagagggctgaactttgtgttttactacaatcttcactt

SEQ ID NO: 249279 - DNA, 578 bp, Homo sapiens
aatttgggtataactgtaaggaattaattagggattaagtttacaagctcttccaaaatagagttacttaggtattgggcaaatagctctcattgtttttaagaatgaatatgctattttgcagagcactaaaagtataggacaaggtttaagttccagaattgatactaagtgacctttcacaaggtgaggtctatgattctaaatcatgttaatttagattgtctgttttaataagtatttaagctcaattgactatacttgagtatcttcaatgacttgatttatatttgtgaaaaatctcttaaaattctattgyatagtttgcatatcaccaaagtagctttgataacaactactcacaattcttctggatacattatgaatttttcatttaaactggtctttattttaatatgctccaacataaaatttataggattactctgtaataaataccttatattattattcatatccaatattcaaagaatgttaatagctaaaattcagcagtctttcaagtagtggaaaattatatttatttcatcttcttaatattttaaatcaaccactgg

SEQ ID NO: 249280 - DNA, 585 bp, Homo sapiens
ttgcacgccccgcagcctcaagaaatatgtcatttctcactttctaagccttcactgctataactcacaaactaacacaggacactcacaggcttctacaagtgaaacctggcacgattgcctaaaatattgggtttgtctattttgtgctgtcaacctgctgaagaccaaaatacctcaaaaagcccaaaatgtaaagagtatcaatgtatttttcctttaactttcatgactttggcctctgacagaaccttaatttattataactactgcgaaaagccacattttagcatcaagtactgaagtcagctccagacacacaagcctgccaactctaatttatttgaaatgagrtgagatttgatcatttattttcccactgagaagatttgtgctgccttttaaagtgaaagaacttggtataccttcagaagctgtttagggttctttgaaattttgttaataagcatgctttgaggaacaagtgaatatggcacaagatataatcagatatagccaaaacagagccaaaagcatcttgtattcctttgatagttacctcaatgactcactcaatgacctaga

SEQ ID NO: 249281 - DNA, 484 bp, Homo sapiens
aggggtgtgattttggtgagctagctctctttgcgagcagttctctgagagtgcctcaggtgagagtaccaccggccacctctcctagcatttgaggaaatgagtgcctcagacctgtaggagggatttgggtgttgcacatggccacccagatctcatataaaaataatrcattgtaaatccatgatatagtttggctgtgtccccacccaaatctcatcttgaattcccatgtgttgtgggagggacctagcaggaggtaattgagtaatggaggcaggtctttcccatgctgttctcgtgatagtgaataagtctcatgagatctgatgatatcgtaaggaggagtttccctgcccaatctctctctttgcctgctgccatccacgtaagatgtgacttgttcctccttgccttctgccatgattttgaggcttccccagccatggggaactgtaagtccattaaacctctttcttttgta

SEQ ID NO: 249282 - DNA, 607 bp, Homo sapiens
ttattatagggaaaatagtagctgcatctgtcttgctggggaacatttctctggttgggtagatcttatcctatcagtttgtatcctgtagcatcatattggtttgtttgagwttaatggttgagggtcaacagaggaagccttaaaaatttccttgtgaacaaatgggctgaaaattgatttttaacagactccacggatacccatttactgaggaaattggaattgttcttggaaagggagaagaggtcagtgacagccatgtttaggcttgttcagtggttttgccttacttcactggacgagaacaaatctctggggacttggctgtaactgtgggactggagttaagcagactttgagtccaagggtagaggccagcttgcctagaaactggagaaattagtaggaaattttatgccagggactggaataaaggtctcgaaaagcagttagaaatgccactgaaatggaacaaagataaatagcctcagggcagggaagtgccaccaacgaagtgggggtctacaggcgttcaggtcattcatggattctaactcatcaggaactgccatggagaatagcttatagttttgaattggcaact

SEQ ID NO: 249283 - DNA, 553 bp, Homo sapiens
aatgagctatcaaatcatgaaaagacatggaggaaacttaaatacatattgttaagtgaaagaagtcaatctgaaaatgctacatactgtgatcctaagtatatgacattctagaaaagataaaactgtggaaacagtagaaaggttagtggttgtcaggtatggggggagagatgcattctcaggacacattagatttttgggggcagtgaaactattctgcatgatactacagtggtagatatatatcagtatacatttgtccaaacccacagaatgtgcaacaccaagagtgaaccctaatgcraactactggattttggatgataatgatgtgtcagtggaggttcagcaattgtaacaaatacaattctaggggagatgtctatactaggggaggctgtgcatgtgtggggcaaggggtatatgggaaatctctatactctcagttaaattttgctgtgagcctaaaacttctctaaaaaataaagtctatttttagaaatggatggggatttaaactagggcctgattatgggaagaagaaaaccag

SEQ ID NO: 249284 - DNA, 553 bp, Homo sapiens
aatgagctatcaaatcatgaaaagacatggaggaaacttaaatacatattgttaagtgaaagaagtcaatctgaaaatgctacatactgtgatcctaagtatatgacattctagaaaagataaaactgtggaaacagtagaaaggttagtggttgtcaggtatggggggagagatgcattctcaggacacattagatttttgggggcagtgaaactattctgcatgatactacagtggtagatatatatcagtatacatttgtccaaacccacagaatgtgcaacaccaagagtgaaccctaatgcgaactactggattttggrtgataatgatgtgtcagtggaggttcagcaattgtaacaaatacaattctaggggagatgtctatactaggggaggctgtgcatgtgtggggcaaggggtatatgggaaatctctatactctcagttaaattttgctgtgagcctaaaacttctctaaaaaataaagtctatttttagaaatggatggggatttaaactagggcctgattatgggaagaagaaaaccag

SEQ ID NO: 249285 - DNA, 619 bp, Homo sapiens
acttaaaattcaacaataatcaaatggtgtatttttcattactatattacttgggtaatgtagtttaaacatttttaagtcaatttgaggaaatgttaatgaataaaattactggctgatggagaatgaaaactatctctcaataattcacattcttatgaaaataattcccccaattttagctttttccttttaggttgcatttccctagaactttcattcactcaacaaagattgagccaatgggcgtgtgctwaacactctgataacgcagaaaaagatattaaaaaaaaaaaacccaccctcatgaaacttgcattctagttggaagacaaataataaacaaagtaattaagtaaaaagcaagtagtttaaacaatcaaaagcactaggcatcaaaattaagcaaaaaagtggggaaagatgaaggggcatgcttacatgttggatagggtagccaagaagtcctctctggaaatacaacatttgggtgaagatctgaacaatgtaagggagtaaatgatgcagatatctaaaagagtattctcaaccaagagaaaagcaagtgcaaagggccagagaagaacgcctggtgtattccaggaaatgcatggaagcc

SEQ ID NO: 249286 - DNA, 538 bp, Homo sapiens
taatgggtttggagtgggatggatgggtgaggaaaacagggggcatgacagattgagtagtctcttgttgattgtgtgagagttttggctttactctgagaaagttggaaagctatcaaaagatattgagaaaaggagaggcttttccttatgttttagcagaaaaaaygttgattgctgcattgcaaatcgactatagaaaggcaaggtagaagcaggaaaactagagggcattgaaataatccaggcaagagaggccagtggcttggtctagagtagtagagaggacgtgatgagaagcagttggattaggggtattttttaagggtaaaggcaaatttttttcccagattggatgcagtgtatcatagtctagatatataaaaccaaagcccccacccaaacatctacaatgatataatcaatttcaagcagcattttaaaatctttcttaaagctcccactcatttccacaaccagtctgtcacaaaattcagccttttccaattctgaaatattttcaaatctttcccctcct

SEQ ID NO: 249287 - DNA, 533 bp, Homo sapiens
atatgacagagtcaaaacctatggtaaataaaaatatgtgtcttatgcttttccaagcttcctttgtcctgggcttacactaaggcagcccaatgactacccctttcaaattatattatagcaatatctacctataaagatctacaccagtcatacagagggatgctccccaggaaggagcytaaaagtgtctaagcaaatagctttctctcattcctcaccatttgtgataatctgaatcgtttgtcagtgttaaacaaattacttcatgaactctcttctctagactgcctccacattcttattccttttagtctagtggttatttttctgccttcttcactaattcctatttttctcttaacatgcaaatcctcatacactgtcatcatacttttaatctgccattattattggtttctttgcagatgttaatgactcataaacctaaagctataccctgacctttcacctaatctcccatcttgcatttccagattcctatattgctcagatgccaaacaacattcact

SEQ ID NO: 249288 - DNA, 533 bp, Homo sapiens
atatgacagagtcaaaacctatggtaaataaaaatatgtgtcttatgcttttccaagcttcctttgtcctgggcttacactaaggcagcccaatgactacccctttcaaattatattatagcaatatctacctataaagatctacaccagtcatacagagggatgctccccaggaaggagcctaaaagtgtctaagcaaatagctttctctcattcctcaccatttgtgataatctgaatcgtttgtcagtgttaaacaaattacttcatgaactctcttctctagactgcctccacattcttattccttttagtctagtggttatttttctgccttcttcactaattcctatttttctcttaacatgcaaatcctcatacactgtcatcatacttttaatctgccattattattggtttctttgcagatgttaatgactcataaacytaaagctataccctgacctttcacctaatctcccatcttgcatttccagattcctatattgctcagatgccaaacaacattcact

SEQ ID NO: 249289 - DNA, 578 bp, Homo sapiens
ccaatgttctattctgggcttaaaagcatcartggatatttgggacctaataaatctgaacgttatccaatgcctatgccagagaaacaatctttaaagcccttaatgagttaggaactccacagacagctcaagaaacctgataccaaaactccctttaggatctagtagacttatctccatcaaggatagataaataatatgcttatcttcatgtctggagaaaaactggggaatattgttgttgacaccttgagggtcacttacaggggttcagagaagaattaaggattctgttatccagtgaagtaggcaccccaccaaactaagctattttagaaacttctcttgagtgtgtacatagcctatattttccaaaatgcatttgtgtgactgatgtgaaccacataactcagacagccaaacattatatatagtttatttacttcccttaaccattctcgattctcctctttgtttttcttttatgccctttgtttatttttggttttgttttgctttggttggggaagaatttaggaaaccatattaagtggattttaaaatgatctcataat

SEQ ID NO: 249290 - DNA, 537 bp, Homo sapiens
cctgctgtggctttgcctcatacttctcaagagttgtgtaaatattaaaaggataaatttattttacaaacaatcttatcatcaacccaatgagacgcatttacctcaaggtaacaaggaaatcaatttggatccctttgggggaaaatttaaaaaagaagtaataaagaacaagtttatgcatttgggagaaacatttttatgggattaaggttggaatttgtgatgctagtatttgggggaggggaaaaaataaatgtagcaagactaaaacagttcccttctttgtttttaatgatcaggatatggttttttaacccatgattcctttgtttgcrcacccagccatataacattgtacctccagggtaattgcaaaggcacagatattgatttgctccctttaaaagaaaggatgatgtgctttcttgcatttaggcaaaaagagaagggagattattgtaaatgtattctattctgctctaacattttttaattaagctacttttccttttatggttatagtacttagattaa

SEQ ID NO: 249291 - DNA, 581 bp, Homo sapiens
agaagggagattattgtaaatgtattctattctgctctaacattttttaattaagctacttttccttttatggttatagtacttagattaatcaagactgaaacagctgcagcaaagtatctatgggttctttattccagcagagaaaagtaagcctccaaaaataggagactacgtaacatgtgcttttacgaaaaagyctttgataattactctcaatagttaaatatttctttcacccttttactctattaatctggatgtcatatttatacctttaataataatttcagttacccatttgcaagtgtacctcctcagattcagataattcttcacccctatttgacttattaccgtctgcttcttccgctaaagatagaccatgtttaatgacaatattatgtaaaataccacccggcagaaatttattgcctgctttacgaaggcggagatataatgtttcaccagatttgcctagacatcaaaacctcaatttctggttaatatccagagttacctcaataaccattctggaaaaatatatatatattctttattattttcttcagtgacagagt

SEQ ID NO: 249292 - DNA, 581 bp, Homo sapiens
agaagggagattattgtaaatgtattctattctgctctaacattttttaattaagctacttttccttttatggttatagtacttagattaatcaagactgaaacagctgcagcaaagtatctatgggttctttattccagcagagaaaagtaagcctccaaaaataggagactacgtaacatgtgcttttacgaaaaagcctttgataattactctcaatagttaaatatttctttcacccttttastctattaatctggatgtcatatttatacctttaataataatttcagttacccatttgcaagtgtacctcctcagattcagataattcttcacccctatttgacttattaccgtctgcttcttccgctaaagatagaccatgtttaatgacaatattatgtaaaataccacccggcagaaatttattgcctgctttacgaaggcggagatataatgtttcaccagatttgcctagacatcaaaacctcaatttctggttaatatccagagttacctcaataaccattctggaaaaatatatatatattctttattattttcttcagtgacagagt

SEQ ID NO: 249293 - DNA, 573 bp, Homo sapiens
ggtacccgtggacacaaagatgggaaccagacaccagggactgctagagaaagaaagggtggggacaagggatggaaaaccacctgttagataccatgctcactacatgggtcacaggatcatttgtgtcccaagccccagcatcacacatatacccatgtaacaaacctgcacatgcaccccatgaagataaaatgagggtcaaaattatgtttttcaagagtggctggaatggctatgacaaccaacactgaatgaggggtgtctggaggacagaggccaccgcagtttcctgagagcccagagctgcagtggaggctctcattcaatcattcactcattcaacagaaataaactgagtgcttgctgcacacaacaagcccagggcaagcatgggggcatgtgacagtggcctgcctgtcccccggagtgcwcacacagggcaagtctctttcctcagtgtagctactttgatagaaacagcaagcaccagaataattggggggtgaaagggcttcctgccagcctcactcagtccgtttgtgtctctccgaggagcccttgccttgctgg

SEQ ID NO: 249294 - DNA, 573 bp, Homo sapiens
ggtacccgtggacacaaagatgggaaccagacaccagggactgctagagaaagaaagggtggggacaagggatggaaaaccacctgttagataccatgctcactacatgggtcacaggatcatttgtgtcccaagccccagcatcacacatatacccatgtaacaaacctgcacatgcaccccatgaagataaaatgagggtcaaaattatgtttttcaagagtggctggaatggctatgacaaccaacactgaatgaggggtgtctggaggacagaggccaccgcagtttcctgagagcccagagctgcagtggaggctctcattcaatcattcactcattcaacagaaataaactgagtgcttgctgcacacaacaagcccagggcaagcatgggggcatgtgacagtggcctgcctgtcccccggagtgcacacacagggcaagtctctttcctcagtgtagctactttgatagaaacagcaagcacyagaataattggggggtgaaagggcttcctgccagcctcactcagtccgtttgtgtctctccgaggagcccttgccttgctgg

SEQ ID NO: 249295 - DNA, 581 bp, Homo sapiens
gaggctcccttcctggggagtctccctggactggctctgctctttgagaaaaatgtttgtgagtttaatgtgaaaccctgaatggttttagaaagataagtgtgctagttgaaggctggtcaggaaaaggatggtcaaytctaattagaataagaaagggacaattcaataaacggactattatagtgaaagcgaactaaatgtggcctgagaaggactccctacttctgtatttgagtccctgtggactaaccacaacctaacttagtaggtagatgagattgaaaacctaatttaggagtatgtacctgtaacaatagctgagtctcagccaatccaagcagccatacttcaaccactcatacactgctgagtgttcaaactgtgttcaaataaagcaaacacctgtaaccaacccaaatgtctctgtacctcacttctattttctctacatcactttcctttgctgcccattaatcttccaccatgtggttgctctggagtgtcagagcctactctggctcaggaggctgcctgattcatgagttgttcattgctcaattaaactcttttaaatttaa

SEQ ID NO: 249296 - DNA, 581 bp, Homo sapiens
gaggctcccttcctggggagtctccctggactggctctgctctttgagaaaaatgtttgtgagtttaatgtgaaaccctgaatggttttagaaagataagtgtgctagttgaaggctggtcaggaaaaggatggtcaactctaattagaataagaaagggacaattcaataaacggactattatagtgaaagcgaactaaatgtggcctgagaaggactccctacttctgtatttgagtccctgtggactaaccacaacctaacttagtaggtagaygagattgaaaacctaatttaggagtatgtacctgtaacaatagctgagtctcagccaatccaagcagccatacttcaaccactcatacactgctgagtgttcaaactgtgttcaaataaagcaaacacctgtaaccaacccaaatgtctctgtacctcacttctattttctctacatcactttcctttgctgcccattaatcttccaccatgtggttgctctggagtgtcagagcctactctggctcaggaggctgcctgattcatgagttgttcattgctcaattaaactcttttaaatttaa

SEQ ID NO: 249297 - DNA, 581 bp, Homo sapiens
gaggctcccttcctggggagtctccctggactggctctgctctttgagaaaaatgtttgtgagtttaatgtgaaaccctgaatggttttagaaagataagtgtgctagttgaaggctggtcaggaaaaggatggtcaactctaattagaataagaaagggacaattcaataaacggactattatagtgaaagcgaactaaatgtggcctgagaaggactccctacttctgtatttgagtccctgtggactaaccacaacctaacttagtaggtagatgagattgaaaacctaatttaggagtatgtacctgtaacaatagctgagtctcagccaatccaagcagccatacttcaaccactcatacacygctgagtgttcaaactgtgttcaaataaagcaaacacctgtaaccaacccaaatgtctctgtacctcacttctattttctctacatcactttcctttgctgcccattaatcttccaccatgtggttgctctggagtgtcagagcctactctggctcaggaggctgcctgattcatgagttgttcattgctcaattaaactcttttaaatttaa

SEQ ID NO: 249298 - DNA, 581 bp, Homo sapiens
gaggctcccttcctggggagtctccctggactggctctgctctttgagaaaaatgtttgtgagtttaatgtgaaaccctgaatggttttagaaagataagtgtgctagttgaaggctggtcaggaaaaggatggtcaactctaattagaataagaaagggacaattcaataaacggactattatagtgaaagcgaactaaatgtggcctgagaaggactccctacttctgtatttgagtccctgtggactaaccacaacctaacttagtaggtagatgagattgaaaacctaatttaggagtatgtacctgtaacaatagctgagtctcagccaatccaagcagccatacttcaaccactcatacactgctgagtgttcaaactgtgttcaaataaagcaaacacctgtaaccaacccaaatgtctctgtacctcacttctattttctctacatcactttcctttgctgcccattaatcttccaccatgtggttgctctggagtgtcagagcctactctggctcaggaggctgcctgattcaygagttgttcattgctcaattaaactcttttaaatttaa

SEQ ID NO: 249299 - DNA, 539 bp, Homo sapiens
ggtgatggttatgttaattagcttgatggcagtaatcatttcacagtatatacatatatcaaaacatccctctgtacacattaaatatatataatttatatttatgaattatgcytcagtaaagcttgaaaaaattaaaatgagtaaaatgtgtgcctgctgcatcactcacacaaaatctaccatctgaagtcaaactctgatatgaggggcttcattcaccatgccctcacctgcactggcaaatactgccagcatggagggcagagagccttgagatacccagaggggagccaccattacccacaccctccatgcctgagttcacagtcaggactgccagcacagagggcagagggcctggagatacctgaggggagccaccactacccatgccctccatacccaagttcatagtcagggtggtgcagtgcatgggaatggacaactggttaggagtcaggacaacttgctccagcccaggtctgcaactcagttgccagtgtcttccactctccatcaatgcacacaacctagac

SEQ ID NO: 249300 - DNA, 617 bp, Homo sapiens
ctgcactggcaaatactgccagcatggagggcagagagccttgagatacccagaggggagccaccattacccacaccctccatgcctgagttcacagtcaggactgccagcacagagggcagagggcctggagatacctgaggggagccaccactacccatgccctccatacccaagttcatagtcagggtggtgcagtgcatgggaatggacaactggttaggagtcasgacaacttgctccagcccaggtctgcaactcagttgccagtgtcttccactctccatcaatgcacacaacctagacagttagtttctccctcctttccactcactaagcctttcacctctgatataaaggtcatctcattattttaatttaattttgagtgaaaaactaaaaactcattgagtgcctgccatgtttcagcactggaccatatggtgggaatacttcaacaaatataacaggtgtagtctttattctcatagtgtttgcaatcattccattctcctcctaagcaaggttttcttgtcttggtgtggattgttcctctctttttgcacagtggctagcaggaagctctgaatctaacaagtgtcaggcaaccagattag

SEQ ID NO: 249301 - DNA, 617 bp, Homo sapiens
ctgcactggcaaatactgccagcatggagggcagagagccttgagatacccagaggggagccaccattacccacaccctccatgcctgagttcacagtcaggactgccagcacagagggcagagggcctggagatacctgaggggagccaccactacccatgccctccatacccaagttcatagtcagggtggtgcagtgcatgggaatggacaactggttaggagtcaggacaacttgctccagcccaggtctgcaactcagttgccagtgtcttccactctccatcaatgcacacaacctagacagttagtttctccctcctttccactcactaagcctttcacctctgatataaaggtcatctcattattttaatttaattttgagtgaaaaactaaaaactcattgagtgcctgccatgtttcagcactggaccatatggtgggaatacttcaacaaatataacaggtgtagyctttattctcatagtgtttgcaatcattccattctcctcctaagcaaggttttcttgtcttggtgtggattgttcctctctttttgcacagtggctagcaggaagctctgaatctaacaagtgtcaggcaaccagattag

SEQ ID NO: 249302 - DNA, 590 bp, Homo sapiens
tgatgggtacactaaagcccagactccatcactatccaatatatgcatgtaagaaatctgcrcttctacccactaaatctttaaaaataaaaaagaaagcatgcttatatttgtcttttttacatttaaacttttagatacaaagggcaaatgtgcaagtgtgttacgtgggaatattgagtaatgctgtggtttggagtgtggatctcatcacccaggtagtgagcatagtacccaataggtagttttttaacccacccccacttcctccaccctctagtagtccacagtgtcaattgtccccatattgatgtctgtgtgtgctatagggttagctcccacttataagtgacaacatgtagtatttggttttctgtttctgtgttaatttgtttaagattatgatctccagctccatctatgttgctttaaaggatatgatctcagtttttatgtctacatagtattccatagagaatatgtatcatattttccttatccaacttaaaattaatgggcacctgagttgactccatgtcttcgcaattgcaaatagcatagcgatggacatacaagtacatgtgcctttt

SEQ ID NO: 249303 - DNA, 593 bp, Homo sapiens
aattaaaccctttataattatctaatgacctgctttctcctttgctgttgttggagtctcttttatctrataaaagaattgtaagccctggtgttttttgttctccatttgcataatagttttctttccatccttttactttcagtttatgtgtgtagttaaatctgagatggatcttttgaaaacattagaaggttggattttttaaaatcaaacttggtactctgtgccttttaagtgggggcatttagatcattatattcaaggttaatattgatatgtgagttttctttcctgtcatggtgttattggctgtttgctttgtggtcttgattgtgtggttgctttatagggtctgtgtgctatttatttacatgtattttgtagtaacaggtatctttcttttgtttccaagtttagaatgttcttaagcatcttttgtaaggccagcctagtggtaacaaattcccttagcaattgcttgtctgaaaaagattttatttctcctttgcttatgaagcttagattagtgaaatgtgaaattcttaattggaatgtgttttctttaagaatgctaataatagggatgaaat

SEQ ID NO: 249304 - DNA, 593 bp, Homo sapiens
aattaaaccctttataattatctaatgacctgctttctcctttgctgttgttggagtctcttttatctgataaaagaattgtaagccctggtgttttttgttctccatttgcataatagttttctttccatccttttactttcagtttatgtgtgtagttaaatctgagatggatcttttgaaaacattagaaggttggattttttaaaatcaaacttggtactctgtgccttttaagtgggggcatttagatcattatattcaaggttaatattgatatgtgagttttctttcctgtcatggtgttattggctgtttgctttgtggtcttgaytgtgtggttgctttatagggtctgtgtgctatttatttacatgtattttgtagtaacaggtatctttcttttgtttccaagtttagaatgttcttaagcatcttttgtaaggccagcctagtggtaacaaattcccttagcaattgcttgtctgaaaaagattttatttctcctttgcttatgaagcttagattagtgaaatgtgaaattcttaattggaatgtgttttctttaagaatgctaataatagggatgaaat

SEQ ID NO: 249305 - DNA, 557 bp, Homo sapiens
cctgctttctcctttgctgttgttggagtctcttttatctgataaaagaattgtaagccctggtgttttttgttctccatttgcataatagttttctttccatccttttactttcagtttatgtgtgtagttaaatctgagatggatcttttgaaaacattagaaggttggattttttaaaatcaaacttggtactctgtgccttttaagtgggggcatttagatcattatattcaaggttaatattgatatgtgagttttctttcctgtcatggtgttattggctgtttgctttgtggtcttgattgtgtggttgctttatagggtctgtgtgctatttatttacrtgtattttgtagtaacaggtatctttcttttgtttccaagtttagaatgttcttaagcatcttttgtaaggccagcctagtggtaacaaattcccttagcaattgcttgtctgaaaaagattttatttctcctttgcttatgaagcttagattagtgaaatgtgaaattcttaattggaatgtgttttctttaagaatgctaataatagg

SEQ ID NO: 249306 - DNA, 624 bp, Homo sapiens
tgctacttctctctagctgccattaatattgtttcatgttgaccttggaggctctaatgactatgtttcttagtcattagagtatctcacagatgttctctgaatttcttgaatttgaatgtttgtttttgttatgtggagtatcgtggagatgtccrttaggtccatttggtgaaatgtgaagctaagtctcaactaggaaagttagagaaatgttcatggacaatattcttatatatgttttccaaattgattgctctctctctcttttcaggaatgccaatgtgtcatagatttgatctctctacataatcctatatttctaaattttttcattttttaaaatccttttttcattatttttgtctgagttcattcaaagaccagtcttcaagctctgaaattgtatcttcagcttggtttattctgctgttaatacttctgatacacttaccacagtagtttgagccaatttcacatcttgtgggtctttctgaaattgtgcctgttattaggcacttgcaacaacctggcagtcaactaagggtataagaagctttggcgaggacctgaggtttgaagggaggcagataccttagtacctggtatcactctgccacagct

SEQ ID NO: 249307 - DNA, 513 bp, Homo sapiens
atactaaccttgaatgtaaatgggccaaatgcccccaattaaaagacacagagtggcaagctggataaagaaccaagaccccttgggctgctgtcttcaaaagactcatctcacatgcattgacacatataggctcaaaataaaaggatggagaaaaatttaccaagcaaatggaaaaaattatgtaatggtaaaaagttcaacaaaaattccaaccattctraatatatatgcaccaaatacaggagcacccagattcataaagcaagttcttagagacctttaaagagatttagactcccacacaataatattgagagacaaatactccaccgtcaatattagatcattgagatgaaagattaacaaagatgtttaggctctgaactcagcattggatcaaatggtcctgataggcatctacagaactctccacccaaaaacaacagaatatacattcttctcattgccacatggcacatactctaaaatcagtcacataatcagaagtaa

SEQ ID NO: 249308 - DNA, 597 bp, Homo sapiens
ttggtaaatttttatatattcctataatttgagcctttgagtgtcatagcaggtaagatgggtattttcaatagagcacgcagttgtcttgcttctttatccaacttgccattccgtgacttttaagtggtgcatttattcccattttttccattcacattcaaaatttattgatatgtgtacatttaatcctgtcaccatattgttarctggtttttatgtagacttaattttgtagttgctttatagtgtccttggtctatgtacgtaaatgtgctttctggtggctagtaacagtcattcatttccatgtttagcatttcctcaggatctcttttaaggaaggtctggtgatcattgccttagcatttacttatctgaaaagaattagagatttttttttcttatgaagcttagtttggctggatatgaaattcttggttggaattttttattacggatacagaatataggccctcaatctcttctggtttataggatttctgctgaaaagtctgctgttaagctgatgggattccctttgtttgtggcctgccctttctctccacttgcctttagtattttttattttgtatt

SEQ ID NO: 249309 - DNA, 597 bp, Homo sapiens
ttggtaaatttttatatattcctataatttgagcctttgagtgtcatagcaggtaagatgggtattttcaatagagcacgcagttgtcttgcttctttatccaacttgccattccgtgacttttaagtggtgcatttattcccattttttccattcacattcaaaatttattgatatgtgtacatttaatcctgtcaccatattgttaactggtttttatgtagacttaattttgtagttgctttatagtgtccttggtctatgtacgtaaatgtgctttctggtggctagtaacagtcattcatttccatgtttagcatttcctcaggatctcttttaaggaaggtctggtgatcattgccttagcatttacttatctgaaaagaattagagatttttttttcttatgaagcttagtttggctggatatgaaattcttggttggaattttttattacggrtacagaatataggccctcaatctcttctggtttataggatttctgctgaaaagtctgctgttaagctgatgggattccctttgtttgtggcctgccctttctctccacttgcctttagtattttttattttgtatt

SEQ ID NO: 249310 - DNA, 554 bp, Homo sapiens
gtgtttgactgagtcagttcgaagaaccagtcttgaagctctgaaattctttcctcagcttsgtctattctgctgttaatgttttataaaattcttgtagtgagtttttcagctccattagatcagtttggttttgcattaaagtggttttatcttgtatttcagctcttgtatcattttgttgatttccttagattccttggactgggtttcaactttctcctgaatctcagtgatcttcattgctatatagattctgcattatatgtctgacatttcagtaatttctgtctggctaaattaatgaggagctagtttggggatttgaaggtaggaagacacgtctgctctttcagttgccagagttctagcactgattctcttatctatgtggagtgatgtttctttaatttttgaatttgctattcttttgatggagctttttgctcttatattcttgatatccttgaggactttactgtggtgacatttgggttcagttggctggctatttaactggataatttcagggggctgaggctcagctcagtgct

SEQ ID NO: 249311 - DNA, 610 bp, Homo sapiens
cagctgcctccttttaaagaaagtccctgtacccacagggcacaaatttgtaacccctgcttaggctgcaagtcctggacctccacaaaatacaattccacgaaaacaaatgtattgttcaataaagacaattgtctaagcacacagctatctattataataacacaaatgaggtgtggtttctacctttggatgatttatgaacaagcacagaacaatgaggtaacaaaataccagaatggcccctccggggttgacggctcagatggtcgtacttcagtcacccgtaaagaaccgatgagttgggctctatagagttttctgcctaagattttctgaagaaggtgggcttcgattttctgaagacatttctgaagactttkttttaaagaaaggtgctatgttttccagacctctcaccctaaaatccagaccaaagcttgcaaaattctcaccttggcagccccgatctgttcctttcgaaacttctccaagggagtgatgagcacctcgctggcattctcaatctggtgaagaacaacagagtaagggaaagaagacacaaaagcagtatcagtaaagaattacagcagctccagcatgagatgcc

SEQ ID NO: 249312 - DNA, 560 bp, Homo sapiens
aagttgttccactaaaggacaagcacagcgcatttaacagggaaaacggggatcactgctgcacaggcagaagcaataatgtataggcattgacctgtccccaactccctcacaatgaatgcgcctcctgccacattctcatggccccataattctagttagcacttattcatgcttttttatggttgatgccatattttgtgctgcacagtgacttctcctttttattattactagacaagataccagttttcctattttaaaataacaatttaaggttgatgtaaatgttctatatctcagttagggtggtagttacacaggcattgcatttgtcaaaactcatgggtgcgttttattgtgtgtaaacctcattaaaggttgattttaaaaaataatgatgatgggccyggcgcggtggctcatgcttgtaatcccagcactgtgggaggccaaggagggtggatcacgaggtcaggagatcgagactatcctggctaacatggtgaaaacccgtctctactaaaaatacaaaaaattgtctgggcgtagtggcacgc

SEQ ID NO: 249313 - DNA, 548 bp, Homo sapiens
cttgaatgatttacaatttctgtttgccctgcttttttattttgttttgttttgtttgagacaggctctctgtcacccaggctggaatggagtggtgcaatcatagctcgctgcagcctcgaactcctgggttcaagcaatcctcccgcctcagcttcccgagtagctgggactacaggcatggaccaccacacttggctaatttttaaaatttttagtagagaccagttcttgctgtgttgyccagtctggtcttgaatttctgggctcaagtgatcctcccatctcagcctcacaaagtgctgggattacaggcatgagccactgtgcctggcatgcttctgattatttatctgtcattcagagacagaccaggacacagacaagatgtcctaaaataaatcaaagtatcaagcagggagggctatttgagctgtgattaattttattagtgatcagtcatcagttaatatttttgattaatcataacttcagggactcagataatgaaaacatagataaacaaggatgccttggcccacaattat

SEQ ID NO: 249314 - DNA, 570 bp, Homo sapiens
agagcaattgctgtgtcatagagtaacagcaatatttagttttagaaactgccaagtgacttgccagcatggctgtttcattttacattcccgctagcagtgtacagaagatccagtttctctgcatccttgccggcattcagtattttcactacttttaattttagtcattctrgaaggtgatagttcatagtggttttagattgcatttccctaatggctaatgatattgaacatcttttcctgtgcttattcgccatattctctttggtaaaatgtctccttgtgtcttttgccctttttctaattggactgtttctctttagctgttaagttttgagagttcttatttatttatttatttatttaatcctagatctaaaaaagaactagatgtaaataagtcccttatcggatatatgtttttgcaaatattttctaccattctgtagactgccttttcatcctcttaccagggtctttcacacacaaagcaaaagcgtttaattttgatgaagaaaattttatccattttttattttatgggttgtgtatgctttccgcattgca

SEQ ID NO: 249315 - DNA, 581 bp, Homo sapiens
ttcaacatctaagaacatactctttggcactgactaattcagtcttcatagacgctatttttttttctgtttgtagggatagaggaaaaaactattaaaggctcacaaaatgtgcttgcctctggattggtaagcaaagattgggagatactagatgcccttaaaagtgtcttataccaattcacgttagaagaacaccttttagcgtacctgtttttacaacttttgcctggtattgaaaattgactagcttctgctatcctgtggatttccatttcctattaagcaggcatttaaaattgagtcatacaggagtaatggtcactcttcaaaatggacttctttgtgagctctagggaacagttcttcctgctttagtgatgtagactgttagggacagacagtcaagacatagaagcctctaccctgtgagaaaaataatgaattatttagggtatgtctaattgcaagtgacacmaagcaaaattattctagttttttaaaaatttatttaaaaatgggaatttgtagacttatcaatcactgagaagtctagatatgaccatccctggtgcttttaa

SEQ ID NO: 249316 - DNA, 524 bp, Homo sapiens
acagtgcaggagcaatttatatacgttcagtcaagcattatgagatctgcagcttctagaatcaaggtgttccctctgcctctcaggggccatgkgacttcttttttctctgatttgctttctcacattttctcatggagattacacctcttgcacatctttcaacatggctgccagccccaaacctatgtttggaagttaaaagtgtgaagtcagggactaggattctcagtaagtgttagttattattgtcaagtacctgttactcactgacgatgtgcactgtgtttagtttcagttctcaagctagaatctgattggtcaggtgtagacaggtagcaactcaaacaggactacctaggtggccctttaacagaaaagcagttgtgagtaggatgtgcataaccgaactttattattccatggtggtcttttcttgatgaagagattgatggaatctgactcataactcccaaactcatgattgaaaaagtaacatgtttagcggggagttaagaacatgg

SEQ ID NO: 249317 - DNA, 527 bp, Homo sapiens
agggattttcatacctgtttttatttgctacatcatgtagatctcagttgaagcatatctttttctcaaaacaagccattcagaacacaaatcttttattttttttaatatgcatcctttcagagaatcattctgtttttctttaccacttgtctacattgatcccaggccaytggtgtcaggtttgtgagaattgtataaatatatccataaatatcgggagtgcaagcactgttctaccgttgactggagaaacagagattgtatttctttagttcactgttgacaggctcaggaaagggctcattgagccatagaagttgacatttggcacaattcattccacctccagagtagcgaagcttcaggaaaccatcttccattctttctaatgtttctggtcagtcatcatatggcttgccacttgtcttggtcctgaaattaattaagaaataataacggaaaggggaaagtaggaaataggtaagatgaataatgattaaattcaatgcaattattatgaattg

SEQ ID NO: 249318 - DNA, 561 bp, Homo sapiens
gaggcaggagaattacttgaacccaggaggtggaggttgcagtgagccgagtttgcgccactgcactccagcctgggtgacagagcgagactctgtcaaaaaaaaaaaaaaaaaaaaaaaaaaaaaaggtagagtcactgcacatgcttagaactgatagaagcttgattcttttttatcagcagtgcccccccaccaccaccccaagataagactttttaaaatagtggctaacatttttctgtcataattatttatttcttagccaaaagataagccaacagttgcttaragtagcatttttttcaacttcaccgtgcacaatggtctgtgtgactttttccctcactaccccaggattcaaacacattcataaacatgctccaaaatcacctgagttgcaaaaacatcacttggtataaaagagttgcaccataactgatgattgatgttgtctaacccagagaactatattgcaatgaagttgaggattaatcgttaaatgtgataataatcctctatctttgtttacatctgtaattaatgcagttcaggaagaag

SEQ ID NO: 249319 - DNA, 568 bp, Homo sapiens
tgggcaattcttttttaagtgaccaatttgaccacaattataacattttcctccaaatgttctaacttgtcctcctaaaacaactcctgttattgcttgagccataagcatagctttatgcatagctcctccgattccatcacaggcttttacatattctgagattacatctgatcctgcaggaacctttccttttaatggcttaatggctgattgacactcaggattggcgttttcatatgccatcaactccactatgaccttacsggctttttcatcggcaattgacttttgagcaacatcttggagccttgccacaaaatcagggtagggctcttttgaaccttgtcttactgtattaaatgaggggcaggtacttcctgggtcttggattttttcccaggctctaaggcagatagctctaacttgctcaatggcctcattttgcattaatgcttgttgactaatagtactccaattttgacctattcctaatagttgatctgcatctatgttaactggaggattggcagccctatttcttcggacctgttcttgtaccccatca

SEQ ID NO: 249320 - DNA, 521 bp, Homo sapiens
ctttatgcatagctcctccgattccatcacaggcttttacatattctgagattacatctgatcctgcaggaacctttccttttaatggcttaatggctgattgacactcaggattggcgttttcatatgccatcaactccactatgaccttaccggctttttcatcggcaattgacttttgagcaacatcttggagccttgccacaaaatcaggrtagggctcttttgaaccttgtcttactgtattaaatgaggggcaggtacttcctgggtcttggattttttcccaggctctaaggcagatagctctaacttgctcaatggcctcattttgcattaatgcttgttgactaatagtactccaattttgacctattcctaatagttgatctgcatctatgttaactggaggattggcagccctatttcttcggacctgttcttgtaccccatcaatccaccaagtcttaaattgtaaaaattgagagggtgagagagacgattttgccagaatctcccaa

SEQ ID NO: 249321 - DNA, 518 bp, Homo sapiens
taaatcattttactttttcgatataggcattcattgctatgaaattccttcttatgactgcttttgcaatgtctcaggctttggcatgatgtgtttttattcttatttctctcaaaaatatttaaatttcctttttaatttcattgttaacttattgaggagactgttgtttacatgtatttgtaaagttctgaagtttttcttctagytgatttctagttttataccattgtcagaaaaaaaatgcttgatataatctttatcttctttgttaagacttgttttgtggtataacatgtgatctattttggagaatgttaaacgtgtaattgaaaagaatatatattctacagctcttaaatggaatgttctgtaaatgtctattaggtccatttggtctatggtacagtttaagtctaatatttctttgttaattttctgtataagtgatctttccattgttgaaagtgaggtgctgaagtcttctactattactgttttggagtcaatctctccct

SEQ ID NO: 249322 - DNA, 437 bp, Homo sapiens
tttgtgcatctagtggaatagtcatccttttcaattttgtgggatagcttttgaagggagagacattttcctgtagatgagtcctatgatgtttgttgagaatggtgcattggcttttgttctgggtggacccagtaacatagcctctgtgcagtttcttcagctgaaaactttgtcagtgatagctgtgattatgccagtgacctaggctacrtgagtttgtgatggcagtagtgaagttttgccgagagctgaaggtactgaactggtggttgggcttggtgcatttggctactatgggctggttactcacaaggctttctagtggctggttcaccagcaggctgactgttggactggacatgtgcaggtacagcaagtcagccagctgtgtgtcaccttccccactatgcaggtctgcctgtatgggggtaagg

SEQ ID NO: 249323 - DNA, 437 bp, Homo sapiens
tttgtgcatctagtggaatagtcatccttttcaattttgtgggatagcttttgaagggagagacattttcctgtagatgagtcctatgatgtttgttgagaatggtgcattggcttttgttctgggtggacccagtaacatagcctctgtgcagtttcttcagctgaaaactttgtcagtgatagctgtgattatgccagtgacctaggctacatgagtttgtgatggcagtagtgaagttttgccragagctgaaggtactgaactggtggttgggcttggtgcatttggctactatgggctggttactcacaaggctttctagtggctggttcaccagcaggctgactgttggactggacatgtgcaggtacagcaagtcagccagctgtgtgtcaccttccccactatgcaggtctgcctgtatgggggtaagg

SEQ ID NO: 249324 - DNA, 437 bp, Homo sapiens
tttgtgcatctagtggaatagtcatccttttcaattttgtgggatagcttttgaagggagagacattttcctgtagatgagtcctatgatgtttgttgagaatggtgcattggcttttgttctgggtggacccagtaacatagcctctgtgcagtttcttcagctgaaaactttgtcagtgatagctgtgattatgccagtgacctaggctacatgagtttgtgatggcagtagtgaagttttgccgagagctgaaggtactgaactggtggttgggcttggtgcatttggctactatgggctggttactcacaaggctttctagtggctggttcaccagcaggctgactgttggrctggacatgtgcaggtacagcaagtcagccagctgtgtgtcaccttccccactatgcaggtctgcctgtatgggggtaagg

SEQ ID NO: 249325 - DNA, 566 bp, Homo sapiens
tgaactaggtggcacttgattatgctaattgtgggagctactgaactaaactatactgattaaattaaatgcttgcaggttcctgggtaattttcctttgtgaataacctggcgctacctgaatttttctctaacaaacatctccaatgagggtaaacaatgatcttgattctaatttatatgaggttaaaaaccttcagatttcgtattttgaattgttctccctagtttcctcagtggttacccccttttagtcagtaaccatctctgttcagaattcagtctttggcttttgaagaaatgggcacagagccaaaggacccatttcacagttcccttggaatatatttcccattgttggactgaggcaaacaaaaccaactgtgcaaatcacaagcaaaagagacttctgtccgtagttgcragtgccatcagtgtgagcttaccagctacaaaaatctgtcatggactggggaacagtatgattccttattgaaactttcatcctcatcggctggcttgtcagcgttctgaagttaatatccatgctgcctgaaacaaatgtt

SEQ ID NO: 249326 - DNA, 538 bp, Homo sapiens
tggaatattatggcctgagagactttcagaggaggctctgatcctccctgagcctcagtttccttgagtgtacaaaagatgtacaaaagatggggtgatcgatgccaggtgtcacaatgggaggtttagatgccccttcccccagataacactcgcaaatatgactgctgtgccgtcatctcctttttagggatctgaagaatctgctgtgtgaccctagggaaataaatctctgattctctctgggctttggttttccccgcctctgaaaggggtatgatgtttcctttccttttgcctgggcacaggtactgggtgcttggtagttaagggagtatcagctggtggctcaacggtagattctaacaggaacttccaagctggggaaatactaggctacacggcagagaggggagctgggtaagggaggcccctgctggtgtgagtagtagccwggcagcaaacagtggtctcttactgatggagaagggcacaaaagcatcacgcttcttaaactgccccttctcacccaggaagt

SEQ ID NO: 249327 - DNA, 566 bp, Homo sapiens
accacatttcaagtacttaattagtggccacatgcagcaagttactaccatattggacaatgtagccycaacccactatatgaccttgggtaagacttgcaaactgtcactgcttcaatctctccatctataaaatggggatggcaacaatacctccctaaaagggtaaagactgagtcactgtgtgtaaagcacttcatgcctccccactggtgcttcaccctggggctggaatgagcacccaatcttagcgtcagatgacacagcacagcaggaccctggtccttgggtcagaaaagtccatgctggcacctctccagtgtcaggaaagtacagcttccacctcataaaaatcaggattgtttatcttatcctcctgggtcaaagtaacttctgggctcagggtaaacactgagtcactgtgtgtaaagcacttcacgcctccccactggtgcttcaccctggggctggaatgaggacccgatcttagtgtcagatgacacagcacagcaagacccaggtcgttgggtcagaaaagtccatgctgcctcctctccccggtcagg

SEQ ID NO: 249328 - DNA, 457 bp, Homo sapiens
acaatatgctttttgcagccatcattcagatacattttctatatttggtagtgattatattattagttagttaatagaatgttattacatactgttattgtattatattaactaataactagttattagttaatagtatgttattacatactgttattatattaaataactaataacataaccactatcaaatatttccagtgagtgcaaaaaagcaagtggcaattgatgtctagaatatcaagatatagctttccackcctcctttggggtttccgggtgattcccattgggaacacaaagaggcattggcgccagtgaaattatttcctgattttggggaactggctcacaaactcaacaattgcttgtcttttttcctagggtataagcctttgctaaagccattcacagattattgtactatggattttcttgtaaggaaagggaaagggtt

SEQ ID NO: 249329 - DNA, 598 bp, Homo sapiens
atgcctggaagcacaatatgctttttgcagccatcattcagatacattttctatatttggtagtgattatattattagttagttaatagaatgttattacatactgttattgtattatattaactaataactagttattagttaatagtatgttattacatactgttattatattaaataactaataacataaccactatcaaatatttccagtgagtgcaaaaaagcaagtggcaattgatgtctagaatatcaagatatagctttccactcctcctttggggtttccgggtgattcccattgggaacacaaagaggcattggcgccagtgaaattatttcctgattttggggaactggctcacaaactcaacaattgcttgtyttttttcctagggtataagcctttgctaaagccattcacagattattgtactatggattttcttgtaaggaaagggaaagggttaggacagcaagaaacagggaagaaaggataaaagataatgctttcatgatggaagagaaatcttgatccacagtcttggaaaagctgtccacatataagatgccaactgcttcttgggaaaaactttcc

SEQ ID NO: 249330 - DNA, 598 bp, Homo sapiens
atgcctggaagcacaatatgctttttgcagccatcattcagatacattttctatatttggtagtgattatattattagttagttaatagaatgttattacatactgttattgtattatattaactaataactagttattagttaatagtatgttattacatactgttattatattaaataactaataacataaccactatcaaatatttccagtgagtgcaaaaaagcaagtggcaattgatgtctagaatatcaagatatagctttccactcctcctttggggtttccgggtgattcccattgggaacacaaagaggcattggcgccagtgaaattatttcctgattttggggaactggctcacaaactcaacaattgcttgtcttttttcctagggtataagcctttgctaaagccattcacagattattgtactatggattttcttgtaaggaaagggaaagggttaggacagcaagaaacagggaagaaaggataaragataatgctttcatgatggaagagaaatcttgatccacagtcttggaaaagctgtccacatataagatgccaactgcttcttgggaaaaactttcc

SEQ ID NO: 249331 - DNA, 598 bp, Homo sapiens
atgcctggaagcacaatatgctttttgcagccatcattcagatacattttctatatttggtagtgattatattattagttagttaatagaatgttattacatactgttattgtattatattaactaataactagttattagttaatagtatgttattacatactgttattatattaaataactaataacataaccactatcaaatatttccagtgagtgcaaaaaagcaagtggcaattgatgtctagaatatcaagatatagctttccactcctcctttggggtttccgggtgattcccattgggaacacaaagaggcattggcgccagtgaaattatttcctgattttggggaactggctcacaaactcaacaattgcttgtcttttttcctagggtataagcctttgctaaagccattcacagattattgtactatggattttcttgtaaggaaagggaaagggttaggacagcaagaaacagggaagaaaggataaaagataatgctttcatgatggaagagaaatcttgatccacagtcttggaaaagctgtccrcatataagatgccaactgcttcttgggaaaaactttcc

SEQ ID NO: 249332 - DNA, 494 bp, Homo sapiens
tgattaaagctgtggccccctcttttccaaataggcacatacatgtttgcataaagttgtgaggcttcacagactccctaaaactctttcataaaccttccaagggtcctctaggtattcatgaccgtctattatgattgcatctcttgggggtaggggaaagagggagggcatgagcaagtgtgtgtcaaggctgaggaaggtggygctgttgcttctccatttcccaataagcttccagattccttttggagccagagggatgcgggctcgtgtctcagattcaattcttatgcgttgagtcacagttttctcttctgtcaattaagaccatgacaatgagaatgtgtgcccctaaggtggttgtgagaattaaatgggatattgcatgcagctagtatataataagtgctcattaaatggcaactaccttgatccactcattcatttattcatgaatccaataacaattcactgggcactttctatgtacc

SEQ ID NO: 249333 - DNA, 561 bp, Homo sapiens
gtgtctcacctataatatacacacaataaatattagtttattttctactcatcttagagagggtgttytgatttgtggcctggagttcttaatctgaaattccatgcaaaatcgtgttatgtgtgtgcatatgtgtgtgtgtacctgtgcatgtgggaagaggatccataatagtcattagatttcaagcagtgagaattcttgttgcttccttcctgctctcctcaccccacgctgattgctttgaggagtatcaaagatctaagcctttactgtaggtttttaattggtcaatagaaagtagtgtccctgctgaaaggtctctttttaaaaaattttctttccttcttttttcttttttttaattttgagacagagtcttgctccgtcacccaggctggagtgcagtggcatgatctcagctcactgcaacctccacctcctgggttcaagcgattctcctgcctcagcctcctgagtagctaggactacaggcttgcaccaccacacccagctaattttttgtatttttagtagagatgggattttgccatgttggcc

SEQ ID NO: 249334 - DNA, 572 bp, Homo sapiens
tcttgcccatctctagtcagtaactcactgtttctaagcctcctggrccatggcccaattcttctcccagtgaggtggttgctcagagtgccgacccttccatagggagtgagcagtgcaaagaaggtgccccctcctgaaccttgaagtgtagccattagggttttccctggggggccttctcactaattgtactctggtgctgccagagagaaggttgtcagcttcccactgctaggtggcagtagatggtggcagccctctctttccagggcaaggtctggtggatgaggtgcacatggttaatgcagagcagcttaacatccaccacagagggtgagccctgggataatgtgttgggaggcgtcctggggagggtgaggattgaagcagcccagtctgctgtggcgtgcgtgcttggcaagcatcctgttgtggcagtggccactgatgtttgatcgtgaatgtttatcttgggactgtcttgctgggccgggcccataggtgtagctgagcattcgtggggaatggacgccagcagagttgtaccagggcagagaggtcagggcaga

SEQ ID NO: 249335 - DNA, 376 bp, Homo sapiens
gaactcctgacctcaggcgatctgcccgctttggcctcccacagtgctggggttacaggcatgagccaccgtgccatcaggtatttctttatagcagtgtgagaacggattaatactagcaccttttcatatacctgtttgccatttgtatgtcttcttttgagaaatgtctattcaaatcttttattaattttaaattggattattagatttttttcctattgagttgtttgagctccttatatttttttgtsaattattctttgtcagatggaaaacttgcagatatttattttcttccactctgtaggttgtctcttcactttgttgattgtttcctttgctgtgtagaagcgttttaacttgatgtgatccc

SEQ ID NO: 249336 - DNA, 540 bp, Homo sapiens
ctgatgacattggcgggttctgatatcagcatcaggtatggccagggagggaaaggcatcgtgttggctttgggactgcccccaggtgtatgcgaggatgggaaacaagttggcactgaacttgacaccaggagaatattgaagtcatgtttggtgccaagagggctctgtgtgttgtctcaggtgtcattgagggcataagagtgtcctgcttcaggagggcrtaagggtggcaccatatagggtctgaggttggtcccagtgggctctgacatgagcatgaggcaggtgctgatattggtcctatgtgggtctgagatgagcctcagccagaccctgagaggggccccagatggccacaggacaggctctggtggttggaccatttagggttgcacctgtcctctgggtcaccaactttggacaagtggaggtgggtgaggttggcacccccaggactgacatcttgctcaaactgttctaggatgctgagctctgagacctgtgtggagggaacaaaggtcagagaacaaggcagag

SEQ ID NO: 249337 - DNA, 540 bp, Homo sapiens
ctgatgacattggcgggttctgatatcagcatcaggtatggccagggagggaaaggcatcgtgttggctttgggactgcccccaggtgtatgcgaggatgggaaacaagttggcactgaacttgacaccaggagaatattgaagtcatgtttggtgccaagagggctctgtgtgttgtctcaggtgtcattgagggcataagagtgtcctgcttcaggagggcataagggtggcaccatatagggtctgaggttggtcccagtgggctstgacatgagcatgaggcaggtgctgatattggtcctatgtgggtctgagatgagcctcagccagaccctgagaggggccccagatggccacaggacaggctctggtggttggaccatttagggttgcacctgtcctctgggtcaccaactttggacaagtggaggtgggtgaggttggcacccccaggactgacatcttgctcaaactgttctaggatgctgagctctgagacctgtgtggagggaacaaaggtcagagaacaaggcagag

SEQ ID NO: 249338 - DNA, 540 bp, Homo sapiens
ctgatgacattggcgggttctgatatcagcatcaggtatggccagggagggaaaggcatcgtgttggctttgggactgcccccaggtgtatgcgaggatgggaaacaagttggcactgaacttgacaccaggagaatattgaagtcatgtttggtgccaagagggctctgtgtgttgtctcaggtgtcattgagggcataagagtgtcctgcttcaggagggcataagggtggcaccatatagggtctgaggttggtcccagtgggctctgacatgagcatgaggcaggtgctgatattggtcctatgtgggtctgagatgagcctcagccagaccctgagaggggccccagatggccacaggacaggctstggtggttggaccatttagggttgcacctgtcctctgggtcaccaactttggacaagtggaggtgggtgaggttggcacccccaggactgacatcttgctcaaactgttctaggatgctgagctctgagacctgtgtggagggaacaaaggtcagagaacaaggcagag

SEQ ID NO: 249339 - DNA, 603 bp, Homo sapiens
ctgaaatcatgtgggagggacttgtcccagtgggcagtgtcttgggaacaggctttcagagtgagttagtggcgagcccaggaagatccctttcctttgctgggcctcagtttccctttctgaatggatggtgcaatgattaaggcctggattggaatcctaaccttatcctttctttgttgtgtggctttgaacagctgacttcatctctctgagtcttatggagccaagaacagctcctacctctttggctatttaggggagaagtatawgtgttaatgcagatgaggtacatggcagtaagtgctcaatgaatggtagttgttctctttaatctgtaggatgaagcagattgatgagatgttccctaagcacattccttgcttttacattctctagtctaaagctcacaaatcttttcctttgggaaggaggaaagggacagagtctttgggaacctccttcgccatcccttcctcagcacagccaagctttaccccatggagctgtgaataggaaattaatccttcatggcctcctggagtgtggtgctgagttaggcagtatctgcggaaggacaggccagcattagactctcaggtt

SEQ ID NO: 249340 - DNA, 603 bp, Homo sapiens
ctgaaatcatgtgggagggacttgtcccagtgggcagtgtcttgggaacaggctttcagagtgagttagtggcgagcccaggaagatccctttcctttgctgggcctcagtttccctttctgaatggatggtgcaatgattaaggcctggattggaatcctaaccttatcctttctttgttgtgtggctttgaacagctgacttcatctctctgagtcttatggagccaagaacagctcctacctctttggctatttaggggagaagtatatgtgttaatgcagatgaggtacatggcagtaagtgctcaatgaatggtagttgttctctttaatctgtaggatgaagcrgattgatgagatgttccctaagcacattccttgcttttacattctctagtctaaagctcacaaatcttttcctttgggaaggaggaaagggacagagtctttgggaacctccttcgccatcccttcctcagcacagccaagctttaccccatggagctgtgaataggaaattaatccttcatggcctcctggagtgtggtgctgagttaggcagtatctgcggaaggacaggccagcattagactctcaggtt

SEQ ID NO: 249341 - DNA, 603 bp, Homo sapiens
ctgaaatcatgtgggagggacttgtcccagtgggcagtgtcttgggaacaggctttcagagtgagttagtggcgagcccaggaagatccctttcctttgctgggcctcagtttccctttctgaatggatggtgcaatgattaaggcctggattggaatcctaaccttatcctttctttgttgtgtggctttgaacagctgacttcatctctctgagtcttatggagccaagaacagctcctacctctttggctatttaggggagaagtatatgtgttaatgcagatgaggtacatggcagtaagtgctcaatgaatggtagttgttctctttaatctgtaggatgaagcagatkgatgagatgttccctaagcacattccttgcttttacattctctagtctaaagctcacaaatcttttcctttgggaaggaggaaagggacagagtctttgggaacctccttcgccatcccttcctcagcacagccaagctttaccccatggagctgtgaataggaaattaatccttcatggcctcctggagtgtggtgctgagttaggcagtatctgcggaaggacaggccagcattagactctcaggtt

SEQ ID NO: 249342 - DNA, 594 bp, Homo sapiens
acattccttgcttttacattctctagtctaaagctcacaaatcttttcctttgggaaggaggaaagggacagagtctttgggaacctccttcgccatcccttcctcagcacagccaagctttaccccatggagctgtgaataggaaattaatccttcatggcctcctggagtgtggtgctgagttaggcagtatctgcggaaggacaggccagcattagactctcaggttattctggttggccctggagccctgcacaggactttgcccacctgtctgtctatgcttgtcttggatcccatctttctatctttctctttctccttccctgcaagtcagtgttcccctcaatcaccctgtgtgctcgtgcatctttgttttgtgccattttgtccagtgggttctcctggatgcctctgccatgtttatcctcatttatacaactgtgtgtgtgtcattctgggtgcatgcttttagtgtctacgtgcatgtatgtttcagcaygttcatgttgatacatgaatttatgtgtgcaccaggctttgtggtgtgtatgtttgtgcttgataatgggtatccattccaacttatgtct

SEQ ID NO: 249343 - DNA, 448 bp, Homo sapiens
ggtcataagtgacttgcttctgcatttcacagctaatgagtgtagagtcttagtatggtcttgtgtgatggtaaatttttttttttttgagatggagtttcgctcttttgctcttgttgcccaggctcgagtgcaatggtgcgatcttggctcactgcaacctctgcctcctgggttcaagtgattctccagcctcagcctcccgagtagctgggattatagccaccagacrcagctcatttttgtatttttagtagacacggggttcaccatgtttgtcaggctggtttcaaactcctgacctcaggtgatctgcccacttcggcctcccaaagtgctgggattacaggcatgagctaccatgcctggctgtgaatgtaagtttcatgctgttaatcaccactttggactgctaggccccacctgtttttctttatgaaacattaga

SEQ ID NO: 249344 - DNA, 448 bp, Homo sapiens
ggtcataagtgacttgcttctgcatttcacagctaatgagtgtagagtcttagtatggtcttgtgtgatggtaaatttttttttttttgagatggagtttcgctcttttgctcttgttgcccaggctcgagtgcaatggtgcgatcttggctcactgcaacctctgcctcctgggttcaagtgattctccagcctcagcctcccgagtagctgggattatagccaccagacgcagctcatttttstatttttagtagacacggggttcaccatgtttgtcaggctggtttcaaactcctgacctcaggtgatctgcccacttcggcctcccaaagtgctgggattacaggcatgagctaccatgcctggctgtgaatgtaagtttcatgctgttaatcaccactttggactgctaggccccacctgtttttctttatgaaacattaga

SEQ ID NO: 249345 - DNA, 448 bp, Homo sapiens
ggtcataagtgacttgcttctgcatttcacagctaatgagtgtagagtcttagtatggtcttgtgtgatggtaaatttttttttttttgagatggagtttcgctcttttgctcttgttgcccaggctcgagtgcaatggtgcgatcttggctcactgcaacctctgcctcctgggttcaagtgattctccagcctcagcctcccgagtagctgggattatagccaccagacgcagctcatttttgtatttttagtagacacggggttcaccatrtttgtcaggctggtttcaaactcctgacctcaggtgatctgcccacttcggcctcccaaagtgctgggattacaggcatgagctaccatgcctggctgtgaatgtaagtttcatgctgttaatcaccactttggactgctaggccccacctgtttttctttatgaaacattaga

SEQ ID NO: 249346 - DNA, 524 bp, Homo sapiens
atccatggccatgaagttcctccctaccagtaaaatggcaggacttagagttcagagatgggaaagaagttggatagatgayagggatgaacagctttttttttttttttcttttgaggtggagtcttgctctgttgcccaggctggaatgcaatggtgcaatctttttttttttttttttttgagatggagtcttgctctgttgcccaagctggagtggagtgctacaatcttggctcactgcaagctccacctcccgggttcatgccattctcctgcctcagcctctgaagtagctgggactacaggcgcccaccactacgcccggctaattttttgtatttttagtagggactctgtctcaaaaacaagacaaacaaaaacaaacaaacatgatgcaactatatgctgcctataagaaactcattttacctgtaaagatgcatatagactgaaagtacatagatggaaaaagatattccatgtagacaaaaaccaacagcaagcagtagtagctataactt

SEQ ID NO: 249347 - DNA, 524 bp, Homo sapiens
atccatggccatgaagttcctccctaccagtaaaatggcaggacttagagttcagagatgggaaagaagttggatagatgatagggatgaacagctttttttttttttttcttttgaggtggagtcttgctctgttgcccaggctggaatgcaatggtgcaatctttttttttttttttttttgagatggagtcttgctctgttgcccaagctggagtggagtgctacaatcttggctcactgcaagctccacctcccgggttcatgccattctcctgcctcagcctcygaagtagctgggactacaggcgcccaccactacgcccggctaattttttgtatttttagtagggactctgtctcaaaaacaagacaaacaaaaacaaacaaacatgatgcaactatatgctgcctataagaaactcattttacctgtaaagatgcatatagactgaaagtacatagatggaaaaagatattccatgtagacaaaaaccaacagcaagcagtagtagctataactt

SEQ ID NO: 249348 - DNA, 524 bp, Homo sapiens
atccatggccatgaagttcctccctaccagtaaaatggcaggacttagagttcagagatgggaaagaagttggatagatgatagggatgaacagctttttttttttttttcttttgaggtggagtcttgctctgttgcccaggctggaatgcaatggtgcaatctttttttttttttttttttgagatggagtcttgctctgttgcccaagctggagtggagtgctacaatcttggctcactgcaagctccacctcccgggttcatgccattctcctgcctcagcctctgaagtagctgggactacaggcgcccaccactacgccyggctaattttttgtatttttagtagggactctgtctcaaaaacaagacaaacaaaaacaaacaaacatgatgcaactatatgctgcctataagaaactcattttacctgtaaagatgcatatagactgaaagtacatagatggaaaaagatattccatgtagacaaaaaccaacagcaagcagtagtagctataactt

SEQ ID NO: 249349 - DNA, 524 bp, Homo sapiens
atccatggccatgaagttcctccctaccagtaaaatggcaggacttagagttcagagatgggaaagaagttggatagatgatagggatgaacagctttttttttttttttcttttgaggtggagtcttgctctgttgcccaggctggaatgcaatggtgcaatctttttttttttttttttttgagatggagtcttgctctgttgcccaagctggagtggagtgctacaatcttggctcactgcaagctccacctcccgggttcatgccattctcctgcctcagcctctgaagtagctgggactacaggcgcccaccactacgcccggctaattttttgtatttttagtagggacwctgtctcaaaaacaagacaaacaaaaacaaacaaacatgatgcaactatatgctgcctataagaaactcattttacctgtaaagatgcatatagactgaaagtacatagatggaaaaagatattccatgtagacaaaaaccaacagcaagcagtagtagctataactt

SEQ ID NO: 249350 - DNA, 552 bp, Homo sapiens
tcgcatacatgtataaaaacatcacactgtaccccacaaatatgtacaattattatgtcaattaaaaaaatttaataactgtttaattagggttatacttaattaagtaacgaacaaagagttttccttgttgtctatcaagactttctaaaacaacatggtctgccagctgtggtggctcacgcctgtaattccagcactttgggaggctaacgggggggcgggtggtggatcacttgaggccaggagttcgaggccagcatggccaacatggtgaaaccacatctctacaaaaatacaaaaattagctggacatggtggtgtgcgcctgtagttctagctacttgggaggctgaggcatgagaatcgcttgaaccctggaggcagaagttgaaatgagattataccactacactccagcctgggtgacagagtgagaatctgtctcaaaaaataaaacaataaaaaaaaataaaacaacatggtttccctrtttgatagatggggaaacaagtcccagaggttaagtgactttcccagtgaagaaaagac

SEQ ID NO: 249351 - DNA, 536 bp, Homo sapiens
tttcattgtatttaattaatagggacagaaaagttatgtctaaatatacaaagtatgcaaagtgaagaatccaggcattccttcgcttcttttttttttcaaattaaaaagaaagcatggtttagagaattaaaatattcaaatgattgctttaatttttgcttttatctgtagacattatatatgtaaagataaggctttgttgaccactgcctaggcgaccccactggcaaatgtgtattataaaattcataccaattcatatcaaagggatagaattagtagatccatccttgggcagacattctgtcctgtaaacacatttcaaaaagtgattttggataaaaatttctttatcatttgttgaaaaattaatttkgatcatcttactcctaagaatttcaagtttaaaatattaaaatgtaactaaattcatttggatgaaatagaagggaaagatttattcaaatgtaactattagctaaaagtaaatgttacttgggcaaaagagctgaacagacacttgaccaagatga

SEQ ID NO: 249352 - DNA, 594 bp, Homo sapiens
attgaattacttacctctcaggtcccaggtgatgctcttcctgatcttcctaatgatttatcatcatggctgatgattgattgcctgttgtttcttttcccaaagataataataattgtcaaaagcctgagatgtatcaataccaggcactgatcaaagcacgctatgtttttaaaaaaattctcacaacaaccttatgtcataggtgctctcattctccccccactttgaaatatgaaaaaaacctgcagatcaggraagttcaataatgtgctcaaggtcatacagttggcaagaggcacagtgaggcttcaaaacgaaggctgtctcgttccagagccagcacaaataatgactctactgttgaagcaaagcaataattgtttctagttaggattcttacatcaacttgcgtattttccagtgtattttcttggatttgagacatttaaccaaaatttacacactttggactggaaccataaaaaaaaattgtgcccctaaaaatcacctgatataattaattcccctgtcaagcatatctgcttttaactaagtccttcccatgtctccatatcagctttctgttacaga

SEQ ID NO: 249353 - DNA, 603 bp, Homo sapiens
ttcttcaggttttggaatcaacttaattttggaacaggacctgggattgacagaagcagtctttatcacttcttttgaggcagcctagagatccacaggcctcagttggaatgccaacttaggttatggggtgccacagttagtaggctatcaggccaagtaagtgagcagctctaggaagtgtatagtgtctttttttctggctgtggcttagctgaacattcttacctgacccccatatccacactggttcataggaaaaaggtaaaggatcttcttaatggaggccattttcaggcctgtttgaatttagcagctcatataggaggggagtattaattaatgaaagggcaatgtctgcaggaatagcactgccaaataaaaccgttatctggctttctgggggatcagaagtcatcatagcaagatatcattgttcaaattggtgaccaggagttgcaatcctacttttgcccttggctggctgcatgcattagggaagattttacygccatgtgggctcctgggtcaaaaaagacagtgatgctatccacttgttttagaggcccagttctgcccactgggaaacatttgttacagatt

SEQ ID NO: 249354 - DNA, 454 bp, Homo sapiens
ttagaccatcaaaaatttgtgagctgagtccctgaatgtacttgctaaaattttatttggtttattcaacatttccttctctatcaacctccattaaccatcttagacactagatgaatatgatatttccaacatatgaactattttaattaattctggtaaatgctttagagaggccaaaatgtttgtttctatataataccaaaaatcattttacttggtgccaagaggtatggatgtttaataacctgtttattgttctaatggtttctccagagcacccataaagaaggaatctcrtaaagatgttgttgactgttgacttttccccactcacttcttttccatcttctacataggagatgctcctcatagctcaagcctggctggctgaaggtttttgacccaagagcatgttgtttatggcagccatgtgtaccatggcataacctta

SEQ ID NO: 249355 - DNA, 553 bp, Homo sapiens
attctatagccatttgagatggtcttaatgttttctaattttaaaatattatttttaaaactgaaacaatggtaactgaattcattcctgtttcagttatttattagtgtgtaacaaactataccaaaactaagttttaggcttaaaatattttattacttctcatggtttcctatgtaaaaaaactggacaggacatggtgtggagaattcatctctctccacatgatgtctgctggagtgraatgtgcaaaatggcttctgtactcacatgtctgatatctcaactggggtggcttagacagctagtgttggctgcaataacctaactggggttgtatgtttggggccacagatttctgtcagctggattctttaattttcctccatgcagtctctaggtctttctgtctctctgtatcttttcacatagtctctccaacagggcaatccagcttcttacgcagcagcttaggcctctggaaagtaaaaaacttgaaactgtcaggtctactttctgcttaggctgagaaatggcacaaggttctttgctg

SEQ ID NO: 249356 - DNA, 622 bp, Homo sapiens
tgagagaacttggtttggtgagcctggcaagaaaaaatgctatggtaacattgtcattaattcctcctttatggatagacctccaaatagttgaaaggaggtagcttttgaggtactccagcttaaaaatcttttatttatttatttatttatttatttatttgagatggactctcaccctgtcacccaggctggagtgcagtggtgtgatctgggctcactgcaagctccgcctcccaarttcacaacattctcccgcctcagcccccagagtagctgggactgcaggcaccctccaccatgcccagctaattttttgattttgtattttcagtagagatggggtttcaccatgttagccaggatggtctcgatctcctgacctcatgatccacccgccttggcctcccaaggtgctggaattacaggcgtgagctactgcgcccagcctagttcattttttaatcacattctaaattctgttattcttcaggtgttatcaattttacctttgaaatgcctccagaatctttctcattctgaagatgagtttcctttccaattatagtttagtttacttatctctcccaggatattgcaattgcctctctttatttttaag

SEQ ID NO: 249357 - DNA, 622 bp, Homo sapiens
tgagagaacttggtttggtgagcctggcaagaaaaaatgctatggtaacattgtcattaattcctcctttatggatagacctccaaatagttgaaaggaggtagcttttgaggtactccagcttaaaaatcttttatttatttatttatttatttatttatttgagatggactctcaccctgtcacccaggctggagtgcagtggtgtgatctgggctcactgcaagctccgcctcccaaattcacaacattctcccgcctcagcccccagagtagctgggactgcaggcaccckccaccatgcccagctaattttttgattttgtattttcagtagagatggggtttcaccatgttagccaggatggtctcgatctcctgacctcatgatccacccgccttggcctcccaaggtgctggaattacaggcgtgagctactgcgcccagcctagttcattttttaatcacattctaaattctgttattcttcaggtgttatcaattttacctttgaaatgcctccagaatctttctcattctgaagatgagtttcctttccaattatagtttagtttacttatctctcccaggatattgcaattgcctctctttatttttaag

SEQ ID NO: 249358 - DNA, 592 bp, Homo sapiens
aaacattgcacatgaaaaagaaacttagaaataaagaaagagcagctaggagttataacagctgacaggtgttgcatgcttcctgtgtctgaggtcctattctaaccaagttacctgtgttagctcatttgattttcatagcaaccttaggtttccagagaaactcattttacagttgagaaaactggggtacagaaaggttgattgatttgcccaacatcacacagccagtaaggagtggagccagaatgtgaacacaggtcatccagccctagaattcctgctcttaacaattatcccacgttgatcagactgccagcatcagaatgaccaagggtgcttggagaaggtacacattcccagactcagctgccaaatctactaagggagaacttctgagaggagcactatgttaaattgccawatgtaatttataaataaattcattagaaggaataggtctcctaaaacttccctgaaaatgaatgatagggaaactcttcactctatttttccccccagccagctctgtgctttactaggattcattgcttggttccaaaagagaagaaaccctgccccgcctgggcat

SEQ ID NO: 249359 - DNA, 490 bp, Homo sapiens
taatgacattacacaaacaacatggtgtgtaataattgaaattctgttgtttctgttgtttgggggagttgtgtctcagtatatgcgtcatgactttacatttttctggaacagtatctcaatcattttgggatgaaattccaacagaaactaatatatattttttgtcatatcaagcaacattgctctgtccttctaataggacmtacattagaataagagagaaatagatatctagtttttaaagtaacaagatatatcaaaccaacttttttgaagagtttcatttaatttaaatgtaagttaaatgtagaacatggtagtggattttagcataacatctttcctgaattcacacagtgagactatgtctgacttctccatagaccaccttgaattttctgtagttttttcttctgtaaagtactaacagtgtgtgtgggtagctctgagatttatattgccttcagtctgatcatgaagattgcaa

SEQ ID NO: 249360 - DNA, 622 bp, Homo sapiens
acagatattcaagtatttgttaatcaaacttgccattaatgccaaaattcccctaaaaacatgattaggaaatcaaaatatttaagctaactgaaataatttttttttcaaaaaaaaaaaaaaaagaggaaaatgaaagctrtatcactcatggaagaaagtttttattttttaatcacatttttatccctcattttctctctgatatttccagttgtttttttcagtcacgagaagcctacatttatggaaaatcagcaagtataaccagctattagcgtcagctagggagaggaacaacacaaagccaggattttgagccagcttcctgggcaaattgggaaaagataccattttagttagttacctgagactgttcaagtttaattacattagtggcacttgacattataaaatgtttttttctttcagatataaccttcttccatcattagtaaacgtcaattataatgaagtgtttttcccacttccttttcttcctgatataacggaagaaaatgctaatgagtttataatcctgaaattgttttcaaagccaaaacaaagtcagcttggtgtctgtttattagcttaattttattctttatatttggagaacaaa

SEQ ID NO: 249361 - DNA, 622 bp, Homo sapiens
acagatattcaagtatttgttaatcaaacttgccattaatgccaaaattcccctaaaaacatgattaggaaatcaaaatatttaagctaactgaaataatttttttttcaaaaaaaaaaaaaaaagaggaaaatgaaagctatatcactcatggaagaaagtttttattttttaatcacatttttatccctcattttctctctgatatttccagttgtttttttcagtcacgagaagcctacatttatggaaaatcagcaagtataaccagctattagcrtcagctagggagaggaacaacacaaagccaggattttgagccagcttcctgggcaaattgggaaaagataccattttagttagttacctgagactgttcaagtttaattacattagtggcacttgacattataaaatgtttttttctttcagatataaccttcttccatcattagtaaacgtcaattataatgaagtgtttttcccacttccttttcttcctgatataacggaagaaaatgctaatgagtttataatcctgaaattgttttcaaagccaaaacaaagtcagcttggtgtctgtttattagcttaattttattctttatatttggagaacaaa

SEQ ID NO: 249362 - DNA, 615 bp, Homo sapiens
ttcccttctgcagtttttttttctttttctttcccctccaaaactacatagtggtcttaaattaaggttacttcatgttaaacatgaaagttagcctgccaataacaactaagatgtgaggagcaattgctaagcctctgttcagagctttctaatctagctcaaggctcctatcaactaaaaggtcagttctgtgtcacagctcagagggggcagtggtgggatgagagcacagaattctgcccccagactctcaccaccaccctacactggaccgcggggagtctcttctttctccctggatgttaatgatacatttcttattgctggtcggacccaaccatagaacattatttttgtgcagataacccaacttaaactcaaatttatatttagaaaatagagggctcctaatcctcagccccttcaaaaacaaaaactcaaaacaccctgtttcctccgttgtctttgcatctcaataaatgacatctctatctttctagcttatcaggctaaaatcttcggagttaatcttaactyctcattttctcagactgcacacccagttcttcaaaaaatactgttatatcttgggtctgatttcaaaacacaatc

SEQ ID NO: 249363 - DNA, 575 bp, Homo sapiens
ttagttactgtagcacattctttccctaaaacagcattttattttttggatgggggtatatttgcagtaagttagtgccaatgaagtacagcacaaatgtcagacatctgaaaagaacgaaagatgccatgtaacctgatgggaaatgtctgctcatttctcacggcctccgttcaaagtttctcttactgttttagtttccagtcagggttctcttgtttttttcccactcataccttcatttgctgcacttggttctggcttgtctcaataaattccccaggctgaacactgagagagaaaatagctctttaaagaatgaagatatgtgaaaaaaaaatgtaaagccttgaattaaagatgtcttagttaagcattttgctaagtttctgttcagaccaaacagacaaagctgggcttatattctggtttcagaaaagtgtgtgtgtgtgcatgtgcatgtgtgtgtgcatgcgtgtaactcaggaaatagcaaatagytcgaaacacatgttagcagttaatgtgctgattatgtgtacagaaggagctaagagaatagagagagacacttg

SEQ ID NO: 249364 - DNA, 580 bp, Homo sapiens
gactaattatgataattaatattaattattggcccagactgtgttgtttggtaaaattcatgttagcccttcaaatttcacttcctgttttaggtttaaagagatcccaaggtttttaaagaaggcaaagtataacaagatgccatttattaaacatattttcttataacaagttcagggaagtttatattttagaaactctcaaaaataagaaacatagaggggaaaaattagaccaaactataacaagatgctagacattagagacattttcttataacaggttcttggaagtttatcttttagaaactctcaaagataagaagcatctgaggggaagaggtaggccatctcaaggaaaacccgaactggactcrggcttgcatcaagcctgaaaaaccatatttccccgttgcattttgtcagtcgtccagaatgaacactatttcaagctgtttcagtgattattcagtttctctgccaatatcatttctgggttatagatagtaactccttttctactctagttgagaaaatgatgtggataacccattagcaggagagaatacctaacaacctg

SEQ ID NO: 249365 - DNA, 538 bp, Homo sapiens
tctggaggttcactacatatggcctagccttggaagtcttatacaaatgtgagctggactccactgtgtcaggggctggctttttctcaccctttagagttcagtttagatgtcagagaggccatcatgaccacttaatctacagctgcctcttggacactctatcacatcattatcattttaattttctgcatagctcttatcacccatatttttcttgcctattctcttttcctactagtaggctataagcctccatgtctctcgtgttctctattttatcccctgagcctagaacaatgcgtgacataatagtaggtgattagtaaatatttggtgaatatgaatatgaccgttgtctagcttagtgcttccaatccactgagtacctaacgaatgctagtagmaatatcagaagaatgcttatctctcctcaccaagtcttcaactgatttgtaaaatgaggtgaatctttgccaaaaaaagaggaaatgtttatcttttaccccaaatacctctgcagcctctttttcttgca

SEQ ID NO: 249366 - DNA, 602 bp, Homo sapiens
atataactttcataacaatataagkttacaaaacaatatgcttaatatgattccattcacatgtgattatatatttacttataaaaagaggagtggaaggttgcacagcaaatattgatggtggttagattaggagtatttggactttcctctttacacatgatgcgtttgttacatttctaaaatgagcgagttttattttcataaataggcaacagaattaaatagagaaaagaaagataagtcttgtggtaaggactcattacatgactgtttcttctcttatctgtcataaagcaagtcaaaagaaaatgtaagctgagggaggtgaaaatggaaaaaactgggccagtcatagctcaatttttaattgatttagactaccaaaggcacaatgggactctgggcctgtcctcaccttgggagcaggaggtgctggctagaaagttaggggtatattaattattaaccttacttttcccaagcaatgcatgatcctcagttgttcgatctgattctgtttctatttttaattttttgtaagaagtttcctgctttctagttgattttcttgacagttttgaagaaagacaatagaatat

SEQ ID NO: 249367 - DNA, 632 bp, Homo sapiens
atcaaacattctaaagaaaaactatcttctattagagctaacaccaataggtgagagtcacaggagggtcataatttgccagttggtaaacatatctgttcttcaggctctttagtatcccttgagctatggccacttgaacagaaattattcatcagtgttggcttgtaagtttctctatcatccaagccacttggtggctagcaagtaacrcccattgatctttgatgagctagagttaaacaagtggcagcagacaagtgatgagaggctgatgaccttacctcttaccgttagattatgattcgggtagccagacataaaaagctaagactgtaggagctaagtggctatgattccatgtttttcgcagataggaggccaaggaggcataaaatgtggtttttttgaaggtcgctagacctaagttactaatactatccccaagccaacccagcttgctggagagtacagcaaggaaccactgaccctttcttttcaccattcactagaggactgaagacctagaatacttactcctatggcttcattgtttagtgaatgcaaaaatacttcattatctcaacagaactgacagcacacttcaaaccaatctgaaacatgttggtgtt

SEQ ID NO: 249368 - DNA, 581 bp, Homo sapiens
agagaattccttctccctgtggagttttaaccgctgctcctctggccaccgtccagatggatccctgtggtgccaggcaggaatgggctgcttggggacccagagagctcgcagggcctttctgctgcttcctctacccctatatttctcttggcttggctctctaatttaactcagctccaggtaaagtctgaaacttctcccacaagcaaaccttcaacttctccagtggggtgtgtttgggagaggagggcctccctttctcacttctacagttggggcactcacagtatttggggtgtctcctgggtcctgcaggagcagtctgcttccatcagaggktctgtgggtcctctcagaattgctgtttttttcttgcggtcaatctggagctaaaattcacagtgcaagcctccatacactgctctgtacaggtgcaatctagtcctgcctcccatgcaccatgattatctctcctctcagattcccttaatttcatctttaaaatggagatgattttggttctgcatgtgaggagcttggaagtcatcacttccatcttcacactagaaaaaagctga

SEQ ID NO: 249369 - DNA, 561 bp, Homo sapiens
ggtttgagctctgagaatggacaggctgcctcttcaagtgggtccctgagccccrtgtagcctaactgggagacacctcccagtagggtccgacagacctcatacaggtgggtgctcctctgggatgaaacttccagaggaaggatcaggcagcaatatatgctattctgcaatatttgctgttctgcagtctctgctggtaatacccaggcaaacacggtctggagtagtggacctccagcaaactccaacagacctgcagctgagggacctgttagaaggaaaactaacaaacagaaagaaatagcatcgacatcaacaaaaaggacatccacaccaaaaccccatctgtaggtcacaaacatcagagaccaaaggtagataaaaccacagatggggagaaaccagagcagaaaagctgaaaattccaaaaaccagcgcgcctcttctcctccaaaagatcgcagctccttgccagcaacagaacaaagctggatggagaatgactgacgagttgacagaagtaggcttcagaaggtcagtaataacaaacatctctga

SEQ ID NO: 249370 - DNA, 561 bp, Homo sapiens
ggtttgagctctgagaatggacaggctgcctcttcaagtgggtccctgagccccatgtagcctaactgggagacacctcccagtagggtccgacagacctcatacaggtgggtgctcctctgggatgaaacttccagaggaaggatcaggcagcaatatatgctattctgcaatatttgctgttctgcagtctctgctggtaatacccaggcaaacacggtctggagtagtggacctccagcaaactccaacagacctgcagctgagggacctgttagaaggaaaactaacaaacagaaagaaatagcatcgacatcaacaaaaaggacatccacaccaaaaccccatctgtaggtcacaaacatcagagaccaaaggtagataaaaccacagatggggagaaaccagagcagaaaagctgaaaattccaaaaaccagcgcgcctcttctcctccaaaagatcgcagctccttgccagcaacagaacaaagctggatggakaatgactgacgagttgacagaagtaggcttcagaaggtcagtaataacaaacatctctga

SEQ ID NO: 249371 - DNA, 642 bp, Homo sapiens
aagtgaattcctgtaagtaatttctttttcctgtgttgtttgaaaaacaaatgtgaacaactctgaaggaggctgtggttacatgttttaatcagaggtaaccgatttggttcctggtcaatagaacttctgggaaaacagtagttaaaatttaaaatgacacaacaattaaatccatgatctattcactgctattgaaccaaggcctacctggascaacaacacagtggctttccaagacaccaacttttaaaggttaagaatttgcttcacattttgaattccttaatgacattctgttgaggtctcacccgtagatttatatattcaacaggctaaaaagttaattgttatttgtctaaaaagtgattaccattttgatgagggccttagatgaacacataaaatacatactgatcaaatttaggaatgacaaatctgaaaaagataactaatatttttgatgaagggattgtcagatcacaattgaattgtaaatcaaagcaaacaagaggaaatttaacagaatacacataaaggttgacactttcataaaaaaataagttgtcaaatatagaatgggaatagaagaaacctatgttcataacagttaatgtgaaaatagtgatgagcattttaagt

SEQ ID NO: 249372 - DNA, 588 bp, Homo sapiens
cgtgctgcatagggattttctgattcttcaaactggattagtagatttgcaacagtcyacattcaaataaagcattttaacaagtaatagacacatttatacttcctgaatgcgttacacctcctctctgtggaagcaggaaagaatgggagggtcagagtacgcagggttcagattagctagtttgaacaacttcaacttactctgggacacaggaacgatccctcagttgcctggcacttaataagtcctggagcgattagggcaggtggatagtggcccagagtgtgaaagccctataatggaggtggttgggagtgtgtgctctggattggttggtttgcctttgaaaagagtgctccagtaagttgtttactatctctagaaactggctaatcctgggagggtcagtccctgcagaatcagtgaggccccaaatgtcaaagcatcagaatacaaaaaataaaaaatctaaaaataaaagacatggttaatatggagggaaagttcttggggcctcaggggcagtctctgtcactaatttcactctgacaaatgctgtgattcccaactgtctcactacaggat

SEQ ID NO: 249373 - DNA, 616 bp, Homo sapiens
ggtaagaggaaaccaagactcagagagtttaaataattcccccctggtcacataactctttatactgcttatagagtaacttcaagccttataactgattaaaataataaatcaaatggtagccaacaatcaatggaggaaaaagtttttccaggaatacataaggtaaaatggacaaatcatgacattatattccatccagattaatctctttcatgatcctctagtcagcccaattcctacaggacttctatcccaagactgctaagcagctctcaaagcttctaaaaattcaaataccggccgggcactgtggcttatgcctgtaatcccagcactttgggaggccgaggtggrtggatcacgaggtcaggagtttgagaccagcctgaccaacgtggtgaaaacccgtctctactaaaaatacaaaaattagccgggtgttgtggtgcacgcctgtaatcccagctacttaggaggctgagacaggagaatcgcttgaacctgggaggtggaggttgcagtgagccgagatcacgccattgcactccagcctgggtgacagagtgagactctgtctcaaaaaaaaaaaaaaaattggaataccatagttttg

SEQ ID NO: 249374 - DNA, 570 bp, Homo sapiens
ctgttttcagcaggctaggaagcatacggtttcatttcttcaacttcccaaccccttacctagaggaaggcagagagggctcatcctggaaaaccattgctctacaacatcttttagaatgagggcagaagaacctacagacacatctctggcagactccatccatggggtaagcccctttagagatggcagatcttatggaaagagcccataaagtctcttaaaactagactataggaaggaaagtagagggggaggcacaaacgtaaagacatctagcccacagggaatctgccgtaactctaacataacttgtgtatttgtgtgataaggattcattagtaaatagtgccaggaaaaacatttaatatggacattctctccaggtagagaagagaaaaaaattgagatgagaccaacagttaaaactttccatatctgaataaaagtcatattattaagagatacatgaataatctatcgttcagattttgatttttcttaactgcctcttccactaagttatatgggctcctawgggttatgggctggacattatttaattcagga

SEQ ID NO: 249375 - DNA, 590 bp, Homo sapiens
tttgcattttgtttatggcatgttttggtcatccttaattttttttattctcrtggagttatatttatcaattattttcttaaaaataaatgtatccaaaagacaagccatactaatgttaaaaccattataacattttctaaagtccgtgttattttataattataacccactttacaactcacatagatatatgttaggtgtgagtataacagaaacctcagcagactaagaacctgtagaaaagcaatgtcagaacagagaaacaaagttcagaattgaaaatagcaggaaacagacattatatgtcacctcgggcactgaacgtatgcaagctgtatatggatcactgttagaagctcttgaagcagttgacatcaacactaggaaatgatctttctttgttcagtagatcaaaatatagtaacaggtgtgtagcaggtgcctctgagttccctacaaggttccttggcctgcatctgatgttagccccaatggcagcgtgggcaggtctgtgcacagtcagcatcccacctcaagcacaccatgcctgccttactgcatttgccaaggcttttctgatggcacag

SEQ ID NO: 249376 - DNA, 590 bp, Homo sapiens
tttgcattttgtttatggcatgttttggtcatccttaattttttttattctcgtggagttatatttatcaattattttcttaaaaataaatgtatccaaaagacaagccatactaatgttaaaaccattataacattttctaaagtccgtgttattttataattataacccactttacaactcacatagatatatgttaggtgtgagtataayagaaacctcagcagactaagaacctgtagaaaagcaatgtcagaacagagaaacaaagttcagaattgaaaatagcaggaaacagacattatatgtcacctcgggcactgaacgtatgcaagctgtatatggatcactgttagaagctcttgaagcagttgacatcaacactaggaaatgatctttctttgttcagtagatcaaaatatagtaacaggtgtgtagcaggtgcctctgagttccctacaaggttccttggcctgcatctgatgttagccccaatggcagcgtgggcaggtctgtgcacagtcagcatcccacctcaagcacaccatgcctgccttactgcatttgccaaggcttttctgatggcacag

SEQ ID NO: 249377 - DNA, 583 bp, Homo sapiens
ctggctagaaccattgatacaatcctgaatagaagtagtgacagaagccatccttgccctgtacttgatattaaggggagaatattgagtcttttcacgattaagtatgctggtaattgtagttttttgttaaaggcttttttttcaggttcaatggatccccttcttttgatagtttactgagagtttttatcagttgagatattggattttgttaagtatagtatcatcatatattgagataatcacatggttttcctttccctttgtggtctgttaatatggcaaattacgttgactgattttcaaattgaaaactttacattcctagtctatttacttggtcatgatatattattatttgtatgtattgatggactgaattgctaacattttgtttatatctatgtatctgagagagatggacctgtaattttcttttaatatgttttggtctggtttgctatcacagaaatcccagccttttagaagaaattggaaagaatgcctttgccttcagtttttggaaagygtttgtgtataattggcattacttcctcctttaaatgttagctagaattta

SEQ ID NO: 249378 - DNA, 645 bp, Homo sapiens
atttcaaagagattttacattattttaaggataaatttatgttatttaatatctcttactatatcctattttttcctaacagcagaaagaaattgttggtattgtgtagaaagtctttataagtgatattcttatattgtttctaaatagttattttaaaaattaataagtaaatcacagaaagtactgtctacctgtagtctaaaatatgtgtttaaaataataagacaaaaaattagtaaytttttagcttataccttcagcaaatattacaaatgatgcctcagtggcccaatcttatttgtcttcacaaactgtaacttagcaaagaaatatcattttctcccactcataactcttcacccctacacaaatatttatgtgtattcacaggttaagttctaattttgaagttttttgtgtttggaaagacaaatgtgatggttttctttgatgaggttcacaaaggcatatatgacacttatttcttcgtgtagtcactctgcttgtagaaatttattcccttccactgacacctcacttcacagaccacaagccaaacaaagttgcatttctaagggtacgtcagggtatttaaaatgaaaaacttgagttatatataaaactggatgacatatactaaca

SEQ ID NO: 249379 - DNA, 620 bp, Homo sapiens
acaaatatatttagaattgttacatcctcctgctaaattgatccatatatcattgtataattactttccttgtctttttcttagtgttttttatttaaagtctgttttatctgatacatgaatagctagtcctgctagttttgggtttctatttgcatggaatatcttgatttatccttttacttccatcctatatgtgtgtttatagctgagatgagtttcttgtaggtagcatacagttgggtctttttatrtatttgttcagccagtctatgtcttgtaagtggaaagtttaatctttacattacattaatctttacattcaaggttattattgatatgtgaggacttattcctgtcactttattaattgatttctggttgttttctatatcttgtatcttgttttgtatatgttcatttctttgtctctgcagttgtttatcactttgcttacaaagttctttgtagtagtaacatttgaatcctttctcttccttgtgtgtttactctaccagtgaattttatactttcttgcattttcatgatggctaatattgtctttttacttccaggtgtagggctttcttacgcatttcttgtagttcaggtttagtggt

SEQ ID NO: 249380 - DNA, 616 bp, Homo sapiens
actttgtacatttcctttttattctttctcatttgtttttgtctgactgggttatttcaaaatactcaacttcaagttttgaaattccttctactcttagatctagtcgattgctgaagcatttgaacatactttatatttcattcaataaatttttcacttccagaatttctgtttggttctctttatgacagtggcccccaacctttttggcaccaggaactggttttgtgaaacacagtttttctgtggaccagttgtggggggatagttttgggatgattcaagtgtattacatttattgtgcattgtatttctattattattacattgtaacatataatgaaataattataaaattcgccataatatagaatcagtgggagccctgagattgttttcctgcaactagatggtcccatctagggtgacagaagacagtgacgatcatcagkcattagattttcataaagagtgtacaacctaaatccctcacatgtgcagttcacgatagggtttgtgcttctatgagaatccaatgccactgctgatctgacaagaggccaagaccaggcagtaatgagagtgatagggagtagctgtaaatacagatgaa

SEQ ID NO: 249381 - DNA, 599 bp, Homo sapiens
acttgctggtttatacataagaaaattatgtaatgaattaaagggctatgcacctattgtcaaagcacttgcaaggaagaatgggaatctagaagtgaaattcataacatttgccagtagggtacaagggtcagaaaaggatctatcctgaagaatttagattaatgatttcttagctaaaggaaatctcaaatattcccactgacaatgtgtaataaagaacccttgggggaaattatcgggaggctgacttctgattatgragttgctctcttttaggcgttgtgacctagggtctgtactggtttccaaggactgctataacaaaataccacaaactgtgtgacttaacagggatttattgtttcatagttctggaggctagaagtctgaaatcaaggtgtccatagggctgtgctctctatgaaggcactatggaaggaactctctcttctttctttcctagcttctggtagtctctggtgttctttggcttataaatgcattattgtggttctctgtctttacatggaattttccctgtgtgccttcatgtcatctagtctcagtgcatgtctgtctctatgtccacatatccc

SEQ ID NO: 249382 - DNA, 586 bp, Homo sapiens
  misc_feature (1)...(586): n = A,T,C or G
ctccaagaccaatgttcaaacaacttccattcaaactctaaaattgcaaccataaatttaatgtgcattgttccttgctgaatccttcatttttccctcacacaacatgtagtccagtttacatgtataaatgaggagatttctatcagcaattttagaaccttattggtaaaaattaacctcatgtatcttacattttaatacaggggaaattttactcattcttactaatcagaattctttttnntattcctttttattatagaaggagctgtgatctkcctttgcaataggacttttttattttatatcacaatgtaattttctttgaaatgtgacattcattgcaacttaatctaagaaaatcacctcagttggaattggccttggcataagcatttcaaaattttatgctgaaattaattgtgcgtatataatatcatgcagagagtaattttcttggaaagtagcctttcttttgatgggttactaggaattaagcattttagcattctttattaatttttcaaagtcactaggaccaaggataacaattcatcatgtgcatacaaggccattctgtgtt

SEQ ID NO: 249383 - DNA, 484 bp, Homo sapiens
tgttatggtgaggagccaagtggaatggaaaggacagctcatcccggcggctgggagtgcatgcacacacatgccccctttttcttgcctactaacaggatctatagaaggmgtacataatgagtatgtaggggacttggctgctttcagttaggaatgagacactgatatggttggaatatagtaagagaaaaagggaggtctttcttaaaaaacggttttgtgtaaaaatagagatggcacttaatggatatcatattagcaggctccctggacaaatacatagagccaaaacttctcatcgattagccacctcttcaagtttaggggttgaaaatctgaaacaactacaaacatggtatctctctgaaaaggagataacgtaaaagttatcacatattaatataatgtgtatgaataaattgacaagctggttagaaattagaaataaaagtcttgaggcaataaaagaggtaataacata

SEQ ID NO: 249384 - DNA, 484 bp, Homo sapiens
tgttatggtgaggagccaagtggaatggaaaggacagctcatcccggcggctgggagtgcatgcacacacatgccccctttttcttgcctactaacaggatctatagaaggcgtacataatgagtatgtaggggacttggctgctttcagttaggaatgagacactgatatggttggaatatagtaagagaaaaagggaggtctttcttaaaaaacggttttgtgtaaaaatagagatggcacttaatggatatcatattagcaggctccctggacaaatacatagagccaaaacttctcatcgattagccacctcttcaagtttaggggttgaaaatctgaaacaactacaaacatggtatctctctgaaaaggagataacgtaaaagttatcacatattaatataatgtgtatgaataaattgacaagctggttwgaaattagaaataaaagtcttgaggcaataaaagaggtaataacata

SEQ ID NO: 249385 - DNA, 638 bp, Homo sapiens
ggagtaaacaagtttaggtactgaactgagaatagcacatggatagaccaattgtggatgaaggagactaaagagaggtttaacgaatattgaaatgaacctccaggtaggttgtatttattagtttgctgggaacaagctgcttttctctctcctgtgaagcaggaaggcaaatttctagtgrctttccaaaggaaatgggaaatctaaggaaatggtttgataccagagtgttctccttaggtttattttaatgatggacttaaagatactttcctatactcatgagctatgttgtctctgatattctttggtatattttaccaaaaagatagaataggtgccacaagtattaaaaattttagactcctcagagcattacaaaaaacaagcacaaaatagaagcctaatatgcagggaaagtcactgaccatgcccttggtactgctgattgtattgcagagcaagagatggaccctgagggtacttgaagccaacaagtttcacttctggaaaaagacttcagaatatgagtttaaaatataaaaagggaatttgagccaagacacaagaacaaactttttttgacaattatatctttattattcctcttacagagctacatttactcttactaa

SEQ ID NO: 249386 - DNA, 550 bp, Homo sapiens
cactactccaaatatattaggggctgtgcttttggaatttcckgcagagccagtttcagagtcaccaaaaaataaagtgacattattttatagttcctatttaactgacataaagcgaattaacccttcaaacagaggaaaatcagaaaagtttgagaagttgtaaagtctttgagactaggtcccatatctactttatctttgtattttccatagcaggatttcttaaactgttttgtttataagcatctcctgaagtgcatgctgaacatacatacttctgggatcaactctaattcttatttctgtacgaaataagaatctccaagataattctgtggggttttgttttgtttttaccaaggcaaatctaatggtcagggaaatttaggtaaattattctacatatagcattgcacacagtgtttggtacagagaagttgttcagctgttaactgaacaacagaatgaagaatgaataacaaaaacgtgtcacctaagtggtaaattgccatttctgcacctgtaaacagaatgcattagttacctt

SEQ ID NO: 249387 - DNA, 616 bp, Homo sapiens
aatccactcacaaaattcctgaatatttaataatcagctctagcgagttggtagaatcagtacaagctacatccagcatactgtggttaaagaaaatagataataaagtttcaggaagcaagaggcctcagggtagaaataatgcttaaaaaggcctcagggtagaaataatgcttaaatgcaagtcaaaattaggtttaactcaacagaagacccagatgtaagatcattaacttcaaaagccatggaattaataatcataacaataggtggaaaagatatattaaattgtaaaacttggaagattgaaacctggagaagaggtgagggagctataaaaaatgaaatatatgtcaatttagctaacaagtctgtaaagagcagggttttcaaaaagaggtcrtgtgatcacttattaaaagttgatataaaaaagaatatatacagacactgcagaatgaatataagctcacacgtactatcatttctataccaacagccagctgaaggcagcccaggttattagattggatagtcaacaagatcgactctattatgttttgctcaagatgaagaaataatagaataatgaattagttgttatctagttccagat

SEQ ID NO: 249388 - DNA, 616 bp, Homo sapiens
aatccactcacaaaattcctgaatatttaataatcagctctagcgagttggtagaatcagtacaagctacatccagcatactgtggttaaagaaaatagataataaagtttcaggaagcaagaggcctcagggtagaaataatgcttaaaaaggcctcagggtagaaataatgcttaaatgcaagtcaaaattaggtttaactcaacagaagacccagatgtaagatcattaacttcaaaagccatggaattaataatcataacaataggtggaaaagatatattaaattgtaaaacttggaagattgaaacctggagaagaggtgagggagctataaaaaatgaaatatatgtcaatttagctaacaagtctgtaaagagcagggttttcaaaaagaggtcatgtgatcacttattaaaagttgatataaaaaagaatatatacagacactgcagaatgaatataagctcacacgtactatyatttctataccaacagccagctgaaggcagcccaggttattagattggatagtcaacaagatcgactctattatgttttgctcaagatgaagaaataatagaataatgaattagttgttatctagttccagat

SEQ ID NO: 249389 - DNA, 600 bp, Homo sapiens
tctagttgttaaactggtcttcctaatacggattatttcctaaactatatctgacttcattatacctctttttttccataaaggtttagactgttgaatgtacttactctttgtggtgagtagctatactcaatcttgttcccccacatctggcctagctatatctgttgaagtacttcttacccctgtgttattgctcaggacccctatgcctacccatagggttggcttctagcttgggactgacttcatactaaactgtattatwcaataccaaaaccaaatttccgcaaccagagtgcagcatacttactgtactctaccaaaaccacagtgtgttttcaggtgggaagacggaaaggattaattcacaagacccatgcgtctcatttaaaaagcagccaggatacttaaatataaagaacatcttgaatagactagacagagttcattcaggtaatgaggagggcattccaggaatgcgctattagattatctacaaaatctgttccttgtatcataataccatgcaaaaagatatttttttctgtaggatgtgttgataattattctcttgggaggggaaagtcaaggaaataa

SEQ ID NO: 249390 - DNA, 466 bp, Homo sapiens
gtattttataaggagagggattaatttatagaacatattactccaaaagaggtcttactcaaaaaatataaatgcagtaagatacagttggaagcatttattaatgccagggatacacatgggttagcattaattttgcagtcaattataggaagactgtacaccttctaatcctagcatggccactgattaatcatatcctctagccatgccatttaaaattgtttggattctacctcctcatttgtggaattaaagattgaattcataagtcattgacttattgtccctatgtagaatttagccagtatagatttttatttatccagctcagtgtttttaaaaatgtgaatatgaatggaatttttaatactcctttgagtttgctaatattgcacatacctttcccagcayggaaaacatcagagtcttcttcacccctctcagaattactcattgaattaca

SEQ ID NO: 249391 - DNA, 522 bp, Homo sapiens
gtgtaatctttttctcttttctcaagcttttctggatccaaagtaactaacactttcttttcaaaaacagcatcttgactgcccactaataaaataaagactattagaacaagagcaactaggggcagctaactccttcagattcaatcttagtaaagtataggaaacagctgccccttgcctagattttggcatttaaccatttatgctgagacctgtgcagaggtctgtgagatacaacagctgcaagattgcctggctgcacataagatgggatacaagagaaattaaagagcaggtgtaagtaaaatatgtgtatgaaataaaagctgaatagtcattagatacagagtggagagagtaatctgaaagcttttactttgtagtttgatcacttattgtattattgataatcttattaaaaatgtttttccaataaactcagtaacatgtataaaaaataaaatacatgttaaataaraaactaagtacttaattttcattttgcagaaggttaatgaa

SEQ ID NO: 249392 - DNA, 598 bp, Homo sapiens
attttcattttgcagaaggttaatgaagaaaatgtaatatgcacaaaacatttttgacatttattatctactgtgggagcaatagcaatatcactgaccaaatgcaaatcagaagatacaaatttgctgaaaaactatcagcacttattttagacttactagatccttaagaaggttgtgcctaaagacaaaacagtgataagacttttcattgacattactaactcttgttctaaattaatttgtcattttaatgcatttcttttcatatttaagcatgatagctattaacaattgtctccattaattgaagataaattttacagttagtcattttatattatgtcatcagatttttcaaatagaaaattaagttatgtaagggcttaagatttttattcggatagtaaatattttctggtaggtaaatagaacgagaaaatctgtatacataatatataaagatattcagtatatatttactgaacaraaagaactttgtgtatagcatgccacatttatgtaaaacaaaaaatatctatttttgcatttattgcttttaaaaagccctcaaaatttgaagaaagtgttaaacagt

SEQ ID NO: 249393 - DNA, 559 bp, Homo sapiens
tgcatatgaacataggttggtagaacaagccagtttacatctgaatgctttgctgcttagaaatttcttctaccagataccctaaataatcattctccagttcaaakttccacagactcctaaggcaggggtacaatgcacccagcctctttgctaaggcataacaaaagtcacctttgttccagctaccaataagttccttacctccatcagagacctcctcagcctggacttcactgtccatatcactatcagcattttagttgtaaccattcaggaagtccctagaaagttccaacctctgaccattacccacttccaaagtagctttcacattttcagatacctttatagcagtgccctactcctcagtaccaattttctgtattagttcattctagcactgctaaaaagatagagctgagactaggtaatttataaagagaagaagtttaattggctcacagttctgcaggctgtctaggaagcatagtagcttctgtttctggggaggcctccaaaaacttacaatcatggcagaaggcaaaagggaagcagg

SEQ ID NO: 249394 - DNA, 512 bp, Homo sapiens
tcaggaagtccctagaaagttccaacctctgaccattacccacttccaaagtagctttcacattttcagatacctttatagcagtgccctactcctcagtaccaattttctgtattagttcattctagcastgctaaaaagatagagctgagactaggtaatttataaagagaagaagtttaattggctcacagttctgcaggctgtctaggaagcatagtagcttctgtttctggggaggcctccaaaaacttacaatcatggcagaaggcaaaagggaagcaggcatatcttacatggctggagcaggaggaaaagagaggggagaagtgctatgcacttttaaacaaccaaatcttagaataactcactatcatgagaacagcaccaaggggatgatgctaaaccattcatgagaactctacccatatgattcaatcacatcccaccaggacccacttccaaaattgaggattacatttcaacatgaaatttgggtggggacacagatt

SEQ ID NO: 249395 - DNA, 627 bp, Homo sapiens
tatggtaggttattccacttttaattttttggtgaatcttcatactgttttccattccccacacagggtaaaagggttgcgataatcaatgcctttttaaacatgacmaactgaaattcagatatattaagtaaattgctcaaagtgacaagcccaccaatgatgaaactggaattcatactctggtttaatatccaaaactgcattttgctcttttctctcacttgctttgttgctgttttcgttgttgttgggttttttttttttttttttttttttttttttttttttttttttttttgagatagagtctcactctgttaccaggctggagtgcagtggcacaatctctgctcactgcaacctctgcctcctgggttcaagcgattctcctgacccagcctccagagtagttgggagtacaggcatgtgccaccatatccagctaattttttgtatttttagtagacatggggtttcaccatgctggccaggatgggctcagactcctgaccttgtgatccacctgcctcggcctcccaaagtgctgggagtacgggtgtgagtcaccacgaccggctgctttttttttctctcccttcttttcttccctcttttctttcttcc

SEQ ID NO: 249396 - DNA, 627 bp, Homo sapiens
tatggtaggttattccacttttaattttttggtgaatcttcatactgttttccattccccacacagggtaaaagggttgcgataatcaatgcctttttaaacatgaccaactgaaattcagatatattaagtaaattgctcaaagtgacaagccmaccaatgatgaaactggaattcatactctggtttaatatccaaaactgcattttgctcttttctctcacttgctttgttgctgttttcgttgttgttgggttttttttttttttttttttttttttttttttttttttttttttttgagatagagtctcactctgttaccaggctggagtgcagtggcacaatctctgctcactgcaacctctgcctcctgggttcaagcgattctcctgacccagcctccagagtagttgggagtacaggcatgtgccaccatatccagctaattttttgtatttttagtagacatggggtttcaccatgctggccaggatgggctcagactcctgaccttgtgatccacctgcctcggcctcccaaagtgctgggagtacgggtgtgagtcaccacgaccggctgctttttttttctctcccttcttttcttccctcttttctttcttcc

SEQ ID NO: 249397 - DNA, 596 bp, Homo sapiens
cagaagtcacaaaatataataataaatatagtgaaaagtcttccacccgctccctatcctctgtgtcttcagtttcaagcaatctctcaacacataggtaataattattaggttcttgatactttggatgcatctatggcaattataactatattgtcttaaccccactccttttttcccaagacagcttcatatacacactgtttaatatctttatttctttctttaatttaacaatatattttgaagatattataaataaaatttgggggggtgtcataatttacctactccactaatgctggacatttgtgtgaatttctatctttacaattattaatgcagaagtaagtaacacgtgtgtcattttcacacatgctagtatttatagcataagttctcagttttcttacccaggaattatcgggcaaagagttatacacttattttgataatgcagtctttccttggtattcatggtttcaggacccctacagataccaaaatctgtggggatgctcaaktctcttatataaaatggtgtggtatgtatttgcatataatgtactcacattctccgtttatatactttaaat

SEQ ID NO: 249398 - DNA, 544 bp, Homo sapiens
ttttctctaatcttgtcttctcactttatttcattaagttaatcttcaatcactgatatcctttcttcaacttgactggttccgctattgaagcttgtgtatgcttcatgaagttctcatgctgcacttttcagatccatcaggtcatttatgttcttgtctacactggttattctagttagcaatttgtctaaccttttttcaagattcttagctgtcttgcattgtgttagaacatgctcctttagctcagaggactttgttattacccaacttctgaagcctacttctgtgaattcatcaaactcattctccatccagttttgttccattgcttgcaaggagttgtgatcctttggagraggagaagaggtgttatgattttttaaattttcagcctttctgcgcttgtttctccccatctctgtggttttatctacctttggtcttttatgttggtgacctgcagatggggttttggagtggacctcctttttgtcgatgttgatgctattcttttccgtttgttagtttttcttctaac

SEQ ID NO: 249399 - DNA, 445 bp, Homo sapiens
ttgatgctattcttttccgtttgttagtttttcttctaacagtctggtccctcagctgcaggtctgttggagtttgctggaggtccactccagaccatgtttgcctgggtaccaccagtggaggctgcagaacagcaaatattgctgcctgatctttcctctggaagcttcatcccagaggggcacctgctagatgccagccagagctctcctgtatgaggtgtctataggcccctactgggagatgtctcccagtcaggctacacaggggtcagggacccacttgaggagrcagtctgtccataatcagagctcaaaagctgtgctgggagaaccacttttctcttcagagctgtcaggcagggacatttaagtcttctgaagctgtgcccatggctgccgcttcccccaggtgctctgtcccaaggagatgggggatttatca

SEQ ID NO: 249400 - DNA, 591 bp, Homo sapiens
gtatttctgtccaatttctggatcacagagacattattctcattttttggtgttttctctgatattgttgtgtttagaacagaaggggtacctccaagtgcagacttataatgtcattttaaaaagacatctgccttggcttttctgccacgtgttgatcccctgaaggtatggacttatcttagcatctttatatatttaaaatctaaaacagtatatgtctttgtgcttytaaaacagaaatctgagactggataatatatagtaaacaaatttattgactcataattttggaggctgaagtctatcgtcagagcatcagcaggtttggtgtctggtgatgccattccccaccttcaaccctatgtttgattcttccacatccatggtgtgtcctctgaaggggaggaaggctggatcctcacagggcagaaaagccaagatataaaagggggccaaactcatcctttttaatggccttaatcccaccagtgaagatgaagcccttatggtcctatcatctcttaatggtctcagctcctaacactgccacaacagcaacccaatttcaatatgagttttgcaggggac

SEQ ID NO: 249401 - DNA, 600 bp, Homo sapiens
ttaaattaaattcatttctaaccagcaaagaaatactagaaattcaacatttaaaatacttctcattattaacaagctaaagacaaactgttggagagtaaaagatgtcaaagaattaaaaatgtgaggtatttgcatatatagctgctctctgaaaccaatctatcccacccagagaactccatgtagacacagattacatgctgaaaaatatacacgctaaagcagtgttataagtgatataaaagacaaaaaaaaatgcatcaagcagttaaggagataattttatttaggcctttataatcaggagaatgtaaatattcattaatgagaaacatcttaaaaggaagaggacttgggccccaaaattagacaaaggagtcatcagataatcttttaggagtcatcataatgatggagacatgtgttatctaagtcactgaggaaagatggagatggattttatcttgcaatatgagatttcaggtggtccttggtggttaaccattcctgaaacccattaaagtgtggaaattttttctaaaagcacaggtctcagacaaagttcartgtggcaatggaaagtaaaaaggtgtccac

SEQ ID NO: 249402 - DNA, 490 bp, Homo sapiens
atacagcataattttttgggttgggaggtgtttgggccatgggggtggatccctcatgagtggcttggtgctgtcctcatggtagtaagtgagttctcgctctattaattcccatgagagctggttgttaaaaagagtctggcaactcccccatctcttttttgcttcttctctcaccacgtgagctctgcacacactggctccccttcatcttccaccatgagtggaagcagcccgaggctttcatcagatgcccagtcttccagccagcagaattgtgagttaaataaatcttttttctttataaattacccagcctaaggtattcctttatagtgaaactaaatagactaacacttccctaatgctggrggggttaagctgttcaggatggtatttatgctgctcatctcactgcatcaagttaagcacacagactgcttaatgatgcttgtatctgttttttgttgttgttgggtttctttgcctc

SEQ ID NO: 249403 - DNA, 474 bp, Homo sapiens
agatcttcacagcagcttctagaacatatcttccgaaaccttcagagaaattgttttaatttgtcttgaatggcttaagtgatgccttgctggaaataaattgctatattagatgtctaaaaccttgtctacttattatggacagttatttaaaaacttgcattatagaatgtgcttatgtgttataatgcaataccaatttcagatcaaatctatatgtttaacattgctgcaaaacaaattacttcaaaaaataataaacatttattcagtgtctgtgggtcaagaaggaatggcttagctaagtggttctgtcttagggtatctcatgaggttgtagtcagactatcagctgaggccrtctactcctaagatggctcacccaagtggctggcaagttgacactggcagttaacaggaggcttcagttcctcactacatagacctctctatagggatgcttgagtgttttca

SEQ ID NO: 249404 - DNA, 579 bp, Homo sapiens
ctgcaactcaagtgtggtgccctaaaagtttcttcaccacacagctggaattttttttcactgcagtctcccttttatccttttcccccaatctcaagcacatggaagaggacctacactacatttcattttcttatggaaaaggtgcttaactagttaaagaactaagcaaaatgggaaacttactagagaaatactagcagaaacaaygcagactttaactggggactttggggagcatagcacaacccacccaatggtaaattggcagaacataagacttcactaaaacacaaccacaggaagtcttggctagtgcaataaggcaagagaaagaaataaagggcatccaaattggaaaggaaaaagttaaattatccttgcttacaaacaacatgattttatatttagaaaaacctttaaaatccaccaaaaaactattgaaactcataaattagttcagtaaagttgcaggatacaaaatcaacacacaaaaatcagtagcatttatgtataccaacagtgaacaaattgaaaaatcaagaaagcaatatatttacaatagttacaaaaaatata

SEQ ID NO: 249405 - DNA, 592 bp, Homo sapiens
ctaagcaaaatgggaaacttactagagaaatactagcagaaacaacgcagactttaactggggactttggggagcatagcacaacccacccaatggtaaattggcagaacataagacttcactaaaacacaaccacaggaagtcttggctagtgcaataaggcaagagaaagaaataaagggcatccaaattggaaaggaaaaagttaaattatccttgcttacaaacaacatgattttatatttagaaaaacctttaaaatccaccaaaaaactattgaaactcataaattagttcagtaaagttgcaggatacaaaatcaacacacaaaaatcagtagcatttatgtataccaacagtgaacaaattgwaaaatcaagaaagcaatatatttacaatagttacaaaaaatataaaatacttaggaattaatttaaccaaagaagtgaaacatttctacaaggagaactataaaacactgatgaaacattattgaagagaacaccaaaaaaaaaaaaaatggaaagatatcctgtacccatgaatttcaataatattattaaaatatcaataatacccaaagtgatctaca

SEQ ID NO: 249406 - DNA, 603 bp, Homo sapiens
acctataaatatattaaaagttcaaccaattctgatttcagatcaagatgtgaagaaagagatgtatgttttaggattcagaaccctctagaaaaaaaatagttcaatatgaatatgagttaactaaatgtatatcaagctagcatttaaaaagmgccattatttatgaagaaagtacatttttgcatggaaaaggtcctaactgtaaaccatggacagcagagaagatataagacaaaaaacatggaatttgccaattggttacagaaatattcctcctataatagctataagaagagatacctgtaaaaatgagtatttgttgttggatgcactttggggagacttgtagcagatatagaattgctataaatatttatagagtaccaccatacatgcagaagaacagtgatacattttctatcatttatttttattttgtctttttgatcttatataacaaatatatacatacacatacctaaatacatacacaacaaacatatacacacatacatgtaaatatacctacctacctatatacatatgtacacacacagacataatgtctgtgtgtgtgacacacactcacacctatatagt

SEQ ID NO: 249407 - DNA, 603 bp, Homo sapiens
acctataaatatattaaaagttcaaccaattctgatttcagatcaagatgtgaagaaagagatgtatgttttaggattcagaaccctctagaaaaaaaatagttcaatatgaatatgagttaactaaatgtatatcaagctagcatttaaaaagcgccattatttatgaagaaagtacatttttgcatggaaaagktcctaactgtaaaccatggacagcagagaagatataagacaaaaaacatggaatttgccaattggttacagaaatattcctcctataatagctataagaagagatacctgtaaaaatgagtatttgttgttggatgcactttggggagacttgtagcagatatagaattgctataaatatttatagagtaccaccatacatgcagaagaacagtgatacattttctatcatttatttttattttgtctttttgatcttatataacaaatatatacatacacatacctaaatacatacacaacaaacatatacacacatacatgtaaatatacctacctacctatatacatatgtacacacacagacataatgtctgtgtgtgtgacacacactcacacctatatagt

SEQ ID NO: 249408 - DNA, 584 bp, Homo sapiens
ttaggcctgctagctacaagttattttacctgattgtagtctaatttcctgctcaacagactacaaacctagactttccaagcaaatgaaaatctaaacaaatactaacagaaaattggtataactctttcacttttattcatcttaaaagtgttgttaccttttacagaaaacctttaggaatgtgctaaaatcgtttacagtacttattaaactttcttctgcctctaactctgtgcataggattctgttatagaccaaacttcattacctcaaagtaaaataccagttactactgctgatacagtaggtgtaccttagaactgttgagtctcagagttgttaagaatggactattgatgaatcagataacagattttggtggagataaagctaaagttttttcttgcctttttatttccatcttaactttaatataactttggaaggagtaggtcctttttctctctaatagataatagaaaaacaccattatctrcaaaacatatgacattttttcattagggaatttatattgttattttaatacaaacagtgagaagagctataggtcaattgttcca

SEQ ID NO: 249409 - DNA, 609 bp, Homo sapiens
tatcaacttttgattctttgttaattctaagaagctgatcatgtttggaattactatttaaactttgttgaacacaatttaaaaaattaactgaggcttagaaagtgtggcttcattttacaggacaaagtcccaattgcctctctctcctcacccccacacccggtgctccctgtgaaatttggattcctgtattcagtggattcagtttaagcagctttttccagtacttagtactctgaaatgaataggtttcctctagcactttcttacttaaaatcatattataaccaccattatctttgatggctacattcatttaatttatttacttattccttttttaatgaacttttaataatgtttctgatgagatgcttttaaaagcaataaggaaatragtaatgatatgtctttgtgcgtttagctgtgaggattttatcccacgtgtggaattactggattagatgcgaaattgcaacatttgtatggctcttgatacatatttctcagtgtctttccaaactggctgtagaaatgtaccctgccatcagaaacatttggagagatatttctactcctcacagattacgtatatttgttaaacac

SEQ ID NO: 249410 - DNA, 581 bp, Homo sapiens
gggtgggggattgtttgtttgtttgctgttatgaacaatgctgctgtaaggaatcaataattttgaatgaatgaattcgaggtgttaattttagtctgtgtacttggaaatctagcttcacctagaatcagctgagattcatcagcatttatggcaggagctaagacatttcacagcttactcatcattttctctaagaggctgggtcaaccrgttagctcttggtcctgcttgtattctgagagtcagaacctgtggtttagacactggcaattgatatggttgtagagaagcagcatggttgagttgagagcatggattctggagctaggtggctggggttcaaatcccagctctactagtcactggctgcgtgatcttgggcaagtcacttaagtgttctgtgcttcagtttcccagtctgtcccagtggtgattctaatagctccatggggatcctaatagctcctatctgggaggattaaatgagttaatacatctgatgtttagagtggtgcctgacacttaggaagcactatatgtgtttatacatggaagagtggatagatggatggacttat

SEQ ID NO: 249411 - DNA, 504 bp, Homo sapiens
aaaaaaatctctgaagacattttaatgtatttcatcccatacctttttatgcatgtaaacttttaggaacacatttccatgccactaggtatccttgaaaaaataagggccaccatgtatagttgcacaggttgtgcactgcacaaagatagcatgtcacatatcttaagtatcatggagcttgtatgtctactatttcagtaccccagctgataaaagcttaagtatcttgttctagcaagatgaagctattrtgacaatttttgacagagaaaggggtgttttgtttaagttcacaatcagagaaatgggtgtcttgtttaatttcacaaccagagaaaggggtgtcttgtttaaattcatacagtggtgctgtatgggttggtggcaaccccagaaaagactgttgttaatatctgataatgttccactttatacgtgtattatattcatgtaacaatctctggctgtttgttttgccattataaataacagtgcagtaaa

SEQ ID NO: 249412 - DNA, 504 bp, Homo sapiens
aaaaaaatctctgaagacattttaatgtatttcatcccatacctttttatgcatgtaaacttttaggaacacatttccatgccactaggtatccttgaaaaaataagggccaccatgtatagttgcacaggttgtgcactgcacaaagatagcatgtcacatatcttaagtatcatggagcttgtatgtctactatttcagtaccccagctgataaaagcttaagtatcttgttctagcaagatgaagctattatgacaatttttgacagagaaaggggtgttttgtttaagttcacaatcagagaaatgggtgtcttgtttaatttcacaaccagagaaaggggtgtcttgtttaaattcatacagtggtgctgtatgggttggtggcaaccccagaaaagacygttgttaatatctgataatgttccactttatacgtgtattatattcatgtaacaatctctggctgtttgttttgccattataaataacagtgcagtaaa

SEQ ID NO: 249413 - DNA, 607 bp, Homo sapiens
taattttagtggctgaagaggctgcaagaagagagagaaagaggggtgtgtgtgtgtgtgtgtgtgtgtgtgtgtgtgtgtgtgtacgcacagtgatagaggctggagggggagaaatgacagataaatcagcttgggcaaagaaagctaatgggcagaggagcgagacccagctcagaaggtggtcagcaaatctaaagatgtgtgcccgagggtcaaggtggtggggggattcataggcaagtggtagagaggctattccatttgcagaggctctctctgtttgaggcgtgattcacctgtgccgtcctcaaggccattctgagaacaccactgttgttttcctccttttatgagtagggaaactgaggcattgaactgcttctattcttcagtaagaagcagggggaacatatggtagaagcaaagaaatacaaacatgagggctctcggggtctacgtgaytggctgtgacatccatgagagcggatcgcaggttgaaggaaacactggtggcagaaagtagctgaacatttggatttgggaatcccagtggacgtggcgaaaattctggcttttcccttcacaggctgcggggccactctga

SEQ ID NO: 249414 - DNA, 293 bp, Homo sapiens
ggatcggttggataatgcaacagcaactrcaggaagctgttaccacccacacctgaaggggtgaagaagagaaggttctaggctccacagacacagggagaattgtgcagaaaaggcagcctgaaagagggacgcacacaacccatagcaacctgaaacagaggaagccaaggaaataaatttaaattcccttaactggccgggcgcggtggctcatgcctataatcccaacactttgggagatcgaggtgtgtggatctctttaggtcaggagcttgagaccagcctggcca

SEQ ID NO: 249415 - DNA, 575 bp, Homo sapiens
aaattgaaataatatcaagcatcttctctaattacaatggaataaaactagaaatcaacaacagggggattttggaaagtatacaaaaacatggaaattaaataaaaatgctccagaatgrccagtgagttgatgaagaaattaaacaggaaatagaaaaatttctagatacaagtgataccataatctatgagacacataccaaaacctatgagacacagcaaaagcagtactaagagggaaatttatagctatgtgtctacatcaaaaaagaagaaaaacttcaaataagtaacctaatgatgcatcttaaagaactagaaaagcaagaacaaactgaaccccaaattagaataaataataaagatcagagcagaaataaatgaatttgaattgaagaaaacaatacaaaaggtcaacaaaaagtttgtttttttgaaaacataaacaaaattgacaaacctttatccagactatgaagataaaaaggggaatagacccaaagaaatcagaaatgaaaaaggagaaatcacaactgataccacagaaagtcaaagaattattagtggctactg

SEQ ID NO: 249416 - DNA, 611 bp, Homo sapiens
aagcttgggacttaggtataagagaaggttatgctaccttatataatactcagtcttagaaaatcagagctagagatttttcttgagggcttgaagaaataagcggccatttggagaagcccacatggcaaactataggtagcttctagaaactctaggcaacctctagaaactgagggtggcttccatctgacagccagcaaaaagctggggctctcagttatacactgcaagcatatgaattctgcccacagtctgaaggagcttggaagaggattttttccccacttgaacctccagatgagaaagtgtctagccaataccttgaatacagcctgagtagatcacttagctaagctgtgcccaggctttgatccacagagactgcgagataatgtttgtgttgttttaaacctctaagattttaataagttgtaacacagtaatagaaaactaatacatttggtcatgtccaagtgtgttgtgttgttcagcatagtgccrttgtataataaacacaatgctttctcatctaatttgagaacgaataactccattgtgctttaaaagcacgaccgtgaaagtccactttctctattggttttgacatg

SEQ ID NO: 249417 - DNA, 538 bp, Homo sapiens
acctgttgctgtgtcttagccagaagactggactctcctgacattgatacttgtcccaaccacaactaagtttgctctattctttttgcgttgtgctttggttgaccctattgtgggcccaaactttgacacactgcttggccctgtagaacttttttttccccacttatagccacattgtgggggtcctggcctggtttcagcactcactggattttcaatggagaaaatatttgcaaattttgcarttgtacctaggctcactctgctgaaattccatgagcaagaaataatgatgatagagcagtgagtgctcaaaaatttgttgaatgcagaacaaaggaggctaggcaagctgcctaggtttgcacggtgaatgacagggagaactaagttttaaacccaggtctttctaattccagagctcaagcacttagtcactgtgccgtaaggctccattggaaatcagccacttacagtagggctgggtttatgttgctcttgtgtgcaagtttaataggaacccaacaacaggcag

SEQ ID NO: 249418 - DNA, 618 bp, Homo sapiens
gaattacactgattttcaaatgttaaatcagccttatattactagaagaaacccaattagatcttgatatattatctgtttcatatatctttgcactttgttaatatttatataggatttttactcttgaatctttaccttagggtctatttctggggaaacctactataagacagaagtgtataatttaggatgaattcagcatcaaatcacaaaaaaacttagccatgcttaaacaaatagtgattacttttcttacacataaaaactacagtgcttaaaactgatagaattgatttacttgtttaatgatactatcagaaacctagtttctttttaaccattttttctctatcttttttatttttgcatttttwtcataatggttgatactgcatattgtgacttagagcctcacaatctcaaactagagttctaggaaaggaagaggccgcggtagggcttttcccaagtgcggttatttataaaggaagggaagctccagaatacatgtccttggctagaactaggtcacatgcagattcccagagcaatcaccggcagaagagtgtggaattcctatgactgagattaaaccaatcctgattcatcttctat

SEQ ID NO: 249419 - DNA, 579 bp, Homo sapiens
ttttttgagacacaatcttgctctgtcaccaggctggagtgcagtggtgtggtcatggctcactgctgccttgatctccccagcttgaacaattctcccatctcagcctcatgggtagctgggaatacaggcatgtgtcaaaatgcccagctaatttattttattttttttgtagaattggagtctcattatgttgcccaggctggtctctagttcttgggctcaagcggtcttcctgtcttggcctcccaaatggttgagattacaggcatgagccactgggcctggctaaaaagcttgcttttaaattaaatctatttttacatggttatccttgagttcctgattaattctaycatttattcattcatctattcaataagtatttagcgagtgcttattatattttgggctccataatgggtgtatacaaaagcaaacaggacatgctaagaattgctgtgttttgaatacaaaaatagatgcagaaagaagcacataagctggagtgaaatatgctgctgatcctctgggaaaagttcccagctcagcagtctgacaatgacagcacgagttatg

SEQ ID NO: 249420 - DNA, 474 bp, Homo sapiens
ttttctctgctttccacattgatctcttccccactgagttagctgctgcttccatgctttcgcttcacgttttgtaataaatgcattcccaggaaaataactaggaattatttatgctataggctaaaactaaagaaataaattcagtcatcagccaggaagtcaaaggacatgggactttctaactaatttatccttactttacatgacatagattcataaagaccaagggtttctaaagtgggggaggaggagagtaggccgggctcggtggctcatgcctgtartcccagcactttggaaggctgaggcaggtggatcacctgaggtcaggagttcgagaccagcctagccaacatggcgaagccctgtctctaataaaatacaaaaattagccgggtgtggtggcatgtgactgtaatctcagctactctggaggctgaggcaggagaatcacttgaacttgggaggagg

SEQ ID NO: 249421 - DNA, 550 bp, Homo sapiens
cttgctcttgttgcccaggctggagtacagtggcacgatctcgacacactgcaacctctgcctctggggttcaagtgattctcatgcctcagcctccggagtagctgtggcataaccacaggtgtgtgccaccatgcctgcctaatttttgtatttttaatagagacggggttttgccatgttggccagactggtcttgaactcctggcktcatataatctgcctaccttggcctcccaaattactgggattacaggagtgagccaccatgcctggccggatgattttcctaagtgttggaaaacaagtgagttaggcatacatgaactgccccagaggacttgtctggttcttccctgatagtggaggagagccaaaaataagataataaggtcccagattaatgaaatcaaaatgtaagcgttgtctctttttggcatgggtcatggtgggaatgatttcaagctgagtcatgtgccacagaaggacaacaaatgaagacttggagtcacaatgttttcattttctggtctttccaactcatcatgta

SEQ ID NO: 249422 - DNA, 582 bp, Homo sapiens
aaatctctgttcatgatgtcacattgctaacttgaaattggtcatagtggaagtatttacacaagggaaataaataaatgctataaatcaggatatgccctcccaccaccaagatggttttgcaacatttatcagctcacagctggtaatagaccatccccaaatagaccatatgctgggggaaaactagaccaaagagggttgattttttttgacagagrgatgaatacagcaaatcattttgattctgtaaatggcttttttttaaagggttcatatttctctcttaatcctagaatgtagtcctcatactttgatgtgaccgtttgggtgcacagaaattccagcccctctaacatggctggggccttgaactctacccctgtctctccagcaccacgaggcagctcagctggtgctgaggtttttaacctcccagctgctgttctcttctggactttctgtagcacaatcctgtgcacatgcaatttagtgtcagctgactacaaaagaggaatttgtttgcagattttgaggttcttttctctcgggtccctgctccttgagtctttgcccttacat

SEQ ID NO: 249423 - DNA, 582 bp, Homo sapiens
aaatctctgttcatgatgtcacattgctaacttgaaattggtcatagtggaagtatttacacaagggaaataaataaatgctataaatcaggatatgccctcccaccaccaagatggttttgcaacatttatcagctcacagctggtaatagaccatccccaaatagaccatatgctgggggaaaactagaccaaagagggttgattttttttgacagagggatgaatacagcaawtcattttgattctgtaaatggcttttttttaaagggttcatatttctctcttaatcctagaatgtagtcctcatactttgatgtgaccgtttgggtgcacagaaattccagcccctctaacatggctggggccttgaactctacccctgtctctccagcaccacgaggcagctcagctggtgctgaggtttttaacctcccagctgctgttctcttctggactttctgtagcacaatcctgtgcacatgcaatttagtgtcagctgactacaaaagaggaatttgtttgcagattttgaggttcttttctctcgggtccctgctccttgagtctttgcccttacat

SEQ ID NO: 249424 - DNA, 582 bp, Homo sapiens
aaatctctgttcatgatgtcacattgctaacttgaaattggtcatagtggaagtatttacacaagggaaataaataaatgctataaatcaggatatgccctcccaccaccaagatggttttgcaacatttatcagctcacagctggtaatagaccatccccaaatagaccatatgctgggggaaaactagaccaaagagggttgattttttttgacagagggatgaatacagcaaatcattttgattctgtaaatggcttttttttaaagggttcatatttctctcttaatcctagaatgtagtcctcatactttgatgtgaccgtttgggtgcacagaaattccagcccctctaacatggctggggccttgaactctacccctgtctctccagcaccasgaggcagctcagctggtgctgaggtttttaacctcccagctgctgttctcttctggactttctgtagcacaatcctgtgcacatgcaatttagtgtcagctgactacaaaagaggaatttgtttgcagattttgaggttcttttctctcgggtccctgctccttgagtctttgcccttacat

SEQ ID NO: 249425 - DNA, 617 bp, Homo sapiens
tctttgcccttacattctaatctctttggctgccctttcttggagatctgctttgtgagcccagggagaccactgcttctgctagggctccatttattcttcagctctgtaaattgggaaatgtttttaggaaaaaaagccaaagtgattatagagttcatttcctgtgtttcctttgttcaaggaacatgcagtcccctaaatactgcctgcattgactgctctgtaatgccttgaagtaatttttaaatackttgttcagctttcctaattgcattcagcatgagagttagcccagtatcatctacattgtcacagccagagctagaaatctgaaggaaaacttttaagtatagaaatattgtcaagtcttcaacaaaactaacttcaaaatccattcagtgtttgataatcacagttgagggcagttttcacttagaaaaatttcagtcttggccctgaaccaaaaaaataggaataaaactttaccactgctaaaccatggaactgctgtatggcatgataagtgaggctatttggcttctattctgacaagacaaacaccaccagcaatggttttatataattttcatgggtcgcaaaatattcttcttcgg

SEQ ID NO: 249426 - DNA, 617 bp, Homo sapiens
tctttgcccttacattctaatctctttggctgccctttcttggagatctgctttgtgagcccagggagaccactgcttctgctagggctccatttattcttcagctctgtaaattgggaaatgtttttaggaaaaaaagccaaagtgattatagagttcatttcctgtgtttcctttgttcaaggaacatgcagtcccctaaatactgcctgcattgactgctctgtaatgccttgaagtaatttttaaatactttgttcagctttcctaattgcattcagcatgagagttagcccagtatcatctayattgtcacagccagagctagaaatctgaaggaaaacttttaagtatagaaatattgtcaagtcttcaacaaaactaacttcaaaatccattcagtgtttgataatcacagttgagggcagttttcacttagaaaaatttcagtcttggccctgaaccaaaaaaataggaataaaactttaccactgctaaaccatggaactgctgtatggcatgataagtgaggctatttggcttctattctgacaagacaaacaccaccagcaatggttttatataattttcatgggtcgcaaaatattcttcttcgg

SEQ ID NO: 249427 - DNA, 517 bp, Homo sapiens
agagctcccatatacaatcctccccacacacagcctcctctaccatcaacatctcacatcagagtaattacattttttgtaaccaatgaaccaacattgacacacaaatatcactcatagttagtttcgattcactcatagtgttgtacattatacaggttttgacaaatgtatgatgacatgtactcacgattacagtatcatatagaataacttcactgccataaaaatcttctctgctctgatttattsctctcacctgctaggaaactggaaaccactgattctttcagtatctccataggtttgccatttccagaatgccataaagttggagccaaacagatataattattttcagattagcttctttcacttacttgtatgcgattaatgttttgatatgctttgactgtgacctcacccaaatctcatcttgaacagtagttcccataatccccacgtgttgtgaggatttcacttagttatatgcaattaaggttctgatatggtttgg

SEQ ID NO: 249428 - DNA, 517 bp, Homo sapiens
agagctcccatatacaatcctccccacacacagcctcctctaccatcaacatctcacatcagagtaattacattttttgtaaccaatgaaccaacattgacacacaaatatcactcatagttagtttcgattcactcatagtgttgtacattatacaggttttgacaaatgtatgatgacatgtactcacgattacagtatcatatagaataacttcactgccataaaaatcttctctgctctgatttattcctctcacctgctaggaaactggaaaccactgattctttcagtatctccataggtttgccatttccagaatgccataaagttggagccaaasagatataattattttcagattagcttctttcacttacttgtatgcgattaatgttttgatatgctttgactgtgacctcacccaaatctcatcttgaacagtagttcccataatccccacgtgttgtgaggatttcacttagttatatgcaattaaggttctgatatggtttgg

SEQ ID NO: 249429 - DNA, 344 bp, Homo sapiens
tgattatttttagacaggcagctagatattagacatacatcaatgtgcaggacactcaaaaggtaatagtaaataggawgacatttaattctcctttttttttgccgatgtcatatttttgttgatggattatatttctgggagaaaggaggtttctagatgagtagtacattctttcaaattgaaaaatatgaaacgtgttaagagttcctagggacttgactgaataatcagttctaggagctttgtctgtctataagacccaaatttgcttccctgcaagagtgtattggtccttggagcccacaggaagcaaatgttgacagcagcgcttaaatcagtgt

SEQ ID NO: 249430 - DNA, 344 bp, Homo sapiens
tgattatttttagacaggcagctagatattagacatacatcaatgtgcaggacactcaaaaggtaatagtaaataggatgacatttaattctcctttttttttgccgatgtcatatttttgttgatggattatatttctgggagaaaggaggtttctagatragtagtacattctttcaaattgaaaaatatgaaacgtgttaagagttcctagggacttgactgaataatcagttctaggagctttgtctgtctataagacccaaatttgcttccctgcaagagtgtattggtccttggagcccacaggaagcaaatgttgacagcagcgcttaaatcagtgt

SEQ ID NO: 249431 - DNA, 569 bp, Homo sapiens
taatataaacaagcttgagaaagagctacttttgttatgttgataatattattattacattaataacgccagcattatacaggagaactacggaatactaaagtgagataggaattccgtattttatcttcaaatttagctctcttttcacttaatgtggctgcacaaataaatcacagtcattatcttaatatactaacaagttattcttattccttaatgatgtagaaatcttaagtaaattttttttggcttaatttgagttgccataaatctacttgaaagcaaaattattttcataaatgcatacagctccccaatataaaattagccccaaactagtgaggtcagtaaggttttactggccttacttaatttaagtttaatttgaaaactaaaccaaatcatacttcacatacctcctttgaacttgacattgagacccaaatgactaacactgwataccaaaactttgtaactggcatttcttagcaaaaattttaactcattaaaagtatatcactaaagaaaatattacttcagctggtaatgatcaacactattaacag

SEQ ID NO: 249432 - DNA, 578 bp, Homo sapiens
  misc_feature (1)...(578): n = A,T,C or G
atgcaaaattgcaaatattttctccattgaaaatccagtgagtgctgaaaccaggccaggacccccacaatgtggctataagtggggaaaaaaaagttctacagggccaagcagtgtgtcaaagtntgggcccacaatagggtcaaccaaagcacaacgcaaaaagaatagagcaaacttagttgtggtgggacaagtatcaagtcaggagagtccagtcttctggctaagacacagcaacaggtaaaatcctggctatattcaaaaaacaggcatttaagaggccttacaatgttcctggtcttcagctaccactgcacaattcactattactagagataaatgagcaagaaagaggtgaagtgagaattcccataaatctcagcttaccactttccgtatatcacctttttacagatggacacrtacctgtgttatacatgacaagtcatccaatatgtgttttccaatgtaagggttgaataggcccccaaaatatatgtccacccagaactgtgaatgtgatctgttgaaaagagggtcttgtggatataattaaggatcttaagatgagatct

SEQ ID NO: 249433 - DNA, 578 bp, Homo sapiens
  misc_feature (1)...(578): n = A,T,C or G
atgcaaaattgcaaatattttctccattgaaaatccagtgagtgctgaaaccaggccaggacccccacaatgtggctataagtggggaaaaaaaagttctacagggccaagcagtgtgtcaaagtntgggcccacaatagggtcaaccaaagcacaacgcaaaaagaatagagcaaacttagttgtggtgggacaagtatcaagtcaggagagtccagtcttctggctaagacacagcaacaggtaaaatcctggctatattcaaaaaacaggcatttaagaggccttacaatgttcctggtcttcagctaccactgcacaattcactattactagagataaatgagcaagaaagaggtgaagtgagaattcccataaatctcagcttaccactttccgtatatcacctttttacagatggacacatayctgtgttatacatgacaagtcatccaatatgtgttttccaatgtaagggttgaataggcccccaaaatatatgtccacccagaactgtgaatgtgatctgttgaaaagagggtcttgtggatataattaaggatcttaagatgagatct

SEQ ID NO: 249434 - DNA, 582 bp, Homo sapiens
gcaagccttaatgatcacatgagctaattctcacaagagaaataaaacctctctctctttctctatttatatctttatgtcttcacattctattggttctgtttctctgaagaatccagacaaagttggtcttgctagaagtgtatcgtttttattgaccttttcaaagaactatgtctttattttattaattttctctatgcttttctggtttcaacttcattgatttcttctcttagttttatttattccttccttctgtttcctgtgggcttattttgcttttctttttctagagttttcatgtgagagcttagattattgatttgaaactctcctcttttctaaagtatgcgtttagtactgtaagtttttttctcagyactgatataactatatgccacaaattttgatatgtttaattttattttctttcagttcagtatatatgtttatttctttgagacttcctctttgacccatggattatctagaaacatctcatttagtttacaagtgtttggagatccttctgctgtctttctggcatttatttctgctttaatttcattgtggttagag

SEQ ID NO: 249435 - DNA, 627 bp, Homo sapiens
ttcaacattttcagcccagggaacaaaaatagcagccagctgtttctgctaccagagacccatgggtacccaagtggcatggggaggctggagcatggctcattgcttactgtgattctgctctttttttctttctcaggccctgcccaggctgagctgcttcagggcatcctgaggccctgactgccagctgaaggcgtataatttttccctcygtgtgccccacctacccgtccaagaccctctgtgctccccaccatcctggaccaaccaaaagctgaacggatgccacactgtgctggggccccttgacctcagcagagccgcttcctggtgctacgcagcctccacactcagagcccgtggactgggctggcctaagggccagggctgatggtactgctggcccaacactgctctctttgtgtttggtttttttgtttttgtttttattttgtttttttccaattctttacttttgatactgtgaagatctttcgtgccgaaagataaagcaacatttggacacagagttggcatgttggtgatttgtgggtctgggcggggagggagttgagggtgtgctcagaagcatgggctctcccttagtcactaaccctagcatgc

SEQ ID NO: 249436 - DNA, 464 bp, Homo sapiens
attcctcttcggccacctctgtttctctgttcctcttcacagcaaaaactgttcaaaagagttgttgattactttcatttccactttctcacccccattctcccctcaattaactctccttcatccccatgatgccattatgtggcttttattagagtcacsaaccttattctccaaaacaaaagcaacaaggactttgacttctcagcagcactcagctctggttcttgaaacacccccgttacttgctattcctcctacctcataacaatctccttcccagcctctactgctgccttctctgagttcttcccagggtcctaggctcagatgtagtgtagctcaaccctgctacacaaagaatctcctgaaagcctgtaaaaatgtccatgcatgttctgtgagtgatctaccaagaaaataaaaaattttaaaaatcaaatgcccatgcctgggcccacacg

SEQ ID NO: 249437 - DNA, 464 bp, Homo sapiens
attcctcttcggccacctctgtttctctgttcctcttcacagcaaaaactgttcaaaagagttgttgattactttcatttccactttctcacccccattctcccctcaattaactctccttcatccccatgatgccattatgtggcttttattagagtcacgaaccttattctccaaaacaaaagcaacaaggactttgacttctcagcagcactcrgctctggttcttgaaacacccccgttacttgctattcctcctacctcataacaatctccttcccagcctctactgctgccttctctgagttcttcccagggtcctaggctcagatgtagtgtagctcaaccctgctacacaaagaatctcctgaaagcctgtaaaaatgtccatgcatgttctgtgagtgatctaccaagaaaataaaaaattttaaaaatcaaatgcccatgcctgggcccacacg

SEQ ID NO: 249438 - DNA, 548 bp, Homo sapiens
aatcagttggctgtaaatttgtggatttatttctagattctccatgtgtctgtttttatgctaatgccatgctgctttagttactatagccttgtcacagatttggaagtcaggtagtgtgatatctccagctttgttcttttttgctcaggattgctttggctattcagaatcttttgtggttccatataaattttgtaatttttttttatttctgtgaaaaatgactttttttaagaaaataaagattgcgttgtatctgtagattgctttgggaagtatggtcattttaacaatgttaatctttccaatctatgagcatgggatctatttccttttgtttgtgtcctcttcaatttctttcatcagtgttttgtggttttccatgtagaagtctttcatcttcttgattaaatttattctagttagttttkgggtagccattgtaaatggattgctttcttgatttttcacctaatttgttattgatgtatagaaatgctactaatttttatatgttgattttgtatcctgcaactttattaaat

SEQ ID NO: 249439 - DNA, 546 bp, Homo sapiens
tatgcaattaaagcaaaagaaagggagtggggagagtaaaattaattgagtgcttcctctgtgccaggcactgtgcctcgcacagattatttaatctttacaactctgtgaggattgtcttattgtaccattgaggaagcttaggttcaggaatggcaaataactcacccaaatcacacaactgataatttagttgtgttggttttcaaaggttgctcttttcccacaatgtactatctctggtgatgtcacagatgaattaagaagtacttaaaagagccaaagggattttagagataatgtcatcaatcccatttgtytggagataaacagcatccagggaggttatattgggtccaaatgggcaacacagaactcaactaccagttcttcccagactcttcctctactcctcttcctacctcctcaccttattctgcatccccagtcatagtcaggattaaaatcttttgcatgtttcattatgggtggttaagagtaagcagcctctggaacctgggtttaaatccatgatctaccacttat

SEQ ID NO: 249440 - DNA, 535 bp, Homo sapiens
cttttagcctcacattctacataattatctcagcccctatggaaaagagaaggaatattctagaacaaattctgaatttactacagattcctaggcctttatccaaaactcatggggccagatgtgttttggagttcagagatatttttggatcttagaaaggtaatatgacacatatgctgtatattacataatatccttggcctgtaattcaacacaataatatttctttggctaaatgtaagactattcccacaaagtgagataaatagatactgctcatagccttacatcacataaattgaggttctgcttgtaaaattataaaagttgtttggtgttcagtaacccttctatctcagaattgtgggtaagtgattgtggayctgtcaaagagataatgtatcaaataagaaaattataaaggtggttccagtcttcagactgagttctgagctgcagggaccctactcagagacagagcagaattacattctttgaagaggttggtgttgtcctggaatgaaggctcagt

SEQ ID NO: 249441 - DNA, 601 bp, Homo sapiens
gcaatgaaagacttcaaaaaacatgaaaaaaaatcaaggaaacatgattccaccaaaggaacacagtaatattccagtaactgaacccaaagaaatggagacctatgaatttctgacaaagaattaaaaataattattttaagaaagctcagtgagctataaaacagcacagatagacaacttactgactcagaaaaacaatacatgaacaaaatcagaagtttaacagcaagatagaaataataaaaaagaaccaaacaaattctggagctgaacacaattactggactgaaaaattcaatagagagcttaagcaacaaacttgatcaagcatgagaaagaatctgtgaactcagagacacatcatatgttatttttcaatccagggagattgaaagaagaaagaaaaaagaattttaaaaartaaagaaagcctaagagatttataaaacaccatcaaccaaacctatatatgcattacgagagcctctgaaagaaaagagaaatgggaagaaagcttatttttaaaaaattggctgaaaacttcccaaatcttggggagggatatggacatcacgttcatgaagctcagaagtttcca

SEQ ID NO: 249442 - DNA, 554 bp, Homo sapiens
gaacccttttacactgctggtatattgtatacttcacatttgctaagatagtggacttaagtgttcttatcacacacccacaaatcaaaggtaactatgtgaggtaatggatatgttaattaactcaattgtggtaatcatttcacaatgtatgtgtatatcaaaacatcacatcatacaccttatacatatgtacaatttaatttgtcaactatacctcaataaaactgaaacacatatacatgtgcatgcgcgcacacacacacacagacactccctccctcttgttctggaaactgagtagcaggctctctcttgctgcttttgaattttcagtccccgacgtttgttctttttctcttttaaacttctggcattctaaaattgattaatacagagtttactaatagatttttttggattcatcttagcaatttaaaaaagcataaaaaaataaagtgaatgtttgtgaatgcaagttcatttcccatcaagacatgtttgtgaattytgtgttgcctggagccatgctgggaggttcagtgagagtcacc

SEQ ID NO: 249443 - DNA, 590 bp, Homo sapiens
cttgacagttttttgactcttcaagtttggcccttaaaattcttatggtttttacatgtatccaaatacataaaagtaaataattttttaaagcctcatgyacctttcgttttccctttgtttggctctcactaggttataaaagaatatatggtgataataaaacaaataggtaaaacaaaaccttagaatttgacataaggttttgtggataatgacttccaactgtgtttttacagtgacaattcacctatgttgtagctatagtgataacaattcttcagtgcctccaacttgccagcctccaaaattatctgtacctaatcctcagaatagtccaataagctagatgctattagccccatctgacaaatgagaaaactggaatttagaaagattagttaatggggctaaggtggcgcagtaagtggcagagttgtgattcaaatatagatccaagtaactccaaggctaatgtcctttcaccaaatactgcctttcagattagaaatattcagagtttttgtggtggccagcctccatgatggtccccagtgatcacccttcttggtattctcagccttggattg

SEQ ID NO: 249444 - DNA, 516 bp, Homo sapiens
tatgttgtagctatagtgataacaattcttcagtgcctccaacttgccagcctccaaaattatctgtacctaatcctcagaatagtccaataagctagatgctattagccccatctgacaaatgagaaaactggaatttagaaagattagttaatggggctaaggtggcgcagtaagtggcagagttgtgattcaaatatagatccaagtaactccaaggctaatgtcctttcaccaaatactgcctttcagattagaaatattcagagtttttgtggtggccagcctccawgatggtccccagtgatcacccttcttggtattctcagccttggattgtccacctcatgaaagtccctgagccagagctacctagccaatttacttccagattcagaacccacagatactgtgtaagataatacatgctcattgtttaagaggctaggatttggcataatatgctgtgaagcaattgacaactcatctaacccttatcattcttactcagcttgg

SEQ ID NO: 249445 - DNA, 516 bp, Homo sapiens
tatgttgtagctatagtgataacaattcttcagtgcctccaacttgccagcctccaaaattatctgtacctaatcctcagaatagtccaataagctagatgctattagccccatctgacaaatgagaaaactggaatttagaaagattagttaatggggctaaggtggcgcagtaagtggcagagttgtgattcaaatatagatccaagtaactccaaggctaatgtcctttcaccaaatactgcctttcagattagaaatattcagagtttttgtggtggccagcctccatgatggtccccagtgatcacccttcttggtattctcagccttggattgtccacctcatgaaagtccctgagccagagctacctagccaatttacttccagattcagaacccacagatactgtgtaagataatacatgctcattrtttaagaggctaggatttggcataatatgctgtgaagcaattgacaactcatctaacccttatcattcttactcagcttgg

SEQ ID NO: 249446 - DNA, 587 bp, Homo sapiens
acagtgctgcttcctttgaatgcttccatctcatccctgctcttggagaagtaacctcattttccaggacttggccccactccagcctctacatagcagtcttgtgaacaggcgctgagcccatgggcttgactagtgaaaatgggtcatggcacagtgtctgctgtgttcctgttcatctggtgccatagagtgctcctgtcctttttgtaacagcaggagaagtggggttggctaagaaaagacaaagctcttgagagaagagggcagaaggaaaraagggcaaacattttctttcctacccactggtggcagctagaatagaggagaagacacagatgcattggagccactaaatggaggcataatgagtgtgactgtggggctgccttggacaccaaggttatcgttgactgcagcctggagtggacctcatcccagaacacagaaggactttgagcaccctcctaacatttccgattagttctgcctcatttttgtcctcttcagttcccatcttgggccttgtttgtactcccaaaggccatggtgtcctattctacacactaactccactgagcaacttt

SEQ ID NO: 249447 - DNA, 526 bp, Homo sapiens
atacgttctaaacacagaaagaatcctagtttgaaaggaaaacacacttctagcagaaaatacatatgttcttawgacttcagggtatggaaggatttcttaagtcataaacaaatcataaagaaaataattaataaactaacaaattaaaataagaactcagacatagtagagagtgtaaacagacaagtcatatgttggaataaaatacttgcaacacataacaaaagatcagcgtctggagtattttaaaaaactatctcaaaagaagaaaacgatagtgacctctttcctccaaaagggatataaattcataagtaggcattttatagaagagaaaacaaaaaaagaccactaaacatgttgaaaagatgtttctcctcttagtttaacatatattaaacccacattgagttaccatttcacaccttgcagattgaaaaaggtaaaaaaatcagacaattccagtgttgctgagacagcagaataactgctggtggtagcgcaaatgacacagaactttgga

SEQ ID NO: 249448 - DNA, 509 bp, Homo sapiens
acttaggcaatacagtggatcttcctgggatcaaagtctgatatgctttagaggtctgctatcatgagaataggaaaggtagctttagggtagggtagatgacatctattaaagatctaaaaattgtattgttagtcctacaaactgttgccactacaatcccacttcatctcccacttccccttccgtacttccacttccctccatggtcaccaggcaaagttgagagtagtactcaccacccaactcttctcargtctatgggaagcccttcttctcaccattctaatgactgcactccaggttttttcactgaaggggcaatacacctttaatgtgagacaaacctggcttccaatcttgccttttgcctaacatgttaagggcccttggacatgctgagggtttactgcctgtgttatccagttttcttctctgcgaaatggtgatgagaaaaggcacttggcaaagctctgttttttctctttcctgcttaactctacaaagat

SEQ ID NO: 249449 - DNA, 509 bp, Homo sapiens
acttaggcaatacagtggatcttcctgggatcaaagtctgatatgctttagaggtctgctatcatgagaataggaaaggtagctttagggtagggtagatgacatctattaaagatctaaaaattgtattgttagtcctacaaactgttgccactacaatcccacttcatctcccacttccccttccgtacttccacttccctccatggtcaccaggcaaagttgagagtagtactcaccacccaactcttctcaggtctatgggaagcccttcttctcaccattctaatgactgcactccaggttttttcactgaaggggcaatacacctttaatgtgagacaaacctggcttccaatcttgccttttgcctaacatgttaagggcccttggacatgctgagggtttactgcctgtgtwatccagttttcttctctgcgaaatggtgatgagaaaaggcacttggcaaagctctgttttttctctttcctgcttaactctacaaagat

SEQ ID NO: 249450 - DNA, 580 bp, Homo sapiens
agttttaaatacagtgtgatcagaaacattcataaaccaataaccatgaatacagaaaagagcagagacaaattggccaacattgaaactgtgttgctttggggatgtttgaattatgcataatttttgcctctactttcctatacattataatgtatagtaaatattacaaatgtgtacatttttaatgtttacagtgaaggggaaaatctttattttttaacagagaatggtctttaacctaatcttttcttcactcatctattggagatacttgactgttagattaatgattttgaccactcatctgccraaaattgttatttcaaaagttaaagagcaaaatattaacaatataaaaataataaaatatttatttcttctattcatgctaccctggttaaataataaccatttatttttcaaaagaaaagaaatcttagtggtagcttcaatctggagtgctggacctgaattgtacatttactgatggagaactttctatctgttttacttgacttttatctgtcttacagataaaagaaacaaggtcagccagcatgattataataaagactta

SEQ ID NO: 249451 - DNA, 527 bp, Homo sapiens
tggcatttggtgactgattctaggagaagccatattgttttaggatgtcagttaagtaatacttttgcaagaagttactgctatatgatgccacgatctcaccctttccctggcttattcaaaatttgaatttgtccaaggagccaattagagtcactgcccsatttgtcgtgctctaacctggacatctgtacaataattggggcatatctgaggcttttccttaaaatatgtgtttaccaacatcagcctgggcttatgccagatcacactgggcctatgtttttcagcagaacagatgaacattcgcctttcactctgaactatggcatttcctattcaatttctcagttttgttcctgtatctcatactcatttaagaggatttcacaggacccacaggatttgtgaaaatcaatgggcagtaaatttacctctcagacaacctcagaatggccctcatttacatcagaaattgaaacaaggagatggaagtagtagaaatgggattactatagtccagcacc

SEQ ID NO: 249452 - DNA, 573 bp, Homo sapiens
aatgtggttgtaactgggaatagtggcatctgcctgtggtcccagctactagggaggccaaggtaggaggattgattgaacccaggaggctgaggctgcagtgagccatgatcacaccactgcactccagactgagtgagagaggaagaccctgcctcaagaaaaaaaaaaaaaaaaaaaaagtgattattctgggatatcatttgcccagcatcgccttagggccrtgggagatagaacacatttaagaccatccatccttttccaggaagagactgcctgaagtacacaaactataggaaaggaaatacatgcacgtccaaattcatgcaaccctcatatttcaaagaaacaaatatgtaatcgtccttccaaagcgtacattttgaaatacatttttaaaatttgatatgttagaaaacaactgagaaaatcattttaaagatagcagactataattctctttttatttagtctctactttctcattatccattgacttcattgctttcaggggatttgtgttaagcaggtagggacaaatgccagtggaatttgaattattacctttaa

SEQ ID NO: 249453 - DNA, 635 bp, Homo sapiens
ggaatgcatctgtttgtgggctggagattagagcccagggtcggggactatgaggaaagctgtctttttgggtggcctcacaagacatgcttcagaccctaagctgatacatctaaacttccttctctgataatctataattttctgtttttagaactacattgtcagcggtgtcagagagacccttctcagatgattcagccatttaaaaccagcagtaatatcttttgtttggaaattaagcaacagaaaggaattcaaacagtcaagctaagtagacgcattttttaaatgaaaatacatgcgtggttatactaccaagttaagtcaagtcagttttattccagagctttaaacaaggttaaaaaattatattttaatttatttgcattttttaacttaaaattttttcattccattaaaaaaagtttaaggtttttccctcgtcctctctcctagaatgcttaatatacattaggtatcttacaaagagttattggttgattttgaatattttttattctgttaagggtatttatttatcctcagttaacttctttccaaaaagatttaaagtgggtcttagaaagccraagtttagagatggataaatgttttgagaagatgaaaatgga

SEQ ID NO: 249454 - DNA, 567 bp, Homo sapiens
cagattggataaaagtaacttgagkccaaaggtcatgtctgactcaaatgtatattctcaagttttgattcatattttctgaatgaacaatgatgataagagttacttattgatattgaatgcttattatatgtctggtacagtgccaaatgttttgtttctaggactacctagggttgcatatcagctctgttccttactagaagtgagttcttgggttagttgtttagcctttctgtaccctgggtgcctcaaagacaaaatggaaatagtaatagtatctgttccataaagcagtttgagaatgacgtcagttaacatataaagcacttagaacagtgcctggcacagagcaggcagcttgtgcatattaactatcattattatttccaacctagacatatccccttctgacgtatgtgcccttttcataacagctatcctactttatgtcatacttaaaaatttttatgtagagagttccaaacttcctttgtctattacttgagccaaacttctatattgtagtattttcagtgctaagaatcccatgcattaccacgtggg

SEQ ID NO: 249455 - DNA, 633 bp, Homo sapiens
acaaacttttgggttacttctgtgtaaatagttccaacaactcaaagtcactttgtccttttactaaataatcttctctaattgttagccaagttgtacttctttttctctcataaaaactcgaaatttatctgaaaaataaatgtgggatttaaataatgcttttcccagcatgattttattactacatttgagttccttgttctctttttcttaacaatggtaacggccttagttattagagatgttagctcaaaaatgtaacaccgaaaagaatgtgaatgcattaaaggtctgttaagtttttcagtatagatctttattttagtgtttcaaactagcatctagaaaaaaactgagtaaaaactgtatatgttaatttcaaagtaataagtttattttaatgaaaggaattggtacagtatgttaaccaaatatgaattgatataagaagatagatttggatgttagatcccyccatctatttagaaaacatttaaattgttatgtattttaaattatagcacacacagaaagctaattttatgggcattttttaatttaatcttaaaaggaactgagctttttaatgtgtctgtcataaaatggtttaattaaatgaaattaagccag

SEQ ID NO: 249456 - DNA, 239 bp, Homo sapiens
  misc_feature (1)...(239): n = A,T,C or G
nnnnnntccaatttagagttgtgcatagaaggcctccttctttcaatcctgtcagtctatctctgtgattgtatgcataacctcatctggaaatggcttcaaaggtctaaatttgaggctctttatgaaagtggaggctgagtggccctgctagcaccccctggagaggacttgcagaaagctcttctgaggaggagctggggttgcccktgtcaccagaatccctcgccttctccttt

SEQ ID NO: 249457 - DNA, 567 bp, Homo sapiens
tgaggtgaggaaggcctcagcacactcccagatggggaggcagagaagtggagagaaggtgagaaggcctggtgatgagttctggttctgtcatggactagtcgtctcactttgcttagactactaacttttgtagacgccatttccttctgtataaatggatggggttggaacagatggtctctgaggtcccttccaaatctgattttcctgggctctaaatttagccacagtgctcggcattctggcagaagagttggtgactgagttyttcatggaggccttatctactggaggaaatgtgctgcctgtgctttttcacacagggtcccccagctcaccttgggcccctagaggtgtcctgggaactgtctcagagagtcatagtggggttagttgtgctggtgaggtgctctcatcaacccctcattttttaaccagggcaaatttcatctgtttttatagtggaattacatttaagacgtccttgaattaaaggggatccttcacttaaaaagatctttgaaagcctgtgctggtaaaaatggagggaaattaaaaaaaaaa

SEQ ID NO: 249458 - DNA, 549 bp, Homo sapiens
tgagggagaaagcagtatcaaggttgaatgagtttgttcaactctgggtatgtagtcgtggggtttaagtaggtgcatgggatttgcgtcacagtttcatgtgaaatattataatgttagtattagctaaagccaggaaaaccaaacctcatgccatgtgctacattgtgtgatatttgggaaaagcctgacaaatagccttttacttttcctcaaggcaagtagcagtttatatcaggcaggcaaaaattgtagatttccttgtagtcacgatatacttagttaagattactgctgaaacaagagtgtagggggaaacacttttcatactaattttcaaggtggactggttagtggctggtgatcaaatgagccaacggttaagacagcccccactagttagacatgttagaggattttacttgctgttgaagatagtggcttcrtgcacaaaggaggattgttgtgtgcacttctcaaaatgcttcataataattttcaccagcagtccctgtggaaggtttattcttgagggaagggagggtaggg

SEQ ID NO: 249459 - DNA, 455 bp, Homo sapiens
gagggagttcctgttttcataggagaaaatctcagtgttggccatgagtatgcagtgagaggcaaatgtagacatagaagccactgtgctctgcctcaaacagaatgactccatgccccakgcccccaaaactagatctttatctatgcacagaaaggtgtcagcatcagccagcctccccatctactaacatgtacttgtctgtaggttggaaccttgatgtaaccatctagagtgtttgatccaaaaggattctagaaatctcacgagatcctctgtttcttcttttactacaacctgctacagactctgaagctgttgttgtggtgtgtgtgttgagggatgtctagagtaaacaacatatcaaggccaaacatttattcattcattgttcagatgtgtaaggaacacctaccatgagccagtgtctttgctgggtgatataaatacagcag

SEQ ID NO: 249460 - DNA, 485 bp, Homo sapiens
cctgccttcctctctgtctgccagtgaagggagaagttcataaaagatagtcattgtccctcttctcctcaataattagttactttattcagcattcttaactattctccaacatagtttaatttatggtgttaataatcaaaatagtgataatttttgttgcggtacataggtgcagcttgttcactgcataagagcatctggctaagtgggcagsatggggcctaaaatcaagtctgtactatgccacccatgctgtgccgcctgaggctgcaatagcccaaagagggcatctttttctaatccaccctaaggagctgcatgggctaccacagtcctaggagttccctatcaccagtgcttgtatcctgcctagtggactttgtcattgccctcaggcctgagccccgtagggttcctaggttctggcttcactgctctggaggagggtgttgacaatgagtggcacgttgcctgtgcctttg

SEQ ID NO: 249461 - DNA, 538 bp, Homo sapiens
ttggataatacaaatggttgtggatcctgtcttctagattacaaatttatttattcaatacgcttttattggctactctacatcagccactttgctgagcatttcaaatacaaagctcaggttccggtgttagaattcagactactacaaaggaaatttgagcacrttgttataagtgtatgataggaatagaaacaatactaaggaaccatggagaaaaaagggactaattttaattgagagtcaggaaagacttcatagaagtcataatgttctagctgtgtcttagaaagggtgttgctagagaatggagtgtggaagttgttcccagacggaagtgggaaaatgtgaagaaggtgaatggtaagaagttcaatgtggctggagcagatcataaaggggagaagaaagagatgatgaaacttcagggattagtctggcttagattttggagaacgttttatggcatggtagggagtttgtatttaggtcagataaaaactagagatctttaagaaaggaagtaacacggcttgca

SEQ ID NO: 249462 - DNA, 563 bp, Homo sapiens
taacatctatgcctttagctttcccttagcagtcttcattctgcrtaagaatttggtttttggtttaaggagtgaattcacaaccaactgggagggggaaaaaagcaaaagcgagttaagttggaaggcatgaattctaatccaggctttgccaatgaccacccctaccaccataaaacattactcaaataattagctcctgtgttaagtacctggaattaccgagacccccctccccccgccccactcagctccctccctccttcaaagagctcgcagtctggccaactcaaaaaaatacagtataaaaataagtgtggcagccaagtatcaggccctacaccgatagacagagatggtattttaacactcaacttaaaggccttaaaaatcaaaaagtacacttcttttcttctgatgactggtcaaaatgcaggtctaggacaggcgctcctctaaattttgcttccttactggccgccacccctactcggatgcaatctgaacctcccgcctctctgcccggaaataaattcagttactttttttcttggtgtcgccag

SEQ ID NO: 249463 - DNA, 563 bp, Homo sapiens
taacatctatgcctttagctttcccttagcagtcttcattctgcgtaagaatttggtttttggtttaaggagtgaattcacaaccaactgggagggggaaaaaagcaaaagcgagttaagttggaaggcatgaattctaatccaggctttgccaatgaccacccctaccaccataaaacattactcaaataattagctcctgtgttaagtacctggaattaccgagacccccctccccccgccccactcagctccctccctccttcaaagagctcgcagtctggccaactcaaaaaaatacagtataaaaataagtgtggcagccaagtatcaggccctacaccgatagacagagatggtattttaacactcaacttaaaggccttaaaaatcaaaaagtacacttcttttcttctgatgactggtcaaaatgcaggtctaggacaggcgctcctctaaattttgcttcyttactggccgccacccctactcggatgcaatctgaacctcccgcctctctgcccggaaataaattcagttactttttttcttggtgtcgccag

SEQ ID NO: 249464 - DNA, 615 bp, Homo sapiens
  misc_feature (1)...(615): n = A,T,C or G
aaggattttcagctaccttactgtggtcactggaggaaggctgctgttgactggctgactctggagcaagggtactggagggagacccttgccgattggctgttatctgtgagtgtggggcatctcagattactgagactgattagctctcagacgctttgggctcttatggattttctccatttcagaagcttgtagggaggctgttttctgactgattgatgatgagaagcatggccataggagtgaagcaatggctgtttggctgattttcagagcctgtgtgtcgatacaaagtcgtctgggaatgaacaatgcttactcatttacaactcggaaatgtggccaaaaaaatagtcttttactttcttaaatatgaaaaataagtacttttaattctcagtttcctcttttggtcttctcttagccaaatctgcaggagagacaatgagggattgtccagatgtttatttccacaaagaatgatttytcgctggtgttgctatttaagtaatttaagtactaattatgggtgcagaaaaaatagctctagctgctgaatttttctactttattcgggcgggaaaannngccaaatacagggcatttaatgtg

SEQ ID NO: 249465 - DNA, 547 bp, Homo sapiens
gttcttggagttatttctaaacagaactaacatcagaattgtctgaatcatcaaaattgtctattttagaacaatcaaatttatcaaatgaatcttcagccaaccactgttcgagaacagtcttaacatcacacattagaatgctatgttttccaggatttgatattttcagccattgagaattactatattttgtaaatggaaataccattactaaaaacagaattctataaatagaatgatgtcctttgtttccaaagtggatgtgctagagcaatgcgaaaataataataaaagtgagatatttcgtggcaaagttatctcggggtaaatgctgcagcagcaagygctgctcagggcaaatgagaaaaacgttaattttatgggccgactttactggactgtgggatgcccagatagctggtaaaacattatttccagtgtgtctgtgaggttgtttctggaaaaaattagcatttgaattagtagagtgagtacagaagatcactctcccaaagcaggggacaccattcatcctgctcaggac

SEQ ID NO: 249466 - DNA, 564 bp, Homo sapiens
ctagcaaactgaattcagtagcatattaaaaggattacatataatgactgttcccttcaaaacccaggttgaagtttaatttccaatgtggcagtattgagaagtaaggcctttaagaggtgattagatcatgagggttctgctctaatgaatggatgaatacattcttggaataatagatgtatgggatatcattagagggaaactgatggctttataagaaaaagaagagagaactgagctagcacattaacatattagcaagcttagctctctcacygtgtaatactctgcactgcctccagactctgtagggttcccaccagccagaagactctcaccagatgtgcccgcttgactttggacttctccacctcaataactgtaaaacataaattcctttttttataaattacccaatttcagctattttgttataagcaaaaaaacagactaagataatgccaagcaggacttattcttggaaagcaggaatgattcaacatataaaaatctatcaacataatacactgttaacagaataaaggatgaataacatatgat

SEQ ID NO: 249467 - DNA, 512 bp, Homo sapiens
gagagacagtaaaatgatgattgctagggaataaaaggagagggcaaaagggggttgttatttactagagttccagttttacaagatggtagagttctggagatgaatggtattgatagttatacaacattatgaatgtrtttaataccactgaactacacttaaaaatgagtaagatggtaaatcttatgttgtgtatttttaacataatttttaaaaattggggaaaaaaggtgacccttagtggcatgagtgaaattacatagcagggtgtgagggggactttcaaattttgttgctaaatattatattattttcacagtgaaaatgtaatcatgtatttcctgagcaacatattaaaagttatatgaattcaacaaaggaccagttatctagaacataaaaagaaatctcaaaactcagcactaataacaaccaatccaactagaaagtggtcaaaaggcatacatgatgttcaatatcattcaccataagaaaaataaaaattaaaa

SEQ ID NO: 249468 - DNA, 605 bp, Homo sapiens
gcagggggacctctctaagaagtcattgccaagggaaacaaagagttgagaaggcaaagcaactagcacctggctgctggccactgtaggggctgagtgcatgctgtgggattctagggtgctgctggctcaggcttaccttgactggattcttaacttcttatctttcctctctcttctggtttgactaaaagtgattacacagattattcccataaagcagttccaaacctatgtggaaaatcagctgaggccgtagcagattctcactttttactccctggatcaaaagtaatcagatcctaaaatagaatttgaaaggaaatytaaaattccaggcaagacttatacaattgtgaaatcattgtcttaccgtcttttgtttttgtgcaatcattagcctctttgattcatggctttctttgaaaacaagaattaccagcctacgctctaggaaaatgcaagtgtttacagatatataaaattttgctttataatttcagagagccacagaccatctcagcacctaagccaatgcctaaaggatgttaccagtagattagaataaaactatcaggtgatcgagggaaggaaatagtgaagca

SEQ ID NO: 249469 - DNA, 507 bp, Homo sapiens
aattatctgcacctgttccaccctcaacatatggggattatggggattaaaattcaagatgagatttgggtggggacacagagcctaaccatatcataagctaatcaatacagaaacagaaaaacaaataccacatcttttcacttataagttggagctaaacagtggatactcatggacataaakatggaaacaatagacactggagaccgctaaaggggcaagggaagggggagggcaagggttgaaaagctattgggtactatgatcactgtctgggtgacagggtcaatcataccccaaacctcagcatcatacagtatacccaggaaacaaacctacacatttattccttgaatctaaaataaaagttgaaattattttttaaaaattgaattaattagatgattttttctttttcactaggctgaccctttgacccttccttggttttcttggggcttttttttcttttatcagtgtatgttggtattttgggttgcaggc

SEQ ID NO: 249470 - DNA, 602 bp, Homo sapiens
ctattttatcttctagccataatcttttagcccttttgatgcaccctcagtgtccatatattttgaaataaccatgatctccagaaggttctataatcaagattgatacatggctctctgtgtcagctggtttcatcaactacttctataagtttaagttgttatttgtgactagggatattaatttagacacaaatgtacatggagtgacttaccttggtttaatttgcctttgttgaaattgcattctgtcagattattttggccaaatttccttctttagccctgtaattaggttagttcttagtccctaacttyctgagcataattttttttcctaattgtttgctttgggcttataaatgaaacttcttcctctaatctcaaaattcatttcatgtatggggctgttctgcagtgaacagatatatgcaggtctccccctcaaaggccaaggaagctgggaagccagagaaaagaggctgacaaatccagtttctcagaaagaaacatttgataggaacctatgaacagaagcaatgccttgggcagctgagagaccatagatttccacacctaccctcctgaaatattctttctat

SEQ ID NO: 249471 - DNA, 502 bp, Homo sapiens
agggcttgctgggaatgaatttattgtgaaaggactgagtttttacatctgggttttataagataaaacaagatcagcacacaagtacacagaagtctagaggcacatagaaacatgaagaagaaaacctcagggaaggtgtgaatctaatccagtggtctccaatctttttggcatcagagaccagttttgtggaagacaatttttccacagactagagtggagggatggcttcagggtgatygacctcagataatcaggcattagttagattctcataaggagtgcctagatccctggcacttcacaatagggtttgtgcttctatgagaatctaatgccagccgctgatctaacaggcggtggaacccaagtggtaatgctcacctgccgctcacttcttgctgtgtgacccagttccttacaggccatggactgataccagtctatgacctggggaatgggtacccctgatctaatccacatttcttccacagtaaag

SEQ ID NO: 249472 - DNA, 552 bp, Homo sapiens
  misc_feature (1)...(552): n = A,T,C or G
gaggattatggtcctagatttgtttttcttctctaaaagaatcgaatcctaagggattttagtgggaactcttttctggttcctgatcagctgcacattctgaatccttgtggtttatgaccaaacaactggttgaccaagtgagctaatatactgttgagactttggtgaagccctttatctattctagagtaaacagtgatggtttccatgaagattaagtagaaagctagaaaaacaagctcttntagaatttcattcaagtagccaagtctagacaacagtaaaaaaggagcagatagggtattattaaaacaaagatgttttaggcatgtgtaatatgacacagtaaaaacagcattgtccttgaagtaagctttcttgagtaaatcaactttttctgggcctcagtttttttcatatagggtttwtattggaatctaacatttattcatttattcatacatacatatatttatttctttattttattcaacaaatatttattaaacatattcttagctccagacacattgttaatcactggagaaa

SEQ ID NO: 249473 - DNA, 491 bp, Homo sapiens
ccagaccaccagaagtatccatgacccaaaatagatgaaaaacccrgctgaaggtagcttgggatcacaaagagagctttaaatatcttcattagcattgtgaatttagtcttgcaggcaaatgggagccactgaagggtttttttctttgttttggggaaggtgtttgtattagtcagggttctctagagggacagaactaatggaatagatatatatacatataaaggggagtttattaactcacatgatcacaaggtcccacaataggacatctgcaggctgaggagaaaggagagccagtccaagttcccaaactgaagaactcagagtccagtgttcgagggtaggaagcatccagcatgggagaaagatgtaggctgagaggctaggccagtctctctcttttcacacttttctgcctgctttttattctagccatgctggcagttggttagattgtgctcactcagattaagggtgggtctgcc

SEQ ID NO: 249474 - DNA, 495 bp, Homo sapiens
ctctgctgaggtcatccattggtgagcactcacatgggatacaaatatcttcacagtttttgaccactcagagaggtccatctacataactcttccccaaatttctttgtcaccaattttccaatcatgcttcttccaagtccctgtccatccagacaaaccattggctacagcccatgaatcagtatataatcacacatctggccaattcttcttccatgcaaatcccacaaccaggtgcactgctcaaagttctgcccactgggaagatttcccttcaccactgtccttcagggatgtcctagaaagaggctgtagtaytgcaactgaacacttttggggggtgcctgcatatcatgcagaaccatctgtgaaccaggccctagtcttctattcctctgccatctgatcatagggaactccccatgaagccagcagtgcaggctgggggagagatggcagggttgcaggagtgaagaccgtaggcatttgagc

SEQ ID NO: 249475 - DNA, 567 bp, Homo sapiens
tggtgagcactcacatgggatacaaatatcttcacagtttttgaccactcagagaggtccatctacataactcttccccaaatttctttgtcaccaattttccaatcatgcttcttccaagtccctgtccatccagacaaaccattggctacagcccatgaatcagtatataatcacacatctggccaattcttcttccatgcaaatcccacaaccaggtgcactgctcaaagttctgcccactgggaagatttcccttcaccactgtccttcagggatgtcctagaaagaggctgtagtattgcaactgaacacttttggggggtgyctgcatatcatgcagaaccatctgtgaaccaggccctagtcttctattcctctgccatctgatcatagggaactccccatgaagccagcagtgcaggctgggggagagatggcagggttgcaggagtgaagaccgtaggcatttgagccacttcctcatgtaacttacttgtgccttcagaacgtgctcaagcccaatcatgtatataccccttccatttgacgatggaatgctgccgt

SEQ ID NO: 249476 - DNA, 445 bp, Homo sapiens
cttgacaggtcccacaccactggacccctagaaattttacttaggtagaagttccctgaatcttattcagatttatttcacatactctggcatgcaaacatctcaccaataagtccagtgtgtctgctacttcttgttcactggatccaatcagtataatgtcatcaatgtaatgaacagtgtgatatcctgcagaagcgaaaaccaatcaaggtctctccgaataagattatgacacaaagttggaragctgatataccctaaggtaggacagtaaaggtatacttgccagctgaaggcaaattgcttctggtgggccttgtggacaggaatggagaaaaaggcatttgccaagtcaatggctgcacaccaggtacgaggagatgtgttaatttgctcaagcaatgaaaccacatctggtacagtagctgcaagaggagtcacc

SEQ ID NO: 249477 - DNA, 510 bp, Homo sapiens
ttggggtggaataacacaaggacccctgtggccaccatcactatgactgcactggctcagaactgaaggcagcacagtgctggatctaccgtaaccactccctggctactctctatgttcactgatggcccccaggctctacaattaacagatgtcaaggccagccaggcctgtgtccttcccttcagggcagtaaactatcccatgccccaggtgggtccagaggtgccatccaggagttagggactacagtcaaaaaccttagaaatctacctggtgytctattatattgtggctgttctggtgctcaaaccacacagtgcagttcttcccactcttccgtgttttttccaaaagcaggagactcaccccatagctaccaccaccccaggccttgaggagtactgtaagactactattgatgttcccttaaggtccaagttctcttaagtcaatttgtcatgaatgctgcctggcctgggactcacctttcagggaagtgggctcccc

SEQ ID NO: 249478 - DNA, 610 bp, Homo sapiens
atcttttctttctttccttcctgtcttgcttttagtgaagctaatttttttctggtggtatgatttaatttcttgcttgttattttttggtttatctgttgtatgttttttaatttgaagttaccatgaggcctgcaaagagtaccttataagccattattttaaaatgataaaaatgtaatcctgtttgcataaacaaacaaataagcaagcaaaaggaaaactaataaatactatataccttaacttcatcsattttaactttattgtctctatttatatcttattgtactgtgtatccttgaaaagttactgtagttattatttttgattggttcatcaaaaagattggttctctttctacttaagatcattgtagtttacacaccacagttacagtgttataatactctgtgatttttttgtgtacttactattaccagtgagttttgtgccttcagatgattttttattgttcattaacgtctttttctttcagactgaaatattctctttggcatttcttgtaggacagatctgatattgaagaaatcctcagctttgtttgtctgggaaagtctttatttctccttcatatttgaaggatatt

SEQ ID NO: 249479 - DNA, 610 bp, Homo sapiens
atcttttctttctttccttcctgtcttgcttttagtgaagctaatttttttctggtggtatgatttaatttcttgcttgttattttttggtttatctgttgtatgttttttaatttgaagttaccatgaggcctgcaaagagtaccttataagccattattttaaaatgataaaaatgtaatcctgtttgcataaacaaacaaataagcaagcaaaaggaaaactaataaatactatataccttaacttcatccattttaactttattgtctctatttatatcttattgtactgtgtatccttgaaaagttactgtagttattatttttgattggttcatcaaaaagattggttctctttstacttaagatcattgtagtttacacaccacagttacagtgttataatactctgtgatttttttgtgtacttactattaccagtgagttttgtgccttcagatgattttttattgttcattaacgtctttttctttcagactgaaatattctctttggcatttcttgtaggacagatctgatattgaagaaatcctcagctttgtttgtctgggaaagtctttatttctccttcatatttgaaggatatt

SEQ ID NO: 249480 - DNA, 610 bp, Homo sapiens
gttgagagactagaaaatcttatagagatggattttgggtgtttctgaaacagttaaagcaaggaatgctgctcttacacaatataaacaaatgccccctacactgccccccccacactagatgttacaggctgaattctcactctaaaaggcaatcattactatgaaaagagacagattattaattgaacaaatcacttaaaagttctggaagacagttttctctctaggttaaaaatccatggtccagggccaggcacagtggcttgtgcctggaatcccagcactttcggaagccaaggcaggaagatcatttgagctcaggagttcaagacaaaccttggcaacatagtgagaccctttctctataaaaagaaaaaaactttttttaaaatccgttgtggtactaatgggataaattatagaggaaagtatacttggacatgatgtgtagaacaatgtaaatctctggacwccctgtgaccaattcgattttgcagatcagcatcgtgcaaagatctgtttacgcatccccaagactaccaccgattaatgaacaggacatttttctcaggctacaccgttaccggccagttccaaggaagatgat

SEQ ID NO: 249481 - DNA, 610 bp, Homo sapiens
gttgagagactagaaaatcttatagagatggattttgggtgtttctgaaacagttaaagcaaggaatgctgctcttacacaatataaacaaatgccccctacactgccccccccacactagatgttacaggctgaattctcactctaaaaggcaatcattactatgaaaagagacagattattaattgaacaaatcacttaaaagttctggaagacagttttctctctaggttaaaaatccatggtccagggccaggcacagtggcttgtgcctggaatcccagcactttcggaagccaaggcaggaagatcatttgagctcaggagttcaagacaaaccttggcaacatagtgagaccctttctctataaaaagaaaaaaactttttttaaaatccgttgtggtactaatgggataaattatagaggaaagtatacttggacatgatgtgtagaacaatgtaaatctctggactccctgtgaccaattcgattttgcagatcagcatcgtgcaaagatctgtttacgcatccmcaagactaccaccgattaatgaacaggacatttttctcaggctacaccgttaccggccagttccaaggaagatgat

SEQ ID NO: 249482 - DNA, 526 bp, Homo sapiens
ctatatttataaaatgagtataatagtacttataaatttgtcatgagatgaaatgagtcaatgtatataaattgtataaataattgcttggcatgttgtaaatgctacagaagtgtccaccattattaatatagtttgtagtattgtgatttattatagcacagacaataacctagacattaggaaatacaaatatgtaaaagagatagcccctgccctgtagcttattcctcatctctctgtctgagaagtaagttccaaatgaaaaggtcaacaggacagaaaattttatggagtgagggcttgaaatcagtcatacagattccagagccacatagtgcatgctggaaaagcacattctagttggtgaagtttgatggtagaggatataaaagatggatctaatagcagcatatgttcccttggtatctcaggagtcaatcagtgctgaaagagaagagatgtgtgaagacaaattccacctacmtcataatttttaaagcaccagtcttgctaaagcagaaat

SEQ ID NO: 249483 - DNA, 581 bp, Homo sapiens
attatttgactatttctttacctcctgctttagcctaatttgtattttagtgagccctctttactgcctgattggttgggtgtgagctgagttacaagccccgtgtttaaaagtagttgcagtcacctttcccagctagggcttargaattcttagtcggcctaggaaatccagcttgtcctgtctctcataatgactaatgatgttgagcatatttttatgtgattagttatttgtaaataatttttggtgaaatatccaagtattttgtccttttaaaaacttaattatctgttcttattgttgagttttaagagtttattatatattctagaaacaagtcagatgtgtgatttgtatatatttcctcccagtctgtgactggtcttttgtttgtttttttggacaaaggtcttgctgtgtcactgaggctggagtgcagtggagccattggctcactgcagctttcaacacctgagctcaggcaagcctactgcctacgcctactgagtggcagggactacaggcgtgcaccaccacacttggctgattttttatttttttgtagagatgtggtcttg

SEQ ID NO: 249484 - DNA, 581 bp, Homo sapiens
attatttgactatttctttacctcctgctttagcctaatttgtattttagtgagccctctttactgcctgattggttgggtgtgagctgagttacaagccccgtgtttaaaagtagttgcagtcacctttcccagctagggcttaggaattcttagtcggcctargaaatccagcttgtcctgtctctcataatgactaatgatgttgagcatatttttatgtgattagttatttgtaaataatttttggtgaaatatccaagtattttgtccttttaaaaacttaattatctgttcttattgttgagttttaagagtttattatatattctagaaacaagtcagatgtgtgatttgtatatatttcctcccagtctgtgactggtcttttgtttgtttttttggacaaaggtcttgctgtgtcactgaggctggagtgcagtggagccattggctcactgcagctttcaacacctgagctcaggcaagcctactgcctacgcctactgagtggcagggactacaggcgtgcaccaccacacttggctgattttttatttttttgtagagatgtggtcttg

SEQ ID NO: 249485 - DNA, 618 bp, Homo sapiens
catgataacctcaaacaaacaaaaaacatacaatgggtacacaaaaaataaaaagcaagaaactaaatcatatcaccagagaaaattaccttcactagaagaatataggaaggaaagaragaaggaagaggagaccacaaaacaaccagaaaacagataacaaaatggcaggagtaagtccttatcaattataacattgaatgtaaaaagactaaactctccaatcaaaatacatagactcattgagtggatgaaaaaaacaagacccagtgatctgttgcctacaagaaacacacttcatctgtaaagacacacatagactgaatataaaaggatggaaaaaatctatgccagtgtgaatcaaaaaggagcaggtgtcactacacttatgtgagacaaaatagatttgaagacagaaaactattaaaagaaacaaagaagttcactgtataataataaaggggtcaattcagcaagaggatatagcaattttaaatatatgtatgtgcctaacacaggagcacacagatatataaagcaaatattattagagctacagagagagataggctccaatacaataatagctgaggacttcaacacccctcattcagcatt

SEQ ID NO: 249486 - DNA, 520 bp, Homo sapiens
aaggagcaggtgtcactacacttatgtgagacaaaatagatttgaagacagaaaactattaaaagaaacaaagaagttcactgtataataataaaggggtcaattcagcaagaggatatagcaattttaaatatatgtatgtgcctaacacaggagcacacagatatataaagcaaatattattagagctacagagagagataggctccaatacaataatagctgaggacttcaacacccctcattcagcaytggacagatcttccagagagaaaatcagcaaagaaacatcagacttaatcttcactatagaccaaatggatctaatagatattgacagaacattcctccaatggctgcagaatacacattcttttcctcagcacatggataattctcaaggatagaccatatattaggtcacaaaataaaacattcaaaaaaattgaaataatatcaggcattttctctgaccacaatggagcaaaattagaaatcaataacaagaggaattttggaa

SEQ ID NO: 249487 - DNA, 520 bp, Homo sapiens
aaggagcaggtgtcactacacttatgtgagacaaaatagatttgaagacagaaaactattaaaagaaacaaagaagttcactgtataataataaaggggtcaattcagcaagaggatatagcaattttaaatatatgtatgtgcctaacacaggagcacacagatatataaagcaaatattattagagctacagagagagataggctccaatacaataatagctgaggacttcaacacccctcattcagcattggacagatcttccagagagaaaatcagcaaagaaacatcagacttaatctkcactatagaccaaatggatctaatagatattgacagaacattcctccaatggctgcagaatacacattcttttcctcagcacatggataattctcaaggatagaccatatattaggtcacaaaataaaacattcaaaaaaattgaaataatatcaggcattttctctgaccacaatggagcaaaattagaaatcaataacaagaggaattttggaa

SEQ ID NO: 249488 - DNA, 555 bp, Homo sapiens
atatatgacagacccacagatattaaatagtatcatactgtatggggaaaaactgaaagcctttcctctatgattgggaacataacacagatgcccactgtcaccactgttattcatcatagtactggaagccctagttagagtaatcagagaagattgaaaaaagggcatgtgaattgaaaaggaagaagccaaattgtccttttttgcagatgatataatcttgtatttaaaaaagctaaacctaaagatttcacaagaaagctactagaastgataaacaaattcagtaaagttgcaggatacaaaatcaacacacaaaaatcagagcatttctgtatgccaagagtgaacaatgtaaaaaataaaaactaaaaagtaattctatcaacaatagccacagataaaagcaaatatctaggaattaagttaaccaaagaagtgaaggatctctataatgaaaacaataaaacactcatgaaagaaattgaagggaacaccaaaaaatggaaagatatttcatcatcatggattggaagaatcaatattgttaca

SEQ ID NO: 249489 - DNA, 449 bp, Homo sapiens
attgcatccgtgatgtggacagctttcttccaaaatcacagattgagagttctctgctatcatgagactcgtatctttcaatgtgtgcttatgcctctgtgaacaatggaaatgaaaagggggtctgttgtgtgtattcatggggtatactcctatttatgaaagattttgcagccagccttatacacggacaagctcatgttgcgatagatgcaagatgaaggawcaatgtaggtaagaaattttaacggcatatttgttgcctaataatcagtcagaaatgaaactttggtccgctcctcttaaactacatcatgggttaaagagaacattgtcaggccaggtgtggtgtctcacacctgtaatcccagcactttgggaggctgaagtgagcagattgcttgagctcaggagttttagactagcctgggcaacatggtgaaatccag

SEQ ID NO: 249490 - DNA, 577 bp, Homo sapiens
gcttgaatgcctgtgaaatgccaacataaatgaaaatttaatagctttccaactgcagcacctgtgcagataaattgtaccaggcttcaaacaagtggaagagcctcaatatgttatatatggagcagctggttcagtcaaagttcatttgctgaatggtttctgtaatcccagcttgagctggaaaggaatctctataaaagtagttaactcagagagtccatgcaagaagcacctgtcatctaaacaactttgtgggagatgcctgccttctcagctgtggcaaatgatgagaaagactgccatcagaaagagcaacaatgttcgtcaacacgtgctttccgaagtgacacagcaagtctcttttgccactagctcaggttgttaacacctggccctaaatcagagtcatttacccaacatcctccctggaataaartgaacacttggttattcgtgatactttttggccctatccaatcaaaagctactttaataacctgtttatctactaagaatatatattctgtcattgtttctactctgccaagtctgtaagtattcttgtcaaaaagaa

SEQ ID NO: 249491 - DNA, 579 bp, Homo sapiens
gagtaggcaacactagtgagagactttttacctcttgccaacctgacacacagatggaacagctccccagaatcaaatgtgcagtcaatgcatgaaactagaaaagtaaacctgggaagacatgaaacctcagaaagaatgaaaaataggtgtcatgatgataatatgttatcaacatgtactataaatgtggggtgcttctggcctcgcttttatatttacgataaggaagcagttgtaagatactgatctgtgattatatatggtttccagctgagcccttaaccktcctgtccccttcagtcccttcctattggtctctattcatttgcctcctagagatgggctccaaattcaaaatcaagctactccaataagttatgcaggtataaccttctaattaaagttgtattgagaatataatctgctttttactaagaaagaacttatactttgcttccattttcactccttttattcctcaaataagagaacaaagtgagaaatgtagagtcgcactttttactttgctttttaaataataaagtagtaaaagaatatgaactgacagtcaattcc

SEQ ID NO: 249492 - DNA, 589 bp, Homo sapiens
aaagcattggggccctatcttcagcctcctcaaacaaaataattatcagccaagaattttgtatccagtaaaactaagcatcatatatgaagggaaagatacattctttttcagacaaacaaatgctaagagaatttgccactaccatgccatcacaagacctgcgaaaaggagatctaaatcttgaaacaaatcctggaaacatatcaaaacaaaatctcttaggccaggcacagtggctcacgcctgtaatcctgactcacctgaggtcgggagttcaggaccagcctgaccaacatggagaaacaccatctmtactaaaaatataaaattagccaagcatggtggcacatgcctgtaatcccagctactctggaggctgagtcaggagaatcgcttgaacccaggaggcagaggttgcagtgagctaagatcgtgccattgcactccactcttgttacctaggcaacgagagcaaaactctgtctaaaaaaaaaaaaaaagagagagcgagagaaaagaaaaacagaacttctttaaagcataaatcacataggacatataaaacaaaaatacaagttaaaaagca

SEQ ID NO: 249493 - DNA, 630 bp, Homo sapiens
cgaggataccaggtagacttcagactactatgctggcagcaagaatttcaagccagtggatcttcacttamtgggcttcctgggggtgggatccactcagcaagaccacttgactccctggcttcagccccctttccaggggagtgaacagttctgtctcgttgacattccaggcgccactggggtacgaaaaaaaaactcctgcagttagcttggtgtctgcccaaatagctgcccagttttgtgcttaaaacccagggccctggtggtgtaggtgcccaggggaatctcctagtctgcgggttgcaaagaccatgggaaaagcatagtatctgggccagataacatgatccctcatgcacagtacctcctggcttccctaggctagaggagggagttccctgaccccttgtgcttcctgggtgaggtgatgacccaccctgttttggctcaccctctgtggactgcacccactgtctaaccagtcccagtaagatgagccaggtacctcagttgaaaatgcagaaatcacctaccttctgtgttggtcttgctgggagctgcaggaccagagctgtttccattcgaccatcttgctagctgcccagagcatctttaaaatactattga

SEQ ID NO: 249494 - DNA, 630 bp, Homo sapiens
cgaggataccaggtagacttcagactactatgctggcagcaagaatttcaagccagtggatcttcacttaatgggcttcctgggggtgggatccactcagcaagaccacttgactccctggcttcagccccctttccaggggagtgaacagttctgtctcgttgacattccaggcgccactggggtacgaaaaaaaaactcctgcagttagcttggtgtctgcccaaatagctgcccagttttgtgcttaaaacccagggccctggtggtgtaggtgcccaggggaatctcctagtctgcgggttgcaaagaccatgggaaaagcrtagtatctgggccagataacatgatccctcatgcacagtacctcctggcttccctaggctagaggagggagttccctgaccccttgtgcttcctgggtgaggtgatgacccaccctgttttggctcaccctctgtggactgcacccactgtctaaccagtcccagtaagatgagccaggtacctcagttgaaaatgcagaaatcacctaccttctgtgttggtcttgctgggagctgcaggaccagagctgtttccattcgaccatcttgctagctgcccagagcatctttaaaatactattga

SEQ ID NO: 249495 - DNA, 614 bp, Homo sapiens
tgcttctaaaatcctgttcttatatgtgttagtaaagaaatgacctaaagttgaactgatacttaaaaggggcacaggatgtaaaagtgtaaaaaatgtgcagcctggccttgtggtagaaaagcccattttcatggaaggaattcaagcaagttttacttatgtaaaagtttgcgtaagtaaaaaggagtcaagtagttaagacaatggggaaaaggcttcaaaggcatttcagataatatataaagaacttaagcaattgagcaagcaaaaaaacaaataaccccattaaaaaatggagaaaaagataagaatggacacttctcaaaagaagatgtacatgtggccaagaaatatataaaatgctcaacatcactaatcatcagagaaatgcaaatcaaagccacaatgagataccatctcacaccagtcagtatggctattrttaaaaagtcataaaataacagatgccagtgaggttgtagagaaaaggaaatgcttatatactgttggtgggaaggtaaattagttcaaccactgtggaaagcagtttggagatttttcaaagcacttaaaacagaataaccattgaacccagaaatcccattactggg

SEQ ID NO: 249496 - DNA, 612 bp, Homo sapiens
gatccaagatgacaacatttgtgcatcaaagctcctcagtgcattgtaagggccaaggtacggccactgaatggtggttatcaaaatgtaaaatagggaggaggtagagcaagatggtagaaagctccactgatctgtcctgtcccccaaccctcgctgcaaggacaccaatttaacaattatgtacacaaaaaaagcaccttcataagaaccaaaaaacgtgggcactcacagtacctggttttaacttcgtatggctgaaagaggcactaaagaggtaaaagaaaaaacagtcttgaatcaactgcgcagcgccacccctcccccacccccagcaggggcccatggtgcccagagtatctctgggctctggggaagggagaacccagtaattgtgatgcattgactaggtgctgcccttgttayagcagaaaggaaaaccagaccaaactcagctgacacccgcccacagagggagcatttaaaccagccctagccagaggggaatcactgatcccagaggtcagaactctagttcccacaggcctcaccaccatgggctaaagtgctctggggctttaaataaacttgaaaggcagtctaggccacaag

SEQ ID NO: 249497 - DNA, 425 bp, Homo sapiens
attatggtgcttgtgtaattctctacaaaatttgcaaaattcagccacatgtgatgtctctcgcctgtaatcccagcactttgggaggccgatgtgggaggatcgcttgagcccaagagttcaagaccagtgtgagcaacatggcaaaactctgtttctacaaaaaaaatacaaaaatcagccgggcatggcagcacatgcctatagtcccagctcctcaggaggctgagatgggagggatctcttgagctcgggaggcagaggttgcagtgaactgtgattgtactactgcactccagcctgggtgacagagtgagactctccaaaaaaraaaaaaaaaaaaaaaaaggtaaattcatttgagcccgttttcagataagaaaacagatcagctaaatagtgcatgtagagaatgcttagcacac

SEQ ID NO: 249498 - DNA, 572 bp, Homo sapiens
agggctaattataatgtgtggttattttccattggtgggattttggaatttccttttataatagcaattgtatagttttcgagaaaaaatataaacccaattttttaagtctcaggggagcttgcaacatctatttatgcttcaaggtccagatgggtaaatgctgtcagctaaggcacagtggttcctccgaaaacttgtctcacctttcccacaatatctgattcaaataggggcaagacatcgatgctgtcatgggaaagaagtgagagacaaaggaaaaaagagcagagggtgggaaatgggaccacatcttttggagaaattactacttaagaattgacaaattacagttatcaagaaataaaggttatctcttggaagtaaagggacaatgggtgcccacccccccatccttaggtgaatagactgccctaacagaagttaggtcaatagacttcactcaatagactgaagtcacagaagtccccaacagttcayctgttctctcaacccaaccctctctcaggtcagcattgaaatgcaaagacctggttggttacagcttcttc

SEQ ID NO: 249499 - DNA, 535 bp, Homo sapiens
atctctgctagcacccactcagccttgggtggcacctcgggtccttttcccatttgcacagccactacttctagctctggagccatcactggatgctcagcatcaggcacagttcaccttttgctaacccctctctcgacccatttccattcatggactcyggggcttctttggataatgacagctctaggaccagtgtgtctgccccagacccagctccacatctgaagcactcagctttagaacagggcctagaggggcatgcagcaccttagtttatgttggggaggcttacacatgagcaccggggttcctgcaagcctacagcacctctggtacagttggagagggcagtactactgaaagcaaaaactcctgggaaacactttcctccctgcctacagtcagagcagctggggcctgtcctgccaaagcacacctcttagaacatcactgagaagaaacatgttccagaaggcacctctgttccttcttgtgttcataacacctggaaaccatctggccaaagcacgtc

SEQ ID NO: 249500 - DNA, 469 bp, Homo sapiens
catttaagccataaaaccttccttgtgtcacatgtgtactagtggcccacattccacactgggtggaatttgaaccctgattgtctgattccagagctcatacatttaaccaccagactatggtggcttcccatcatgtagacatcacatattaccagttttgacagtctgtagggtacttagtacaattacacctccataatgaacacaggcactgcctatggcttttctcctttattctcttaatatggtgaattacatttattttttaaatcttaaaccaaccttgcattctgggaaaaaccccacccaaaagtggtcakgttagatcatacatatttataattgttatatcttcttgataagctgacccttttatcagtatataatgtctctccttttaatagtaattttttttttcttgagacagagtctcactctgtcaccaggccggagtacaacggcgtga

SEQ ID NO: 249501 - DNA, 597 bp, Homo sapiens
ttttcttttctaaaatggtatcatactaagcattactattgtataacttgcttttgtttcctaatatgtgggagacatatttctctatcagtttatacagattagtcgtgctctttttaatgactgcagtgtatctggagtacagatactccttgatttctttaacctctgagagctccgtctgggacagactgccctttagtatatgggacatgttccctatccattccactgtgctcccacatcttcctgttgttaccactggaaaggaatctacatggactacattaaattttatccctaggatataattatatcccattaaattatatccctaggatatagtttaatattacgcccttgtagctttcattgattttttatgaaataawtcagacgtataataatcctccatgcaccttctaccctactaaagaaataaaacactacaatacaatcgaacctctaatcctccctaatcccattgccctctaccctatccatagtaactaactggttgtccttgactttggtatccatcccatgcatttctctacatttttactcactgatgttttttgaaacaatgcatggaag

SEQ ID NO: 249502 - DNA, 593 bp, Homo sapiens
ttcaatttcaatgtgagttttagaggggacaaacattcaaaccacagcattctgcccctggcccccacaaattctatgtccttctcatatacaaatacattcattccatgtttatagccccaaagtctagagtctcatcgaatcagatgtgagtaatgctcaaaggacaattcatcttgaggtaaatttcttacagctgtgagcctgtgaaatgaacgtgttacctacttccaaaataaatggtgggacaggtgtaagacattctcatttcataagggagagataggcaagaagaaaggggtaacaggtcccaaataagtccaacacccaaaggaaaaactaagccttgaggctccagagtaatcttccttggttccatgtcttgcttcctagatacaccagtgtgaggattggatcccagggcctcaggcagccccaccacctaggctttcctgggctctcccaggcttcagttctcacaagtaacagtcaagtgcctgcagctttcccaggctggagctgaatgctggcagttctacagttctgagatctcagcraggttctgttctctctgctccactagacattacccc

SEQ ID NO: 249503 - DNA, 598 bp, Homo sapiens
agaccattatacatacccctaggaaagaggctgaatctagggggctgagcagtgataatctgtaggcctcacttccacagcacctcacagaataagacccactagcttggaatttcagccagccactggtagcaatgttgcaccccactggatggagctcctggagtgaggggcaggccaccatctttgctgtttgggcaacttagcctttccagtcttcgggtttggagaatctgagcttacttgggtggaggcagtccctgagcacagcacagctgctstgggaagatgtagccagacagctttgtaaagtgagtcaccaatcccattccacctcactgggcaggacctcccaaatggggtcttcagccacccatgccagtgcactccaaccatagagactgaaaacttccctggtacagagctcccaggggaggggctggctgccatctttgctgtttgagtgatttaactatcctgggcattggggtttggagtctttgaggtaaccaggtgctgaagcggacccccagcacagcacagttgctctacaaaaatgtggccggactgctttttaaattgggtccccaatcccatt

SEQ ID NO: 249504 - DNA, 551 bp, Homo sapiens
tgcaagaaagaagagggttatgaaggagaagcacttgaagaagatcaaggaagaagatcaaggaagaagactgagcaaagaataagcctttttttttttttttttttttttttttttttgacggagtctcgctctatcaccaggctggagtgcagtggcacgatcttggctcactgcaacctccaaatccctggttcaagcgattctcttgcctcagcctcttgagtagctgggattacaggcacgcgagaccatgcrcagctaatttttgtatttttagtaaaggccatgttggccaggatggtcttgatctcctaacctcatgttttgcccaccttggcctcccaaagtgctaggattacaggagtgaaccaccgcacccagccagaataagctttttaaagaaaagctcatgtacatcttaaaaacaaaagccataggaagtatttccagagtgatggggtgttggcctttaaaaatgtactccttcataaaagcaataagaatgctggcaaaattgttaaaatcaactttttcagaactttagaaat

SEQ ID NO: 249505 - DNA, 551 bp, Homo sapiens
tgcaagaaagaagagggttatgaaggagaagcacttgaagaagatcaaggaagaagatcaaggaagaagactgagcaaagaataagcctttttttttttttttttttttttttttttttgacggagtctcgctctatcaccaggctggagtgcagtggcacgatcttggctcactgcaacctccaaatccctggttcaagcgattctcttgcctcagcctcttgagtagctgggattacaggcacgcgagaccatgcgcagctaatttttgtatttttagtaaaggccatgttggccaggatggtcttgatctcctaacctcatgttttgcccaccttggcctcccaaagtgctaggattacaggagtgaaccaycgcacccagccagaataagctttttaaagaaaagctcatgtacatcttaaaaacaaaagccataggaagtatttccagagtgatggggtgttggcctttaaaaatgtactccttcataaaagcaataagaatgctggcaaaattgttaaaatcaactttttcagaactttagaaat

SEQ ID NO: 249506 - DNA, 602 bp, Homo sapiens
ttttttctctaaattcaggaactgaaacggatatcttctctcactacttacattcagcattatattgtagattctagccaggccaattaagcaaagaaatwaaataaataaataaataaataaatggtacccagtttggaaaagaaggaaagatacctctgttagcagatgacataatcttgcatacagacaattctaagaaatagacaaaagaactttggaactcataaactaattaaacaaggtaataggatacaacatcaatatataaataacaactgtatttctatacattagcaatgaaaaatccaaaaacaaaatttataaaacaattctacatcatgtagtatacatttaaccaaaagagtgcaagacaaacacattgatgactacaaaatatttaaagaatttaatgaagacttaaataaatggcaacacatctcatatcagtgtgtcagaagactaaatattgtgaagatgatttcttcccaaattaacctacagattatttggtcatcctgtcaaaatcccaggggtttgttgttgttgttgttgtttttgttgttgtgttgctgtgcagaagttggcaagctaattaatat

SEQ ID NO: 249507 - DNA, 646 bp, Homo sapiens
ctctacaagtataatttctattcttttacatttttttgaggtgtsttttatggcccagtatatggtctacccttgcttgaagtgattcatgcagctttgggaagaatattgagtctactgttgttgaaggaaatatttgataaaagtcaattaaatccagttgatttattctgttcaattatacctcatttatatattgcctgctggatctacctattactgagagaattatgttgagatctccaatacaacagtgaattatctgtttctccttggaattttatcagtattttcctaatttttttttggtgccctgttgttgggcacagacagattaaggattcttacaacttcttggaaaattatctctttatcatcatgtaatgcaggggtccccaaccccaggccattaaagggtctgtggcctgttaggaaatgggctgcacagcaggaggtgagcagcccaagggcaagcattactgcctgagctctgcctcctatcagatcagcagtggcattagattctcaaagtagtgtgaactgtattgcaaactgtgcatgtgagggatctaggttgtgcgctccttatgagaatctaactaatacctgatgacatgaggtgaaacagtttcatcccgaaaccata

SEQ ID NO: 249508 - DNA, 487 bp, Homo sapiens
agtgtgaactgtattgcaaactgtgcatgtgagggatctaggttgtgcgctccttatgagaatctaactaatacctgatgacatgaggtgaaacagtttcatcccgaaaccataaccatgcccctttctccactgtccatggaaaaattgttytccataaaaccaattactggtgccaaaaagattgaggaccactgaggtaatgcattgtactaccttaaattaactccttatccctgataattttcttttttctgaattctgcttctaccgaaattaaaattgctccagctttcttttgattagtgttagtatagtctatggtttttattccattaattttgaaatatctgtgtttttatatttaaagtgggtttcttgtagacaacatataattgtctttttttttaagtctgctctgtcagtctctatgttttaattgatgtctttagactactggtgtttaaagtaaattgggttaatatct

SEQ ID NO: 249509 - DNA, 600 bp, Homo sapiens
atttttctgtaacagacaaaaacaaaattgaaaatgctgaaatataacctacaatagagaaartatatatacttccttagcaagaagataaatttaagaaagaacaaagagaagaacattatgaggtattttgaaaacaaatttaggagtcctaaagtacaataatagactctcataaaaggcaaaacaaacaaacaaacaaacatagaaggtgtaagacaaaatcaataaaataattttattctttctagctctggatattttcttttgtatcttctgattgaaagtacccataaagaacctggttacaataataaaaacttaataagaaaacatatccaggttttcaagtaacattttagcataaagaaacatcataccctcaatgaagaaaaaaaattagactttctacgtatgaaggaaagcatggtttgctttagattctcagttaccttatgtttcaggagcagaggagcaatgattgtagagttttgtagttaaaaaaaaagtgatatgtaagataaagaagccaattttcttagatatactaatatttaggaaagtcaccagttttacattcctcaacacatgatttagaat

SEQ ID NO: 249510 - DNA, 549 bp, Homo sapiens
attgtttatgtattatttatgtattattctttcatcaatagtttacacccccaaattatcagtgttctgtactgttcaataagttaagaagcagctttggaatatamattttaataagtttaccatgattttctaatgtatggtcttggcaccaaacttttgagaagtattcttccatgttttcattcaaagaaatcccatgattttaattactatctgcatgctactatatcctaggtgtattgaatattactctagctaagagttatcctctgagtttcatgtgtagaaacgcaactgctctctcaacaaatcccaacaaacttacttgaaagttgaacaggcatttcaaagtcactatatcaaaatagagcaaattctatccccattcctaaatccataacttgtctagtgtttccttaactcacacaatggcatcaccatttatctatctgaacatcattattagagagttaaataattttacctatagatatctgctgcaaaattgtgctatgtataaatcttagcaaaacagcttgggctttt

SEQ ID NO: 249511 - DNA, 593 bp, Homo sapiens
ggaacatatgtcttcttttgaggcagtaaattataagtggtcttcaagcagattttaatgtatccagttttgatttcattacattgattttccccttgtgccttgaaaaatatttatagaatgttttgcttcaatttccttatccatgaatgtaatattaaatgtatattttcattacataataagatgaagaataaatacaacaaaatcaacaaaacaattttataaaatataaaagtgccatatattactaatgtactacatccatgcctctcaraactcagaccaacaatctacttaaaaatgggaaaaatagattcaccaccaaattttaccagaggtaaaaagaggagctggtaccattccttctgaaactatttcaaacaatagaaaaagagggactcctcactagctcattttatgaggccagcattatcctgataccaaaacttggcagagacagaacaaaaaaagaaaatttcaggccaatatccctgatgaacatcaatgcgaaaatcctcaataaaatacgggcaaaccaaatccagcagcacatcagaaagcttatcttccacaatcaagtcagcttcata

SEQ ID NO: 249512 - DNA, 561 bp, Homo sapiens
aggaaacatttcaaatcttctagctattttgaaatatacaataaagtattaactatactcaacttactgtgctatcgaacagtagaacttattccttctatccaactgcatatttgtacctatttaccaacctctcttcatctcccttttccagcctctagtaaccatcattctattgtttacctccatgagatcgcctttttagctcccatatttgaggaagaacatacaatatctttctgtgcatgacttatttcacttaacataaagattttcaattccatccatattgctgcaaatgacaggatttcattctattttatggctgaatagtattccattttgtatataaaccacatttttaaaatccatttatctgttggtgaacacaggctgattctatatcttggatattgtgaatagtcctgcaatagacatgggggtgcaagtattttttttgatataatgatttgaagttgaattttgaagcaaactgcatatcaatcttaaaatrtatagttaataatggcacactgttctaggagttgttaacacatttgt

SEQ ID NO: 249513 - DNA, 492 bp, Homo sapiens
caaactgaaaattagcaattcttctaatatttgccagagaggtaaggtggcagggcaaactactactccccaaaatggggagatatagaggaatatagagagaataacagggttatggtggcagaggcccaggagcagaaacccctgtggaagttagtaccaggttagggaaactttaactataattgatagtgtgctggaggcacagtgtgagcaagctcaaattttaagaatgccaggggtggccagtcttggtgccacacttttgttttacctctgggagccacatcaggttctcacatcaargatcagaataaaagtagcactgtgattttggcaagaaagtgggggaaaacagccatctgaaatactgttagaaaaatttgttcttaaggcctccctttaaaagaaactattttatgagagcctaactaactggggttttaccatatcaaaacccatttggggaaggaaaatgcccaattccagcct

SEQ ID NO: 249514 - DNA, 600 bp, Homo sapiens
atgaaaattaaaacctgaattctcaaagaaactaggagacagtaaacytaactccaaatgatgtataagaactaccaaagccagacaaatggcaaattcataaatttcattgacctccatcaaagtgctgaggatttaaagcaatcaacttgttcaaaatataagagacaggaatctactgggattaatgattactggtttgttgggtcaagaaacaaccagattggtaagaaaagttcagctgggtgattggtgaattggtggaaattgagtgtacaagggtaaaggttaataaatcccttggaaaagcaaatagagatggacttcatgccctccaacaggctttttctccaccaaccccactggatgttcataggaaatttggcagaataacaggaaagtctctcacatggtacagaatggaagtagaggaacagaaatgataagaagtattttctctgataatagtgaaataaactggaaatccaccatagaaaaatatgtgagaaattcctaaatatttgaaaatcaagtaacacacttctaaataacccattcatttaaaaagaaatgaaagcacattttgaaatgcataaggag

SEQ ID NO: 249515 - DNA, 604 bp, Homo sapiens
ggttaactgataaacttctatctaaatggatgaagaataaaagacataagacacaattaatcaatatgagcaatgaaagagcaggtatcactacagctttcacagatgttaataggaaaataagggggcattatgaacaacactaagaccataaatttaacttacataaaatagcccaaattgttgaaagtcacaaaaaatagagctcatttaagaaaaaatatgtaatctgaataccctcatgtcccttaaagaaactcacttatagttaaacaccttctacagagaaaactctgcacccagaagttttcactggcatattatcaaaaactgttaataaaatcatgcaaactctgttcatccttctccagaatatacaaaagaggaagcaccataaaacccatcttaytaggtcagaagtaccctaataccaaaaagagacaaagatattgtaagaaaaccacagaccaatatgatgtgtgaacttaaacagcaaaattctcaaaaatattagcagttaaaatcaagcaatatatagaacaactgatatatcatgtaaaagtggggtttgtgtcagaagtacgaggttcattcaacattcaac

SEQ ID NO: 249516 - DNA, 560 bp, Homo sapiens
aatatttaaatatattttcaataattaatatgatgtggtattagtgcaaaaataaagattgatataaagcatagccttataagagatcatagtatatataaaatcttaatatgtaataaaggaggcattataagtcttttagaaaagattgattgattcaatacatagtgttatgatggaaaaattaatcagcttttgttggtggggtgtcaattaaaactgtcacatattcaacatacaaagatatataccaggtggaattaaagggtaatgtgggaaataaagtgtagaaaaaaaagaagaaaatttgacctttatttaagcagcaaaagattttataatatcaaytttgaatcagatacaaataagatagcagcacacttttaaagagctcacaaaattgaagaatcctcacagtacctagggttatggcctcatctacttggatagccacagaaatccactggaaaggtagaaagtcatgaaatatgggtccttatttggctagatcaagggaagagaacaggaaaacatggaggtacagtaaatgaaggctgaaa

SEQ ID NO: 249517 - DNA, 497 bp, Homo sapiens
gaagccatatgaaaatagcttctttggtgatataattaagacataaaaatcctattgaactagatcagtcacatttttggaccaattgaaacagaattttgtgactggcaaaatattagcatcttgagctaagaccagtagtgtatagttcagtragttacgtaaaacagggttccccaaccctcatgttgcagaccagtactgatccatgacctgttaggagcctggccacacagcaggatgtgagcggagggccaggagtattactgtctgagctctgcctcctgttagatcagattagattctcataggagcgcaagctcattgtgaactgcacctgcgaaggatctaaactgtgtgctccttatgagaatctaaagcctgatgatctgaggtggaacagttgcatcccccaaaaccatctcttcactcctttgatctgaggtggaacagttgcatcccccaaaaccatctcttcactcctttgatctgtggca

SEQ ID NO: 249518 - DNA, 600 bp, Homo sapiens
atggtgaatttatcaattttgcttcatgtatttgtagcctttgatagttggtatgtataatacttaggagtattaagtcttctggtaggttaatctttatataaaattcctattattgatttaatttatttttaagtctacttacataaaactgcctttttaattaatgatttaaataatcttatcttcttccatgattttactttcaacatacctatatgtttacatttgaagtgagtttctttttaagcagaatacaattgagtcactttttaaattcagctctagaaatctctgttttaggtcatatttagacccattacattcaaggtaatgattgatatgttagcacttaattctgctacttatttgccacatattttagcatattttaattatatttatctgccagtgcttggtatttacagaagtagttaaatgaatgggcaacgagtattcactagaactctrcattatgtggcaagaagttcaaggaaaaaagtttcatagaaatagtttaatactttcttgtggctagtaaaaacatgagtcttcagataaaatgacctagtaagttaaaaatgaaatgattaaaaaaag

SEQ ID NO: 249519 - DNA, 541 bp, Homo sapiens
ttcatatgtgggacgtttaatactgcacttttgagaaacttatttatccattttttttgaagggaagatattggtaggtattacctctgccttaaatgaagtcattgaaaccatttccatttggtcttaaatataaggttttaaaatgaattcatttattttagatgtgtcacttttattgtgaatctgtgttatcaataacttataagcaataaaaatgagaagcagagtttagtagcatttggcataatttagtagcaacacttggtagagctacctgtatgccaaattgggactccacttatttcattacaataatgaggtctgtggacacctacaattatttttctttttttgaataagmtaatccatggtagtgagttatctcaattgattgttcagtcagttacagattgaactcttttctactctttttccatgctcactacttcactggactagtcttaaacaaataaatatcatgctgtaactgatatagacaggacttgtccagatttccttaaatatttttttcccattt

SEQ ID NO: 249520 - DNA, 655 bp, Homo sapiens
taagtgcaactatccctactgacaagtccttcccatttcatgggtagacatcacactcacatccatgggtggtgcctttagtagccaccaggactcagggaaggaaaggagggaagaaagaaaaagacgacttttttttttctttccctcacataccccaggtttttgctggaagccaggaactaagggatgccttttcccctctctttcagatgaataacaaactaccttcagcctgcactcctcttgagagcatcctgaatcactgggrctcctttgaccctcagactctggaaaaacagaaaccacctcatattcctttgcacaagggtttggatggattatgtactacaggaaggaaggcgtccagaaggaaacgttagttttaatactatcctgcagctggaccttttctgtaaatgtgagggcaaagatccaaggtctcacatgtgcaggctttcttttccttgaaagataaactggacctttaccaacattgtaggattgtttcagtcctcctggtggccatgtcaggagtggctgcaaaggataatcccaagggataagggaggcaaatcccagatgtgtctctagtgggggagttggctccctccagtcctgcttctcctggtccatccagtcttccatatccagg

SEQ ID NO: 249521 - DNA, 594 bp, Homo sapiens
tcctggtggccatgtcaggagtggctgcaaaggataatcccaagggataagggaggcaaatcccagatgtgtctctagtkggggagttggctccctccagtcctgcttctcctggtccatccagtcttccatatccaggttttttctcaagcttgcgccatcctagaaatcctcattttaggcaggtcccagtctcacttcttcccctacaagagatgactttgaatattgccccattaagatccaggttccattttctctatgggacttaaggcaaattaaggaaagccttggtaagttttcagacgacccttacaggtatatagaggctttccggaatttaacccacgtatttgaagtttcgtggaaggattctatgttactatggaatcaaaccctgactaccactgaaaagcaggcatccctaaaagtgacagagaattttggggatgagctttgtatgtcatatagtgccaaggaatgagatgagccttatccaattggaagaatagcagtaccattggaggaccctaaatgggaccccgatgatgaaataggagaatggaagaggaaattcttttaggtgtgcatatt

SEQ ID NO: 249522 - DNA, 594 bp, Homo sapiens
tcctggtggccatgtcaggagtggctgcaaaggataatcccaagggataagggaggcaaatcccagatgtgtctctagtgggggagttggctccctccagtcctgcttctcctggtccatccagtcttccrtatccaggttttttctcaagcttgcgccatcctagaaatcctcattttaggcaggtcccagtctcacttcttcccctacaagagatgactttgaatattgccccattaagatccaggttccattttctctatgggacttaaggcaaattaaggaaagccttggtaagttttcagacgacccttacaggtatatagaggctttccggaatttaacccacgtatttgaagtttcgtggaaggattctatgttactatggaatcaaaccctgactaccactgaaaagcaggcatccctaaaagtgacagagaattttggggatgagctttgtatgtcatatagtgccaaggaatgagatgagccttatccaattggaagaatagcagtaccattggaggaccctaaatgggaccccgatgatgaaataggagaatggaagaggaaattcttttaggtgtgcatatt

SEQ ID NO: 249523 - DNA, 594 bp, Homo sapiens
tcctggtggccatgtcaggagtggctgcaaaggataatcccaagggataagggaggcaaatcccagatgtgtctctagtgggggagttggctccctccagtcctgcttctcctggtccatccagtcttccatatccaggttttttctcaagcttgcgccatcctagaaatcctcattttaggcaggtcccagtctcacttcttcccctacaagagatgactttgaatattgccccattaagatccaggttccattttctctatgggacttaaggcaaattaaggaaagccttggtaagttttcagacgacccttacaggtatatagaggctttccggaatttaacccacrtatttgaagtttcgtggaaggattctatgttactatggaatcaaaccctgactaccactgaaaagcaggcatccctaaaagtgacagagaattttggggatgagctttgtatgtcatatagtgccaaggaatgagatgagccttatccaattggaagaatagcagtaccattggaggaccctaaatgggaccccgatgatgaaataggagaatggaagaggaaattcttttaggtgtgcatatt

SEQ ID NO: 249524 - DNA, 608 bp, Homo sapiens
atacattcaaagaaaacaggaaaagtaatgcaagtgataaaggcatagtatcaatgagatttggaaacatttttcttcagtagtgttcattgcattctctgatttaaagtagaattttaaaagtgcattccaagttatagataaaaagcartaacattctctctagaaattcaaactctcagtcatactgtgtacattctcattggttaatttaatttgttagctgtatttgggaactgctttgaagaaatgagaaatctttgatgtaaacttttccttctcttgtgttccccagttccagataaaatggagtagtcactgagatctgcaaacaatctgagcaaaacgatcttaagtcctttggaaaatatcaaggccaaaattaacaaaaaggtgcatctgagtatttttgaattataattaaatataaatcatttaaatataaagattttcatttatgagaatagtatcaaggcacaattgaacgcttaacaacttatttccagtcaaatcactcaaagtctgttaaatattgtagtcatgattgaaaaaaattacacaattttatacgtattttgtcattttcattttccttaaaaaaatcatac

SEQ ID NO: 249525 - DNA, 608 bp, Homo sapiens
atacattcaaagaaaacaggaaaagtaatgcaagtgataaaggcatagtatcaatgagatttggaaacatttttcttcagtagtgttcattgcattctctgatttaaagtagaattttaaaagtgcattccaagttatagataaaaagcagtaacattctctctagaaattcaaactstcagtcatactgtgtacattctcattggttaatttaatttgttagctgtatttgggaactgctttgaagaaatgagaaatctttgatgtaaacttttccttctcttgtgttccccagttccagataaaatggagtagtcactgagatctgcaaacaatctgagcaaaacgatcttaagtcctttggaaaatatcaaggccaaaattaacaaaaaggtgcatctgagtatttttgaattataattaaatataaatcatttaaatataaagattttcatttatgagaatagtatcaaggcacaattgaacgcttaacaacttatttccagtcaaatcactcaaagtctgttaaatattgtagtcatgattgaaaaaaattacacaattttatacgtattttgtcattttcattttccttaaaaaaatcatac

SEQ ID NO: 249526 - DNA, 554 bp, Homo sapiens
tggccaggctagtctcttatctggckgctctagggagaaatctgcttagaagattgttcaagttgttagcagaagtgcattccttaaggctataggattgagatccttattttcttgctggctgtcagcctgggataatttcttctactggggatttctcatctctagtgtctgttctcaggctctggaaattaggtgattctttaacccttttctgctaaattctgttcacccagatggcagaccgaactcaaaaaaatacaagcatctctccccacaattacatttctcaaatctttttgtaatattcagcagccagaaccattgaaactcttaatgaagatattttaaagttatttattttgttttaaaattatttttgaaaatgtgtatcttgctcaggcacgttgttttagattgtcttacatagtatcttcatgtaaacacacaataaccagtcacaatttccaatttaacatcatgcagattattgtagtagtaagattctcttttaggtggcaaaatagacaaggtaatcagcaataggttcaagg

SEQ ID NO: 249527 - DNA, 617 bp, Homo sapiens
aaaatcttgcccaaagttagccaactgaaataagtcagtactgtaatttcaacccggtttatttattaatagaaacacacatcaaaaagtttagcaataacaataacaataaacaacaaacacaacaaaacaacagacaacaaaacaacatcagtcttggtacatgccattgttggcttcagcttctatctctgataattgccctcaaagggtacagagttacctttgtcacttccacgcaatttttaatgcactgtccaaatctttgctttagaaatcagaagaaaaygtgatatatttttaaaagaatgaacttaatccctgtgaattccttttagttagaccttactattttacatttggagcgatattaccattttatctcagacatcatccatttccaccttcactttttaaagatcatgtctttctaggtttttggtgggaaaatatggatattttatgatcattcttgagtcagtaccacacttcatgtatgtctctgatgcctgataacaatgtgggatttctgcatagctatctgcctcccattgtgctgatacctctgcataaatgactagagacggtgactttggagcaattcatattattttatt

SEQ ID NO: 249528 - DNA, 608 bp, Homo sapiens
ctgcaatatgttcttagtaagaatatgaacacagttatccatggggaagcactgaaatgctcatctagtggccttcatatttttttaaaggacaaaaggctaagagccaaatatgaaaatattgtctctcagtagaaaaaaaatagtaattagtcagataaagtctatctaacaaaaggtgttttacagtgaatttaaatattccaaaaaaatcactcaaaattagaattatttttatgtgttttgataatttttaaaataaaaattttcattattatacmactccgacatgaagaaacctggagatctcatgaaagtcaattaaacacgaaagacaaattaaatttctattcagcttttcctgctactttaaaaaagcaatggaaaatgagaagaataattttacctagatagtatgcagagtaggtaatgatcttgagacacagctaaaccgtgaaccatcacccactggtgaaagacctgctgacttgtcctgactgtgaatctctatgaagctggtggtaaaattctctgaagaatcattacttaaatattttacatatatgctatttttcaaattattaaaacccatttagaataaaaatata

SEQ ID NO: 249529 - DNA, 564 bp, Homo sapiens
tggcatttttaggtttgatacaattctattggccagagcttgcttttctcattgatacatgccgaaactctcagtgtgtaacctttcttcaccccttgttccctgtcccattttgatattcaaagtgaacattaatagtctgaatatcctgctttggatgaactttcaaagagcatttcttacttctatatgcagtggtsacttacatcaagtttctggtgtcctggttgccatcttctgctcctattctccagcacattcctagaattgagaccagagacatgagaatatgagccaatgtgtctggcatctttatgtcccttcatatagaggcatactatatgctaggcataagcagacttatcaaatggtaaggttatcattgttttctaccaaggctttttaggaaaaagaagttctgtttggtgaggcattaatttaaaaaattcaacacctcgctcagacccaaagtgttataagagtatatgcttcataagaaagaaaatattattttcaccatacattggatatgacactttatataaattaaaataacatcagcaa

SEQ ID NO: 249530 - DNA, 577 bp, Homo sapiens
ttatactggcgtgcaacaataatccttaggctatctgctaacatttgtcatagcaatgtgatttgatttcaagtacaatcaaagcccatatgttgatttgctaatgtaataaaagtcaccctggtactgctgtattagtccatttacatgctgctgataaagacatacccaagactgggtaatttataaagaaaaagaggtttaatggactcacagttccatgtggytggggaggtctcatgatcatggtggaaggtgaaggtcacatcttacatggcagcaggcaagagagaatgagaaccaagtgaaaggagattcctcttataaaaccatcggatctcatgagacttactcagtaccatgagaacagtatggggaaaccaccgccacgattcaattatctctcaccaggtccatcccacaacatgtgggaattatgattgctacaattcaagatgagatttccgtggggacacaggcaaaccataccaactgcccagactagatgtcggccacagtagacctgccttttttttttttttaaaaaaaaaaaagatgtgtttacagaagaattact

SEQ ID NO: 249531 - DNA, 396 bp, Homo sapiens
  misc_feature (1)...(396): n = A,T,C or G
ctttntgtgctcaaggagaattcttctagcttttgctcatttagtgtgatgtcagctgtcggtttgtcatagatgactcttactattttgaggtatgttccttcagacctagttcattgaaattttttattataaagagatgttgaatattactgaaatttattattgaatattattgaaagtattttctrtatctattaagatgatcatgagatttttgttttttctgtttatgtaatgcatcacatttattgatttgtatatgttgaaccaaccttgcatcccagggataaagcctatttgataatattggatatcttttttgatacactgctgattttaatttgctggcattttgttgaggatttttacatatatgtgcatcaaaggtattgg

SEQ ID NO: 249532 - DNA, 607 bp, Homo sapiens
ttagtaacaactgaacagcaaagaaaatctcggaaagcctgaacacgctggacacactgaccagtctattcacagccatgaatcttggtactcaggccggtggtcaggcataacagctgactatctcaataccctgtaactgttctagacgcacagatggacttgaatagagcatcccaaagagacaatagattgctgaccaccaatcagttcctgaccaccgattgctctcccgcctgcaccctgggaacccctcgcaatcccataccaacttcctgttgggctttgaatatttggggaagtagaactggggtggcaagttgagatgaccctaaggtctctgtggcctaccctctaccctatgaaatatatcgtatattttaccaaaatacaactaagcttggttttcaaaatgattgttayagccaatgaacacacaagcatctagtgataattctaataatagctgtcattgttgaatacttattttttaacaaatgctctactaagcactttgtgtgtgtgtgtgtgtgtgtgtgtgtatgtatacttctttcatatacatacttttttatgtttaaaacgaccccatgagataggtcctatt

SEQ ID NO: 249533 - DNA, 554 bp, Homo sapiens
taaaccttttcattttatttaattagttactttatcttaaaaaatttatcttcctttgggtctgggttaaggacactaatggcttaattagttatattatattttgctgctaggttttttttccttcccactattcaaagtccgtagtatcagagaagcttttatctcaagcaaaagacatctgctawacaacaaggattgatattcaatttactgaatgaataaacacatgtctttcctcatagtttggattatttcctttgaatatgctcccataaatagcaagtgagtcaaagaatatgtatacataatttttaaaattgtggtaagaacacctaacttgagacctaccctcttcattaaattttaagtacacaatacagtactgttaaggatgggcacaatgttgcatagcagacctctagaacttattcatctgacaaaactgaaactttacacccactgaacagcaactcctcccatttcccctttgtctccagcaaacaggactttctaaagattgaattacagctgtcatcaagagtgaattggta

SEQ ID NO: 249534 - DNA, 587 bp, Homo sapiens
aaatcatctacttaataatacagaaacaactgaattcgacaaggttcgagtgcagagagcagacatccatttcctatactgaggatttcttcaatgagaaacagtcctattttgtgttggcttccaatttctaacgatgacacatyaccatatcataaagggtaggcaaaagtataaacagtcaatccaaaatttcagacttcaaaaaaattctaaaacatattatgacattaataaaccttgaagtcatctaagtacaatgagccagaagtaaaagggcaaatattgtatgacttaatttaagtgagatatagagtttcagcttgagaagatgaaaaagttctgggaatgaattgtggtgatggttgccaacaattagaatgtatttaatgccactgaaaggtatatttagaaacaatgaaaatggagaattctatgttgtgtacattttgccacaataaaaacactttaaaattcatattatagacatgactgaaaaatatgcatgtagaatacactatatggaatcttataagtagtcagaaaaatgcaaattaaaataaccatgagacttatccattaaattg

SEQ ID NO: 249535 - DNA, 565 bp, Homo sapiens
gatgaccccaccctcatgccctatattcaaaaatattaatctgttcaattttcaaatgggagccatagccagtgcgggaggatgtgggagaagccctgccttgatgagggaaagtgttgaaccaatagctcatggctgcatattagttgaactaccgaccttacagttgatgtagctttctcaaaagtgcttaacttartagcggggagtagtttaccccctggtgaaatcaggatcaatacttattaaatacttcatgaactctattcatttctaaaacatccacttgtctgcctttcctgtcatgttctgaattaatttgatgtgtgatacaattcttaccttttatattacgttacttgtatgctgaaaagtaaaagacaaaataatgaggattgagggatggtctttttgtttttcttaactgtcttgtctcccttttcaaagatatttattataataccttcttagacaatagttttccacttcttcccttaaaaaatatttaggcctaaatctacaagcacaatattaaacatttgttatttactttcttcccagttct

SEQ ID NO: 249536 - DNA, 674 bp, Homo sapiens
acctaacatttcactgtttgtgtcaatttttctttaggaagatagctttttcttttggtcactgttgtaactgccagatattcccatgttaatcaatggctttgtaagttcttagaacagttctccaatgtcactctcacctacttcatagaatctctgacttttcacaagatttgcaatgtcactttgcaaggtcattgctctattttcgtacagcactgacaaatttcaaaactaaaattagcaagagatctagaagtgttcaggcaacaaatagtactgttctatgagactatatgattgaatcgagatggattttrtaagttttcatgtatttaccaacttattcatattatgatggattttgagattaactcaggagccagccaatttatttatcaaagggcccagtagtaaatatttcaggtctctgttgctactactgaactcagtcattgtatcatgaaagcagccatagacagtgtgtgaaagaatgaacatggctgtgatcaaataaaactttatttacacatccagatgctgggcttgatttggcccaaaggctctagttttctgatatcttgtctaattcaataaacactacgattatgagaatcccctccataagaaaatatgtttcccagaaaataatggataaaagcttcattgataat

SEQ ID NO: 249537 - DNA, 450 bp, Homo sapiens
agatggataactgaaattgaactgaggattttgaatttccaagctcctggggggcaagtttgaacctattatatcagtcttctataaagaatagcaccaagttcttctgcatacatacttgtgaggctcaattgaaaacatactagaaatcacctagcagataccctaactttataaggataaattaggaaattaatatgtttaggaaatattatttacacacttttattggatcttatataacrtcataccataaatagtgtaagcagtcacatgacattgactcaatacgtctgtctacatttggtcttagcctgtagttcctcaacttcaaagttattttattgcctacctcagggggctttgagtcttttgattctaccaactactcatgccccctcatccaccagatgacctcacttcccagcttccctgttaagaggtcaaggt

SEQ ID NO: 249538 - DNA, 570 bp, Homo sapiens
attcttcacagaaatagaaaaacaatcctaaaattcaaatagaaccaaaaatgaccctgaatagccaaagtaatattgaacattacaacaacagaatagttggaggcatcataccacttaatttcaaaatacactacaaagctataataaataaaacaacagggtattggtataaaaatggacacacgaaaacagacaatgtaacagaatagagaactcagaaataaatacactctgtatcccataaatatgtacaaatattttatgtcatttgaaaataaaagaaaaaatataaccagtcatatttcatagaatttctgattctggaatggcccaacaatctccttctagatctcactctcccacaggtatcagtgataaaattgggaataatacagaaacatcaatgaaccaaaagccttgcaaaatgaaaaggataattctagagaagagttggcagtttgaaaaatsgatcatcataggtgagtaaccatttttacagatttaagtctaagggcaggtcacatccaatctcatgcaagggcgacagaaatgccaaaagaaaacata

SEQ ID NO: 249539 - DNA, 549 bp, Homo sapiens
taataaaggctactgaattccaagcaggaaaaaaagcaaatcagaaatatgagaaattcctaaacatattataaccaaactgccaaaaagcaaagataaatcttagaagcagccaaatgaaaacacacatcttatacaagaacaattacacttggcccttgcataacccatgaagccaggagcgctgaccatcctcccagtccccacagtcaaatgcgtataacttttgatttctcaaatatattaactaatagcctattgttgactgataacatggtcaattaacaaatatcttgtgtattatttgtattgtaaaatgtattctcacaataaagtaagctagagaaagaatgttattgagataatcacaaggaagatgaaatgtatttactattaagtgstagtgggttataatcaagttatgcattcttgtcatcttcatgttgagtaggctgaggagacagaagaggaagggttggtcctgccgtttcagggatgggagaggcagaagaaaatccacgtataagtggacgtgcacagttcaaatcc

SEQ ID NO: 249540 - DNA, 496 bp, Homo sapiens
gggcatctgtagtcccaactactcaggagtctgaggcagggacaattgcttgaacccgggaggtggaggtgcagtgagccaaaatcacaccactgcactgtagactgggcgacagagcaagactccatctcaaaaagaaaaacaaaggaaaataatagagaaataaactaagaaaaaaaaccagatttcattgccagcagacatgaaatataaaaaaggctaatgaaatttttcaggctaacaggagttacaaacagacagaaatataaatacatgtatcttcaaggagaaatgaatcagcaatgcccagacattaccatatgtattcyttttagtctgtagagattaaataagaagcccaaataatgattttacaagacttgtgtaatatttcatatttttcttggctccacgtgtttatataccatataggaatttagattctcctcaagcacttggacactgaaaagtgaaattcaatctagacacttgaaaa

SEQ ID NO: 249541 - DNA, 519 bp, Homo sapiens
aatgattttacaagacttgtgtaatatttcatatttttcttggctccacgtgtttatataccatataggaatttagattctcctcaagcacttggacactgaaaagtgaaattcaatctagacacttgaaaatctgctaagtcagaaaaattctagaggtgctatctgaataggtgttacagagtaactgattctggaatggacatcaaaggctttcatgttcactctgcactggggagaagtctttcctaataggaaacaaatatgtgttcactgcctgatgttgacatgctataggtaattagattttgcattgtacacaattttaaattggrgcaaggtgatcatatgtgcatatatattcatgtatatatgtaaatgtatgctttatatatatatgtgtatgtgtatatctattttatatataagcctatagtctcagtatgctttgttggactatattaggctatattactaaaagtgttattaaaaatttggttttgggactacacaattgaa

SEQ ID NO: 249542 - DNA, 593 bp, Homo sapiens
agtgactggtgataggctcctcgaatatattattactacatttgtgttacgatttataatgagaaaaataaatagcaaaagcatatgattatttccgtaatttaacttacattttccaaaactggtaataactagcgtaatttagatctcataaaagaaacagagatgctctactgaatctaaaatcaaagcccatgaaaaccttttatacacaatgtaaacagacatgtttaatatcagcatctgccaatctaatctgataattttgctcatgttgtatttttttgcccatttggcatgtttctatgcagcaatttatacacaacactgtatcagcatatatgggggtatacaaccagctgtgtcctattatgtaatttacacacaaaaaagtttgaccaaaaaaatttactttctaatgaaatacgtagggaacmttttcagatatggaacctgttgacctattttccagatgagcccccaagggcatatgctgtgcctagccctttgcctacaatatcactcctctcaaacagatttgtatgtctactccaaggcagaatttgtacccttgcttcacaaatgagcctacc

SEQ ID NO: 249543 - DNA, 593 bp, Homo sapiens
agtgactggtgataggctcctcgaatatattattactacatttgtgttacgatttataatgagaaaaataaatagcaaaagcatatgattatttccgtaatttaacttacattttccaaaactggtaataactagcgtaatttagatctcataaaagaaacagagatgctctactgaatctaaaatcaaagcccatgaaaaccttttatacacaatgtaaacagacatgtttaatatcagcatctgccaatctaatctgataattttgctcatgttgtatttttttgcccatttggcatgtttctatgcagcaatttatacacaacactgtatcagcatatatgggggtatacaaccagctgtgtcctattatgtaatttacacacaaaaaagtttgaccaaaaaaatttactttctaatgaaatacgtagggaacattttcagatatggaacctgttgacctattttccagatgagcccccaagggcatatgctgtgcctagccctttgsctacaatatcactcctctcaaacagatttgtatgtctactccaaggcagaatttgtacccttgcttcacaaatgagcctacc

SEQ ID NO: 249544 - DNA, 605 bp, Homo sapiens
aatcctcccaccttatcctctcagactacagaaacacatcacaatgcctggctaatttttaaaatttttttttagcgacaaggtctcaccatgttgctcaggctggtctcaaactcctggcctgaagcaatccttctaacttagccttccaaataatttttttaaaaattaacctttttattttgaaatagttatgtgttgcttaatgatggggttacattccaagaaatgcatcgttatgtgattttgttattgygtgagcatcgtagactgtacttacacaaacccagatggtacagtcttctatacacctagactgtatggtattggctattgctgctaggttacaaaccatgttactgtactgaatactgtaggcaatggtaagtatttgtgtatctaaacatacaaaaggtagagtaaaaatatggtattataatcttatgggaccactgttgtatacacaatctgttgttgactgaaatatcattatgtggtacaagactgtaactgtagattcatgtggagttgtaagaagtaccttttaaccagtttcatcccaagggtaacatcttaccaaactatagcacaatattgcagccagg

SEQ ID NO: 249545 - DNA, 591 bp, Homo sapiens
ttcatgtacaagtctttttatgaacatattctttcatttttcttgggtaaatgtgtaggattgagatggctgaatcatctgatagatattatgtttaactttttaagaaactacccttattttcccaagtggtcataccactttattttgtatttctgtcagcaggatatgagagtaccaattccttcaccttcttgctaacatttggggtgatccatgtgttagctcctatggatggtgtaacaaactaccatsaatttggtggcttaaaagaatagaaatatattctctcacagttctagagacctgaggtccaaaatcagtatctgaaatcaaagcatgagtggggccacactccctctggcagttctaagggagaatctgttccttggctcttctgacttctggtggttgccatattccttggtttgtggctgcatcactccaatctcggcttctgtagtcacgttgcctcttctgcaggtgaaatctgcctcttcctctctcttgaaaacacttgttgatatagacaggaggcagccaaggattccctggcaaaaccctgccttcaagtctaaaacagcctgaagg

SEQ ID NO: 249546 - DNA, 579 bp, Homo sapiens
tatttatggtggattttttttttccaatcacagatttgcttgtaagcagatagtgtaccatgaacattcctctgtattaatgcaaacctttcagtgtgggagtccatgtggcacaatctcagctcactacaacctccaccatccatgctgaagtgatcctcctgcttcagcctcctgagtaggtaggactatggcatgcacccttgggcccagctatttttttaatttttttgtagagatgaggtctcactmtatcacccaggctgttcttgacctcctgagctcaagcaatccatccaccgtgacctcccaaagtgctgggattacatgcgtaagccaccacccctggcccctcaaactttttacagtctgcaaaagctactgctaaacacttcactgttaatttttggggggattcactaggtgataggaattttccaggttcataataatcttatggaactactcttctatgtatgatcagtaattgactgaatgtcattatgtggtgcatggctttaccacattttgtttatgtattcatcaattgatgaacattggggttgtttccactttttg

SEQ ID NO: 249547 - DNA, 557 bp, Homo sapiens
cttacaaaggctaaatcataattaacttaatgtcttcatcactgaaattaacagaagaactgtaagtctcctttttgacatataatttactaatcacatgtcaaatctaagcttgcctttctttctttagagacagggtctcactctgtcacccagcctggagtgcagtggagcttactgcaacctctaactcctggattcaagtgatgctcccacctcagcctacagagtagctaggactacaggctcacaccaccatgctggctaattacttttattttgtagagacgggggtctcaccgtgttgtccaacctggtctcaaactcctgggcttaaatgatcctcccacctcggcctcccaaagtgctgggatcacaggagtaaggtactgcrcgaggcctaagcttcatttttgaaacacatctccatcaagtgaacaaggctaagtaaattaaatgtacctctttatgcttgggcaggcaaactgaccagttcatttttgactattctactggaaatacaaaggagttattttcagctacgacctccaaaaatt

SEQ ID NO: 249548 - DNA, 515 bp, Homo sapiens
ctactggaaatacaaaggagttattttcagctacgacctccaaaaatttgaaaagctgtacatgaaggttgacatcaaaaaaggaggaagaagaaaaaaagagagaaagctggttgttgttttcaaagtaagctctgttccatgcaataaatcagttttctaatcggcaaatgcaaatgtaaacattaagaagccttctaagaaaaactgccccttgcttcattgcttagaacctatgtctaaggacattctgtcatgatttcacctcycataaggcacagcactatctaactatatcatctctcatgaggcatggcattatatgactatataataatggcagctaacacacatttggcatttaccatgttatcatgtgctaggcactattctaagcccttacatgtactatttaattcaactctcccaacaatctgtgatgcagatagtgttattctcatttcactgatgacaaaactcaggcacagagttaacttgccaacagtgagtaaatg

SEQ ID NO: 249549 - DNA, 599 bp, Homo sapiens
tgatgtggttagccactaagaatgatgctctcggtgcagacacatttgatgaagtggtggccatcaataattgcttttgttcttcctgttcatgtttttttaatttgaaaaactccaaaggcttgtcttttagtgcagggtgtttggtctccacatggtgaagcagttttgaagatttcatggctccattgaatagctggtcaccacatatacaaagcgggcttacagaatgtaaatcacctgttgcaatcaacctgtaaaaagtaggacttttggtattttcttttaaatgcagctttctttttgtttgcagtcttagagtyttctgctgtcttatcattggatctttcccccttttcaaagaagctctccagtgacatctgtttttcactcattttggctagggttagcttgtgggtttagcaaaactgtgactgagacaagtgcacagtacaggaaaaaggcatgggtggaagtggtaaataaaataatgagtggaccatgcaaagactgaaataagtgttggattctgatttaaagcctgccaccagatgcagcttaattgtcccttgccactcactgatagggttttgatatga

SEQ ID NO: 249550 - DNA, 593 bp, Homo sapiens
attcaatgatgaattttagtataggagttcaatagtatatctaagcaggcagaaggaagaatcagcaaacttgaagacaggataattgaaacagtatagtctggggagcataaagataaagaaataaagaaagtgaacagaggcaaaggaacccatgagacacgatgaagtggaccaatatacactwgatggtccacatcaagtggaccagtatagaagtttcagaaagagaagaaagagacagggcagaaagtatatttgaaaaataatggccaaaaacttcccaaatttaataaaaaatataaatttagacaaatgagaatcttgaaagcattaagaaagaagtgactcatcacatgcaagtgatcatgcaaatgaaaataagattaacagttgatttctcatcaaaagccatggaggccaaaaggcagggaaatgacatatttaaggtaccaaaagaaaaaacggtcaaccaagaattctatatttggcaaaactatcttccaaaaatgaaggaaaatttaagacattaccagataaaccaaagctgacgaagtttattattagtagacctgccctacaagaaatgctaa

SEQ ID NO: 249551 - DNA, 593 bp, Homo sapiens
attcaatgatgaattttagtataggagttcaatagtatatctaagcaggcagaaggaagaatcagcaaacttgaagacaggataattgaaacagtatagtctggggagcataaagataaagaaataaagaaagtgaacagaggcaaaggaacccatgagacacgatgaagtggaccaatatacactagatggtccacatcaagtggaccagtatagaagtttcagaaagagaagaaagagacagggcagaaagtatatttgaaaaataatggccaaaaacttcccaaatttaataaaaaatataaatttagacaaaygagaatcttgaaagcattaagaaagaagtgactcatcacatgcaagtgatcatgcaaatgaaaataagattaacagttgatttctcatcaaaagccatggaggccaaaaggcagggaaatgacatatttaaggtaccaaaagaaaaaacggtcaaccaagaattctatatttggcaaaactatcttccaaaaatgaaggaaaatttaagacattaccagataaaccaaagctgacgaagtttattattagtagacctgccctacaagaaatgctaa

SEQ ID NO: 249552 - DNA, 622 bp, Homo sapiens
cagaaactgtagtgactactgcccctgccacctgcaaccacagctacactctcctctccttttttattcccagttttatttgttgtggtatacttgccccatgtttgtaaattgtctctaatcatttttagaaaaaaaaaaaagaaagaaagaaaagtatatagtcaggtcccaggaggaaacagcattaccagcaaagcaactgaggagagttaatctatgaggttaactatctacaaaggcaaaggcagacagcccaacaagagatggtggagtaccccgaggctggcaacaacagggagctgctcccaacaccacacttggaagagcaaggggtgggaggtawcatcagaatccagggagaccagtgattgtgaaagggccatgtgataggagccgtggcctctgctgagacacagcccacctgcagggaggacaccgagaaataagcaccctaacctcacttttcctcttgccttccaaccctgcttgtgtcttccattggctacaaccagaggacttaatgttgtccacagaggtcaatatctcaaggcacagagcagcatgggttaggatggacaatacaaccagggggacaaatgaaaggtgcactgcaggagga

SEQ ID NO: 249553 - DNA, 478 bp, Homo sapiens
catttcccttaggcactgccctagcagaggttctccatgagggtcccgcccatgcagcaaacatctgcttaagcatccaggcatttccatacatcttctgaaatctaggcagaggttcccaaacctcaattcttgacatctgtgcacccacaggctcaacaccacgtggaagctgccaaggcttgggacttccaccctctgacgtcacagcccargctgtaccttgacccctttttagtcaaggctggagtggctgggacgcagggcatcaagtccctagacttcacacagcagagggactctgggcctggcccatgaaaccatgttctcttcctaaacctctgggccagtgatgagaggggctaccacaaaggcctctaacatgccctggagacattttccccattgtcttggtgattaacattcagttgcttgttacttatgcaaatttcctcagctggcttgaatttctccccag

SEQ ID NO: 249554 - DNA, 341 bp, Homo sapiens
aacctctcctgcagcaggcacatgggcacatgagtgcagcctaaatgtcttctggggcctctccagccctcaagagcaaagtaagtttactatgaagctgcatagaacaacaacaacaaaaaaaactcactaagttaaatttctgctaattcctgagaattacctcctatctccatttctgtggtttcacacatgctactctttcacatcattacttttattcttcccaaatatgggtgtccacaaagctctcaataagtatatcatgaattttartaaatttcactagaaatgaaaaatagagagtgggcttacagccacatgacctctaaattgcatac

SEQ ID NO: 249555 - DNA, 518 bp, Homo sapiens
aatagacttcatacctgactgtaacaatcaatctgtaccaattatttctgtttaagtaaagctgtctaaagcaaagtgggaggcttactacaagggagaaaaacaaaaagtgaaaaaaaggctatgatttttctctactccttyttttctacatggaccttctccctttttatctacatggacctttgactcagaaaactggcagagagtgaaatagattggttagagtattggataagccaaaagaaaggtgaaagagaactgataccctaaacccttcttccattctattccttataacaccatcataattctgtattgaatgtatagtttgcaagaaaagacacaagcaaggttagtttctgaaatgaccttgcttgagtcagatttataaatgtaaggcagagtggtttaagaccataggcttgggagaaaaatttgacacttaatacctataaaagtttgggcagacaagtggaactttctatgtcccaggttctttcttttaaaatggtggc

SEQ ID NO: 249556 - DNA, 571 bp, Homo sapiens
actggcataacagctcttccatagtcatcagtcatgaagsttcatttatgtctagacaatggcttgaacattcagctcaataaatagcatgaatcctttatggcccactatgtggacaacctagttcagagttttcaatgaagcatccagaattatctaacgcaagagcagacaaactatggcctgtaagccaaacccagcccactgcttgtttttataaatatagttttattggaacacagccatgcccatttttttactattgcctgtggcttcctactatagtggcaaggttaagtcattgcaatagagagcatatggcctgaaaatatgaaaatattaactatctagccctttacagaaagtttgccaaagctgatataacacattaattcaggctactataattgtggtctatgtacattgaaatacttttttgaacttttgaactcagttttgtaaagggtccttcctaagtcaatagaaatatcccctttatcttctctgtttcataaattagtttgcttttaaaattaggattttaatgtattttaactacacatagcatgat

SEQ ID NO: 249557 - DNA, 580 bp, Homo sapiens
agaagcaaacactcaggaatgtcctatgaattctgtgttaataataaggtgtgaagcctgaacacctttgggatcaatttcaaattccaaaataacaaaaaaatttagaattactgatatagtttggatatttgtccccayccaaatctcatgtcaaattgtaatccactatcgtggaggtggggcctgttaggaggtgtttggatcatgggggcggctctcttgtggcttgatgctgtcttcatgatagtgagttctcatgaaatttggtcgtttaaaagtgtgtggcacctccccccacccccacacttgctttctctctctctctttctctctccctctatctcttgctcctgctttcgccatgtgaagtgccaggtcccgctttgccttctgccatgattgtaagattcccaaggcctcatcagaagctcagcagaaccatgagccaattaaatctctcttttttaaaataaattacccaacctcaggtatttctttataacaatgcaagaatggtctaatgaagttagtcatcttttcttttttccatttaaatgggaatttaaaaaaacctttt

SEQ ID NO: 249558 - DNA, 594 bp, Homo sapiens
gtattaaataactttcccaaaatctggggtctgtaactctaagtctttataatactgtgttcagtctcataatatttctttctacatctcactgatttaacagtttcaactcttatgaatctcatgaatccatatgcctttactctttttcttttcttcatttgagatcaactcatacacccacagttatctttacaggtgctaccaccatcataaagtacrgatttgtggtacagatttgtactttgtagtgcagatttccctttgccctaagggcaaagtgtacaacactctgcttgatatactagcataaatcatttctcttattgcattgctttttccatttataaagattaaataaattcacctttaggatttagtcctaataccatgataaattgttaaatttatagcaaagccagaagattataaaattttcctttccgaaccatttgatatattagcgaactctaccccaagcttccttgccactaaagacagtatctgtgccataatctttggattcaaaattacacatagtgttggcccccagaggttgctaaatcttatctttaaataaaaatgccttattta

SEQ ID NO: 249559 - DNA, 517 bp, Homo sapiens
ggactatgcctattttttgctttgacaagatctcctaaaataaaagttagagttcaaagagcctgcattgtcaggtattgaactgtttattataacaaaggcaggaattgtttctttttgccatgtagctttcataatattatcatcatttcctgaaattttatctaagttacctaacagtgagggattagcaagccctactgccccaggctgaaattaaattagccttttcatgagaaataattttttcttttgtatacaggagtaatcatgagtatatcttaagaaattcttagtacacgctgcaatttatataacaaagtataataatttgtcagtcaaagaatggtataaattatacttacgttttattgtgtttcattgcaaagttatttaaaataaaaccrtttccttttcagttcttacattgcatttctttacaggttttcataaaataaagccaaatcactatgaatattgagttttgtgacatctgctccaattgatacagtagaaa

SEQ ID NO: 249560 - DNA, 522 bp, Homo sapiens
atcagttagaagtggatgtcaaatctttagagccataggaatggctataaaagaactaacgtgtttcttaccctcaggaaaatcaggaatcctggctctaaagattgctagaattctataaaaatataatatatatatatatatataacattttagagataagttaccaatatatgcataaactttcctggctgatgcctacaatgtctccaaaataaatctactctaatgatttaatkctctgtaaaattatgggttgttaaactttatttatacttttgcatgaataacaagttatggatacattcatgatagtagggtccaagcaggaggggaagaggaggacactgaatgcctaaaagagattgagagaggaattacaataagatgagaaaagaacaatgagccttcagagttattcttcctaagttgattaagaggaagacttaaatgggaatcattattatacttcaatattgttttattatgcaagaattgaatggttcaacttttaaaagtaac

SEQ ID NO: 249561 - DNA, 607 bp, Homo sapiens
agcgtcatgctttccttatagacacagacatggcaggaccagctggtaaataatttgtcccaaatgaaggtaccttccttctgatttcttccctaaacaatatgctgacgattttgaaatccttctcaaattgaatcaatttgcagttgtatcwtcagacctgttgtaggttcagttgttaggaatttgtgctcaggaaaactagagtttattccagtgctggttaacattttgatgttttagtccattaaggtcatgttacttacgttacttaaatctgactcaacctatagagacacactgtgagagttgtggccagaatagataatgcctatgtaagtgtggaattaagctaaaaactctttctgttttcaaataaatgaataggattatgtgccccacagatggtatttcaatcccttgtgtgggatccattacaacagactatttcaacacaagctgttttgtttttttttttttctgtatgagtcaattactttgtagaggaaaagcttagtagaacatcacattgtcattttttagtattagcagttccccaaataaatatttattgggagggtctaaagccaataccttcataggcatt

SEQ ID NO: 249562 - DNA, 607 bp, Homo sapiens
agcgtcatgctttccttatagacacagacatggcaggaccagctggtaaataatttgtcccaaatgaaggtaccttccttctgatttcttccctaaacaatatgctgacgattttgaaatccttctcaaattgaatcaatttgcagttgtatcatcagacctgttgtaggttcagttgttaggaatttgtgctcaggaaaactagagtttattccagtgctggttaacattttgatgttwtagtccattaaggtcatgttacttacgttacttaaatctgactcaacctatagagacacactgtgagagttgtggccagaatagataatgcctatgtaagtgtggaattaagctaaaaactctttctgttttcaaataaatgaataggattatgtgccccacagatggtatttcaatcccttgtgtgggatccattacaacagactatttcaacacaagctgttttgtttttttttttttctgtatgagtcaattactttgtagaggaaaagcttagtagaacatcacattgtcattttttagtattagcagttccccaaataaatatttattgggagggtctaaagccaataccttcataggcatt

SEQ ID NO: 249563 - DNA, 604 bp, Homo sapiens
ggaaatgtttggtattgctttgaatctatacaactattggaggagaatcgatatcttattaatagagtcatctgactcacaaacaagtgctgtctcactatttaagataatgtgtatattgtgctgttgttgggtaaagtgttctataaatgtcaaatagatcaaattgattgacagcttttttcaattcttctttactttctctcaacaatgttgtttgtttttagtgtacaggtccttcacatctttggcttgatttgtccttaagtatttcatattttttgaggttattgtaaatggctattcaatttctgattgttgctaatatatagaaatataattgaggttttgcgtagtgacttttatctgtaattttgttaagtgctctttttttagtagtttttttgtaaattccattagattttctaaatacatatatttacatagtctgtaaattaaggcagttttacttcttccttcctaatctatataagctttatttcttttccttgccttattrcacttgctagaacccccagtatcatgctgaatagaaattgtaagagcaagaatccttgttctgttgttaatcttagaggaaagc

SEQ ID NO: 249564 - DNA, 526 bp, Homo sapiens
actgtatttctccatactagcaatgaacaattggaaacaagaactcaaaaataattccatttatgaaatattaaaaataaaatacttagggattcattttttaaattgtgtgtaatactgccatgttcaaagctacaaaatattgctgagaaacattaaagaatacctaaattaatggagagataaatgttcataggttagaggaatcgatattkttatgtcagttctccttaaattgatcaatggattcaaggcactctcaattagaaaagtgaatttttaaaacattgacaagcaaattctgaaatttacatggaagatgaaaaccaaataaaaacaaaaacaaaagctgaagagttgaacaaattttgaaaaaaaataaaagcacagttggaagacttattacatctaagttggagtcctattataaagttatagcaatctgaacagtatggttttggcataggaatagaaatatagatcaaatgaaaggaataatgagtgaatcctgaaatagactcactca

SEQ ID NO: 249565 - DNA, 609 bp, Homo sapiens
ttttctctctctctctttttttatttttatttttattttttttgaggcagggtccgctctgtcacccaggctggagtgcagtggcatgatctcagctcactacagcctccacctcctgagttcaagtgattcttgtgcctcagccccccaagtagctggattacaggcatgcaccaccacacttggctttttgtatttttagtaaagatggggctttgccatgttggccaggctggtctcamaatcctggcctcaagtgatctatctgccttggcctcccaatgtgctgggattacaggcttgagccaccgcacccaacctttttttctcttatagtctttccctcagagagttcctctgttcacatctcacatctcatcatgctggatattcccaaatctatattcccaaatacttccaggcccatattttaaactgattttataaacacaacatggcaaacccacactaaccccttccctttcaaatcaaatctctttcttttatttttccatatgcgcaatgtcatctggattacttcacacagcaagttctaaatcctcgtcttctctgcctccttcacttcctcagtcaatgtattatcaagat

SEQ ID NO: 249566 - DNA, 588 bp, Homo sapiens
agttcatcattccttattgtaagctcttatacaagtggytggcccatagtagttatggaataaatgcctagagaatgttggagaaaagtaaatggatgaatgatagtcaacattttcttagcagacaaagtggttgggacagtattgtatacatatggagggtgtggaaaagccagttgggaatttccagtttggctagacatagcctaggaagttaataacttcaagtggggctgggcatggtgcctcacgcctgtaatcccagcactttgtgaggctgaggtgggaagatcacttgaggccagggatcctagaccagcctggccaaaatggcgaaatcctgtctctactaaaaataccagaattagccgtgagtggtagcacacacctgtaatcccaactacttgggaggctgaggcacaagaatcacttgaacttgggaggcagaggttgcagtgagctgagatcgcgacactgcactccagcctgggtgacagagtgagactctgtctcaaataataataataataataataataataataataataaataacttggagtagaaaaaggacaagacagaatatc

SEQ ID NO: 249567 - DNA, 497 bp, Homo sapiens
aagcatcttcaagcaatagtgattaaaccattccatagtagtggtgagtttacatttgagaataattttataataggcacttacaggacctgcccatccccatagtactatctgcrttaaaggaacccttcacattacactgcagttattttatagaaactagatgggattagggggacctattgagattcaagtaaaaattggctagaaatcttcctccctattccatgagaaggtgtaaaatgagaaaactgttcttcctttcaaccactatgggattcttggggctagagacggagacagggctcatgtttcttctagtgtcacctggatctgaattcatattttcccttaagaagtttaaaatgatccgaagccactcacccagccacgaataaccttcacttcataaaatgccaccaaatgtgtggcttgagtgtttagaattttaaggtttgggactatggaaagagttcatatcttaacacttagaacta

SEQ ID NO: 249568 - DNA, 510 bp, Homo sapiens
aaacagatgtgcaaaatcagaccatgagtgaggttagaaatgcttgaggcatgtttaccctgtgctctgacttcagaggcacgagaatcacctgcagatactggctcctccctagattttgattcggtaggtgcgtagtggggtcccaggatgtgtatttttaacaaggtgtgctgatgcaggtggcccatatatgcatgataatccttgttggacttatagtgccccattcaaaaggcatgccttttttgtgtgtttttaaattttagtgacttggccrgagggggtcacagagaatagctggtctgtgagaacccatgcctctcctctctacttgaagggacaatggctgtaacacaacgctgttcatgtgacagccggagtaaaggacccattgttcaggggttggctgatgtgccattctgctgcggccagccgtccaactgagcttggtagccccaaggaaacagacacacttaaatcagagagacaaagaaaggaggtcaaggc

SEQ ID NO: 249569 - DNA, 518 bp, Homo sapiens
taaattgctctattttggtttctgtgtatgggttctggagggattgccatctgtaacgagatgtaaaattctgggacactggcccaaggagaagggggtgaagagaccaggctgacacaggatcacactgttgttattatgttttscctccttccactttcaagtcctagcaactgcattaccagtccatgtgcagtccttgtgatccatggaagaattcatgaatgtctgtcttaatcatgcagatgagtagtgaaaagaagtaaacaaggagttctcaccttttgggcagacatctgttacttacgctttaatactagcttgcttttagactttgtaaaatattgcggtaaaatgcacataacataccatacaattcagcatttttaatgtgtggttctgtggcattttaaatacattcacactgttgtgaaaccatcaccaccatccatctccagaactttttcatgatcccaaattgaaactctgtacccattaaatagcagctccccattttc

SEQ ID NO: 249570 - DNA, 598 bp, Homo sapiens
cacaactcctaattttaatgtgtgcaagtaggcatcctaacaaaaccacagctcagcccccacctcgtctcgccttgctccttcctctctcactgtgcctccttttcatggtctccagggaagcatggtcagttttgaaggagggagagaaggcaaagagggatggaagtcagagcaagcagcccaggtcccacttctatcttaactggcaccaggaaaaagtgccttyggctggcacagtggcttgtgggcaccaggctttgcttgtttgccatataaatcctggtcataacagagaccaatgccattcaggcagtgagcaggaagctgcttttatggggagctttttggcaccgtgtccgacatacactccagtcaatcacagtaaagggcctaataacagatgtggtgattaagcctgaagaactgtctctattttttcatttttgtttcagagaataacaaagtgcttcattaaacccccaatcgcacagagttttgaattgggcatactgatgtggtaaaaacttacatctctgtaaggactttcttctgaagttcttatcagcaaggatgcctcagagggaaggttggatcc

SEQ ID NO: 249571 - DNA, 598 bp, Homo sapiens
cacaactcctaattttaatgtgtgcaagtaggcatcctaacaaaaccacagctcagcccccacctcgtctcgccttgctccttcctctctcactgtgcctccttttcatggtctccagggaagcatggtcagttttgaaggagggagagaaggcaaagagggatggaagtcagagcaagcagcccaggtcccacttctatcttaactggcaccaggaaaaagtgccttcggctggcacagtggcttgtgggcaccaggctttgcttgtttgccatataaatcctggtcataacagagaccaatgccattcaggcagtgagcaggaagctgcttttatggggagctttttggcaccgtgtccgacatacactccagtcaatcacagtaaagggcctaataacagatgtggtgattaagcctgaagaactgtctctattttttcatttttgtttcagagaataacaaagtgcttcattaaacccccaatcrcacagagttttgaattgggcatactgatgtggtaaaaacttacatctctgtaaggactttcttctgaagttcttatcagcaaggatgcctcagagggaaggttggatcc

SEQ ID NO: 249572 - DNA, 596 bp, Homo sapiens
aatgccacgaccaactcagtcatacagtttcttttaaatctgtacatgtacatatacattattcgttaattaagtataaagaaaagttcttggaaagaaggaaatttcartgatcatacaacagctcatacttctgtggatatgaatgcattttctagagtagggtccacaatttagattccttacctcagtaaggcagttgtggtaacatagctattgtatcctaacttctgtttttacctgttgatttctctaagaaaatctcttggtgattaaaatttaccacctgttggtttttaactcagaagtgaaactggcatttttgacactaacatatctttttgtctctgaattctgagatgcaaataacgagtacttgttcagataactttagggagacttatctgtaataaaagaaaattcatgaaaattttggtacttgttaaatcaattcctaacatagtatataatttgtctccattatgttagaattataattctaaaatgatggtattttggactaaaagcagtctacacgtaacatttcatatgcattatcacaaagattatatcatggaatgtcatgtaatacagtt

SEQ ID NO: 249573 - DNA, 574 bp, Homo sapiens
aggcttctcaattccaggggaaaactgtcttgcagggttttgttttgcttctgttggaaatcaggaggagagtgggcattttgttcacacgccattgaggcaaaatgtttgggatgtgggatttggctcatgtccatttttctggccgactgacctcaaatgtgatgttgctttcattaacttttccagtttaaaaatcagttgtgcctagacatcttgaagaaaaataacattattataaactagtgggatagggaagagtgggcrtattagtcatttaaaactatgtggtttgccactaattccagggcaagaatgccacagaataacttcagttgtattcatactttgtctcctaagaattgcagactacctcgagctaagggctcagactgaagtgattgtgtaagcaaaacaaaagcctacatgggtttcagactctctagaactgattaggaccttctagaaaataaaccgttgctttattttggagtttaatgaagactctagaattctgagaacagatgttcttttaacactgaaatatgatattgaagcaacttttagtttattt

SEQ ID NO: 249574 - DNA, 636 bp, Homo sapiens
aaaatttaaatggcctaatttctaaggattctatttccatctccccccygctttggttattgttatgcatcaatttgatggtggacattagatccataatataattgctttgataattagactggctccttgtatcacttaagatccaattaggagatagaaaccacagtaatttttaaatttttaaaatacaaattggttttatttgggaacacttttagacttatagaaaagttgcaaagatagtacagagctcctgtgtgctcaaacccagtctcccccattgttaacttcttaaattactattagtttgtcaaaactgggaaactgaccatagtatattactattcaatcaactgcagatgttatttggattttatcaatttttccactaacgtcctctttctcttccggattccagctcaggccaacacactacatttcactgtcatgtctcccctgtcttctctggtctgtgacagtttctcagtctttccttgttttcatgaccttgaaattgatagtctagaggagaactggccaggtatcctgtagaatgttccccaatctgtgtttgtctggtgcttttctcatgatcagacatgggttatgagttttgaagagaataccagaatt

SEQ ID NO: 249575 - DNA, 625 bp, Homo sapiens
attcataatggcacccatctagactttcctcattcataatcttgtgaatgttggggcagattctatttatgatccttttcaattctgtgattttatgtatgacttactttaagcaatatgtatatgcaactcctgagatctttctttgtgatggaaaccctttaaaccttttgtatgaatagcagtaacacatttgttttcttattccatataatcctatttataatttcccaaacatctatagagaaatctatttcacctacagctatagggcacaaatggtagagtcctaaatcagccagcatatggttttcaaatgcttgtccctcgggctctttgcttttgacattagtaccacatagcggcaaaaatagaaattagctttggtctagaaactccaaacttgggttttattgagtcactaatagcattccggttaaatatacttggcagtagtgaaaatatccctaggaggcaagactagctcaaacattttcaggtgcagcgtaaggaacactgataaccttttgtgtaaagcaggcatgwtgtacagcatggagaaagtaataagattttgcctgcaggatattcgaatggggggaatccatttgaaggatattatgag

SEQ ID NO: 249576 - DNA, 412 bp, Homo sapiens
ccctttttgcagcagccaatgaaatattcattctcttgagattatttgttggtttttcaagaaccttcctctccttgcacaatttcccagtgctagagacttggcttaggattaaatttctttttaaagcatctcaaatcaccatactgtcttttgtcctctggtatgggttgtccagggagtaagtttacttttgttctgtaataaactacccgcaaacttagtgrccccatcacattattatcacttacaattattactaggtgcttcttctggtatggaccacctagtctgatctgtttggctagctcaggcatctgtagtaaactaatgagtcacctaaccaattggatattataggatagccttgcctatgagtttggagattgaacaactgaggcaacaggcatct

SEQ ID NO: 249577 - DNA, 412 bp, Homo sapiens
ccctttttgcagcagccaatgaaatattcattctcttgagattatttgttggtttttcaagaaccttcctctccttgcacaatttcccagtgctagagacttggcttaggattaaatttctttttaaagcatctcaaatcaccatactgtcttttgtcctctggtatgggttgtccagggagtaagtttacttttgttctgtaataaactacccgcaaacttagtggccccatcacattattatcacttacaattwttactaggtgcttcttctggtatggaccacctagtctgatctgtttggctagctcaggcatctgtagtaaactaatgagtcacctaaccaattggatattataggatagccttgcctatgagtttggagattgaacaactgaggcaacaggcatct

SEQ ID NO: 249578 - DNA, 549 bp, Homo sapiens
cactgtgggtggagaaaaatttccatatgacatcagtgtttgaaatttgttaagacttgctctatgggtcaatatataatcaatcttcataaacactctatgttggcttaaaaaaatgtacataccaaaattgatatgtacaataccaattggtatgtacaaaattggtatgtacaataccaataccaagggtacagcattctatatgtatgtattaggtggtttcttaattatattcttcaatacttctatctcctcaaagcatttgccttctttttcataagctcctatgatatgttcaacatcttctactatgattgttgactgatgtattctttgtgtatttatatgattttttcttttttttataatttagaaattgatttctgatgaactgaaactcttatatgatattcatctatatctctaaaaagcctttatgtaaaaattatatctgtagtgacatagctacatcagctctttttgtctagtttgcatattgtacctctkctttttcattcctatatctttgttttagattagatctat

SEQ ID NO: 249579 - DNA, 549 bp, Homo sapiens
cactgtgggtggagaaaaatttccatatgacatcagtgtttgaaatttgttaagacttgctctatgggtcaatatataatcaatcttcataaacactctatgttggcttaaaaaaatgtacataccaaaattgatatgtacaataccaattggtatgtacaaaattggtatgtacaataccaataccaagggtacagcattctatatgtatgtattaggtggtttcttaattatattcttcaatacttctatctcctcaaagcatttgccttctttttcataagctcctatgatatgttcaacatcttctactatgattgttgactgatgtattctttgtgtatttatatgattttttcttttttttataatttagaaattgatttctgatgaactgaaactcttatatgatattcatctatatctctaaaaagcctttatgtaaaaattatatctgtagtgacatagctacatcagctctttttgtctagtttgcatattgtacctcttcyttttcattcctatatctttgttttagattagatctat

SEQ ID NO: 249580 - DNA, 645 bp, Homo sapiens
tgttgattgaccatttatgcagccracattaatttaactttaagcttaactgattactagtagaaaagtgattttgtggcatatcatgcaaacacaatcttattcaaaaagatttttctacttccatattgacatgcatttggtgaaatagtttttaaaaacctaatggttttgattggatatattgatattatggttaataacattttttctcactcaattttctataagcttgaacagttctttacaatttaaaatacttttacaatgatgtgcttccaagtcagtctttggtgttaagctctgagctttttattattattattattattattaaggcagggactgtatctaatccagctttgtattctcaaggcatagaagcagtttctgataggtattagatacacaaacaacgttgcaatgcaaattataaacctggagtacaagatctttgcctctctcaggacctgttttcctggaaagtaaaccatttcccagctgcttgtaggttagatgctattggcagactttttgcagataatcctttaagatgtaaaagttctgtgatgtgatttacacttcagagactgatggtggataaggatacctaagatgacatttgtgcttgggtcctcctccttc

SEQ ID NO: 249581 - DNA, 597 bp, Homo sapiens
ttgcaaaaaaaaaaaaaaaaaaaaggagcatgataaaggaataactgattattgtggccttccttacaaattccaattctttaaccatggttaaggaatttacttaatgaattaagctatataatttaatctttgatttttaataacctaaaatggtttctttgtaatactagaacttattaatttacagagatttcaagcaactcatcagatatagtgaacaaaactccaataaaatagcatgttttgttacaaaattgttggagaatagtaaataacgtgtaactaaataccaaaaagacaattcattttataaatattcatatttgtttgtattcattgtaattctttttcctcaggcttaggaaatttttttttttttaccaacttgtctgcgtcttgttttaraaacctctaacttttttttgcatttgcacatctttaggtatcctattttatttttaactatatgtgttacctttaacaataataaaaataaagttatttatttgtaacattttgagggttcattacttagttggttgaaatagtctctgaaaattattttgcctacatataattaaatccattaaaata

SEQ ID NO: 249582 - DNA, 578 bp, Homo sapiens
ttgcaaattactcatctgactaattactcatccaggactagtatccagaatatacaagaaactcaaacawctcaacattttaaaaaaaaaaaaaactgcctttaaaaaatgggcaacggacatagatgtttctcaaaagactaaatggccaacacgtatatgaaaaaatattcaacatcactaataattaaggaaatgcaaatcaaaaccacaatgagatattatgtcatcccagacagaatggctattattaaaggataaaaatttcattctggtgaaaatgcagaaaaaaaaggaactcttatacactgttggtgagaatgtaaattattacaatcacgtggaaaatactatttagatttctcaaaaatcttaaaatggaatgactgtataacccagcaactccactatggaatgtctattgaaagggaaaaaaatcagtatatcaattggatactttcactggcatgtttatcgcagcactattcacaatagccacaatatggaataaacctaagtgcccacaatgaaaaaatggtttaaacaggtgatatatatacacaacagaatactatttg

SEQ ID NO: 249583 - DNA, 578 bp, Homo sapiens
ttgcaaattactcatctgactaattactcatccaggactagtatccagaatatacaagaaactcaaacaactcaacattttaaaaaaaaaaaaaactgcctttaaaaaatgggcaacggacatagatgtttctcaaaagactaaatggccaacacgtatatgaaaaaatattcaacatcactaataattaaggaaatgcaaatcaaaaccacaatgagatattatgtcatcccagayagaatggctattattaaaggataaaaatttcattctggtgaaaatgcagaaaaaaaaggaactcttatacactgttggtgagaatgtaaattattacaatcacgtggaaaatactatttagatttctcaaaaatcttaaaatggaatgactgtataacccagcaactccactatggaatgtctattgaaagggaaaaaaatcagtatatcaattggatactttcactggcatgtttatcgcagcactattcacaatagccacaatatggaataaacctaagtgcccacaatgaaaaaatggtttaaacaggtgatatatatacacaacagaatactatttg

SEQ ID NO: 249584 - DNA, 613 bp, Homo sapiens
tatgtggctttgtataatgagcagggagcatggtacaggaggagtctataccaagaagtaggatgcagctcttctaaggctcgtagataagacggtgaagtaacagaaggagatgaaaggataattaaaacagagtagaaattaactgagttcacaagtaaccaaaacaacagaagtaaaatggagatttgggactgtaaagaaaagaagagatgtgaaaggaatgtaaattacttacgaagagaaaggcttgggatatctcactctactcatcattactaatagatacagaggacagaaaaagccaatctgctataaggaaaaataatgcacctggattacacaacctaagaaatggaacagaaaaayatatgcaaaggtaaaataaaagaaaatttcttgaagggaataactaaatctataaataacaagggcccacatgttgttctagaaacagctctgcagaataagctgtatctcagatgagtagggatatatgaaactaagcatttctgatcacaaccttctttaaatgcgactcacttatccagtaactcccaatacagctattttccacttcatcagaattcctgtccactgctccctctcattt

SEQ ID NO: 249585 - DNA, 553 bp, Homo sapiens
accctggcaggtttatttgtactctaagccagaaggtaaccaacttactggctcttttcttgagtctaaatcctcagcttaaacttctacttcctgctttgtgagtcctcctttggggttcatgaggacctttcctttctataaactttgttctgggccactctgtgctaatccagtgaggtcccctgacttcaattgtggagacagagattctgatcttggtttctgcatttgtaatatgtcctagacagagccagctatataatttttgggyctcaatgcaaaatgacaatgtgaggtctgacaactgctccttctttatctatgactttttccttcaggcttattttaaataatacttagtgccaaaactagagtacatatcccttttgtgtgcaaagtacctactcaaattttaccttaaatcatctcactttctaagggcctgtttacttgcctatgcacactttaagcctgatggtcatgaagaaaggaaatttaccttggttaccattgtatccctaaatgtttgcgcattgtaagatacatagta

SEQ ID NO: 249586 - DNA, 546 bp, Homo sapiens
agaattgtttcttactgaaataactaaatgctcattacgtaatgataaataataacataaaaagcagttaagaccagatggaggcagaacacagaatgaggctatagtttgaagataaaggagmttaaacttttagaatcattaaactgcttggttttgaaagccttttttgccaatataattgaagaaaataattaatgcacaacaataatgaggacagcttttacacgctttccttttgtttaatttttatcattcttgatgcgttgccagaattttgttttttatattaatgcggagtgctccgtatgttggatttctttctcctttaaatgtgggaagaactaatttctttaagaagcagaaaattaacagccctatatttgtcttaaccctagacttttaataaatagacattttagatcatgactgaggccatttaaatatttaatatctctcactgcttctgcattgaaaaactgaaagctagagattagttctgctcctcaatgttgccaagttcatttctacctaagagataattgt

SEQ ID NO: 249587 - DNA, 546 bp, Homo sapiens
agaattgtttcttactgaaataactaaatgctcattacgtaatgataaataataacataaaaagcagttaagaccagatggaggcagaacacagaatgaggctatagtttgaagataaaggagattaaacttttagaatcattaaactgcttggttttgaaagccttttttgccaatataattgaagaaaataattaatgcacaacaataatgaggacagcttttacacgctttccttttgtttaatttttatcattcttgatgcgttgccagaattttgttttttatattaatgcggagtgctccrtatgttggatttctttctcctttaaatgtgggaagaactaatttctttaagaagcagaaaattaacagccctatatttgtcttaaccctagacttttaataaatagacattttagatcatgactgaggccatttaaatatttaatatctctcactgcttctgcattgaaaaactgaaagctagagattagttctgctcctcaatgttgccaagttcatttctacctaagagataattgt

SEQ ID NO: 249588 - DNA, 546 bp, Homo sapiens
agaattgtttcttactgaaataactaaatgctcattacgtaatgataaataataacataaaaagcagttaagaccagatggaggcagaacacagaatgaggctatagtttgaagataaaggagattaaacttttagaatcattaaactgcttggttttgaaagccttttttgccaatataattgaagaaaataattaatgcacaacaataatgaggacagcttttacacgctttccttttgtttaatttttatcattcttgatgcgttgccagaattttgttttttatattaatgcggagtgctccgtatgttggatttctttctcctttaaatgtgggaagaactaatttctttaagaagcagaaaattaacagccctatatttgtcttaaccctagacttttaataaatagacattttagatcatgactgaggccatttaaatatttartatctctcactgcttctgcattgaaaaactgaaagctagagattagttctgctcctcaatgttgccaagttcatttctacctaagagataattgt

SEQ ID NO: 249589 - DNA, 355 bp, Homo sapiens
tttgatgcacagataaataatttttactagaagcatgtaaaaataaaacaagacacctacataaattaaaatcttttagcattctaatttctaaacaggaaagagtgwtagtaagtgaattgcaattgaacaataagacaatttttacataacagtgtaataatttttatatcctatatcaaaaaactattaaatgacaataataaaaattagaaagcttaaatacagcaacagaaaaaaggggcattcatgaaaaaaagtttaaagagctagtaacttctgttttaagtgttccagatgtcagaaagaaaagaaagaatgagaatgacagataataaataataaattgattatt

SEQ ID NO: 249590 - DNA, 560 bp, Homo sapiens
agataaaaggaaatccccactcctctgaaagtttttcaaataattatttttactcaaggctaatatgtttccagactaatacttgcagagccaccactaggtatagttacattactaggccattttgcaacttattttacaagtgattaaacaggcttaaygtgatttcattatttttcaaccacgctgtggttttatactatgtcaaactagtgtggctggaattgtatttatcaaaaatttctaaactctgctaagagttgagaatgagtgtcaagataaatttgtggtaatagaaaccattttatgtttctgtcatatacggttaacaaaccagataaaatatatggaacaatttttttcagattttgaacaagagactttgtgagacatcggtcactgagagaaattaaacatgaggtgaactccatagttgccccagctgaccttctgtggagaggttcaggatacagctcagagagaggggactcaaatagtgcctagtagtcttcttgagctgaagtcatggaggtgaaaatcagggtgtacgaggcagctgc

SEQ ID NO: 249591 - DNA, 562 bp, Homo sapiens
tggcatatatacacaatgaaatattattacaatggaatcccgccatttgcaacaccatgggtaaaactagggaacatgttaagtgaaataagtgaggcacagaaagacaaatatcacatgttctcacttatgtgggaaccaaaaatgaatttttggagatagagaatagaatgatggttaccagagggtgaaaaggatagaggggagggcagrataaacagtgtatggttaatggatacaaaaatatagagtttggtagaagaaataagatctggtgtgtggtagcacaatagagccactatagttaacaataatttattgtatatttcaaaacaactcgaagagttgatttggaatcatcctaacaaaaaaaatgataaatgcttgaggtaatggatatcccaataattctgatttaatcattacatgttatatgcttatataaaaatatcatatgtgccccataagtatgtgcaactggcatttagcaataatagttaaaaatttaacaaaatatcttttcaaagtaacaaatataaaaatcagaataaatattcaaaaa

SEQ ID NO: 249592 - DNA, 562 bp, Homo sapiens
tggcatatatacacaatgaaatattattacaatggaatcccgccatttgcaacaccatgggtaaaactagggaacatgttaagtgaaataagtgaggcacagaaagacaaatatcacatgttctcacttatgtgggaaccaaaaatgaatttttggagatagagaatagaatgatggttaccagagggtgaaaaggatagaggggagggcaggataaacagtgtatggttaatggatacaaaaatatagagtttggtagaagaaataagatctggtgtgtggtagcacaatagagcyactatagttaacaataatttattgtatatttcaaaacaactcgaagagttgatttggaatcatcctaacaaaaaaaatgataaatgcttgaggtaatggatatcccaataattctgatttaatcattacatgttatatgcttatataaaaatatcatatgtgccccataagtatgtgcaactggcatttagcaataatagttaaaaatttaacaaaatatcttttcaaagtaacaaatataaaaatcagaataaatattcaaaaa

SEQ ID NO: 249593 - DNA, 575 bp, Homo sapiens
accaaacaacagatcttgtccattgaggaacttcatccccttctatgwtaaggaatctgactgagtaattaggaagtttcagcaatagctgctggaactctaactcagttgccacttctgagttaggatgcagacatgaattggctattacagcagcctgcattagaagtattgcatacatgctgtaatacacaccagcaaatccaatgtatcatacatgagacagccgtgaagccagactatgaaccacaactgctgctattatttccataagaaaaaaaaataatacatccagatcttatttgtcagtgaaaacagcagcagaagtaaaatctgtgtcttctgctggcttacaaatttagagcatatctgaatgatatacaatatatcccaaattccttctagcttctaggtataaccccaggctgcaaaataatctaaaaactacagtttttagctttccagtctttgtacaggaggcatttcctgtaaaagtgggctgacatgtccattttatcatggacaccgcagtgtttgcactgggccttaaagaccaatatatttcaggagggtga

SEQ ID NO: 249594 - DNA, 556 bp, Homo sapiens
ttgattcacaccagagccttatcttttctcagtttgcaaactgatatcaccaataaatctctcctttatactatttagccatcctggtggtcctttgaacagccaggactcttgataataatgcactggtgttctcaatgtgatggctctgatgaaatgggatttgtgattctttttccataaaagtgttttagaaaattatgactgtgttatttatgtattacagagttgtgaggtagttgttttgattgatttttttttaatacttagttctctttaggacccagagagaagtccatgatagaaaggatattatattgaccaacattctcagcatcctatcttttgtctgtccttgaagctttgtaagtgtgttaatgcttgtggcatctggccaactctttattgaagataatttctttccatgtgatatggtttggctctgtgtccayacccaaatctcatcgtgacttgtactcccataattcccacatgtagtaggagggacccagtgggagataatttgaatcatgggggtggtttcacccatactgtt

SEQ ID NO: 249595 - DNA, 555 bp, Homo sapiens
atggggaaaatgtctccaggacatttcagaggtcttcacagcagcccctctcatcacaggtctggaggcctgtgaggaaaaagtggtttcctaggcagggctcagggtccctgagctgtgtgaagcctagggacttggtaaccctgtgtcccagccactccagctctggctgaaagaggtcaaggtagagctcgggccatggcttcagatgatgcaagccccaacccttggtagcttccacttggtgttgagtctgccagtgcacagaagtcaagaattgaggttgcgaacctctgcctagatttcagaagatgtatggaaatgcctgaatgtgcaggcggaagtttgctgcaggggtggggctctcatggagaacctttsctagggcagtgtggaagggaaatgtggggtcagagctcctacacggagtccctactgggtcatcacctagtgaagctgtgagaagaggtccactgtcctgtagacctcagaatggtagatccaccgacagcttgcaccatacaactagaaaagctgcagacactcaatgccagt

SEQ ID NO: 249596 - DNA, 516 bp, Homo sapiens
ttttctaattgctaacaaacacttcagtgtgttaaaagaaaatatacaactcacacaaagatatatttcctcctaatattaaagaaggagtaatatttgttgttgttttactctttatataagagacaccagatgtataacaaaaagggaatcatattataattatgtcagaagatatattattaaaatgtacatgtatttttgtatatttgtaacaataaagacttcaaaatatattttaaatcaggaaagccagttctagggaatttacaatcacataacctcatcttatttccttagatcatctagatccacatttcttagaatatgctatagaaaaactggkttggcaggattataacaggggttattagataaaaagcatcccatgataaataagcttggaaattgtgagtgaaattaaatagctttatttacttcagggtaatcagatcttaagttgtgacagtggatacttaaattttcaggaggtaattatggtcggcagcatttctc

SEQ ID NO: 249597 - DNA, 606 bp, Homo sapiens
gaggaaaaataaaggcaagttacattttttttgaaaaaagtaatctgcagatcagaggagaccaagcatcctgattagtagaaaacagctgagtcccaactgggcagtttccaagtccaaagcagaaatctctgttgaaagccccttgcaggcagctggtgggaggagttttctgacacagtgtctcacctagggttataggaaccatcttagctcagaggcaaaacaagatgtttgtctggagccctctccagaaacatgggaagcatggctgcccttttctcactcaatatggttctgggttagtttcatgttacaggtctttatatgttttgatggaaaaaatatcatatacatataacagacataaaaattacrgatgaacagaatatcttacagaaaatctttatagtttttattttaaaaatcatgactaaaacataatattataaattgactggtttgtaagaagagagttggatccaaattatatttcagacaaagtgggttaaggctaaatttaagattttttaaaattgtcttgagaagtaaccttatgaaggctgtgaaccaaattttgggtaaagccgttagagtcagttacta

SEQ ID NO: 249598 - DNA, 579 bp, Homo sapiens
atttctaaaacagagtccacaaattakttgcatgactatcagtgaaaattatcacagacagttcattttatataaagatttactcaaataagtcttagcatgaggtttccaggaaggaggcagtgagataagaagagaaatgcaagtggttaattagggagatgcagaaaacaccagcaagggaatggggatatgaggcagggaaaggaaggaagctaataaaggaatattatgcagccaaccctctgaattaatggagttcagtcccttggctaactctgggaataaaaagtagaaaaagtttcaagtttatcagacttgggagtgagatatctagtatgtttacatgtcaggtcctatcaagcatttgttgaggtctgccctgagagatattctccaatacttcctgcatagcatacaggaagtaatgctcttctaggagggaaagcctttagaaaaaaaggaagttactggcagctggtcataaaactatatccaataaaatagtaaggcccaaattatatgaccaggatactaaaagggtctctaagaaataaaagagatgctataagtatgtat

SEQ ID NO: 249599 - DNA, 647 bp, Homo sapiens
gtgtttcttttctatatttagcactcctttcaattagacaggtctggcagtatattagggttctctagagggacagaataatatatatatatatgtgtgtgtgtgtgtgtgtgtgtgtgtgtgtrtatatgtgggagtttattaagtattaacttataggatcacaagttcacacaataggctgtctgcaagtttaaggaaaaggaagaccagtctgagtctcaaaactgaagaagttggagtccagtgttcaagggcaggaagtatccagcacaggagaaagatgtaggcaggaagggtaggccagtatcctctttcatgtttttctgcctgctttatcttcgatggcagctgattagattgtgcccactagattaagggtgggtctgccttccccagcccagtgactcaaatgttaatcagctttgccaacacattcacagacacacccaggattaacactttgtatccttcaatctaaccaagttgacactagtattaaccatcacaagtggtaatgtatcccctttgcatttgcttttctgaataggaccttatttctccttccttatgaaacttaacttggctggatattaaattattgattgcaatttattttctataagaattctgattataagcatcct

SEQ ID NO: 249600 - DNA, 647 bp, Homo sapiens
gtgtttcttttctatatttagcactcctttcaattagacaggtctggcagtatattagggttctctagagggacagaataatatatatatatatgtgtgtgtgtgtgtgtgtgtgtgtgtgtgtgtatatgtgggagtttattaagtattaacttataggatcacaagttcacacaataggctgtctgcaagtttaaggaaaaggargaccagtctgagtctcaaaactgaagaagttggagtccagtgttcaagggcaggaagtatccagcacaggagaaagatgtaggcaggaagggtaggccagtatcctctttcatgtttttctgcctgctttatcttcgatggcagctgattagattgtgcccactagattaagggtgggtctgccttccccagcccagtgactcaaatgttaatcagctttgccaacacattcacagacacacccaggattaacactttgtatccttcaatctaaccaagttgacactagtattaaccatcacaagtggtaatgtatcccctttgcatttgcttttctgaataggaccttatttctccttccttatgaaacttaacttggctggatattaaattattgattgcaatttattttctataagaattctgattataagcatcct

SEQ ID NO: 249601 - DNA, 647 bp, Homo sapiens
gtgtttcttttctatatttagcactcctttcaattagacaggtctggcagtatattagggttctctagagggacagaataatatatatatatatgtgtgtgtgtgtgtgtgtgtgtgtgtgtgtgtatatgtgggagtttattaagtattaacttataggatcacaagttcacacaataggctgtctgcaagtttaaggaaaaggaagaccagtctgagtctcaaaactgaagaagttggagtccagtgttcaagggcaggaagtatccagcacaggagaaagatgtaggcaggaagggtaggccagtatcctctttcatgtttttctgcctgctttatcttcgatggcagctgattagattgtgcccactagattaagggtgggtctgccttccccagcccagtgactcaaatgttaatcagctttgccaacacattcacagacacacccaggattaacactttgtatccttcaatctaaccaagttgacactagtattaaccatcacaagtggtaatgtatcccctttgcatttgcttttctgaataggaccttatttctccttscttatgaaacttaacttggctggatattaaattattgattgcaatttattttctataagaattctgattataagcatcct

SEQ ID NO: 249602 - DNA, 554 bp, Homo sapiens
aaattttagtttatgtcttgatcctgatcaaatgcctggctcttccatccatacccttaagtttatccagtgtcaatttgatagggacagaaggaagccaagtgcctaggtaggtaggggcaggtaccctttgaaaacccacctccaagccaaagacagtttaaagcctgaaagctaaactacaagcaccggattgagaacttgtcctcctatttggcttgctttcctctgatccccactcttcacctattttacatacacctaaccttttctaattggctttctacactgccctacccacctttaaatggtgctttcactttaagcttttttgcatactcacaaaacaatcatcatgcacactccatcctgtgcctgtaaaggccccagactcagttggtagagaggaatatggcctgactttggagaagagacaacctgacttcagggaagattacctgcycttcttttcccctctctaactcccctctctgctgagacctgttttcatctatcaataacattctccaccttcaccatccttcaattgtcct

SEQ ID NO: 249603 - DNA, 580 bp, Homo sapiens
atgtcttacttaattcttacaagtttttatgtgccacaattttatttccattccatttaaaataatttctaatttccactgtgatatcattaaaaaaacatgggttatttagatgtgttttcttttaaagttagaattttttgattgattttttcacttcataccactgaggctagagaaaatgctctttatgattcaatcatttgaaatgtattaaggycttctctatttttcaatatgtggtcgatgtctatgattatcatttgtaattttaaaagcagggataatgtgcagtcattgagtgcagaagtctatatatgcctattatgtaaagtttgtaaaataagttttcaatcttctgtatccttagttcccctatattctcaccagtaactaaaaggtatgttaaatattttcatattattattgatttatttatttcttatacacattttatcaactttgtaatttatacactttaaagctaaattttgatacttagatacctttaggattgttatatcttcctgcagaatccatgctttatttcataaagaaatgccctttttatgtcttgtta

SEQ ID NO: 249604 - DNA, 580 bp, Homo sapiens
atgtcttacttaattcttacaagtttttatgtgccacaattttatttccattccatttaaaataatttctaatttccactgtgatatcattaaaaaaacatgggttatttagatgtgttttcttttaaagttagaattttttgattgattttttcacttcataccactgaggctagagaaaatgctctttatgattcaatcatttgaaatgtattaaggtcttctctatttttcaatatgtggtcgatgtctatgattatcatttgtaattttaaaagcagggataatgtgcagtcattgagtgcagaagtctatatatgcctattatgtaaagtttgtaaaataagttttcaatcttctgtatccttagttcccctatattctcaccagtaactaaaaggtatgttaaatattttcatattattattgatttatttatttcttatacacattttatcaactttgtaatttatacactttaaagctaaattttgatacttagatacmtttaggattgttatatcttcctgcagaatccatgctttatttcataaagaaatgccctttttatgtcttgtta

SEQ ID NO: 249605 - DNA, 427 bp, Homo sapiens
tttatgaaaaaactagttcattgccaaagggatgttacttacagcaaaatctctagaagctctgaaatagaatttgagttttatttgcattttatttttacattcttactactctactaactacattctgcctaagtaaatatgctcaaagctttaaaagtaggctgaatgaatcactggtggaaaaataatgaccaggagccaacawcaagctgaaaaaacaagaatccataatctccatatgagaggaaactgtgtggtaagatggatttaatgggtctgggctaaaatggtaaaagtataatggatgtagctaaaacaaacaaggtccaactctaaaccagcacaagaaaaacagagcaagggcatttgatttcatttaaaagaaattaaattttaaatcaaagtaaaaaatgtaagtcattac

SEQ ID NO: 249606 - DNA, 578 bp, Homo sapiens
aattttatccaggctgaaggacaggcacggtggctcgctttggcaggacgaggcaggaggatcgcttaaggccaggagttcragaccagctagggcaacatagcgagacccgcacccccatctctacaaaaaaagtttaaaaattacccaggcctgatggcacatgactctggtcccagctactcgggaggctgaggcaggaggattgcttgagcccaagaggttgaggctgcagcgaactatatggttgcaccactgtacttcggcgagatcctgtctcaaaaaaaaaatcaaaaaaaaaaaaaaatccagtctcagaggagactggggcaggattcccatcctgtgggtcctggcaggtgacccccatgtgtcctccatagtagggggtgatcaggccctccaagaagtcaataccaattatatcccaaagcctcttacatgtctccacctggacctccctgtctacctccagacatacagctgccctctggacctcacccagggacactgctatgatcactgagcgattcaccaatattccagctctttctccctccaggtacaaggtaggaagg

SEQ ID NO: 249607 - DNA, 691 bp, Homo sapiens
ggatatataggagctaatcaggtgaagagagcccagggagaaaattttagacaaaggtatccatatgaagaggttgcagttctagcagaarcatgattcatttgagaaaccaaatggagggtaatttggctggagtatagagagaaaatgggagttatgtatggaaagtgcctggagagtgggctgtaaccatgcaggatgttatgggtcattttaagttttctggtgtttagcctaaaagcaatgtaaagctattaggtcataacatgggagtgatatgaccagttttacattttgaaacaatacgtccagctgtagtatgaacacattggaggggttaggagtagatatgagatatatctggagccaattgtaggaatgtatgagaaataaggggggcttaaactagggttatggattagaggaaaaagaagtgggcagatgtaggagaaatttaggaaagtacaacagaaaaatgtggtggattatggagggtatagaagagagtgtcaattatgatttttaggttttgactggtataattgaatggatggtgggctcattctcattgataaagaacactaaaagagtccgagcttagagcaaaaaaccatgtgtaattttgaactggctggcttggatatacttttgtgatagccagtgtgataatccaggggaggttagataaaaa

SEQ ID NO: 249608 - DNA, 610 bp, Homo sapiens
aactagggttatggattagaggaaaaagaagtgggcagatgtaggagaaatttaggaaagtacaacagaaaartgtggtggattatggagggtatagaagagagtgtcaattatgatttttaggttttgactggtataattgaatggatggtgggctcattctcattgataaagaacactaaaagagtccgagcttagagcaaaaaaccatgtgtaattttgaactggctggcttggatatacttttgtgatagccagtgtgataatccaggggaggttagataaaaaggcctggaattcataaaggaggcctaaaccagagattgtaatgcttgagactttctttgtaggagataaaactgtcagtgtgggtgagttgcctggggaaagagaacagacaagaaggtgacctaggtttcgttgtgaagtacaaggcaagagcttctgctgagagttatcaaggaggtgagagggagaggggcttaggatgaaagaaaggtaaggggccagggaaatttttgaggaattgataatatcagcaaatgggaaactgacacttagtcatatcagcaaatgggaaactgagttaatggggaaaagttttaagttt

SEQ ID NO: 249609 - DNA, 599 bp, Homo sapiens
ataatgttattgcttgaagaatacagcatatgaaatcacaagaatatcaaaatgaaaagtcactaggcttgaaacatataatacattatcagatgcagtaaaatattaactaacctgaactctgcwtcagaaaaaaaaaaaggtgtggaaaatatctaagttttttacttcagaaacagataaaatagaaagtataaggatgttacagtacaaattagaaaagccaacacacattaatttattattgttctagactagactacctttggtacttaaactttttaaaaaacaatttcttctatctcatccaaacgcacttaatgggtatgacatccatgaagtagcttcaacttacaacattcagcaaaattaaccttttcacctcatgggggaagtatatttaataaatgtataacaacatttcccttttactaaaactgcaaaatatgatcattaagaaacctaatacttataaaactttacttacttagctctccaattaaaattggaatcctggcagccacaatctatttgtgggcttggtgaatacaaagttttaaaagatttgccaactgacataggaatttaattacttcata

SEQ ID NO: 249610 - DNA, 624 bp, Homo sapiens
ggggtgggagcgggtgagctacctgaacttcttgaataagcccattatgcaatagcatgattatctccagagaagttggggtggtgttctggatggcaggcacagtggatgtgctgcaaaggcatagctgaggttttgaagaagtgagatgcaacagagcagtaatcatgacataatgtgtatatacaacatacacacgtgtgcaaatatttacaacacaaaggcatattgatcagctaaaacagcatgtatatttgtaaacaaataaattacaaagtatttgtaattctaccacttggagactcgactatgtttttggaaatcttctggtcttttccttttgctttgcacccagtttccytgcataatcactctagtttactaaaagacaatttgatgtcattgtcaagatcatggtttttaaggtcagacagccctgggtagagtcaaggctctgttatgttataggaggcaagttatttaaccttgttgagacttgttcatccatacaaggaaggtgatgatacaaataacacagtattgttctgaggataaaagagaaaataccatgattttcaatcctcactgcacattagaatcatccaagatctttgaaaaattcca

SEQ ID NO: 249611 - DNA, 624 bp, Homo sapiens
ggggtgggagcgggtgagctacctgaacttcttgaataagcccattatgcaatagcatgattatctccagagaagttggggtggtgttctggatggcaggcacagtggatgtgctgcaaaggcatagctgaggttttgaagaagtgagatgcaacagagcagtaatcatgacataatgtgtatatacaacatacacacgtgtgcaaatatttacaacacaaaggcatattgatcagctaaaacagcatgtatatttgtaaacaaataaattacaaagtatttgtaattctaccacttggagactcgactatgtttttggaaatcttctggtcttttccttttgctttgcacccagtttccttgcataatcactctagtttactaaaagacaatttgatgtcattgtcaagatcatrgtttttaaggtcagacagccctgggtagagtcaaggctctgttatgttataggaggcaagttatttaaccttgttgagacttgttcatccatacaaggaaggtgatgatacaaataacacagtattgttctgaggataaaagagaaaataccatgattttcaatcctcactgcacattagaatcatccaagatctttgaaaaattcca

SEQ ID NO: 249612 - DNA, 624 bp, Homo sapiens
ggggtgggagcgggtgagctacctgaacttcttgaataagcccattatgcaatagcatgattatctccagagaagttggggtggtgttctggatggcaggcacagtggatgtgctgcaaaggcatagctgaggttttgaagaagtgagatgcaacagagcagtaatcatgacataatgtgtatatacaacatacacacgtgtgcaaatatttacaacacaaaggcatattgatcagctaaaacagcatgtatatttgtaaacaaataaattacaaagtatttgtaattctaccacttggagactcgactatgtttttggaaatcttctggtcttttccttttgctttgcacccagtttccttgcataatcactctagtttactaaaagacaatttgatgtcattgtcaagatcatggtttttaaggtcagacagccctgggtagagtcaaggctctgytatgttataggaggcaagttatttaaccttgttgagacttgttcatccatacaaggaaggtgatgatacaaataacacagtattgttctgaggataaaagagaaaataccatgattttcaatcctcactgcacattagaatcatccaagatctttgaaaaattcca

SEQ ID NO: 249613 - DNA, 588 bp, Homo sapiens
cagccttcttctcttatggaaatgtaaccctcacaagaaaatctcaaacctgctttctttttccattggaggaagctccctcaagaatccagcctacactgcgcatttgtggttgtcccccattaaacatttataccattgccgtcagytcctgatttctatctggaggttcacgttgttccagggaacctgaccaatcccttgaaaaatcccacccattgaatggggggaactgatgttgcttgttacttgattcaagcctcctggtgggcagaaggtattcttaattctcctaatccagcctctgtcttaggcagatcctgtgcattaaacctcacagtggggctttctcggtgttcctgttccccctgccagggctgcaaaactctgccttgtgttagtcttgtgtgagagcgtgtttcctgcccctcctgcaatggaggagcctagatctgattgagtctcctggacctcctttagtagaaggtggctttgggctgggcctactgagaggtgaaaaagtttcctatgcagatagcttttattgttcctctaggtttccttatttttatcagattgggaaaaaag

SEQ ID NO: 249614 - DNA, 588 bp, Homo sapiens
cagccttcttctcttatggaaatgtaaccctcacaagaaaatctcaaacctgctttctttttccattggaggaagctccctcaagaatccagcctacactgcgcatttgtggttgtcccccattaaacatttataccattgccgtcagctcctgatttctatctggaggttcacgttgttccagggaacctgaccaatcccttgaaaaatcccacccattgaatggggggaactgatgttgcttgttacttgattcaagcctcctggtgggcagaaggtattcttaattctcctaatccagcctctgtcttaggcagatcctgtgcattaaacctcacagtggggctttctcggtgttcctgttccccctgccagggctgcaaaactctgccttgtgttagtcttgtgtgagagcgtgtttcctgcccctcctgcaatggaggagcctagatctgattgagtctcctggacctcctttagtagaaggtggctttgggctgggcctactgagaggtgaaaaagtttcctatgcagatagcttttattgttcctctaggwttccttatttttatcagattgggaaaaaag

SEQ ID NO: 249615 - DNA, 620 bp, Homo sapiens
ttgactgttttaatacttgagggtatagagtgaaagcaatgtattcaaaacttacatgaaatgattccttatccctgtttagtatgattatttatctgaattagttatgctctctttcattcctaaagttggtaattgtgctttcttttttttaatgatcattgttgtgagggattgatcacttttattaatcttttcaaagaacttgctttgggctttattattattgtactcgttctctatttcttgtatttctgcactttagcatttcccttcttctacttccattaggtttcatttgctcgtacatttctagcttcttagatggaaacacatttaacaaatttcactatcattctatttgacatacttcttaatttccctgtaacaactttgatctacgtatacattttcctatgtatactttttgattttcaagtatatagagcttttacacatatcttttattaatttttaatttaatttcattgtggtcagagaatacattctctaayatagcaatctttggaaactatttcataattaaaatttatggccccatatatgatcttttttttaaatattgtacttggatttgaacatgtattctacagttgcca

SEQ ID NO: 249616 - DNA, 579 bp, Homo sapiens
tggtctccccagagtccattttgtccccatccatacagaaggtctttcttttccctgagcatagggagaagttaatggaatggagagaggagaataataagtcaatttcttcctatcttttgtgtgttgttttaaaaataatatgttaatactttaagtaattattcatttcacrttataatccttataatcccctctcatgtatatgcttcttttttactagcaaaattgcatcaatctatattctctgtctccacatcctcatattccaccttttcttggaatcacttcactcaggcttttctttccattgctccaggaaagccactctcatcaagctcaccaatgacctccaggtatcaattatttatcctcttcttgttcaacttctcagcagcattgattttttaaaattctcctctctattgaaacactttctttcttgactccctgaataccactctcaccttctgaccacttctcaaacatttctgcactacactctaatccaagctaccttcttctcccacctggtctatcaaatagcttcttaaccggtttttatttttttattccact

SEQ ID NO: 249617 - DNA, 648 bp, Homo sapiens
gaaatcactgctatatatacttctcgtgatgttgcagtgtcttttcctcataggagacttgcctacttcttcagtcaatgggttctgggtgtgagaatgctcaggcctggaaactggacagggatcataattatccattgaggtgaccaattacattgcccctaggaacatcacgttttacaagccaacgccatagaatcctgcaggycagagtatggctcacccctgtagctgccattctaaccttgccgctgattatggtaattacgtctactgtttttgatgttgaagtgctgccacctggcgtcagtatgtaatctatctcccattgctattagaaaacccagttttgcaatagcgtttcctattgtcagtgtaagcctcagatgccaccactgatgaactatgaatgatgctggtcccctcccctccaaacacaagcaagtgagtgattgtgagaataatactggccgttgctttcattggagcagtgctgtgagtactgcatttcttaattctttagtaaaatgaaacgtcctctgagcccttctgaggaacttaatcagccagtaggttttctaatatgtagtagaaacattctagtatacccacttctctgtgcctgttgattctattctccacagtttg

SEQ ID NO: 249618 - DNA, 579 bp, Homo sapiens
aaagtttacattctaaggagaatagtcaataaaaaataagcaaagaaatatacaaataattttagattatgacataagcaggattataataacayattggaggatgggataaagagctcaaaagaaatggggagaaaattaaggcactgcttggaaatgacttaccacagaagttctctaagggaaattctagaaccaaaggatgaaaaggagccagctctgtgcagaggtgaaggaacatcataccaagatgagagaacagcaaggtcgcaggccctggagtggggaagtgaacagtcattcacatgttcactgactatttctggtttcctacctcacaggcacaatgtaggattgctcttccttgttcttgaattagatggggacacatgactagttctagcctctaaattataagtagaagtaatgagtatcaactgctgatacaagatctgccagaggatgttttccctgtagcataacaactaacaattgttgagatcaatggcagcttcatcatcctagatccctgagtgactgcaataaacagagcccctctgtgatccatagtaaacagac

SEQ ID NO: 249619 - DNA, 626 bp, Homo sapiens
ccaatagtcacaccaagaaaaccttacttctctgacataagagagttctgcggtgaccttaactataatggcaatggcaggatataaagagcctcagactggaagagagaaggtgaaggcccttgtttctgtaggttggctcagaatctggtgtgtgcagatggcagatggccgaataagtcacaagtttccaaacctgaccctgtgtcatattcactacgtgatcttgttaaaagaattccctcagcagattactagatctcagcgggtgccctgaaattaagtacctcagggtgatttttatgcatcccgtggattttggagtcatggttctaagttataagccttctcagaacccatatcatgttggtcctccatgtgacagaatctccaccttggttcctgatttgcacccctattccctttctgatattgggattctgtactgaacccgagcttactgggctggagctttgaccatacatacatcaatccctttgttctgagaaatgaatcctgtctcctgagctcycagacacgtgacaccttgtgattcagaggaataccactctttgaggaggccctgctggaactcattgtggtacataattttgcgatacaggtaa

SEQ ID NO: 249620 - DNA, 579 bp, Homo sapiens
aaagtttacattctaaggagaatagtcaataaaaaataagcaaagaaatatacaaataattttagattatgacataagcaggattataataacatattggaggatgggataaagagctcaaaagaaatggggagaaaattaaggcactgcttggaaatgacttaccacagaagttctctaagggaaattctagaaccaaaggatgaaaaggagccagctctgtgcagaggtgaaggaacatcataccaagatgagagaacagcaaggtcgcaggccctgragtggggaagtgaacagtcattcacatgttcactgactatttctggtttcctacctcacaggcacaatgtaggattgctcttccttgttcttgaattagatggggacacatgactagttctagcctctaaattataagtagaagtaatgagtatcaactgctgatacaagatctgccagaggatgttttccctgtagcataacaactaacaattgttgagatcaatggcagcttcatcatcctagatccctgagtgactgcaataaacagagcccctctgtgatccatagtaaacagac

SEQ ID NO: 249621 - DNA, 585 bp, Homo sapiens
taataataatggtgagaagaacaaagctttggagagtatattctgtgttaggcactgtgaaaatcactttacatgcattagggcactaatcctcacaatgactctctaaaatcaacattactcttatcagccccattattttgcccatgaaacaggatcaacaagcttaataacttgccaaagatcacatatgcagccagtggctgagctgagattcaaactcaagcagtctaacccttgagctgctactcttaatcacaatgatgtacagccargcaagacaggggctggagaatgaggaattatgacatcactaatgtgtcatttacacacagtttgtcctattcgtcgaggcatttttacatgtattattcgatcttcacaggcttctacagcattattgttgggtattgtcggacagatgttattgtctccattttgcagatgagtaaactgaagtccagaaaagttaagtgacccagttaaggtcacatagcaagtcagtagaggaaccataactatagcttgagggcttaattctattgatgtatcctgcataaaataacagagctagagaagagtttc

SEQ ID NO: 249622 - DNA, 617 bp, Homo sapiens
gaatgattatgtaatgtttacacttgcattgctcaattaattatttatttcattaaatatttactggatgcctgctctgtgcctagcactaggctatggcattgaaaggcagtccctttytcagcaaagcactccaaattcattatatgcactctgtataaggaaaggaaaagagagtcgaaagaagttttattgtttacttaaaagtcacatgcaccaaactaatgccagagctagaagcctggttgctcagcaagccttatccaattaacagaggcctcagggaacttggggtggcatgagggtgagtctatggctggggatgggctttaggctaaagcctgagtcagggatctctggctggagtcagaggtccacctggagagaacaggacctggcttataaggaaatcaaattatcaggtattacaggataaaatagaacaccagagagagaataggagttgccactggttcagcaaagagaaacatctcttttttataaggagaccaattagccacccaaaatctcgaattttcatccatctgggcactgacctctcagagatggtacccctgtgggccacactgtcccccatagtaaaagcaagggttgca

SEQ ID NO: 249623 - DNA, 555 bp, Homo sapiens
gcactgcgaattaaaaatctctccaagtaattctaatgtgcagccaaggctgaaaaccactggacaagaaattctctagggctcctttcagccccaataattcatcatttcacaatgtaagacagtatttcccaaactttaatatgcataagaatcacttgggatccctgtttttaaaaattcgtttccgagatccatctctagagattycattgcagtatatttaaaatggagcccaggagtctgcattttaaaaacaccccagatcctaggaggtcactgtgagactcactaatctaaggattattagacatacaggactccatttctcatcatcatcgtaatcaccaaacaggctttcagacccaaagctcacagctaggagggctgttataaggcagacacatccaatcaccagagtcaggcttagcacttggcctatcacaaggctgacagatggcagagggagggttccttggttttcaggagaaaaaaaaacatgatgctgcagtatgccactgcagaggcagagacaggccgaagattgatagtcca

SEQ ID NO: 249624 - DNA, 555 bp, Homo sapiens
gcactgcgaattaaaaatctctccaagtaattctaatgtgcagccaaggctgaaaaccactggacaagaaattctctagggctcctttcagccccaataattcatcatttcacaatgtaagacagtatttcccaaactttaatatgcataagaatcacttgggatccctgtttttaaaaattcgtttccgagatccatctctagagatttcattgcagtatatttaaaatggagcccaggagtctgcattttaaaaacaccccagatcctaggaggtcactgtgagactcactaatctaaggattattagacatacaggactccatttctcatcatcatcgtaatcaccaaacaggctttcagacccaaagctcacagctaggagggctgttataaggcagacacatccaatcaccagagtcaggcttagcrcttggcctatcacaaggctgacagatggcagagggagggttccttggttttcaggagaaaaaaaaacatgatgctgcagtatgccactgcagaggcagagacaggccgaagattgatagtcca

SEQ ID NO: 249625 - DNA, 464 bp, Homo sapiens
agaatagtcgggtaaaatgatgaggtcaatgcattggagacccagttggggtgaaaatattgttgtagagagaggactagatgaatcaagacaaagagcacagaagctggcaatcagggagtaagatatttgaaataaagatttcagaggtgacacagttactgatgatacaggttgagcactcctttatcgaaatgtttggggccagaagtgttttagatttcaratttttttcagattttggaatatgtgcactgtactgattgagtatcccaaatctgaaaatctgaaatccgaaatgctacaataagcatttcctttgaacatcatgttagcactcaaaaagttttaaattttggagcgtttcagatttattttgtgaatttcggatgctcaacctgtaataaggtctaggcaatagtggggaggaaggcaagaacactggcagagatcaatgtgatccc

SEQ ID NO: 249626 - DNA, 587 bp, Homo sapiens
ctatttgaattaataagtaaactaaacatggtcattagaaataaagccaatctataaaaattagttgtatttccatatattagtaacactataaattagaaaaattaagtttcaaggagtgtagcattaataacagcattaaaaaacactaaattcctaggaataaatgtgacaatagatacagaaaactacaaacatcactcacaaaaatggaagataagctaaataaatgaaggtatatgttcacatattagacatattggcatataataaatatgtcaattcttcccaggccaatctgcaaattctgtgtaatcctttttgaaagcacatcagattttttaagacaaactgacaacctaatcytaaaatgtatatgggaatttaaagtgccaaggccagtgaaagtaaagaacaacaacataggctactatatttagaatctataataaagctatgacaaattttatatatatatataaaatatagacatatgtatttctatacacacactatatattatgtatatatgtgcatacacatatgcacatacacatatgtactacatatatacatatatatatact

SEQ ID NO: 249627 - DNA, 464 bp, Homo sapiens
agaatagtcgggtaaaatgatgaggtcaatgcattggagacccagttggggtgaaaatattgttgtagagagaggactagatgaatcaagacaaagagcacagaagctggcaatcagggagtaagatatttgaaataaagatttcagaggtgacacagttactgatgatacaggttgagcactcctttatcgaaatgtttggggccagaagtgttttagatttcaaatttttttcagattttggaatatgtgcactgtactgattgagtatcccaaatctgaaaatctgaaatccgaaatgctacaataagcatttcctttgaacatcatgttagcactcaaaaagttttaaattttggagcrtttcagatttattttgtgaatttcggatgctcaacctgtaataaggtctaggcaatagtggggaggaaggcaagaacactggcagagatcaatgtgatccc

SEQ ID NO: 249628 - DNA, 591 bp, Homo sapiens
ttctctgacattagcaatttgccaaagggcttgcaatgagagttctatgttaagtatctaatacctgcaaggccagttctgaacacagtcctggccctcctaatccacaggttttgtaccaaccatgcgttgaaaatattcaaatttttttaaaaacttaaaaataataataaagcaataaaaataatacaaataaaacattacagtgtaacaactatttacataacatttacattgtattagaagtattgtagagattatttaaagtatacgggaggatgtgcataggttatatccaaattaccacaaatgtgatggcttaaaacaacaaaaatgtattatcttatagtcctagaataagaggacttgagaagttcaagatcaaggtattggctgggccctgctccctccaaggcgtctaggggagaatcctttcttacttacatcttccagytcctgttgctctaggcatttgactttctccaacagaactctaccctctgcctccatcttcacatgcccttctcttcttcctgtatctgctcctctttttcttttatgaggacacttgccattggatttagggactac

SEQ ID NO: 249629 - DNA, 652 bp, Homo sapiens
ttacaggaatgttcttgtattgaatactgtaaataactgtacacgatagtaagtatttttgtatctcagacatatctcaacatagaaaagttacagttacatatgtgatattataatcttatgggaccaccttctacatattagtctgtggtctactaatgackgaaacattgttatgcagcacatgactatattttattaatcatgtttactgtgtggactcttctatcattattctaaaactcagagatcacaaggaattcataaaaagatcatgaggtcaatttaattaacctcattagaagcattaaacaatttaattttgttttctccctttgttctatgaattttatatgaaccattacataagctaactctagaacttgtgatattttaattttcattttgaaatacatacttcctatatgtatatatgtacatgtgtagatgtatgtataaacaaaaactcagccaacattattttattctttttttttctttttgaatcttatttcctcctgactaggtcaaatccctttttcatatggtgccaaagtacttgtatttatattttgtggcacacttcacaatcagatttaagcaattattgttgtcatggttttcagaaatgaataatctcttcttctagaca

SEQ ID NO: 249630 - DNA, 652 bp, Homo sapiens
ttacaggaatgttcttgtattgaatactgtaaataactgtacacgatagtaagtatttttgtatctcagacatatctcaacatagaaaagttacagttacatatgtgatattataatcttatgggaccaccttctacatattagtctgtggtctactaatgactgaaacattgttatgcagcacatgactatattttattaatcatgtttactgtgtggactcttctatcrttattctaaaactcagagatcacaaggaattcataaaaagatcatgaggtcaatttaattaacctcattagaagcattaaacaatttaattttgttttctccctttgttctatgaattttatatgaaccattacataagctaactctagaacttgtgatattttaattttcattttgaaatacatacttcctatatgtatatatgtacatgtgtagatgtatgtataaacaaaaactcagccaacattattttattctttttttttctttttgaatcttatttcctcctgactaggtcaaatccctttttcatatggtgccaaagtacttgtatttatattttgtggcacacttcacaatcagatttaagcaattattgttgtcatggttttcagaaatgaataatctcttcttctagaca

SEQ ID NO: 249631 - DNA, 652 bp, Homo sapiens
ttacaggaatgttcttgtattgaatactgtaaataactgtacacgatagtaagtatttttgtatctcagacatatctcaacatagaaaagttacagttacatatgtgatattataatcttatgggaccaccttctacatattagtctgtggtctactaatgactgaaacattgttatgcagcacatgactatattttattaatcatgtttactgtgtggactcttctatcattattctaaaactcagagatcacaaggaattcataaaaagatcatgaggtcaatttaattaacctcattagaagcattaaacaayttaattttgttttctccctttgttctatgaattttatatgaaccattacataagctaactctagaacttgtgatattttaattttcattttgaaatacatacttcctatatgtatatatgtacatgtgtagatgtatgtataaacaaaaactcagccaacattattttattctttttttttctttttgaatcttatttcctcctgactaggtcaaatccctttttcatatggtgccaaagtacttgtatttatattttgtggcacacttcacaatcagatttaagcaattattgttgtcatggttttcagaaatgaataatctcttcttctagaca

SEQ ID NO: 249632 - DNA, 652 bp, Homo sapiens
ttacaggaatgttcttgtattgaatactgtaaataactgtacacgatagtaagtatttttgtatctcagacatatctcaacatagaaaagttacagttacatatgtgatattataatcttatgggaccaccttctacatattagtctgtggtctactaatgactgaaacattgttatgcagcacatgactatattttattaatcatgtttactgtgtggactcttctatcattattctaaaactcagagatcacaaggaattcataaaaagatcatgaggtcaatttaattaacctcattagaagcattaaacaatttaattttgttttctccctttgttctatgaattttatatgaaccattacataagctaactctagaacttgtgatattttaattttcattttgaaatacatacttcctatatgtatatatgtacatgtgtagatgtatgtataaacaaaaactcagccaacattattttattctttttttttctttttgaatcttatttcctcctgactaggtcaaatccctttttcatatggtsccaaagtacttgtatttatattttgtggcacacttcacaatcagatttaagcaattattgttgtcatggttttcagaaatgaataatctcttcttctagaca

SEQ ID NO: 249633 - DNA, 627 bp, Homo sapiens
accacagaattctgcccactaatgtaaaccatcatgagagaattctgatttattaaaactgggttgcaattagcagagtttctttgtttgttttaatgttgagtatctgaatatgactattaaattaacaaatgatgatgtcagagaccaatacccccatttatcattggaatcattcattcaacttatgaacaattcagaggctaaatgctggaacttttgtgtttcagcatcagtaactcctgagattgggaagggccttcttgtaccatagggacagcaggcatatcattataatcacaastgattggttggccaactgaaggtcaggtatccctgtcagaaacctaatcttagtcttttgtctcttaatatggttccatttgaaattgttgcttaactcaatacattgaaatatgaagccaactcactttatcacatatttattgaacatctaccattgtgatagatatattgccattgttccaacaacagaaaaaatgaataccagatacatcatgtctttgacaaatttacattctggcaaagcaagaacataaatcactgaaataaaaagcagagtgaagaaaaagcttaagagacataaactgacagagaagtcagata

SEQ ID NO: 249634 - DNA, 627 bp, Homo sapiens
cagctgagctcaggtagaagaagacacctggaatgcaggggatttaaaaagatgtgctgagaagaacttaagtgaccggcatgaaggaagaagcataaatatttacaaaggcctagaatccctgtgattgcctcttttataagtgataatacatacaagcatctaattgagaatacaaaatgctctgaatagatmttccacctgtgcacttagccatcaaacacaaagattaaagagtcttggagtaagttaggctgacatgggatctctctgagatgttcagcaactttctttgatcactacttgtttaattaaagaacatgtttctataacatgactgaaagatgcttaaatatcagagggaagagaaacgtttctatctcattggaattttacttaaatctataatttgggattgcaagtagtggaagaaggtaaatcagccaaggcttagttcctgctgagactccttataatgctaagatacggcttcaaagaaatattccctagcgtgctgttcctacctacccttttcccttgatggttcctccaccttttgaagaattgtattttaccatttatttcctctaccaattaaccttcacattgtcattttcctgtttggaa

SEQ ID NO: 249635 - DNA, 586 bp, Homo sapiens
actaaacatgaggccctatttttgcccaaatacatgataggcacaaaaaatgagtaaaagaagtattcttttaaggatctgagactctcaaaggtgccacagcrtttgaccttggacatgacacttagtatagtgattagatgcacagacttggaaaccaaataggcaggaactagaccagtaggggtttagaaggctactactatttagttgtcttcataaggagaaaaggtaccagggcatgatggtgctgtttcatttcttttttcttttttttgttctttgagacagaatcttgctctgtcacccaggctggagcacagtggcatgatctcggcttactgcaacctccgccccaggttcaagcgattctcctgccttagcctcccgagtagctgggattacaggtgtctgtcaccacacccggctaatttttgtatttttagtagaggcggggtttcaccatgttggccagactggtctcaagctcctgacctcaagtgatccacctgccttggcctcccaaagtgctgggattacaggtgtgagccaccgcacccggccatgctgtttcatttctaaccat

SEQ ID NO: 249636 - DNA, 586 bp, Homo sapiens
actaaacatgaggccctatttttgcccaaatacatgataggcacaaaaaatgagtaaaagaagtattcttttaaggatctgagactctcaaaggtgccacagcatttgaccttggacatgacacttagtatagtgattagatgcacagacttggaaaccaaataggcaggaactagaccagtaggggtttagaaggctactactatttagttgtcttcataaggagaaaaggtaccagggcatgatggtgctgtttcatttcttttttcttttttttgktctttgagacagaatcttgctctgtcacccaggctggagcacagtggcatgatctcggcttactgcaacctccgccccaggttcaagcgattctcctgccttagcctcccgagtagctgggattacaggtgtctgtcaccacacccggctaatttttgtatttttagtagaggcggggtttcaccatgttggccagactggtctcaagctcctgacctcaagtgatccacctgccttggcctcccaaagtgctgggattacaggtgtgagccaccgcacccggccatgctgtttcatttctaaccat

SEQ ID NO: 249637 - DNA, 586 bp, Homo sapiens
actaaacatgaggccctatttttgcccaaatacatgataggcacaaaaaatgagtaaaagaagtattcttttaaggatctgagactctcaaaggtgccacagcatttgaccttggacatgacacttagtatagtgattagatgcacagacttggaaaccaaataggcaggaactagaccagtaggggtttagaaggctactactatttagttgtcttcataaggagaaaaggtaccagggcatgatggtgctgtttcatttcttttttcttttttttgttctttgagacagartcttgctctgtcacccaggctggagcacagtggcatgatctcggcttactgcaacctccgccccaggttcaagcgattctcctgccttagcctcccgagtagctgggattacaggtgtctgtcaccacacccggctaatttttgtatttttagtagaggcggggtttcaccatgttggccagactggtctcaagctcctgacctcaagtgatccacctgccttggcctcccaaagtgctgggattacaggtgtgagccaccgcacccggccatgctgtttcatttctaaccat

SEQ ID NO: 249638 - DNA, 586 bp, Homo sapiens
actaaacatgaggccctatttttgcccaaatacatgataggcacaaaaaatgagtaaaagaagtattcttttaaggatctgagactctcaaaggtgccacagcatttgaccttggacatgacacttagtatagtgattagatgcacagacttggaaaccaaataggcaggaactagaccagtaggggtttagaaggctactactatttagttgtcttcataaggagaaaaggtaccagggcatgatggtgctgtttcatttcttttttcttttttttgttctttgagacagaatcttgctctgtcacccaggctggagcacagtggcakgatctcggcttactgcaacctccgccccaggttcaagcgattctcctgccttagcctcccgagtagctgggattacaggtgtctgtcaccacacccggctaatttttgtatttttagtagaggcggggtttcaccatgttggccagactggtctcaagctcctgacctcaagtgatccacctgccttggcctcccaaagtgctgggattacaggtgtgagccaccgcacccggccatgctgtttcatttctaaccat

SEQ ID NO: 249639 - DNA, 548 bp, Homo sapiens
gcaactctttcattcttctttctcatctttagtacctacaaacaaaggggttgctgccatatactgcaggacccctattgcaggcccattagaaaagcatttgcactaagaaactgtggtctgccaggcatctatctagaagctgcttagagatgtacaatcataacacatcagcctaactgtctgcatttgagttagcagctccccaccaccattcyccatgacatgttgtaaagaatatgagctgctgctcagtttggtcctagcaattgctaaatgtatggccttatgtaatctctgcaagcctcattttttcatctgtaaattgaggataataatacccacaccagaggattgctgtgaggtttaaatgagataatacatgtaaagtacctaccagagtacttatggtaaacaataaatcattgtttgtttgtttgttttcgttactattgcactgacttgaccgggcatctagttcagacaatggggaaaatggagcagcatgatcatattcatttttgttttttaaaacaggttttttaatt

SEQ ID NO: 249640 - DNA, 548 bp, Homo sapiens
gcaactctttcattcttctttctcatctttagtacctacaaacaaaggggttgctgccatatactgcaggacccctattgcaggcccattagaaaagcatttgcactaagaaactgtggtctgccaggcatctatctagaagctgcttagagatgtacaatcataacacatcagcctaactgtctgcatttgagttagcagctccccaccaccattccccatgacatgttgtaaagaatatgagctgctgctcrgtttggtcctagcaattgctaaatgtatggccttatgtaatctctgcaagcctcattttttcatctgtaaattgaggataataatacccacaccagaggattgctgtgaggtttaaatgagataatacatgtaaagtacctaccagagtacttatggtaaacaataaatcattgtttgtttgtttgttttcgttactattgcactgacttgaccgggcatctagttcagacaatggggaaaatggagcagcatgatcatattcatttttgttttttaaaacaggttttttaatt

SEQ ID NO: 249641 - DNA, 548 bp, Homo sapiens
gcaactctttcattcttctttctcatctttagtacctacaaacaaaggggttgctgccatatactgcaggacccctattgcaggcccattagaaaagcatttgcactaagaaactgtggtctgccaggcatctatctagaagctgcttagagatgtacaatcataacacatcagcctaactgtctgcatttgagttagcagctccccaccaccattccccatgacatgttgtaaagaatatgagctgctgctcagtttggtcctagcaattgctaaatgtatggccttatgtaatctctgcaagcctcattttttcatctgtaaattgaggataataatacccacaccagaggattgctgtgaggtttaaatgagataatacatgtaaagtacctaccagagtacttatggtaaacaataaatcattgtttgtttgtttgttttcrttactattgcactgacttgaccgggcatctagttcagacaatggggaaaatggagcagcatgatcatattcatttttgttttttaaaacaggttttttaatt

SEQ ID NO: 249642 - DNA, 534 bp, Homo sapiens
atggcattaatctattcatgagggaagcacccttgtgatctaatcacctctcattaggccctaccttccaacactgttgctctggggattaagtctccaacacctgctttttgggagacacattcaaattatagcagtggtcattttcrtctttaaccataaatgctatgatgctttaaggaaggagcaagagagaactagagcaggcacacagggaacagaagaaaaaaggaagagaatgtgacttctgatggcacttaagtatttggttccaacatttcttagccttaactgcattttattcttacccccaatgagccaccctattgtccttgtccttataaattattctcccaacacacttttctagttactaagattgatttgaattgtcccttgcaaccaaggggattctaatacattaccagggccccatcccagagccactgaatcagaatctctggtgctgggtttcagatattagtattgttaactcaaaaatcacaaaatttataaatttagaaaggagagtag

SEQ ID NO: 249643 - DNA, 621 bp, Homo sapiens
acacagggaacagaagaaaaaaggaagagaatgtgacttctgatggcacttaagtatttggttccaacatttcttagccttaactgcattttattcttacccccaatgagccaccctattgtccttgtccttataaattattctcccaacacacttttctagttactaagattgatttgaattgtcccttgcaaccaaggggattytaatacattaccagggccccatcccagagccactgaatcagaatctctggtgctgggtttcagatattagtattgttaactcaaaaatcacaaaatttataaatttagaaaggagagtagactttcttatatagggttacagcttgcaaggtggccattctgacaggttgggaagtatagcctcctgcagaagcccaaaaggcaggcactttgagggaggggtgggtagaacaacagggattcatgctgagtgagttgaccatgtatacatattcaacaggttataggaagagctatgaatattcatgagcagggccatgcatgtgtaataaccaaatatacatgttacatatgacccatgttgtcaccttgcagtagagacataacatttaaatgtattacaatgaggccctat

SEQ ID NO: 249644 - DNA, 422 bp, Homo sapiens
tgaaatgcccaatcttcctgccagtggaatctgggagcaacgtaccatggtctgcctgaaagacctacagctacagcttgatcttcaaaactcrgctaacaaactttcaggcagctacctcaaggaaaggagggctccatcaaagacaacattaagcccttggatcatccttgcttgccactgtcttcccagcttcccaaaactgacaccagatgtcactagtcaaaactttaacatgtgtcagcacaaggcaagataatttcaactcctccaagattcctggctatttagcaggaatggaagacttggctgacactgctaagaccaacagcttccagaaaccaatagaaataagtccaataatgctatactgtagatacctttgcttccttgggtccaggttcaccggtgctgcctgtgcc

SEQ ID NO: 249645 - DNA, 422 bp, Homo sapiens
tgaaatgcccaatcttcctgccagtggaatctgggagcaacgtaccatggtctgcctgaaagacctacagctacagcttgatcttcaaaactcggctaacaaactttcaggcagctacctcaaggaaaggagggctccatcaaagacaacattaagcccttggatcatccttgcttgccactgtcttcccagcttcccaaaactgacaccagatgtcactagtcaaaactttaacatgtgtcagcacaaggcaagataatttcaactcctccaagattcctggctatttagcaggaatggaagacttggctgacactgctaagaccaacagcttccagaaaccaatagaaataagtccaataatgctatactgtagatacctktgcttccttgggtccaggttcaccggtgctgcctgtgcc

SEQ ID NO: 249646 - DNA, 422 bp, Homo sapiens
tgaaatgcccaatcttcctgccagtggaatctgggagcaacgtaccatggtctgcctgaaagacctacagctacagcttgatcttcaaaactcggctaacaaactttcaggcagctacctcaaggaaaggagggctccatcaaagacaacattaagcccttggatcatccttgcttgccactgtcttcccagcttcccaaaactgacaccagatgtcactagtcaaaactttaacatgtgtcagcacaaggcaagataatttcaactcctccaagattcctggctatttagcaggaatggaagacttggctgacactgctaagaccaacagcttccagaaaccaatagaaataagtccaataatgctatactgtagataccttygcttccttgggtccaggttcaccggtgctgcctgtgcc

SEQ ID NO: 249647 - DNA, 568 bp, Homo sapiens
aatcttggttaactggctttggtagtgtttgttaattttccccactttagagttactcttgttttttttgcagtactgtaatttttggaagaaagtcactatgtgcagttgatatataatgtgtagaaagttattctctatctccttggggcagagtatctacataaagcatttggaatttttcagcatgrgagatttgcctattctcttccatttattaatttcatcatttatttatatcaatatagactcatagatatttactttatatattgggttataattcaatataattttattttgttgttcaaattattccatttttggctactaggagcttaaatttcttcctatgttcttttgacatactttcatcattgtggttttttctttgttttgtttttgtttttgttttgttcttgtttttgttttgttcattttagcatgtgcttactttatgacataagatgtttcaggctaattttgtgtattttctgctctagtactaaaatcagatattttccaaggagtctgttttttaatatatgaatagtattagaaaccgaga

SEQ ID NO: 249648 - DNA, 596 bp, Homo sapiens
aaatgtctctcattgcccttgatatgaaatctaaactgcttatgcatctcacaaggctaaggttttacacctgattacctttccagtttcacttctcacaactcctctctctcttttgcccactcccactgcccttgcatgctttgttcaaatcagactgcatttcttttatttcttttagcgattccatacatgctgtctctcatatcattctctctccctgaaatgctttcccttctttgcccccactagagagagatgcgacttctttggggaagcctgtggtgcttctgctttgtgttctcatagcacgttgtacttccctatcatgacactcaatgcattttgttatggtggccaggaaaattcacctctcyggtctctgaaggagggggcacaattcaatggcctgagcactgaagccatatcttcaccagctgctcccagcctatgactgagcccaggggaatgctaaggccagtccattcctggtagatgtgagattcttcagattgctggctaggctggaagactctctttatctttgtcaaaactttatgagacttgcacaggagatttttcctacatatgttcct

SEQ ID NO: 249649 - DNA, 440 bp, Homo sapiens
cagtagagtatgaactgtgtgaaagaaggagccaagtctgtcttgttcacatttataacttctgtacctagcacatagtagctactcataagtatttgtcaggtcagtgttgttaaagtttggatctaatactacytttgctctgactccaaagcccattttctattcacttcctcatgcttctttctcgctgctcctgtcctatatacatacacacacacacacgcacacgcacacacacacacacacagcaatactaagcatgacaggatattcagatatagagaatgatgacccttactccccccaaaaagctaattgtactggaagactggatgtgatctgcaaagagcctttgtagggtggggatgagggaggatggagaaaagaaaaatatgtagatatttgataatcatgtgccctgccaccaagactttgtt

SEQ ID NO: 249650 - DNA, 440 bp, Homo sapiens
cagtagagtatgaactgtgtgaaagaaggagccaagtctgtcttgttcacatttataacttctgtacctagcacatagtagctactcataagtatttgtcaggtcagtgttgttaaagtttggatctaatactacctttgctctgactccaaagcccattttctattcacttcctcatgcttctttctcgctgctcctgtcctatatacatacacacacacacacgcacacgcacacacacacacacacagcaatactaagcatgacaggatattcagatatagagaatgatgacccttactccccccaaaaagctaattgtactggaagactggatgtgatctgcaaagagcctttgtagggtggggatgagggaggatggrgaaaagaaaaatatgtagatatttgataatcatgtgccctgccaccaagactttgtt

SEQ ID NO: 249651 - DNA, 568 bp, Homo sapiens
aatcttggttaactggctttggtagtgtttgttaattttccccactttagagttactcttgttttttttgcagtactgtaatttttggaagaaagtcactatgtgcagttgatatataatgtgtagaaagttattctctatctccttggggcagagtatctacataaagcatttggaatttttcagcatgagagatttgcctattctcttccatttattaatttcatcatttatttatatcaatatagactcatagatatttactttatatattgggttataattcaatataattttattttgttgttcaaattattccatttttggctactaggagcttaaatttcttcctatgttcttttgacatactttcatcattgtggttttttctttgttttgtttttgtttttgttttgttcttgtttttgttttgttcattttakcatgtgcttactttatgacataagatgtttcaggctaattttgtgtattttctgctctagtactaaaatcagatattttccaaggagtctgttttttaatatatgaatagtattagaaaccgaga

SEQ ID NO: 249652 - DNA, 618 bp, Homo sapiens
tgactaagggttcttaaaacactagcagatggaagctttggtaattatttctttatgaaagtggatacctgagtcgcatctagaatacacagattgctctgtagatcagaacgtgactcagtaaagacagcwcctcgctagtggtattatttaaaaggagaaaaatcctccattgtctaaaatttcctgccccagtcgtgcttgaaatcttattatttctttaagcatctcttctctgtgaggaaaaatcatcatcaacaatgccagcttccatgatcgactggcactgagctaagtgctttgtttgtattctctaatttaatccttgcaacaacccaaagaggaagtatttttattacccacattttacagatgagaaaagccaagatttagaaaggttacatgcttcacgaactcacacagttaattttcatcagtgccacaggtacttgtacaggacctgaccacttgctgtctgaatgcagagcctttgcagtgagttacggctcagaatcaccatgtcacaaaagctatgctattttcacataaattactgagccatgcatttaaggggtacctacatttaaacagagtattcctatagatacaatatattca

SEQ ID NO: 249653 - DNA, 618 bp, Homo sapiens
tgactaagggttcttaaaacactagcagatggaagctttggtaattatttctttatgaaagtggatacctgagtcgcatctagaatacacagattgctctgtagatcagaacgtgactcagtaaagacagcacctcgctagtggtattatttaaaaggagaaaaatcctccattgtctaaaatttcctgccccagtcgtgcttgaaatcttattatttctttaagcatctcttctctgtgaggraaaatcatcatcaacaatgccagcttccatgatcgactggcactgagctaagtgctttgtttgtattctctaatttaatccttgcaacaacccaaagaggaagtatttttattacccacattttacagatgagaaaagccaagatttagaaaggttacatgcttcacgaactcacacagttaattttcatcagtgccacaggtacttgtacaggacctgaccacttgctgtctgaatgcagagcctttgcagtgagttacggctcagaatcaccatgtcacaaaagctatgctattttcacataaattactgagccatgcatttaaggggtacctacatttaaacagagtattcctatagatacaatatattca

SEQ ID NO: 249654 - DNA, 618 bp, Homo sapiens
tgactaagggttcttaaaacactagcagatggaagctttggtaattatttctttatgaaagtggatacctgagtcgcatctagaatacacagattgctctgtagatcagaacgtgactcagtaaagacagcacctcgctagtggtattatttaaaaggagaaaaatcctccattgtctaaaatttcctgccccagtcgtgcttgaaatcttattatttctttaagcatctcttctctgtgaggaaaaatcatcatcaacaatgccagcttccatgatcgactggcactgagctaagtgctttgtttgtattctctaatttaatccttgcaacaacccaaagaggaagtatttttattacccacattttacagatgagaaaagccaagatttagaaaggttacatgcttcacgaactcacacagttaattttcatcagtgccacaggtacttgtacaggacctgaccacttgctgtctgaatgcagagcctttgcagtgagttacggctcagaatcascatgtcacaaaagctatgctattttcacataaattactgagccatgcatttaaggggtacctacatttaaacagagtattcctatagatacaatatattca

SEQ ID NO: 249655 - DNA, 621 bp, Homo sapiens
tttacatagggtgtacaccaagtaactagtgggaaacctctagagggtatttaagccccagaaaattctgtaactgggttcttaaacaactatgctcagtcgggctcccaccttgtggagtgtacttttgttttcaataaatctctgcttttgttgcttcattctttccttgctttgtttgtgcattttgtccaattctttgttcaggatgccaagaacctggacaccctccacaggtaacaactgagcctggggagcatactgtgagatcaggaccatgcagagacttgtaggccatactaaggcctttacttttgtttctctttgctattaaagaagccaatgaaacattttaaactggaaagacatgattttcaaaaagatccctcttggctgcagggagaaaatgaatggaggtrggaaagatgaggagatataggctatttcactagtctaaataagggataacagtcacttgggcttagatagtgacagtagagatggtgggaagagatagaaagaaaataaaggcagcaggactgccaaatatctaggcctcacacttactggctgtgtgaccttaagcagatgcttaacctctctgagtcactatttctaccc

SEQ ID NO: 249656 - DNA, 541 bp, Homo sapiens
aagtattaaccctgatgtcagtggaaacacaaaatcacccaaaaaacaaggaaagaaaatcagtagtctacaatctacaaagtccagggaactcaagcagctataagtggtcaacaagttggtattccaggagatgcgtgagattagtatcagtgaattacttctactgtggtgtactgaactgcaagggatgctagctggagattatattgtcaggcaggtaccttaagtgaggccagttgacctcagctgaagtggctcayacccgctgtgtggaaaaaactcaaactgcttttcctctgctctcctaccacaacaatcaacacaaaagacatctgtaaccaaatgtgtgtgggttttcccatacacaccaagcaagcaattctgcagtagacaccagctgtatgtcctccaacccattttaactcagtgacgctatccacctggagctagtgtcagatcctataggttgagggttcattcccataaaatcttcccctctgcacttccaatgccaactgcaagcccaggttgttttact

SEQ ID NO: 249657 - DNA, 647 bp, Homo sapiens
tgacgtattttacatctttaaaagatcattctagttactgtgctcagaataggctccagggtgataagagtagaactggagagagcaattcaaaagstattgtaaggctggcgtggtcagtcacacctgtaatcccagcaatttgggaggctgatgcaggaggattgcttgagcccaggagttcaagaccagcctgggcaacatgataagaaccccgtctctacaaaacaccatttttttctaattagccagatgtggtgacatgcacctgtggtcccagctacctgagaggctgaggtggaaggatcgcgtatgcccaggagttggaggctacagtgagccatgattacatcactgcactccagcatgggtgaacagaatgagaccccatctttaagaaaaaaagaaggaaaaagctattgcagtaatctgggcaagacataagagtgacttggaccagagtggtagtaatagagttgatgagagttgggcaggttctaaatgtattttgaagatagagccattgtaattttcttatgtattaaatatgcttagcctgagaaactagaaggatggagttgccatcaactgaggttgggaaagctgcagataaatagattagatgggaaagatcagaaggtcagatt

SEQ ID NO: 249658 - DNA, 647 bp, Homo sapiens
tgacgtattttacatctttaaaagatcattctagttactgtgctcagaataggctccagggtgataagagtagaactggagagagcaattcaaaagctattgtaaggctggcgtggtcagtcacacctgtaatcccagcaatttgggaggctgatgcaggaggattgcttgagcccaggagttcaagaccrgcctgggcaacatgataagaaccccgtctctacaaaacaccatttttttctaattagccagatgtggtgacatgcacctgtggtcccagctacctgagaggctgaggtggaaggatcgcgtatgcccaggagttggaggctacagtgagccatgattacatcactgcactccagcatgggtgaacagaatgagaccccatctttaagaaaaaaagaaggaaaaagctattgcagtaatctgggcaagacataagagtgacttggaccagagtggtagtaatagagttgatgagagttgggcaggttctaaatgtattttgaagatagagccattgtaattttcttatgtattaaatatgcttagcctgagaaactagaaggatggagttgccatcaactgaggttgggaaagctgcagataaatagattagatgggaaagatcagaaggtcagatt

SEQ ID NO: 249659 - DNA, 595 bp, Homo sapiens
tgtaattttcttatgtattaaatatgcttagcctgagaaactagaaggatggagttgccatcaactgaggttgggaaagctgcagataaatagattagatgggaaagatcagaaggtcagatttggacatgttaagaagcagctatttctcctctagcccttagaacatatgtcattttttattaaatacttatttatgcatgtgtcttagcttcctttctagaatgtatactctgtgagggcaaakattaggtttcattcatttctatgtctgcttagcccctaggacagttctctgcattttgaagtgctcagaatgtgtatgctgaattgaattattggttcctcttgttgcattttttttgcttgaaagttgaaattattgccttaaaagtcactctttttactttttatcttcttagttgtttgtttacttagtttggattattcttgtgatttattcttacaagagagaacgaatcacaagaataatccaaaaacgctaaaaaacaatgccttggctgaaaaaaatgcaatccctctttatcacgtctactacagtaaaatggaagggttacctttaattcaagttgac

SEQ ID NO: 249660 - DNA, 602 bp, Homo sapiens
gcaaatttatgtatttattaataccagtgggctattamaatgtaaatatcaatttgtagcttgctttttttggctcaacaatgttttagtaaacatttttatataaaaatatcaaaccatccctttctttttgactgctacatagaattttgtaaataaatcccaatttgttacatttctgtcttgaagagcattcatagttctcccttcactttttgtaattattaacccttgctgctatttctaacaatgctgcaatagaatccttatacatatctcctagtgtttgtgcagtgttacatggaaaagatatctagcagtagaattgcagtcataaattatgtgcatttaagtagatgttgccaaattggcctattaagtggctgaacaactcacgcttccataagtaatgaccgtgacatccatttctcacccctataccaacagctgatgctaatcaaagtactttatatcttgttactccctgtgaataatttttttaaactatattttagtggtgtttaaattctcatttttttctttttgctggtgagatttcacttttgcaaatttcttgttaatatcctttgcctaattttctg

SEQ ID NO: 249661 - DNA, 602 bp, Homo sapiens
gcaaatttatgtatttattaataccagtgggctattaaaatgtaaatatcaatttgtagcttgctttttttggctcaacaatgttttagtaaacatttttatataaaaatatcaaaccatccctttctttttgactgctacatagaattttgtaaataaatcccaatttgttacatttctgtcttgaagagcattcatagttctcccttcactttttgtaattattaacccttgctgctatttctaacaatgctgcaatagaatccttatacatatctcctagtgtttgtgcagtgttacatggaaaagatatctagcagtagaattgcagtcataaattatgtgcatttaagtagatgttgccaaattggcctattaagtggctgaacaactcaygcttccataagtaatgaccgtgacatccatttctcacccctataccaacagctgatgctaatcaaagtactttatatcttgttactccctgtgaataatttttttaaactatattttagtggtgtttaaattctcatttttttctttttgctggtgagatttcacttttgcaaatttcttgttaatatcctttgcctaattttctg

SEQ ID NO: 249662 - DNA, 577 bp, Homo sapiens
attttactttactgtctggtttataaaagacagctaggttctcatatctgcttctgcattcaatcttttgtgatattacatgtgctgtagcctctggaaaactcccctgtacacttatgagagactaaaaataaaaaaggcaaatgacatcttagtattattataaaaatagttttcaccttgcagatccctgaaagagtctcaggtcgccagacgacattctgagagttactgctctaaactttgtcatacctttgaaaataattaaacatatcaaatcttcttatttcaatgtgtcttatgtttcctgccgtggccctgaatgataaacccatcctgtctggatactaaggcacagtcttaggggatggagggaaggttagggatgggggatgaggggcgcacagcatggagggatagagatagagaagagcaaggattccaattgtctgttccaccaggacacagcagttasaaaccaatttaggatgtaaccacatgaccaaaaactaggtggtgctctgtaggtggcaggaagagcccctgacattggatgtttagatttcctgagcctacc

SEQ ID NO: 249663 - DNA, 486 bp, Homo sapiens
ggcagttgattggaagagtttatctagagacctggaatcaatagaagggagtgtcttggttaagataaagggttgttgaccgggtacagtggctctcacctgtaatcctagcactttggtgggcaggtggatcacttgaggccaggagttttagaccagcctggccaacatagtgaaactctgattctactaaaaatacaaaaattagctgggcrtgatggtgcacacctgtggtcccagctactcgggaggctaaggcacgataattgcctgaacctgggaggcagatgttgcagtgagcagatatggcaccactgcactccaacctgggcaaaagagtgagactctgtctcaaaaaaaaagaaaaaagaaaaaaaaagataaagggtcatggagaccaagatttttattatgcaggtgaagcctccaggtaacaggcttcagagaaaatagatggtcttaaggtctctgttttaatgttaatgc

SEQ ID NO: 249664 - DNA, 488 bp, Homo sapiens
gggcctgaagatatctgacctagtgctgggagctgggacagcagccaagactgcactgacagtggggctcctgaagtgccgtttaattggcctttaactcaattagttccagaaatgttgttttcgtgcttgcatttacatccttgatctcattgagtgtaagttttggttctgtccaaggtcatcttattgctcacctagggcaagrgcatggatcagttcatcttttgaggcttctttccattatttattctatttatgcatatattttaaaattaaagaagccatgtggctttggaagcccatggacctggcttctattgttggatctgctaattactcaatgagtgaccttgcaagtctcttcatatgcctcagggttggtttcttcatctatgaaatggggttgcaatgagagctatgtatgataaataatgcaaacagtttaacatagtacttgagtaccccatgtccaaactatggtaaat

SEQ ID NO: 249665 - DNA, 488 bp, Homo sapiens
gggcctgaagatatctgacctagtgctgggagctgggacagcagccaagactgcactgacagtggggctcctgaagtgccgtttaattggcctttaactcaattagttccagaaatgttgttttcgtgcttgcatttacatccttgatctcattgagtgtaagttttggttctgtccaaggtcatcttattgctcacctagggcaagggcatggatcagttcatcttttgaggcttctttccattatttattctatttatgcatatattttaaaattaaagaagccatgtggctttggaagcccatggacctggcttctattgttggatctgctaattactcaatgagtgaccttgcaagtctcttcatatgcctcagggttggtttcttcatctatgaaatggggttgcaatgagagctrtgtatgataaataatgcaaacagtttaacatagtacttgagtaccccatgtccaaactatggtaaat

SEQ ID NO: 249666 - DNA, 535 bp, Homo sapiens
tagtgtttatgaatgctgaacttttatttttttctctttaaataaattttgttaaaattgctttcacaaaggataaactatttttgaaaagaagtaggaaaattattcagtgtatgttagatatgttttgaaacatagcaagaggaatctattcattgggataagattcctacaacatatctgtaagccctgataaaaagtggaaaaaaaattttctacaattaagtctatacatgaagtgtatcttgctttattagctgagcttttaaataaagcacatrtttaacaaaatgattcaaaaacatgacttgggttgatttttgcaatttttcagatgtttttactatgacttcaaagaacacaactccatcttaaagaaggcacagatttaaaaacataattcctattataaacgactaaagtcactgaagaaaactaataatatcaaaatcaagcccctaaaacaatgttagtagctttatactggtctagcttcagaaatgacccctttcatattgaaagtgagagagggtag

SEQ ID NO: 249667 - DNA, 418 bp, Homo sapiens
ctccatgttggttaggctcgtctcgaactcccgacctcaggtgatccgctcacctcggcctcccaargtgttgggattacaggcatgagccaccatgcctggcttgaaaataattttttgaaacagaaagttctttgctttaatttctttttgctaccggaaaacttactaaaaatcacatatttccctgcctcacgtaactcaagcgttctaaataagaccatttcttgataactgagggtcattatttgcatactgggctttgtttgtttgtttgtttaatgtgaacgaagtagatattatcctagaacttgctttatataaacgtgcatgtttttataaaactagagtataaaccatacctgtttatgacatgcttacctttctgtaaagctaattattgaatcaaagaagaggc

SEQ ID NO: 249668 - DNA, 590 bp, Homo sapiens
tatgtcatgtgttatataccttcttcttgttttgaatggaattattaaacttcttgtaatcagagatcaaattataccaggtagatggttgtcccaccccctggcagtgttcttacagagtatgtgggtaaaaattcttgtacggttatgaataaaagggatattttagaaatgaagttttgtttctaaaaaggatggtaattttcaygcacataaaactaagaaaatccaccttatgtgttctcacctccattttatcctcttgcatattctgctagtggccatgtaaactgctgtacttattgtattagttgctgattttcattttccaacataccaagtactctttccttgaatgatttatgttagacagcattggctcatggcaacagacagttttagaaaatcatcatctggaatgtatataaaatgatcttgtttgtcagtctacctaggttgttaatgtcaaattagatgggcaaattgccaaattattgttagaattgagctatatttgctacagtgcttaatccttgggaattaaatcagttccattgacagtatggggccaaatatatatgattttagct

SEQ ID NO: 249669 - DNA, 643 bp, Homo sapiens
ggaatccttcttcacccctctctttctctcatatcctacttgtttaccccacctttaaaatatattcagaattgggaagtttctagctgtttcctctgctagtccaagccaccattatgctagcccaaggcatcattctttctcccctggaagattgcaatggctttctaatgcatttcttattgcaatggctttctaaaaccaatcttgccccctctcataaattattttcaacaaaatagtcaataaggtcaaagttaagactgaagattttccatctcgctcagagtaaagggcaaaacttttctaagatctgcaaaaccttctgaggcgacgagacagggtcctcccgtagctgctgatgccatctcctgctactttttcccttgcttactctcctccagccatggtggcccccttatgattctttgagtacactggcaggcccttgcctcagggcagttgaccttgctgttgcctctgtttaaatgcactttccctagatctttcctctttaccccctttcttgcttctcgactttactcaaatatcactttctcagacagcccttcccckgctatctaaaaccactgtttcctttcatatgacacatatacttcctgttactatttccctctgagta

SEQ ID NO: 249670 - DNA, 564 bp, Homo sapiens
ttgtgtcaagaagtctggagaatagacttggctctctgctgattggctctgtgactttgggcaagttccctggcctctctgagcctcagttttttcaccaataatagaagaggtctgggaggatcacggcagaygggaagcaggactagactgcagctcccacttggacagacagagcagtgtatggaggttcgcatcatgaacttttgctccagaacgattgcaggaataaatcaggaaagccaagagaacccacagcgctctgaaggaagcagattgctcctgcaggacccaggggacaccccaaatactgtgagtgcccaaagtgtggaagtgggaaagagggatcatccgtccctgaacacacactctcactggggaacctgaaggtctagatcatgggagaatattctgaccttacttggagctgaatcaatctagagagccaagcaaaatacaggggtaaagccctgtgggctcgctgggtccccctagcaagccattctgccttgcctcacagggatccttgaggaaagctgccagaggcactggaaaaggccactg

SEQ ID NO: 249671 - DNA, 511 bp, Homo sapiens
ccctgcccccacctgatggtccttccctacccaccctggtagctgaagaaaaggggcatatactcgtgggagttctagggccctgcccactgccccatactaccacagctgatgctctcttgaaagcgctgcctcctggcaggaggccaaccagcacaaaaataatgcattaaacaaccaaagcacagaatccatttcactcccctgccacttccaccagagcaggtgctggtatccccagctgagagacccacagacagttcacatcacaggactctgtgcagacaacccycactagcccagagcttggtagacttgctgggtggctagaaccagaagacagataacaattactacagcttggctctcaggaagccacatccctaggaaaagagggagagtactacatcaagggaacaccctgtgggacaaaagaatctgaacaacagccttcagccctagaccttccctctgacaaagcctacccaaatgagaaggaaccagaaaacca

SEQ ID NO: 249672 - DNA, 520 bp, Homo sapiens
taaaaatgacgcattagatataagcaatactgtctctaaattgagtttaactatgaccactgagatgagtgaaaagaatgatctagccacctggcctcctttccccctgaattggtgaaccctttccagccttgggacctttgcamatgtgttccctctgcctggagggctttcccaacccagctccatagtgtgattgtctttttcttatcctcttggcctcagcttagacattacatcctcagagggcacttccttagcagttctctgccactttgcaccaagtttattcctttagcagcatttctcacaacgtggcattttttttggtcgtctatgtgtttatttcctacctcctcctctggaatataatctccatgagggaaggatctagcatgtttgctttagtgatgtgtccccagctcctagatcacaatgcctggcactttcagagaatcaataagtatttgttaaaagaattcatgattaactatcccttgacatttgacaataattttga

SEQ ID NO: 249673 - DNA, 590 bp, Homo sapiens
tctgatgttttggatttgagcttaatgtatgatgccacttttcatcaacactgaaaattcagacaaaaaacagttaggttttgggggaagaaaacaaatttgggatttagtatatggcatctctctagagatgccccttgaacagtctgaaatgtgtctgaagacagagatttggatgttatcagagaagtaaatggtggttgaagacttaggtgaagaaaatgagattgcctgagctggcaggtgtgcgtgtgtgtttgtgtgcrcgcacgcgtgtgtgtgtgcgtgtgtgtgtgtgtgtgtaaaagagaacaggcatttttggaatcactcaggtagctttcaatggtggttgaagacttaggtgaagaaaatgagattgcctgagctggcagatgtgcgtgtgtgtgtgtgtgtgtgtgtgtgtgtgtgtaaaagagaacaggcatttttggaatcactcaggtagctttcaaaaggaagagttgcaccaccactgctcaccttggctcctaccccatcccacatacttcaactgtctggtggggtgggggcctaggacctgagaaatgatgggggattctgtggga

SEQ ID NO: 249674 - DNA, 630 bp, Homo sapiens
ctattgcaacaaacaaaatcagaggcctaagcagctttcatcgttctcaaaggcataatctcttctacatctttcttatgtcactggcttcttacagtatatccccaagtaacagcacatataatctttatatagtctgtgcattacagcttccgcctgaggttattacatttgttttctgactttgtctragtttctcaataaattctagttaaatcctcccttaatgcaacattaaattccttaataaatcctgattaaatgctagagctgcgctgggattcttgactttgttctaatcaaaagcttcagaaataaaaatatttctgtcacaagaagagaaagtaaaagcatggaatgcaaatttatttaagttcttcaattttgtgataaaaaataagcttcaatcttgaggaaatagaggtgaaagtatctgaatataacacactgacaatgcagtcagtttgatgaatacattcatggaattagtctaattcacttttaactagttatctaacttgacaacaccctaatcatactgtacaaccttaatgcccaaattaatgctagactgatataacagatattgagcttttgtatttaatgagattagatatgctatgaaggaaa

SEQ ID NO: 249675 - DNA, 577 bp, Homo sapiens
tagggatgctggtttatcactccaaaggagatagatcccccgaataaggcttaagtttgattttataggtaaagagagagagaaagggataaagaaagggaaaggaagaaaagaaagaaggaagaaaggragggaagaaggaaggaaaggaaggaggaaggcagggagggagggaaggagacataaatcaagaagataggctagggggaatggcatattgtaaagtagacaatttttttttggtttatgctattttattaacttagagctgtccaaaaatgacacaactttgtaatttctacactgtaaatggaaattatcttttaatactgagacttttttaagcgaattcatgccttaaaatatttcaacacgactgcctagttctggattctgtcagtttccccataggtcttccaattgcttgatgttcttttatttttttaaattatactttaagttctggattacaggtgcacaacatgcaggtttgttacataggtatacatgtgccatggtattttgcagcacccatcaacctgtcacctgcattaggtatttctcctaatgctatccc

SEQ ID NO: 249676 - DNA, 546 bp, Homo sapiens
ccaggtatggcagacacataactagtgtcataatcaattgggaaaaaaaactgaaggtctttaatatctggaacaagacaaggatgctcactttcaccrctgttaattgaatatagtactggaagtcctagctagagtaatcacacaagagaaaaatgtaaataacattcaaattggaaaggaggaagtcaaattatcctcatttgcagatgatataatcttatactgagaaaatctaaagattccacaaaagaactattaggcctgattaacaaattcagtaaaattgcaggatacaaaagcaacatacaaaaatcagtagtgtttctatatgtcaacattgaacaatgtgaaaaagaaattgagaaagtaattccatttacaatagccacacataaaattaaatacctgggaattaaccaaagaagtgaataatctctataatgaaaactataaaatgcttatgaaggaaattgaagaagatgccaaaaaataatttaaaaaacattccatgttcatgaattgaaagaatattgtcaaaatgtc

SEQ ID NO: 249677 - DNA, 598 bp, Homo sapiens
ttttagtgttactgaattactgcactaattcgtaatgtgagtatacgtaattcctttaacttagactatagatccttcaaatgttcaaagcatgtacttctccttgtctcrctgatcttagataagccacgttaaggcagtagaaagacagtataacagcttcttgggaagccaaaagagagaaggaggcatcagcattgctagtggttgatggttgggagcatgggccccaaagccaagatacctaggtttaaatccagtctcagctacctactagctttgtgaactagaaaagttccttgacttctctttgcctaaattttcttttatagataatgaaaatgacaacagccattacttcgtaggtgtggtatcaagaaaatttagaagctcaataaatgttggctattattattgctattattatcttttatattgcctatgaaaagctcccacctactcattctagaggtccttggaaacctacaaaatgtatgccaaaggctttacatgtcaccagtttctctaccttctacctttcatttcagaccttgtctctatgatctggtttcgctggttcacagctgcctgtctccta

SEQ ID NO: 249678 - DNA, 552 bp, Homo sapiens
ttcctttgccactgtctttcagggatgtcctacagaggggctgtagtgctgcagctgtccactttcaggtggtgcctgcatatcgtgcaaagccatctgtaaaccaggccatagtcttctcttcctctgtcaactgatcatagggaactccctatgaggatatcastgcaggctgggggagagaaggcttggtggcaggagtggagaccatggacatttgagccactttttcatgtcctcaagcaggacctgcttgagcccaatcacatatatagcacttccatttgatgatggaatgctgctgtgcatgacccacttaatggagatatgtgccagaaaacacccagttcatgatagacagttcagattgcatggtgacttgatgacccatagtcaaatgttcagtttctaccaaagcccagtaacaggccaaaagctgtctcgcaaaaggagagtagttatctgcagaagatctcagggccttgctccaaaatcatagaggcctccactgtgattcatctatgggggcctgccaaaggctccaaacacatc

SEQ ID NO: 249679 - DNA, 564 bp, Homo sapiens
atttaacatccatattcttctatgtttagatacyatcctggggtcattactaatttaacttgtttaatccccactagaaacaaaaacaaaacaaacactaggagatgtatgtgattcttaactgcattttgtctattaggaaatgaaggcctagagagataaggaccctgctagagtcatgagacagtatgtgttggagctgagattcacacagactctgtctatctttagagctgtttgtcttaaccactgggaattcaaaataaggaattcaagaatagtacaatgaatcaaagaacactgtattatcagaaaaaaattaagtcagtaatattagagaaataattgattaaacaggttatagaaaaatatttaacattactgaggttatatcagaattttcatcatgaatatcaagttttgaaaatttaattacctattatttctaatacgagagctttgatcagggaaaaaacattatttgtagacaggcttcatgggtatgcaacctgcgaagtaacatggtgctctgtgcttacaggagcctcatgctttgtttaatgc

SEQ ID NO: 249680 - DNA, 503 bp, Homo sapiens
taagcatagctacttcttctctttttttggtttccattggcaatgaatatctttttccattctttcattttcagtatacgtttatgtttgtaggtgaagtgtgtttcttataggcaacagatcaatgggtcctgttttttcatccgttcagacactctgcgtcttttgattggaacgtttagtccatttacattcaatattactattgataagtagggacttctgccattttgttatttgttttctggcccgccctctctgcctccctccatccctcccttccttcctttcttcctttcttccttccttccttccttttagtaaaggtgattttctctggtggtatgatttagtttttgctttttattttttgtgtatccattgtacatttttcaatttaaggttactataaggcacataaatactatsttacaacccattattttaaacggatgacaacactgattacataaacaaacaaacacacaaaaagaaacctaata

SEQ ID NO: 249681 - DNA, 562 bp, Homo sapiens
aatatggcacattttttacaacaaataatgatacaatattattaaacaaagtscatacattattcagatttccttaggttttatttgatgttcttcaataccacattagacacttctaagctatgaaagtttctaacactgtccttgtttttgatgaccttgaagtttttgaggagtactagttttgagtagtaccagtgaagtattttgtcgtattcctgaaatagaatttttcaggtaattttgttataattacactgagttttcgggaagatcacaaagacaaagtacaattttcagcatattatatcaaaagtacaaactaccagtatgacatctaattaatgatgtttactctgagaatctggaaagttattattttctcctttttccatgcgtttttctcttctttgtatactcttggaaagaagttgttatgcatagccccaacttaaggagtagggagtgccatagccaagaaaccattacctaacccaagatcataaagatttactcctatgttttctttaagagttttgtgattttaacccttacatttagg

SEQ ID NO: 249682 - DNA, 459 bp, Homo sapiens
cctaggaccctagagtgcattggcctgtggtgatgarggctgctgataccctgagttcagaccaatggggttggcaatttccctttggttaggtctggtccaaattctccctctgttcacaggcactggctgagccaagcatggctgtactctctgctatgatagggcagcactgaattcaatgtaaagtccccagtcactgcactctccctcccccagatgcacagactctgttgctataggcccaatccaagggatgggaaagaagtaacattaatgatccaagactgtctttcctatcctcctcaatgcctcttttaatgatacgaagttaaaaccagttactatcattgcctacctgatttttggttcttgtggtggtgcttttctgtgtgcagatatttgttaaaatttgatgttcctgcaaggagtacaagtggagtaggcttccattcctcc

SEQ ID NO: 249683 - DNA, 512 bp, Homo sapiens
atttgatttgtggatttttttaaggatttttgcrtctatgagatattcatgagagatatgggtctctaattgccttccttgaaatgtatttgtcttggtttagtattagggtaatgccagtgttattgaataaattagaaagtgtgctatctgcatcattttataaaagagattgtagagaattgatataatttctacattaaacatttggtagaattcactggagaaaccatttatgcctagtgtggtcttttttgaaaagctattaattattatataaaaatattaccaattatatgtatacatatatttacaaccatatatgaaaggttttatgtaaatcatatacatataaattatacataaatcatatatgcaaattatatataaaattgtataaattaatatatatatacctttttagattatcttttctctttgtgtaagttttagtaatttgtatattttaaggcataggtccatttcacggaagttatcaaatttgtagacat

SEQ ID NO: 249684 - DNA, 607 bp, Homo sapiens
gctgtttgatgaccgtgagggtttgaatgtggtataagatggattcagctgactggtttcatttctgaactctgatgggtggtgtcaggcaaagtgttttgtagtgtggtgacagtgggacccatcctcatttgcatgttccagcagcagcagcagcgtggtagggtgcacacttgttatctgtgtcaattaagagtaatacaaataaaatatttattttactttctttagtccttctctgacacttttcctttatttagatagatctgagtttctcaccaccattttttctrctctctgaagagtatcttataacatttattacaggaaggactactggagataaattcattattgcttgagaaaatctttatttttctttcacttttgaagaataattttggtgaatacagaatttgaggttcgtgtttttctttttttcttcattcaacacttcaaatattggagaaccttggatttaaattttaaaaattagacaacatccaaatgaaacaaacagtcccctctcttcttgcttgcatgctttgcaatgtgaagtgtaatgtaattctaataattattcctctatcgttaagatgtttttata

SEQ ID NO: 249685 - DNA, 647 bp, Homo sapiens
ataaatcagtaagcatgagaagaaaaatgtgacccgtactcaagataaaaacagtcaacaataccaatcctaagataacctatatgttacaattatagtagataaaaacttttagagtcaaatgtagagctgaaaatacttatgtagaaaggaggaaataaattgaaattcaagaccttgttttctacattaagaaactagtaaagaaagagtaaattaaaccaaagtaataaaatgaaagaaataataaacgtgagagaaagcattaataaactagaaacattgaaaccatagagaaaagtgacaaagccaaaaattgatttttaaaaatattaataagtctataaactaccagaagactgatcaagaaaaaaattagtaatatcagtaatgaaagatagtatagtattatagatcttacaagtgtcacaagaataataatattatgaayaactttttaccaacaaatttgacaactcagaaaataaaaaaatttataaaaactgcttattaatactgacagaagataaaacagaaaatataagtatatatttctatattatatatttacatattaattgaatttgttattcaaaacttcccccataaagtaaatcacagcctagatgacttcagccacaaattct

SEQ ID NO: 249686 - DNA, 593 bp, Homo sapiens
aactctactctgtggcatctcctggacacctgtgtcagttgacagctcacagacttcaaaaatttaaagtctgggtttacaatgatgtaattgttgacttttaagaccaggaagatttctatattattggacacttaaaaacacagaggtaatttatttttagatggggattctctgtagataaccgagtatgaattttatgagtctgtctttgcctgctttggagmgtctgatttttttaaatggcactttacttgctaagtgcctacaatacttgctaagccaccaaatctaacagtttgaaacagctgtccccaggcatccctgcaaattaatactgtggcactacacttcatttttcttaaaattaatattttggctctctataaattaacttctagcaatctaccaatgtaaacatttgttcttttaatttaaatttcttgacacaggaggtgttttcaaagtagaagaatgtataattattcacctcaaaaatggcagatgaaaatgaaggcatagctagatctctgacatattttctttcacagttgctgcttaaactctgaatcctaattttttttttatggaag

SEQ ID NO: 249687 - DNA, 593 bp, Homo sapiens
aactctactctgtggcatctcctggacacctgtgtcagttgacagctcacagacttcaaaaatttaaagtctgggtttacaatgatgtaattgttgacttttaagaccaggaagatttctatattattggacacttaaaaacacagaggtaatttatttttagatggggattctctgtagataaccgagtatgaattttatgagtctgtctttgcctgctttggagagtctgatttttttaaayggcactttacttgctaagtgcctacaatacttgctaagccaccaaatctaacagtttgaaacagctgtccccaggcatccctgcaaattaatactgtggcactacacttcatttttcttaaaattaatattttggctctctataaattaacttctagcaatctaccaatgtaaacatttgttcttttaatttaaatttcttgacacaggaggtgttttcaaagtagaagaatgtataattattcacctcaaaaatggcagatgaaaatgaaggcatagctagatctctgacatattttctttcacagttgctgcttaaactctgaatcctaattttttttttatggaag

SEQ ID NO: 249688 - DNA, 593 bp, Homo sapiens
aactctactctgtggcatctcctggacacctgtgtcagttgacagctcacagacttcaaaaatttaaagtctgggtttacaatgatgtaattgttgacttttaagaccaggaagatttctatattattggacacttaaaaacacagaggtaatttatttttagatggggattctctgtagataaccgagtatgaattttatgagtctgtctttgcctgctttggagagtctgatttttttaaatggcactttacttgctaagtgcctacaatacttgctaagccacyaaatctaacagtttgaaacagctgtccccaggcatccctgcaaattaatactgtggcactacacttcatttttcttaaaattaatattttggctctctataaattaacttctagcaatctaccaatgtaaacatttgttcttttaatttaaatttcttgacacaggaggtgttttcaaagtagaagaatgtataattattcacctcaaaaatggcagatgaaaatgaaggcatagctagatctctgacatattttctttcacagttgctgcttaaactctgaatcctaattttttttttatggaag

SEQ ID NO: 249689 - DNA, 430 bp, Homo sapiens
atgctaacaatttctcagaaacgagttgtaaatacttatagtgagcaacttacactgactagaaaaagaaaagttacctaaaaatagctcctccaaaaaattcctaggtacttacagtttattgaaagcaattttagcaatatgcatggaattacttccatttggatatataatcacttttgtgccatcagtatgcatttactaaattacctttccaattatatactcttacttttataattgtacttctatttttttcaacatgacaaacattttttgcaatccarttaaagtttgtagcacatacattaggttgggtttgctagaaagagacttggataaaaagctggaagcagaatgtgtagctgggagtgctcaaggaagatacacctctaggatgtgaggaaggcagagttgggcagagggagaa

SEQ ID NO: 249690 - DNA, 501 bp, Homo sapiens
ttgtaaacttcctgaggcctccctagaagccaagcagatgccatcaccagggttcctgtaaagcatgcagaactgttagccaattatacctcttttctttacaaattaaaaacctcttttctttacaaaatggaaagaataaaggtatttctttatagcaatgcaagaacggcctaatacagatggctctgccattagtgagaaaattgagaygctttctctagatggcaaaaaagttgtaaaaataaaaggaaattattaatataccgtctattgtgatcatttactaagttaagcatattattaagaagacaagcataagtttaacacaatttggcaaagaataaaattgaaggagagagagcatatgttggctttgctctgtgaaactcaaatgaaatggtcacctgttctagcagctcatgaaaaattctgcattgtttattatgtgtcaggatcaaccttaaattcagttataaaaagtttgatgattccaaaaaa

SEQ ID NO: 249691 - DNA, 581 bp, Homo sapiens
agtgtgaatggattttaccaccctagctcaaataatatatcaggattctgcacacattgaggatgtttgttaatacatgtgtctgcacattactgcgcatttcccacaaccaagcatcaacatttaggtgtctgggataatctaccaatttgcataatccagatgtagacaatgttattccccagaattgctccactgagatttcagagtgaaaagcagttagactgtaggaacttctcttcagtgtctctatgaggagaaatagaagattggtggtcctctagccaccaattttttggtctgaggcaatttgtgggtgtcttcagaaattccaataaaatataacaggaaggaggcactggtagcatggggytggaaaagataagagtgaaaagcccatgtaaatgggctatctgggagcatttcagggaaaaagtttaatagagtgttaaaggtggactctggagcaattacaaactatgagagaattggagatgagagacgaggggatttttataacatatcatcatagttgctgatctaggtgtctaccaacacctctagactggtccacatgagca

SEQ ID NO: 249692 - DNA, 601 bp, Homo sapiens
cttacagaaaaaaatcaatactrattagcacataagatatatatacctgtggtaaatgaaatatattttaaatagtggagagaaacattatcaagtatgtaccaaaattgaatatgacaacaaataaatcaaaatatacactgttgcatgttgctatccctgcgtatgtgcagtgcattttttctgcacagtgtatatttttaaaatttgttttcttttcttagaatatattgttacagagttagaaaagaccacatcctttcttcacttttagtgttgaactactattaatgtaatggctgctcagtgactcagaggaggcactgaatagctgtgcaagttaggttcttagtaagagaaattacaaacctccaaataacatctctgttttgaatgtggtaccaatctagtaatgtatgtttaaagctttgcatgctgggcttgattattccatttcaataatgaataagagtatttagatgatatcgtgttccatgactgatctacagttttattcaggtgaagacagggcatgactcagagaaatattaacatgctcttatgtacccaatgtaaactattaagtcaatcctcttcatat

SEQ ID NO: 249693 - DNA, 601 bp, Homo sapiens
cttacagaaaaaaatcaatactgattagcacataagatatatatacctgtggtaaatgaaatatattttaaatagtggagagaaacattatcaagtatgtaccaaaattgaatatgacaacaaataaatcaaaatatacactrttgcatgttgctatccctgcgtatgtgcagtgcattttttctgcacagtgtatatttttaaaatttgttttcttttcttagaatatattgttacagagttagaaaagaccacatcctttcttcacttttagtgttgaactactattaatgtaatggctgctcagtgactcagaggaggcactgaatagctgtgcaagttaggttcttagtaagagaaattacaaacctccaaataacatctctgttttgaatgtggtaccaatctagtaatgtatgtttaaagctttgcatgctgggcttgattattccatttcaataatgaataagagtatttagatgatatcgtgttccatgactgatctacagttttattcaggtgaagacagggcatgactcagagaaatattaacatgctcttatgtacccaatgtaaactattaagtcaatcctcttcatat

SEQ ID NO: 249694 - DNA, 601 bp, Homo sapiens
cttacagaaaaaaatcaatactgattagcacataagatatatatacctgtggtaaatgaaatatattttaaatagtggagagaaacattatcaagtatgtaccaaaattgaatatgacaacaaataaatcaaaatatacactgttgcatgttgctatccctgmgtatgtgcagtgcattttttctgcacagtgtatatttttaaaatttgttttcttttcttagaatatattgttacagagttagaaaagaccacatcctttcttcacttttagtgttgaactactattaatgtaatggctgctcagtgactcagaggaggcactgaatagctgtgcaagttaggttcttagtaagagaaattacaaacctccaaataacatctctgttttgaatgtggtaccaatctagtaatgtatgtttaaagctttgcatgctgggcttgattattccatttcaataatgaataagagtatttagatgatatcgtgttccatgactgatctacagttttattcaggtgaagacagggcatgactcagagaaatattaacatgctcttatgtacccaatgtaaactattaagtcaatcctcttcatat

SEQ ID NO: 249695 - DNA, 601 bp, Homo sapiens
cttacagaaaaaaatcaatactgattagcacataagatatatatacctgtggtaaatgaaatatattttaaatagtggagagaaacattatcaagtatgtaccaaaattgaatatgacaacaaataaatcaaaatatacactgttgcatgttgctatccctgcrtatgtgcagtgcattttttctgcacagtgtatatttttaaaatttgttttcttttcttagaatatattgttacagagttagaaaagaccacatcctttcttcacttttagtgttgaactactattaatgtaatggctgctcagtgactcagaggaggcactgaatagctgtgcaagttaggttcttagtaagagaaattacaaacctccaaataacatctctgttttgaatgtggtaccaatctagtaatgtatgtttaaagctttgcatgctgggcttgattattccatttcaataatgaataagagtatttagatgatatcgtgttccatgactgatctacagttttattcaggtgaagacagggcatgactcagagaaatattaacatgctcttatgtacccaatgtaaactattaagtcaatcctcttcatat

SEQ ID NO: 249696 - DNA, 623 bp, Homo sapiens
tcaatttctggggatttttaattttgacaatttaaatttttataaggaattattcatttacttaaagtttttaaatgtattgctatagggttacaaatattactttaatttcaccttttctgtgcctacatttcctttctcttaattttgtatctctccctctcttttctcttgttggaataatacaacgtttagctattttatttgtcattacagaaaaacagcttttcaattatttctttctactaattttggctattkactttctgcttcattaatttcagctgttaccttaatcatttttatcaaaagtatttcaattttgttaattttttcttatgtataattttcttcatttttagtctttttagtagtaaaagaactaaatactacacaatttttaagcagtttttactgtgtctcataagttgtcagtttgaagtattctcttttcaataactgtaaggtattgtgcaattttctattgattttcttttagatccatggattttgtagaggcctatttcttaatttctaatgaactaagaagtttggtcacgttttgctatttatacttgattttattggatttagatcagaggacttagcatgtaattttccac

SEQ ID NO: 249697 - DNA, 555 bp, Homo sapiens
ctgttattgtttacaagttagatctcctggattgattctttcatctgcttatcttttctcattttctatatctgaatagttttctctttgttgtaaaatgatattttttcatgtcatagtccagattgtccttcaagtgattatgctgttctttattgaattatttgggaactcatgtttttayttaagatccagaaagactctgtttcctgtgtgataatggtatacttgattttgtttaaatgcctcttctcccttttaaattaaacacattgcctggattgtccaaaagctatattttataccatatgttttctgactgatattcctctatcaagctgctcagcacccatagatgtactgctatttttctttgttggttccctgaggctcagattcaattgctggaatactctaagaggtagcatcctaaccagcgacggaagatgagtttggcattgcagactgcagtcatagaagcaggcagatttctagacatttgctgaggcacttggaagctttcctgctatctcgattcatgttcttcctgtacag

SEQ ID NO: 249698 - DNA, 555 bp, Homo sapiens
ctgttattgtttacaagttagatctcctggattgattctttcatctgcttatcttttctcattttctatatctgaatagttttctctttgttgtaaaatgatattttttcatgtcatagtccagattgtccttcaagtgattatgctgttctttattgaattatttgggaactcatgtttttacttaagatccagaaagactcygtttcctgtgtgataatggtatacttgattttgtttaaatgcctcttctcccttttaaattaaacacattgcctggattgtccaaaagctatattttataccatatgttttctgactgatattcctctatcaagctgctcagcacccatagatgtactgctatttttctttgttggttccctgaggctcagattcaattgctggaatactctaagaggtagcatcctaaccagcgacggaagatgagtttggcattgcagactgcagtcatagaagcaggcagatttctagacatttgctgaggcacttggaagctttcctgctatctcgattcatgttcttcctgtacag

SEQ ID NO: 249699 - DNA, 555 bp, Homo sapiens
ctgttattgtttacaagttagatctcctggattgattctttcatctgcttatcttttctcattttctatatctgaatagttttctctttgttgtaaaatgatattttttcatgtcatagtccagattgtccttcaagtgattatgctgttctttattgaattatttgggaactcatgtttttacttaagatccagaaagactctgtttcctgtgtgataatggtatacttgattttgtttaaatgcctcttctcccttttaaattaaamacattgcctggattgtccaaaagctatattttataccatatgttttctgactgatattcctctatcaagctgctcagcacccatagatgtactgctatttttctttgttggttccctgaggctcagattcaattgctggaatactctaagaggtagcatcctaaccagcgacggaagatgagtttggcattgcagactgcagtcatagaagcaggcagatttctagacatttgctgaggcacttggaagctttcctgctatctcgattcatgttcttcctgtacag

SEQ ID NO: 249700 - DNA, 490 bp, Homo sapiens
attctttttagtggtaacagaggaactgaaaaagtagtaagaaattatggtacaaatacttttatcttccttaatgtcataatatttggttgttcaatttgagaagtttcatttaaaatgacacataacatgtattttattttaacttgaaatatagatatacactcattggccaattttttatgttaatgcaaggccttttaaaattatkaaagtatgagtcttcagattagagcccatatcttccttgaataaaccgtaatattaatgactttgtttgggtttctttaaactggaataagaaatatttatgaagacaacagagtgtacaatccttttggagttttacaattgtattcaaacattagtagttttcttacccttgtctatttgcttttttctaacatttttatcttggttttctttttttatactcattactgtaattacttaattaaattattagtgtgttttactgccctaaacatat

SEQ ID NO: 249701 - DNA, 522 bp, Homo sapiens
aaaaattcaaaaacattaataattattttcagtagcatgacrtatttgttttcgacagacaactgaaaaaaataaaatccaatacaccaaaatcacagaagaaactgctcctttcattcttttaaatcattttaaaaatctgtttctttaataaaatgtaattacttttaccctctcctagaaaattcctagtttctcagaaagcgacctcctttcttcaaatcttcatctgattttttgtgtgagatttctaaattaccttccacatgaaaatgatactttcatcaacttctttgtaaaacttttctaccaaccttcaactcacagtagtttttcaaagtcatataaagatataaaagcatgctttaggaggatcttagagtttgtggaaggccatgtctgcatgtagaccatgctatatcattcctgagatgtgtgccataatgggaagagaaatgattcccacatttatctgtgcggtatcaactgaggctttccaacatgtctgtaggtagagtctgt

SEQ ID NO: 249702 - DNA, 522 bp, Homo sapiens
aaaaattcaaaaacattaataattattttcagtagcatgacgtatttgttttcgacagacaactgaaaaaaataaaatccaatacaccaaaatcacagaagaaactgctcctttcattcttttaaatcattttaaaaatctgtttctttaataaaatgtaattacttttaccctctcctagaaaattcctagtttctcagaaagcgacctcctttcttcaaatcttcatctgattttttgtgtgagatttctaaattaccttccacatgaaaatgatactttcatcaacttctttgtaaaacttttctaccaaccttcaactcacagtartttttcaaagtcatataaagatataaaagcatgctttaggaggatcttagagtttgtggaaggccatgtctgcatgtagaccatgctatatcattcctgagatgtgtgccataatgggaagagaaatgattcccacatttatctgtgcggtatcaactgaggctttccaacatgtctgtaggtagagtctgt

SEQ ID NO: 249703 - DNA, 629 bp, Homo sapiens
tctgcctctgaatttttcctgtaagtagcttttcttggtgattctcatatcctttgcttcttagaacaaaaccyattctagagaatctcttattgctaatctgtgtgtgcttttactgcaaaaaggatttaagttttactccccaggatatgcttctcacttttaagaagtatattttctgtgttttgctgtgatttggaaccatggctttctttctctgctttcatataccctactctaatcaatctttacttttttagtagccattatacccattttcctctctgtaatgtttagctttatcctacttttataaaaatggagaataattttatatttttaattatcctctttgcctttgtatgactttttagaataggaggaaaatgctagcatcttcaaacataaacttaataagggttattacaaagtgatgcttataatgagatttcataaatgtcaatcacatatgattatatagatattggagatcactctttctacgcaagataccatttttatctacagaaaaagtcagactgcaccagtgacagcttgttttcaacttctgcccccagctttatctttagcacatagtgctcatatatgtagtaatagatagcaatgca

SEQ ID NO: 249704 - DNA, 675 bp, Homo sapiens
tcctgtaagtagcttttcttggtgattctcatatcctttgcttcttagaacaaaacctattctagagaatctcttattgctaatctgtgtgtgcttttactgcaaaaaggatttaagttttactccccaggatatgcttctcacttttaagaagtatattttctgtgttttgctgtgatttggaaccatggctttctttctctgctttcatataccctactctaatcaatctttacttttttagtagccattatacccattttcctctctgtaatgtttagctttatcctacttttataaaaatggagaataattttatatttttaattatcctctttgcctttgtatgactttttagaataggaggaaaatgctagcatcttcaaacataaacttaataagggttattacaaagtgatgcttataatgagatttcataaatgtcaatcacatatgattatatagatattggagatcactctttctacgcaagataccatttttatctacagaaaaagtcagactgcaccagtgacagcttgttttcaacytctgcccccagctttatctttagcacatagtgctcatatatgtagtaatagatagcaatgcagttgaaataatttttctgctacaactaatcagtaggattttaattaaagatataaacatgtg

SEQ ID NO: 249705 - DNA, 675 bp, Homo sapiens
tcctgtaagtagcttttcttggtgattctcatatcctttgcttcttagaacaaaacctattctagagaatctcttattgctaatctgtgtgtgcttttactgcaaaaaggatttaagttttactccccaggatatgcttctcacttttaagaagtatattttctgtgttttgctgtgatttggaaccatggctttctttctctgctttcatataccctactctaatcaatctttacttttttagtagccattatacccattttcctctctgtaatgtttagctttatcctacttttataaaaatggagaataattttatatttttaattatcctctttgcctttgtatgactttttagaataggaggaaaatgctagcatcttcaaacataaacttaataagggttattacaaagtgatgcttataatgagatttcataaatgtcaatcacatatgattatatagatattggagatcactctttctacgcaagataccatttttatctacagaaaaagtcagactgcaccagtgacagcttgttttcaacttctgcccccagctttatctttagcrcatagtgctcatatatgtagtaatagatagcaatgcagttgaaataatttttctgctacaactaatcagtaggattttaattaaagatataaacatgtg

SEQ ID NO: 249706 - DNA, 490 bp, Homo sapiens
attctttttagtggtaacagaggaactgaaaaagtagtaagaaattatggtacaaatacttttatcttccttaatgtcataatatttggttgttcaatttgagaagtttcatttaaaatgacacataacatgtattttattttaacttgaaatatagatatacactcattggccaattttttatgttaatgcaaggccttttaaaattattaaagtatgagtcttcagattagagcccatatcttccttgaataaaccrtaatattaatgactttgtttgggtttctttaaactggaataagaaatatttatgaagacaacagagtgtacaatccttttggagttttacaattgtattcaaacattagtagttttcttacccttgtctatttgcttttttctaacatttttatcttggttttctttttttatactcattactgtaattacttaattaaattattagtgtgttttactgccctaaacatat

SEQ ID NO: 249707 - DNA, 394 bp, Homo sapiens
ccagatttgggtttctaccacctttctctaataccatttatcagaatccttgaagaaattgctyattctaagactagagaaggaaatatacaagattagtttagggcattttatagtgccagaaagtaaggaaatgtataaaaccaaagctttgtaaaatgtgggaggaattccataatcatgtctgtcaaggacatattttcattctcagaagaaaaacattatacaatcacttaacatacacctgtgctctcctattccatggcatccctctttaaaattttggaaacttatatctctgggtgaaaaaaaaaattacagaaccctacaatggtttaatatgttgggaatttttaaattaagacattttgatgtatatctgcatttcattaac

SEQ ID NO: 249708 - DNA, 641 bp, Homo sapiens
agtaggactttaatctcagtttttattgctgttggtcttgttcaatctaaagactttctactacagytgtccctctctatctgaggagaattagttccaggaccccaggagataccaaaatctgaacatatttaaggctcacagtggatgatatggaacctgcaaataggaaaagttggtcctccatatatgcagaatggcaatactatattttggtctgtgtctggatgcagatgcagaacctgctgatccgaaggaccaactgcatttattttaaaatcttcttgtaagtgaacctatgcagttccaacttgtgttttttatgggtcaactgtatatgggttggggtcataacctaaaaaccacaatctcgagtactataatcccaaatgttcaaatcttgaaagatcaggatcccaaaaatatatttctggaaaaaataattttaaaaattctttaaaagatatctatttacatttttaaaaggggatttgagattaatagtaatagagattatacaataaaatagacaatagcatacatattttacaagcataaacatttaggtatactaactaacaacagtcatgcagatatgacagttctgagcagacaaaacatattcacaaagaaagagatta

SEQ ID NO: 249709 - DNA, 641 bp, Homo sapiens
agtaggactttaatctcagtttttattgctgttggtcttgttcaatctaaagactttctactacagttgtccctctctatctgaggagaattagttccaggaccccaggagataccaaaatctgaacatatttaaggctcacagtggatgatatggaacctgcaaataggaaaagttggtcctccatatatgcagaatggcaatactatattttggtctgtgtctggatgcagatgcagaacctgctgatccgaaggaccaactgcatttattttaaaatcttcttgtaagtgaacctatgcagttccaacttgtgttttttatgggtcaactgtatatgggttggggtcataacctaaaaaccacartctcgagtactataatcccaaatgttcaaatcttgaaagatcaggatcccaaaaatatatttctggaaaaaataattttaaaaattctttaaaagatatctatttacatttttaaaaggggatttgagattaatagtaatagagattatacaataaaatagacaatagcatacatattttacaagcataaacatttaggtatactaactaacaacagtcatgcagatatgacagttctgagcagacaaaacatattcacaaagaaagagatta

SEQ ID NO: 249710 - DNA, 588 bp, Homo sapiens
atcttttttcaaggcttttagcttccttgtgatgggttcgaacatcctcctttagcttggagaagtttgttattaccgaccttctgaagcctacttctgtcagcttgtcaaagtcattctccgtccagctttgttccattgctggcgaggagctgtgatcctttggaggagaaaaggcrctctggtttttagaattttcagcttttctgctctggtttctccccatctttgtggttttatctacctttggtctttgatgttggtgacctacagatggggttttggtgaggctgtcctttttgttgatgttgatgctattccctgttgtttgttagtttccttctaacagtcaggtccctaagctgcaggtctgttggtgtttgctggaggtctactccagaccctgtttgcctggatatcaccagcagaggctcagttggaaatgcagaaatcacccgtcttctgcattgatcacgctgggaggtgcagaccagagctgttcctattcggccatcttggaatggacctatgcaactcttaaaaagaataaggtcccgacttttctgtatgcttaaaaatgttcattta

SEQ ID NO: 249711 - DNA, 588 bp, Homo sapiens
atcttttttcaaggcttttagcttccttgtgatgggttcgaacatcctcctttagcttggagaagtttgttattaccgaccttctgaagcctacttctgtcagcttgtcaaagtcattctccgtccagctttgttccattgctggcgaggagctgtgatcctttggaggagaaaaggcactctggtttttagaattttcascttttctgctctggtttctccccatctttgtggttttatctacctttggtctttgatgttggtgacctacagatggggttttggtgaggctgtcctttttgttgatgttgatgctattccctgttgtttgttagtttccttctaacagtcaggtccctaagctgcaggtctgttggtgtttgctggaggtctactccagaccctgtttgcctggatatcaccagcagaggctcagttggaaatgcagaaatcacccgtcttctgcattgatcacgctgggaggtgcagaccagagctgttcctattcggccatcttggaatggacctatgcaactcttaaaaagaataaggtcccgacttttctgtatgcttaaaaatgttcattta

SEQ ID NO: 249712 - DNA, 574 bp, Homo sapiens
tgtatattggatgtctgtcattgctggggacagttttaccacagaagaggctaattagagtagaaaagattgatagagggatggaaaaagagaataggacacatgagcaaaggttgagctgtgatgatactgaatataaagggtaaaagagaagcagaaacagttacctcagtgacacacaaaagtctggagaataagggaaaccttgaaatgcataggaaaaaaactaggatagaataggaaattagtaaggaataagagtagtgaacagacaggaagaactggaccaggaactcaaatgttaaaatagccaagaggsagaaacaacacaaagcaggaagatttttttttttataaaggaagtaatttttttttttttttgagaatggggtcttgctatattgcccaggcaggtctcgagctccttggctcaagctatcctcctgcctctgcctcactaagagctgggattacaggcctgagccatcacacccggtggaagtaatatttttgttgataatgtccaattctatgaagttattaaattcagtcagaagagaatctgcctaagtgg

SEQ ID NO: 249713 - DNA, 583 bp, Homo sapiens
attggagacaaaaaggtcaatattataattgctagtaacatgtcctggttcatatatactaagagaattaagagaattaatgacagagctaatattttttagtgtcattcaatgccaaatccacactcctattaaactccacaccattgctgagatattgtacaactacagagaggaggggtgaggaagagagaaagaatgcaatattgttaccacactgacaatgaaagtttcagccaaatatgaagtttttaaatgcttatgctygtggaaaggcagactgaattaaaggaggatgaaaatggacatggaaaaattgtggagatgatgaaagggctttatagaattatggcgcttgttttcaaatcttatttttatcaaactatcttccttttcttcatacaaatgtgccactaaattcaacttatcaaccttgattgaggctgctggctggaggtagggttcacaaaggtagaaagagaagatcaaggtaaacaagagaaattttccttagttgagtagaaattgagagagtattctgagcacattgtggagtagaaagaaccaggaatccatcttccca

SEQ ID NO: 249714 - DNA, 595 bp, Homo sapiens
cctcggggtgcacagttgggttgtttattaraaacctttcttctttttgaggtagggtgtttattgctatgaactttccttttgctatgtgttagggatttctgtatgatgtgtttccattttcattggtctcaaggaatttttaaatttcccttttaatttcttcaatgagccatcagttatttaagagcataaggtctaatttccacatagctctaagttttccaaggtttttatagttgttgatttttagttttattccactgtggtccaaaaagatacttgatatgatctctatcttcttaaatatgttaagacttgttctgaccaggcgcagtggctcacgcctgtaatcccagcactttgggaggcccaggcgggtggatcatgaggtcgggagattgagaccatcctggctaacacggtgaaaccccatctctactaaaaatacagaaaaaaaaattagccgtgcatggtggcagacacctatagtcccagctactcgggaggctaaggcagaagaatggcatgaacctgggaggcagaggttgcagtgagctgagattgtgccactgcactccaacctgggcaacag

SEQ ID NO: 249715 - DNA, 595 bp, Homo sapiens
cctcggggtgcacagttgggttgtttattagaaacctttcttctttttgaggtagggtgtttattgctatgaactttccttttgctatgtgttagggatttctgtatgatgtgtttccattttcattggtctcaaggaatttttaaatttcccttttaatttcttcaatgagccatcagttatttaagagcataaggtctaatttccacatagctctaagttttccaaggtttttatagttgttgatttttagttttattccactgtggtccaaaaagatacttgatatgatctctatcttcttaaatatgttaagacttgttctgaccaggcgcagtggctcacgcctgtaatcccagcactttgggaggcccaggcgggtggatcatgaggtcrggagattgagaccatcctggctaacacggtgaaaccccatctctactaaaaatacagaaaaaaaaattagccgtgcatggtggcagacacctatagtcccagctactcgggaggctaaggcagaagaatggcatgaacctgggaggcagaggttgcagtgagctgagattgtgccactgcactccaacctgggcaacag

SEQ ID NO: 249716 - DNA, 550 bp, Homo sapiens
ggctcatgtaggaggatcacttgagcccaggacttggaggctgcaatgagctatgatcatgccactgtactccagcctgggcaacagagcaaaattctgtcttaaaaaaaaaagagagagagagagagagagagaaacaagtcactaagtctatgttcaaggagagagggattagtctctaccacctgaagagtatgaaagaactgatggatatgttaaaaccaccacattggtcttcctgcctctagagtccacactcctggatacactgaacaaggattataggagaaagtgcaagcctctggcagtcacttctagtagataacattacctgaaagggaattatggsgggaggaggagagcgaggaccaatatcaccaggggatgggaggtgggaggggagagctacatctgtggtctctgcagagcagacacttttccagggaaacccttttctttctaatctttgtgagtcccccagtggatatttgtgtatctgagacctatgagatactcgtcctatgagacctcataggacgctgagacccca

SEQ ID NO: 249717 - DNA, 568 bp, Homo sapiens
ctaattctggatatgggtttgcttcccctgctcacgtgttctgccaaaaacactatttgtggacttagagaaagccttagtggtctttatggtatcccacacaacatatgacatattttattattttattttattgtttaattttaattttatattttaccaaggaactcattttactgcaaagaaagtaaggacatagaaaagaaaaattgtctcttctactgcctggcttaggtctgcatgtgcctgtgactgatgaaaaacaagaaatctatccccatttcacacatttccagtggaggtatatttctgctcttggagtagtcaggataatcacacacttccatgatcatctcaaagtgccatttgatgctatttgttggccagacgtacattactgggggtacatccaggctttaaattattytttagagtcgggggtcttgctatcttgcccaggctggtcttgaactcctggactcacatgatcctcctgcctcagcatcctgagtagctgggattacaggtatgagccaccacacctgacttcatctgggctctatgcaca

SEQ ID NO: 249718 - DNA, 572 bp, Homo sapiens
tacccgcagacctcaatgatccatgtatatgattcatgtcttcctgctagcataatgttagtactttattatgatggaagagtgtcttgtctctttcccaattttgactgtgacattataaaaccctctcctattggtctggccttggagagctccatggtcaatttccactgctcatttctcctggctgcagcagtcaggggtgggtttgagtggaaaagatgttagccctgatacaaacacacacaggccaygtcttaaagccccagtttggagttgagggtatccaggatattggcagatgcaggtcactgctagagcctactataggggcaaggaagacagagcccagaagctcaaaagcacacaacatagcatgcatttgggagcagacagagcactggaatttaccatctgaagtgataaatatgtatgggaggtgcatgatgctttgagatcacagggagctaaccttgggcatgaaggaagacttctcggatgaggtgatgtctgcccagagccatgaagagcaagtaaagttatccaggagtgtgtccacctgtaccctgacc

SEQ ID NO: 249719 - DNA, 372 bp, Homo sapiens
tttctcctgcaaaagggcagctgctgttcatttctcaccccctcaagaattgtggtcttccttctggggaagcggggtagggatgcaaagttcagtagattcatctatttctcttcccttctttttcctcatttgtttctttattttctaggatacaacagccaatgaaattctttccctgccctgagaaaatgctcagttttttgagggaaacagacwttcaagcaagcatagataatactgactatggtgatggggggggaggatggaggaggcgcctcactctcaagtggaagtcaaggaaggcttcctggaggaggtgatatttacacagaaaggttgtataggattggggtgaatgtgcatttcaga

SEQ ID NO: 249720 - DNA, 484 bp, Homo sapiens
ggctttcctgggacccagtcatttccagtgggagaagagaaaccatctaaacagctgcacttgtacctccctgacaggtttttgcaggatgagttaggaccacagggctgggggctttgagaacattcatcaatatctagacagagaattggagttacaaatttacttatactagatagaagactgtattttgcaaaaaaaaaaaaaaaaaaaagttaaaacaatatctcccatcccatatgcacttcactttggtacttcttctgtcaagcaatggaaggtatgtccccatcttgaatctgagcatacttgtgactatggtggaagtgacactaggtcataaaaatatcatgtasttctaccttgttctcttgggatgcttatccttggaatccagccaccatattgtgaggaaactcaaccatccatgaaattttacagtgaccaggaattatttacatgatcaaagagaggaagggtgggg

SEQ ID NO: 249721 - DNA, 552 bp, Homo sapiens
gaatatcatctaaaactccagtttaaaaagcccacaatgagttttttgtttgtttttgagacaggatctcactctgttgccctggttatagtgcactggtgmgatcacagctcactgaagctttgaacttcttggctcaagcaatcctcctgccacagccttccaaaagtagctaagaatacaggcatgtgccaccatgcctggccaacttaaaacaattttttttagagatgggatctcactatgttgcccaggctgttctggaacttctggcctcaggtgattctcgcagcttggtctcccaaagtgctgggattataggcataagctaccgcacctggcctcacattttaatcttcatattcttccatttttgcaagtgtagttagtgacaaaaagaaataaaccctgtagtttagagtgaagagctctttcacttaaagttacatttctagtattgcaaataacaattttcccttattaaataatatactgatactgtggagattttgaaaacagatcagaaaaacatctgcaattccatcatcactg

SEQ ID NO: 249722 - DNA, 552 bp, Homo sapiens
gaatatcatctaaaactccagtttaaaaagcccacaatgagttttttgtttgtttttgagacaggatctcactctgttgccctggttatagtgcactggtgagatcacagctcactgaagctttgaacttcttggctcaagcaatcctcctgccacagccttccaaaagtagctaagaatacaggcatgtgccaccaygcctggccaacttaaaacaattttttttagagatgggatctcactatgttgcccaggctgttctggaacttctggcctcaggtgattctcgcagcttggtctcccaaagtgctgggattataggcataagctaccgcacctggcctcacattttaatcttcatattcttccatttttgcaagtgtagttagtgacaaaaagaaataaaccctgtagtttagagtgaagagctctttcacttaaagttacatttctagtattgcaaataacaattttcccttattaaataatatactgatactgtggagattttgaaaacagatcagaaaaacatctgcaattccatcatcactg

SEQ ID NO: 249723 - DNA, 564 bp, Homo sapiens
ttggtacttaaggattaaaaggaacctttcatgttaacgtacaaaatttgaatttcatcctttgagtgacttttccctaaaatggagtccttactatgtaagcaagggcaactgtaagctcctttgttgctctgcagacaaccgtgtgggcaactgctacctgaagtttggacctcgaggagatgggagtctgtcttgcaacaccgagatcggggtgggcgtcagtcgctcttcatgctgctgctctctgggaaaggcctggggaaacccctgtgagacatgcccccctgtcaatagcagtaagtacaaagctgaagaagaggaagaaaaccaactggtatctaaagatttgttgccattttattcctgagctgggagtgaggagtgtttagtgaggacaaaacaaaaaaactgaatttgaactactttcagtgatyactctgaaaccagccaagaatgttaaaggatttgaattcctctcttcctatgttttatcatgatatgttaaaaaaataatttttaactgtaatcatgtatgaatagtactaatatcagttcttcatg

SEQ ID NO: 249724 - DNA, 577 bp, Homo sapiens
gcactacgcctcctggcttttgtgcacactgctcacacgtgtatagacagtctttttgttagaccctccttgaattgtcctccttgaaatatgccatctctttcctactcggactctgagatagcagacaatctccatttcctccatataacatacggcgttgatgcccacagaatgctgaatgcttatgattaatggcctattctctattactcatgctcttctgtttcaaagaagtcagttgggttttcttaaccttttaatgccaagtgtgcttgttattgacataggtaatttgatagaatatcaagtaagctaatgaaatataaaggagaaaaaaaattttttctttaataaaaatgaagttgaatactttggaaagacccgacaaaagtctaagtcctttctgccccacgactgtcatatatwggtgtgagtgagacaataaaaaaccgaataagaaaaataaattgtaaaatgatagaaggattctgtactgagactgctccgcagctggaaattttatttaggtaatgcttacttggtatactttatgcaaaataatagcagagaaaca

SEQ ID NO: 249725 - DNA, 520 bp, Homo sapiens
gtgtgattaagaagcacattatttgagaggatggcaaacattttaataaaatatatattccaagctccataataaagacactctactgataatgagtgacttgcaggaaacagtagctgattagcccccaaacccctggatatagaggtgcccatcgttacctatacaagaggttccactgatgtctgtggtgtagccaaccttgcagaagcatcggaatgagcccatggtattgatgcactgaccattggtgcagaggtttggcattaccttacattcatcaatatctgtggaccaaaacaacaaaaacaatcaggagttaacatatatgcaagggtaaaactggttagaatcaaagagaaatgaagaaatggagatgasataactaactgcaaacattcctaatagcactggagcacctgttcatcattcaggtgaacagcaacatggatgtgatggaaaaataatctcaagtgatgggaggggataaagggagactctggtgaaagccctggtttaa

SEQ ID NO: 249726 - DNA, 631 bp, Homo sapiens
tgcatgtcgcagttatgagcaccaatttcacactcatccacatctgataaaccataattcataagaagaaaatcaaaatacaaactaattaattctacttccaagtatatttttgtataggtaacattttaaagtaaagatgcaaccgtatggagaaaagagtagcctaactaacttttatttttaatttttgtaggctccaagaggacttggaaaattcatgatcctaataaaacaagttcttccctagaaacaactktcagccactttccagtagaagagagagagacacagcagtgttgctccctggcaggtatgtgtattatcctggggccttcttccctgcccagattcagacacaacaccataaagaggacattcgattacagatcaagagaaatcttatttccaataatagatggtgctattccttcctattgatatttattacatatttttcatgaagatagaatctaactttttaaaaaaagtaatagtttattctctttaaaattacatgatcatttgtcatttaaaaaatcaatataaatattttacagaatttaaaaaaaactattcatttaggtgtatatttttatttcttctacttatttgagattatagaaaaata

SEQ ID NO: 249727 - DNA, 585 bp, Homo sapiens
ttcagctgtgtacacaaaaggcatttgttacagtattctaaaaaagaaagattactggctcacgcctgtaatcccagcactttgggaggctgaggaggaaggatcatttgagcccaggagttcgataccagcctgggaaaatagcaaaaccccatctccaccagaggaaaaaaaaaaaaagaatactttaaaagttttaatagtggggctgggtgcagtggctcacgcctgtaatcccagcactttgggaggccgaggcaggtggatcacctgaggtcagaagttcaagaccagcctggtcaacatggtgaaaccccgtctctactaaatatacaaaaattagccaggcttggtggcaggtgtctgtaatcccagctactcgggaggctgaggcaggagaatcgcttgaacscaggaggcagaggttgcagtgagccaagattgtgccattgcactccagcctaggcaacaagagtgaaacttcgtctcaaaaaaaaaaaagaaaaaattttaatagcatatactttgaaaatactttcatgtacctgcattcaaatatggtatattacatatatgtaaataaaa

SEQ ID NO: 249728 - DNA, 594 bp, Homo sapiens
cagggctaatatctgatgtattttctttcaggcacttaaaaaatgtgtgtatgtgtgtgtgtagatttatctctagttcaaaaagtaaatcatacttatggtaaacaatttgaagaaatagagaagtatgaggaagatgtaaaaatcacctgtaaccctctagagataaccattcctaacgttttagactgactccacatcaaatttgttcttccttttgaatggtagagtacccagtgaaatattatgcactttaaaatttttattttatgtggattaaagggaataacgaatggttagtatatttttggtggcataatgaaaagtttttcaaatgaacaaataataaatgactgttaactgattttgaagcagtgataaggaatccagtcaaagctgatatagcaaatactaattggctaaaacaaatcatatgtcatgttttccttgtagagcagtggctctcagttaagygtgcataatattaccaagacgcttgttaaaatgccgattcataagtttcccggtatgcagcccaggaatctgaattttgacaaactcctcaggtgattctgatgtgagtgatgtggaaaa

SEQ ID NO: 249729 - DNA, 577 bp, Homo sapiens
gattatattgctgcccaaggcatttttagggtaacggatatacatatgtgtgtggtatggaaatgattataagttatagcataatatatctacttatataaaaggaagatttctagaatctaacaaaaattgaataggctgcctaattaatgctattatgttttacctcyatattgatattgagtaaaaacaactaacataatgtgtaattctttgctttttggaatcatattctgtttttatccgtagtaaggcctgagatctgtgcttatcttggcagtgaaattgaagcatcagtattgtgtatgaatcttaccaatacagatcaatcctgtggagctgagtttgctgccgggcgaacattcacaattgaaagatccaaggttgtttctgcaggccccattgacacatgggttgctttcacattcatttatatctacaatccagaaggaaaagattctgttagaactgccatgtgtttctggaaaatattattccaacaagccatgcaatgccagaatgtctggtaaacttggctctggtaattttaatatggatctatgaagcataaagtgaa

SEQ ID NO: 249730 - DNA, 569 bp, Homo sapiens
ccttcaatacatcatcacaactttacataaattggatttttttttcccacataataagatgcaattccaggtgcaacatcctgtgcacaaacaaaggttgattgctttgatgatttcatgaggctctgaaaaacttaaaaagtctatcttagatgcaaaatatcacaatgctgctttaattccaagctcktgggtatgaatcaggaaataaggactgaaacattcatggtgggtacataactctcctctagtccctatccaccttctctgtctttagctgttcacatttacatgtttagtttgcttagtttttttttaatacaactaattttggtaaaataaaaattagaaatacttgatcaagtagaaataattgctttaaatgggactctaccatttatttgatttgagtcctaaatgaaatcatataccataatctaaacaattcctgttgatggtcagaagtaagcagaactgcactatgcctatgttctcaaatggtgattacagaaaatgtcaagcctgtaatgtgaaatagtttaacacatgagttaatgaaaaagaaatac

SEQ ID NO: 249731 - DNA, 605 bp, Homo sapiens
atgctgttttgtattgagtatctaacatcatcttcagcaggttgcattcccatatcatatttcctccaccatcaacaaaaggtaatctaagtgcaaaatcattactataccatcacttgtatggcatgtatgatatttagtaccaatactgaggaaaaaataaagatacaaggatgaacttgtatattaaaataaatcaatcatatggttacatcataatggattgtttccagctagcatgtggtgacagtattcaatatcaaacaggctactcagcaaaaagtacaattattagaggcaggacatctagcatgttgtacttaaactactttgtgttctgatattattcaactttattgtctttattcccttattaaatttacttaattattattagatctttaacaattttgagtcagaattgctgttaatgatgagtaaaaaaattgtatgaagcattattctgttgttagatttttctccttcaaaaagcagaaatctttcaggcttgtgattgaggttcttrttcttctctttttatctttgctaaaccgtcaaccttaacaattcaggcctgcttgccttcccttaacctaatggcatat

SEQ ID NO: 249732 - DNA, 538 bp, Homo sapiens
tggtcaggaaattgaggtgagctggggccataaggggaaacatgttcctgtagaggaattcgctttaagccctacttccctccatgccttcatgttgtctacttgggatagaatgaagccctggacttagtttatgcttagttcatgctatctctctgaagagaaaatgctttttgaagttcaattcaagttaattaaattcaatcaacatttgtaggttctgggccaggttcccagcccaaagactaaatagcccatggtaccatttaactgagagaagataataaaattgaaatcattgaattttaggaaaggcagagttgttctctatgaggtcaagctaaaactcaaaggatttcmacataggaagatgtgctgtggtgtgacatgatcaaaatctatacaattcaggatggcaacaaaaatctatacaattcagtatggtgacgagagtgtaaatatagattaggagacaacctacaaccttcgtttaaagcatttaaaaagtcctttatacatgggaaattaaacgtgagga

SEQ ID NO: 249733 - DNA, 468 bp, Homo sapiens
taaaacggccctgttggtaaagagcccagtgtgacttttgcaaatgaatgtaggctctccctctccagctctgtgctcaaggctaagccctggaaagtgagcccaatgcagagactgccttgttagtcattggtggtgagggactccatttttggacaggagactgggctgaaatttgatgcacataaaatagaggatgctgaagtgaagggtcatataccatccatgccagaagagtccttgggaattattgcctaaaatttgcatctttaaagatgagacacagaggtcccaggggaccaaggtggcaygacaactaatagaaatcgaaagtggggcttgggtctcccaacccccagaactgttttcaccctcctggattaaccggattagtgtcatagaaactgccaggattagtatgaaatttctatcaaacactaagcgcagtgacacttattagaagaatcc

SEQ ID NO: 249734 - DNA, 468 bp, Homo sapiens
taaaacggccctgttggtaaagagcccagtgtgacttttgcaaatgaatgtaggctctccctctccagctctgtgctcaaggctaagccctggaaagtgagcccaatgcagagactgccttgttagtcattggtggtgagggactccatttttggacaggagactgggctgaaatttgatgcacataaaatagaggatgctgaagtgaagggtcatataccatccatgccagaagagtccttgggaattattgcctaaaatttgcatctttaaagatgagacacagaggtcccaggggaccaaggtggcacgacaactaatagaaatcgaaastggggcttgggtctcccaacccccagaactgttttcaccctcctggattaaccggattagtgtcatagaaactgccaggattagtatgaaatttctatcaaacactaagcgcagtgacacttattagaagaatcc

SEQ ID NO: 249735 - DNA, 553 bp, Homo sapiens
tgcataactctgttgtcatatagccttctcactatgtcttcacagtgtcttcttactcataacatcagtcatactgggttaaaggcccaccctattctagtaagttaagaccttatcttaactatttctgcaaggacctgtttccaaatagggttccatcctgaggcattgggggttacggcttcaacatatctttttgggtaacataattcaacccataacagttctacatatcatgtaaatactcattttaatttcctcattgcttctgattatttcacagatgactctctgttttcctggggcacagcttatctgcatataatgaaaatgatgtctcttttccamtatttatttctcatttcatcttcttatctaagctcattgactggtacttttatcacacctagacaagaggtattcattatctttaaaaagtttgcttgtttttaaaatctgagtatgattactactggagtggaacattttaaaaacccatccatttgtatttcttcttctgtgaactatgtgtttctatcctttactttttata

SEQ ID NO: 249736 - DNA, 565 bp, Homo sapiens
ctattaaagagaggcccattccatatcatcttataattcaaagacttaaacaggggtaggcaaactatggccagggagccaaatctggttggtcatctgtttttgtatagtctcagagctatgaacagtttttacatttttgaatggctaaaaattttttaaaagatttgtcatacgaaaatacagaattcaaatttaatatccataaataaagttttattggaacacagctatactcattcatttatgtatcatgtatggctgttttcatgctataagagcagagaagagtagttgtgatagaagaaccatatggcctgcaaaacctaaaatataatatctggtcctttacaaaaaagggttgctgacccctgacttgaaagacttccacttaattctgtccatcacctacttaattrtatcagcattaacacactacaccgaagccatttacttgctaggtcttaagttccttgaagagaggataaggttgtattcatattgtttaattgatcttcctacatagtaggcactcaatgttggttgaatgaataaaaaattgagt

SEQ ID NO: 249737 - DNA, 549 bp, Homo sapiens
tgggccaaaaaacagcataaaaaatatttgcatctcacgttaatgctcacaagataattctaccataggagaggtcttcaacaaccaggtgaattggatgacttattctgtagatatcagtcagcctcgttcctcagccatcccactactgggacaataagttggtaagcagggaggccatgggggtagatggagattttgtatggggatagcagcaggggctccctctcactatggctgatctattaccccttctgggttttttttttttccatttctttttatcttaattatttgagcttttcctttgcagaatattrccacttctgaatgccagcagaagaatgctgagccttcagtatcattccttgaggaaaccagcctgccacttaatggcaagttgattttatcagactcccctcactctggatagggcagtaattcatcacacctactctagaaagtggtgttttttttttctcctctcttcacaattcttcgacagcaatattattcaaaggcttacagaatgatgtatcaacaaggtat

SEQ ID NO: 249738 - DNA, 639 bp, Homo sapiens
ctgcccattcacattgcaatctggaatttccagaaatttaatgcccttagggttaacactcaatgaaagatggaaggtgagatcagtctaccactaactttctggttctttgatgggacaattctacagtatgttccacacagttcctcatagagttccctagcaagattgaggcccatgtattcacaatggtaatctgcttattaaaataataatttttaatttattgatgtttctcccttctttttctcagtttccacacttcctcactggtgcttctctagataactttttaaataaattaawtgcacctaagtccttgtctctaggtctgcttttgggagaactcaacaaagatagcaacttagaaagcaaattctaaggatgggattctgaacttgaattacttgctggtcacatggcagcaatccaattctggtagaaagtggggttgtgataatccctgtcatgctgtagcatcacacttactaagattctcacctgtggaggattgaaatgagcaacaggtataactactggcttatgcaatagcttctgcacatgacacaaatggaaaaaattgtaattgaaaggattgtgaagtttgcttcttttttctactgaccataagccctgaat

SEQ ID NO: 249739 - DNA, 639 bp, Homo sapiens
ctgcccattcacattgcaatctggaatttccagaaatttaatgcccttagggttaacactcaatgaaagatggaaggtgagatcagtctaccactaactttctggttctttgatgggacaattctacagtatgttccacacagttcctcatagagttccctagcaagattgaggcccatgtattcacaatggtaatctgcttattaaaataataatttttaatttattgatgtttctcccttctttttctcagtttccacacttcctcactggtgcttctctagataactttttaaataaattaaatgcacctaagtccttgtctctaggtctgcttttgggagaactcaacaaagatagcaacttagaaagcaaattctaaggatgggattctgaacttgaattacttgctggtcacatggcagcaatccaattctggtagaaagtggggttgtgataatccctgtcatgctgtagcatcmcacttactaagattctcacctgtggaggattgaaatgagcaacaggtataactactggcttatgcaatagcttctgcacatgacacaaatggaaaaaattgtaattgaaaggattgtgaagtttgcttcttttttctactgaccataagccctgaat

SEQ ID NO: 249740 - DNA, 500 bp, Homo sapiens
agcctatgaaaatttcacacactgggttttctcatggatataataccatgataataatgcaaatactaatgccttagcttcccttctgaaataatgaaaatactaaaattgttcattaaaagtgactattgagttaagayatatgcttagaacagtgcctagcacacagtaagtgtctaataaatgctacctatctattattaccattcatgttactattagcagtactgctactactacttcttcatactgatgtggtcataaacataaatccaaacacaggcaccatatggcaggaatccacataaagagcttatcttcatgatccagaatatgatcatgttaattttgtttagattctcttcaaaatgggaccacaaaacttaaaagaaatcaagatcccaagactacagaaatagcagccaaatttgccaaaatttgaaagtctgtgcaagtcacgtgctgacccagagggatctttgaagaagaagtggttagaa

SEQ ID NO: 249741 - DNA, 648 bp, Homo sapiens
ttctgtaaggctgggccatctcttgtgtctctattttctaagtgtcctttaacccccgctagataaaaaattatattctaagttacttacaacctatagttctttcatataaaattggctgatacagcttgattcctatgcactgttttaagtataactataaatgaggtctttgaagcatataagcaaaattcgtttttagcaatgcattctaggagaattggttggttatatgtatctgggcatttgagctcctgaatgcctggtcactcttcattagagccaggaaactcatagttctttttataaagagaggagtcctgctgctcatatatctagaaaaactggaagtaacagracaagtacttggcccttctctccactgttgcaccagcgagattttctgtctgagttgtttgaactactctttcccactccaccagtagatatgagaagatcacagggaagctgctagaataactcccacctttggaggccagaagttcaacagcctgggcgacatgatgagaacccatctctacaaaattttttttaaaatagctgggggtgctactcgggagactgaggccaggagaatggcgggaacccaggaggcggagcttgcagtgagccgagatcgcgccactg

SEQ ID NO: 249742 - DNA, 570 bp, Homo sapiens
tccgtagattttcatgaatataagaatgaagctgatcatggtcaggtgagtttagttctttgcttgcttttaatttccagatgaattttatttggcataaattatgttttgaaaaacattgtgaagatagttgaaaataatttttaaggtgtatcacagagttttgggtttattttggtggtgttactataaaattgaactctaatagtcataggttattgtttcatttgcttttaaacgacttggaaaagattgttcaaccattttaagccttccagtattttattcctattatcactcattcacttaagaagtagctacccgtccatactggtaattttgctattgtttgtktgtgtgtgtgtgtgtgtgtgtgtgtgtgtgtgtgtgtgtgtgtgtatcccaaactagaacttcagaaaattatcaagaagtctaaagccttgttattagcttagcaaaagtaaaatatatctcagaatttttagggttatgtttagcatttgaacctgtaactaggctcttgtagatttcttcactttaaacctcttttctgagccctgtttctgt

SEQ ID NO: 249743 - DNA, 571 bp, Homo sapiens
ttgacagctgaagggtgcctactgacagcactcctggcactcccagcagcactcttgaaaacaggtctttcatggaaggggratctgagtggtacatctccatgttcttacagtccaccctctgtgctgttcagatccttttcatatcttcatatatgttcagagagcagctccttctgattctagtgggcctcctcctggaggaaacttagacaagaaagtttaatgggatgaactgcagttcccaccactgaagctggtctcaggttacaactgataatcataatctgtcttctctactatccatttgagttttccctcatcctccactagctggtctgctggtcagagtggcttatttggtggtgtaatccacgccttcatccctgagagacctgagccctggtcaccattcccttcttatctgggattgtgtatttattcacttaccaaataattgggcagggtgtaccaggaggcacccaagtgggtcacctatgtgccaaacataattttcctagctcctactgtgtaacagcagacctatttctatctgatgatcagtgtcagg

SEQ ID NO: 249744 - DNA, 660 bp, Homo sapiens
ggatctcttttaaagtctgcttaacatgcgcactacattaggcggttcaagttttgaaacatcttcatgtggtgcttgataccaaatactcctctctctctctctctctctcatatatatatatatatgagaaaaagtatatatatatatatactttttttttttgagatgcagtctcactcttgttgcccaggctggagtgcagtggcaygatcttggctcactgcaacctccgcctcctgggttcaagtgattcttctacctcagcctcccaagtagctgggactacaggtgcacgccaccacacccggctaacttttgtgtttttagtagagatggggctttgccatgttggccaggctcgtcatgaactcctaacctcaggtgatccacccgcctaggcctcccaaagttctgggatcacaggtgtgagccgctgcgcctggcctcatctatatttttaagaggagaaggtacctgcataccagtgtggctttgacattcttgagttaaaagtttcagagtaagcattgtggattttcccaagaaacaatacccttaatatagtgtatccattttcaaagtgggattatattctgcactctgcctatatggttagggatgatctagagtatcatcaggccttggggaatccacaca

SEQ ID NO: 249745 - DNA, 586 bp, Homo sapiens
actgccctggaaaaggggaggcaaacacatatctgcatgtgtcagtattcaccaacaccaatgattagaaattaagggaatcacagtgaacattttcttcataattcttgtattttatgtgtctgcaaatattaaagaaattttacttcacaatcagggcaacagatagatggcagctcaattactttgaacatccaggcatttgtctgtggaatggtcataggtgacaatggcaactcaacattgatgctgaatttcagtatactgctcagctcactaaagaaaactgatgcccagtaggaaggcaaagtagactatctggagtggtggcaattgagggtggttcctcttaaaatgggaattaaaatcagtgaggcctgtgacatctatttcttcatcaaaattttctgcagaacattcrttttagctagcacagtagctattagcatctttttaagtggattttttcttacacacctagatgcccccttaatgatatgtcaaaggaagagatgtaatagcaaaatgacttaaatacatgaatttgttcttgacctttctatgtttctgactgcagtaatcatta

SEQ ID NO: 249746 - DNA, 617 bp, Homo sapiens
attttctcatcttttgtttgtctgggacagtctttatttttcttcatttctgaaggatagttttgctgggtactgtactatccgttgctagtttttgttgttgttgttgttgttgttttttcattcctctaactatatcatctcactccctcctagcctgtaatatttctaccgagaatcctggtgccaggcatattgcatctcccttacatgtttttgctttttttctttcactattttcaggattctctctgtgtctttgactttttttgtttgtttgttygtttgagatggagtcttgctcatgttgcccaggctggagtgcaatggtgcaatctcggctcactgcaacctctgcctcccaggttcaagcgattctcctgctcagcctcccgagtagttgggattacaggtacccaccaccacacccagccaatttttttgtatttttagtggagattgggtttcaccatgttggccaggctggtcttgaactcctgacctcgggtgatccacctgccttggcctcccaaagtgctgagattacaggcatgagccaccatgctcagcctgtctttgacctttgagagttttattacaatatgtcttagggtatt

SEQ ID NO: 249747 - DNA, 645 bp, Homo sapiens
tatttgcctctttctccaggtttggaaagttttctgttattatttctttgaatatgctttctgtccctttgtctttctcagttacctctttaactccaataacctgaatatttgctcttttgatattgttccataaatctcataaactttctttattccttgtttttcttttttcttctctgcccgtatattttcaaatggtctatatttgagctcactgattcttctgtttgatcaagtatgctcttaatgttctctattgcatttttttcaatcgactaattgtatttttcagctcyaaggtttctgtttgattttttaaaattattttaatccttgctaacatttgtctgatgaatttctgaattctctgttttcttaaaaatgtcactgagtttccttaaaacagctttttttcaaatactttgagaaattacacagctctactcatttagggttcatctttggcaccttattttgtctatttgatgagatcatatttctctgaatattcatgatgcttgtgaatgtgcaatgatgtctgtacattgagtatttattttcgtcttcacagactggctttgtttatgcctacccttcttcagagggccttcccaggaatctaagcagacttaattgctgagt

SEQ ID NO: 249748 - DNA, 645 bp, Homo sapiens
tatttgcctctttctccaggtttggaaagttttctgttattatttctttgaatatgctttctgtccctttgtctttctcagttacctctttaactccaataacctgaatatttgctcttttgatattgttccataaatctcataaactttctttattccttgtttttcttttttcttctctgcccgtatattttcaaatggtctatatttgagctcactgattcttctgtttgatcaagtatgctcttaatgttctctattgcatttttttcaatcgactaattgtatttttcagctccarggtttctgtttgattttttaaaattattttaatccttgctaacatttgtctgatgaatttctgaattctctgttttcttaaaaatgtcactgagtttccttaaaacagctttttttcaaatactttgagaaattacacagctctactcatttagggttcatctttggcaccttattttgtctatttgatgagatcatatttctctgaatattcatgatgcttgtgaatgtgcaatgatgtctgtacattgagtatttattttcgtcttcacagactggctttgtttatgcctacccttcttcagagggccttcccaggaatctaagcagacttaattgctgagt

SEQ ID NO: 249749 - DNA, 645 bp, Homo sapiens
tatttgcctctttctccaggtttggaaagttttctgttattatttctttgaatatgctttctgtccctttgtctttctcagttacctctttaactccaataacctgaatatttgctcttttgatattgttccataaatctcataaactttctttattccttgtttttcttttttcttctctgcccgtatattttcaaatggtctatatttgagctcactgattcttctgtttgatcaagtatgctcttaatgttctctattgcatttttttcaatcgactaattgtatttttcagctccaaggtttctgtttgattttttaaaattattttaatccttgctaacatttgtctgatgaatttctgaattctctgttttcttaaaaatktcactgagtttccttaaaacagctttttttcaaatactttgagaaattacacagctctactcatttagggttcatctttggcaccttattttgtctatttgatgagatcatatttctctgaatattcatgatgcttgtgaatgtgcaatgatgtctgtacattgagtatttattttcgtcttcacagactggctttgtttatgcctacccttcttcagagggccttcccaggaatctaagcagacttaattgctgagt

SEQ ID NO: 249750 - DNA, 482 bp, Homo sapiens
cacatcccagagccattttgcagtgtaagttgcagcacacatgccattataagtggtgcgaagacaagaactatttactttatctgattacataagaatccatatctgaaactgccaggcatataatgggtactcagtagatcttacctccttcttctttcatattactcctctcatgggtcttgttcatggttgttgaatgaactatacattaattactgcctttaagtaatactagataacatttatggaacaattattatgtgccaggcrtgagtactatctcaattaattctcacagtaacataaggtatgaactattcttccttttgtacaagtggacaaacctcaacaaagtaaagcttgaagagttaaaacaatcccatccctagtctcacagctagtaagctgcagaatgaggactccaactcagatatctctcacactaaactattatttatttagctcatagtcaccaactg

SEQ ID NO: 249751 - DNA, 492 bp, Homo sapiens
gggacatagggatgtaccctggtcttaggagacctgctggagaaaagagaagaggagcttctgttacatgtatttttcagattctcatttttgatatctgaaaaatagactatgaaaacacctctagtggtcatttgcagggttaaatggataacgtatgtaaaatcattcatctcattaactaatatactttcccactagtctgagagccccatgatggcagagaccacatcccttttgttcyctcactgctgtggccatagtgcctggcacagaggagaggctaaacaaatatgtgttggattaaataaatacctgttggttatgcattcacaaagatgaaaaatgagttttctcttatgttaattcaaaagtaatttgtgataagcaaataatttccaaagctaaatttgcccctaagtaatcaaagagatcctgaagatgaactaaaatggtcattcacatttaatgacagaaacagagggacaacgg

SEQ ID NO: 249752 - DNA, 315 bp, Homo sapiens
ttttgagctcctaaacagggaatkatgtttttcccattagaaaattattttatgaaaatatttctaagttcctgaattagaaggatagattttttaaaatgttctatgcaagattatgtctagatcttgatcaaaatgcaaaagtctgttacactaaatagatcctaaattagtgtttcataataggcggaagtaggtgtattatatatttttcacttttggaaggcaaatggaaaacaattttgcatgtggaataggaatcatttaaggaactaaggaaaccactaatctagcttaatgctttctattacttag

SEQ ID NO: 249753 - DNA, 532 bp, Homo sapiens
tagttagactcacaagttgcattgagctagtcatcaggaatacagagatagcacataaggtgctcacttttaaggcatttaagggagcaggatgacataaagtcatgaaaggttaaatagaaaagtgatagaagagaaaaatgagatttttacaaatgccaagttcaaaggaggaaaatccactgtgyctcagcactgtgagggaaagtttcttgagggaagtagtgcaggcaaaggccttgaagattgggagggacatgataaactcagcacctgccatcgtgtcagtcagctttggggatgaagaaagcacatgtggcctcaacgtgttactgctggcagaggtggaactagtcaaattattcagttctactacacaaggagaaaaaaaaataataaagactaagattagagtaactcaggaaggaaaagtaggacaaatttacatgataagaaaataaagaacatagaaaaaaatctgtctgtatctattttgaatctctacaaaaattcaataaaaatgacaacagat

SEQ ID NO: 249754 - DNA, 533 bp, Homo sapiens
gtggaaccaaagtaccaaagtgtgacagcgtattagaatcttgcagcttcgaaaattcaaaaaatttgtacaagaaatagttgcctgaattcctacccagtatcagagcttccatgattagtagccaatcacgtacatattttcttttttttttcttctagatgtatcagggcattttccccctggactttgtttcttcagctaaaaaacatgacctttgactttctgagcagctgtatatatttttcgaagatcaatcaggggaaaaaaatcactggaaatggcaagtggatgggacagtgctgcacagtgtaaatgacagctgaaggttgacaaaaacgcagcccccacttcagttcactgctctgtagcaaatgkctcagttactcatagaactaagccactctgaaggacattctggcagaaatactcctgcctgctttttaaaaagaatgtgtggtgggtgatggtggaatggcggggaaggtggagtggaaactctaaacatttgctcctatctgtcagaaatcatc

SEQ ID NO: 249755 - DNA, 570 bp, Homo sapiens
tgcttgcctttttagaggttcacattactcattaagtgtaatttgcttggaaccttccttaaccatgatccaaaaagtgccttcagtcaaaaagatagagcaaccataaggcttaccttaatcattgacctatcttcaaagattgcagtcatatggggcctgttatctaatgtctgaaaacattgcttcttacatttgtctagttttatttttatttacggggtggcaggaacaggtctggggccacttacttcctcattgaagaagtggaagttctttttccagtttttaattatattaatatactgaattttattgctaataattacatcratatttggaagctacttttcaaaatatgttactcatgtatacatttttaggtagtttcaccaatattttaattagaatttttgtatttggattcataagtaaggatgattgggagtatcctttaatcctatttttccctgactttagtatcagagttatgataatttatacatttatttagaaagttgttaaacttttaaaatgctctggagtagttctaaaaacagaatttatact

SEQ ID NO: 249756 - DNA, 622 bp, Homo sapiens
agatcttcagcttcagcagagtcagcacttggaatcactacaagcaatcttggacaggaggcataaggtgcaagagtgcagaaagagcaggccatcctcctgttcttctcacccaagcaggagttctttgccaagacacatacttgttgcctttatattagtgggggcctggggtaatggtggctcatattccaatagccttgattctaccacacccttsctgtttcccataagttggagtccacaagttctagtggatggctcagtggagagaaagtgtccacttgaggtgcacggaaaaaactgaacaacactagtaaacagaactgtacagttgtagcacttttaggacctgaatgaatggtaaaggagttattagtgtaaagacaccatgaaagatttggtttgtagagcatggagtctttattttaggaagaatcgtttgaggttctaacgttgaattttggtgtctctgtcttgggaaatcactattttcatttaaaagagttcaataccactattatggtagccttgattcatattgaggtgggagaagaagtgtgaagaagagaacaattctttatttgcatttgtttgtccaaaggtagttttaggacaaaca

SEQ ID NO: 249757 - DNA, 563 bp, Homo sapiens
gaattgatctttttatctttgtttcccattagtttctaggaatgctttatgcttcctggatacaaaattctttcctggctgtgtgccctctcacaatctgtggtttgattgttgtttgcagaagcttttaactattatatactcaactataacaatatggattttggtttgtgtcctgtttaaaaaattctttcctacattaagtttctagaaattttttttgaattatgaaaatgtctactggttattgatttttatgtctagtgtgaggtaggaatctaattttattgtattccagatggatgaacagctaacactatttgtcaactagttcatcattttctctgtctataatatcattctgtcttaacccagtatgattttgctagaatgtgagatctatgatggcaggagtcttggtctattttgttcactgatgtatgccaaccatctaggacagttcctggcacatagtagctatttaaatttattggtgaattaatgaaaatgtgaatggtgtttctggtgtacaccagarcgtaagcatgatttctaaacaaagg

SEQ ID NO: 249758 - DNA, 577 bp, Homo sapiens
acaatgtatttaaggctcctagctctatcctggtctgagtcattggctaaaaatgtcaggacaatttataacattaaaatgaatggtaatttccaagtgataatatccaatgacatgatgaaaattgaaaatctattaatatatcagaacttgtcaccagagctaagatctatctaaacaatttggatttgtcggtctgtctctcttagtgcatttgtcttagatcaattctctaaatacatacttcctgggatgaaccttgttgtgatgccgtttatcaggactggtagcgtttgagatccctactcagcaacattttactgagtcattcactgtgacgggtgagaatggtactgctgagtaatgattatttttagacaggcagctagatattagacatacatcaatgtgcaggacactcaaaaggtaatagtaaataggawgacatttaattctcctttttttttgccgatgtcatatttttgttgatggattatatttctgggagaaaggaggtttctagataagtagtacattctttcaaattgaaaaatatgaaacgtgttaagagttccta

SEQ ID NO: 249759 - DNA, 526 bp, Homo sapiens
aagctgggcaacagagccagaccctgactctaaaacaccaccaccaccaccaacaacaacaacaaaacaaataagggttcagtaagcatcacttactggctgtgtgagttaggcaacttactttccttctctgagcttcagtattcttatctgtataatgaggacagtactaactctccatttgttgggtgggttaaataaggccatgtttgtgagtacttttagcacaggtgctagtgtgaatgggcactcaaaaatcattagttatccttacctccatttaccagaaggagaaactgaggctaagaaagactaaataacattctcaatgtcaaagacaaagctgggatttcaagcaagatggctggtctctagggcccctgcagggagctaccagattatcttgaaagctgacaccttcattgcatctcctaagccccacgggaaaacacaaactaccattttggagtagaaggagggaaaatrgggtagacacaggtgatggggacttccctcagctcaggat

SEQ ID NO: 249760 - DNA, 613 bp, Homo sapiens
tcttatagggcttacattctactggggagaaccgatattaaagaaatactcaaatatctaattaacacagtgtgtgacaaggtccatgaagaaaaagtacaaatggtagaaaagaacacaaaaggagaggcccaatttgaactggcaggtgagcctcttccagtcaagtgactctgtggctgagactggtggtgtgtaccctgcctccaccattttcccagccttccctgtggccgggtgggcagggcgtatgaccaagttctggccaatgggatgtgagcactagtagttaagaaaagtgtgtgtgtcttctttactgtctgttgcatggactcttgtggactcaaaggggaggcgtcacagatggaaagagcctgagttcctgaatgaccacatggaaggctgcctgttaactggacatacccaattagacattatatgaacaaaaaataaacccgttgtatgaagccacggagactttgggggctgtttcttgcagcagttagattcctgactagtagagaaatttaaggatggataatggacarcagttggctaggaaaagtgcaggagggaagaacattccaagcaggggctttagcaaagaccttat

SEQ ID NO: 249761 - DNA, 605 bp, Homo sapiens
cttggcacatagtaagtccttgctactgttgttatgacctgatgtgactgcttattaggtatgtaacattgggccaattccccaggccttaaagataagaaaaattcattcatcagaatgattgggaagggtgtctggcacataacaagtactgagtcactgacagttctggaccactaagactacaactactgaccgcgtattctcaattcagagacaggtagtggcactgtgtgaacaactgtggatttggggtcagaggcctggagttggagtcctggctcgctctggccttcatgatggaagggaccatttctcaagaaagcattttggtatcacaagcttctagcacagtcactggtatattgcaggcactaaataacagttaaaggaaagagctggcagcctcatcccttaacttctctaagactccrtatcctcatctataaggcagagatgatatggtacctatagggtgggttatgtgagaacacagcattaagagccctttatacattgccaggtgttatatagatcttcagtattattatcattgggccaaaataagatccacagtataacaatgaatactgctacaaatagct

SEQ ID NO: 249762 - DNA, 611 bp, Homo sapiens
tgtggctgttgtggccggtgctgagttgggtttcgagggctcatgagagacttgacagcttgcgtgggcagtagccaagaatagcccccggtgactgggctggcggtgcagatcgcagggaagctggttaagcaaaaacactttcctcccttcaggccacgggaagaaccgtacgctcagacatcgatcactttgaaaatagaagccaaaagcccagaatatcatcttgcagccccaaatggcttggcttggtgccmattcaagccacagaagcatggaggacagttggtgaggaggaaacagggatagccaatatcaagaaactcattctaggggcactggtgaggggatccatagaaaactcagaggctgcagtcaggagtgaaacactgggtagttggggagaagacccctgcactcacaaagaggggtacagttcctttacaaatactttggcctgcagatggctagtagctggacacatggtggtatggggaaggaagggacagcctctttttctgtgctagtctgttaagagcagcaagaagctacaaggctcaccggtcacccttggacaagtgggaagacagctatggaacttagataggaac

SEQ ID NO: 249763 - DNA, 581 bp, Homo sapiens
aggagagggattctggggtgaggactggaagcagccagtagggcttgtggagtccctggcagggatgggcttgccttcctccctaggttctcagggcctgcacctgtctgggtattgaatggcttcaactgtgtttccatcctcttgccccccaatgcttttttgtccatgggatgtgcctctggaagtgaatctcatttatattgacccagctcttcccctctgtcaggttcactagaggygaatgcaagggtttagagaggtgaggttgcagagggaaaaggtgccttcccagcaaggattctgcccttgggatatagcaagcctttggaagagcccagcttgtctgtcctgcagaactctttgagatgatgcaataggatgtcatttctgctctcctccagttagcacagagctgacatttgggaatgtgcccctttatgtgtgtgatttacccctggttctcctctaattgccatgaccaccacaagcagtgggtagcttcccttctccgcatgttgctaatgagaaaactgggtcataggattgtttaagatttgtctaagacttgtagcaagtac

SEQ ID NO: 249764 - DNA, 581 bp, Homo sapiens
aggagagggattctggggtgaggactggaagcagccagtagggcttgtggagtccctggcagggatgggcttgccttcctccctaggttctcagggcctgcacctgtctgggtattgaatggcttcaactgtgtttccatcctcttgccccccaatgcttttttgtccatgggatgtgcctctggaagtgaatctcatttatattgacccagctcttcccctctgtcaggttcactagaggtgaatgcaagggyttagagaggtgaggttgcagagggaaaaggtgccttcccagcaaggattctgcccttgggatatagcaagcctttggaagagcccagcttgtctgtcctgcagaactctttgagatgatgcaataggatgtcatttctgctctcctccagttagcacagagctgacatttgggaatgtgcccctttatgtgtgtgatttacccctggttctcctctaattgccatgaccaccacaagcagtgggtagcttcccttctccgcatgttgctaatgagaaaactgggtcataggattgtttaagatttgtctaagacttgtagcaagtac

SEQ ID NO: 249765 - DNA, 597 bp, Homo sapiens
ggactgttaaactgtgttcatatataactttaataaaaactaaaaattaagaactattaaactttggggcaagatagtatttaaagtcctgttggatataaagttcttgtagcggggccgggcgtggtggctcacgcctgtaatcccagcacttggggggccgaggcgggtggaycacttgaggtcaggagtttgagaccagcctggtcaacatggtgaaactccatctctactaaaaatacaaaagttagctgggcgtggtggcaggtgcctgtaatcccagctactcgggaggctgaggcaggagaatcgcttaaaccctggaggtagaggtggcagtgagccaagttcacgccactgcattccagcctgggcaacagagggagactcatctcaattgaaaaaaaaataagttctcgtagtagaggatagtgaagggatgcagacacaaaggagaggctgatgacctgttttcttgattacagtgctgattgcttgagcgtgtttcttttgtgaaaattcctcaggctgtacatacatgatgtgtgcacttctatgtatgtattttttacctcaatcaaacatttacttacaaaa

SEQ ID NO: 249766 - DNA, 597 bp, Homo sapiens
ggactgttaaactgtgttcatatataactttaataaaaactaaaaattaagaactattaaactttggggcaagatagtatttaaagtcctgttggatataaagttcttgtagcggggccgggcgtggtggctcacgcctgtaatcccagcacttggggggccgaggcgggtggaccacttgaggtcaggagtttgagaccagcctggtcaacatggtgaaactccatctctactaaaaatacaaaagttagctgggcgtggtggcaggtgcctgtaatcccagctactcgggaggctgaggcaggagaatcgcttaaaccctggaggtagaggtggcagtgagccaagttcacgccactgcattccagcctgggcaacagagggagactcatctcaattraaaaaaaaataagttctcgtagtagaggatagtgaagggatgcagacacaaaggagaggctgatgacctgttttcttgattacagtgctgattgcttgagcgtgtttcttttgtgaaaattcctcaggctgtacatacatgatgtgtgcacttctatgtatgtattttttacctcaatcaaacatttacttacaaaa

SEQ ID NO: 249767 - DNA, 569 bp, Homo sapiens
ctcaggccataccacagaccaagtaaaccagaatctttgggggtgggccaggcrtgggtatttttagttgtcccctccagtgatctgacgagtctaatatgtagcagaagctgggaaccactaactgttccttttgttcccccagctccaaagacacctcctcatctccttgtagaaaggagatcaagactccttattcgtccattgcagagctaaggaaaccagggctcaggaaggttaagtggtttgctgctaagaggaagggccagaaacagaatccaaaactccggacccggggagcattcaaccctggcttaatgtgcttctactgcatgccagccactgagctatccattaaccaagaatagaaaagacgcaggaaattatgccattctattacggcacaggatgctatggagcctgggctggggaggtggggaaggtgtttctaaacttcatttgtaagctgaatcttaatgccaagaagacgtgaggcgatggtgagggcctggagaagggagtgtggaggttcagagtggccagcaaggatttgggaatgatattaaaaa

SEQ ID NO: 249768 - DNA, 569 bp, Homo sapiens
ctcaggccataccacagaccaagtaaaccagaatctttgggggtgggccaggcatgggtatttttagttgtcccctccagtgatctgacgagtctaatatgtagcagaagctgggaaccactaactgttccttttgttcccccagctccaaagacacctcctcatctccttgtagaaaggagatcaagactccttattcgtccattgcagagctaaggaaaccagggctcaggaaggttaagtgrtttgctgctaagaggaagggccagaaacagaatccaaaactccggacccggggagcattcaaccctggcttaatgtgcttctactgcatgccagccactgagctatccattaaccaagaatagaaaagacgcaggaaattatgccattctattacggcacaggatgctatggagcctgggctggggaggtggggaaggtgtttctaaacttcatttgtaagctgaatcttaatgccaagaagacgtgaggcgatggtgagggcctggagaagggagtgtggaggttcagagtggccagcaaggatttgggaatgatattaaaaa

SEQ ID NO: 249769 - DNA, 632 bp, Homo sapiens
tatttaactatttcccagtctccatcccccgcgtgcacaccccattgcagcagggactttgctctgatcctccgctctggcaacagagtctgagcacagtaggcactccataaatacctgctgagtgaatggccaaccccccgctgggtgggacrtgataaatgccaatgcccttcctgcaacaccaccatgctcaaatcagcaggtcctcaaacagctctcaaacagcgcaaaagggaagactgagtgaggggacatgatatcaaagcagttacaaatgagttccagagacctccagttcctgcatcagcctttttagctctgccatgacaactgcaattcattaccctgattcacacacagccctggtgccagctcactggcaagagtcgcttcactccagaaattccaaagaagggcttgcccctgataagactgggggaggaggggagtttactgattcatataatgagtgctgccaaggtggtttgcgagctctaatgtcagtgtggctcaggtgagccatggcccgccaggaagagacctgagttggcaaggaagaaacaggggttttagttcctctaccgttaccaatgcacaggagggtaggttggcctaactggaaagggctc

SEQ ID NO: 249770 - DNA, 562 bp, Homo sapiens
gcagattattcatagaagctctgccttgataatcttggacacgattcgggagaattctctggattaccaggcagagaattttattctttctccttactttttcccaagcatatagagtctctctctttctgctctgatccacctaaagctgaagataaaatggcaagagcacccctgtcaccaccaccattatgattatgccaggttacaccagaagccagcacacagtgctgggtctcacatgaagcctactgtaaccactccttggcttcagcctatgtacactgaaggtccaggggctctacatcacatagtggcaaatacagccaggcctgtgtttttcccttcagagtagcaaggtctcccagacatgggtctagaagtgccatctggaagtcaggtactagagtyaaaaattaggagtttacctggtttctgttgtactgtggctgaactggcactcaagccacagggcgtagtctttcctattcttccctcctctttccaaaggcagaggagcctgaccccatattcactgccatcccaagccatgagaaatact

SEQ ID NO: 249771 - DNA, 556 bp, Homo sapiens
attaattctggagacattgccatattgctgactagaattcagatttcacaagaggaaacagatgcattacaaaataggcattctttttcttgataaarttatgtccattagtagtttatgaaaatacatattggctatagttatatattgatacaatattttacaagtatgtaacaatgaaaccagaaattagtataatagtgtaatcaaatacttttttacctgaaaactgtaagataaggttttaaaactacataacctccaaagtatatttaaattgatggcttttatgacataaattataccacaaaaaggccgtttttaaaaaacaatatagcctccaaattatggtaacctgtaaaataaatctaaaatgacaatcctaaatgtataggacttggtgaaatcttaggaatcatttagcaaaatttccaacaatactatacaaatattccaggagcaaaagtttccacagatgtctttcaaaatattcagaatccaaaaacttttaactccattaataccataatttagtcctttttaattattcacagaa

SEQ ID NO: 249772 - DNA, 556 bp, Homo sapiens
attaattctggagacattgccatattgctgactagaattcagatttcacaagaggaaacagatgcattacaaaataggcattctttttcttgataaagttatgtccattagtagtttatgaaaatacatattggctatagttatatattgatacaatattttacaagtatgtaacaatgaaaccagaaattagtataatagtgtaatcaaatacttttttacctgaaaactgtaagataaggttttaaaactacataacctccaaagtatatttaaattgatggcttttatgacataaattataccacaaaaaggccrtttttaaaaaacaatatagcctccaaattatggtaacctgtaaaataaatctaaaatgacaatcctaaatgtataggacttggtgaaatcttaggaatcatttagcaaaatttccaacaatactatacaaatattccaggagcaaaagtttccacagatgtctttcaaaatattcagaatccaaaaacttttaactccattaataccataatttagtcctttttaattattcacagaa

SEQ ID NO: 249773 - DNA, 620 bp, Homo sapiens
gaaatgtgctactaccagccctagcttaaaaaatctccctcagtgtctccaggatcttccttatgacagactgaaatagcgaattgcattatgttcttaaaattcactacttaaaaatggtagcagtaggcagttatacagatatagcatactaaaatgctaaaaataacgttattctttagtcaaatatttgtttaaactgctgcttatgaagattttgaagaaagaccaacaatctaccaaaactgtagctcaggggaaagaggttgggaaaaagtcaggattcatttaaactggctgctaaataatgtatttgcccaattacatgtattatatttgagaaataaatgagctcaggaaagaactgactgatttgcaggcagacattaagggtcttgcagtgctggaaaagccaacttcttcaaaactactaacataagagatataagcgaaaaaggctttgagcacaaagtcacaagaagttttctcagttataaaaggtactccrtcctgaaactaaaaataagattaaggatgttaccttcttatgaaaacctattgttcagatggcagctactactttggtgaaagaaataggcatgggatcaaagcagcaagaa

SEQ ID NO: 249774 - DNA, 620 bp, Homo sapiens
cttgccctggttctgtgagggtacacctcccagaggaatctttatggcttgctgtgtggaagaaaagataggtcatctacttgtttctgtaactacratttttccaaggttttcaactcaaaataatcaatttaccaattatcatgcattgagatggcatatccttcactcctttaaaattctgattcattataccccatgtcaaatgcatccttcttaaacaagcgtattctgtcactacacttctcaaaattattatgtttcaccatattcctattcatcaacacaaacctctgtctcacttttagggtttcctgtaatccagcttgtgaaatttaggcatcattctggacttctgtcttattattgccacccctgcctagaaatttaacgtctaatctatcaccaagtcctgtccgttcaactgccaagttcaagaaactaatgtatttctcatagactacagcaagcctatattatttcctggtttttgcttatagaacaccacagtgattaggagcacaaactgcctcagttcaaagcttagacttttcatttattaattgtgtaaatctggacaaaataattaacctcctagtgcccttctatttttctctcta

SEQ ID NO: 249775 - DNA, 439 bp, Homo sapiens
tgtcctatttccctgtcctgccttacaagaaaagtagctttaaaatgaccaatctgcttttttgttctttgttcctataaaaccaaccccttctgctcaactcattggaacacttactctattttacacaacaaatcattgcccaattctagartctcaaataaagccatttgagatctgtagatgaaacttattgtaactttgtcttttgactatggttatgaccgagttcacacctaggcaataacaactttgtcatgtctgccatggctaacaacgatcacacaattctatttcagaaatgtcaaaaagtagaaaacagcatcttagaattaatgaaaggtaatgtatttctttcttaaccaggctggcaatctttgtcatttaacttgaacatctagttgatttatatttttttaaattattggccattgcatca

SEQ ID NO: 249776 - DNA, 472 bp, Homo sapiens
tgcttgagctcaggagtttgaagaagccagcctgggcaacatggtgagaccccatctctattaccaaaaaaaaaaaaaaaaaaaaaaaaattatgggccaggcaaggtggctcacrcctgtaatcccagcactttgggaggtcgaggtgagaggatcgcttgaacccagaaatttgagaccagcctggcaacatagtgagactgtctctataaaacactaacacgctaattaaataaataaaattcaaataattgatatatttgaattcgaatttcaccttgatatgtacattttgttttcctacctgctctatgttcttctctccttctttctccctctcttttttagtgaaagtgtctcactatgttgcccaggctggagtacagtggctattcacaggtgcaatcatagctcactgcagcctcaaattcctaggctcaagcaatcctcctgcctcagcctcctgattag

SEQ ID NO: 249777 - DNA, 527 bp, Homo sapiens
gatgcaaatactccaattataaaacatagccccctatatgctgatgactycaaaatgtgtatttccagctctcaactgtttgttgaattccagattagaatatccacctgatcactgaaaatctccaattgatctttaattgacatctcaagattaataaattggaaatcgatcttttgatttcattccctaaatatgcttttcctatagatttccccaactctgaaacagcatcaccatatatccagttgctcaaggcaaaaaccatggaatcatctttaattcatctctttctctcacatctcacctcatcaacagcctatttttttccacactcaaaatatgatttggctctacctcagagccattatgttttgtgtgcactattgcatttttctcctacttgcactctgtaattccattattgccctaatgaagcctatttttttcattgtacagccagagtgatgtttttttaaatgtatagcattttgtttcttcctttcagctcttcatttcctgcttcc

SEQ ID NO: 249778 - DNA, 527 bp, Homo sapiens
gatgcaaatactccaattataaaacatagccccctatatgctgatgactccaaaatgtgtatttccagctctcaactgtttgttgaattccagattagaatatccacctgatcactgaaaatctccaattgatctttaattgacatctcaagattaataaattggaaatcgatcttttgatttcattccctaaatatgcttttcctatagatttccccaactctgaaacagcatcaccatatatccagttgctcaaggcaaaaaccatggaatcatctttaattcatctctttctctcacatctcacctcatcaacagcctatttttttccacactcaaaatatgawttggctctacctcagagccattatgttttgtgtgcactattgcatttttctcctacttgcactctgtaattccattattgccctaatgaagcctatttttttcattgtacagccagagtgatgtttttttaaatgtatagcattttgtttcttcctttcagctcttcatttcctgcttcc

SEQ ID NO: 249779 - DNA, 605 bp, Homo sapiens
catactgccctaagtaatttatagattcaatgctatccccatcaagctaccattgactttcttcacagaattagaaaaaactactttaaatttcatatggaaccaaaaaagagcccatatagctgagatgatcactttttcgtctttttaacttttgataatttagttataaagtgtctatcctcaatataataccagcagccagaatttaacctcaccttaaaaggattatacatcatgagtagttaggattgatctctggtaagactaaatctaggatatgatcaagtagagctggagctgagkcacagggctgcttcagcatctgtagtgaggtaaaggtccccaggcttattactggggacatgaagaggtgtgtttcccaccagtttcctgggttggcaggactgactctggactatggtagtgaggacctgcttcagaatcctggattgtgtctgaggttggagggcctgttattaggggacatgaattgcaatggtggaaggagctcatttagaaactacagccaagtagggttgaagctgagtccagagggaggtgggactacttttgctctgcagccagaactgtgctcagcaagc

SEQ ID NO: 249780 - DNA, 563 bp, Homo sapiens
tccaagagtaacatctaggtaatactttcagctaattaaaggagatataggtcaataagaatatgcacagttgatctgaaactattgaatatgatgttcagaaatctcacttagtcatgtcttttaaaagtcctataatgattttattatctgattccatttaattgtgatgtattaaacaaaaagaacaaaatggggagaacgtttagaaaaaatagtatgcttagtcatgataaccatatatgaacaaatttttatggaaaataccataattaaaaattagtatagagccttccataagagaagcattctttttaaaaaatattttcaatagttacctatttttttttgtgtgtgtgtaatcagaaaaatattttatttrtttatttattttttatatatttttttattcaagttatttttttttttttttttagtatttattgatcattcttgggtgtttctcacagagggggatttggcagggtcataggacaatagtggagggaaggtcaacagataaacaagtgaacaaaggtctctggttttcctaggcagaggac

SEQ ID NO: 249781 - DNA, 593 bp, Homo sapiens
ccttggctcccaaagctctgtgattacaagtgtgagccaccrcacttgctgttgagaataatcttggtcaatttgaccatcttactacattttgtgaatgtaatcttctgctcctagttgtaaatattttaagctgaggagagttagatttgagatttcaggagggccaacatggctagggttctcatggaaaagtactgaaaggagagagctacagagagatagagagagagctaccaagagagaaagagagagacagagagagagagagagaagaggggagagagagagagaaagacagagagagagagatcgatctagacatctgacagagttcccagagttggctgactactcaaggttgggaaaagaatcacccaaaaagagcaatcagaacaatttcctgagcacacacagggaaagatgttgttgatattctcaccagacagatgggggtggggtagggtgctcagaagggtatttgttgcctcattagtaaggcaaaatttgctctagatgaagactgctttggtttctcctaacaaagcttagaaaaaaatccttacaaagatcaaactatttcaaagtaacat

SEQ ID NO: 249782 - DNA, 576 bp, Homo sapiens
ggttcgagtggagatcagcaaacagcaggaaatgtgggtaaaatgagtaagtgaattaataatagtcttctccttccaacagaagtagaatcctctcccaggcctcagaagtagaatattaatgcayttggtgcctgctgcatttctttcctctagcatcagaatgtgagcgtttgactcttagggctgttttggctgtgttacagaaagccgattcaaagtcacccccgcaaaaagaagttgattggttcccttaactgaaaatgtggggttcaggtttagttagatccaggagctccatctctcaactctgctttcctctgtgagagctccatttccacacaggctctttccagccaatgggagaaacggcctcagggtttcccatggatcagcttagcaaccacagcaagagagcatttcttttccagtagcatcagccagtatcctaaggcaaactcttattgtctggattgggggcacatattcagtcctgagccaatcatgatggctggaaaagatggccctctggttgcccaggactaggtcatgggcccacccctgggcaagagtgtg

SEQ ID NO: 249783 - DNA, 599 bp, Homo sapiens
gccctctggttgcccaggactaggtcatgggcccacccctgggcaagagtgtgtatgtgagcttagcttcactgacccacgagagctgggccaggaggcattgctgtctggaaagatgatggaaaggataaaaaccccttgtgcccactgaacctctccacttttatattaaacaccaaattggctccaggttgggattttaaaatgtgattagtaacaaattacctaccataccttttgccggtgtctattgtcacacagaggtgacctgctgatgtaaaattagctgagaacatctgctgatacaatttggtagtcacaaaagtcaggttgtggggcccgctctttagccgtgtgtctgytgagcagtttcttggatgtagggaaagatgggtgctgctgtgatcacattctatctgcagggacactataatctaccagtgagatctgcagggaggttgacacatgtagggacatggactgggctatgagcaccctgtcggccaatcataactaaatgtagaaataactcaagtttggatagaagattttgtctgtacaatggaagggttaggtttggtcacctaccatctgcaatc

SEQ ID NO: 249784 - DNA, 569 bp, Homo sapiens
ttccccatagggaacccaaggccaaggacttagaacttgtatcctggggttccctaggcccagcaagtgctcattcatccagtgtttgttgaataaatgaaacttttatagacaaatccttttatatttaaacggaaaactgcaaggcactgagatactgccctcattatcttaatctgtcagaagttgttaaaggtagggaagggtactgctggacaccaggccaatcagagcagctcgactgactgtctcctttactcaaggagcttttgtgcaagactatttgcagagggaagacaaggagtcctacagcaaaaaaattccctctcagcaccaatattctgtactacccattctgcagaaattgacatttgctatgaaagaccagcctctccagaccataagatcacawcatcacacacactcttcccataggttggatcccccagccccaatctggagtgggtatgctctggagctccttgcacacctgcagggatggggagctcatgaagaagcagagacttatctctagaaactcaagcaggagctctgggtgctcattcatc

SEQ ID NO: 249785 - DNA, 521 bp, Homo sapiens
tatgacttccttttgagttttttggaaagcttataagaaaaacaccacatttacataagcagaatcaattatatcttccattgctgtccttacacatgcttggctatttcttatttaaataggaaaccatgaaaatatatacatcgtgcatttctgttttcttaaactttcaaacattgtcttcacattcgtgatctcagtttctcctccctatggtgctgtgaattagggagaatggatattgccatcccccatttacagatggcatgagtgtgtcctgccttaaggcacacactagtagaggcagtgttggatctagaacccaggtcattggactcttcagtctctgccccttccactgcatcctgctgcttgaaagggcttgtcaaagactgtgaaccccttgaatagattctctggcaatttttcctttcaaaaaaaaatgraaatcagtttctcatcctcaagattacaatcacttcatcacattaatattaatctttcatttggggaaaatttct

SEQ ID NO: 249786 - DNA, 521 bp, Homo sapiens
tatgacttccttttgagttttttggaaagcttataagaaaaacaccacatttacataagcagaatcaattatatcttccattgctgtccttacacatgcttggctatttcttatttaaataggaaaccatgaaaatatatacatcgtgcatttctgttttcttaaactttcaaacattgtcttcacattcgtgatctcagtttctcctccctatggtgctgtgaattagggagaatggatattgccatcccccatttacagatggcatgagtgtgtcctgccttaaggcacacactagtagaggcagtgttggatctagaacccaggtcattggactcttcagtctctgccccttccactgcatcctgctgcttgaaagggcttgtcaaagactgtgaaccccttgaatagattctctggcaatttttcctttcaaaaaaaaatggaaatcrgtttctcatcctcaagattacaatcacttcatcacattaatattaatctttcatttggggaaaatttct

SEQ ID NO: 249787 - DNA, 594 bp, Homo sapiens
atttgaactaggaacccaccctgacttgaaatatgaatatcataatcatcccttatatttgcaaagcgttttgtacctttccaagcctccaaatctttataattttatttttacagacacacaaagcaagtacttttgagtttatattttcaatgaagaaacaaatacagaaagttgagtcacttatctaagtccacacatgtttggtgacaggattgggatgatatattatcctttccaaggaaactggtgaaaataaaatcttaatacctctcctccctgttttcatcagttggtgcagcaagcataagccccattgtgcakggattctccacaaacttagaccttcacatcctccttaactgctctaccacccctggtgaggttgttttcttccttgctcctgatccaggttcctgatctcaacccagcaccatcaatgcttttacctggctgcttggacttgccatgtcccagcaaaccagatctatactcttttctcggggtgctcttgttagctctttttttgaattgacacctgggtcttccccaaggctgcagcccttgtgtgtctgacccttactctatcccatc

SEQ ID NO: 249788 - DNA, 594 bp, Homo sapiens
atttgaactaggaacccaccctgacttgaaatatgaatatcataatcatcccttatatttgcaaagcgttttgtacctttccaagcctccaaatctttataattttatttttacagacacacaaagcaagtacttttgagtttatattttcaatgaagaaacaaatacagaaagttgagtcacttatctaagtccacacatgtttggtgacaggattgggatgatatattatcctttccaaggaaactggtgaaaataaaatcttaatacctctcctccctgttttcatcagttggtgcagcaagcataagccccattgtgcatggattctccacaaacttagaccttcacatcctccttaactgctctaccacccctggtgaggttgttttcttccttgctcctgatccaggttcctgatctcaacccagcaccatcaatgcttttacctggctgcttggacttgccatgtcccagcaaaccagatctatactcttttctcggggtgctcttgttagctctttttttgaattgacacctgggtcttccccaaggctgcagcccttgygtgtctgacccttactctatcccatc

SEQ ID NO: 249789 - DNA, 593 bp, Homo sapiens
aattataccaaacactagagatacaatgatagacaaaacaaacattgtcccttcaaaatttatggtaastaacacggtaaagacagacaattaacacgcaattgcagtcagccatacttatattttgggggccaggacaagagtacaaatagcccacatagcatatgcctaaatgtttaaagctaataaactgttaaaaaaatatgttctattttccttccttgacaattatatttcattgagacaaattgaaaagtatgagtgaaagtatggcctttctatgagttaaagttagcaaaatgtcaaaaatgactaattgttattgcatatgtgtgggtattttgttgaaaagctggagatgtttaaatgagtaacaaaatagacatacataattcatgaactattatagattcattccataaaatttattttttccttcatttcaatgaaatcactacttaagatattatattcaacatttttcatacaatttgtgctctattgagactaatgtctaaagagttaaaatattaagatacaattatattcaaatacatatatacaaaatttgaatttattttcatcaaaatgta

SEQ ID NO: 249790 - DNA, 503 bp, Homo sapiens
tcaatcaatgctggtaagcatggagtgacagacgttgcagccagattattcttacatcaaatatgaataaagaaaaccattgtcatgagcaaatttatttatgggttaataawagaaaacaagtgacttcttatctttttcagtacttcccgatgtgaattcttatgtctatttctgcaggatgctctggtggtgctgtgacatgccacctgcaccctcctccttcaggacagacgttctcattcccatcctcattcctcagcttctgggagttgggtgaaggtggtgactggcagctatcagctgacccactctccaggaattggcctaaggttggtcactactacttgccccaagacacatcttctcctgggggcagccaatgactggcccatttcaccccaacaatggtttatctgagagcactccctagcaaatttcctatactctccttttcagaatctgtgacctaagatagatatacaggacaggaattattgcct

SEQ ID NO: 249791 - DNA, 503 bp, Homo sapiens
tcaatcaatgctggtaagcatggagtgacagacgttgcagccagattattcttacatcaaatatgaataaagaaaaccattgtcatgagcaaatttatttatgggttaataatagaaaacaagtgacttcttatctttttcagtacttcccgatgtgaattcttatgtctatttctgcaggatgctctggtggtgctgtgacatgccacctgcaccctcctccttcaggacagacgttctcattcccatcctcattccycagcttctgggagttgggtgaaggtggtgactggcagctatcagctgacccactctccaggaattggcctaaggttggtcactactacttgccccaagacacatcttctcctgggggcagccaatgactggcccatttcaccccaacaatggtttatctgagagcactccctagcaaatttcctatactctccttttcagaatctgtgacctaagatagatatacaggacaggaattattgcct

SEQ ID NO: 249792 - DNA, 622 bp, Homo sapiens
ttatttatgggttaataatagaaaacaagtgacttcttatctttttcagtacttcccgatgtgaattcttatgtctatttctgcaggatgctctggtggtgctgtgacatgccacctgcaccctcctccttcaggacagacgttctcattcccatcctcattcctcagcttctgggagttgggtgaaggtggtgactggcagctatcagctgacccactctccaggaattggcctaaggttggtcactactacttgccccaagacacaycttctcctgggggcagccaatgactggcccatttcaccccaacaatggtttatctgagagcactccctagcaaatttcctatactctccttttcagaatctgtgacctaagatagatatacaggacaggaattattgcctcctttacaaaaatagagaaatggaagctcagagcagtcacatcttccctttaatagcacttaccgtattttattgtttatttataactccctcccactacaatgagaaaccgccagaatcactgaaacactttctcaaaattcacatgctcgagtggtgccctgaagatgctatgcagctctactaaggcctggctggggtctcagtgagagc

SEQ ID NO: 249793 - DNA, 622 bp, Homo sapiens
ttatttatgggttaataatagaaaacaagtgacttcttatctttttcagtacttcccgatgtgaattcttatgtctatttctgcaggatgctctggtggtgctgtgacatgccacctgcaccctcctccttcaggacagacgttctcattcccatcctcattcctcagcttctgggagttgggtgaaggtggtgactggcagctatcagctgacccactctccaggaattggcctaaggttggtcactactacttgccccaagacacatcttctcctgggggcagccaatgactggcccatttcaccccaacaatggtttatctgagagcactccctagcaaatttcctatactctccttttcagaatctgtgacctaagatagatatacaggacaggaattattrcctcctttacaaaaatagagaaatggaagctcagagcagtcacatcttccctttaatagcacttaccgtattttattgtttatttataactccctcccactacaatgagaaaccgccagaatcactgaaacactttctcaaaattcacatgctcgagtggtgccctgaagatgctatgcagctctactaaggcctggctggggtctcagtgagagc

SEQ ID NO: 249794 - DNA, 514 bp, Homo sapiens
ggccccacaagctgtaccagtcagaaggcaataaagggcagaaaataataaacacaagagcaagagagagtgaaattctccctaaagtctagagcatgtggggtctgccacccactccctatgtcctgatacctggaccccgtgttggacccactgggctctctacagggagaatgagagagaagcaatwgtcttcacacattggaagaggtctggctactctcatcataccagttttgtgagaggggacaagagggactgagggagagagacaggtgcctacagagaaaatccaaagagactatttgtgtagacagatgagctttgaactttgttgtctgcttatgtcccagtggtacttgggacctaagggactatcagtacctgtggtctcaatcaacatcgctacttgtcttcttcctcctcgaagctcctcctggacttgggcagtttataaaccctaatgcctatgtgatccagggcagtaacctcaatgtgtgaagggggccaaata

SEQ ID NO: 249795 - DNA, 568 bp, Homo sapiens
tttaactttcttcatatcataaaagtaatatatgttatttgttaagaagtgacatttgtaggaagaaatgcaaggaagaaaaaaattgaccataactcctcaacctagaaaaaatcatggccactttttcttctgtgtatattcctttcagttattttctatgtacatgatgacaaattctctatagttatgtattatttttactcaatatcattasatcattagcaggtccctataccattcaaaattattgtaaaaactatgtttgatggctgtacaatattctactgtatagctattgtgcaatttatttaattagtccctcactgatgtgtttaagattgattccaatacctagatagaaagggaacttgaagattaacctgttaagatctgttttcagaaagtcacaaaacatattagcatatcaaaagtcatgagaattctgtggtaaagaataaaggccttgttttaacagaacattttccaaatacattttctcatgaaattctacctcttctttttattttggctaaagacctattatattctgtctgcagcattctaa

SEQ ID NO: 249796 - DNA, 546 bp, Homo sapiens
gagaattctgtggtaaagaataaaggccttgttttaacagaacattttccaaatacattttctcatgaaattctacctcttctttttattttggctaaagacctattatattctgtctgcagcattctaatacttcaaggaacccagctggaaaaaggctgctattgggttttcccattgcaatttgaatcttagaagcaaagcagtgtcaggagaatatagctttgttagaagtacaagtaacttggtggctataatgggtaatccttcagtaatacaatcaatgactgtaaatataatatttataatatttataaaaacctagttgtttttattatttctraagaatctttttattgtaattagggagcggatcaagaatatgtcaaataaagattgtagatgaccactgaactgaggcaagaaactaatttattaatcctgctacaattgcagtctcaaagaagatgaaagagttagaactcgttgggttaagagttatagatttctatagttagaaaggaatgataaatgatgagaataggt

SEQ ID NO: 249797 - DNA, 579 bp, Homo sapiens
aatatttctaatttcaaaactagtcatccttatcatwaaaaaaatgaaagaattgcttagtcttaactcgtatagtgtacttgccttagattgttagacaggaaataatgaacaggaaaactatatgcatgttttacaaataacacattcatatttataaacatgcatatatgcactggtttggttgatacctcagcaaaagggtctgtgcaaaagatttttcccagtaatactttcctattccttctcacagcagtaaatgcttagtcatgatctcaactctgtctggaagactcagtaatagttaaatccactgtaacacacattccttctgccattcttactaacttactgcttaatctctttcaagacaaattctgaacccactcacgtttctattagtggtaagttgggctaggctgcaacataattatatttaagacttcaatttacctatctttttctagatcatttttaccaaatgtctcttttctatacaaaatgcattcagttctccttcctccaaatggaccagaccagtatttgtaagtcaccaggtccatgataggaagttccgag

SEQ ID NO: 249798 - DNA, 579 bp, Homo sapiens
aatatttctaatttcaaaactagtcatccttatcattaaaaaaatgaaagaattgcttagtcttaactcgtatagtgtacttgccttagattgttagacaggaaataatgaacaggaaaactatatgcatgttttacaaataacacattcatatttataaacatgcatatatgcactggtttggttgatacctcagcaaaagggtctgtgcaaaagatttttcccrgtaatactttcctattccttctcacagcagtaaatgcttagtcatgatctcaactctgtctggaagactcagtaatagttaaatccactgtaacacacattccttctgccattcttactaacttactgcttaatctctttcaagacaaattctgaacccactcacgtttctattagtggtaagttgggctaggctgcaacataattatatttaagacttcaatttacctatctttttctagatcatttttaccaaatgtctcttttctatacaaaatgcattcagttctccttcctccaaatggaccagaccagtatttgtaagtcaccaggtccatgataggaagttccgag

SEQ ID NO: 249799 - DNA, 555 bp, Homo sapiens
aaccaccttcacttctgataccaacttcaagtttaaggaagcccaaaatcaccatcagtcttgataattgattggaagttctcmcagaactcacttaaaactattattctcataatatggttaattatagagaaagaatacaaaaaaacagccagcaaaagagacactcagggcagaatctggtcgagttcccaacatgaagcttccattgcgctcaggacacattaccttctcaatgtcaatgtgtgacaatagacatgaagtcttgtcaacctggggagcacagcaaggctaacgggtcaagtctcctagaaaggcaaaaattaggctggcttcaaatctctccaaagaagttttcagcacctcaacaatttaacatgcttaaggaaagaatagtgtaagccaatcattttatattcagccaaacttttatttccagcaagtgtaaagatgacagacaaaagttttgaacgtgtaaaacttgcagaatagaggaagcacttctaaactggcagagtaagaacctgacaaaatctgttgtatataaaagcaatt

SEQ ID NO: 249800 - DNA, 563 bp, Homo sapiens
ggtagccccatctgcaaaataatttttattctcagtccttcacagaaagttaaaggcttcagacattatgaaggtcaggaaagtgatctgcatttcttttgtagctaaccttcagcactcatgactgcagctgttctgagagctgatgtcacacgacaattctaggagggttygattgacaatgctgcatgatagcccaaccaaaaaattaatccgtgttgaaagcattgaagcaccctaaagacagtcagttgggtctttttcactttttcttagagatagtaaggattatagtgattcttctatccttgaggaaaggtaacaagcagacatctgcacagcatcttaacgtgtgtattttcagcaggtcagccatctaatctgggagctttagtcttcttcacaatcatactgaaatgtcagtttgtcagaagatagtatcacatcaatgccaaatatctgagtggtggggccgcattgggccatggcaacactatctatgatgatggaagagcttgaaaggtgatcacagaggcattgttgttatgtccaaagggtcctcc

SEQ ID NO: 249801 - DNA, 609 bp, Homo sapiens
aagttcccatagcctaaaaaattggaatgtcctcaaagatgaaattttaccccaaatcatcatgcctgctatttattttccccattcccttcaacctgcaactgcatccacagtctccaacttaatcagtgacctttataatcaaaggataaattgggtcttccataaaaccaaagtcacaactcagtggttctacttccattcctcttcctgactctgatacctctgtgaatggaagacttgccttagctcatctcttgcaaaatacaaaggaaaatatctttgagaagagggaaaaaaaatatatatatatatatatrtgtgtgtgtgtgtgtgtgtgtatgcatatatgtgtgtggtatatatatataaatagagagagagagagaaatagtttcaaaaggccatgtaacagaaaggggtttgttcctttctcccctgaactatcagagaaatgataagagaacagatcttgaacacaatgcctttaggttgtcaggccaaccatgcactctgccactggagttgtgaaagtcttgaagggaaagatcacagctattttacttaccaagagataaaactaccatgtgtagaagagctaggcctgag

SEQ ID NO: 249802 - DNA, 561 bp, Homo sapiens
gaatatgccatcttttctaagacattttaataaagtctctcatttttcctgacttttaaaggaaataagtaaccatasggtaaagatcagatctcttcatgaattgaaaaccagctaggaaaggaaaggacttgtgggcttgcgaggcagcgtttagtagcagcacatcaacccccacccttgttgagtgctgcttatgggagtaggaactgaatatgcttttccataaattacgtttaacttcctaggaaatctattccattaaactctatgtgagtatccttattttttgaacatcctcaaataagtaacctgaagcccaaatacagataatagtgtctaccagatttctttctgaaccaaatttgaagcctggttatggatgttcaatgccagtaattctcttccttcaaggataagcaatggcaaatttgaagacattttagacgcaaccaagcaaattgggaaagagggcagacaaaaggcatgtagtatttaatttagacaaatgaaaggaaagatgctaatgactggggaaaggcaatatgaagtttgccttct

SEQ ID NO: 249803 - DNA, 561 bp, Homo sapiens
gaatatgccatcttttctaagacattttaataaagtctctcatttttcctgacttttaaaggaaataagtaaccatacggtaaagatcagatctcttcatgaattgaaaaccagctaggaaaggaaaggacttgtgggcttgcgaggcagcgtttagtagcagcacatcaacccccacccttgttgagtgctgcttatgggagtaggaactgaatatgcttttccataaattacgtttaacttcctaggaaatctattcmattaaactctatgtgagtatccttattttttgaacatcctcaaataagtaacctgaagcccaaatacagataatagtgtctaccagatttctttctgaaccaaatttgaagcctggttatggatgttcaatgccagtaattctcttccttcaaggataagcaatggcaaatttgaagacattttagacgcaaccaagcaaattgggaaagagggcagacaaaaggcatgtagtatttaatttagacaaatgaaaggaaagatgctaatgactggggaaaggcaatatgaagtttgccttct

SEQ ID NO: 249804 - DNA, 591 bp, Homo sapiens
cacatcacatttcacagtgtattgatttttttttcaacacatcaacatgtaattttcatttacaagaagctaatgtttatttttaaataacataagatgacatgggagaataaacttaactttaaataaaaagtcagggtacaatattatgtatacagcaggatctcagttttgcaaaaagtggtattttatgtgcatattaaaagtctgaaaaggaatcattcacaatgtttgtgatgatctctaagtggggagatacaagcaawtttttttctttatatatttatgggttattaaattcagaaacagttatattttaaaattatgttaaaatgtctaatttcagaatgagaatagattggcttgtttgagccttcctttccttgactgctctataatgtccagcccccttaaagtacattatgtttattatctttgggtcagtgctattttatgggagaatgctgttctggaacttcttactcataattatacagattaaaatagcatatcaaaatctttttacaaaaagatatcagttgttgttatgagactatgttgtacattaataatatatgttcagatcaaata

SEQ ID NO: 249805 - DNA, 591 bp, Homo sapiens
cacatcacatttcacagtgtattgatttttttttcaacacatcaacatgtaattttcatttacaagaagctaatgtttatttttaaataacataagatgacatgggagaataaacttaactttaaataaaaagtcagggtacaatattatgtatacagcaggatctcagttttgcaaaaagtggtattttatgtgcatattaaaagtctgaaaaggaatcattcacaatgtttgtgatgatctctaagtggggagatacaagcaaawttttttctttatatatttatgggttattaaattcagaaacagttatattttaaaattatgttaaaatgtctaatttcagaatgagaatagattggcttgtttgagccttcctttccttgactgctctataatgtccagcccccttaaagtacattatgtttattatctttgggtcagtgctattttatgggagaatgctgttctggaacttcttactcataattatacagattaaaatagcatatcaaaatctttttacaaaaagatatcagttgttgttatgagactatgttgtacattaataatatatgttcagatcaaata

SEQ ID NO: 249806 - DNA, 631 bp, Homo sapiens
actttcgagtcttattgtttaaaaaatacatttggtaaggctatagctgccatagatggtgatttctttgatccgggcaaagtaaattgaaaacctctggaaaggattaactgttctagatgccattaagcatatttgtgattcaaggggaaaagtctaaatattaacattaatatttagaagttgattccaaccctcatgaataacttcgaggggttcaatactttggtggaggaagtaactgcagatatggtggaaatagcaagagaactacaattagaagtggagcctgaagatgggactgaattgctgcaatttcattataaaatgtcaacacatgaggagttgcttcttacagatgagtaaagaaagtggttwcttgagatggaatctactcctggtgaagatgctgtaaacattgttgaaaggacagctaaggacttagaatattacacaaacagttgataaagcagtggtagtgtttgacagaactgactccaattttgaaagaagttttactgtgggtaaaatgctatcaattggcatcacatgctgcagagaaatctttcatgaacagaagagtcaatgtggtaaacttcatcgctgtcttattttaagaaattgccacagc

SEQ ID NO: 249807 - DNA, 631 bp, Homo sapiens
actttcgagtcttattgtttaaaaaatacatttggtaaggctatagctgccatagatggtgatttctttgatccgggcaaagtaaattgaaaacctctggaaaggattaactgttctagatgccattaagcatatttgtgattcaaggggaaaagtctaaatattaacattaatatttagaagttgattccaaccctcatgaataacttcgaggggttcaatactttggtggaggaagtaactgcagatatggtggaaatagcaagagaactacaattagaagtggagcctgaagatgggactgaattgctgcaatttcattataaaatgtcaacacatgaggagttgcttcttacagatgagtaaagaaagtggtttcttgagatggaatctactcctggtgaagatgctgtaaacattgttgaaaggacagctaaggacttagaatattacacaaacagttgataaagcagtggtagtgtttgacagaactgactccaattttgaaagaagttttactgtgggtaaaatgctatcaattggcatcacatgctgcagagaaatctttcatgaacagaagagtcaatgtggyaaacttcatcgctgtcttattttaagaaattgccacagc

SEQ ID NO: 249808 - DNA, 579 bp, Homo sapiens
gttgctctttctgacgcaaagtatcaggcacatcctgaaaccatcttcatatacttctcaaaattctgcaattatgcagttctgaagacatctggaaaacaaagttggttcagtgggtttttgcattacatgtggttttatagccaaagtaatttaaccttccctttttctcttcacagtggtaaactattttcacagtgtctcaggatttctttatacactatgcatgtcttattcaagtcctaagatacctttatgtataactcaaagtaaagattgtcatgccccactgatttctatcatccaaacatgttgctgaaattccaattatgatggctttttctgatttagccatataaattcaaccctatggtttggatttttaaatctcactattagcatagagagagttattaatatattttacattaagctatatctaacacttggtactgagcttgttgttttgctaggaatagagcatatgcctcattatccttgctcctgggaatacaaacttttctttaaaaaggatacacaaatgcgtgcacacgtgcrcgtgcacacacacatgtaaac

SEQ ID NO: 249809 - DNA, 600 bp, Homo sapiens
atataaatccaatattatattaatatttactmtactatattttttcaattagtgttctatgattaacatgttcaatattgcaacatatttttagtatttatcactataatttttaacagctacataattttccaagtagatgcaccaaaccttctttcagccttctcctacctttcattccacgtatatgttgtatctagttcttggctattggagctaactttatcatctatctgaatgcatgcagctagctttctgccttttaaattatttccttaacataattttccatgtgtggttaaaaggaaagtgacaaattgcttttcgaaagattatacaaatatagactcccaccagcagaatacagggtatcaaacatgccagtttgggactttattcttgattgggaatttattcttgcgtgtttaaatttgtacttgttgaaaagaaattgtttatatattgtgtggatataaagatctctaaaatatattggcaatcaaaagaaaccaaggtgcagagcagcatatattatatactgtgctactgtttatacagtgttggtatatatatgtgtatggatttaattacattttccat

SEQ ID NO: 249810 - DNA, 600 bp, Homo sapiens
atataaatccaatattatattaatatttactatactatattttttcaattagtgttctatgattaacatgttcaatattgcaacatatttttagtatttatcactataatttttaacagctacataattttccaagtagatgcaccaaaccttctttcagccttctcctacctttcattccacgtatatgttgtatctagttcttggctattggagctaactttatcatctatctgaatgcatgcagctagctttctgccttttaaattatttccttaacataatttkccatgtgtggttaaaaggaaagtgacaaattgcttttcgaaagattatacaaatatagactcccaccagcagaatacagggtatcaaacatgccagtttgggactttattcttgattgggaatttattcttgcgtgtttaaatttgtacttgttgaaaagaaattgtttatatattgtgtggatataaagatctctaaaatatattggcaatcaaaagaaaccaaggtgcagagcagcatatattatatactgtgctactgtttatacagtgttggtatatatatgtgtatggatttaattacattttccat

SEQ ID NO: 249811 - DNA, 611 bp, Homo sapiens
gcctgtctaaaagtaattgatctcaataattaaagttagtgtgacaaaggtattgagtcaggaactagagagggagatagattcaggaagatttggaaaagaaggacaacccctatcccatcttctcccaaactcttcctgcttgacatctcttgcttgtcaatggcaataatgatttccaccttaggaagctctcaactagcttacagactgggacaaagagtagatatgtagggaggggagtataataagcagctctgccatgtctacatggcrttaggataagggagaggaatgttggacatgccaaacaaggcacattgttaataaaaatcagtatgatcaccaaacaacggcaagtactgtacgccttttacctacacctgaatgtgatcttctcctaagtattaatttagctcagcctagaaactaaagcatttagttcaattatacattatctacctttcatgtgaagtgatatatgaggacctcaaaatctgattaaagacattgtagagatgctcattttattctacatgatatcattttatataatgaatgttagtaccagtaagtgacctcaaaacagatataataaatgaagagaaaat

SEQ ID NO: 249812 - DNA, 544 bp, Homo sapiens
gggaaaagagcgagaaaaacatttttgaaatgtgtcccttccaacccatttgtaataactgcagccctttaaccaggtcattttattgaaatcattagctgttactaagaagttttgtcgtcatcatcggaatatgctgagctcaccaggacacctcatgcttttcaaagcaaagaaagaggcaggaaataactgctattccttttttttttcctgaaatacgatgataaattaaggtgactgtaggaacaaaaggggtctccagtgaggtcagtctcttagaactcattgtagtggtacttctttgttgctgttgcccaccttagagggattctaggcaccatttgtttgcatctccatttatatctgagcstaatcttaaatctactactctcctatttcagcattttggcatgatgggttttttcagggttggcctgggtctgcttgttcgttcattcctgggagaagaaaaaaaacttaaaacgtataaaatttaacagaaaacccatacaattagaagatgctggatcaggatcttcta

SEQ ID NO: 249813 - DNA, 544 bp, Homo sapiens
gggaaaagagcgagaaaaacatttttgaaatgtgtcccttccaacccatttgtaataactgcagccctttaaccaggtcattttattgaaatcattagctgttactaagaagttttgtcgtcatcatcggaatatgctgagctcaccaggacacctcatgcttttcaaagcaaagaaagaggcaggaaataactgctattccttttttttttcctgaaatacgatgataaattaaggtgactgtaggaacaaaaggggtctccagtgaggtcagtctcttagaactcattgtagtggtacttctttgttgctgttgcccaccttagagggattctaggcaccatttgtttgcatctccatttatatctgagcctaatcttaaatctactactctcctatttcagcattttggcrtgatgggttttttcagggttggcctgggtctgcttgttcgttcattcctgggagaagaaaaaaaacttaaaacgtataaaatttaacagaaaacccatacaattagaagatgctggatcaggatcttcta

SEQ ID NO: 249814 - DNA, 548 bp, Homo sapiens
ccaagggaaataccaccaagtatttccttcaaattagtctctgcagtttattgtaaagagctttctgatccaaaagtttgttcacaatcaaatgagtggacaaaattgtttgctaaactaacatgtgtccttgttgcttattatcatgttttgcaaacacactgcarctcccttgagaaggtttctttttaatattattatttttaaatggtacattgtaattatatatatttatggaatataattttgtgttctcaccacaaagaattgataaatgcatgaggtgatggacaatgtacacaccctgatttgaccattacacaacatatacatgtattgaaacatcagatttaccctgagaagccttctcatcaagtgtcttctcaacattgaggataccatgagtttagatgaataagcatttttttaatcagagaaacaaaaatgatgaaatgatttatttaagtttgatgtaaacacttgaaatggagggttgaaaccattctataaataactttaaaatagataaaaccttattttcctcaatt

SEQ ID NO: 249815 - DNA, 629 bp, Homo sapiens
aatgagttggtcaacttaattattactcaaactattatgaaagttacaggcctttttgcttctttataattcaagtacaatctctatgacttgtattctttgtactattgagcaaaaaggagttgggaaggtaattactaacaaatactacaatctgggaggtagaaacgattcacagaagagaataaaaactccatgaaggtagagagtcctttctcaatagagaggactctttaagaaagagatagtgactgatatttttcccctgcttattagttagtggtttattttgttttgttttttgtttttttacaaatgtccttttgtttcattgttaacaaagtggttgctaaaacagtctcttctggatgaaagcagaaattagatgctgatgggactgctattactctctgctactcagccatctgcagggaaaactatttcctgaatatctttctcctatgggtggtcataggaataaaagaacaaacaatattagctgctctggaatggaaggtgggagtgagaagaggaagtgctgtgaaaaacatttgtctaaggccratctttaggggaaagtatgggacttccttttttttcttttgttttgtttttgtttcctattacta

SEQ ID NO: 249816 - DNA, 625 bp, Homo sapiens
tgtaaatgtaagagatgattgttgacaagcaggatgctaaacactaaattttgaaggaggtattattatttgtaatagcaacttctggaatatgattgaggaaaccctggatttaaaagtagggttggcagtttgatttaagggtcctgacagttctttcagactactatagcaaaatatcataagttgggcactttctaaacaacagaaatttatgtctcacagttatggaggctgagaaggaggatgccttattgctgtgtcctcacatagtggaagggtcaatctgactctctgtgtcctcttttataaggacactattccctttcttcatgttacaaagaagtgctgttgtttggtactacacacatggttgttaaggctttcagttggaggtatgtttttcctataaccccttttaactcctaaacttckcagacagtcgtggcactcaaatagtgactaattagactatagtaatagtttacacatgtcattcatcaaccactaggataaaagcttattatctattaccttgttttatatttacagtaaccacaaagaggtagagagtagtgtcacttcccaggggagagatggggaaactgaggtacagagatattaa

SEQ ID NO: 249817 - DNA, 625 bp, Homo sapiens
tgtaaatgtaagagatgattgttgacaagcaggatgctaaacactaaattttgaaggaggtattattatttgtaatagcaacttctggaatatgattgaggaaaccctggatttaaaagtagggttggcagtttgatttaagggtcctgacagttctttcagactactatagcaaaatatcataagttgggcactttctaaacaacagaaatttatgtctcacagttatggaggctgagaaggaggatgccttattgctgtgtcctcacatagtggaagggtcaatctgactctctgtgtcctcttttataaggacactattccctttcttcatgttacaaagaagtgctgttgtttggtactacacacatggttgttaaggctttcagttggaggtatgtttttcctataaccccttttaactcctaaacttctcagacagtcgtggcactcaaatagtgactaattagacwatagtaatagtttacacatgtcattcatcaaccactaggataaaagcttattatctattaccttgttttatatttacagtaaccacaaagaggtagagagtagtgtcacttcccaggggagagatggggaaactgaggtacagagatattaa

SEQ ID NO: 249818 - DNA, 420 bp, Homo sapiens
tgttcctgcattagtttactaaatataatggcctccagctgcatctatgttcccacaaaagatatgacctcatttttttctggctgcatagtattccatagtgtatatgtaccatattttctttatccagtctgtcattgatgggcattcaggttgattccatgactttgctattgtgactagtgctgcagcraacattcatgtgcatgtgtctttatggcagaatgatttatattcctttaagtatatacccagcaatgggattgcggggtcaaacggtagttttgcttagctctttgaggaattgctgtactgctttccgcaatggttgaactcccaccaacagtgtataagcattcccttttttccacaatctgttactttttttactgtttaataatagcccttctgactgaagtg

SEQ ID NO: 249819 - DNA, 420 bp, Homo sapiens
tgttcctgcattagtttactaaatataatggcctccagctgcatctatgttcccacaaaagatatgacctcatttttttctggctgcatagtattccatagtgtatatgtaccatattttctttatccagtctgtcattgatgggcattcaggttgattccatgactttgctattgtgactagtgctgcagcaaacattcatgtgcatgtgtctttatggcagaatgatttatattcctttaagtatatacccagcaatgggattgmggggtcaaacggtagttttgcttagctctttgaggaattgctgtactgctttccgcaatggttgaactcccaccaacagtgtataagcattcccttttttccacaatctgttactttttttactgtttaataatagcccttctgactgaagtg

SEQ ID NO: 249820 - DNA, 420 bp, Homo sapiens
tgttcctgcattagtttactaaatataatggcctccagctgcatctatgttcccacaaaagatatgacctcatttttttctggctgcatagtattccatagtgtatatgtaccatattttctttatccagtctgtcattgatgggcattcaggttgattccatgactttgctattgtgactagtgctgcagcaaacattcatgtgcatgtgtctttatggcagaatgatttatattcctttaagtatatacccagcaatgggattgcggggtcaaacggtagttttgcttagctctttgaggaattgctgtactgctttccgcaatggttgaactcccaccaacagtgtataagcattcccttttttccacaatctgttaytttttttactgtttaataatagcccttctgactgaagtg

SEQ ID NO: 249821 - DNA, 609 bp, Homo sapiens
tgcaaaatcctcaccatccttcatggtcctgctcatcactgactgtgtccattatactttccaatttaatataaccttctctgatttgtatgcttctcttatgaaagtttttgtctcctgttataatgagttatgtacatgccttgactcatggatttggagtcagacaaaacaaggttcaagtccagagttcattacttagtacctctgtggtgagttacttaagctttctaagtctcaaattccttatgtgttagtttagagacacagactttttctacaatctctgctcaataaaattcctttactgaatacagtttaaaagggctcggtatattgtgattacttctcagacaatattacaatatcactaaatgttgttttattaatatctcatggattagtaattaaggtataggtatgtcaccagaaatggttctttgtaaatttggttaatcaaaatagaaataaatraagtatattttcctttttcttgaggacttagtattactagaatccttctcatttcaaggttgatagatttttagtgttctagccattgagagtttgacttaccaaatttggatgtattttttctaataaaaatca

SEQ ID NO: 249822 - DNA, 537 bp, Homo sapiens
acttttatattaacatgctcttcaggtattcctgatatttgtggaagttttgagaacccctactgaacctaagtctcaggatcattgctatgtgttgttttgaagactaaatgttcaggatgtataataatggggtctagcaatggtagttaatttattattactactgaagggcagaggagaaggttgcttttgagctggttttaggattaagtaaatgtggagaaaaaggaggtcgttctaggaagtggaaaggtatacaatgttttcaaaggctcagtgctagagatttcatcagatattggagtcaggtagattctggacaatgtttggaaatagactttggattcaaatctcagcytcactacttgaggttttggattatttacttaactggaatacctttactaaaaattgggataataagtctcctagataattattggaggattaaatgagataatgtatgtaatgttcatggcagagtgcttggtatttgctaaatattagttgcttttgttagttactttcattatt

SEQ ID NO: 249823 - DNA, 646 bp, Homo sapiens
atacaatgagtagtggtgagacctgtggaaaaggccctgtctaatgggaaccactgctcctcagttataactcaccattgccatttgttttgaaagcaggccaagtagtgccagaatctccagttatttccaggaaagctaaaagatccaaatttcatgtgaaacmatctgttttactttaaaaatttgtttaaaatatttgcgattattttagattcatagaagagttgcaaaagtagtacagagggtttctgtatattatttaccgagttgtatatgtttcctaaaggctgctataacaagcaactacaaacttggttgcttaaaacaatagacatttcttctctggcagttttggaggccagtggtctgaaggcaagggttctttccattacaagctttgagaaggaatctgttccatgcctctctcctagcttcaggtggtcttcagcaacccttggcattccttgctttgtagacacatcactctgatctctgcctttctcttcacatagccttcccctctggaactcctttcttttataaagacaccagttattggatttagtaatcacccaaaatctagaattatttcatttccagatccttaacttacatacatctgcaaagacactatttctgaata

SEQ ID NO: 249824 - DNA, 646 bp, Homo sapiens
atacaatgagtagtggtgagacctgtggaaaaggccctgtctaatgggaaccactgctcctcagttataactcaccattgccatttgttttgaaagcaggccaagtagtgccagaatctccagttatttccaggaaagctaaaagatccaaatttcatgtgaaaccatctgttttactttaaaaatttgtttaaaatatttgcgattattttagattcatagaagagttgcaaaagtagtacagagggtttctgtatattatttaccgagttgtatatgtttcctaaaggctgctataacaagcaactacaaacttggttgcttaaaacaatagacatttcttctctggcagttttggaggccagtggtctgaaggcaagggttctttccattacaagctttgagaaggaatctgttccatgcctctmtcctagcttcaggtggtcttcagcaacccttggcattccttgctttgtagacacatcactctgatctctgcctttctcttcacatagccttcccctctggaactcctttcttttataaagacaccagttattggatttagtaatcacccaaaatctagaattatttcatttccagatccttaacttacatacatctgcaaagacactatttctgaata

SEQ ID NO: 249825 - DNA, 635 bp, Homo sapiens
ttcaactgcaattccacaggatttcattaccagctatttgcggtcttgctttttcctttgctggtactaaacaggtgacatatattttacattgataattagtgtcatctgacttgaggccactgcttttcttcttagtttctggtgccctttgcagtagtgcctttcctaccattttacatttggcagactggaacagctcaaatagctccaagaaagaaaaaactgcctcctttgtctattcaaggctctcacttcaccttaaatgcagaattttttctttttctttttttttaagttatgtatgaggattttttcttttcttttttcttttttgagacagggtcttgatctattgtccaggctgcagtgcagtggtgcaatcacagttcactgcagcttcaacttcctgacctcaagccagcctcccacctcagccttgtgagtacctgaggtcacaggcatatatcaccatatttggctaattcctttttattttttgtagagatgagaattcccaatgtaatcactcaggctggtctcaaactcctgggctcaagcgatcctccccmcttggcctcccaaagtgttggcattacaggcatgagctgctatacccagcctgtatcaggatt

SEQ ID NO: 249826 - DNA, 555 bp, Homo sapiens
tggactttcctagcatttgaggcctcagatctctttctactctctcttccctttaataattgctttgaaactgccaattcttgcctaagcctaattgtttcttttgaaatattgctaaatgcatccagtaaaaatcaacacaaacctctaacatttttctgaccttctcccctagagccaaaggttcaaacgcagttgatctgcttttgaagcaatagaaaatgtcaggtttttttgttttgttttgtttttgagacagagtttcactctttttgctcaggctggagtgcaatggcgcgatcttggctcaccgcaacctccgcctcmcggattcaagcgattctcctgccttagcctcctgaatatctgggattacaggcatgtgccaccacgcccggctaattttgtatttttagtagagacggggtttctccatgttggtcaaactggtctctaactcccaacctcaggtgatccgcccgcttcggcctcccgaagtgctgggattacaggtgtaaaccatcgcgcccggcccgaaaatgtcagtttttaaaa

SEQ ID NO: 249827 - DNA, 589 bp, Homo sapiens
gagcccagcagtttgaggttacagtgaaccgtgattgcaccactgcacttcagcatggacaacaaagcaagaacctgtctctaaagcaaataaacaaacaaaaaagtaaataaactcctatttaagtaactcttaacccagatgctgtaaaataagaaatattgtgtgtgtgggagtaagagtaagcctggagaatggattccatttctactgtttgtttgtagaaaccatgattatggggmtatggggctgtaattctctctgagatttgagaagagagacataaatataaataataaatatatcttcttatatttattgaatatataaattcaatattgaatttacgttcaaattcaataggcagcagtgtgcaggagacatacttaaatagtttgcatactgtattagtctgttttcgtgctgctgataaagacatacatgagactaggtaatttataaagaaaaagaggtttcatgaattcacaattccacgtggctggggaggcctcataatcatggcagaaggcaaaaggcatatttacatggtggcagggaacagaaagaatgagagccaagtgaaagggga

SEQ ID NO: 249828 - DNA, 500 bp, Homo sapiens
gcaaacaaataattaaaataaaagcattgttgccagactggaagctcaatataattctattttyctttggagttcagcttgctgaggggatagtctttattcacattccacacaagcaaccatcatccacacccactttctttttaaaggaaaacatttacttttgtgacttggtcataatgaaatacaaaggacctctttgtgtgtgaaaatgaaactgggtgtgagccttttaaggaaaaattaaagaaggatgtgtatgtagggggtgaaattcccaagtcttgctgagttgatcctgcctacctcctacttagaaaccaggctgttctgtatggcaaggcccagatgttgtgtgtcagggagcaaaacagcacctccagtggatcaccgccaagtcattccaacaaagccaggctcagactgctcactgcaccaagttacagtgcctggcacagaggcacagagagaatctcagccaggcaacatctaatagatgc

SEQ ID NO: 249829 - DNA, 500 bp, Homo sapiens
gcaaacaaataattaaaataaaagcattgttgccagactggaagctcaatataattctatttttctttggagttcagcttgctgaggggatagtctttattcacattccacacaagcaaccatcatccacacccactttctttttaaaggaaaacatttacttttgtgacttggtcataatgaaatacaaaggacctctttgtgtgtgaaaatgaaactgggtgtgagccttttaaggaaaaattaaagaaggatgtgtatgtagggggtgaaattcccaagtcttgctgagttgatcctgcctacctcctacttagaaaccaggctgttctgtatggcaaggcccagatgttgtgtgtcagggagcaaaacagcacctccagtggatcaccgccaagtcattccaacaragccaggctcagactgctcactgcaccaagttacagtgcctggcacagaggcacagagagaatctcagccaggcaacatctaatagatgc

SEQ ID NO: 249830 - DNA, 566 bp, Homo sapiens
acattaattatataattctattaggaaagttgtaaagtataaagaaattatgtggaaataatataactatactctaaaatacaccatatatattaagttttgtgataataattgttgaccatttcaaggaggaatataaaatatagctataaaaatggacagaagagattaaattctgccaatgaaaatttgaaattaagcattagaaaaacacagaatgtggaaaaagcaaggacagatgagaagacattagaggtcatatattaaagaaaaagtttttaaattaaagaataaaaatagaatcaatactcaataatgtagttaaaatgttctyagatatttaaaaatcagtgatacttagaaggaaagcacttaccttgtcttaaataaaataaacattaatcaactccaaagtactgttcaaattcaagaaaaagagagtcccttaattgtgcaaaggaagagtacaataaagattaattcaaaggagatgaaacgtgtacaatgctatgggaacaattatgccttcttaagtagctgacatggcaatgctttttgacagagat

SEQ ID NO: 249831 - DNA, 500 bp, Homo sapiens
atcagaataaaattgtttaatggatggaggcgctwtgaatgtacactccaaccttgtttaaacttttctaaaacagagagctctgaattcttttcacaatggaagttggcatagccatgatactaaaacctgaacaaaaggatacaaatacagaaaatcaaagatcagatcttttatgaatatttgtgaaaacatcctaaataaaaaattgaaaaataacatccaataataatctatcaccaacaaataagatattgttaatataacatcataatcatggtaaagaagaagaaatgatcattttctcaggtggtgagtgaaaaaactaataaaatccaacacccatttctgataaaactcttattaaattggaaaagaagcttactttctttataataccttatggtatttttccagttagaaaattttactatttatgtaatcaggtccatcttagacatttctcactacagtttgaaaatgcatataccccttaagcc

SEQ ID NO: 249832 - DNA, 593 bp, Homo sapiens
agactcctaaattctatcacaaggcatcctatgtacttaaaagtgaatcctgaatgtgaactgccatagtccctgttacacctaaaagactttgggcagcttcaccccaggtctgttgstaagataggtggggaaatttgaaacctgaaagattagacaggaagtagctagtacacgtgcccaagggaagttttctccccaatgtctatctgaggaactgagctggacaagagacctctctatggcagtaatgattaaagacaatgaactaaaagtggatcagaacaagattttgttttcccacctgtacctgacaactgttaaatgacctcaaaagcccaaaaaggagacttgagtaaagcagcttccaccatgaaacttttcttcagacacccaggcctgtgagtccccagcattctcccgctatggcatggtaacttcaggacacacagcagagtttataaatacctttccctgtccctgtgtctgtttgtaagcaaaaatataatgacaaacagagggatacatggactgtttctcagcataacataaccataaaataatgagactttctcctaattgcattatgagtg

SEQ ID NO: 249833 - DNA, 593 bp, Homo sapiens
agactcctaaattctatcacaaggcatcctatgtacttaaaagtgaatcctgaatgtgaactgccatagtccctgttacacctaaaagactttgggcagcttcaccccaggtctgttgctaagataggtggggaaatttgaaacctgaaagattagacaggaagtagctagtacacgtgcccaagggaagttttctccccaatgtctatctgaggaactgagctggacaagagacctctctatggcagtaatgattaaagacaatgaactaaaagtggatcagaacaagattttgttttcccacctgtacctgacaactgttaaatgacctcaaaagcccaaaaaggagacttgagtaaagcagcttccaccatgaaacttttcttcagacacccaggcctgtgagtccccagcattytcccgctatggcatggtaacttcaggacacacagcagagtttataaatacctttccctgtccctgtgtctgtttgtaagcaaaaatataatgacaaacagagggatacatggactgtttctcagcataacataaccataaaataatgagactttctcctaattgcattatgagtg

SEQ ID NO: 249834 - DNA, 593 bp, Homo sapiens
agactcctaaattctatcacaaggcatcctatgtacttaaaagtgaatcctgaatgtgaactgccatagtccctgttacacctaaaagactttgggcagcttcaccccaggtctgttgctaagataggtggggaaatttgaaacctgaaagattagacaggaagtagctagtacacgtgcccaagggaagttttctccccaatgtctatctgaggaactgagctggacaagagacctctctatggcagtaatgattaaagacaatgaactaaaagtggatcagaacaagattttgttttcccacctgtacctgacaactgttaaatgacctcaaaagcccaaaaaggagacttgagtaaagcagcttccaccatgaaacttttcttcagacacccaggcctgtgagtccccagcattctcccsctatggcatggtaacttcaggacacacagcagagtttataaatacctttccctgtccctgtgtctgtttgtaagcaaaaatataatgacaaacagagggatacatggactgtttctcagcataacataaccataaaataatgagactttctcctaattgcattatgagtg

SEQ ID NO: 249835 - DNA, 591 bp, Homo sapiens
tttacaacagagaatctggaagagatgccatataaaatattaaccaaaatacaaaggtcaattttcaagtaaggggacatgtgcaactagcaacaccttgattactggcttatttgggtatagcaggtgcatttggaggggaagctccatgttgctgttttagataatatgttgtcagatggagcaattagaaatattaaatacaaagttctaatgaatgtgtatgtatggtatagccaattagattaccagcaaatggagatacacgctatctctgacatttgaatcactttccagcctcttgttgataatgctctaagctgtcatcccctactctctaaatcttcccttccatctcattgttcctatggtttactcatcaccattcagtcccaacaaactcatgccgaaatgcatgctgtgccatacaccacatctctataacctgtccagtgtcccccatccaatatgagttcaaaattatgttttatggtcatttctctcaaggctgtttttaatatccasgaagcctcaacatttgtatggtcttcttaatttaatctcctggttctcagttggtgaaaatgacaa

SEQ ID NO: 249836 - DNA, 543 bp, Homo sapiens
gaattaaaaaaagagcaatcctaagaaaaaagaataaagctraaggcaacatgctacccaacaccaaactataccacagggctacagtaaccaaaacagcatggtacttgatatggtttggctgtgtccccagccaaatctcatcttgaataactcccacaattctcacatgtcatgggaggaacccagtgggaagtgatttaattatggggatgggtctttcttgtgctgttctcatggtagtgaatgagtctcacacaatctgatggttttaaaaacgggagtttccctgaacaagttctcttctcttgtctgccgccatgtgagatatgcctttcaccttctgccatgattgtgagaactccccagccaaatggaactgtgagtccaatagacctctttcttttgtaaattgcccagtgtcaggtatgtctttatcagcagcatgaaaatggactaatacagttctggtacaaaaacagacacagagaccaatagaacacaataaagagatttgaaataaggccacacaccaacaacaaa

SEQ ID NO: 249837 - DNA, 543 bp, Homo sapiens
gaattaaaaaaagagcaatcctaagaaaaaagaataaagctaaaggcaacatgctacccaacaccaaactataccacagggctacagtaaccaaaacagcatggtacttgatatggtttgrctgtgtccccagccaaatctcatcttgaataactcccacaattctcacatgtcatgggaggaacccagtgggaagtgatttaattatggggatgggtctttcttgtgctgttctcatggtagtgaatgagtctcacacaatctgatggttttaaaaacgggagtttccctgaacaagttctcttctcttgtctgccgccatgtgagatatgcctttcaccttctgccatgattgtgagaactccccagccaaatggaactgtgagtccaatagacctctttcttttgtaaattgcccagtgtcaggtatgtctttatcagcagcatgaaaatggactaatacagttctggtacaaaaacagacacagagaccaatagaacacaataaagagatttgaaataaggccacacaccaacaacaaa

SEQ ID NO: 249838 - DNA, 543 bp, Homo sapiens
gaattaaaaaaagagcaatcctaagaaaaaagaataaagctaaaggcaacatgctacccaacaccaaactataccacagggctacagtaaccaaaacagcatggtacttgatatggtttggctgtgtccccagccaaatctcatcttgaataactcccacaattctcacatgtcatgggaggaacccagtgggaagtgatttaattatggggatgggtctttcttgtgctgttctcatggtagtgaatgagtctcacacaatctgatggttttaaaaaygggagtttccctgaacaagttctcttctcttgtctgccgccatgtgagatatgcctttcaccttctgccatgattgtgagaactccccagccaaatggaactgtgagtccaatagacctctttcttttgtaaattgcccagtgtcaggtatgtctttatcagcagcatgaaaatggactaatacagttctggtacaaaaacagacacagagaccaatagaacacaataaagagatttgaaataaggccacacaccaacaacaaa

SEQ ID NO: 249839 - DNA, 537 bp, Homo sapiens
ctaatttgagagactctaaaaaatattgattagcttctctcttaatcttagaggtgaggatgtgtgaaggaagcaaggacgacaggaggcagatagaggtggacrgcagtcttatctgtctttcctccctggctcaggcttcatggaaagttttttaaaggaactgaaagtgtgtgtgtcttagggaaaatatccatctcatgtttataaaagatcactctggtaagctcttggcaagcctgaaggatcatagctgtcatctttgcctattcttcatagtctggagaaaatgaatgatgataatgttactcatctacaaaagttcagttttctccataaacacagctgtgtcgtgaattaagcaaagtcaatatgtgaaaacttagattgactgaaaaataaactgaagatgattatttgtaccataaaagaattctgtaccataaaaaagagtcatcatggaattattttgaattgtgaggtccattaatgatcctgcaatgcaattctgtttattaaagatgtgattagcaggca

SEQ ID NO: 249840 - DNA, 566 bp, Homo sapiens
cagctatctcttagatatactgatttcctttcttttgggtatatacccagctgtgggattgctggatcacatgatagttcaacttttagttttttgaggaacctccaaactgttttccatagtggttgtactaatttagattcctaccaattgtgtataagggttcccttttctccacatccttgccagcatgagttattgcctgtcttttggatataagccattttaactggggtgagatgatatctcattgtacttttgatatgcatttctctgatgatcattgatgctgagaacttttttacatgcctgtttgccatatgtatgtctttttttttttttttttttgagaaayggctattcaaatcttctgaccattttttgattggattattagactttttcctatagagttgtttgagttcattatatattctggttattaatcccttgtcagatgggtagtttgtaaatattttctcccattctgtgggttatctcttcactttgttcattgtttcctttgctgtgcagaagatttttaacttggtgtaatcccatttgtc

SEQ ID NO: 249841 - DNA, 498 bp, Homo sapiens
atgctcctttagctgagagctgttcattattacccaccttctgaagcctgcttctgtcaattcatcaaactcattctccatccagttttgttcccttgctggggaggagctgtgatcctttggaggatcacagaacctttctggtttttgggattttcagtctttttgcattggtttttccttatctttgtggatttatctacctttggtctttgatgttggtgaccttcagatgtggtttatgtgtggatgtcctttttactgatgttgatgtgattcctttctgtttgttagttttccttctaaccaaaaggcccctctgcttcaggtctgctggagtttgctggaggtccactccaggtcctgtttgcctgkatatcaccagcagaggctgcagaacagcaaatattgctgcctgttccttcctctggaagctttgtcccagaggggcacccaccagttgccagccagagctctcctgtatgaggtgtctgttga

SEQ ID NO: 249842 - DNA, 602 bp, Homo sapiens
caaatagactggcagcattttgcccttgccctagagatctgtggaactttgaactaaagaaagataatttagggtatctggcagaagaaatttctaagccccaaagcatgcaagatgtgacttgggtgctatttaaagcattcagttttatgcattcacgaagaggtggtttggaattggaacttatgtttartagggaagcagaacatagaagttcagaaaatttgcagcctgatgatgggatagaaaagaaaaacccattttctgagaagaaacccaagctggctgcagaaatttgcatgagtaaaaaggaaccaaatgttagtcaccaagacaataggaaaaatgtctccagggcctatcagaggtctgcatggcagcccatcccatcataggcccagagggctaggaagaaaaaatggtttcctgggctgggcccagggccttgctgctttatgcaatcttgggacttggtgccctgtatcccagccatggctaaaaggggccaacatacagctcaggccattgcttcaaagggtgaaagccctagtccttgttggtttccacgtggtgttgggcctgtgggtgcacagaagtcaaga

SEQ ID NO: 249843 - DNA, 551 bp, Homo sapiens
cacaattaataatagttctgtcattctaaagacagtataaagaatgaaaaggcaaactttaccatacatatatttgactcaagtattagtatgcagaacatgtaatgaattcccctctctcaataatatgaagacaaataccatatttaaatcttggcaaaagatttgtataggtatttttaaaagaagatatataaagcccaataarcatatgaaaagatacccaatgtcattaattggtcattagaaaaatgcatatttaaaccttagtgagatgacactatacatccactagaatggttaaaattatataaactgacaacacaaaaattttgctagtacatggagtgcctggaactcgtatatttttagtgggagtgcaaaactgtgcaacacctttggaaaacagtttggtagtttttgtaatctagtttttatatagttaaacacttaccaaaggactcagcaattccattcttaggtatttcaccaaaggaaatgaaatcacatgaccatacaaatatttgtacaacttggtccttagatatata

SEQ ID NO: 249844 - DNA, 555 bp, Homo sapiens
taaatttatgtagtaaatatattttgtaaaaactctaagtgccatagaggaatggattaatcctagaaacagtatctaatctgtattcctttctcagggctaccataacaaagtaccacaaactggcataaaacaacagaaatctattatctcacagttcaggaggccagagatccaaaagtcaaggtgccagcagggttggttccttctggaggctgagagagggaaaccgttcattcctccctcctaccttctcttccgacggctgccggccatgcttggcattcttagcttgtggatgcattgctgtcatctctgcctacctcgccttcacaggaccttcttccctgtgtgtctgtgtgtccttttctatctcataaggatactttcactggatttaggattcggcctaatctagcacaatctcatctcatattcctttaccttaattacatttgcaaagacyttatttccaaataagctcacattctaaggttgtaagtggacaggaattttgggagagacactatgcaacccactacagaacctaatgtc

SEQ ID NO: 249845 - DNA, 621 bp, Homo sapiens
cagctcatttgcaggctcgaactcctgggctaaagcaatcctcccatctcagtctcctgagatagctaggactacaggtgcaagctatcatgcccagctaattttgtttattttttgtaaagatgaggtgtcactatgttgcccaggctggtcacgaacccctggcctcaagcaatcctccctccttagcctcccaaagtgctgggattacaggtgtgagccaccacacccagctgaaaacatttaaagaaacaataaytgaaatttgttcccacgattagaaaaaaaatgaaagactttagattaaaagatcttatagagggataagcaggtaagaataaactcactcttagtcacattatattaatatttcaaaatatcaaaagcaaaaagaaaatgtaaacacttccagagagaaagagcagattacctcttaaaatcaaacaatgggattttggaaaaacttttattcaagtattatacatatggaaggagcggggggagagggggagatgggaagatgggaagataggcagagagggagagggagagagggagagaggaagagagggagagagggagacagggaaagagagagagacagagagagagagagagaga

SEQ ID NO: 249846 - DNA, 572 bp, Homo sapiens
gtgaataattttaatccgccaatgtactcaagggtctatcttaagcacagctctagagccctgattgtagcgctttccatggcctgacgaccagctttcctgtctcaaggggaaatctgagaatggccgaacagccatgacagtcctctcgaagagttcattcccccttctctccgcgacctgctgaggtctgagcccgacttccccagcacgcccatctcagtcaccattggtcgcctcctcgctggcgtgactaagacccagccctcttctcgctgggaccactctgaggcgatctgcggaagctgaggggcctcggaggaggggccgcgatgcatctcgggctttgtagtccacctgcacaactacagccagagagcggggcctcacgamccggagaactacaatccccagcagccgggcggaagcggagcgagggggggctcgcgtcacgtgggcgttcggcctgggcgggctatttctcagtgcggcggcggcggcggtggcggcggctccggggaccggggccttttgtttggagcggctgcgggggggccccggagcggcgaggc

SEQ ID NO: 249847 - DNA, 586 bp, Homo sapiens
gtttacacctgtaatcccagcactttgggaggctgagtggggcagatcacgaggtcaggagttcgagaccagcctgaccaacatggtgaaaccccatctctactaaaaataggaaaattagccgagcatggtggcacgcgcctgtagtccaagctgttcgggaggcttgaggcaggagaattgctggaacccaggaggcggaggttacagkgagccgagatcacgccactgcactccagcctgggcaacagagcaacactccgtctcaaataataataataataataatattaatattattttaactttaaatcactcaggttaacaaaagatatatttgttttgtttttgaatacctgtatggggttttttttggcataattaaaacatttattgatcacatagtgtgtgtatggcattttctttatgtgcattgcatcatttaactgcatactagaagaagctgtatattatattggctaaacaagtgaccttggcttcacattatttacctaagtgttagaaaatatttcttctaaatacattaccaatatcttaacaggttataaacccgaatgcatatatt

SEQ ID NO: 249848 - DNA, 561 bp, Homo sapiens
ttctcaaacacatacataactgcaaagawgatgttatttttacacattttaggcacaaaatgttaatgtcttatctgatatactctgaaatatgacctttataactccatttaatgtgatattgttatgtttaactgtgttttaacattgaggctctcacatggtctttgaaaggaagtatgacccatttaagaaagaaaaattcttggaccaaagattaaactatggaatggtaagaggctggggaatgataggaaagaggtgttagcaatagtccataaggagcacatagtcaaatactgtttgagagacaaactcttctcttgaaaatggaaaattaatcccttctggatggcaaaaggttatcacagatactagaaaaacataggggacaatatagactctatctctgataatgtttccaaactacatgaagtggaaatctgtataaaaagagaaacagggctaatagtgaaatggcaagttgagtatgaatgcctatgtctataaaataacacttaatgaaaaacttacataagaacaaagattaccagggttttg

SEQ ID NO: 249849 - DNA, 561 bp, Homo sapiens
ttctcaaacacatacataactgcaaagaagatgttatttttacacattttaggcacaaaatgttaatgtcttatctgatatactctgaaatatgacctttataactccatttaatgtgatattgttatgtttaactgtgttttaacattgaggctctcacatggtctttgaaaggaagtatgacccatttaagaaagaaaaattcttggaccaaagattaarctatggaatggtaagaggctggggaatgataggaaagaggtgttagcaatagtccataaggagcacatagtcaaatactgtttgagagacaaactcttctcttgaaaatggaaaattaatcccttctggatggcaaaaggttatcacagatactagaaaaacataggggacaatatagactctatctctgataatgtttccaaactacatgaagtggaaatctgtataaaaagagaaacagggctaatagtgaaatggcaagttgagtatgaatgcctatgtctataaaataacacttaatgaaaaacttacataagaacaaagattaccagggttttg

SEQ ID NO: 249850 - DNA, 572 bp, Homo sapiens
catgcaatcatagaatattaatgctgctaaggatcctaaaaagcacctagtttaacccccgtaatttacagatgaggaaactaacactcagaaaggtaaactgattcacacagtgtaatagggtggattaatggaagagccatgattagaaagtcagtatttatttgcagtgatataaattgatgtgctttttggaattgaacattcttatttttgttgctgttcctcttctttaattttgggcaggagctaaactgtggagaggtgggatggggagcctaacagaacaaaatagtcaatattcaataattgctatgcactaaacttaaaatactctagtaaataataggtcaagagaaagtgctttatagagagttagatgctgttttgagctttcactcttcttcacttagaactagttcttcaaggcatgtgagtgtgtgccaatataaatagctgaatttgggggtttaagtgcagacagcacaatggcctgattcccatttgaggagcagcagcayggagtggttatcctgatattgaagcagtagatagaatttgctggatggatt

SEQ ID NO: 249851 - DNA, 459 bp, Homo sapiens
tcttcttcacttagaactagttcttcaaggcatgtgagtgtgtgccaatataaatagctgaatttgggggtttaagtgcagacagcacaatggcctgattcccatttgaggagcagcagcacggagtggttatcctgatattgaagcagtagatagaatttgctggatggattttttgagtccaaataggcctcagatgaaatctttgaggctctggaatggattggaatarttccaacttcccatttgctatcaacaaggtacagagttgggtgagagacggatttggtagacctgaagacatcactcaactaggacatggaggtttcagggtgcaagtgtcaatgactggcctgacattataggtggagaagataacagaggaaagatatcaggcatacagacaagcctgggtgagggaatctcagcagataccaaagtggacaaagtcagtgatca

SEQ ID NO: 249852 - DNA, 459 bp, Homo sapiens
tcttcttcacttagaactagttcttcaaggcatgtgagtgtgtgccaatataaatagctgaatttgggggtttaagtgcagacagcacaatggcctgattcccatttgaggagcagcagcacggagtggttatcctgatattgaagcagtagatagaatttgctggatggattttttgagtccaaataggcctcagatgaaatctttgaggctctggaatggattggaatagttccaacttcccatttgctatcaacaaggtacagagttgggtgagagacggatttggtagacctgaagacatcactcaactargacatggaggtttcagggtgcaagtgtcaatgactggcctgacattataggtggagaagataacagaggaaagatatcaggcatacagacaagcctgggtgagggaatctcagcagataccaaagtggacaaagtcagtgatca

SEQ ID NO: 249853 - DNA, 567 bp, Homo sapiens
gctacaaaacaagtctcagtaagtttataaaaatcgaaattatatcaagtactctctcagatgacagtggaataaaactgtaaatcaactccaaaaggatctctcaaaaccatgcaaatacatggaaattgaataacttgctcctgaatgatcattgggccaacaatgaaatcaagatggaaattaaataattctttgaactgaaaaataatagtaacacaacctttcaaaacctcaaggatacagcaaaagcagtattaagagaaaagttcatagcattaaatgcctacatcaaaaagtctgaaagaacagtaatagacaatctaaggtcatgcctcatggaactggagaaacaagaacaaaccaaacccaaaccagaagaagaaaagaagtaataaagatcagagcaaaactaaataaaattgaaacaaaccaaccaacaaacaaaatacaaatgataaatgaagcaaaaagctaattagytgagaagataaataaaactgagagattttagcaagattaaccaagaaaagaagagagaaggtccaaataagctcaattagaaat

SEQ ID NO: 249854 - DNA, 445 bp, Homo sapiens
  misc_feature (1)...(445): n = A,T,C or G
agggaggagtcagcttctgtctgtcttattgtttgaactgggtcattgatcttctccggcccttagaggttcctttctcaggccttcagatgaagactagaatctacaccatcaactatccccagacctcaggccctcaaaatcaaccagtgaccttcctgggtcttcagctggcagatggcagatcataagacttctcagccttgatcactgtgggagccaatactttacaataaatctatttatatatgcatcctattggttctgttttttggagaaaccttactaatacactgcaattattacaaataattacsacatttactcattaaacatctctatgatgaattactagtactgtagcanncanganangagnttaaaaaggggncgtgtgtgccttanaaagtttcttgcgtatctaagtaactttggcggtgggact

SEQ ID NO: 249855 - DNA, 585 bp, Homo sapiens
caagtgggagatgaagctagaaaaatatatgaataagtatgaatcattttaaaaatgctactatatataatatatcctgaacctattgtatatcaggaaataataataaacccttttacaaattaaaaaatagaaacttacagctaataagtattatttcaggaatgtgcacagctaataaggtacctacaaataacctcggggattctgactgctctatattgtgctgaaatagttaatttgggtctccctagaagattgcccaagtaatgagaaatacagggaagattttaattgacaggaatcacacaaataccaaatttyaagaatcacttttctgtcataggttttagttctttcctaaagtgaatttgggcaggtgtttagtggtccttaaggtagctctccatctagatattaaaatacgtatgtattagctgctgaatcagtgagatcaaagaataatattggagtcctgagagcctgtaaaatggagtcatgttaagtttagccctgagtctgtcactccagtgtctatgctcatatcaaagctagacattggctagcctaaagaagcatgtgtag

SEQ ID NO: 249856 - DNA, 572 bp, Homo sapiens
acaaattaaaaaatagaaacttacagctaataagtattatttcaggaatgtgcacagctaataaggtacctacaaataacctcggggattctgactgctctatattgtgctgaaatagttaatttgggtctccctagaagattgcccaagtaatgagaaatacagggaagattttaattgacaggaatcacacaaataccaaattttaagaatcacttttctgtcataggttttagttctttcctaaagtgaatttgggcaggtgtttagtggtccttaaggtagctctccatctagatattaaaatacgtatgtattagctgctgaatcagtgagatcaaagaataatattggagtcctgagagcctgtaaaatggagtcatgttaagtttagccctgagtctgtcactccagtgtctatgmtcatatcaaagctagacattggctagcctaaagaagcatgtgtagctccatgtgggaggatatagcctggtcacagaaatctagttgctgctgataagtgtaataccttggtgattgctttatccaggtaagaggtcaatcacagtctt

SEQ ID NO: 249857 - DNA, 572 bp, Homo sapiens
acaaattaaaaaatagaaacttacagctaataagtattatttcaggaatgtgcacagctaataaggtacctacaaataacctcggggattctgactgctctatattgtgctgaaatagttaatttgggtctccctagaagattgcccaagtaatgagaaatacagggaagattttaattgacaggaatcacacaaataccaaattttaagaatcacttttctgtcataggttttagttctttcctaaagtgaatttgggcaggtgtttagtggtccttaaggtagctctccatctagatattaaaatacgtatgtattagctgctgaatcagtgagatcaaagaataatattggagtcctgagagcctgtaaaatggagtcatgttaagtttagccctgagtctgtcactccagtgtctatgctcatatcaaagctagacattggctagcctaaagaagcatrtgtagctccatgtgggaggatatagcctggtcacagaaatctagttgctgctgataagtgtaataccttggtgattgctttatccaggtaagaggtcaatcacagtctt

SEQ ID NO: 249858 - DNA, 572 bp, Homo sapiens
acaaattaaaaaatagaaacttacagctaataagtattatttcaggaatgtgcacagctaataaggtacctacaaataacctcggggattctgactgctctatattgtgctgaaatagttaatttgggtctccctagaagattgcccaagtaatgagaaatacagggaagattttaattgacaggaatcacacaaataccaaattttaagaatcacttttctgtcataggttttagttctttcctaaagtgaatttgggcaggtgtttagtggtccttaaggtagctctccatctagatattaaaatacgtatgtattagctgctgaatcagtgagatcaaagaataatattggagtcctgagagcctgtaaaatggagtcatgttaagtttagccctgagtctgtcactccagtgtctatgctcatatcaaagctagacattggctagcctaaagaagcatgtgtagctccatgtgggaggakatagcctggtcacagaaatctagttgctgctgataagtgtaataccttggtgattgctttatccaggtaagaggtcaatcacagtctt

SEQ ID NO: 249859 - DNA, 549 bp, Homo sapiens
tttgtgacctttggtaaggtattaagcctctgtgtgcctgagcttccctttctgtaaatctggccacgatatttgtgatacccaatacatagggctattgtaaagatgtaaattacaaagaataagaataactcctggatattagcaattttatacttacaaagtcccacagtatagtgatatggtaagcagtgaaaggcagtttataatatgacatggaaaaagtctgatggacactgagagtctaataagaamaagttccaagagaagaaatatggagcactcaaagcaagaggaagcctgggcatcttgcagaaaactattgtgtttggttaaaaaaaaaaaggtataaagtctccatgtaacattctgctaactctagacgtgtcaaaatatatggtagtgatacgctttgactgtgtctccacccaaatctcatcttgaattgtagcttccatgattcccatgtcatgagagggaccggtaggaggtaattgaatcatgggggtgggtctttcccgtgctgttctcatgatagtgaataactct

SEQ ID NO: 249860 - DNA, 591 bp, Homo sapiens
taccataacatcacccagactgggtaagcagacaaaaaaaaaagatgcttttgaaaaacatagaaatgcttatggcttcttgtattttgtatattactttaaaccttgatagttgtaaatctatactgattattttggtttgcactaaattggatccatttaaatrtgatttcgtccaaatggtcaggtgggtaaaaaagtcctaaaaacttaaactgctttgattcccaaagttgtccaatcagagccaggtccaggaaataatgccacaccaccccaggtctttttgtaaccaaaatttagactcggatcaatctcatggcagaactatcaattaagttaatatctgtggaaagatgagattgtagtgtaagccttagatttctccatggttgatagccttccttgtgatctgggtataaattattctttggagggacacagactaaaaaatgtctttcaagaagaatgggtgcatggatctacaccattaaacaagaagttctattttctttttaagttttgagaatatgatactaaataaaaaatacattctagtaatattgactatattgatatttacattgtttt

SEQ ID NO: 249861 - DNA, 629 bp, Homo sapiens
cgaggatagattctgctgatggcaatataattctcccattaccctagtactagttggaacttcttagttttagaaatgctaaaatgttaaaataaaatatggatgatctgtgaagaagggtaatgatgtaaaaatcctcatctacctcatgcctatccttcattttgtgtcctatcatcagaggcctgcactctgtaagtttaatgcctctgttctccactaagagcttcattaatagagactattttgtcacattctgcatatagctttcctttgtaattaaacatggatttcttttctcttttctggcttataaactcttaccaatgtagaaaaatgggagtgaccacagggacttgggtttatagcctaaaagtggtgtcaaggtttcagaaagtaagttaggggctctatgagatatagacaagggtgaagatgaaagttgaattaatgaggcataagaaaaaattttaatgaaaaccaaagttatggtttccaraagcttctctcaggaagttagtgctgacgaataaccttatgagacctgtaaaacaggcctcagacctcagagtccactgctttagggagagtgagagtgtaaacagaggactgggtaggggagggagcag

SEQ ID NO: 249862 - DNA, 547 bp, Homo sapiens
ttcctggttgctgccagaatatatctaatgaacaaatatttctcaggctgcttgctcttcctaaaagattctttggggaataacacacaccttcaagaagaaatttacttgtctttggctctctatattggcaagtagagacacagaacctagatccaaatatatttgattaggctttttccttagccaaagcatgaggtaggtggtatgagccttcagttttccttaggyatccttcctttcaatacttctgtcattccctagttgcccgaggcttcgatactgtctcgttctacttacaagtttcgtctcagcctctccatcttctcccaccatcctttgtctgcctttaccccaaaaccatcaattcttatttctcattgctatccctgtaggtagcctaaatgactgaaaatcaggaaatcaagcttttactttttaaagtacagattcagggggtaaaggtgcaagtttattacctgagtatattgcgtaatggtggggtctgggcttctagtgaacccattacccaaacagtgaacgtagt

SEQ ID NO: 249863 - DNA, 547 bp, Homo sapiens
ttcctggttgctgccagaatatatctaatgaacaaatatttctcaggctgcttgctcttcctaaaagattctttggggaataacacacaccttcaagaagaaatttacttgtctttggctctctatattggcaagtagagacacagaacctagatccaaatatatttgattaggctttttccttagccaaagcatgaggtaggtggtatgagccttcagttttccttaggcatccttcctttcaatacttctgtcattccctagttgcccgaggcttcratactgtctcgttctacttacaagtttcgtctcagcctctccatcttctcccaccatcctttgtctgcctttaccccaaaaccatcaattcttatttctcattgctatccctgtaggtagcctaaatgactgaaaatcaggaaatcaagcttttactttttaaagtacagattcagggggtaaaggtgcaagtttattacctgagtatattgcgtaatggtggggtctgggcttctagtgaacccattacccaaacagtgaacgtagt

SEQ ID NO: 249864 - DNA, 547 bp, Homo sapiens
ttcctggttgctgccagaatatatctaatgaacaaatatttctcaggctgcttgctcttcctaaaagattctttggggaataacacacaccttcaagaagaaatttacttgtctttggctctctatattggcaagtagagacacagaacctagatccaaatatatttgattaggctttttccttagccaaagcatgaggtaggtggtatgagccttcagttttccttaggcatccttcctttcaatacttctgtcattccctagttgcccgaggcttcgatactgtctcgttctacttacaagtttcgtctcagcctctccatcttctcccaccatcctttgtctgcctttaccccaaaaccatcaattcttatttctcattgctatccctgtaggtagcctaaatgactgaaaatcaggaaatcaagcttttactttttaaagtacagattcagggggtaaaggtgcaagtttattacmtgagtatattgcgtaatggtggggtctgggcttctagtgaacccattacccaaacagtgaacgtagt

SEQ ID NO: 249865 - DNA, 470 bp, Homo sapiens
gtgtgtggtaagtagagattctggatttaacgtgttagttgatgtgactgagagtaattctaacagtttgactgaaaactgggcccaatagtggttcatattgagcaaagttgagatgccagacttctttgctacaatgtagtatagagaaaggtatacatttaggaagattggttttaatawgatagttatgttcatccacctgttaaatatattccccaagagggcccagagggcattccctaatcaaggctttgaaagatacagtggtgaaggcagcgttggaatccttaaagaactctgtagtggctattctctggaagccaggaataacgttgggaaatgctgccatagaactgatcttatagaatttaatgagtataataagttccatatggccaggaaccaagtgacaggatttaacttccaaagaccatgcgtgcatggatattataaggagcagcggattc

SEQ ID NO: 249866 - DNA, 546 bp, Homo sapiens
tctctcaacccacacagcctcatagagaatttattataacgaattgactgagacagaaaacatttggtcctggtttactaatggttcttcacaatatgctagcataaccaggagtagacagctgtagctctrcaaccctgcacagaggtgacctgaatgattagtaagaaaaatcctcgcagaaggaattcaagctgtgcatctggctgtttattttgactggaagaaaaaacagccagaagtatggatatgcactaatttatgggctgtgtctaatgggtttggtaggaacttgaaaggagcatgataaaaactggtaataatgaagttctgaggaaaaagaatggggatagaactccttgaattgtttatatacttatatttcatttgaatgttcaccaaacagcatactcaggagaaactgatcaatcatcaggtggataagatgacatgttcttttaatgttcatcagtctcttccatgcacctctgtcctcgaccaataccctcaaaaataaagagataatggtggcaggagtggagatta

SEQ ID NO: 249867 - DNA, 480 bp, Homo sapiens
  misc_feature (1)...(480): n = A,T,C or G
aaagctgattccctggctactactatcgctgtgagtaataaagtcctttgtgtctaatgcaggagtctcatgtcttctaccctgaaatcataacaggctaacttgataagttgcaagtaaggtaaaacctcaaaagcttcacagttctttacatttctgtcattaatatttttcgccttcattttaataaatgtgttttaatatcgaggtcacctttttcctagattgaccattcctatgtargtcctttaatttaattgctgagatatagggttaaccaatatcaacaaattttatgtgaaatagtagacgaatgggagaaggaaaaattgaaatagtaagttccatcccttgactcctgaatccataaatctaggtagaaatagcaccatatattggttgatagttcagaaaatatacatcttagagaacattatcttagactccaaagtgttttcatcctacctggnntaggaagac

SEQ ID NO: 249868 - DNA, 584 bp, Homo sapiens
aaaaatgttggcataatttagaaggccaacttgaaagagtataagaggtaaaaatgctagattgaatatcccacactttcaaaaaaaccctacgtcatttcagtgcccccaaacttctcttcaaagaacagattgatgacaaaaacattagaccctttggaaacaagttttctggtttttcattctaggccagaaattctacttgaaaaggcagcacttacattgtaccaaatgggtctctatgayatcatccgagttgagaagagcctggtgtgcagagactagatactggcaaatgagggcaaagggtaggaggaggtaacatttcaggatagacaatagatttctctcttttatattttattcttgtcaagaatatttaatttatgaaacttgttgaaaatgcagatgttttattatacttttagttttagggtacatgtgctacaatgtacaggttagttacatatgtatacatgtgccatgttggtgtgctgcacccagtaactcatcatttaacattaggtatatctcctaatgctatccctcccccatccccccaccccagaacaggccccggtgtg

SEQ ID NO: 249869 - DNA, 584 bp, Homo sapiens
aaaaatgttggcataatttagaaggccaacttgaaagagtataagaggtaaaaatgctagattgaatatcccacactttcaaaaaaaccctacgtcatttcagtgcccccaaacttctcttcaaagaacagattgatgacaaaaacattagaccctttggaaacaagttttctggtttttcattctaggccagaaattctacttgaaaaggcagcacttacattgtaccaaatgggtctctatgatatcatccgagttgagaagagcctggtgtgcrgagactagatactggcaaatgagggcaaagggtaggaggaggtaacatttcaggatagacaatagatttctctcttttatattttattcttgtcaagaatatttaatttatgaaacttgttgaaaatgcagatgttttattatacttttagttttagggtacatgtgctacaatgtacaggttagttacatatgtatacatgtgccatgttggtgtgctgcacccagtaactcatcatttaacattaggtatatctcctaatgctatccctcccccatccccccaccccagaacaggccccggtgtg

SEQ ID NO: 249870 - DNA, 558 bp, Homo sapiens
tcttcagccctgctaaaaattctaaaagtcatttaatcctctaaaataaatccctttctgcttaaagtagttggagtggattacattctctgtaacagaaaattcaccaatattatgtggcattagcaatagctgaataaaaagctctttgtcagtcagcttgaagtatgaaagattggactaatactttataaatagtatcccttctaatcctaataatcattaagtattattatcatttatcatgtgattcaatttagaatcaatgaggttaagttacttacccatagctagcaatagtgatatcaagatgtaaactccaagctctgcaggccatgaacttcttatactctattcctcagttttattacactttcagaatagaaatggccaatatattgacttcccataagtttttttctaataartattttaataactcaaagaagcattgagattttgaaattctttttagttcctgagttacaaaggtgtatcagtcagatcacttagttgcaaacaatagaatctgtgctggctacttttatcagaacagtg

SEQ ID NO: 249871 - DNA, 557 bp, Homo sapiens
tggacatttccccccaaacaaaaaggccatacaaaggcagtgggcaataatatgataatgtccaytagaaacaatgtcaaagtctgatttttactttattttttcctacatattgaaagataatcatttattagtcctgaagtcaggtaattagagctagataccatctactaacacattttgagagcgttatcattggccctattctctttaaaacaagctgctagtttgaaagagaaatgtttctttaatgaaaaattattgcagagaatattcacttcaccagttatccatctcacaaatgaataaaacaaataataattagcgtactgctgatttctcagttgtgataattttcatttatttgtgagtctatagaggcccctatgtgtcctgtgtttgtaatgaaattgtttatacacagatgttagagtaatctcatgaaaataattgaagaattataaaatggacatataaattttaatcaccataccttttaactcagctcattttatttttcttctgaacgtatgagtttctgtaatgatttcacttca

SEQ ID NO: 249872 - DNA, 655 bp, Homo sapiens
gccaccgcgcccggcccaaataattcttatattcaattcaggtctgtaattcttgtgggcaggtgtactttggaatttagaacttttaagatttcatagaaataacacagtgcataaatagtacctaacaacctgaatggtgtctggggaggcccctgtaaacaaatatattaatacttatgtaatgtaatgtaatgtaatgtaatgtaatgtaatrtaatgcaaagagtagtcatattgagatatgttaacaatcctaaatagctgttcttccattctaagtatttcaggtgtttagccactaaacatatcatataaaactttccatttctaactctttatggattttggaattgcagattagggattttggatatgtcttaattatcaatgcttaatcagaaaacaactgatgttttggaaagataaatgtttaaaaatccttcacctcctccacaagtggcatcgcaatcttcccagcttgtgtgtgtccacatgaagaggggctcaggtgctttagagctctggttttctggaagagggtctgatgggatagtgtattcatagtgaagaccataattctgatcctgaaacaggagcacctatagtatacaaaaatgatcaaggcagatgggtcaaactagagcacgtgcaa

SEQ ID NO: 249873 - DNA, 487 bp, Homo sapiens
tcatgttactctatcatgacctacaagttttccattgagaagtctgctgccagatgtattggacctccattatatgttatttgtttcttttctcttgctgcttttagagtcctttctttatccttgacctttgggaatttgattcttaaatgttttgaggcagtcttctttcggttaaatctgctctttttctaggtttgggaagttctctgttattacccctttaaataaactttctactcctagctctctctctatctcctctttaggtctataactcttcaatttgcccatttgaggctatttattagattttgtagatgtktgtcattcttttttattctttgtctccactgactgtattttcgaatagcctgtctatgagcttactaattctttcttctgcttgattaattctgtttttaaaatactctgatgcattcttcaatatgtcaattgcatgattcaactccagagtttctgcttg

SEQ ID NO: 249874 - DNA, 590 bp, Homo sapiens
atgttggccaggctggtctcaaattcctgatctcaagggatccaccctccttggcctcccaaagtgctgggattacaggcgtgagccaccgcactcagtccaaaatctcttttatttgacttctacagttaaaattctcattacttgaaatgccactgtattgaatttatgttttcagagggcccaattaaaacayaaatgtatttattagaatgagggacacttcaatcacttatcattaaaagagtagaagggaagttccagaggggttagaacccagtacaggtagattttgatatctagagtatatttgagatggaaatggaatatcttgcatagtggaaggggttatctggtgtgtagatgactgcacaagatgcaataaatatatttatgttgggagggtgtggggaagaaagaaaataagtgtctaaaaaggaatgacaatggaagaagtttcacagtgggtttgggagtgagggaagtaattataaaacaaacaaaatcagcttacttaatgggtttttcttggggtcagaactaaattatactctcagttaatctcaatgtttctatattgagggtgtgga

SEQ ID NO: 249875 - DNA, 598 bp, Homo sapiens
attatcagcaacttatttcacaaatgtcctgatatggataataaattatatgatcaccctatctaaagatgaatcatgcatatgaattgtccttagagcaaaagtttacctcataccatataacctgagttatactaaaaatgcaataaaaaagctttcaaaattcattaatgtttaatttaacagtaaagtaggataatagtctaacatggcagtatgtggaaaagggaaatatttcggttttaacataagagaaatattagcaactttcaagtattaaatagtgcttaagcatttaaatgctgaattcagtattttttaagttaaaactctaattccagcacttcttgcctgtaaaacygtagacagtagacagtttgtgaatttatgtgagcctctactttctcctctgtttaaaagggataatagtattcatggccttcatgtgagatattaaaataaatataagctttaacaaagtgcctggcatataataaacactaaataagtactagcttctttctcttagcattgaatggaggaaaaactttcagaagtagtactgtcagaggctttggaaccagagagactctgtctt

SEQ ID NO: 249876 - DNA, 587 bp, Homo sapiens
actggctaaaagtggatgaaattgcctagcttccacagtggtagtaatctacttctaactccattgattttatgtcattgtgttttgttaataaatgttattgaataaaataccagatccatagtaaataatctctggtgtttgtattttttacaaaggaccatgaacataatgagtggtcagtaaatatttgaaaacaaaaataaataatgtagtattctgagacattcaagcaaactgtaattttaagactatgttagacaggacttctacttgcagaaagctaagacttgtcacaactgtaagctggcaaagtggataatagttaatgagattagagtcwttactcttaggtagcttcaccacttagaaattttcaccacctagatgacagtaacttttaataataaattatttggagttttactttgatagtaatttagacctgaacctgcagctatgatctactacaataccttgtctaacaaaaaggaaaaataagtttcaggtaaattatttgctaaaggcaaataattagaagccaggtctcctaatttggaggtcagaattattttggctttttcttt

SEQ ID NO: 249877 - DNA, 360 bp, Homo sapiens
atatgtgtggggggttgttattcagctcatcatattcactaatttctatccagtagttcatgtaaaaactgacartcttccttgatccttcactttctttactgctctaatgtgacgcatcaggaaatcatttcagttactcaaaattattactttttctctgtatacactgacctctaaccaagccactctgtattacattgtcctgctttattttctgtattgcatatccttgtctgaattttttatttgtttaaattcttgcttttctaatgtcaatctccattgttaattctggaaggcattttgttcttttgtctacaatatctaaatcaaagtctggcacacaggaaattatag

SEQ ID NO: 249878 - DNA, 570 bp, Homo sapiens
tgacaatttaaagctataggattccctctaaccactgctttagttttattccacaatatattcttagttcaaaagattttcatattagcaccatgatttctactttgattcatgagttacttataaatggattgtttaatttccaaatttttttagtttttaaaatagatatattgttactgatttttagtttaaatctgttctgataagagaatatattcagtgtaatttcaattttgagacctcttttataacttatggcatctattgaccaatgacccgtttatacttgaaaaaatttgtgttctattaatacaattgctgagtacaatctctaaatatcaattagttttatttggttctagtcttctatattcttactgatactcatctttttttcagttaagtattgaaattttcaactaaaattgtggatttttctgtctcttttcaattatgtcagttttgcttcatgcattttgatactttagcatacacttaggrttgttaagtctactcaacaaatgttatgtcattttaaaatttaaatttaattaattttaatgtaaa

SEQ ID NO: 249879 - DNA, 513 bp, Homo sapiens
gctttctttatgcttatttggcttagatttcattgcattttttagatttgtttatgtttgtagactgtatcaaatttggaaataattttgagcacaatgtcttcaaataatttgtatgcccccacccgtatttctggaattctagttacacatacgttactctaccaggtatttcccatgggacagttatggtctgttcatttttttagcctattttctttttagaatccagtcagtttctattatattagctttccttcaagttcacagrcttcttttgcaatatctaaagtgtttgtaaatcagttcagtgaatttgtcattacagatattatgtatatttttctattctgtgactttatcattacagttattatatatattttttctatttctattttacatattttattctgtgaaatttgatttttcatagtttccattactcttcaatattacatatttttctttgaattattgtgcatactgaacatacttacaatagctcttcaa

SEQ ID NO: 249880 - DNA, 595 bp, Homo sapiens
ctaatacttggagattagcctaaataactagcaggatttattggcttaagttatcaaaatgttttcatrtaattttgacatagccttcaatgaatcctcatgtacatgtctttaggaaagacagtaaagttgtatggaagagtctaaaagtttaaattaaacactaaatcatttgaaggaaaatattttaaaaacttaatttaaaatggtaaccatgatgtctcatttccgtgtcactaatcttatttaaattgtacacagattagctcaaaaagaaaaaaaattatgtaaacagaattattctgtaaaatcctatatagatgattgttgcttgtgggtgagaaataacatttatcttccattcttgttcacagcaaatcacaaacagatgttaaaaggtcctgggtctgtttttaaatccaacatattatctttgaattgttttataatgcatataaccctgccattttgatcagttaattaatgtcctgcttaatgatccttctttaatcacatacttttctgaatgggcataggagagacagagcatgtatgagatataaagccagtattcacaatgctcataggatcactg

SEQ ID NO: 249881 - DNA, 541 bp, Homo sapiens
cgagggcatttgctgggaaatgggtttgactgacggtgacatttaagctgggagaggagagatgcataaatgacaggatcagggatttgaaaattttgaggatattgtaggattgatgttgtggggttactaggagcgagctggagagatatgagttcagagagtagcatctttgaaattgggattttggagggattgtaattatttatagtgactaggtgaaggggatgactaaaggatgtaagtaacatggcgggggaagatatcaaggattaagaaggcagagtattagatagatcatttatgttgcatatgaatgttactaaggagttgaggtggagattgacagtggcaaggaaayatgcagggaatgaaagacaatgtcccagcagtggtagataatggcaataagaaaagccaggagaagtatagcctgataacataaaatacaaaatgacatttttagagatagagggataatggcatggaagcagcaatgaggaccaaggaggtcactgattcccatctccaggccagtgga

SEQ ID NO: 249882 - DNA, 610 bp, Homo sapiens
ccaataatattctaccttggattcgttattttgctattgttgctgcgactccattattgataattatgatcacatatgagactggattccatctgggtaccacgtgaaagcaggcctgcccaaaggaggctcaggtacaagcctttctcccttatttttatggtggttccacattttttgtaggcaaaccatagctaactcagatgtgaagcctaactagtatgtgaactttactatgatagcaatacagttagtactcctgaatttcctgctatattaatttcacaaccagagaaatgaaataaaattggaacaacaggttttctcacctagtgacaagcagttcagttctgtataggtctaacctgaaccttctgtctctttcctcccagcattacagaattcagcccagtagggaagcacctgggctgcgaccctgcactgctcagtgtgaaagcaggcttcatcactgagcaaccgtgggttattagtgaaaatgtctatgttcagactcttcacctggaaaaattgggttaattacagtacctgccaaagcatgtaaactycttatcaaagcatctgacacaaatcccttaaaaaatgttagctt

SEQ ID NO: 249883 - DNA, 611 bp, Homo sapiens
tagttaatgaatgtgtgaacatccctggcaaatgcaatataactttggtcttcttgtattcctgtcggtcttctagcacagcacctgtgatgcctcagtcaaaaggagaaggctgtcaatataagtaataataaactacatctaaataatattttaagatgcattttataaacctatctttattttcacagtaagtttggtaattgtcttatttataagatagaacactgacaatctggaagtttgagatttgctaaggatttgaaaactcataaattgtagcattggctctaaagattagacctttgactccttctacaaggttatttcttctacagtatgctgttttctgagtcagctctctaacagtgcagagaccagtggttgactccttattctcatgttctctcactcattctggttaggcagcatcagcagtcttgaccatctcccttctagctcccatctgctctcttctccacttcctgcttcagccacctctaggaaaactattcctactyctaatgtcagtgtgtacctgtgaaacattttagacaatcacctctttcctgcttggaattgtttagctaattatccttccacacatcacc

SEQ ID NO: 249884 - DNA, 338 bp, Homo sapiens
cttgttgccgaatttaactcagcactagacctactaggcattttggggactggtgcttgttgtggagaaaagcttcagagagtgctgaattgtcatccatcagccactatgcactgctgcccctctgggtttcattactttgagacttgctctgatgcaaaagattttgyggaggttttgcatcttctgtctccttcagttgctctgggattttgatctaatttgaaatgtctcaatatatgtatatgttttcttccttaggcaagcatgatcaggagtcacagctttcttaaggtctttttcctaccaggctttctgtcagctttcttgattctaaa

SEQ ID NO: 249885 - DNA, 338 bp, Homo sapiens
cttgttgccgaatttaactcagcactagacctactaggcattttggggactggtgcttgttgtggagaaaagcttcagagagtgctgaattgtcatccatcagccactatgcactgctgcccctctgggtttcattactttgagacttgctctgatgcaaaagattttgcggaggttttgcatcttctgtctccttcagttgctctgggattttgatctaatttgaaatgtctcaatrtatgtatatgttttcttccttaggcaagcatgatcaggagtcacagctttcttaaggtctttttcctaccaggctttctgtcagctttcttgattctaaa

SEQ ID NO: 249886 - DNA, 338 bp, Homo sapiens
cttgttgccgaatttaactcagcactagacctactaggcattttggggactggtgcttgttgtggagaaaagcttcagagagtgctgaattgtcatccatcagccactatgcactgctgcccctctgggtttcattactttgagacttgctctgatgcaaaagattttgcggaggttttgcatcttctgtctccttcagttgctctgggattttgatctaatttgaaatgtctcaatatatgtatatgttttcttccttaggcaagcatgatcaggagtcacagctttcttaagrtctttttcctaccaggctttctgtcagctttcttgattctaaa

SEQ ID NO: 249887 - DNA, 567 bp, Homo sapiens
cgcagtaaaaccccatctctactaaagatacaaacattagctaggtgtgttggctcaagcctgtaatcccagctactcaagaggctgagacatgagaatcgcttgaacccgggaggtggagtgcggtgagctgagatcgcgccagtgtgctccagcctgagtgatagcatgagactctgtgtcaaaaaaaaaaaaaaaagttcttacctcttgttaagtatatmtgttatgtaattgattgtataacttttagctgtatcattgctcttgttctattaaccttatgtctaaaaagcaaatgatgtacactgtactttcctggccaaaaaaaaccccacaaaaaacaaataagagaaccattgtgaaagtggttttcaaactatcaagtgtaggaaatggtattatcataatgtgtaccttatcttatgttccctcatttagaaagaaatccctgccctctaccctttgagtgggagacacctttagcagatttgaactgggtttttaccctggcatgtctttaggcaagttttgtagtgactgcaggctatttctttggaatattta

SEQ ID NO: 249888 - DNA, 471 bp, Homo sapiens
gccaccacacctggctaatttttttgtatttttagtagagacggggtttcaccatgttgaccaggctggtctcaaactcctgacttcaaatgatccacctgcttcggtctcccaaagtgctgggattacaggcatgagccaccacgcctggccagagaggctcttttcaacaaccagttctcttgagaactaagaatgagaactcacttctgcaagaatggcaccaagccattcatgagggatccacccccatgacccatatacccccaagcagaccccagtcccaacagtgggggtcacatttcaaaatgagattgagtggagccaaacaaacgatatccaaaccgtagcagtaacaaacaacaatcaacacctgtgactcagtcaccaacagttgttgctaatgctttgaaacatcatttaagttcatcaccattttgaagayacaatacttatttaaatccatcagta

SEQ ID NO: 249889 - DNA, 642 bp, Homo sapiens
cccaacctgctccagtaggatcttgccatcctcagaaactctatgccatagttttctggatctttctcttctgccaaactgtcagcattccaagggcagggtaccccaactgaataaggactctataaaaatgcgaatgatctgctgtcaaaaggcccacgtctcactgctgtaaatggaaagactggaacaaatatgctaaaatgtactatgggcttttgagagagggtttttttttttttttttttttttycctttgcgggtggaggtgaggagagtagacagcttctggaaattggtggtatgtccatgtaatggaatactgaatgacaatgaagataaggatcttctcaagggttatatatagggcaatgatacattcacctttttttttaaatgactgtagtgaggtatattttacatctcataaaattcacctatttaaagtgtacattttttggttattttccatacattttctgcttatgtatcaagtgacaattttctgattcttagtaactttaaatttaaatttttttatatatttaggggatacaagtgtagatttcttatatgcatatattgtatagtggtaaagtctagatttttagtgtacccatcacctgaatagtgatcattgta

SEQ ID NO: 249890 - DNA, 602 bp, Homo sapiens
aactatcagaagaacaaacctcatttatttactcccaaatgcaaattacttggtatggaggcctgtttagattaagtaagcatagacattgtggcagggatgtcagtgattattactgttgagcatacaaggttatagagcatttcattaatgctgaagtcaaattattttctaaaaggggttccatttatttcatccctagacaatgcaaaaaagggcatttgacctctgkaaattaaataaaaattgttgttctgcattgctcccattggtaaaacatttatttgctaaccctgtgactgtgagcaaagttgccttgaaactttatagtttccccaacatttcagtatttggggaagacctactaatgaacactttttcaagtagagaatggaactctctaaaagatgtgacccactcctgtttcctgaaataagtgaccacttggtaagtgtacattgctataattccttgtagtaaagtactgatgttttttaaaagaaagaatctcatataattctttgttactattagaaaagcttccacttcactgtagttgagaaagttaacaaagtctaaattggacagtgttagtgttccat

SEQ ID NO: 249891 - DNA, 624 bp, Homo sapiens
gctgccacagcagagtggagagttctgttcctgcccagccccctcaccccctagcagtgtccatgtgggagaagaggggcaaattctaggctctgggtgattcctccatgaaggctgtattggtgagactggagtacaggctgtgccagcatccatggggagagagtagcaacgctcagctataattagtcacccccacagcagagccagcacaacagggagaaggaggagggtctctggtgggaggagggaccactggctgctcagaagggaggaggaaggagcagatgcwaggaaaagcagctctattcagggaaaaagaagtctgaagcacagccttcaatgctgtcaggactgaagaggtcggatgtatgaaagcatctagggtagacagcacacaggaaggccccgatacacggaagtttcttataccctgaagtgagaagaatgtggacctgaacgtgggttgggggggtacccatacacaggcacaagaaggcagcagctttaagtggggagcaggggagagctggaggaaaagtggcagtgtagtttcccaagggaatggacactcggacatggtctccagggaaggctgctttttcagaaccaggatgcctgtgt

SEQ ID NO: 249892 - DNA, 462 bp, Homo sapiens
taaatataaagcatatactcaaaccttatgctccaggaatctggatagtccctatgagtttgrattttattttattggcaataaggttgtattacagggtctgaaattaaagggtctgaaaggctggtagaagagtgaaatgattaggagatttatgtttgggagtcatgtaaaagatgagactagaatatcaacctaaaggaaaaaatggagagaaaattaatatagagagtttatttgggtcagatttgaggactgcaacccaagagacagattcaagttgccctgaatatatgctccaattagcagcagttacacgtgggtttttaaaggaaagaagacgcagttcctaagctgtttaccaatcacttacattaaaataacataaagtgttgattagctatacctggttcttgtgccacaaattccaagaacatgaagataatgggtgagccagcacta

SEQ ID NO: 249893 - DNA, 462 bp, Homo sapiens
taaatataaagcatatactcaaaccttatgctccaggaatctggatagtccctatgagtttggattttattttattggcaataaggttgtattacagggtctgaaattaaagggtctgaaaggctggtagaagagtgaaatgattaggagatttatgtttgggagtcatgtaaaagatgagactagaatatcaacctaaaggaaaaaatggagagaaaattaatatagagagtttatttgggtcagatttgaggactgcaacccaagagacagattcaagttgccctgaatatatgctccrattagcagcagttacacgtgggtttttaaaggaaagaagacgcagttcctaagctgtttaccaatcacttacattaaaataacataaagtgttgattagctatacctggttcttgtgccacaaattccaagaacatgaagataatgggtgagccagcacta

SEQ ID NO: 249894 - DNA, 452 bp, Homo sapiens
ttctcatagcatggtggctggattctgcatgtcccaagagacccaggagcaaactgtaaggctgttttagtagtttggcctctgaagtcctagagtgtcacttctgccacattctgttagtcaactaagtcactgaattaagcccagattcacaagtrttgggattagactctatctcttgtttgggggagtggcaaggtcacattgcacaacatacagtatgggagatactgctgtggtcatctttaaaaatttaatctgtttcattgagttttgatacatacatatacccatgttaccatccctaatatataatatttccatcatgccaccttccattcaatccttacacctcccatagaccatcaccatgcagtagttttgtctgtgcttgaatttctcatatatgaaatcacatagtatgtacacttttgtgtttggcttttttcact

SEQ ID NO: 249895 - DNA, 565 bp, Homo sapiens
atttctccaggggcttagctcaagtgttttattttttcttttaatctataatatcttggatttcacgtttccttctttagtccttcaaagttgcttttagagacaggagccaaaagccatctttactggcactaaaactcatgtcactaacttttctgtattaattgtttatccagaaatctcttcttaattggatataatctattttttgtttgtacagattcttcagagattttaatgtaaatatttaaaaaataaatatggtccctcttcttttcatgtatttatattctttattctttttctttttaaggttattcttgactgcaactgcctattacattttgagtagtagtaatgatatagacacccttttatggtttctggcttttaagataaagcttccaatgatttatcattaattatcatgtttgttttagtttttcctagatacatttaattaaaataaggagaactrttcttagcttggaaagtttttttatttgtttttagaatcatgaatggaaactgaatttaatggaattattctttggcatatatcaaa

SEQ ID NO: 249896 - DNA, 582 bp, Homo sapiens
ctgagtgtaatagatagataaccttaaaatcctgtgtcccaaagtggaatcaatgacttaaaaagtcctgcaaagaacatgcgtttaggagagcccaaagattctcctaataaggtatttatagtttattcacagtctaggtataatgtgtcaatcaggagttttgtttgtttgtttgtttgtttgttttaccataagcggtggtcccagtaacacagctgacatccacttttgctatttttttaggggaatggaattagaaaataacccaagctcaaatttatgcattataaaaagaaagaacattttgcttcaccctttattcacaaacataccatactttttggttcacaagatagaatgttgtttgattccatattttatcccttatgaaaaacgttgctgtgaccattcttatacatgttccctggtacataggacatatttctattggatatatataaagttgtgatattgctaagtcagtgygtatgtctgtcttgaatcttgatagaaaacatccaactgttttccagttggtggttttaccaatttacacaaccacacgcagtttgtgagaat

SEQ ID NO: 249897 - DNA, 570 bp, Homo sapiens
aagcagagatcatgattccaacacttccatgtcctataatctttgctgaatcacttaatctgtgggagctataattttccatctgtagaaacagtgaaaaaatcttgcagaattttggaaagcatcaaatcaagccacacagcctagttcctggcatatattcagtgctgyaaaactgttagttataagcattactctttttggtgagattcagaaaaagcttctttgtggaaatagcatgtgatccttgaagccttggcaggaactcgaaaggacagaatagcagttgtcctttcaaagttctttctctgctttttcctgggcacatgatcacccagaatttagagattaggtggaggtcaagctaaatcaagttaaaattgatctatctaaatcaatagggcatgatgaataatgggatatgagaaaagaaatcatgatgtcaagcatacagataaactcaatgtttttggcccacatgactggaagtagaaagatgacatcaagataattggacgggaggaatctgagcagatgatctgtgccattctgggcatagagaggatgatt

SEQ ID NO: 249898 - DNA, 577 bp, Homo sapiens
ctaaatcaagttaaaattgatctatctaaatcaatagggcatgatgaataatgggatatgagaaaagaaatcatgatgtcaagcatacagataaactcaatgtttttggcccacatgactggaagtagaaagatgacatcaagataattggacgggaggaatctgagcagatgatctgtgccattctgggcatagagaggatgatttacctatgagacatccaagtggaaaggtttataatccaaaaggacttgtaagtcaagcatgaggaaatggataagatcyagaaataaagatttcagattcaccgacatatcagtgatgatcaaagccttaaaatttcaagaggaagaatactaagaaaaaaataatcaatcaaaggaaagttttgtttgatgaagcccagagttaggaaacaagagggaaagaagaaacagtaaatatgagaggagattcaggaaagtactacaatggaattgagacgtatatataatatggggtgcaaattccttctctgaaaagtgttcgttattaacagtccctgctgcactggggcctaagttctgtattagtccat

SEQ ID NO: 249899 - DNA, 577 bp, Homo sapiens
ctaaatcaagttaaaattgatctatctaaatcaatagggcatgatgaataatgggatatgagaaaagaaatcatgatgtcaagcatacagataaactcaatgtttttggcccacatgactggaagtagaaagatgacatcaagataattggacgggaggaatctgagcagatgatctgtgccattctgggcatagagaggatgatttacctatgagacatccaagtggaaaggtttataatccaaaaggacttgtaagtcaagcatgaggaaatggataagatccagaaataaagatttcagattcaccracatatcagtgatgatcaaagccttaaaatttcaagaggaagaatactaagaaaaaaataatcaatcaaaggaaagttttgtttgatgaagcccagagttaggaaacaagagggaaagaagaaacagtaaatatgagaggagattcaggaaagtactacaatggaattgagacgtatatataatatggggtgcaaattccttctctgaaaagtgttcgttattaacagtccctgctgcactggggcctaagttctgtattagtccat

SEQ ID NO: 249900 - DNA, 577 bp, Homo sapiens
ctaaatcaagttaaaattgatctatctaaatcaatagggcatgatgaataatgggatatgagaaaagaaatcatgatgtcaagcatacagataaactcaatgtttttggcccacatgactggaagtagaaagatgacatcaagataattggacgggaggaatctgagcagatgatctgtgccattctgggcatagagaggatgatttacctatgagacatccaagtggaaaggtttataatccaaaaggacttgtaagtcaagcatgaggaaatggataagatccagaaataaagatttcagattcaccgacatatcagtgatgatcaaagccttaaaatttcaagaggaagaatactaagaaaaaaataatcaatcaaaggaaagttttgtttgatgaagcccagagttaggaaacaagagggaaagaagaaacagtaaatatgagaggagattcaggaaagtactacaatggaattgagacgtatatataatayggggtgcaaattccttctctgaaaagtgttcgttattaacagtccctgctgcactggggcctaagttctgtattagtccat

SEQ ID NO: 249901 - DNA, 645 bp, Homo sapiens
cctcttgagctaagaaagtattaaaatggtattacaatcttaaaacaagcattcttagagtgatttatactgtgatttttaattcctttacttcagtgttgaaatcacttgaaattagagagcatggctagagtcccagcatcaccatgcactagctatgtgaaactgattaaagatgctaagcctcagtcactttactgtaaaatgagattactaatgctacattccttatagtgttttaaggagaattaaataacttaattcctgtacattatatcatatagtgcctattatataacaaactttcagcagatgctgtccattattatttaataatagtttattgaatgataacaaccaggtaattaggccatgtttctcctggttgctataatcttctggagaagcaatcaatctataaaaatgatggaaactgagaaggaaaaggggctagaaaagtaaaagataaaaatcagcwaaatttactaattttaactcacattactggggaacagatcacatcaaactttgaggtaaaactatgtattaggaagtaaataccaaacacattctaatattcttttagtccactatatttattttcacaaatatttacttggtacctaacctatacagttttgagag

SEQ ID NO: 249902 - DNA, 588 bp, Homo sapiens
  misc_feature (1)...(588): n = A,T,C or G
nnnnnnnnnnnnnnnnnnnnataaggccttttaaagccaagcccagacatgggtttgtaccctcaaatatgtatgagttgagtaaattcctctcttgaggtcccaagataagttggagctcatgggcctattagaaagtgacattcsttatgcaccacaggttaggaaccctgtacagggagtatgtagacaaggtataaggccagttttcccaaggggcttttattggctatgcaagtcaagctggattccttaaagagaagcatacccttccagtcaaagtgttggtaaaacaaccagtttctccaattgcatcttgttgcagaagaaaatggattcttattgcgtttatgcaaaaaaacaaaaaacaaaaacaaaaacaagaaactatattgccataagttaagaatacttacaaatagcttccaaattttggagaaaccaggcagagagaaacaaatatgctccaaattttgttagcaggtgtacaccttactcaattgttaaaagctgtaaatagctcaaaataaaagtttcctgactttgaaaaacaaaggatggcaacattttaagcacaaagttaaaaaa

SEQ ID NO: 249903 - DNA, 627 bp, Homo sapiens
aggctatctcatacaagtgacaactctgtaaattctatagcaccatacaaaaattcatcatttatttaacacaatgccaaatgcaaggggaagggaaagtatgatttgggtcgcaagacactaacttcagttaactgaagttagttctaacagaaataataataataataatcataaatcaaagatgaatgatacagccagaaaagaaacaaggtagaaaagagtaattagaagagcaaaggctgatccagtgcgagtttttacagagagggcactcacatatactagagaaaagaatatgctagaggatctgatgtggaaatagaagacaggtgtacaaatagttggattttgtatacaggtgaagtaaaaactaccttcatcttacagttttaagtgtaggaaggagggtaagacatttaattaaatgtacttgaagcgccaccatgtggttaggaatagtaacacaagcaaacagaatttcaagtgctagcagaaaattgcttcagctttgtagtatttaccacacccaatagtatcaaatgtyacttaaaggcatgttttaaaagaatcctgtcagtaaactacctgtggggacaacctgcttcctgttcggatgattatcca

SEQ ID NO: 249904 - DNA, 592 bp, Homo sapiens
tcaataaattttatttttcacaaatgcagctgtacaaaaggacatctcttcatttactgagaaagtttcaagtttttttgtacacatacaatgcttgcacacaaagtcagtgtggtgatagtgcactttcgtgtaggcaaatttgcaaaaaatgcataaaatgaattataactctctggaagtctctatacaacttatacttccagtataccatagtaatatatttttttaarttctgataatttaaaatagttgaaaaaagaagaagaagaagaaaaaaaaacaaaaccttttcacatgcctgttggccatctgtatgtggtcttttgagaaatatcgattcaggtcctctgtacattttttaatcaggtcatttctttttggctattgatttattttagtttcttaaatattttggatattagcaccttctcagatacatggtttgcaagtattttctatcaattcgtagattgcctgttcactctgttgattgtttttatactgtgcacaagatttttagtttgatgcaatcccacttgtctagttttgcttttgggttcatagtggagaaattattgcgaagaccaat

SEQ ID NO: 249905 - DNA, 590 bp, Homo sapiens
caaaacatatttatattcagttgaaataaagctagcmaaggtatgttttgaaaaacttcttaatgtttttaaatatttcacatactacatgtaacaacatgacatctgttttaggatcaaaacagaacatttagttttattatagaatattcttttgtttggtagtttaatcttctctaattgtgagtagtacgttattattgcttaatatctaaatggagatagtttgagaaaatataatgtcacaaactatataagaaaataacatttcattaaaaaaacaatatacttctacttaactgtttctctaagtatatatagagtttttcttttctattttaaggacttttaaatgccacctcctttgccatttaaaaatgctgacaaataaccttaaatagctgcccaatttgggaaacttagttgttcttctaatattctatgtcactttagatctataaaaatgaaaaactcttttcaggtaactcatattttataatgtccttgagatcatattgtttcactctcagtgatgatcatggttgactgctgtaaaatatattattagtcaaacaaatgtagtttaacta

SEQ ID NO: 249906 - DNA, 577 bp, Homo sapiens
ttatctgtttttcagaaattgtcttttaaagtatacagtttcaacctcatttttattggaactttaaaaaaatacatgaagaattaatagtaaaactaaaaaaagaaatctgggtctgtgccaggttgcagatgaactgccaagcacccaggcagactgctggagccatttcatgagctgaaacatttctctttaaagtataaacattcttggtttgggtaatccacatacatacttgattgaaggtagcagatttttatttcactaagacctattctgcatggacccttatgatcttaatgagtagtgctatattcttgctgaacgtctgattcattatcagaatcattcattgttatgataaatttgataaatgttcctgtcttgaagttcattgtccrtccagagctcctggtaaagtgtctgctcacaaatgcttaacattttccaaaatgtgtcctgtatgtagttctaggagatgatgttctaaagatttctttagtcaataaattttaaagtactacatgtcacactgctactcagagagatgtagagtatatatgagaatattaacact

SEQ ID NO: 249907 - DNA, 610 bp, Homo sapiens
ttttttttgtagtgatggaatttgctttgttgctgaggctggtttcaaattctcgacctcaaatggtcttctcacctgaccctccaaaaattctggggttatagatgtgagccattgtgcccagctaagtataatttatgatttattatttttaaaaatttgcttgatgctttctatgggtctccaaaagtatctgaatattgtatayacacacacacacacacacacacacacacatacacacacacacacatttccttccccagtctataagagtatgagagtatcacttcctcttatcttcaccaacacctaacagatcaatttggggagacttaacatctttatcataatcatcataatcatatgatagtttagaaacatggtatatcgctccatttatttagttatttataaaattttcttaatacagttttagtgttttttttcatatgggtattgtcttagatttattaatttttgccagtataatagatcaaaagtgacacttataatgaattttttaagattccctaataactatgctactaaatatctttttatgtttgttgctgttagaattacttccatgtgttttcttattcttatt

SEQ ID NO: 249908 - DNA, 560 bp, Homo sapiens
ggacatggatgaagctggaaaccatcattctcagcaaactaacacaggaacagaaaaccaaacaccacatgttctcactcataagtgggagttgaacaatgagaacatgtggacatagggaggggaacgtcaaacactagggactgttgggggtgtgggggtaggggagggatagcaataggagaaatacctaagttagatgacaggctgatgggtgcagcaaaccaccatggcatgtgtagcaaaccaccatgacacgtgcatacctatgtaacaaacccacatgttctgcacatgtatcccagaacttaaagtataaggaaaaaaaaaaaaaagaaagaaaggaagctttggacaatgaggaaaatgagtttaaaagcatcattaaagtttaaacaggaaatatttccattcctatcaatcacttatttactaatttattcaggaaaatcacaatgagctgatactgaaattataaakccctgttctggcatacttagttaaatatttcaaatctcctttattcaccataggaagccctttgtctttgatgcaaactg

SEQ ID NO: 249909 - DNA, 551 bp, Homo sapiens
atccaatcacctcccaccaggtctctcatttgacacatggggattataattcaagatgatatttgaatggggacatatagccaacctgtatcagtccccactaatgcagacttatactatacatgagcatattttaaaactgagccaggcacagtggctcatgcctgtaattccaactttttgggacgaaaaggagtgccgatcacttgaggccaggagttcaagaccagcctgggcaacaaagcatgaccccatctccmcaaaaaaaaaaaaaaaaaaaaactaaaaattagccaggcatactggcatgtgcccgtggtgccagctgctcaggaggctgagacaggaggatcatttgagcccaggattatagtaagctataggttatagcaaggttataataagctataatcacgccactgcactccagcctggatgaccctgtctctaaaaataaattaattaacaaataaaaaagctgagaacttttggagcaaagaaaacaattgcactttgttaaatccagggcttttgaaatttgtttaaatgca

SEQ ID NO: 249910 - DNA, 530 bp, Homo sapiens
ttgtagtatatctattcctccgctagataagatctgtagcacacttactctcttcctccctgttactatcctagaatgcttttgtattttaattttagattatttccttttaaaattatgcataaataattatttaaatttagcttcctactttttggacactactattggacaccaccacatctttttttctctggatkgatttttttttgttttactggagttgatcatttaataattcttagattgtatctgaaggtattaaactagcctgtttttgcatgactgaaaatgtatatttattctcacttgattgctgattagacttgacatagagtcctatgtttaagtcattttatcttagatctttgaaaatactattctattgacttttctgatattgctaaaaagatttctgatatcaatataatttttgtaccactgtagatgaccctttttcatcccttcgtcctctttctttctctttggaagattttggaatttttatccttggggtttgatactacgct

SEQ ID NO: 249911 - DNA, 524 bp, Homo sapiens
tctgcagcagtgaaaaatagtgactctaaatgcactactaaatagagacacacatgtaattaacagaaactgaggaaagtccatcagctkaaatataatttgctgttctcaaaaaaaaaaaaaaaaagggaagtacaaagtgtaaacatgaacttacaaatttggaagagttgaggtgtaagttaatgtctaaaacatcatttgaatttcattgaatgtttagaagcccttgttttaaatgtactatttgaaatcaatagggatgaagtagtttaacttctgatcatgctgaaaaactgacgtggtcatacaaaaccccagagataccaataataagatactagattaaagcaaacaaactacttgaagatacttcaaactttcaaatgcagacataaggctgaagagagttttattttgaaaactagaaggggtaagaattgagagttcatactggctgcaaggcactgaccaaactccatagctacagctacaaaaaaggagaagaaaaaaatggcatcgca

SEQ ID NO: 249912 - DNA, 622 bp, Homo sapiens
caaatagacatttattaaacttgttttgctttttggaatctacttatttaaaatactccatatatttgagaagcaattgaaaatgcatccatgtatgttatttgagcgttactagaaatttatttatacaaatccatattaatgtgctaataagtgacaaatatatatatagtcatgcactgaatratgatgttttggtcaatgatgaactgcacatacaatggtggccccataagattaaaatagaaccaaaatttcctatggcctagtgatgctgtagccatcataatgtggtagtgcaacccattaccttttctatgtttaaatatacaaatacttaccactgttttacaattgcctatagtattcagcacagtaacatgctgtataggtttacagtcttagagtaacaggctatatatatagcatagctgtgtagtaggctataccatctagtttgtgtaagtatactctatgatgtttgcacagggatcagattgcctaacaacacatttcttagaatgtatcctgtcattaagtgatgcatgactgcatatacatacaaatatacatacatatacataaacacacacataaacataatatatagagatataaccat

SEQ ID NO: 249913 - DNA, 522 bp, Homo sapiens
ggtatgcataataggaaaaaacatagtatatataagggtcagtgctatcagcagtttcaggcatcctttggaggacttgaaatatatctcccacagataagggggaactatacataacagtttatgaaagtccttgacccttgtgaagtctgtattctagtagaggtctacagacaataaacaaaaaagtaaaacaactaggttgtctaataaaatatttacatagaagctatgaaggggactgtaatttcataaggtggtcaaggaaggcctcactgataagrtgacatttgagtaaagatttgaaagatgtgagaggataaaccacgagaaatgttctggaagcagaacattccaggtaaagaaatcagcaaggacaaagtccctgagaagaaagtgagcttggtatcttcatgaacaaggagagagttttaatgaagcacagtaagcaagagggagattggaagaggagaggtgagaggggtgtggtaggacagatgatgtaaagccattgttaggatt

SEQ ID NO: 249914 - DNA, 522 bp, Homo sapiens
ggtatgcataataggaaaaaacatagtatatataagggtcagtgctatcagcagtttcaggcatcctttggaggacttgaaatatatctcccacagataagggggaactatacataacagtttatgaaagtccttgacccttgtgaagtctgtattctagtagaggtctacagacaataaacaaaaaagtaaaacaactaggttgtctaataaaatatttacatagaagctatgaaggggactgtaatttcataaggtggtcaaggaaggcctcactgataaggtgacayttgagtaaagatttgaaagatgtgagaggataaaccacgagaaatgttctggaagcagaacattccaggtaaagaaatcagcaaggacaaagtccctgagaagaaagtgagcttggtatcttcatgaacaaggagagagttttaatgaagcacagtaagcaagagggagattggaagaggagaggtgagaggggtgtggtaggacagatgatgtaaagccattgttaggatt

SEQ ID NO: 249915 - DNA, 522 bp, Homo sapiens
ggtatgcataataggaaaaaacatagtatatataagggtcagtgctatcagcagtttcaggcatcctttggaggacttgaaatatatctcccacagataagggggaactatacataacagtttatgaaagtccttgacccttgtgaagtctgtattctagtagaggtctacagacaataaacaaaaaagtaaaacaactaggttgtctaataaaatatttacatagaagctatgaaggggactgtaatttcataaggtggtcaaggaaggcctcactgataaggtgacatttgagtaaagatttgaaagatgtgagaggataaaccacgagraatgttctggaagcagaacattccaggtaaagaaatcagcaaggacaaagtccctgagaagaaagtgagcttggtatcttcatgaacaaggagagagttttaatgaagcacagtaagcaagagggagattggaagaggagaggtgagaggggtgtggtaggacagatgatgtaaagccattgttaggatt

SEQ ID NO: 249916 - DNA, 522 bp, Homo sapiens
ggtatgcataataggaaaaaacatagtatatataagggtcagtgctatcagcagtttcaggcatcctttggaggacttgaaatatatctcccacagataagggggaactatacataacagtttatgaaagtccttgacccttgtgaagtctgtattctagtagaggtctacagacaataaacaaaaaagtaaaacaactaggttgtctaataaaatatttacatagaagctatgaaggggactgtaatttcataaggtggtcaaggaaggcctcactgataaggtgacatttgagtaaagatttgaaagatgtgagaggataaaccacgagaaatgttctggaagcagaacattccaggtaaagaaatcagcaaggacaaagtccytgagaagaaagtgagcttggtatcttcatgaacaaggagagagttttaatgaagcacagtaagcaagagggagattggaagaggagaggtgagaggggtgtggtaggacagatgatgtaaagccattgttaggatt

SEQ ID NO: 249917 - DNA, 636 bp, Homo sapiens
tcagtaggtatttattagaaatctatgaggtaccaacatctatgtgaagtcctggttataatgcaaagaagccagtctagtgaatagacaaatgaatttattaaattaaaatacaatgatatatgtcatgagatgttcaagagctatgggggtacagtagagaaatatctgaggaggggtaaagaataggagaagtttccccggctgaatcttaaaagtaaggtattttaagatgctactataccattaccacttaacaagtaaggaaaaaraaaattacaaaaaaaaaaaaaaaaaagaaaacagccatatgattacatgaaaattgaataccttctcctgaatgatttttaggtagacaatgaaattaaggcagaaatcaagaagttacttgaaactactgagaacagagatacaaaataccggaatctatgtaatccgactaaggcagtattaagagggaaatgtatagcactgaatgcccatatcacaagttagaaagatctcaagttaacttacaacttaacatcacaactaaaagaactaggaaaccaagagcaaacaaatcccaaagctagcagtagacaagaaataaccaaaatcagagctgaattgaaggagattgagataagaaaa

SEQ ID NO: 249918 - DNA, 636 bp, Homo sapiens
tcagtaggtatttattagaaatctatgaggtaccaacatctatgtgaagtcctggttataatgcaaagaagccagtctagtgaatagacaaatgaatttattaaattaaaatacaatgatatatgtcatgagatgttcaagagctatgggggtacagtagagaaatatctgaggaggggtaaagaataggagaagtttccccggctgaatcttaaaagtaaggtattttaagatgctactataccattaccacttaacaagtaaggaaaaaaaaaattacaaaaaaaaaaaaaaaaaagaaaacagccatatgattacatgaaaattgaataccttctcctgaatgatttttaggtagacaatgaaattaaggcagaaatcaagaagttacttgaaactactgagaacagagatacaaaataccggaatctatgkaatccgactaaggcagtattaagagggaaatgtatagcactgaatgcccatatcacaagttagaaagatctcaagttaacttacaacttaacatcacaactaaaagaactaggaaaccaagagcaaacaaatcccaaagctagcagtagacaagaaataaccaaaatcagagctgaattgaaggagattgagataagaaaa

SEQ ID NO: 249919 - DNA, 549 bp, Homo sapiens
ggggtgtcacactgtcttaataataagaggtaatgcaaggttaaagtcttcaatttctcaaaaatggtctgaaaaaatgtaatcaaatctctttgtatctgttacaccaattagaccaacaaaattttcacagccactgtgagcattttacaaacatcaatgcaataccattgccaagttaaaaagctaggtttcattcaggttaaaattctaatatgaaacaaataaaaaaagttagtccagtgaatatactacataattatcattttcacctraatttcagctgatctctgttgctacctcaagccctgtgattccaaagacttcattaaaatattatgcagtccagcagtttccaaaacctcacaggaatgtccccattctttaagaagggcactgggcaaacggaaactcctgagcttacatcaaagtttgataaaagttacaaaaggacaactgcaacaaatacatggaatacacaacaaaaggcattttcccagtgttaaatcaatcgaataacttttaatttttgaaaagtacagtttaaca

SEQ ID NO: 249920 - DNA, 559 bp, Homo sapiens
aagactagaaggatcaatttccatttttatccaaaataaaattacctatgggaacattgggttggtttcatttccacagacaaaaatatctctcatggggacttgtggtggtggctcatgcctgtaaccccagcattttgaggccaggaatttgagaccagcctggccaacatggagaaacctgtccctattaaaaatacataaaaattaccggggtgtgccggcacatgcctgtaatcccagctactcaggaggctgaggcacaagaattgcttgagcctgggaggcggaggttgcagtgagctgagattgcgccactgcactccagcctgggcracaaagagagattgtcttaaaaaaaaaaaaaatcaagattgagctgagttcctgacatgaacacatcatggagcatttacactggtagaatggaaagcagggaccatatacatgaataattatgtctgctccctgccccagtcttccctaggaaagagttaactgaagccaattcaagaaaggagtggaatgtttatttctttttaataaacaggatgtgctg

SEQ ID NO: 249921 - DNA, 526 bp, Homo sapiens
gctgaataaactggtattaatatagcctagtaaaagacttgaaagaatcgtcttaaatgatttaggtaaaaaatgactgaaatttgcatgttgtttctatgttagctagagctyaaaagtacttgaaaaaaatttcctgagtgttttatttacaatttcctttcactattaaaattttatgaaaactcatttgattagagatagtacaaaactaaattctagccagtactagtgtgaatggcacaagatttaaaaccagcagaatccgagtggatgtggtttttctccttatgtgcgttcgtgtgtgtgtagcatgacatttatacctagcccacccagagaccaaaacaaggtgctcataggagaaccaagcatcttggggtcagtcacttttaatcaaattaatgtaaacttagcagaacaaaaccttctctactagataaaagctgttgggcctgtgggctacttgggttagaaacattcttcaacctttttacaaccatagtacagaactacgtttttattc

SEQ ID NO: 249922 - DNA, 509 bp, Homo sapiens
gacatcacaccaggtaatttttaaatttttctgtagagacaaggtttcattgtgttgcccagaccggtcttgaactcccgagctcaagcgatcttccctcctcttgctgggattgcaggcatgagccgttgcacccggccttgatagttcttgttatcaggcattcgtgcatgagaycccttccttcatggccttccccagctctgtttgtcagaagttttaacacaattgactccactttgattctgacaactttcacaagtgcaatgtgatgttgtgatatatatatatatatatatatatatatatatatatatgcatacatacacaatgtggagtgatttaataaagctaattatcatatctatgatctcacttaacttttttgtggttatacatttgaactttactttcttagttattttgaaatatacattattactgacaatagtcacctgctgtgcaatagatctcgaaacttatttgtcctgtctaactgaaactgtgta

SEQ ID NO: 249923 - DNA, 509 bp, Homo sapiens
gacatcacaccaggtaatttttaaatttttctgtagagacaaggtttcattgtgttgcccagaccggtcttgaactcccgagctcaagcgatcttccctcctcttgctgggattgcaggcatgagccgttgcacccggccttgatagttcttgttatcaggcattcgtgcatgagaccccttccttcatggccttccccagctctgtttgtcagaagttttaacacaattgactccactttgattctgacaactttcacaagtgcaatgwgatgttgtgatatatatatatatatatatatatatatatatatatatgcatacatacacaatgtggagtgatttaataaagctaattatcatatctatgatctcacttaacttttttgtggttatacatttgaactttactttcttagttattttgaaatatacattattactgacaatagtcacctgctgtgcaatagatctcgaaacttatttgtcctgtctaactgaaactgtgta

SEQ ID NO: 249924 - DNA, 604 bp, Homo sapiens
acatgctttgtaagtttaataacctctttaatcactgagaagatatggggcttctctttggagtctctatcaatgatgacattcttaacaaaatagttgatggatgcctaggatgtgccaggtacttcttaggacctgtgggaattattagaaaacactgttccgtggctcagtctagatgaaagagacaaaatgtaataagcacgataaataataaattatatagaatgttagaaattaagtgtttggaaaatagcacaatttaagagagtagtagcacaggcgaaggagaatgggagcaaagctgtaattttaaataaaattgtcaagaatgacattgttggcaaaaagacatttgatcaatgaggggatggaagtagggggcgttaattatatgaacacaacagagacaatagagaagactttggcaggcaaagaaaataatyggcacaaaggctttaaacccagtgagtttaaagcagaataaggaagaagagccaagatagggatgggagctggaaaatcatggtctcacctgccttcataagaactttgactttgactctaatggacacatgagccaccaggagtgcttgactgcagg

SEQ ID NO: 249925 - DNA, 585 bp, Homo sapiens
gcaattgactttcttacctattctccaaatattttttcacttattaagcactgcttcttttctaagacatcttctgtttttagtgttacataagcctgttctattacatttgttaacagttgaaaatctatgatggtattaaaaaggtaaattaaaaaatggtaaaaacatcttgttctctattcattgttaatatcatttactattgtatgataaaatgtgactaaacatttcaattcataaaatttttcttaagaaatcatttaagcctgccggaataactagtagatatgctrgtacagttttagaaaggttgttttagtgtcattctaagtcattaatatgctgtgattacatgattacactttcagttagcaggtatcatattttacaagtttatttttttacgaatggtttattactgaattatgaatatgttagcaggaaaattgaacatttattatttttcttttttccttaaattctctttttaaaaagtcagcatagaaagaattcctaaatgctcaatggtcacagatttaaagcaatatcagaaatagtaaggatttcagggttagttaaatt

SEQ ID NO: 249926 - DNA, 594 bp, Homo sapiens
caccaagctgtaggaatgtctggaggagagtgcttgtcaggaatgctgcagaaagaaatatattttgggcatcctcagcaagaaatgaatataggttttctaatggaaatatccttattgtgacaaatgatggttttgtgctatggtgcattgtgaatcaagtcgtcaaagtgaagtgtaaacaaaactttgggtgcagaagataatccctggagtacagttttaaaaaaaaaaggtagaactttaatctgtgtttatttatttttcagtcctatctttttgactttctatttttacaaatgtgttataatgcacacaatatattaggatacaatacctgcaaaggatttataatatatggaacatgtattcttaaaacattttactaatagagttccaagaaagcttggcgactacaattgatacacatacagatactatgatttatatgacagtgttaacctgccttgtggataggctgaaaattctttctcccatttataacaatgactgtgggaatattctttgtaaataagtcattagtattatgacctayatatgaactcctgttgttcaccaatgtgtacagtagga

SEQ ID NO: 249927 - DNA, 572 bp, Homo sapiens
cccccaaaatacttctttactcatccactatgtttctatctccatgaatataattgttttttggacataacctgacagaagtgctcagtccttcctaggcaccacttttggaagaatcttccttaagtggctctatcatccctgctccggcaggacccttctaggctttccactgctrctagaagagcatacttcggtaatcgacttttcaaatcagttcacaacacgaaaaatagcagtggcctgtgaaatcggcaaattcagggttagactcattctaactgtatatttgaaccacccaccaactctaggggcactagactttctgtttgaaaattaggtgatcagaagcaaggatgacaagacccctttcttctctactcttccaaccttcccggcacccacttccagggcaacctggatctggtaagcacccacccctgcgagggccactcctttccccaccaaatgttttctgatcgctctgcccaaatttattcttctctacttccttaagcccatccacatttgaaatatcaccttaaattttaccctctccaaagagccgctcc

SEQ ID NO: 249928 - DNA, 625 bp, Homo sapiens
taattggccatgggccaagtcctttatccacacaaggggtagccagtaggggcctcgatcgggtacagacactccagaaaactttgtaaccaggcccctgagccgctcgctgtggcctgctcccaccctgtggagtgttctctcgcttaaataaacccccacattcaccgtttcattcctttgtgacttaactccccttcacgtcctatcaaaatgtctccatcccatgtcccaaattcctagccacaaattaagttaataaataaatatcttaaaattccaatcctgcttcggcagtattaattcctcaacagaccattcttaaagaggcaaagtgcggtggctcacacctgtaatcccagaactttgggaggccaaggcgggtgggtcatgaggtcagcagttcaataccagcttggccaacatggtgwaacttcgtttctactaaatacaaaaattacctgggcatggcggcccacacctgtaatcccagctactcgggaggctgaggcagagcattgcttgaacccaggaggcggaggttgcagtgagccaagattgcgccactgcactccagcctggcaaaagagtgagactccctctcaaaaaaaaaaaaaagaggcaa

SEQ ID NO: 249929 - DNA, 598 bp, Homo sapiens
caaacaaggtgataaagacatcccggaatgtggcagtttgccaaaaatatacgaaacaagataccacaagcttctctatataagaatccaagagactacatcattccttaagaaactaggatatttctagagaacactctatattatttgcataaaytattccaaactaaaattataacactaaaagtgtcctcttctaagcatcattatttcctggaaagtctactgtagaaaatattttaaataaatacattagataattcccatagtgatgcccttgatagtactccaagatttgaattatatatgctcatttattcttttttaaataattcaagagacagatcaaagctttacttttgtgagtttagaataatattttttaaactacatctctcaagctttctatttttcatgtgctcataaaaacattttcataccgaacattttaaataaaaaaataattagttgaagatcagcatgatacttgtaatattttgttgaaaatgtattcaagtgttttctttgaaaataaaagcaaaacataagtgcaaatttcacagagcttgatgtacagagtaaatcacttaagtacaga

SEQ ID NO: 249930 - DNA, 598 bp, Homo sapiens
caaacaaggtgataaagacatcccggaatgtggcagtttgccaaaaatatacgaaacaagataccacaagcttctctatataagaatccaagagactacatcattccttaagaaactaggatatttctagagaacactctatattatttgcataaactattccaaactaaaattataacactaaaagtgtcctcttctaagcatcattatttcctggaaagtctactgtagaaaatattttaaataaatacattagataattcccatagtgatgcccttgatagtactccaagatttgaattatatatgctcatttattctttyttaaataattcaagagacagatcaaagctttacttttgtgagtttagaataatattttttaaactacatctctcaagctttctatttttcatgtgctcataaaaacattttcataccgaacattttaaataaaaaaataattagttgaagatcagcatgatacttgtaatattttgttgaaaatgtattcaagtgttttctttgaaaataaaagcaaaacataagtgcaaatttcacagagcttgatgtacagagtaaatcacttaagtacaga

SEQ ID NO: 249931 - DNA, 467 bp, Homo sapiens
aaagacaaaaacaaaaaacccttggagattgttccaaatgcatctttcttgccctcaactgccagccttcttaggaattaaataatcccacttgtgatcattccaggattcaaacttctaatattgacatctctgttacaggcgacaacgatgccagattatgtctgcaaattaaggtcattttaaaggcctagggaaacagaaaatgcctggcaagggatcaaattcttctttgagagagggttagaagaaccattgctatttactcattgtggatttgttttgcaggggcattgttattatcgcaggcatcaaaccgtagaggggaaaaagctgcaaacaaaatatcaagggaaataacgaccatacaaaataaatagcaggcacaaayaaagttcacaatgcctcatgtgaacttaggaaaaacgcagtcatgcatcccacttcctgaatatgttttcagtgga

SEQ ID NO: 249932 - DNA, 562 bp, Homo sapiens
tcacagctactcaggagtctgaggcaggagaatcacttgaacccgggaggcggagtttgcagtragccgacatcatgccattgcactccagcctgggcgacagagcaagactccatctcaaaaaaaaaaaaaaaaagagtcaaatacacagaaccaggaagtgggaaatggctcctgggggtagaggaatatatttggtgtttatgccagagggagtcacctttaaacaaggatagatccataaaggcataagagggaaggtaaattagaagggtttccagactttcgatgatactgcagtctgatatttactgaaaattcaggaagcaaagaactaaagactatgggatacaatctcacaaacactacatcatacttaaaacatgatataaagcttgtctaatccgtggctttgggccacaggtggcccaggttggctttgaatgcagcccaacgcaaattcgtaaactttttaaaaacattatgagaatttttttgtgatttttaaaagtttatcagctctcattagtgttagtgtattttatgtgtggctcaagacaat

SEQ ID NO: 249933 - DNA, 603 bp, Homo sapiens
tgtccacgtgttcccatcctttagcccccacttataagtgagaacatgtggtctttggttttctcttcctcaactagcagatgaggttttaatatcatatactgtgcttggttttgcatgtgttgtaatgtgacctcattacaatgtcaacttctcaagatgagggaacatgtctcaatcagttgtgtaaccctccccccattcctattacaaggctagcggggtgttccatcagtaatactcacttggcttcaacatttctaagaacagatgraagcactcctccttctgtccagaaccaaaatgagtgtactcagacttgcattcatttgcagtcatcaacgatggtgaccagtcttaagctagctttaatacaggatccatgttctcaagtcattatctgtgacccaagaatggagttatagggatgctttttttttttttaattctaaggattactatgagtaaatgaatgcattcatactgcctaaccaagtttcttttttaaaaaaatcaactacacatttgctttgttatgagcacagagagtggccaaaaactatacttgtggtgattgaccaatgactaaaattagctaactta

SEQ ID NO: 249934 - DNA, 603 bp, Homo sapiens
tgtccacgtgttcccatcctttagcccccacttataagtgagaacatgtggtctttggttttctcttcctcaactagcagatgaggttttaatatcatatactgtgcttggttttgcatgtgttgtaatgtgacctcattacaatgtcaacttctcaagatgagggaacatgtctcaatcagttgtgtaaccctccccccattcctattacaaggctagcggggtgttccatcagtaatactcacttggcttcaacatttctaagaacagatgaaagcactcctccttctgtccagaaccaaaatgagtgtactcagacttgcattcatttgcagtcatcaacgatggtgaccagtcttaagctagctttaatacaggatccatgttctcaagtcattatctgtgacycaagaatggagttatagggatgctttttttttttttaattctaaggattactatgagtaaatgaatgcattcatactgcctaaccaagtttcttttttaaaaaaatcaactacacatttgctttgttatgagcacagagagtggccaaaaactatacttgtggtgattgaccaatgactaaaattagctaactta

SEQ ID NO: 249935 - DNA, 612 bp, Homo sapiens
aacaaaggaacatgtctctgaaggggaacttctatgcacttcaaaactgtgcctggaatttgctatactcaacggcccagtgacattgcgtatgtctcaattttgtggtgatacagttggtgtcaaaatccaatttggacatgcagaaattcgtttctatgatttactctaagcccaaagtcaggaatttgttttctactgagggatgctgacacatgggagaaagacagattacagggctcaacgagatatatacactatccactcctgagagaaaaagagacaaagagggagagccaggcactgtgataggaaatggaaaccgatattcaaggggaaagcacccgtcttctgacctactcattaacagctgttctaagctgtttggtgtagcttgggcaacaacagagttctcatttgaayattttccttcatttgatttcacagattgcttacagcttattttcatcatcattctaaaatagttgacaaatctcaatatcagtctgtgatttttgtttctttaggaagcattgatcattttaattctaaaaagagaagccacgcaagttaggcaaacgccttttattgtgaaacatcttaccaaacaag

SEQ ID NO: 249936 - DNA, 612 bp, Homo sapiens
aacaaaggaacatgtctctgaaggggaacttctatgcacttcaaaactgtgcctggaatttgctatactcaacggcccagtgacattgcgtatgtctcaattttgtggtgatacagttggtgtcaaaatccaatttggacatgcagaaattcgtttctatgatttactctaagcccaaagtcaggaatttgttttctactgagggatgctgacacatgggagaaagacagattacagggctcaacgagatatatacactatccactcctgagagaaaaagagacaaagagggagagccaggcactgtgataggaaatggaaaccgatattcaaggggaaagcacccgtcttctgacctactcattaacagctgttctaagctgtttggtgtagcttgggcaacaacagagttctcatttgaatattttccttcatttgatttcacagattgcttacagcttattttcatcatcattctaaaatagttgacaaatctcaatatcagtctgtgatttttgyttctttaggaagcattgatcattttaattctaaaaagagaagccacgcaagttaggcaaacgccttttattgtgaaacatcttaccaaacaag

SEQ ID NO: 249937 - DNA, 605 bp, Homo sapiens
aacaaaacaccagcctagttatgggacagagaaagcaaggcaaagggaaggaagaagtacaggattgtggcagagatggggctgtgcacagaggtcaggaaatgggctggcaggggtgtcactgcccgatgacctaagcaactgaattaagtctggctttgagagaaatgaccagtgtttggctgggaaacaactcataagaattttctgggcaagaagacaggtgttgttattgtcactttgcggagaatatgacaaaaagtaatggtatgtcaccaccaaatgtgaaattaaatgattttttattagaggatttctgagggaataaaatagcattgtattatacacagaatgaagattaacaaggttattagtatgcatacmatatgcaaatgtgtataaacatttacacatatatagaattaagcagatttcatttcaaatccttgcttaattcctatataattgagcaagtgattttcccttattgagccccagtttcctcaactaaaaaatgggaatagtaacacgtctataaggttactgtgagacttagatgagataaaaacatgctaagtacttagttcagtgtctggttcagatac

SEQ ID NO: 249938 - DNA, 605 bp, Homo sapiens
aacaaaacaccagcctagttatgggacagagaaagcaaggcaaagggaaggaagaagtacaggattgtggcagagatggggctgtgcacagaggtcaggaaatgggctggcaggggtgtcactgcccgatgacctaagcaactgaattaagtctggctttgagagaaatgaccagtgtttggctgggaaacaactcataagaattttctgggcaagaagacaggtgttgttattgtcactttgcggagaatatgacaaaaagtaatggtatgtcaccaccaaatgtgaaattaaatgattttttattagaggatttctgagggaataaaatagcattgtattatacacagaatgaagattaacaaggttattagtatgcatacaatatgcaaatgtgtataaacatttacacatatatagaattaagcagatttsatttcaaatccttgcttaattcctatataattgagcaagtgattttcccttattgagccccagtttcctcaactaaaaaatgggaatagtaacacgtctataaggttactgtgagacttagatgagataaaaacatgctaagtacttagttcagtgtctggttcagatac

SEQ ID NO: 249939 - DNA, 605 bp, Homo sapiens
aacaaaacaccagcctagttatgggacagagaaagcaaggcaaagggaaggaagaagtacaggattgtggcagagatggggctgtgcacagaggtcaggaaatgggctggcaggggtgtcactgcccgatgacctaagcaactgaattaagtctggctttgagagaaatgaccagtgtttggctgggaaacaactcataagaattttctgggcaagaagacaggtgttgttattgtcactttgcggagaatatgacaaaaagtaatggtatgtcaccaccaaatgtgaaattaaatgattttttattagaggatttctgagggaataaaatagcattgtattatacacagaatgaagattaacaaggttattagtatgcatacaatatgcaaatgtgtataaacatttacacatatatagaattaagcagatttcatttcaaatccttgcttaattcctatataattgagcaagtgattttcccttattgagccccagtttcctcaactaaaaaatgggaatagtaacaygtctataaggttactgtgagacttagatgagataaaaacatgctaagtacttagttcagtgtctggttcagatac

SEQ ID NO: 249940 - DNA, 583 bp, Homo sapiens
gccagtgattgcaggaaggtgactgggaccyggggcaaccttttagaatgagtaaagggatgtgacaactatgtggggactgaccttcggttggtgcttaatctcatgtctttagggtaaaaaacaaaaactaaaataatactaaacaatttaaaaagaaaaaagaattcccgcaaattaggtttgggggaaagtgaagacaaactagagaaataaatttggttgaaatcaacctttgctaaaagtaggctccagagatgaattggagaggaaatgtcacaagatgtgaatggacaatttgttgagcttgctttctagaaaaacagtaatttaacttcagataacttcactaaataaaatattgtattccttgaaactgaagtctttgaaagatatatatatatatatatatatatatatatatagcacttatgtagtgattttgctaaaacacaggaaagatgggacaaggtgaggtgtttctcacattgggtgattaggatcacctaatgcagcagttttctttttgctgataatattgttctcatttagaaaaaagattaatttcaaaagatcaggaaaa

SEQ ID NO: 249941 - DNA, 580 bp, Homo sapiens
aggatcacctaatgcagcagttttctttttgctgataatattgttctcatttagaaaaaagattaatttcaaaagatcaggaaaatggtacttgaaaaatgcatcatttttcagggtttccatttacaacctgttaaactttgagagagaaccattgaaaagaaaataccatgaacatgccttaatagttcatyaaagctcagagactggctgaaagatctattcatattatagtactcataatatcaagaagtggaagagaaaaaatgcaaggaccttgaaaacaatcaactaaattgagaatatcactttggtgtctccttcatggagattgcaatgcttttgtgtctttccttctttctttttaatatatggctcaagttctaaacaaaatgtaaaatggctgttttatcacgtttttaaagggagggagattgaattctttggtgaaaacagttcaatataatgcccatagactaatattaattactaattttaggcaaaatggcacaccaaattaattactgatgagctattttagtggaaatatgccaggaatcagattgtttgggggcaaagt

SEQ ID NO: 249942 - DNA, 580 bp, Homo sapiens
aggatcacctaatgcagcagttttctttttgctgataatattgttctcatttagaaaaaagattaatttcaaaagatcaggaaaatggtacttgaaaaatgcatcatttttcagggtttccatttacaacctgttaaactttgagagagaaccattgaaaagaaaataccatgaacatgccttaatagttcattaaagctcagagactggctgaaagatctattcatattatagtactcataatatcaagaagtggaagagaaaaaatgcaaggaccttgaaaacmatcaactaaattgagaatatcactttggtgtctccttcatggagattgcaatgcttttgtgtctttccttctttctttttaatatatggctcaagttctaaacaaaatgtaaaatggctgttttatcacgtttttaaagggagggagattgaattctttggtgaaaacagttcaatataatgcccatagactaatattaattactaattttaggcaaaatggcacaccaaattaattactgatgagctattttagtggaaatatgccaggaatcagattgtttgggggcaaagt

SEQ ID NO: 249943 - DNA, 580 bp, Homo sapiens
aggatcacctaatgcagcagttttctttttgctgataatattgttctcatttagaaaaaagattaatttcaaaagatcaggaaaatggtacttgaaaaatgcatcatttttcagggtttccatttacaacctgttaaactttgagagagaaccattgaaaagaaaataccatgaacatgccttaatagttcattaaagctcagagactggctgaaagatctattcatattatagtactcataatatcaagaagtggaagagaaaaaatgcaaggaccttgaaaacaatcaactaaattgagaatatcactttggtgtctccttcatggagattgcaatgcttttgtgtctttccttctttctttttaatatatggctcaagttctaaacaaaatgtaaaatggctgttttatcacgtttttaaagggagggagattgaattctttggtgaaaacagttcaatataatgcccatagactaayattaattactaattttaggcaaaatggcacaccaaattaattactgatgagctattttagtggaaatatgccaggaatcagattgtttgggggcaaagt

SEQ ID NO: 249944 - DNA, 603 bp, Homo sapiens
acaagattaaaattgcatgttgagaatgactgagccacaggataggagagcctgggtccctgataccacagagacaccctagcagcaccagactgcttaaacttggaatactatgggagagaataaatgaatttgcaacttgcttatgtcactattatttttagatctttgctagagcaatcatctttgttaagtgttaaaaaaaatttttaacaataatttacttttatctttacgttactcttatttgactagaactcctgatgtacctcaagaatagaatctctatttgctggcacatgactttgggatttgtaagacgaccctaaataagtttttggatcctgataagtctatgttagctatctgatacactttttgaacaaagatttatgttcatagattctggggcataaaacagttaatttcatagatcttttaaaaataagttggtagtgtaaatttatttagtgtgacttaatccagccatatattttattattttaacatatttkcatgtattatcttgaaatatcctatggagacattttcataaaggtacaatttgattctcttttctttctctttgtacacaaaaattaa

SEQ ID NO: 249945 - DNA, 603 bp, Homo sapiens
acaagattaaaattgcatgttgagaatgactgagccacaggataggagagcctgggtccctgataccacagagacaccctagcagcaccagactgcttaaacttggaatactatgggagagaataaatgaatttgcaacttgcttatgtcactattatttttagatctttgctagagcaatcatctttgttaagtgttaaaaaaaatttttaacaataatttacttttatctttacgttactcttatttgactagaactcctgatgtacctcaagaatagaatctctatttgctggcacatgactttgggatttgtaagacgaccctaaataagtttttggatcctgataagtctatgttagctatctgatacactttttgaacaaagatttatgttcatagattctggggcataaaacagttaatttcatagatcttttaaaaataagttggtagtgtaaatttatttagtgtgacttaatccagccatatattttattattttaacatatttgcatktattatcttgaaatatcctatggagacattttcataaaggtacaatttgattctcttttctttctctttgtacacaaaaattaa

SEQ ID NO: 249946 - DNA, 389 bp, Homo sapiens
gcctgtagtcccagctactcgggaggctgaggcaggagaatggcgtgaacccgggaggcggagcttgcagtgagcsgagatcgcgccaccgcactccagcctgggcgacagagcgagactccgtctcaaaacaacaaaacaaaacaaaaacaaaccaaaacaaaacaaaacatttatatctctcttatgttaaggataaaaattatttacattgattttttaaagcttaaataactaacaaaatttgttctaaacccatcacacacaggtgaaaatggaggcttagagcatttcaagggctcacaaacgacaaggttcgaaaataatttccataagaatatagatcagtacaaacgttgctaacaggtatgagaaggtgacgatcatga

SEQ ID NO: 249947 - DNA, 562 bp, Homo sapiens
ttttctttatttccttcatccctcccttctatttatctctccctctcttctattttctctcttttttctttatttcaagttcattttttattgcctaataaaaattaactttttttttccttttttttcccccgagatggagtcttgctctgtcgcccatgctggagtgcagtagcatgatcttggctcactgcaacctctgcctccttggttgaagcaattagcctgcctcagcctcccgagtagctgggattacaggtgccctccaccacacctggctaatttttgtatttttagtagagatggggtttcaccatgttggccaggttggtcttgaactcctgacctcctgatccacccgcatggagaggaaaatgtgtttctagtttgttaatgaatatactctaagcataatagacaatagatgcccaataactaactaaataaatattctgagtacrataaaagtttgtagttaaatgttattgccatgaattactcgatacattttgaaattacagacaacatattagtcaggcttctccagagaaacaaaaataat

SEQ ID NO: 249948 - DNA, 574 bp, Homo sapiens
gcagtagcatgatcttggctcactgcaacctctgcctccttggttgaagcaattagcctgcctcagcctcccgagtagctgggattacaggtgccctccaccacacctggctaatttttgtatttttagtagagatggggtttcaccatgttggccaggttggtcttgaactcctgacctcctgatccacccgcatggagaggaaaatgtgtttctagtttgttaatgaatatactctaagcataatagacaatagatgcccaataactaactaaataaatattctgagtacaataaaagtttgtagttaaatgttattgccatgaattactcgatacattttgaaattacagacaacatattagtcaggcttctccagagaaacaaaaataatagaatatatatctaatgaagagatattataaaatatggcctcacatgattttggagactgagaaatcccatctgctgcctgcaagctggggaaaacccgtagtgtagttycaaggcttgagagttggagaggttatggtatagatttggtctgaaagcctgagagacagaaatgctgacg

SEQ ID NO: 249949 - DNA, 413 bp, Homo sapiens
gaaatacaaatcatgaaataaaaaatacacgtagacaatgaatacatgaagagttgctcagattaaagtgaagggaagccagaataaaaatatttcgatycgtaatttggtaaaatattaatgatcattcccagtgactcctgagctcaaggattccgtgtgcctgttgattttcccacagtgctggtgcaagagttcctctgaggacactggttgaaaaggattgcaatttcacataactgtgtatgttctaagtcttctaggaattcatcttaagaaaacagtcagggatgtccacaggaatgtagctataaggattttatccatcacattgctctttactgcaactaaaataaaaattagttaaatgtacaatgaaaggaaattgaggaaatggattacattaaaggagt

SEQ ID NO: 249950 - DNA, 413 bp, Homo sapiens
gaaatacaaatcatgaaataaaaaatacacgtagacaatgaatacatgaagagttgctcagattaaagtgaagggaagccagaataaaaatatttcgatccgtaatttggtaaaatattaatgatcattcccagtgactcctgagctcaaggattccgtgtgcctgttgattttcccacagtgctggtgcaagagttcctctgaggacactggttgaaaaggattgcartttcacataactgtgtatgttctaagtcttctaggaattcatcttaagaaaacagtcagggatgtccacaggaatgtagctataaggattttatccatcacattgctctttactgcaactaaaataaaaattagttaaatgtacaatgaaaggaaattgaggaaatggattacattaaaggagt

SEQ ID NO: 249951 - DNA, 615 bp, Homo sapiens
cttttcttcttcacaaataagaaatgaggatggggagtgagagtcactcctgaatgttccttggctatcctgcttatccactggttgaagaacattcctggtttgtggaacactcgctgttctgtttgtttctgactcgctggttcccakttcagcattagctaacattgctccatgtctttctctcttggcatactggaggtcttcgtgtatcactgcatgtctctcttctagccttcgctttattgtctccaacttcattgttacagaccccataaaccatttgctggatcaaaactgaacataattagcacaaagtcattttcctcctctttaaatggcttcctcctgaaaagccctggggttttcttcaatcagctgaagtagctaaagtttttaaagtaggttttccctccatctatttccaaatagtccacctaaatacttttacattaaaatagctttaaaattatgtgttaaatcaaatactctgaccttaatttttcagtacttcagggcatctactacttcggaaaatggagttgacatattacccacttaaactcaccccccacatatacaatcattttattactttccaaattaaattgattg

SEQ ID NO: 249952 - DNA, 606 bp, Homo sapiens
aatcattttattactttccaaattaaattgattgtaatttgatttaattttatctgaagcatttaaatctaaatgccttaaaaccattttagaaatttagtagagcaaaattaaacccactttgcagatggagcaaacttaccaaaagaagtaacattctagctctgaatacatgaacccataaaattgctgagttctagctttctacaatttttatatctgatttccataaagactgtatgtaggtcagggttgataactcaagggactacaaaggctaagtcagaccttaaacaacagtgtagcctggaggaagatcaggtgacctcaaagacatggaatctatccagaactgctactgcttctaatctgatctgtcccraccaaaacctgaaccagtgtgactgaatcttcttatgttttgagaacggccaaaaataaaaatttctaatataaaatctcttacttttaaaatgttggttgttaatctaaaaatgtttgatactgcactaagcaaattaaacaattcaaactggattcagcctgtagactaacatgcagttggtaacttctgttgttaaatatcccataagccacttagccaca

SEQ ID NO: 249953 - DNA, 607 bp, Homo sapiens
tgccgaggagacagatacgctacagaccttttgccaaaaggactcaatctaatagaatctgtgtttcacaaatacgctttacataaatccattacgtgcccagagccagcttgttttataaatgcattttgtgaaatgcaatggaattaacccaacatttatatctcaacctcaaagtacattatgaggattgtaaatttcccaattacaacagatgaaaatgaacattgtacttatttactttgggtggacatggagaggggaggggaagaataattttyttaaatgtttaaccaacaccagatttcacttactgccatttctagcttcctatttcataccaactttattttctttggggtttgtttttttgttttttccctttctggatttccaataaaataactgaaactagaattctgctggaaggaaaaaaaaaaaaaaaaggaaatttttaagtcccaaggtgaagaaatcgcctaagggagtcaagagaacatagacaagattttttagtttgtgctgctttgcatctttaaggaggcaattagttattcttctgtattactgactacccctttttctccataactcatataatacaaat

SEQ ID NO: 249954 - DNA, 515 bp, Homo sapiens
tatctcaacctcaaagtacattatgaggattgtaaatttcccaattacaacagatgaaaatgaacattgtacttatttactttgggtggacatggagaggggaggggaagaataattttcttaaatgtttaaccaacaccagatttcacttactgccatttctrgcttcctatttcataccaactttattttctttggggtttgtttttttgttttttccctttctggatttccaataaaataactgaaactagaattctgctggaaggaaaaaaaaaaaaaaaaggaaatttttaagtcccaaggtgaagaaatcgcctaagggagtcaagagaacatagacaagattttttagtttgtgctgctttgcatctttaaggaggcaattagttattcttctgtattactgactacccctttttctccataactcatataatacaaatggccttagagaggacatattttaagtgggacatttattattgaacaaaagtatggactctaatttaaag

SEQ ID NO: 249955 - DNA, 588 bp, Homo sapiens
ggagcctggctagttggagatggttttctgctgatgaaaattccaacgaaattaaaaatcaatttcagtattaaaaactataccaatcagttatcctatgtgagagcattacaaacatgtacattcacctgactatatgagactcttcctccmtaaacaatttttttcatcagagaaagagagggaaagagagagtagtgagttagctgcaaggctactaggttagtttacagttactgaaggcttcaaaatgtgtcaagcactgtcctaaatgcttttatatagtttccccttttaattaaaaaagcagccctacaaaacagtcaccatatagcctaaggttaagaaaatcaggagttagaatgtctgttttaaaaatacttgtcgaccagatagtcttagaattaattacttctgctgacttcatttataaaagggacataaaaatagcacctactttcacagggtggaggagggtactgaatgacacaaagcagcggaaaatgcttagattgttgcctgcatcagaataaccaaaaaacaaatgtagctattatgatgatcatcagtctacagaggaagaaactt

SEQ ID NO: 249956 - DNA, 588 bp, Homo sapiens
ggagcctggctagttggagatggttttctgctgatgaaaattccaacgaaattaaaaatcaatttcagtattaaaaactataccaatcagttatcctatgtgagagcattacaaacatgtacattcacctgactatatgagactcttcctccataaacaatttttttcatcagagaaagagagggaaagagagagtagtgagttagctgcaaggctactaggttagtttacagttactgaaggcttcaaaatgtgtcaagcactgtcctaaatgcttttatatagtttccccttttaattaaaaaagcagccctacaaaacagtcaccatatagcctaaggttaagaaaatcaggagttagaatgtctgttttaaaaatacttgtygaccagatagtcttagaattaattacttctgctgacttcatttataaaagggacataaaaatagcacctactttcacagggtggaggagggtactgaatgacacaaagcagcggaaaatgcttagattgttgcctgcatcagaataaccaaaaaacaaatgtagctattatgatgatcatcagtctacagaggaagaaactt

SEQ ID NO: 249957 - DNA, 430 bp, Homo sapiens
atacttgtcgaccagatagtcttagaattaattacttctgctgacttcatttataaaagggacataaaaatagcacctactttcacagggtggaggagggtactgaatgacacaaagcagcggaaaatgcttagattgttgcctgcatcagaataaccaaaaaacaaatgtagctattatgatgatcatcagtctacagagraagaaacttgctttatttctttacatagaattattactattttctattttgtcatgagttgatttagaaaatttaggaacaataaattttctaggaatgtgcccatttcatttatgctttcaaataggttgacataaatacaataggttatccatgtattgtttaggctttttaaaaatttctgctaggtttgtagaatactgtctttattttcattcctcataatat

SEQ ID NO: 249958 - DNA, 399 bp, Homo sapiens
taatgtctaagtatctgacaccttttttagggcgatacagtgccttatctacagtaagtacttggatataatgggtttaattttttaaaaacttttattttaggttsagcagtacatgtgcaggtttcttgtttgagtaaacttgtatcaccggggtttgttgtacagatttcttcatcacccagatactaagcctagtgcccagtagttcttttgtctgctcctcgctcctcccactctccaccctgaggtagaccccagtgtctgtcgttcccttttttgtgttcatgtgttctcactgtttggctcccatttatatgtgagaaaatgcggtatttggctttttgttcctgtcttagtttgctaaggatgatggtctctagctctatccatgatcct

SEQ ID NO: 249959 - DNA, 399 bp, Homo sapiens
taatgtctaagtatctgacaccttttttagggcgatacagtgccttatctacagtaagtacttggatataatgggtttaattttttaaaaacttttattttaggttgagcagtacatgtgcaggtttcttgtttgagtaaacttgtatcaccggggtttgttgtacagatttcttcatcacccagatactaagcctagtgcccagtagttcttttgtctgctcctcgctcctcccactctccaccctgaggtagaccccagtgtctgtcgttcccttttttgtgttcatgtgttctcaytgtttggctcccatttatatgtgagaaaatgcggtatttggctttttgttcctgtcttagtttgctaaggatgatggtctctagctctatccatgatcct

SEQ ID NO: 249960 - DNA, 557 bp, Homo sapiens
acaatacacagaaggagagccctcatgattaataaacactagcattataccagcaacttgattagttggatttgtttggatragatggtggaaatagctgggatggattttgaaagattagaatttggaacttggctgaacctctaaggatttgtatcacctttcacaagtcacttttttagctttagttggctcatctttcaaacaaaggagttaaaaaaaaaaagatgagtctcatctgtggtgctaattgtgaaatcgctgtgataaactaggctttattcttttgtatgcaaaacgaaatggtagtagtggtagaggtgaaagcaggggtgtgtgtttataaaacaggtatcctaaaaagccacgaagccataggttgctagccagccaactgatatttggatctgtgtccctgctcaaatctcatgttgaaatgtaacccccagtgttggaggtcaggcctggtgggaggtgattaaataaatcatgggggcggagttctcatgaatggtttagtgccatcctcttggtactttcctcacaacagtgagtga

SEQ ID NO: 249961 - DNA, 590 bp, Homo sapiens
aggtaggacctgggaataagaaccaatcattgatttttctccaggagttctacttatatttttatgaaattttaaatatrcctgtgtaacatttatcaaaattttcacagatacttctgaaatttcaggcgattttggctctttttctactcttctcaattttttgacttcttcaaaattagcacatgcaatttttattatcagtgagtaaaagctgattgcatttaggaaaaaaatataacaaaaaactcagaggtgttagatattcagaggacacatctcagcactattttagggaggggaatatatatatccacatacatatatacacatataacacacatattatatatgtatgtatgcaccatacacatatacacacatatctgtatctataaaacaaaggttttatttttcagcttaaccttggttagttaggacgatgtcagttcaaattctgaaccagccgcctactatccatttagccatgccaaaccaattcactgctctaaatcagtttctttatctgtacattcagaaaaccaaactagaataatacatctcataaaggacttttaaaagactaggta

SEQ ID NO: 249962 - DNA, 619 bp, Homo sapiens
tctttctttttgtgaaaagaagaaaaggcatttgaaaatcacaaggaccactaagaaaatatagtacaaagtttactcaaagatgaaaaaaagagagaaggagctagggtatttcgtaagaaggtttgaaagcattaaggttataggtattagggactggataaataggcaggattgccttgcttcccttagcatctctttcctttttcttctttctctggctcttcaatgtttccgcattccccatttttgtctccataacttccttcttgaattctccttcccaagatatctrttcattccagatcagctcttacatgactatgctactgaagagaaggacaggaagtctactctaatggactgcttttctaagttagctgtttagaatgcaagacccatgtaaccatagaaatgatgtagctacagaactgtacatttataacatgtgtttccaagcacaggcccaaaacctcttacctgcaactagtaaacccaaacagtgccaaaaactggaaacttttaagtttgcagtaacctcatttgacatcaaatgtgatcacgtgattaaactgacatgaggttattaatagtctcagtgtgaatattcatagaattt

SEQ ID NO: 249963 - DNA, 542 bp, Homo sapiens
cactaagaaaatatagtacaaagtttactcaaagatgaaaaaaagagagaaggagctagggtatttcgtaagaaggtttgaaagcattaaggttataggtattagggactggataaataggcaggattgccttgcttcccttagcatctctttcctttttcttctttctctggctcttcaatgtttccgcattccccatttttgtctccataacttccttcttgaattctccttcccaagatatctattcattccagatcagctcttacatgactatgctactgaagagaaggacaggaagtctactctaatggactgcttttmtaagttagctgtttagaatgcaagacccatgtaaccatagaaatgatgtagctacagaactgtacatttataacatgtgtttccaagcacaggcccaaaacctcttacctgcaactagtaaacccaaacagtgccaaaaactggaaacttttaagtttgcagtaacctcatttgacatcaaatgtgatcacgtgattaaactgacatgaggttattaa

SEQ ID NO: 249964 - DNA, 401 bp, Homo sapiens
agagacagcaccaggggaacctacataaccaaccttgctaaaagaacacatatcttccattagtttccccacatataccttcccacaatttactgcacctacaagttcaaagtccttttcctttgtcttgtcattttttaaataaattcattgttctttattaagatgccacayaagccccatgtttgagttactatcgagttctcccctatgtatgcatgatgcatgtcttaataagcttatgtttttctcttgttaatatgtcttttatcagtctaatttgcagggtcccagccaaggaacctaagctgggtagaagaaaaagcattttcctagggaaaaacaaaacaaaacaaaaaaggggggaagaggtagacagagggaagaggaaagagttgaat

SEQ ID NO: 249965 - DNA, 497 bp, Homo sapiens
tttgtagataggcaattttctctcaagtaaaacacacagatacaaaatatgaaaaacatacatagacaatcaaatttattatactttatttgaggttaactttatatttcatattctatttatgtaaattaataaaattaagatattttattaattcaataactactgaatgtctatcagaattctgatattaataaaaagacagctatgtattaaacctaaatgtgataaaggcctctgatattcaccaaaaacgactcctcttacttgttctggaattttgagttggtataatgactgaacatatttaacttggtccctacttgtttagttaacaaaatgtttattttcttcaatgatgagatatgttcaaatattatgaattctcaacatgaaactccattgtctttgctytcaaaactgtacagaattcgtatttcactatttcagagggatttgttatatattgctgaggctttctctttttttaatgtgaa

SEQ ID NO: 249966 - DNA, 466 bp, Homo sapiens
tgacatgactgctgaaggataaaaattrttgtcctacaatagtatatccagtaaaacatgaaggagaaataaagactctctgagacaaacagaagctgagggatttcattaaaacacaaaacatgtcctagaagaaacggtaaagggagttcttcaatctgaaagaaaaggatattaatgaacaatgagaaatcatctgaagtattacaaaactcactggtaatagtaagtacacagaaaaacagaatattaaaacactgtaattgtagtgtgtaaagtactcatgttttgagtagaaagactaaaagatgaacctatcagaaataataactatgactttttaaggcacagacagtataacaagatataaatagaagcagcaaaaaagttaaaaagcaggggattaaagtatagagtttttattagtttttgctttgcttatttgtaagtttgtttatgcagtcaa

SEQ ID NO: 249967 - DNA, 586 bp, Homo sapiens
acatcaacaaacctttagccagactaagaaaaagagagaagactcaaataaataaaatcagagattattaccaacactgcagaaattcaaaggctcattagaggctaccatgaacaactatatgcgaaaaaattggaaaatgtaggagaaatggataaattcctagacacatgcaactgctaagattcaaccatgaagaaaytgcaaacctaagcaaaccaataaccaacaggtaataacatttaagccataataaaaagtctatcattaaagaaaagcccaggacccaatgggttcagagcagaattgtaccaaacatttaaagaactaataccaatcctacacaaactattctgaaaaaagaaagaggagggaatacttccaaactcattctacaaagccagtattactctgataccaaaaccagacaaagacatcaaaaaaggaaaactgcaggccaatatccctgatgaacattgatgcaaaaatcctgaacaaaatactagcatattaaattcagcaacacatcaaaaagttcattcatcatgaccaagcagtatttatcccaagatgcaaggatggttga

SEQ ID NO: 249968 - DNA, 593 bp, Homo sapiens
tgccctgaaaattatgctgtggcagaattgccatgtaggagaagtttagggatggcaatctagggcaacaaggaacttgtctggaagtgtgtttacctggtaagcacagttttacctggaatttacgtttatgtggtaagacttggggaatggggctaatgaaggtaaggggcattaaatgaytccctctctgaagccacttttctgtgctgctttcatttaatgacctgtacttaccactctgtagtgggtgatgtggtttggagggttgtgcattcctgttctatcagacatgagagttggactttttaacattaaaaccttaaaaactttggattcatctaaagacgttaaatttatgttcctggtagacagctgtatctgttagaatttcagatgactatatgtcatcacagtaacctaaccatagtcaaataagggttggctttgtcacctagtagaaatctggaggtaggctatctaggttggggcagcagctctgcggtggtgtcagtccccagctaccttctacctttctccaacaccatttttcacataaagcattcatcctcatggttatctcatagtccaaa

SEQ ID NO: 249969 - DNA, 593 bp, Homo sapiens
tgccctgaaaattatgctgtggcagaattgccatgtaggagaagtttagggatggcaatctagggcaacaaggaacttgtctggaagtgtgtttacctggtaagcacagttttacctggaatttacgtttatgtggtaagacttggggaatggggctaatgaaggtaaggggcattaaatgattccctctctgaagccacttttctgtgctgctttcatttaatgacctgtacttaccactctgtagtgggtgatrtggtttggagggttgtgcattcctgttctatcagacatgagagttggactttttaacattaaaaccttaaaaactttggattcatctaaagacgttaaatttatgttcctggtagacagctgtatctgttagaatttcagatgactatatgtcatcacagtaacctaaccatagtcaaataagggttggctttgtcacctagtagaaatctggaggtaggctatctaggttggggcagcagctctgcggtggtgtcagtccccagctaccttctacctttctccaacaccatttttcacataaagcattcatcctcatggttatctcatagtccaaa

SEQ ID NO: 249970 - DNA, 593 bp, Homo sapiens
tgccctgaaaattatgctgtggcagaattgccatgtaggagaagtttagggatggcaatctagggcaacaaggaacttgtctggaagtgtgtttacctggtaagcacagttttacctggaatttacgtttatgtggtaagacttggggaatggggctaatgaaggtaaggggcattaaatgattccctctctgaagccacttttctgtgctgctttcatttaatgacctgtacttaccactctgtagtgggtgatgtggtttggagggttgtgcattcctgttctatcagacatgagagttggactttttaacattaaaaccttaaaaactttggattcatctaaagacgttaaatttatgttcctggtagacagctgtatctgttagaatttcagatgactatatgtcatcacagtaacctaaccatagtcaartaagggttggctttgtcacctagtagaaatctggaggtaggctatctaggttggggcagcagctctgcggtggtgtcagtccccagctaccttctacctttctccaacaccatttttcacataaagcattcatcctcatggttatctcatagtccaaa

SEQ ID NO: 249971 - DNA, 593 bp, Homo sapiens
atgcctacttcagtagagtccgaggaagcatataattcaactaggcacattacctcctaaacaaaatctgggttctgttactaagagcaggaaatagatattgggtgggcaagtagcggttaatacctataataaaccccccatcccatgataatccacattcaagtatatttgctctggtcctcygctgaaccctcattctaaacaggagtaggctggaaatcttaagtgtgggggaaggataagtggaagagaaactgggccgtgaggggaaatgtcagggaggtaaggggtggtgctttgtgctttcaatattctcttggcccagtcttcctatcaggctgacaaaaaaggcatcagctaactagattcttggaattgctgcttctgccaaggaactttagcctataaaagggacccagaatcatccccatcaatagttaaggtagaacagaaagctatgatcaagtagctccaaactgcggctgggaccccgctggatttggtcagcagagtgagaccaccgtaagctctttcagtgcatttcattaaccttacaatgactttaccacatattttatggtactggattt

SEQ ID NO: 249972 - DNA, 593 bp, Homo sapiens
atgcctacttcagtagagtccgaggaagcatataattcaactaggcacattacctcctaaacaaaatctgggttctgttactaagagcaggaaatagatattgggtgggcaagtagcggttaatacctataataaaccccccatcccatgataatccacattcaagtatatttgctctggtcctctgctgaaccctcattctaaacaggagtaggctggaaatcttaagtgtgggggaaggataagtggaagagaaactgggccgtgaggggaaatgtcagggaggtaaggggtggtgctttgtgctttcaatattctcttggcccagtcttcctatcaggctgacaaaaaaggcatcagctaactagattcttggaattgctgcttctgccaaggaactttagcctataaaagggacccagaatcatccccatcaatagttaaggtagaacagaaagctatgatcaagtagctccaaactgcggctgggaccccgctggatttggkcagcagagtgagaccaccgtaagctctttcagtgcatttcattaaccttacaatgactttaccacatattttatggtactggattt

SEQ ID NO: 249973 - DNA, 480 bp, Homo sapiens
ccccttgaggtagctcaagataaaaagtagarccctacttaggattgtaaagtaacatgggagacaatttggaagaggacacattggcgttatgaacattcacatacaagtgaagccatattacttttgagaagagctaaccgatatgcagtattctctgatttactgacatgcaataaaaggaacccatttaaagtgtatatttcaatgagttttgacaaatttatatacccctttaaccaccaccaaaatcaggattgattttcataacacaagtttcctgtgccccttcctagtcaattgctaccccagacccagtcccctgcaaccactgatctgctttctgtcactgcagattagatttgtcttttagtatttcacataaatggaatcatacaacatgtattatttttgcatctgacattttttgagcaatgtcatgcatgtgaaattcatgcatacttttacatatatcagtag

SEQ ID NO: 249974 - DNA, 480 bp, Homo sapiens
ccccttgaggtagctcaagataaaaagtagagccctacttaggattgtaaagtaacatgggagacaatttggaagaggacacattggcgttatgaacattcacatacaagtgaagccatattacttttgagaagagctaaccgatatgcagtattctctgatttactgacatgcaataaaaggaacccatttaaagtgtatatttcaatgagttttgacaaatttatatacccctttaaccaccaccaaaatcaggattgattttcataacacaagtttcctgtgccccttcctagtcaattgctaccccagacccagtcccctgcaaccactgatctgctttctgtcactgcagattagatttgtcttttagtatttcacataaatggaatcatacaacatgtattatttttgcatctgacattttttgagcaatgtcatgcwtgtgaaattcatgcatacttttacatatatcagtag

SEQ ID NO: 249975 - DNA, 592 bp, Homo sapiens
ttcatgtacaagtctttttatgaacatattctttcattttycttgggtaaatgtgtaggattgagatggctgaatcatctgatagatattatgtttaactttttaagaaactacccttattttcccaagtggtcataccactttattttgtatttctgtcagcaggatatgagagtaccaattccttcaccttcttgctaacatttggggtgatccatgtgttagctcctatggatggtgtaacaaactaccatcaatttggtggcttaaaagaatagaaatatattctctcacagttctagagacctgaggtccaaaatcagtatctgaaatcaaagcatgagtggggccacactccctctggcagttctaaggggagaatctgttccttggctcttctgacttctggtggttgccatattccttggtttgtggctgcatcactccaatctcggcttctgtagtcacgttgcctcttctgcaggtgaaatctgcctcttcctctctcttgaaaacacttgttgatatagacaggaggcagccaaggattccctggcaaaaccctgccttcaagtctaaaacagcctgaagg

SEQ ID NO: 249976 - DNA, 552 bp, Homo sapiens
atgactatttggttttgcattcaccccttgaaaaatatttccagtttaactatatgctgtgaatattcatgtacaagtctttttatgaacatattctttcatttttcttgggtaaatgtgtaggattgagatggctgaatcatctgatagatattatgtttaactttttaagaaactacccttattttcccaagtggtcataccactttattttgtatttctgtcagcaggatatgagagtaccaattccttcaccttcttgctaacatttggggtgatccatgtgttagctcctatggatggtgtaacaaactaccatsaatttggtggcttaaaagaatagaaatatattctctcacagttctagagacctgaggtccaaaatcagtatctgaaatcaaagcatgagtggggccacactccctctggcagttctaaggggagaatctgttccttggctcttctgacttctggtggttgccatattccttggtttgtggctgcatcactccaatctcggcttctgtagtcacgttgcctcttctgcaggtg

SEQ ID NO: 249977 - DNA, 542 bp, Homo sapiens
tcaagtaatgttcccactgctctgtatatttttattgtaattctcacaacaacctagcaagaggaattagtattcctgtttaaagattagagatgttaactgacctgggtctcagggmtagtggtatgatttggatatggtttgtttggccccatcaagtctcaagttaaaatttgatccccagtgctggaggtggggcttaatgggaggtgtttggatcacacaggcagatccctcatgaatggcttggtgcaatcctcactgtaatcagtgagttctagctctgttagttccagctttattagttcccagaagaactggttgttaacaagtatgtcacttcccttctctttctttctttttttttttttctcagcaaactatcgcaaggacaaaaaaccaaacaccacatgttctttttctttcttgccatgtgacctctacaagctggctcccctttaccatctgccatgagtggaagcagccctcaccagaagtagaaattggtgccatgcttcttgtacagcctgcagaactgtcac

SEQ ID NO: 249978 - DNA, 542 bp, Homo sapiens
tcaagtaatgttcccactgctctgtatatttttattgtaattctcacaacaacctagcaagaggaattagtattcctgtttaaagattagagatgttaactgacctgggtctcagggatagtggtatgatttggatatggtttgtttggccccatcaagtctcaagttaaaatttgatccccagtgctggaggtggggcttaatgggaggtgtttggatcacacaggcagatccctcatgaatggcttggtgcaatcctcactgtaatcagtgagttctagctctgttagttccagctttattagttcccagaagaactggttgttaacaagtatgtcacttcccttctctttctttctttytttttttttctcagcaaactatcgcaaggacaaaaaaccaaacaccacatgttctttttctttcttgccatgtgacctctacaagctggctcccctttaccatctgccatgagtggaagcagccctcaccagaagtagaaattggtgccatgcttcttgtacagcctgcagaactgtcac

SEQ ID NO: 249979 - DNA, 559 bp, Homo sapiens
ttctttaacacttaatgcaatatcgttgacatgaattaaatcaaaccttattttggttatttccactaaggccatacttggtgaaagtaattccagtaatatgattattactggaactaccagtaaaaattatgaaccctgtaacactaaggtttcattgtccttgaactgtcrttaaatgggttcttggaagaaaataaacaagcaagtttctggataagctcaaattctagggattattgacttgtaagtctgtatgtgtgcaagtacacaaatatttttaaatttaataagaacaataatgtttgtatgttgcaaattttgaataagttttcccgatgcgttttaggtctttgaattattatataaaggagttttgaatctgaagctaatttatttggcatttaatcagaaaaaaacttcacaaatactaagataacatttcttttctttgattctttgtgctgtaaaattggggcagggctgacagggagccagaagccagttccatctgtgctcctaacactacctaatatgtggtgtgtgaccctgagcttgc

SEQ ID NO: 249980 - DNA, 429 bp, Homo sapiens
tgtcctatatattgattccctatgttgtgtaagccttgggtcttaggggtaatgttgccaggatccaccatcttgtctcacagccaccgaagataatggcttttgttccatagtccctatttctttggtctctcagttctcttggcctttgaaggtagatttgtagaggcctgctcatcatagaacataccacgtcaggaaatctttatgtataatttgaataaacagcaattcagaatgactttggamatttttcctctgtctttaaagttctcatgcatagaagaatggaataagagtatgggttattgatatgaggaatggttcagggaacatttggatttatcagttactgcaatgttcttaactatgccttcctcaaagggcttcgtagttgtgttatccatttaactagcatttaacagtaaa

SEQ ID NO: 249981 - DNA, 429 bp, Homo sapiens
tgtcctatatattgattccctatgttgtgtaagccttgggtcttaggggtaatgttgccaggatccaccatcttgtctcacagccaccgaagataatggcttttgttccatagtccctatttctttggtctctcagttctcttggcctttgaaggtagatttgtagaggcctgctcatcatagaacataccacgtcaggaaatctttatgtataatttgaataaacagcaattcagaatgactttggacatttttcctctgtctttaaagttctcatgcatagaagaatggaataagagtrtgggttattgatatgaggaatggttcagggaacatttggatttatcagttactgcaatgttcttaactatgccttcctcaaagggcttcgtagttgtgttatccatttaactagcatttaacagtaaa

SEQ ID NO: 249982 - DNA, 560 bp, Homo sapiens
aaacaacattaatctccttacatatctccatcagagctcatgggaccaggtgcattgtcaatgagcagtaatgttgtgaaagraatcatttttctaagcaataggtcttaacagcgggcttaaaatagtaaaccatgcactataaatagatatgctgtcatccatgctttgttgttccatttatagagcacagtcagagtagatttagtatcatttgtatcgacccaagaactttccaaatggtaagtgaacactgacttcaacttaaagccatcagctgcattagcccctaacaagagagtcagcttatcctctgaagctctgaagccacgcattgacttctcctctctagctctgaaagtcctagatggcatcttccttgaatagaaggctgtttcatctacatttgaaaatctgtagtttattgtaaccaccttaatcagtgatcttaactgggtcttctggacaacctgctgcagcttctacgtttagcacttgctgcttcaccttacactttatgttatggaaatggcttctttccttaaatcttacgaaccaac

SEQ ID NO: 249983 - DNA, 524 bp, Homo sapiens
tccctcttataacaacccttgtaattatatcagatatacccagataactcagaatatcctccccatctcaaaatcctgaatttgatcatagctgcaatgtcccttttatataaagtatatatataaagtaatatacaggttccataaattargacatggacacctttcagatatccagcttaccacacacttgaagttcacttttcttttcttgttttaacataataggtatgtgctgataatgaaacgtaaatatagatgacattgaataatatgcattttgaaatgctgtcaagttatagatacaacatggcaacttgtagtacagggagcatgatgagaagagagcctttcttgcaactagctagctcgggacttgtagcatgaaagcagctacagataatatgtaaatgaataaatatgattgtgtctcacgttgaaatttaaatttcacataatttttacatcatgaaatattaatcttcttttgattcttttaaatcattgataaagtataaaaacca

SEQ ID NO: 249984 - DNA, 524 bp, Homo sapiens
tccctcttataacaacccttgtaattatatcagatatacccagataactcagaatatcctccccatctcaaaatcctgaatttgatcatagctgcaatgtcccttttatataaagtatatatataaagtaatatacaggttccataaattaggacatggacacctttcagatatccagcytaccacacacttgaagttcacttttcttttcttgttttaacataataggtatgtgctgataatgaaacgtaaatatagatgacattgaataatatgcattttgaaatgctgtcaagttatagatacaacatggcaacttgtagtacagggagcatgatgagaagagagcctttcttgcaactagctagctcgggacttgtagcatgaaagcagctacagataatatgtaaatgaataaatatgattgtgtctcacgttgaaatttaaatttcacataatttttacatcatgaaatattaatcttcttttgattcttttaaatcattgataaagtataaaaacca

SEQ ID NO: 249985 - DNA, 524 bp, Homo sapiens
tccctcttataacaacccttgtaattatatcagatatacccagataactcagaatatcctccccatctcaaaatcctgaatttgatcatagctgcaatgtcccttttatataaagtatatatataaagtaatatacaggttccataaattaggacatggacacctttcagatatccagcttaccacacacttgaagttcacttttcttttcttgttttaacataataggtatgtgctgataatgaaacgtaaatatagatgacattgaataatatgcattttgaaatgctgtcaagttatagmtacaacatggcaacttgtagtacagggagcatgatgagaagagagcctttcttgcaactagctagctcgggacttgtagcatgaaagcagctacagataatatgtaaatgaataaatatgattgtgtctcacgttgaaatttaaatttcacataatttttacatcatgaaatattaatcttcttttgattcttttaaatcattgataaagtataaaaacca

SEQ ID NO: 249986 - DNA, 524 bp, Homo sapiens
tccctcttataacaacccttgtaattatatcagatatacccagataactcagaatatcctccccatctcaaaatcctgaatttgatcatagctgcaatgtcccttttatataaagtatatatataaagtaatatacaggttccataaattaggacatggacacctttcagatatccagcttaccacacacttgaagttcacttttcttttcttgttttaacataataggtatgtgctgataatgaaacgtaaatatagatgacattgaataatatgcattttgaaatgctgtcaagttatagatacaacatggcaacttgtagtacagggagcatgatgagaagagagcctttcttgcaactagytagctcgggacttgtagcatgaaagcagctacagataatatgtaaatgaataaatatgattgtgtctcacgttgaaatttaaatttcacataatttttacatcatgaaatattaatcttcttttgattcttttaaatcattgataaagtataaaaacca

SEQ ID NO: 249987 - DNA, 597 bp, Homo sapiens
ttgcaaagtaaagtatttatgatcttgggcttttttatggtattgtttcaatatttttgtaacatttgtatttcttgctgatgtttttggcattaaaaatcactcaagctgtgctgaaatataatggtattcactgaaccataccatggaaggataattcagctcagttaggttattctagctcatcatgtacaccaaggattgaaagaaattgtagaagactctcagttctcttcataggcagcattgagtcttttttttcccctctctaataacttgacataggaaaaccttcacttgaatacagaaatacctggtttccagtctttggagcaaaccaaaataacaacacaatggcccaaggtawgaggaagcaaagtactggtgaacagttactctagatcacaaatttcctttacctgtgaccagacaaaaattatacctcaacaaataatgagctttcattatcaatttcaacacatccctatgcaagtgatatagtgctaaacttcattagactagggaaatatgctattacagatacaaaccagagatgatttagttccagatatttaagttgtccctgactatggatat

SEQ ID NO: 249988 - DNA, 538 bp, Homo sapiens
tcagggtagtatgtagattagttttatagggcctttctatgggaaagaaagggtttcagcagggcatgtataggaggggcttctctggtgcttgcatagtggccttacatgtttcttcatacatctcatgtaacataatgaaattttaaatccccatccttgggtatgatctttagcattaaaatgagggaggggtaactttaagttgaactgcgcagacrggaccctggagcagtccctaacccgctaaaccagggacttgaggttaatggcttcttgggtcttttgttgctgattggctggaagttgggtaagctacagcttgggtaagaggcttgttccttctcctctaaaccacagcaaaacaggaaaccagacagcctgcctgtctcaaaatgacccagtgtaggcaaatcaggttctccctctgaggaatgtgccacttttagcagatggacacagaggtaaaacttagggccatgaagcatcactactttattcctgctaaggggttccccttccttcccagggcctagag

SEQ ID NO: 249989 - DNA, 538 bp, Homo sapiens
tcagggtagtatgtagattagttttatagggcctttctatgggaaagaaagggtttcagcagggcatgtataggaggggcttctctggtgcttgcatagtggccttacatgtttcttcatacatctcatgtaacataatgaaattttaaatccccatccttgggtatgatctttagcattaaaatgagggaggggtaactttaagttgaactgcgcagacaggaccctggagcagtccctaacccgctaaaccagggacttgaggttaatggcttcttgggtcttttgttgctgattggctggaagttgggtaagctacagcttgggtaagaggcttgttcyttctcctctaaaccacagcaaaacaggaaaccagacagcctgcctgtctcaaaatgacccagtgtaggcaaatcaggttctccctctgaggaatgtgccacttttagcagatggacacagaggtaaaacttagggccatgaagcatcactactttattcctgctaaggggttccccttccttcccagggcctagag

SEQ ID NO: 249990 - DNA, 538 bp, Homo sapiens
tcagggtagtatgtagattagttttatagggcctttctatgggaaagaaagggtttcagcagggcatgtataggaggggcttctctggtgcttgcatagtggccttacatgtttcttcatacatctcatgtaacataatgaaattttaaatccccatccttgggtatgatctttagcattaaaatgagggaggggtaactttaagttgaactgcgcagacaggaccctggagcagtccctaacccgctaaaccagggacttgaggttaatggcttcttgggtcttttgttgctgattggctggaagttgggtaagctacagcttgggtaagaggcttgttccttctcctctaaaccacagcaaaacaggaaaccagacagcctgcctgtctcaaaatgacccagtstaggcaaatcaggttctccctctgaggaatgtgccacttttagcagatggacacagaggtaaaacttagggccatgaagcatcactactttattcctgctaaggggttccccttccttcccagggcctagag

SEQ ID NO: 249991 - DNA, 497 bp, Homo sapiens
agggaactctcctgtttcagcagggtgtggagggawgggggaaggagcgctcataagtctcctcccaaagcctagcaatggagtgggatgttggtatgtatatttttagagagaaaaacagcttttaaattatattcatttaagaaaagtaaaatactctaatgtagaggcaaaacaaagaaatatccttttacaggaaatgggggctgggggacaagtgaaaagaaggaatagaaagatgctaaaagcacatacctaaatcatgttaactctatctttgtgtttctacacaatttctggaatgacaggtacatgaacagcaatagcagtaatattcacaatagtaatagcaaatattaatactatgatttgggtcgtattctatttacattacaaaccattatccccaactacacagatgacaaaactgaggcatgaaagtagattaactgtccacaagcctgcctctttaacaaattaacttccccatagctaat

SEQ ID NO: 249992 - DNA, 497 bp, Homo sapiens
agggaactctcctgtttcagcagggtgtggagggatgggggaaggagcgctcataagtctcctcccaaagcctagcaatggagtgggatgttggtatgtatatttttagagagaaaaacagcttttaaattatattcatttaagaaaagtaaaatactctaatgtagaggcaaaacaaagaaatatccttttacaggaaatgggggctgggggacaagtgaaaagaaggaatagaaagatgctaaaagcacatacctaaatcatgttaactctatctttgtgtttctacacaatttctggaatgacaggtacatgaayagcaatagcagtaatattcacaatagtaatagcaaatattaatactatgatttgggtcgtattctatttacattacaaaccattatccccaactacacagatgacaaaactgaggcatgaaagtagattaactgtccacaagcctgcctctttaacaaattaacttccccatagctaat

SEQ ID NO: 249993 - DNA, 497 bp, Homo sapiens
agggaactctcctgtttcagcagggtgtggagggatgggggaaggagcgctcataagtctcctcccaaagcctagcaatggagtgggatgttggtatgtatatttttagagagaaaaacagcttttaaattatattcatttaagaaaagtaaaatactctaatgtagaggcaaaacaaagaaatatccttttacaggaaatgggggctgggggacaagtgaaaagaaggaatagaaagatgctaaaagcacatacctaaatcatgttaactctatctttgtgtttctacacaatttctggaatgacaggtacatgaacagcaatagcagtaatattcacaatagtaatagcaaatattaatactatgatttgggtcgtattctatttayattacaaaccattatccccaactacacagatgacaaaactgaggcatgaaagtagattaactgtccacaagcctgcctctttaacaaattaacttccccatagctaat

SEQ ID NO: 249994 - DNA, 548 bp, Homo sapiens
ttctgggcttctaatagatgttttttttctagggcaggcacagtggctcatgcctgtaatcccagcactttgtgaggctgaggtgggcagatcacttgagcttaggagttccagaccagcctgggcaatatagtgaaaccccatctctacaaaaacatacaaaaattagttggacatggtggcaggcacctgtagtcctagctaagtgagagactgaggtgggaggatcacttgagcccagtaggtggaggttgcagtgagccaagatggtgccactgcactccagcctgggcataaaaattagtccctgtctcaaagaaaaacaaacaaacaaaaggaacaatggtttttttctaaayttttttatagaatgtcatatcaaagaaaaaactataaattgtatatgaacactactattttaatataccatgtatcataaaatatttgaaatgttttagaggatataattaaactattgaaatagagattatagaataaaaatgacaaataagatttaactttatattatgtattattggtataaaatg

SEQ ID NO: 249995 - DNA, 614 bp, Homo sapiens
ggaagttatcttgagtgaattttctgcacttcttttttgctctctaataccttagcatattccttaaaatatcaaacatgggtgctcagacattcagcaaggcagacaggggaggagaattggtcctgatctgtgcattaaaaatagcttacagccactatttctctttcatccatccattcaacaaacactgattaaagatgttgtccataaaaaaaaaaaggctgtcaagtcagagagacatgagtttgtacataagttctactataagactgggtaaayttgagccactttaaaaactcctcccagcctttatgcctcacctgtaaagtggaaataataatagaatctatttcctggggttactaagagattaaatgaatactgggggattaaagtgctctgtgcaggcctgtgtgaataaacagaagctcctatcattacaggcactttccctactgtatactttagagaacacaaagatgaattagatgaggctattgtctaaacaggaggaagcccatagtctaatggaagacacatatcattcaggttgtatatcacagaaattcagagaaagcatacattatagccgggaagctagaaatcataga

SEQ ID NO: 249996 - DNA, 590 bp, Homo sapiens
cttgaaactcttctacttgatctaatgtattactaaagcttttgagtgcattttgtatttctttcaataaattcttcagttcyagaatttctgtttgggtcttttttatgatatctatcactttggtaaagttctaattcatatcgaattaaaaaatatttggattattatctatgttctcatgtattttgttgaactttttaatgtcattattttgaattctttttctgggattttataaatttctttttcattggaatttgttgctaaatgattattatgtttcttttgaggtctcataattctttgctattccctgtttcttttattgatatctggtgtaacaaccactttttaaaaaaatttttcaaatttgcttttttagggaagagctttttcctgaagatgtatttatattgttggttgggtaggacatttcaggtggtctattctttaagcctcagtggtggcaatggcagactggacatgtctgtccttgcatcccagagcagtgtacgctagcagcagtttaggtccagtcaggtcagttcttgggtttccatgcagcttgctcaagtaccagcagtagt

SEQ ID NO: 249997 - DNA, 647 bp, Homo sapiens
gcactgtcattcactatgagtacattttaattcataatttacaggctgccttttattaacccaactttccaaccatccacagtttgaagacgtatattgacagctctaagctagctttggagtgccaaatctagacttcatatttcagacagtggttgctgtacaatgaataacatttcaagctaatgcggtctttggtgaagctttttacamacatactgtgtgcacacacatatacacatttgtaaagaaatctgccattggccatttggaaagccaccttgccctttattctagttgattgggaatcaagactattaaattcattcattagagatgtagaggagatgttgaaattatatcaactttaaaattgcaggaaaattgaaattttattaattttagctctgaagaatgaaattatgcatataccatttgtgtgcattatttgatatttaggtacacatattttaaatagttatcaaagtagaagtctacttaaaagtatcagatacacaaaatactttaaagtggattatgataaaaggtactaataaaagatgtttataaaatggaaaataaattggtaaagaccctatatataaagatatatttcaaaaatcttaattaatatagttgttgagctt

SEQ ID NO: 249998 - DNA, 349 bp, Homo sapiens
taaactctttactccctgttggctcaaccagtccctagactagaagttacttaatattattgcataagattgaaagggatgcctaagtttaaagtgatgagcataaaakgcctacatagccaactacattctctcataatccaattctaatgcttaaaatgtccataattaagaaaaactaatgacggtatgtttgggtggatttttaaccgggtaaatcaccataattagagtgtggattagagcactgatgtcaaacaggtaagcattttctagtatctggccgcacagccttgtcctcaattgagtcccagtaaatatttttacgtttgagttggatatgggcatt

SEQ ID NO: 249999 - DNA, 582 bp, Homo sapiens
gcaaatcattcccttaaatgcactgttccaaccaaactgtctctctactcaaataccttcaaagtctctcattccscacaagaaagctctggctcactagctgggcatttaaggccttctgaaaaaaagatctggaatacttttctagacttcattcccatcttttttgtctgaatcaggagaggccacgttatgttaagtcccttagctttctgttgatgtgtaacaaatgaccaccaacttatcagcttaaaataacatatatttattatcttgcagcttctgtgggttgagattatgggcataatttaagtgggtcctctgttcagggtctcacagactaggatctagatgtagggaactgccttcctttctgaaattcagggctgtcttccaaacttacataatggctgtaagcaaaattcaattgcttgccattgtaggtgagggacattcttttctgtggctatcagccgcaggttgcttttagctcccaatggacccctacaattcctctacctctggctcactcgcaagccttatcataacatggaagcctactttttcaaagccagtaggaga

SEQ ID NO: 250000 - DNA, 582 bp, Homo sapiens
gcaaatcattcccttaaatgcactgttccaaccaaactgtctctctactcaaataccttcaaagtctctcattccccacaagaaagctctggctcactagctgggcatttaaggccttctgaaaaaaagatctggaatacttttctagacttcattcccatcttttttgtctgaatcaggagaggccacgttatgttaagtcccttagctttctgttgmtgtgtaacaaatgaccaccaacttatcagcttaaaataacatatatttattatcttgcagcttctgtgggttgagattatgggcataatttaagtgggtcctctgttcagggtctcacagactaggatctagatgtagggaactgccttcctttctgaaattcagggctgtcttccaaacttacataatggctgtaagcaaaattcaattgcttgccattgtaggtgagggacattcttttctgtggctatcagccgcaggttgcttttagctcccaatggacccctacaattcctctacctctggctcactcgcaagccttatcataacatggaagcctactttttcaaagccagtaggaga

SEQ ID NO: 250001 - DNA, 582 bp, Homo sapiens
gcaaatcattcccttaaatgcactgttccaaccaaactgtctctctactcaaataccttcaaagtctctcattccccacaagaaagctctggctcactagctgggcatttaaggccttctgaaaaaaagatctggaatacttttctagacttcattcccatcttttttgtctgaatcaggagaggccacgttatgttaagtcccttagctttctgttgatgtgtaacaaatgaccaccaacttatcagcttaaaataacatakatttattatcttgcagcttctgtgggttgagattatgggcataatttaagtgggtcctctgttcagggtctcacagactaggatctagatgtagggaactgccttcctttctgaaattcagggctgtcttccaaacttacataatggctgtaagcaaaattcaattgcttgccattgtaggtgagggacattcttttctgtggctatcagccgcaggttgcttttagctcccaatggacccctacaattcctctacctctggctcactcgcaagccttatcataacatggaagcctactttttcaaagccagtaggaga

SEQ ID NO: 250002 - DNA, 606 bp, Homo sapiens
ctcaattctctgttctctgtttttgaagaatgagtgtacctttacaattgtaagttttacattatagaattattattcttatggaactaggcatagggccagttctaaagacattctatacaggcaatttcatttttcctttcctccctccctctctctcttttttctttcttccatccttcctacaaatacacattgactctctactctggaccagacactgttctatccagaccctggagattcaggagagaattacatacaaattcctagaactcatagaagttaaattcttttttttttttttccaacttttattttaagttgtaggatacatgtgcaagatgtgcagatttgttacataggcaaacatgtgctatggtggttttctgtgaagatcattccttcacctaggtattaagcccagcatccattagctattctttttgatgctctgcctcstacccacttcaacctctgacaggtcccagtgtgtgttgtttcccacacgtgttcatgtgttctcatcatttccctcccacttataagtgagaatatgcagtattttgtgttctgtttctgtagtagtttgctgagaataatggc

SEQ ID NO: 250003 - DNA, 645 bp, Homo sapiens
ttgattaccttagacaaatggatgaattcctgaacactttcaatacaccaagactgaatcatgaagaaatgcaaaatctaagcaaaccaataacaaatagggagattgaatcagttattaaaaacctctcaagaaagaaaagcccagaacctgatggcttcactgctgaattttactaaactttttttttttaatttcatagcaatccttctcagtctcaggaaggaaggcttcmaaactcatgagactaacattaccttgacatgaaagtcaggaaaagtcagtacgaaaaaagaaaacaggccaatatctctgataaatatccaggcaaaaacactcaacaaaatattagcaaactgagttcaacaacacattgaaaagatcacacaccataattaagtgagatttatccctgggatgcaaggatggttcaatatatgcacatcaatgaatgtgatacttgacattaacaaaatgaaagatataaatcatggaatcatctaaataaatgcagaaaaagcatttgacaaaattcaatatcctttcatgataaaaactctcaataaattaggtttagaaaggatgtacttcaacacaataaagaatatatgacaatcccttggctaacatcatatacaatgatga

SEQ ID NO: 250004 - DNA, 650 bp, Homo sapiens
gactaatattcaaaatgtataaggaacacctacaatttaatagcaaataaataaataaataaataacacaattttttaaagggtaaagaacctaaatagatatttttccaaataagacatacaatggccaacaggtgtatgaaaaggtgctcaacaccactaaccatgaaggaagggcaaatcaagcctgttatgagatctctcctcatatctgttagggtggctattaccaaatgtcaaaagataacaagtgttagtaagaatgtggaaaaaagagaacccttgaacattggtgggaatgtaaattggtactgccattttggaaaataatatgaagattcctcaaaaagttaaaaataaaactacaatatgatcaatcaatgccacttctggatatacatccaaagaaaatgaagccagtaatctatactcccatgtttattgctgtatcatttacagcagccaagatatggaaaaaacyaaagtatccattgacagatgaatggataaagaaaatgtagtacacatacatatacatatatgggatattgggatattatatttcatgtataaatattatttcaccacacaatgaaatattattcagcattataaaagaaggcaatactaccattttatgacaacataaa

SEQ ID NO: 250005 - DNA, 596 bp, Homo sapiens
tggtacaggcttggacaattacatcttgatggaaatattgaatgggcttttgtgggtgggggcaaaatttgattctcaaagccagggtattacccatgaaagtccatggtgttttttacagtggtggctacctgccgttctttctctctttctttttgatctactgtctacccagcccaggcctcagctttatgggaacccattctagcataytggctccttgactctgcaatgagtctgtttattgctcactcagctttcagttgtgagatatgagattcaagctacaaagatctaatccaaccctctatttagagatggggaagcagaggttttaggaagtggaaggaacttgcctatgtcccaccacaaggttatcaatctaaaggagagatagcaacacaacatgccccactcctaacaaagttaaatatcatagtccccaagccaagctctctagaaaatatcaaagaggatattacctaacaggtaatacccgcattccttcatagtctttttcagagggttatagcatgtggaagcaattctctggatgacctcattaccaggaaagttaatccggccaccaattcaac

SEQ ID NO: 250006 - DNA, 596 bp, Homo sapiens
tggtacaggcttggacaattacatcttgatggaaatattgaatgggcttttgtgggtgggggcaaaatttgattctcaaagccagggtattacccatgaaagtccatggtgttttttacagtggtggctacctgccgttctttctctctttctttttgatctactgtctacccagcccaggcctcagctttatgggaacccattctagcatactggctccttgactctgcaatgagtctgtttattgctcactcagctttcarttgtgagatatgagattcaagctacaaagatctaatccaaccctctatttagagatggggaagcagaggttttaggaagtggaaggaacttgcctatgtcccaccacaaggttatcaatctaaaggagagatagcaacacaacatgccccactcctaacaaagttaaatatcatagtccccaagccaagctctctagaaaatatcaaagaggatattacctaacaggtaatacccgcattccttcatagtctttttcagagggttatagcatgtggaagcaattctctggatgacctcattaccaggaaagttaatccggccaccaattcaac

SEQ ID NO: 250007 - DNA, 596 bp, Homo sapiens
tggtacaggcttggacaattacatcttgatggaaatattgaatgggcttttgtgggtgggggcaaaatttgattctcaaagccagggtattacccatgaaagtccatggtgttttttacagtggtggctacctgccgttctttctctctttctttttgatctactgtctacccagcccaggcctcagctttatgggaacccattctagcatactggctccttgactctgcaatgagtctgtttattgctcactcagctttcagttgtgagatatgagattcaagctacaaagatctaatccaaccctctatttagagatggggaagcagaggttttaggaagtggaaggaacttgcctatgtcccaccacaaggttatcaatctaaaggagagatagcaacacaacatgccccactcctaacaaagttaaatatcatagtcmccaagccaagctctctagaaaatatcaaagaggatattacctaacaggtaatacccgcattccttcatagtctttttcagagggttatagcatgtggaagcaattctctggatgacctcattaccaggaaagttaatccggccaccaattcaac

SEQ ID NO: 250008 - DNA, 621 bp, Homo sapiens
aataaattcctagtggaaaaattgctgggtcaaagatgatgctcatttgaaagcttttaatatatgctgctgattgtaaaaggcaccaaattatattctcagtagcagagtatgggagattttgattccctacatcctacgcattatccttttttctactccttcgctccttagacaaaattatacccttgtcctgactgagcctttggcacaaaatgaggattctagagaaggagataactaaaattggaagaagaaacaaatgaacacacatagacacatacacacaaactactgcatttttcttcattaaccttgtaaatgaaattcttcagcattgatgaaaatatattttcttctgtctgactcaatttagcctgtaaagcattagctaatccttcagactaatgctgccattagcctcttttgagtttaagttgtaccttgtatgacacatataatatacatgttcagtaagatttaacaattattcatcaagtccatgctaaatgtcaggctatmcccctggcactggacaatactagagagaaaaatgaatatgacattgccccttaccattgtgggcttacaacttagtgaaggattgtggctataaccaaa

SEQ ID NO: 250009 - DNA, 232 bp, Homo sapiens
ttttcttccacacaaggattgagaattgaagcaggacaccaggcagatgagaacccttgagttcttaccaaaaacaagacgaggaatggaggagaacacagtaagctatcaataacctcaaaagtatagacatcaaacaccccgaaaatagagtccagagctgtttcayaactggctttaatgttgctgcccttggaccctttcctgtctgcccttctggactcagtttctt

SEQ ID NO: 250010 - DNA, 629 bp, Homo sapiens
tttcccaattatacccctccctcattcctcaacacaaagctgtgtacaccacagccaaaaatcaccactctaccttcaactattggaaacttgaaagaacaaagtctttagcggtggcagactctctctctctacctgctaattcactataagagtccacacgtttcaactcggttttctctcccagtcctgcatgctgggaagccaattcctagcaatgaactcatcacagctgagtgagtccacagagcactgctctcctacaaagggtctgaagcattcagatttgctttttagtagttcaactgaacatctcccacactctaacacaatccctccccagagaacccctgacaaagatgtaaaatcggaagaacacatcaatgagttggaccagtgacacaccagaaagtcagtaatagaacaaatctcctttctgtcagtctgcagacttaattacagcaccaccattgctcattatccawcctcctttgcagtctgtgtaagcagaaagatcgcagaacacttaacaaatgcaggggttacagggctaggagagatatacccttgggactctatgaagtcagttttaagcagtggtgaacataaatccagcttgtagagttatt

SEQ ID NO: 250011 - DNA, 627 bp, Homo sapiens
ttatttgatgaaagaaagaatgagtgatttttcttctccttttaaatttcccaagttttaaatgcaatgcatatatgtgactttctgaccccaatgctgaggaagggcacagctttagttattaatttttagaggacatgttttttaaatcaattttttacatctcttttaccaatatctaaagctaacatagccatgccacatttttcctctcttagcttctgggtgctatctttttactaagtagcccctgagtagagtgataatgtaattcattgtctaaatctaggtagttctgagagggaagcaggtgmtcttagtaatcatgcagacagcaggcacaaactaggactgtcttagaaaagcaaggacttgtagccaacttcccattgagagtattacttaactaggtaatgattggggtgggggtaccttttccaaatatctaccaggtgcggattcagggcagagcctactgcctagctgctagaacctacagctgagcttgctactatcctcaagggcagctactgtttcagaaagaattttttttttttttttagtctggctttctgccttgctctatgtttatggatcatgtggattttcctcaaaatctcacaaggt

SEQ ID NO: 250012 - DNA, 627 bp, Homo sapiens
ttatttgatgaaagaaagaatgagtgatttttcttctccttttaaatttcccaagttttaaatgcaatgcatatatgtgactttctgaccccaatgctgaggaagggcacagctttagttattaatttttagaggacatgttttttaaatcaattttttacatctcttttaccaatatctaaagctaacatagccatgccacatttttcctctcttagcttctgggtgctatctttttactaagtagcccctgagtagagtgataatgtaattcattgtctaaatctaggtagttctgagagggaagcaggtgatcttagtaatyatgcagacagcaggcacaaactaggactgtcttagaaaagcaaggacttgtagccaacttcccattgagagtattacttaactaggtaatgattggggtgggggtaccttttccaaatatctaccaggtgcggattcagggcagagcctactgcctagctgctagaacctacagctgagcttgctactatcctcaagggcagctactgtttcagaaagaattttttttttttttttagtctggctttctgccttgctctatgtttatggatcatgtggattttcctcaaaatctcacaaggt

SEQ ID NO: 250013 - DNA, 647 bp, Homo sapiens
tttgttttttcttcaaaagtagaggttttgtttgggtgcataagggaaatagagctggacaggcccacgactgcctgcttggaaataatgcacttttgaggagtggaattgatataggacttaagaaattatttaggcagatagtgacggtatgggagcccctggtaaggttttccttttaacgaaaagcagcccccaaataattttcttttctaacaaaaagcagcctgtaaaatcgagctgcaagcatagacaagcaagctggaagcttgcgcaggtgaatgccagcagttgtgccaataagaraagactacctgggactaggtgtgttcaaaatggtggcttcatcttcccttctctttgccagtcacatgtgcagtgaggaacaggcaacatggtgctggccgggcaaagaccccatttgcataataaggttaggtggggcagtcagtttccccacattttatgtaaacgtcacacctggtccaacgaatctttgggccctatgtaaatcagacactgcctcctcaagcctgtctataaaatctggtgcactccgctgtgggccagaattcccacttgggcgcccctttctctctcgcaggagagagagatattcttctttctctttcttttgcttgttaaac

SEQ ID NO: 250014 - DNA, 584 bp, Homo sapiens
tgcaggccccagtgacaagatcaacaagcatgtcctcacatcagtggacaaatgggctaatgagatagtcatagccctgacccagaactgtgggtgttcattttgtgctcagacttgagtaccccagtcaaggtgaaaggatcagaggggtgtgagatctggagctgyctcagtgatgagttaacccctggctgagcaggcttctgggccataaatctggatgtgcctgtgtcagaagagccagccacttggctctctgtacctaggggtgctgcccagcatggctagaagtagctctcagaggccctgccagggacagggtctggaagtaccaccgcatggaggaagtggggggccaccattgccaacaagggcacagggctggggcaaggccctgcctcactgtactcactctccctccatctctgcccagcctcccagagccagggaagggacacagaagcacaaatgctttctcagcaagccttctatgtgattctcacaggcacagagaccatcgggacagaaaatcatccccgcttcccagatgaaaaaaccgagcctcaggcagggccatgcttgaa

SEQ ID NO: 250015 - DNA, 481 bp, Homo sapiens
ctaacataaaaccatgtccaggaaacaaatatatgagaagagttcatttgtccacaatgataaaatctggcattttttaaaaaaacttccctgtacagacctccctctgagaatcacagctcccttcatccctctcaccctgagtttgctcctctgggargcgagatggctgaagtagctgaatttcaaggattataacattccaaacctctagaacccatcttctggaaactcaaaatgtatgatttaaaattttatttttacttatttttggcctgaggggaagaaacctcagaaggagaaaatcacctgagaaaaagcaaatatgctgagcagtagggtctgggatgggcccgtgctcacagatgagcggagggccacataggattggaatgagccaagttgcacttgctttggctcagctataggtgttgctggactcttgtgtgaaggaagagcctgtgggccagtgttgtccttg

SEQ ID NO: 250016 - DNA, 555 bp, Homo sapiens
  misc_feature (1)...(555): n = A,T,C or G
gggaaaatacaactntgccttgggatattgagatttttctagaaatgcaaaggtctgcagctccatctctcatcctattgcaccctgacttttccctggcattacctttcgtcttagactctgtaaataaaggawcatacgctaggatgaaaagtcttattctgaaaaaattattattattttagggcccattgaaagaaaagagtaaagaaggattgcttcaagagccaaaccctgattcagctctgacagactacctttcttatcttaaatatcctttccccagtgattcagagcatttactctctttatagcactactaattaggaagttactaataagaaaaactggcaaattttacgactgcaatttctaccacccatttgctgtatcccaggggactgtgtgtccactttaaatagaaaaggctaaagcaattgttaggaagtttcaaagagaaacctcctccccagcatacacttagattaaaatcattttggacccaaatgatctcagtacctgcttcagggttccaagtcaatgtccaggtgtaag

SEQ ID NO: 250017 - DNA, 589 bp, Homo sapiens
ccactccctgccctcaagtaatttacagtgccataggtgagagacatgtaaaacaaatcataagacatcttatctggtaccaaatctgtagattttcccatccaacctttggatatttgttgtctagaatgggattcctacrtgtggaaaaggtaatccattacaattttgcaaaaaggacctcaggacttaaagagaggcaaagctaatcatttaaaccaatgctggatttaaaaggcagcattaaacaagcatgcaaggacataacctcaatgagggcaaggataaaatctgtcttgtttgccatggtatccctaggcattagcatggtgcttggcatatagtgccttgtgttgggaatgtctgtcagttggttggttgtttggatggatggctgcttggatgggtagctggatgaagagatggacagtcaggtggatatagataaaaggatacgacgcctgccaggtacccaagcattaagggccgggccatgtctctctgctctgtgagtgagccaaaacagctaaggcagagttgagtatgccctgggagaattctatgggatacaatgttgctttcaaaagta

SEQ ID NO: 250018 - DNA, 589 bp, Homo sapiens
ccactccctgccctcaagtaatttacagtgccataggtgagagacatgtaaaacaaatcataagacatcttatctggtaccaaatctgtagattttcccatccaacctttggatatttgttgtctagaatgggattcctacgtgtggaaaaggtaatccattacaattttgcaaaaaggacctcaggacttaaagagaggcaaagctaatcatttaaaccaatgctggatttaaaaggcagcattaaacaagcatgcaaggayataacctcaatgagggcaaggataaaatctgtcttgtttgccatggtatccctaggcattagcatggtgcttggcatatagtgccttgtgttgggaatgtctgtcagttggttggttgtttggatggatggctgcttggatgggtagctggatgaagagatggacagtcaggtggatatagataaaaggatacgacgcctgccaggtacccaagcattaagggccgggccatgtctctctgctctgtgagtgagccaaaacagctaaggcagagttgagtatgccctgggagaattctatgggatacaatgttgctttcaaaagta

SEQ ID NO: 250019 - DNA, 589 bp, Homo sapiens
ccactccctgccctcaagtaatttacagtgccataggtgagagacatgtaaaacaaatcataagacatcttatctggtaccaaatctgtagattttcccatccaacctttggatatttgttgtctagaatgggattcctacgtgtggaaaaggtaatccattacaattttgcaaaaaggacctcaggacttaaagagaggcaaagctaatcatttaaaccaatgctggatttaaaaggcagcattaaacaagcatgcaaggacataacctcaatgagggcaaggataaaatctgtcttgtttgccatggtatccctaggcattagcatggtgcttggcatatagtgccttgtgttgggaatgtctgtcagttggttggttgtttggatggatggctgcttggatgggtagctggatgaagagatggacagtcagrtggatatagataaaaggatacgacgcctgccaggtacccaagcattaagggccgggccatgtctctctgctctgtgagtgagccaaaacagctaaggcagagttgagtatgccctgggagaattctatgggatacaatgttgctttcaaaagta

SEQ ID NO: 250020 - DNA, 601 bp, Homo sapiens
gattatataaaatgcatgtgtaatttggcaagattgataaactccttaccaaagactttttatatatttctttgaaacttgtttgagagcagttagatagatttctaaatgtaagtaattaaaattgtatagtattgagttattgaccaatccttggctattagtcaagctaaaaaattctacaatcagggctcagtgtgctgaagcctggtaaaataatagtatttgtgttcagtgaggcaagtggccacaattaagcagttcacttgacaaatgagagggtacactttattttgcacttaattgaattgttgtacatgctcagtcaccattgtctcccggcccttcattttggtttctggtcattggagcttgtgyatttgttaaaggttgagcaattaagtctgctttcaccattggtttctgagtgcagccagaaatgtctggctcataagccagggcttagtgaatgctgttaatatccctcacgacagattattaattatctgaacaaaaattttgataaacaaattagaatcctgtcaaggaatgatatgaaatagctttgaatagggaaaactccctgggttttatatcactc

SEQ ID NO: 250021 - DNA, 620 bp, Homo sapiens
cctgagtggagactggacagtagactggacagggggaagagcagggaatccagctagaggctcttgcagaaatccaggggagagatgatggtggtttggactagtatggaagtggtggaggtggtgagaagtagttggattctggatatgttttaaaagtaaatccaacagcattttctgacacattagatgctgagtgagaaagaggagtcagggatgactttgaggcctttggcctgaggagctggaaggatggcatgaccacttactaagctctgagccagaaatggaaactgtggagtgaccacttaggaaatgcatttcttaccctcgatctggatctctggcgtgggagactcatatccacatggtgcttccacctgacaatgctgtcacacggacaggaggcattgaggggttggagtagagcatttttgggtctctgtgccattcacagccacctgaaaatgggtgtctaagagcataccactggccttcagatttggtgccaccgtgccaaaaatgtactttytggaaaaaacataccagtttgcttttcagttcttctttctgctagtgtctaacctgagtgaagcattcttgagattgatgattagagt

SEQ ID NO: 250022 - DNA, 528 bp, Homo sapiens
acaatcagctaaatgtctaaacattagattgagatgttgtttactataaaagtgaaccaaattttaaattgtcaggctatagttgtggcactaatgattgacttcataaatttaaatttgcacacatgaaataaaagaagaatacagcatagcaaaaaaaaaaaaaaaaaaaaaaaaaaagagccattagagtaactctaaaatgttgggttcacaggttaaaaaggactaagagagcaccataaattaaagataaggataaagattaggggagatgtgagtgccagcagttagtgaactcagtttgaaacaatgtcaggactttcagatggagatgttcacaactaaggatataagatttaagacagatcagtgcgggatactgaatctgagagcatcgcttttggggagcaattgaaacaagaagaacaggtgagctctccgggtgtgagaaagaacagaaaacaggctacawgctcggatgacttccatcaacagcagcaatgggaagccgaggagggaaaaaga

SEQ ID NO: 250023 - DNA, 629 bp, Homo sapiens
gctaatccagtgagtataatgcaaacatcccaaatccaaaacaacccaaaatccaaaactcttctggtcccaagaattttggacaagggatactcaacctgtattcagcagtaataatccacgtggataataaccataaaaaggttccaaacgtagctactgtcatgaacaaatttgatgtyccattacagttctgtacattttttccgtttagcaattcacccatgtggttaagaaattacggagagtatctcttatctccaaactttctggtacaaacagagcatactgggttccggaacagaaatgagccattccagccctttatactaaaagcaaattatgtaactagaatgaaattagggggtccaagtgactggatatctccctctatttccccttatcttcaacaatcaactcagatgtgatgatgtaagtcaagcatttcctcatcattactaagaaacattgtattttattactttgcttataaaggaactgatcttttgaagtaattttttattttaacttattcaagaatgatggtgaacacctctcaagtctttaccaacaaactgcagggaaggaacccactgcttcagtaatttaatcccactctggcaccttcc

SEQ ID NO: 250024 - DNA, 531 bp, Homo sapiens
ggaggttgaggctgcagtgagcagtgattgcgccactgcactccagccaagctgacagggcgagactccagctcaaaaaaaaagaaaaaaaaaagaaagaaaagaaaagagcatcagtaaattctgggacaaattcaaatgrtcttcccaagtacaagaaacatgaaaactatattaggacatgatataatcaatttgatccattcattgataaagagaaaatcacaaaagaagctgggagtgaggaggaagacatgttacctacagagaaacaaagatacgaatgatggaacattgttaacgtgctgagagaaaaaagatctgtcgaactataattctgtactcagcaaatatgtcttaaaaaatgaaggtaaagactttctcagacatacaaaagctgaaataatttatcaccaacacttgaacaatgtaagaattgttaaagtaaaagaagtgaaaatatggatgtctgcaaaagcatgaacattttaatgtgcaagatggaacacctctggtgttccagaggtgaat

SEQ ID NO: 250025 - DNA, 553 bp, Homo sapiens
ttctgaacttacttccttatctttaaatggggcatgtattcttacatcagagtactgtgatgaagattaaattaaatacatctaaaacttctggcattagcaaatttcaacaaatatctgtcctttttcctttctgtcatcttctttgttctcccacccttaatgagttcctgcctcctctgcctccctgccttctccattatggctttcccacaccaccattctccttktacctttatctgtatctagtgcctttatctgtatccttgtgactttatctgtatctttatcttgtggtaacctgtaaggatcatgcactttggcatttcacttctagttttccaaagtacttcagcagactattgctaaccagagaaaaagtttccactgttctaaacaatgtaagaaagaaaatatgagtttttttcagaaagcttgttttttccatttaaaatacatgaattacatcacaaaacaccgtctctattaaaaatacaaaaattagctgagcttggtggcaatcatgcctgtaatcctggctacttgggtgact

SEQ ID NO: 250026 - DNA, 572 bp, Homo sapiens
ttatgaagcttctgagatgagcaagcctgttttgataacataaaattggcaggaacttgagcttgaaatttgaatagagaccaaactgagtatctgtacaagtttgaagaggcacagatgattttatgcaaattgtttgtttatggaatatttctcctgggcacatctgytggatcacatgggctgaaagtggaaggagagatagaagctcttaagttaaagggactattgagttgctttttttggtttgtttgtttttttccagtagttagaaataaaaagagtaatatctaacatttatggaacactgttgttgcaggacttttccttagttcagctaaagatggggtccttgtcccatggccacaaaagtttaggcttgtggatggtttaaagggtgagtaaagcagggttttattgagtgaaaagagaaaaaaaggtaaacggggactctccacaaagccagaatccctgctagagagcttcccaccttgcagtttgaatcccagtttccacacagccaggctcctcctggctgaaaatggcacggacttctgtgtctccaccccagt

SEQ ID NO: 250027 - DNA, 600 bp, Homo sapiens
tgaatagttacaacagagactgtaaaacgtcaaaaatatttactatcggccgggcatggtggctcatgcctgtaatctcagcactttgggaggctgaggtgggtggatcgcaaggtcaggagtttgagaccagcctggtcagtatggtgaaaccccatctctactaaaaatacaaaaattagccagcactctccagcctgggcaacagagcgagactccgtctcaaaaaaataagtagataaaaatatttactatcgaccaggcgcggtggctcacrcctgtaatcccagcactttgggaagctgaggcaagtggatcatgaggtcaggagttcgagaccagcctgcccaacatggtgagaccccccatctctactaaaaatatgaaattagccaggcgtggtggcgggggcctgtaatcccagctactcgggaggctgaagcaggagaatcacttgaaaccagaaggcagaggttgcagtgagccaagatggcacccactgcactccacgcctgggcaaaagagtgaaaccccgtctcaaaaaaaaaaaaaaaaaaaaaatttactatctggccctttacagaaaaagtaagtttgatg

SEQ ID NO: 250028 - DNA, 589 bp, Homo sapiens
gatacacacaccagggatacaaggacagtttaaaattagaaaacctaaagtaatttgccaaattaatgaagtaaagaagaacaatcatataatcatctcaacagatgcaagtagaaaaagcatttgataaaaattccgtatcactccttgtaaaaactcttgaccagccaggcamagtggctcaagcctgtaatcccagcactttgggaggctgaggcaggtggatcacaaggtcaggagatcaagaccatcctagccaacatagtgaaaccccatctctactaaaaataccaaaattagccgggcatggtggtgggctgctgtagtcccagctactcaggaggctgaggcaggagaatcgcttgaacccaggaacctgggaggcagaggctgcagtgagccaagatcataccactgcactccagcctggacgacagagcaagactctgtctcaaaaaaaacaaaaccaaaaaaacccaaaaaacaattcttgaccaatccagaattgaagggaacttcccaaacctgagaaagggtatctactaaatacctacagcaaacaatatccttgatggcaaaatattttaag

SEQ ID NO: 250029 - DNA, 577 bp, Homo sapiens
caccgccttctcaaccctcctggggaaggcttgggctagacctggcagaaggggttggataggggatgtccctctccaggtctccccgtggagtgagaccctttccccttgagtgccatggtggctccccaggcatcatcaagccacctggcatcttggtgctttgacatgagatccagtagacaccctgtaaaggaggactgtgggcactgcctgctctctyggcatgggcttctccagctgccctgcacttgggcatcttacagcctggaataaatcctcctggcccatgtcccctctgcctggacccagctacagagtgatactgctgatgccagaactgactcttctgttccaacagggagtggtgccctcgggtcccaagagggctgcagactgcaggcctccctgaagtgaagatgcagcaaagtggaagacagcacacggaaaccatgcagcagctccctctggggaagagaaagagggagccacgttgctctataccctgtggacttcttgcaatatgaaccttcatggacctaagaaaaataataataaaggaaaaaatagccaggtg

SEQ ID NO: 250030 - DNA, 577 bp, Homo sapiens
caccgccttctcaaccctcctggggaaggcttgggctagacctggcagaaggggttggataggggatgtccctctccaggtctccccgtggagtgagaccctttccccttgagtgccatggtggctccccaggcatcatcaagccacctggcatcttggtgctttgacatgagatccagtagacaccctgtaaaggaggactgtgggcactgcctgctctctcggcatgggcttctccagctgccctgcacttgggcatcttacagcctggaataaatcctcctggcccatgtcccctctgcctggacccagctacagagtgatactgctgatgccagaactgactcttctgttccaacagggagtggtgccctcgggtcccaagagggctgcagactgcaggcctccctgaagtgaagatgcagcaaagtggaagacagcacacggaaaccatgcagcagctccctctggggaagagaaagagggagccacrttgctctataccctgtggacttcttgcaatatgaaccttcatggacctaagaaaaataataataaaggaaaaaatagccaggtg

SEQ ID NO: 250031 - DNA, 542 bp, Homo sapiens
ttccagttccactataggaaagttttatgatttatgttttgggcaggacttargaatttccactgcaaacactccgaggagttgtgatgtgttttttcacagactgtacttgaagaattagggttttgttttgttttgtttttctttttgaggtggagtctcgccctgtcacccaggctggagtgctggagtgcagtggcgtgatctcagctcactgcaacctcggcctcctgagtaactgggattacaggcgtgcgccaccacacctggctgatttttgtatttttagtagagacggggtttcaccatgttggtcaggctaggagaaattagggtttttaagggaccatagttttgtttctactttatattcttattaagtttatagtttcataggttagtggttctcaaacattttagcctacttagaaaatctattttacatctggatccatatatccttatatacatgtgtgaaacagattcattgcagttacagatatttacttctactcttaactctgattttattttaatcatag

SEQ ID NO: 250032 - DNA, 481 bp, Homo sapiens
gggtgcaggtgcaagagacttattgatgaatgagaacagatctggccctgccctcctggcacttacaagtgaaggggaagcagacactaagctcgtggttacacagagagctaaaaattccaggtaggatacaaggagggggctgggccagcggtggagagggtgccaggctctgcctgggactgggcagggctgcgctggtgcaggtggtccagagcctagcgaagccaggaaggagggagcagcaggcagtgcaaaggtcccctggrtgagggctagaacttgaatgtggagatcaggttgtttggcccagactggcctccactgttgtaactgaggcggggacagggtgatgtcaacaggccctctgatagcaccaagaccccaggagccctggggtcttagcagggtccaaatctgtcctttatcctcctggaggagtcacaggtccacggtgaggaacggcatgagtgcacactac

SEQ ID NO: 250033 - DNA, 481 bp, Homo sapiens
gggtgcaggtgcaagagacttattgatgaatgagaacagatctggccctgccctcctggcacttacaagtgaaggggaagcagacactaagctcgtggttacacagagagctaaaaattccaggtaggatacaaggagggggctgggccagcggtggagagggtgccaggctctgcctgggactgggcagggctgcgctggtgcaggtggtccagagcctagcgaagccaggaaggagggagcagcaggcagtgcaaaggtcccctggatgagggctagaacttgaatgtggagatcaggttgtttggcccagactggcctccactgttgtaactgaggcggggacagggtgatgtcawcaggccctctgatagcaccaagaccccaggagccctggggtcttagcagggtccaaatctgtcctttatcctcctggaggagtcacaggtccacggtgaggaacggcatgagtgcacactac

SEQ ID NO: 250034 - DNA, 580 bp, Homo sapiens
actgtttactgatgctataccataaagttataaaaagaaggtttttctgaacttgggaawcccctgaggagacagtggagggctgcagccagcacagagactggagcgacacagccacaagccaaggaacgcggcagccccaggagctgggagaggccggcgacagattctcctcagagcctctggaggaggctcagccctgaaggtaccttgatctgggccaagtaaaaccgattctggacttgtggtctccagaactgtgagcgaatacatttctgttgttttaaatcagtaagtttgcagtcatttgttacagcagccagtggagacgaacacaccaaccaggacaaaagacggtgatgtcaaggcaagggcttcaccttctggcaagaactaagaattctccagctcttcacagtgattgtttttttttttttctccctcacagattactaagtgcagtatgggacgcacagggacagtttacaaattcgtggatgggaagcgcaaatccttcctgccaaatccccatgcatgcctggtccatgctgccacactccagctcatgctgtgccccagc

SEQ ID NO: 250035 - DNA, 580 bp, Homo sapiens
actgtttactgatgctataccataaagttataaaaagaaggtttttctgaacttgggaatcccctgaggagacagtggagggctgcagccagcacagagactggagcgacacagccacaagccaaggaacrcggcagccccaggagctgggagaggccggcgacagattctcctcagagcctctggaggaggctcagccctgaaggtaccttgatctgggccaagtaaaaccgattctggacttgtggtctccagaactgtgagcgaatacatttctgttgttttaaatcagtaagtttgcagtcatttgttacagcagccagtggagacgaacacaccaaccaggacaaaagacggtgatgtcaaggcaagggcttcaccttctggcaagaactaagaattctccagctcttcacagtgattgtttttttttttttctccctcacagattactaagtgcagtatgggacgcacagggacagtttacaaattcgtggatgggaagcgcaaatccttcctgccaaatccccatgcatgcctggtccatgctgccacactccagctcatgctgtgccccagc

SEQ ID NO: 250036 - DNA, 597 bp, Homo sapiens
gagtggtattactataaaagtagacacatagacaagtggaacagaataaaaagcccagaaataaatccacatatttacagcctattatttttgacaaagctgccaagaacctacattaaggaaagagcagcttctttaataaatggtgctgagaaaactgactaaccatatgctgaagaataaaactgaacctatctctcatcgtatacaaaagtcaactcaacatgaattaaagacttaaatgtcmaacttaaaactataaaactataagaaggaaacaaaaaaactcttcaagacataggtctaggcaaatattttatggctaagatttcagaagtacaggcaacaaaagcaaaaacaaatgggactatattaagctaagaagcttctacatagcaaaggaagcaatcaacagagtaaagagacaacccacagaataagagaaaatgtttgcaggctatacattcaacaagagagtaatatccaaaatgtgtgagaaattccaacaacttaacaggaaaaaatgaataatctggtttaaaagtgggcaaagaattttcatagaatttctcaaagaaaagatatggaaatggccga

SEQ ID NO: 250037 - DNA, 601 bp, Homo sapiens
tcagaaataacactggcatagccaggtttttctaaagcagagaattacacgtaattgttttccactcctgcccacccactcaactacatccagttcactcgaatctccctaatctcctaccagtgagtggtattgtttctcacattctgattgatatttaatatagattttttatcaccctactttcaataactgcatttaataaaggaaaaggagagagagagagagagagacagatgaagacctctgtctaaatgcaggcacacgaagcaagtagaatatttcactcaattaattttcttcaagatattccacaaagttttgggaaattaaaatatgtattatakataagtctccgttttttctcacctttgatgcataaaataaagataagaaacaactagttagattttaaaagatttgtgaatattagaccaaacacaaaggaaggccctcataggagtaagcctctaatcagaactggaccaatttccttttgttttcacttctgaaatgtatctttctagtacttatttctattctctaacaacataaagcagcaatgatatttgccacttgttaatctttatataaagataaa

SEQ ID NO: 250038 - DNA, 585 bp, Homo sapiens
gattgttgctgtagttgttgcttgttgtatattcctaaacctaactaaagctcatttcttagattttggcttctctacatatacaaatgtagatataaattagaacagaatagaaacaataattgcagtctgtactcaaggggaggaatacacaagagaatgaaggccaggagatagagatcaatgtgggaactgcacaccctattatattgaataagacactgagattcaatagatgcagtaaattcatactgctgtgaaaggtggatttgatattggaagctaggagtcccaggactgaataattagctctttcttcttacaaataaattatgtaaatcgtttgtgtgttgatttatgtgatcataaattatattactttaaattattaacaacattatgatgatttattttttacctccytgcgttagttaggtttaggcttctctgcatatacaacaagcaataactagagcaatgatcacctaaacaaggtcaactttattttccatctctggaaaaagagaagtgaagtctggaggtagataagctgaagcagataagaaggctccacgctgtgattca

SEQ ID NO: 250039 - DNA, 575 bp, Homo sapiens
gtcaccacactgcttttctcatgtaattataagggacttgagggcaaatgtcatgacttactcacctctgcattctccagcacctggcagtgtctgacaccttaatgataattaacagtatttgttaaataaatgaataaaaatgaataaatgaatgaataaatgaatgataacctgacttgaaagcacactggtttgcccaggtttttggagaactaggtttgaaaaatttttctattagaaattgaatattaaaatagtttctactattttgttacaaaacttataataaccctatgatatataatgttccttggtttaaaatgttccatgtgttaagattatttgatataactacacataaatcgtacaatattttcccattatcttttaaacatgatcaacttgaaacttatttaatgtgcaaataagagcagaaaatcaagaaattggggaaaacacaagcagtgagatttggacatgagtcaygcagtcatttaactattaggccaccaaggaaatgctactagaccatcttttgcagaatgtatggtttaactggagagacaagcatt

SEQ ID NO: 250040 - DNA, 583 bp, Homo sapiens
tagttttatcacctcatttaatcctcactacaatcttctgaggcaggtaaaattaaatccctattttacagatgaggaaaccaatgaacaaaaaagatcttcactttctcaaggtcacacaactggttggggcagaggtaagattcaaaccaggccctgatatttctgtgtgatctgcgacaagatttttccctccaaatccttggtttcctgttatgctaggtgatctctgaggattcttcaagcctcacaattctcaagtccatgtcctmcctcatgtgcgccatggaaagcctgtgtatcttcattggcctgggggagaaaaacaaggctgctgatgcctggctcagggatgaattatgcaatttacagtcaccaacactagattacaaaatatatgccctgaagtccatgttcactaacatatttcttttttcagtaaatattgtagatatgtagtatgtttaagcactaaagattcactgttataaagagaccagcttaccattcattaagtaaatgaataaatagataattgcaaagtaagacagtagaatgaaggaaatgtacaagggggtaggga

SEQ ID NO: 250041 - DNA, 570 bp, Homo sapiens
gccattcatcctgctctctttgcttaactcttaaaatgaggtcaatgcatattccagtgcctctaggacacaaaataattggccctgcatatctgtgggttctgcatccatagattcaaccaacagcagattgagaatattcaggaaaaaaagggtggtcatgtttatgctgaataygtatatagacttttttcttgttattattccctaaagaatacagtgtaacaactatttgcatggcatttatatttattaggtattataagtaacctagagatgatttaaagcatacagaaagatgtgcataggttatatgtaaacactacaccattttatatcagggacttgagcatctgtggattttggtatctgtaggggtcctggaaccaaccctctacagatactgaaggacaactgtactcacaccctctgattatttgaaaaaaagatgtgagcctagagtggcatttttcttactatttgtgtttttagtattcaatattataggccatattttcttaaaaaaaattaaaagtatttttcctttgtttcaggaatactcagtgttat

SEQ ID NO: 250042 - DNA, 570 bp, Homo sapiens
gccattcatcctgctctctttgcttaactcttaaaatgaggtcaatgcatattccagtgcctctaggacacaaaataattggccctgcatatctgtgggttctgcatccatagattcaaccaacagcagattgagaatattcaggaaaaaaagggtggtcatgtttatgctgaatacgtatatagacttttttcttgttattattccctaaagaatacagtgtaacaactatttgcatggcatttatatttattaggtattataagtaacctagagatgatttaaagcatacagaaagatgtgcataggttatatgtaaacactacaccattttatatcagggacttgagcatctgtggattttggtatctgtaggggtcctggaaccaaccctctacagatactgaaggacaactgtactcacaccctctgattatttgaaaaaaagatgtgagcctagagtggcatttttcttactatttgtgtttttagtattcaatattatagkccatattttcttaaaaaaaattaaaagtatttttcctttgtttcaggaatactcagtgttat

SEQ ID NO: 250043 - DNA, 551 bp, Homo sapiens
agctagaactgcaagttcatgacaccagcttgcctggctaattaaattttatttttattttttttgtagagatggcacctctgtatgttggccaggttggtcttgaatttctgcccacaagcaatcctttttggcttctcaaagtgctggaattacaagtgtgaaccaccatgactggcctttattttattttttgtgtagccattgtaagtggaattgccttctttattttattctcaagtatttcgttattggtgtgtagaattgcyactgatttttgtatgctaattttgtattctgtaactttatcaaatttatttatatctaagagttttttggtggagtcttcaggattttctagacataagattgtattatctgcaaagagaaacaatttgatttcctcttttgcaatttggatgctttttctttcccttgtctgattgttctgagcaggacttgcagtactatgttgaataggagtggtaaaagtggacattcttgtcttgttccagttcttagaagaaaggctttcagctttttcccactta

SEQ ID NO: 250044 - DNA, 564 bp, Homo sapiens
cccaaagtccattgtatcattgttatgcctttgcatcctcatagcttagctcccacttgtaagtgagaacatacaatgtttggttttccattcatgagttacttcacttagaataatggtctctaattccatccaggttgtgacaaatgccattattttattcctttttatgactgagtagtatttcatggtctatttatctatctatctatctatcacattttctttatccattcattgagtgatgggcattcgcttttttgttttgtgattgcaaattgtgctgctatraacatgcatgtacaagtatcatttacatataatgacttctatccctctgggtagatacccagtagtgggattgctagatcaaatggcagatctacttttagttctttaaggaatctccacattgttttccatagtggttgtactagtttacattcccaccagcagtacaaaagtgttcccttttcattacatccatggcaacatctattattttttgattttttaattatggccattcttgcacgagtaaggtggtatcacactgtggttttg

SEQ ID NO: 250045 - DNA, 564 bp, Homo sapiens
cccaaagtccattgtatcattgttatgcctttgcatcctcatagcttagctcccacttgtaagtgagaacatacaatgtttggttttccattcatgagttacttcacttagaataatggtctctaattccatccaggttgtgacaaatgccattattttattcctttttatgactgagtagtatttcatggtctatttatctatctatctatctatcacattttctttatccattcattgagtgatgggcattcgcttttttgttttgtgattgcaaattgtgctgctataaacatgcatgtacaagtatcatttacatataatgacttctrtccctctgggtagatacccagtagtgggattgctagatcaaatggcagatctacttttagttctttaaggaatctccacattgttttccatagtggttgtactagtttacattcccaccagcagtacaaaagtgttcccttttcattacatccatggcaacatctattattttttgattttttaattatggccattcttgcacgagtaaggtggtatcacactgtggttttg

SEQ ID NO: 250046 - DNA, 512 bp, Homo sapiens
ttttgattttttaattatggccattcttgcacgagtaaggtggtatcacactgtggttttgatttgcatttccttgatcattagagatgttgagcattttttcctatgtttgttggccatttgtatatcttcttttgagaattgtctattcatgtccttagcttactttttgattggattgtggtttttttgctgatytgtttaagttccttatagattctaggtaatagtcctttgtcagatgcagtttgtgaagattttctcccactctgtgggttgtctgtttactctgctaattatgtcttttgctgcgcagatgctttttagtttaattaggtctcatctatttatctttgtttttgttgcatttgcttttggattcttggtgatgaagtctttgcttaagccaatgtctagaagggttatattatagaatttttatggcttcagatcttagatttaagtctttgatccatcttgagttgatttttatataagttgacagatgagga

SEQ ID NO: 250047 - DNA, 627 bp, Homo sapiens
aaaaacaaaaacaaacaagcaaaaaactcaaactcttgcccaaaccccattctggaaacttaaatcagaattttagggatggggtataggcagcattcctaaaaggttagtaccttcatttaactataaagccagggttgagaattgctcttttagagcaatccttcattttagggagaaaaaataaaaatctcaagaggtgacaaggtgaggatttctggttttgttaatgcccaagtaagttcatattggttaaaccaaaaccaaactaaaacaaaacwatgatctgtaggcattagagcaataacaaaagcagacagattgcagaggggagttgaaacttgaaagaagggcaagtgagaggtgtgtttcattttctttttgaattttgatggacagccggctatcaaactcattgcctcacacagggtgactaaaattctgacagaacagctgcagtgattatgatctaaaatatcagaggagagagtttggagcaatcagtcattagaaagtgaggagtaaactatagaaagcagagaaccagagaaggacagctctaaattctgtgtataaactcttcctgtctctggttgacccctctcccccaaattcatatggagggat

SEQ ID NO: 250048 - DNA, 459 bp, Homo sapiens
ttcattgctgttgagctagtgtgatcttttgggggtgttaaacttgttttgtcatattaccagaattgtttttctggttccttctcatttgggtggaccatgtcagaggaaagatctggggctcaaggtctgctgttcagattcttttgtcctagggggtgatgccttgatgtggtgctttcccccttcccttagggatggggcttcttgagagctggactgcagtgactactattgcttttckgggtctagccacccagtggagctaccaggctctgggcaggtgctagggtgtgtctgcaaagagtcctgtgatgtgatctatcttcagatctcccagccatggagaccagcacctgctctggtggaagtagtaggggagtaagtggattctgtgatggtccttggttgtagttttgtttagtgcactttttttttttttttttgtatgctggttat

SEQ ID NO: 250049 - DNA, 642 bp, Homo sapiens
tctattgttgaaactttccaatgtattttgtatttctctaagtgtgtctttcatttccagaagttgtaattgctttttgtttatgatgtctatttctctgaaagcattgtggttcatatcctgtattatttttaaaatttatttaagttggttttcacttttctctggtgcctacttgtgtaacttaataatcaactttctgaattctttttctagcaattcaaagatttcttctttgtttggattcattgctgttgagctagtgtgatcttttgggggtgttaaacttgttttgtcatattaccagaattgtttttctggttccttctcatttgggtggaccatgtcagaggaaagatctggggctcaaggtctgctgttcagattcttttgtcctagggggtgatgccttgatgtggtgctttcccccttcccttagggatggggcttcttgagagctggactgcagtgactactattgcttttctgggtctagccacccagtggagctaccaggctctgggcaggtgctagggtgtgtctgcaaagagtcctgtgatgtgatctatcttcagrtctcccagccatggagaccagcacctgctctggtggaagtagtaggggagtaagtggattctgtga

SEQ ID NO: 250050 - DNA, 459 bp, Homo sapiens
ttcattgctgttgagctagtgtgatcttttgggggtgttaaacttgttttgtcatattaccagaattgtttttctggttccttctcatttgggtggaccatgtcagaggaaagatctggggctcaaggtctgctgttcagattcttttgtcctagggggtgatgccttgatgtggtgctttcccccttcccttagggatggggcttcttgagagctggactgcagtgactactattgcttttctgggtctagccacccagtggagctaccaggctctgggcaggtgctagggtgtgtctgcaaagagtcctgtgatgtgatctatcttcagatctcccagccatggagaccagcacctgctctggtggaagtagtaggggagtaagtggattmtgtgatggtccttggttgtagttttgtttagtgcactttttttttttttttttgtatgctggttat

SEQ ID NO: 250051 - DNA, 518 bp, Homo sapiens
gaggatacgaacttgtcctaaggtcacctggataagtattgggtttctctggtgatggttggggccatggagctcccataagcttatgtcttttgtctttgactaccagggtgggtagagaaagaccataaggttggggcagggttaggtgtgtctgagtgcagactctttttgggcagggcttgccatggccactgtgggggatgggagtgtatttttcaggccaatggagttatgttccaagggggattatggctgcctctgttgctttgtacagttggccaagaaagtgggggaaagctggcagtgacaggcctcacccagctcctgtgcagacagcaaggccagtctcactcccgccatgctctccatagagctaaatttatatccagrcctctggtgtgcagggctgagatcttgcctcaggctacaagcctccttgctgagaaagcaagcaggtctttcaggtcttgactctccctgcctgccatggcttctgtgctcctctctacactttc

SEQ ID NO: 250052 - DNA, 528 bp, Homo sapiens
actaatctctgggtcctacatggtctgtacttgtgttgacagtggctgtgatgkgctgggtgggccagtccgtaggcctataggtgtgtgcccactgtggtggtaatggcaggttgggtgggcttgaactcaagcttccaggaggagtgctcaggtgccaacaatggtggactgggctgggtggtccccaggtctctggaccacatgctctggtactggtggtgggggagcagagcaaggctgggcaaactggtccttagtcctcccaggggtacttgcaggtactagctgtggtaggcagaggcagggtgagccttagggcccactggtagcatgtgtgggtgagtatcaactgcagtggcagtggcaggccgaatgagcctcacctccaggccctgggagaagggctcaagtgccaatggtgatggactggactaagcagtctccaggtccctgcactgtgtgctctggcactaggaggtttgggtggtggagtgagccacgcaattgtgtcctttaggtctgcta

SEQ ID NO: 250053 - DNA, 484 bp, Homo sapiens
tctgggtcctacatggtctgtacttgtgttgacagtggctgtgatgtgctgggtgggccagtccgtaggcctataggtgtgtgcccactgtggtggtaatggcagkttgggtgggcttgaactcaagcttccaggaggagtgctcaggtgccaacaatggtggactgggctgggtggtccccaggtctctggaccacatgctctggtactggtggtgggggagcagagcaaggctgggcaaactggtccttagtcctcccaggggtacttgcaggtactagctgtggtaggcagaggcagggtgagccttagggcccactggtagcatgtgtgggtgagtatcaactgcagtggcagtggcaggccgaatgagcctcacctccaggccctgggagaagggctcaagtgccaatggtgatggactggactaagcagtctccaggtccctgcactgtgtgctctggcactaggaggtttgggtggt

SEQ ID NO: 250054 - DNA, 552 bp, Homo sapiens
gttgaagtgaagaaaaatatactttcaacaaataaaaatatattcaaaataatagtagacaaacataaaccaaaaaactataaaaataaacgaagtggaggctttagaatgtaaaatacaatctctaaaatcaaaatttgccaggtcatttatgagcagaatagaaataatagaagaaagattcagtgaacttgaagatggatcaatagaaattatccaatctgaagaggaaaagaaaaatttttaaacaatgaatacagcctcagggataygtgagaaaataatgaaagatctaacattgtgtaactggaaccccaaggtaagaggagagatagaattgagtagttttttttttttttttttttgagacggagtttcactcttgtttcccaggctggagtacaatggcatgatttcggctcactgcaacctgtgactcccgggttcaagcgattctctagcctcagcctcccaaagtagctgggattacaggtgcctgcctctacacccagcgaatttttgtatttttagtagagatggagtttcaccatg

SEQ ID NO: 250055 - DNA, 552 bp, Homo sapiens
gttgaagtgaagaaaaatatactttcaacaaataaaaatatattcaaaataatagtagacaaacataaaccaaaaaactataaaaataaacgaagtggaggctttagaatgtaaaatacaatctctaaaatcaaaatttgccaggtcatttatgagcagaatagaaataatagaagaaagattcagtgaacttgaagatggatcaatagaaattatccaatctgaagaggaaaagaaaaatttttaaacaatgaatacagcctcagggatatgtgagaaaataatgaaagatctaacattgtgtaaytggaaccccaaggtaagaggagagatagaattgagtagttttttttttttttttttttgagacggagtttcactcttgtttcccaggctggagtacaatggcatgatttcggctcactgcaacctgtgactcccgggttcaagcgattctctagcctcagcctcccaaagtagctgggattacaggtgcctgcctctacacccagcgaatttttgtatttttagtagagatggagtttcaccatg

SEQ ID NO: 250056 - DNA, 552 bp, Homo sapiens
gttgaagtgaagaaaaatatactttcaacaaataaaaatatattcaaaataatagtagacaaacataaaccaaaaaactataaaaataaacgaagtggaggctttagaatgtaaaatacaatctctaaaatcaaaatttgccaggtcatttatgagcagaatagaaataatagaagaaagattcagtgaacttgaagatggatcaatagaaattatccaatctgaagaggaaaagaaaaatttttaaacaatgaatacagcctcagggatatgtgagaaaataatgaaagatctaacattgtgtaactggaaccccaaggtaagaggagagatagaattgagtagttttttttttttttttttttgagacgsagtttcactcttgtttcccaggctggagtacaatggcatgatttcggctcactgcaacctgtgactcccgggttcaagcgattctctagcctcagcctcccaaagtagctgggattacaggtgcctgcctctacacccagcgaatttttgtatttttagtagagatggagtttcaccatg

SEQ ID NO: 250057 - DNA, 552 bp, Homo sapiens
gttgaagtgaagaaaaatatactttcaacaaataaaaatatattcaaaataatagtagacaaacataaaccaaaaaactataaaaataaacgaagtggaggctttagaatgtaaaatacaatctctaaaatcaaaatttgccaggtcatttatgagcagaatagaaataatagaagaaagattcagtgaacttgaagatggatcaatagaaattatccaatctgaagaggaaaagaaaaatttttaaacaatgaatacagcctcagggatatgtgagaaaataatgaaagatctaacattgtgtaactggaaccccaaggtaagaggagagatagaattgagtagttttttttttttttttttttgagacggagtttcactyttgtttcccaggctggagtacaatggcatgatttcggctcactgcaacctgtgactcccgggttcaagcgattctctagcctcagcctcccaaagtagctgggattacaggtgcctgcctctacacccagcgaatttttgtatttttagtagagatggagtttcaccatg

SEQ ID NO: 250058 - DNA, 525 bp, Homo sapiens
ggttcaagcgattctctagcctcagcctcccaaagtagctgggattacaggtgcctgcctctacacccagcgaatttttgtatttttagtagagatggagtttcaccatgttggccaggccggtcttgaactcctgacctcaggtgatcygcccgcctcagtctctcaaaatgctgggattacaggcgtgagccaccgtgcccaggagatatttttttgaaaggtacaaattcttaagaatctcaataaaccatagcttaggataaatgagaagaagagtgcaccttgtcacatcatagtcaaagtgttgaaatctaaaggtaaagagaaaatattgaaaaagccagagaaaaagacacattacattaaatagaatatcaattccaaagatctctgacttctcatcagaaatcatggaggccagaagagtgtgaaacagcactctaattaaaatggacagtctatcagaatttatttttaaaaagtaagattcaattatatactattcagaagttataatttaag

SEQ ID NO: 250059 - DNA, 581 bp, Homo sapiens
agctcaataccttggggaggtgcaacacctcagcagctcagactccagagggctggttcagatccgagaagatggagctctgcagttgcacagcccaaagggtagggtgaaatagaacagccaagactctgtttccctagggggtagggcaccacatctgctcaggcaycagaggtgcagctgctctggtgagaccatctctggatccccaaggggcttggtgacacatgggcttgaatgctggggttgtggctactctcctgggctgacactgattctgaggggtgaggtatggggttggttatggctctgggggctcaggtatgctctgctggctcaggcatgatttacccctcccttatccagctactagagggcagggatgttgcctacactgctccctgctagatgatttccttatggattacaaggcctgcacaaagagggcactcggtgcacaattgtggaattaaatccattgaaattatcaggcaagaggatctactttctacatacacacatatggttgggatgttctttctttttcacaaatgggatcatattgtatgcattgtattgcc

SEQ ID NO: 250060 - DNA, 588 bp, Homo sapiens
ccggtggcaatgtgatcagagagaccccatccctcctgcgctctactccctgccccagctctcatctcctgggctttgtgtaaatggttagctggctccagaggtttcagtccttcctaggcctttctcattgtgtgtcctagtagtcatgggagaacccacaatgtatcccatgtatcagaaacgtgattcttctgggctgtggaatcaactagaccttgctcagtcttgactctgacattcataaatggtgggagaagggagggagwtggacaagttatacactgctctttatccgtttcctcacttacaaagtagaaatgatgcctacattatggggctgttatgggatttgaaaagaataatgtacagtgagagcctggcccacagtaaacattcagtaactgtgtctcaggatgagtcaggatggagacgggagcagtgcttcagagacaggctcaagaccctgtcctctggggctaggctggtgtgtgaggtggatactcctgatctctggtgggactgacccctaggccattcttcacctggtcacccaagtgctcctctcagaatataaacttgatcagg

SEQ ID NO: 250061 - DNA, 588 bp, Homo sapiens
ccggtggcaatgtgatcagagagaccccatccctcctgcgctctactccctgccccagctctcatctcctgggctttgtgtaaatggttagctggctccagaggtttcagtccttcctaggcctttctcattgtgtgtcctagtagtcatgggagaacccacaatgtatcccatgtatcagaaacgtgattcttctgggctgtggaatcaactagaccttgctcagtcttgactctgacattcataaatggtgggagaagggagggagatggacaagttatacactsctctttatccgtttcctcacttacaaagtagaaatgatgcctacattatggggctgttatgggatttgaaaagaataatgtacagtgagagcctggcccacagtaaacattcagtaactgtgtctcaggatgagtcaggatggagacgggagcagtgcttcagagacaggctcaagaccctgtcctctggggctaggctggtgtgtgaggtggatactcctgatctctggtgggactgacccctaggccattcttcacctggtcacccaagtgctcctctcagaatataaacttgatcagg

SEQ ID NO: 250062 - DNA, 588 bp, Homo sapiens
ccggtggcaatgtgatcagagagaccccatccctcctgcgctctactccctgccccagctctcatctcctgggctttgtgtaaatggttagctggctccagaggtttcagtccttcctaggcctttctcattgtgtgtcctagtagtcatgggagaacccacaatgtatcccatgtatcagaaacgtgattcttctgggctgtggaatcaactagaccttgctcagtcttgactctgacattcataaatggtgggagaagggagggagatggacaagttatacactgctctttatccgtttcctcacttacaaagtagaaatgatgcctacattatggggctgttatgggatttgaawagaataatgtacagtgagagcctggcccacagtaaacattcagtaactgtgtctcaggatgagtcaggatggagacgggagcagtgcttcagagacaggctcaagaccctgtcctctggggctaggctggtgtgtgaggtggatactcctgatctctggtgggactgacccctaggccattcttcacctggtcacccaagtgctcctctcagaatataaacttgatcagg

SEQ ID NO: 250063 - DNA, 606 bp, Homo sapiens
gcaaagagaggctgagagaggagaaatgaaggtgaattctcattttcggcaagttgttgtgagatgtttccctgatcagaggcccgagactttagagttctgaggtcaggttaatgtagwgaaaatggcaaggtccctacccattcctacccattgatttggatggcctctggctcttttgttaatttgctgtgtgatctcagtaaaatcatgactcctctctgggcctttagtttctcaacagtaaaattgggagtggagctaggtgatcttttaaatcccttccttcattcattttctgcaattcttgcctcttccccatgtttatccctcatattcaatatgtcaagatgccttctcttttcttgtttaaaaatataacctcattcactctatgccctcacttctcatttccagggccacagcccacattcttacactcacctccctggattttcacagcacctcttcagctggtctctctgcctattgtgcttttctctccttatccttcccaggttacccaagtagaattttcacttttgttatgccattgccatgctcaagaatatttcacacctcaccatcgcttactgtatccattct

SEQ ID NO: 250064 - DNA, 606 bp, Homo sapiens
gcaaagagaggctgagagaggagaaatgaaggtgaattctcattttcggcaagttgttgtgagatgtttccctgatcagaggcccgagactttagagttctgaggtcaggttaatgtagtgaaaatggcaaggtccctacccattcctacccattgatttggatggcctctggctcttttgttaatttgctgtgtgatctcagtaaaatcatgactcctctctgggcctttagtttctcaacagtaaaattgggagtggagctaggtgatcttttaaatcccttccttcattcattttctgcaattcttgcctcttccccatgtttatccctcatattcaatatgtcaagatgccttctcttttcttgtttaaaaatatarcctcattcactctatgccctcacttctcatttccagggccacagcccacattcttacactcacctccctggattttcacagcacctcttcagctggtctctctgcctattgtgcttttctctccttatccttcccaggttacccaagtagaattttcacttttgttatgccattgccatgctcaagaatatttcacacctcaccatcgcttactgtatccattct

SEQ ID NO: 250065 - DNA, 606 bp, Homo sapiens
gcaaagagaggctgagagaggagaaatgaaggtgaattctcattttcggcaagttgttgtgagatgtttccctgatcagaggcccgagactttagagttctgaggtcaggttaatgtagtgaaaatggcaaggtccctacccattcctacccattgatttggatggcctctggctcttttgttaatttgctgtgtgatctcagtaaaatcatgactcctctctgggcctttagtttctcaacagtaaaattgggagtggagctaggtgatcttttaaatcccttccttcattcattttctgcaattcttgcctcttccccatgtttatccctcatattcaatatgtcaagatgccttctcttttcttgtttaaaaatataacctcattcactctatgccctcacttctcattkccagggccacagcccacattcttacactcacctccctggattttcacagcacctcttcagctggtctctctgcctattgtgcttttctctccttatccttcccaggttacccaagtagaattttcacttttgttatgccattgccatgctcaagaatatttcacacctcaccatcgcttactgtatccattct

SEQ ID NO: 250066 - DNA, 625 bp, Homo sapiens
tgctgatgagggtcctagaactaattctcattggcttaactttgatcatgtggccatggcactgcataacccagttggattatgcctgaattatgtgctcacttttggagctagggagagagtcagctccayatagactacatagactgggttcacatgggtcacatggctaatgaagaagccagggtttgagtccaggactgtctgattgccacttgttcttagccacttctctacctgccttcagtgttagaaaacaaatgcataccgatcacagaatatttgaaaaatagagagcttgctttggcagcatgtatgctaaaatcggaaggatacagagaagattagcatggcccctgtgcaaggatgacatgcaaatttgtgaagtgttccatatttttgaatagataatgaatggatgctgggctaaatacctaggtgatgggatgatctgtgcagcaaatcaccagggcacacgtttacctatataataaacctgcatatcctgcacaggtacccctgaacttaaaataaaagttgaagaaaaactaaaagaaggatggaggagggactttatcattcaaaaatatcagtgtcatcagagaaaaaaaaagtcataaaaaaa

SEQ ID NO: 250067 - DNA, 625 bp, Homo sapiens
tgctgatgagggtcctagaactaattctcattggcttaactttgatcatgtggccatggcactgcataacccagttggattatgcctgaattatgtgctcacttttggagctagggagagagtcagctccacatagactacatagactgggttcacatgggtcacatggctaatgaagaagccagggtttgagtccaggactgtctgattgccacttgttcttagccacttctctacctgccttcagtgttagaaaacaaatgcataccgatcacagaatatttgaaaaatagagagcttgctttggcagcatgtatgctaaaatcggaaggatacagagaagattagcatggcccctgtgcaaggatgacatgcaaatttgtgaagtgttccatatttttgaatagataatgaatggatgctgggctaaatacctaggtgatgggatgatctgtgcagcaaatcaccagggcacacgtttacctatataataaacctgcatatcctgcacaggtacccctgaacttaaaataaaagttgaagaaaaactaaaagaaggatggaggagggactttatcattcaaaaatatcartgtcatcagagaaaaaaaaagtcataaaaaaa

SEQ ID NO: 250068 - DNA, 615 bp, Homo sapiens
ctgtttttcctattatagaatgcattctaattttccagcttccttattgtttctcagagaggtgcccttctggctcatgggatccgaggcctctggtgaattggcttgagcattctcacactctagaagacatcagaaatacccaaagtgctaattaaaaacacacacctcagaactctactcctagatatttcaaggtagagtaagtagagaggggctccaggaatattataaaattcagcttttcataaaaatgtaccattaacacatatacaccatagaatactatgcagccataaaaaagaatgagagcatgtctttcatgagacatggatggagctggaggccattattcttagcaaactaatgcaggaacagaaaacaaaatgccacatgttctcacttataagtgggagctaaatgataagaacttataaacacaaagaggaaaacaacagacactgggatctacttgagggtggaggttgggaggagggaragaagcagaaaagatcactattgggtactgagcttcatacctggctgatgaaataatctgtataacaaacctccatgatataagtttacctaagaaccaaaccttcacatgtaccc

SEQ ID NO: 250069 - DNA, 596 bp, Homo sapiens
ccttcatttataagtggggaaagtgaaaactcacaaagtggacaggtgaagtgtcttgcccaaggtcattgaactcatgtatgggaagatttgatttgtgctcattctcatttctcattattcccaagccagtgcctttttgctgcagttgcttttggttcctcggggcagaactgaaaaatgatcctgttcaactatatagctcattgctgccaggtttccagctaagctgcttagctttcagcactgaacagctaacaagatttactggatgaagagctgacaggcccctgcttctgcctattccagctgaaatccacttcattcttcatgtacatcacccaaaacagtgctaactgctcccactgcgaakaaatggaaggtcctcaacttgggtgtcaaaatccccctccgtaggcacagagtggagacacaggctattagcagcaatatgagaatttaggttcaacattaaccagaagtgagtgtgactgctccacccctgttgcattcttgagctgtatcattagaggcacagatccagtatgcaaaacttggtaggcctctttggctctgatgcacaattttataagcac

SEQ ID NO: 250070 - DNA, 609 bp, Homo sapiens
ctgtgtcttgatcttctttcttcttctttttactccacttctaccgttgtgaagacagtaacttttcagagttgggaagaaagacaggcctgacaggaccctatttaaggggcagacaggacagctggggacaattatacatttcagggccattataaccacaccccaattgtctccctaatgatgccaatgtctgtctccactccagcccttccattatctgcccctattgaaccttaagccttgctgtagtcagatctgtgatgacctgtgtaggctcaatgtatattgagcaccttcagtgttctaagccatgagacttagttcgatatgtgaatggggatctgctttttaataagatgggcatacccaggctgctgctggattgagatggcatgtatgacagttctttgataayagcttagataattacaaggcaatggtgataacaattagaattcttccatgccactaatcctggaaaaaatttgtcacttgaccaaaactacagccttgcttataacttgctttcaacttccttacactcttaagatgaccttttatttcatcttctccaggtaaagaaactccttccaaggatccaactgt

SEQ ID NO: 250071 - DNA, 622 bp, Homo sapiens
tagtggggaggtgaggaggggaacagctaatgcttaatgtgtttactgaatctttgatacataccaggcactgagtaaaaagttttatatccacgatgttatttaggaagcttttttttttttccttgagacagggtcttgctccgttgcccaggctggagtgcagtggtgtgatgttgactcactgtgacctcagcctcctgtgctcaagccatcctcctatctcagcctctgagtaactgggctacaggcatgcaccaccatgcccaggccaccatgtctggctaatttttttttcttttttgtcagaagacagggttttggcatgttgcccaggctggtcttgaactcctgagcttaagtgctcctcctcccttgacctcccaaaccgctaggattacaggcatgagccactgcgcccagtctagtaaacatcttaaaacccctgtgggataggtactataaaagycattttgctaaagggaaaagccatgcatagagaggtgattaattgtttagggtggcacatttattgaggggcagagccaagtcttgagctggagactgcgtgacccctccctgggcttcatctttgcactgtgcctcctcctagagctcagca

SEQ ID NO: 250072 - DNA, 281 bp, Homo sapiens
tatttcttttctgtttttcttatcagtggttttcaagcarggtcacctgtgctgtgggaaggatcagtggcaggactgcagacccctgccctctcctctgctttaaacagggcagttcttcctgtgtcctgctccatgatagaccagctgtgtgaccctggcaagtacttcatctctttatgcctgtttctacacctgtaaaaaggggacagtggtaatgcctgcctcacaggaatgttatgaggattaagtgagataatacatagaaagcactcagatta

SEQ ID NO: 250073 - DNA, 281 bp, Homo sapiens
tatttcttttctgtttttcttatcagtggttttcaagcagggtcacctgtgctgtgggamggatcagtggcaggactgcagacccctgccctctcctctgctttaaacagggcagttcttcctgtgtcctgctccatgatagaccagctgtgtgaccctggcaagtacttcatctctttatgcctgtttctacacctgtaaaaaggggacagtggtaatgcctgcctcacaggaatgttatgaggattaagtgagataatacatagaaagcactcagatta

SEQ ID NO: 250074 - DNA, 281 bp, Homo sapiens
tatttcttttctgtttttcttatcagtggttttcaagcagggtcacctgtgctgtgggaaggatcagtggcaggactgcagacccctgccctctcctctgctttaaacagggcagttcttcctgtgtcctgctccatgayagaccagctgtgtgaccctggcaagtacttcatctctttatgcctgtttctacacctgtaaaaaggggacagtggtaatgcctgcctcacaggaatgttatgaggattaagtgagataatacatagaaagcactcagatta

SEQ ID NO: 250075 - DNA, 577 bp, Homo sapiens
cactgcactttctagactggctattgtactttttaaggacattctggtttgaaaattctttacttctatgtcaactctatagtaggaaagttagttttagccaagtttgaagcctaccagagtgggtataaagatctctattggttataattatttttttttccagccccctgacatctttcaaccccactttccatcctttagcaattatactttttcttagtgattcacagtgaatttgtcctaagtcatggaatcaagttttaatggttatgcaagcttctatctgaccgaagccagccttgcttcctggttcttcaactttgtgtcacctctgtttagattttatgctgaaatcacctaaccacaaaggaatcttatttaatggtccctctctaacccttacgtttatggcaayttcttctacatttcccatgcaagcagggtctatgtcgtctcaccgaaaggataggagttaaggaaagggctttgctttgtttcatgagagaaggtgctattgggagaggcatttttattcccacacagcaattattcagcacaattttccattgatgag

SEQ ID NO: 250076 - DNA, 434 bp, Homo sapiens
acaggcctacagtctttggggcacacaggcgagggttcamcactctgggctaaggtatttccctctgctctgaacatcctggatagcctgtactgagaccccaggcctcagtgacatccacacgtcagacaggtgctgcctgggactggggccctccaaaccaggctcacaacagctctcatggacatcaggccaaatatggcccaggaaaaaacaggagtgctcaggaaccagaacgaattgtgccaaatgtggaatatttgtctccaaactctgattactgtaatccctagtcaccacctaaaactctttgaataggcttgctgagttgtctgggtaatcttatttatacttgttgtcctggcataattatcaacagggtctccattcactctcaaaaatgtcaccctatccaagatgcaaggccacatgta

SEQ ID NO: 250077 - DNA, 532 bp, Homo sapiens
agttgtagaattgtaacaagacaacaagcaattcacataagtcatggtttctcagacaataatcttgtttagtaattattagtctttatctgaaacacatggtttgatggtaaattttttgaataggcgataataaaaaataattctcaaaaagaaccctcaaagtcaactgtgtgtatttccttctttcctggtggggaaagtytataagggttggggcaagtcccttcagacccaggaatttgataaacaccatcagggttgttgagaccaacctcactgtgagagagaaacagaatgaatgagatgttgatataggaaaggaagtagctgaattaagagtgttttcttctttactaacagccagtccacacgttgaaaagcattcagttacaatttttatctataaagagtggaacattcgcccaatgtcccagtacaataggaccatgagagtgaagttccctaaagaactcaaccatttccatggatagatggcagaggaacacagctttgctgtcagaatgatttg

SEQ ID NO: 250078 - DNA, 499 bp, Homo sapiens
cactctctggacagtcagacaagaaggctcactttctccaggaatctcctagtgccaggttctgggctgtggacaccatgctggccagaggaagctgctgcacaggtacagaggtgcagagggtggggctgcactgagagggcggggcgggatcagaagtaatttgaccagttaggaagctactgcaatagcaatattgattatttactatgtgtcagaygctgtgccattgtgctaggtgctgggcataggagtgaaaaagacaccaaagtcctcagttccagggaattaatttttctagtaaacaaacaaaccaaaaaacaaggaaagtcatcattactatggagaaaacaacactggatcttgtcatagcgactgaggcctccacagaaggtgggctgtgtgtgtgtgtgtgtgtgtgtgtgtgtgtgtgtgtgtgtgtgtatgtgtattatttggataaacaaattagggcccatctttggagttggggatgggg

SEQ ID NO: 250079 - DNA, 499 bp, Homo sapiens
cactctctggacagtcagacaagaaggctcactttctccaggaatctcctagtgccaggttctgggctgtggacaccatgctggccagaggaagctgctgcacaggtacagaggtgcagagggtggggctgcactgagagggcggggcgggatcagaagtaatttgaccagttaggaagctactgcaatagcaatattgattatttactatgtgtcagatgctgtgccattgtgctaggtgctgggcataggagtgaawaagacaccaaagtcctcagttccagggaattaatttttctagtaaacaaacaaaccaaaaaacaaggaaagtcatcattactatggagaaaacaacactggatcttgtcatagcgactgaggcctccacagaaggtgggctgtgtgtgtgtgtgtgtgtgtgtgtgtgtgtgtgtgtgtgtgtgtatgtgtattatttggataaacaaattagggcccatctttggagttggggatgggg

SEQ ID NO: 250080 - DNA, 634 bp, Homo sapiens
tcggtttcacaagatctcatcacaccttgaaaaaaaataacaacttccacttactgaacatatgtattctaagacaatcagtgtgctgatacgttcatacttcatgtcatttaatcttacagtcaccctatgaaataatgactaatgaacatatatattctaagacaatcagtatgctgatactttcgtgctttatgtcatttaatcttacagtcaccctataaaataatgactaatgttataatctataattttttaagttctagaataattaactgcagctggattacaaaggtaaaaatatagtttatatacaatctggaatgcaattgagtggcatggaacagacctcaaaaccagttctattaattcctgccaaggcacagtgaggcttctcttccatgtaatccttctgttggtgttcacgaaacatctcatcgtctccaaggagccttagaatatatctgacaaacaaaaagttataccacacggagccagttcaatagggctgagcaaaatttcagtcccaaagacccctcactcctagaagaccatgagcagagctctggtggtgctgtcagtgggaggcctttacgggacattatraggagagctaacgtaactcaatggcatg

SEQ ID NO: 250081 - DNA, 622 bp, Homo sapiens
catgaacaccaaaaatatatattttttacttacccataaattatatacataagctacgctaacatatatagtataaaacataccacaagtaaaacttttaaaataatttgaattttggccaggcgcagtggctcacacctgtaatcccagcactttaggaggcygaggcgggtggatcaggcggtcaggagttcgagactagcctgaccaacatggcgaaaccccgtctgtactaaaaatacaacgacaacaacaacaaaaattagccgggcatggtggcgcgcacctgtaatcccagctactcaggagactgaggcagaattgcttgaacccgggaggtggaggttacagtgagctgagatcgcgccactgcactccagcctgggcaacagagtgagactctgtctcaaaaataaataaataaataaaataataataataatttgaattttaaaatataataatgagtgtaatatatttcattttatcccagtgagtcatcataagcacctagagcatggagtggcaaactttttctataaagggccaggtagtaaatacgttaggctttgccggccatattctttctcttgtaaagatgattttgtctgatgttagtata

SEQ ID NO: 250082 - DNA, 608 bp, Homo sapiens
aaagaaaatgctgttattgtgacaacaaggataaacatggaggacgttatccaagtgaaataagccaggcttagaaagacaaagactgcttgatatcacatacatgtggactctatgaaagtcaaactcatagaagtagagagtaaaatggtggttactagagcctgggagggatcagggaattggarggtggatgggaaaactggatacgttactcaaagggtacaaagtttcagttggttaggaggactgattctagtgatctgttgcatagcatagtgactacagttaataataattattgtatatttcaaaatttctttaaaaaagtagatttcaaatgttctcacaataaagaaatgataagtatgtgatgtggtaaatatgttaattagtctgatttaatcatcgcacaaagtacacatgtattataacataacattgtaccacataatatatataattatttgtcaattaaaactaaaatctaaaacaaaaaaacaaaaacaaagtctcctaaacacagcaaataattgcatcttgttttttatttgagtttgacaatttttgactaaactatttaatccgttcaaatttaacattattat

SEQ ID NO: 250083 - DNA, 608 bp, Homo sapiens
aaagaaaatgctgttattgtgacaacaaggataaacatggaggacgttatccaagtgaaataagccaggcttagaaagacaaagactgcttgatatcacatacatgtggactctatgaaagtcaaactcatagaagtagagagtaaaatggtggttactagagcctgggagggatcagggaattggagggtggatgggaaaactggatacgttactcaaagggtacaaagtttcagttggttaggaggactgattctagtgatctgttgcatagcatagtgactayagttaataataattattgtatatttcaaaatttctttaaaaaagtagatttcaaatgttctcacaataaagaaatgataagtatgtgatgtggtaaatatgttaattagtctgatttaatcatcgcacaaagtacacatgtattataacataacattgtaccacataatatatataattatttgtcaattaaaactaaaatctaaaacaaaaaaacaaaaacaaagtctcctaaacacagcaaataattgcatcttgttttttatttgagtttgacaatttttgactaaactatttaatccgttcaaatttaacattattat

SEQ ID NO: 250084 - DNA, 612 bp, Homo sapiens
ttttttatagtaccagaaaagcatttgttgtttatctgaaatttaaatttaactaggcatcctgtatttttatgtacccagtctggtaacattacttgtcagggtacaatacaattaaaaaataaaggtcccactttatcctgtgaccagggctcagaggggcgaccacatgtagctactgtcactcttccatctcttctcatctcctgggaataaagacaatcaagcaaagtcaaaaagcccccaagggaccttgaatataatcaacctcactctggatccttggccctcattccaatgggcccttaagaatctagtgttaagaggcctgcagttatcatcttagcatttttcttactgtctatgaggtcttctgtaagcctcttaatcctttcacttttcagttcagtgagctaaaaaatgcatactctgtaagattgctcaggggataaaattacacwacatttgtaaaatcactatttatgaaactactaggtgatatgcaagggatagaattgctttgtcatcattattgttatactattttgaatcttctaaaagaagtgcaaattgcataacttttccatcaaagactgtgcagctcatcataga

SEQ ID NO: 250085 - DNA, 636 bp, Homo sapiens
ctctttttgtaccagtaccatgtttcatagttactatggctttgtgatataatttgaaatcaggcaatgtgatgcctccatatttattctttatgcttaggactgctttggcaatttggacttttttttcagttccatatgaactttaagattgttttttctaattctgtgaaagatgacattggtaatgtgatagggattatgttgaatctgtaaactgctttcagcagtatggtcatttaaacaatattgtttcttccaatccacgagcctgggttgtttttccatttgtttctgtcatttacagtttttttttatcagtgtcttatattcatccttgcaaagatctttaacctctttgattaartgcatttccagtttttttttattactactgtaaatgggattgagttcttggttgggttctcagtgtgaatgttattggtgcgtagaaatgctactgatttttgtacattgattttatatcctaaaacattactgaagtcgtttattaagcgtaggaaacttttggaggaatctttagggttttctagttatacaatcaggtcatcagtgaacagagataatttgacttcctcttgtctgaacaggatatgttttctttctctctcttgc

SEQ ID NO: 250086 - DNA, 644 bp, Homo sapiens
ttagaatgtattggatgtcttttgtgcatacatggagatgactaattgttttttttagttctgtttatggggcaaatcacatttgttgatgtgcaaatgtatccttgtatccctggaataaaatccacttgattgtgatgaattatctttctgaggtgctgttagatttggtttactagtattaatattttgttgaggatttttacatttacgtttatcagggatattggcctgtagttttctttttrttgtgtcctttcctgattttgatatcaggatgatactggtttcatggaatgacttaggcaagaataccctcctctgagattttttggaatattttcaataaggttggtatcagctcttctttgcatgtctagtaaaattcacctgtgaatccatctggtcctgggctgctttttgtgggaagatcttttaaattactgattcattttcattactcattattggtctgttcaggatttctactttttcctggtttaatcttgggagattatatacttccagtaatttatccatttcctctaagttttctagttcatgtgcgttgaggtgaaatcatgttccctgcagcaacataatggagctggaggccattatcttaagtgaactaatccagaaag

SEQ ID NO: 250087 - DNA, 666 bp, Homo sapiens
taaaaaaacaaagccaaaatttttgctttactcagacggctgggtatagcataaaaaaaaactatatccatatcccttttcttaggcactgagtgggaagactcactaaatacttaaatagggcagaaagagtgaaatacaaatagaaaaaaatccataaaaagctggatatttagttataaaacagtggaaatttactctagttacactaagcaaaaaaaataatttattaaaaagatgttgggtaactcctaatctccaggaaacctggaagacctagaaaagaaagtcagcagcatctaaaatcaggccatggtactggatcactatcagtatcactgctacctccactaagccgaggctcctcggcttatactgactcatcactggccactggatactaccacttgggctgctgtgccactgctgttgttgaaaagagaacgttrctgccacaaccactaccatgttgactgtaatgaaaacatgctggctcaattgcctttatgtcataaactattgactgaaagtctatgatgtggcaatggattagtagaatttaagtcatgggctatcaatggaaaagaaactaccaaagagagtattaggcatttttagcttttacacagtgcagtagtctcagagacacaaagcaaaggattaccc

SEQ ID NO: 250088 - DNA, 666 bp, Homo sapiens
taaaaaaacaaagccaaaatttttgctttactcagacggctgggtatagcataaaaaaaaactatatccatatcccttttcttaggcactgagtgggaagactcactaaatacttaaatagggcagaaagagtgaaatacaaatagaaaaaaatccataaaaagctggatatttagttataaaacagtggaaatttactctagttacactaagcaaaaaaaataatttattaaaaagatgttgggtaactcctaatctccaggaaacctggaagacctagaaaagaaagtcagcagcatctaaaatcaggccatggtactggatcactatcagtatcactgctacctccactaagccgaggctcctcggcttatactgactcatcactggccactggatactaccacttgggctgctgtgccactgctgttgttgaaaagagaacgttactgccacaaccactaccatgttgactgtaatgaaaacatgctggctcaattgcctttatgtcataaactattgactgaaagtctatgatgtggcartggattagtagaatttaagtcatgggctatcaatggaaaagaaactaccaaagagagtattaggcatttttagcttttacacagtgcagtagtctcagagacacaaagcaaaggattaccc

SEQ ID NO: 250089 - DNA, 534 bp, Homo sapiens
ggctgcaaataagcccagacattgaagactacaataaatacccaacccttcaatgcccagacactgaagaacatctrctagcaacagcaccatccagggaaacatgacctcaccaaataagtaagactgggacaaatctgggagaaacagagatacgtgacctttccaacagaattcaaaatagctgtgttgaggaaactcaaagaaattcaacataacggagaagaaattcagaaatccatcagaaaatttaacaaagagattgaaataattaagaagaatcaagcagaaaatcaggagttaaaaaatgcaattggcatgctgaagaatgcatcgtagccttttaatagcagaattgatccagcagaagaaataattagtgatcttgaagacaagctttttgaaaatacacaatcagaggagacaaaggaaaaaaagaataaagcatacctaaaagttctagaaaatagcctcaaagggaaaatcttaaagagctattgaccttaaagaggaggtagagaaagagataggggt

SEQ ID NO: 250090 - DNA, 534 bp, Homo sapiens
ggctgcaaataagcccagacattgaagactacaataaatacccaacccttcaatgcccagacactgaagaacatctactagcaacagcaccatccagggaaacatgacctcaccaaataagtaagactgggacaaatctgggagaaacagagatacgtgacctttccaacagaattcaaaatagctgtgttgaggaaactcaaagaaattcaacataacggagaagaaattcagaaatccatcagaaaatttaacaaagagattgaaataattaagaagaatcaagcagaaaatcaggagttraaaaatgcaattggcatgctgaagaatgcatcgtagccttttaatagcagaattgatccagcagaagaaataattagtgatcttgaagacaagctttttgaaaatacacaatcagaggagacaaaggaaaaaaagaataaagcatacctaaaagttctagaaaatagcctcaaagggaaaatcttaaagagctattgaccttaaagaggaggtagagaaagagataggggt

SEQ ID NO: 250091 - DNA, 506 bp, Homo sapiens
acagagatacgtgacctttccaacagaattcaaaatagctgtgttgaggaaactcaaagaaattcaacataacggagaagaaattcagaaatccatcagaaaatttaacaaagagattgaaataattaagaagaatcaagcagaaaatcaggagttaaaaaatgcaattggcatgctgaagaatgcatcgtagccttttaatagcagaattgatccagcagaagaaataattagtgatcttgaagacaagctttttgaaaatacacaatcagaggagacaaaggaaaaaaagaataaagcatacctaaaagttctagaaaatagcctcaaagggaaaatcttaaagagctattgaccttaaagaggaggtagagaaagagataggggtagaaaggttattcaaagagatgaaaacmgaacacttcctaaacctagggggaaaatatcactattcaaatacaagaaggctatagaataccaagcagatttaacccaaagatgattac

SEQ ID NO: 250092 - DNA, 506 bp, Homo sapiens
acagagatacgtgacctttccaacagaattcaaaatagctgtgttgaggaaactcaaagaaattcaacataacggagaagaaattcagaaatccatcagaaaatttaacaaagagattgaaataattaagaagaatcaagcagaaaatcaggagttaaaaaatgcaattggcatgctgaagaatgcatcgtagccttttaatagcagaattgatccagcagaagaaataattagtgatcttgaagacaagctttttgaaaatacacaatcagaggagacaaaggaaaaaaagaataaagcatacctaaaagttctagaaaatagcctcaaagggaaaatcttaaagagctattgaccttaaagaggaggtagagaaagagataggggtagaaaggttattcaaagagatgaaaacakaacacttcctaaacctagggggaaaatatcactattcaaatacaagaaggctatagaataccaagcagatttaacccaaagatgattac

SEQ ID NO: 250093 - DNA, 519 bp, Homo sapiens
tctagaaaatagcctcaaagggaaaatcttaaagagctattgaccttaaagaggaggtagagaaagagataggggtagaaaggttattcaaagagatgaaaacagaacacttcctaaacctagggggaaaatatcactattcaaatacaagaaggctatagaataccaagcagatttaacccaaagatgattacctcaaagtatttaataataaaactcccagataccaaggataaaggaaggatccaaaaagcagataaaggaaatttttttaaaaaatagcatacagtggagctctaatatgtctcrcagcaaacttttcagtggaatccctccaggccaggagagagtagaatggcataaagtcctgaaggaaaaaaacttatcctggaatagtatgtcaagtaaaaatatccttcaaacatgaaggagaaataaagaccttcagagacaaaccagagctaaagaaatttatcaatgccagacctgtattacaagaaatgcttaaggaagtccatc

SEQ ID NO: 250094 - DNA, 602 bp, Homo sapiens
ctgactcctgccacattgtgatttgttttctaattgtttggttgtcrtctcttttttccctcctccctgtcttcccttcaatgaaggttattttctctgatggtacgatttagcttcttgctgtttaccttttgtgtatctgttgtatgttttttgatttgaaaaacaatgaggcttttaaatactatcttataacccattactttaaactgatgacaacttcacaatgattgcataagcaaaaaaatcaacatgaaaaagaaaacaacaaatctacactttaacttcatcctcccacttttaaattttttttgttgtttcgctttatgtcttattgaactatgtctttaaaagttgttgaggttattattttaattggttcatcatttagtctttctacttaagataatagtagttaacataccacaattacagtgttataatattctgtgttttcctgtgtgctaatttttaccaatgagttttgcaccttcagatgatttcttttgctcattatcaccattttctttcagattgaaaaactcccttaagcatttcttgtaggacaggtctggtgttgatgaaatccctcagcttttgtt

SEQ ID NO: 250095 - DNA, 437 bp, Homo sapiens
taaataaattaattttttatgatggactaacaggtaaagtgcagatatgcaagcaaaaataaacaaaaacaaaacaattccatgtatttgggaaacattgttaaaatgtttccatttgacatttatcaattatttaagcattcattaattcacctatgcattcctccatccggtcacccacacattcactgaggatcctcagatgatgaaaacctcatgaaactcatttagggaggagtaaagagaatagcagaacatgtactctaccttcataaagcccacattcaaatttgggatataattataatgataatagctataatagggtataaattgagtaatagggtagttttgtaatttcttaattattgtktcaaagataaaatgaagaaagagtgattatcatgattagaattgttcaggaaagactcaactgt

SEQ ID NO: 250096 - DNA, 426 bp, Homo sapiens
tagtgacagacttccctcatagtactgcttttgcagtatcctgtaggttttgatatgttgttttaattatcatttgtctctagaaaaatttcagtttccttctgaatttcttcattgacctactgctcattcaggatcatattgtttgatttccatgtattcgcatagtttctaaaatttctttttattgattcctagtttataccattgtagtcaaagaagatgcttgatattacttcaagtttttgaatgttttattacttattttgtgacttaatttatggtctatccttgagaaagatccatgtgctgaggraaagaatgtgtattatgcagctctcggatgaaacattttgtaaaaaatctattaggttcatttggtttatagtgcagattaaggttgatgtctctttattttctatatgg

SEQ ID NO: 250097 - DNA, 573 bp, Homo sapiens
atgaaagtagcaactgctttcaccctcatttgttgcaattaaaaatatctccaaacattgccaaatgtcttcccagaggaaaaatcaacactggcttagaatgactattgtagatatattttataggcaaagccaaaaaaaaaaaaaaaaaaggactggaaagagatgtgtccagtgtgatgcattaattggaagacagttaaacttttgtcactatcagacaaagcaaataatccagggtgtgttggtgagcattgttcaatgaggtaacccaggaaacagctttcgggggtggaagcattgccataccaaatatatctgatttattaggtagctcacaagaactgaaacaaatttttaacttgtagaaaggccaaagaacatatgaagattaaacaacatcaattttaagaacacaaagctcaaattgcatgcttcactttcattcctctctcaatggagaaaacctagccatatggcyacatgaagtgacaagagttttgcaatttactctcaagctggaaatacatgtaggcagtcaaaatgtgggtaaagaaaagtctataactaaat

SEQ ID NO: 250098 - DNA, 525 bp, Homo sapiens
ttgtaatccacagaaagataggatctctcatgtaaatgtaggtcagggtattgttagctgatctaggttagcctctttgagggtaactaaaattacttggttttgctccacatatttcattcaccagggagctaactcaggcatgttctcattataatagcagaatgtgagagagtcagaagaagacatgcaatgccacttgaggctaggctgggaactgatacactgttcatttctatcttattttattggccaaaccaagataaaggtcaaaccaagatttaagggatagggaacwagactgcacacctctttattgagaggagttaggaagtcatatggcaaaggatgcatatagggaagggtaaagaattgagatgattaatacaatcattcttccatgtgaagactaggaaagacaggtagtgtgggtcttagcaactagtaggtccatgcaatgcttgtagaaataatatgagaaagattatctatatgtaacttccccaaaacaaatattacacaata

SEQ ID NO: 250099 - DNA, 364 bp, Homo sapiens
tgattaactactgatatttaacactagaaagaaaggaaaaaagaattgtcattcatccctgtgctatatcataatataaataaaagaatgcaaagtgaggttgtgaaaaaagtcctaacgtaatatgaaagartgtttttggttaaaattgggactctctatacaggagaattgttaatttcatgccctctgaaatatcaaaataaatgaattatactctagttacatgtaaaaaatactttgcttttagaaaaaaaattttaacaccctgcataaaagattaatagatatagccaagtgcatctggcaatgtgagtatagtacctgttccaaatgccagctggatttgtaattacatctttgg

SEQ ID NO: 250100 - DNA, 563 bp, Homo sapiens
ggtgttgcttcaaatagggaattcacactgagtcccacacacctcctgagacctaaacagctgcagtatgttgccattttgagagcccagacatcattcagctctggggcccaatggtccctgcatctgcacatccctggaaacctccactaacatccttccatgtccatccagaaggctatagtggcatgatgacagctggacccagcagtgtagcaggattccccagcgccataaccctcactgtgtcctataccctakggaatggtctgtgcagtgcctcagggaggctgtcctcaggacaaagggagccaaagtgcatactccccagagcctgaaagctgcctgcctgggtccactgccaataaaagcaacacccacgtccccagcagcagggctacagaacatttgtgtgtgtcgcaaagacagtccctccctgcccactgctgctgctacctgagtatgctgcccagggtcttagggattgccccaccaaccacagcctgtagccatgtacaccagtagggaatctaagaacaggcttacctggcctggcaccaccc

SEQ ID NO: 250101 - DNA, 555 bp, Homo sapiens
ggaccactactgccactgttggcatctgagaaagccacctggaggcctaagaattggctcacctcaagctgctaacagtagtgcccacctgggggcccaaagacaaacaggcttggcctgccgctgccactatggggccagaggactagtccacctcatgtctccatccccacctcaggcttggaaaagcctcaaatctgccaagaaccctatgcccagtaatatggtttgactgtgttcccacccaaatctcatcttgaattcccatgtgtcatgggagggagccagtgggaggtaattgaatcatggagatcatgggggygggtctttctcatgctgttctcgtgatagtgaataagtatcacgagatctgatggttttataaagaggagttcctccctacaagttcactctctttgcctgcctccatccatgtaaggcctgacttgttcttccttgccttctaccatgattgttgggcctccccagccacgtggaactgtaagtccattaaatctcactttcttcccagtcctgggtacatctttatcagca

SEQ ID NO: 250102 - DNA, 526 bp, Homo sapiens
tcatgatagtgaataagtctcataagatctgatggttttataaagaggagttctcctgcacaagctctctctctttgcctgcctctatccatgtaagatgtgacctgcccctccttgttttccaccatgattgtgaggcctcccagccatgtggaactgtaagtccattaagcctcattttcttgccagtctcaggtacatctttatcagcagcaaaagcattcccaagagggacatttatagcaatagaacctacatcaacaaagtagaaagatttcaaataaatgatcttaaggatgcatctcagggaactcaaaaagcaagaacaaacctaacccaaaattartaggtagaaagaaatagcaaagattcctctctaccaaagtgaaccagaaagaaataaaaaatctgaaaagaccaataatgattaatgaaattgaatcataatcaaaagtctcccaagaaagaaaagcctagattctgatgccttcactgctgaattccatcaaacttaagaaggactact

SEQ ID NO: 250103 - DNA, 592 bp, Homo sapiens
atgagaagaatcaaagaaagtcattgctatgaaatctatcatatgaattatttcaaaaaaacagaaaaaagaaagaaatgaaggaaggtccgataaaagggaaataagccacatccctttgacatgcaaataacataatttaaagttaacaatagaaatatatactaatcattaccaataatacagttattataaccttaaaaactctatgaattactaaaatcatgactgtcaaactaactwatttatcatattgtataccgtccttgatgtgtaatgcatgtgcacaaaatatttttgatttttcaccattaagtaaagtcactggaaaaacatttgtatttggccatcagaaagaaacatttgatatttgtctgggatgaagtagggggccaaaatgaaataggagatccacactctgtgctacagttcacaatcaggctagacgttcataagctatagtcttatttggaatttttatattatatagctattaattatatatattatataattaatatatatattataattaatatatatattaattataaatttttaaaactacaatagaaatacaacacacacaaaa

SEQ ID NO: 250104 - DNA, 592 bp, Homo sapiens
atgagaagaatcaaagaaagtcattgctatgaaatctatcatatgaattatttcaaaaaaacagaaaaaagaaagaaatgaaggaaggtccgataaaagggaaataagccacatccctttgacatgcaaataacataatttaaagttaacaatagaaatatatactaatcattaccaataatacagttattataaccttaaaaactctatgaattactaaaatcatgactgtcaaactaacttatttatcatattgtataccgtccttgatgtgtaatgcatgtgcacaaaatatttttgatttttcaccattaagtaaagtcactggaaaaacatttgtatttggccatcagaaagaaacatttgatatttgtctggkatgaagtagggggccaaaatgaaataggagatccacactctgtgctacagttcacaatcaggctagacgttcataagctatagtcttatttggaatttttatattatatagctattaattatatatattatataattaatatatatattataattaatatatatattaattataaatttttaaaactacaatagaaatacaacacacacaaaa

SEQ ID NO: 250105 - DNA, 592 bp, Homo sapiens
atgagaagaatcaaagaaagtcattgctatgaaatctatcatatgaattatttcaaaaaaacagaaaaaagaaagaaatgaaggaaggtccgataaaagggaaataagccacatccctttgacatgcaaataacataatttaaagttaacaatagaaatatatactaatcattaccaataatacagttattataaccttaaaaactctatgaattactaaaatcatgactgtcaaactaacttatttatcatattgtataccgtccttgatgtgtaatgcatgtgcacaaaatatttttgatttttcaccattaagtaaagtcactggaaaaacatttgtatttggccatcagaaagaaacatttgatatttgtctgggatgaagtagggggccaaaatgaaataggagatccacactctgtgctacagttcacaatcaggctagacgttcataagctatagtcttattyggaatttttatattatatagctattaattatatatattatataattaatatatatattataattaatatatatattaattataaatttttaaaactacaatagaaatacaacacacacaaaa

SEQ ID NO: 250106 - DNA, 473 bp, Homo sapiens
aaacacaacactagaggaagctgtgcaaataaacgtgattccacttcttcctccctgtgaagaacttctgcaaggcatgatttctcagtggggtttgtccagaaatgtccctcacagctgagtggacacattagctgaagaaacagcttactgaagcatgaagcagtagtcttcatggtgtcatgaagtaacaggatgagctgcctaagtcatgtatttttcctctcctccagagctctgaggttataccttcccaagaaagcatcatatttattccctccttcaggatggtttattagaaaatyttggctaagtcacctcatatcctagtgtcctgaacttaattggagggttttgttatttcactgcagggtttaaaacttgaagaaaggtcaggataggctccacatagaagtacaaactctctagtcctctctaaggccttaaagtccagtagagggttttctcttctt

SEQ ID NO: 250107 - DNA, 546 bp, Homo sapiens
tttggctaagtcacctcatatcctagtgtcctgaacttaattggagggttttgttatttcactgcagggtttaaaacttgaagaaaggtcaggataggctccacatagaagtacaaactctctagtcctctctaaggccttaaagtccagtagagggttttctcttctttctgtttaattctctaatttttgctttgtgtttagaaccaacaaacgtgttcttattttgataaaatctgggtctttcaaatgaatgcactcctctccagactattatttctgacaaaaagcttttaaaattctattgtgaaagtcaggtctgagctatataatgtttttgctctggcagcaccttctttcttcctgaatcatggatactactggctctatgtgctcagaaatcacattgcagcaagaacatttaaaaccttatttgtcccttcagaaacacaatttcactaaayattatgtggacttggtatgtctgctcctggtaccccaacactgtctgactctagctcagtcaaatcatatgtatgtctcttc

SEQ ID NO: 250108 - DNA, 509 bp, Homo sapiens
tttctactgtatcaattggagcagatgtcacaaaactcaatattcatagtgatttggctttattttatgaaaacctgtaaagaaatgcaatgtaagaactgaaaaggaaatggttttattttaaataactttgcaatgaaacacaataaaacgtaagtataatttataccattctttgactgacaaattattatactttgttatataaatygcagcgtgtactaagaatttcttaagatatactcatgattactcctgtatacaaaagaaaaaattatttctcatgaaaaggctaatttaatttcagcctggggcagtagggcttgctaatccctcactgttaggtaacttagataaaatttcaggaaatgatgataatattatgaaagctacatggcaaaaagaaacaattcctgcctttgttataataaacagttcaatacctgacaatgcaggctctttgaactctaacttttattttaggagatcttgtcaaagcaaaaaatagg

SEQ ID NO: 250109 - DNA, 533 bp, Homo sapiens
ggccactaatcccattcacaarggctctgtcttcataacctaattacttcccagggctctaccccctaataccatcaccttgggcttaggatgttaacattagtttggcggcatgatggggacacaactattcagaccatagcattttgcaatagctctatcaaatgtaggggtaatggggattacaaagactatgcttttggttggctattgccaactgccctacaactttgacaaagagataataatagcctcagcaaagccaaatctctactcagggtttgctatgaaagccagaagacatccgtcatagcagttaagtaatttcctattttctgaagcaggacaaaagatcatgttaaaaatcaggttcaacattttattataaagatggtggaacaacaaggaagatggagttcacaacatcaaatgcctgctgtgataaagtgtggatgctaacagggaaacaattgttcagaaaagagacatttaatataaataaactttctagagtagcagaaaccgcctgtgga

SEQ ID NO: 250110 - DNA, 594 bp, Homo sapiens
aaatggcagaatactggtggctggttattggtgggggaaataactaaatggctcagagaaataagcaagctggtataaatatactattcaagcctgaaaaactgatgaaggtatttatggaaaggccaggagaatagacaatggactcactaacactaatagggctgacctaaccctgaaataacagaagccaggtgacagggcttgacctccagatgtcagagtagtcgagtagaagtggtagctagaggaatttggtcgcagagcaataaggagatggttaatagaatatgtcatccctagaggcaaaaataaatgagcaaccaamaaaggccactcatttacatgttcagtatgtaccactgacagaagtgtggacatcctggaggctgagggctagctttccaccaaaatgtcacaatccctgagccagttttctgagctagagctcactgatgtagccatggcagcacttatgcataggcccaacattagaagtttccgtttacccaggctcatttagttactgctgtcaacatatgttcaacctattagcaatagacaacaatactgagatccatacatggctgtatt

SEQ ID NO: 250111 - DNA, 579 bp, Homo sapiens
gaaaagtattattatacattatttataaagtcatccagacctaccaagaacagtttaattaaataagatagttttattgaaagtcaacaagaatacttgagcgtcattgaattagaatttccaggaactgggttagaacatctacctgttcagcagttgtattagttcatttaaacactgctaataaagacgtaccctaagactgggtaatttatactagtaaatagctttaatgtactcacaggtccacctggctggggggacctcaccatcatggtggaaggcaaggaggagcaagtcatgcttacgtggatgacagcaggcaaaaagagagcttgtgcaggaaagtccaacttataaaaccatcagatcttgtgagatcatgctaacagcacaggtaacacccacccccagattcaattatcttccactgggtccctcccacaacaygtgggaattgtggaagctgcaattcaagatgagatttgggtggagatacagccaaaccatatcatcagtcttctaagaatttcttatatacacagaataggattactaggaaactagatcaaaagacaa

SEQ ID NO: 250112 - DNA, 471 bp, Homo sapiens
ttgcctgctgctcacctcctcctgtgcggcctggttcctaacaggccacagactggtactggcctgtggcctgggggttgggaacccctgctgaagaagatgtttccatttacctcgcacaatatcatgctgttctgtgtttctaatttctatttcctctatcctactacttttcaccctttttgtatcattaagaaaaccttcaaactaggtaaaaaaatgttattatagctctaataagtttattccaagttcacaaggattatatttacttaaaataatgcttcattcagaattgacaaaatagttctgccttacaatatatcccacaawacccaattgtactaagtgtttgataataggtttatagcaatgcattcaaaattattaggaccaaaataactgtacatggcttgcccagtggtgctggtcatagcagcagacatttcagttggtgtgacaaaacatgca

SEQ ID NO: 250113 - DNA, 545 bp, Homo sapiens
catgccacaaggtcagctgagtattagatacagaggtctgccaggggtgctgacagctccatcttttctaagggaaagagagtgccgcgttcagaaatttggttgcaatmctggcccaagagtcaaaaatgatttcatctcaaaggacatgatgattattagggactgtgtttctatgattcttaaatctctttccagaggtgaaccttatggtgtcctttcttaaagcttttggaaaagctgatagagagaaggaactgtaactgaaatgggaataagtgactgtaagaaagtaagtccagagagtcatgcagaattaagaatctggtagttacattagacttcatttttctttagcccaagatgggagacttgttttaagaataccaatttcttgtacaatgggggctttaggatcttttctaattctctttgttttggttaattttaattttaaaattatttcattacttaaatacaacaaattatattaaaatacagaaaatcaaaattgtaaactgtattaccggtaaaaatgtagtaaa

SEQ ID NO: 250114 - DNA, 534 bp, Homo sapiens
tttaacattgattcttgatttcaaaatcattacataaaattcagactgatgaatatttccttaacatgttgaaatgtgtatctttacttaaaagctaacaacttattactggagaagaactaggggacattccctctataaccactatcaccattactactattatttyacttgtggtattagccaacaaatttagacatgataaacatattcaaggaatgagaagtgtgggttaagataactataaacttatataaaccaacaatcttcatatataaaagcatctagctgaaaaaatacattgaaagagatcgcatttaaaacaaaaaagtaaaataaaatacctaaaattaaacttaacaagaaacatgtaaaatctatataagaaaaattaaaatgcttctagagaagccaaaaagagacttgaaaaatgaaactgctttcagtgtttctggatatatagattaaatataaaaagatataaattatctgtaagtcaatttataaatattatgtaaacctgataaaatatta

SEQ ID NO: 250115 - DNA, 534 bp, Homo sapiens
tttaacattgattcttgatttcaaaatcattacataaaattcagactgatgaatatttccttaacatgttgaaatgtgtatctttacttaaaagctaacaacttattactggagaagaactaggggacattccctctataaccactatcaccattactactattatttcacttgtggtattagccaacaaatttagacatgataaacatattcaaggaatgagaagtgtgggttaagataactataaacttatataaaccaacaatcttcatatataaaagcatctagctgaaaaaatacattgaaagagatcgcatttaaaacaaaaaagtaaaataaaatacctamaattaaacttaacaagaaacatgtaaaatctatataagaaaaattaaaatgcttctagagaagccaaaaagagacttgaaaaatgaaactgctttcagtgtttctggatatatagattaaatataaaaagatataaattatctgtaagtcaatttataaatattatgtaaacctgataaaatatta

SEQ ID NO: 250116 - DNA, 534 bp, Homo sapiens
tttaacattgattcttgatttcaaaatcattacataaaattcagactgatgaatatttccttaacatgttgaaatgtgtatctttacttaaaagctaacaacttattactggagaagaactaggggacattccctctataaccactatcaccattactactattatttcacttgtggtattagccaacaaatttagacatgataaacatattcaaggaatgagaagtgtgggttaagataactataaacttatataaaccaacaatcttcatatataaaagcatctagctgaaaaaatacattgaaagagatcgcatttaaaacaaaaaagtaaaataaaatacctaaaawtaaacttaacaagaaacatgtaaaatctatataagaaaaattaaaatgcttctagagaagccaaaaagagacttgaaaaatgaaactgctttcagtgtttctggatatatagattaaatataaaaagatataaattatctgtaagtcaatttataaatattatgtaaacctgataaaatatta

SEQ ID NO: 250117 - DNA, 467 bp, Homo sapiens
aaatttatgtatgtacagatgaatggatggatggaaagcgaaatagaagattttttttcaagatattgaattatactagaattaattaaaatattaaatttaacaatacttgaatttatcagaaaaattatgtggaaataagtctaacagtgtcataaactttaaatgtttcaaacacacaagtttattaatggccatactgcccaaagtaacttttagattcaatgctattcccatcaaactaccattgacattcttcacasaattagaaaaaactactttaaaattcataaggaaccaaacaagggcctgtatagcgaaaacaatcctaaggaaaaaaaaaaaaaacgaagctggaggcatcatgctacctattttcaaagtattataggccaaggtaacagtaaccaaaacagcatggtaccagtaccaaaacagacacataaaccaaaagaacagaatagaga

SEQ ID NO: 250118 - DNA, 467 bp, Homo sapiens
aaatttatgtatgtacagatgaatggatggatggaaagcgaaatagaagattttttttcaagatattgaattatactagaattaattaaaatattaaatttaacaatacttgaatttatcagaaaaattatgtggaaataagtctaacagtgtcataaactttaaatgtttcaaacacacaagtttattaatggccatactgcccaaagtaacttttagattcaatgctattcccatcaaactaccattgacattcttcacagaattagaaaaaactactttaaaattcataaggaaccaaacaagggccygtatagcgaaaacaatcctaaggaaaaaaaaaaaaaacgaagctggaggcatcatgctacctattttcaaagtattataggccaaggtaacagtaaccaaaacagcatggtaccagtaccaaaacagacacataaaccaaaagaacagaatagaga

SEQ ID NO: 250119 - DNA, 467 bp, Homo sapiens
aaatttatgtatgtacagatgaatggatggatggaaagcgaaatagaagattttttttcaagatattgaattatactagaattaattaaaatattaaatttaacaatacttgaatttatcagaaaaattatgtggaaataagtctaacagtgtcataaactttaaatgtttcaaacacacaagtttattaatggccatactgcccaaagtaacttttagattcaatgctattcccatcaaactaccattgacattcttcacagaattagaaaaaactactttaaaattcataaggaaccaaacaagggcctgtatagcgaaaacaatcctaaggaaaaaaaaaaaaaacgaagctggaggcatcatgctacctattttcaaagtattataggccaaggtawcagtaaccaaaacagcatggtaccagtaccaaaacagacacataaaccaaaagaacagaatagaga

SEQ ID NO: 250120 - DNA, 474 bp, Homo sapiens
gtgtcattttaagtttcatcaattaaatcctgacattaaagtgaagaaatttgcatgtttttacacaccttctctgtctgtatctcctggttattgtagtgatttctaccttgtgaaagtttttaaaatttgcatctcttttgtaattgtaatctctatttttgttatgtcttatttttgtatttaaatagattcaatgcccatccccagtcctttcaccatattcataacataaaagggattttttaaaaattctcttttgttggttggttttcattgtcaagctaattttctttaataaattttcaactaargctcatgtgtgctgtattcataattctgtttactcttaaaatgttatgattatctatgtatggccttttgtgcttgaaggaggatacaggtcaccaaataagatgctagactgggtatacagagatgtatacatcaaaattcatgacctgaaaagattta

SEQ ID NO: 250121 - DNA, 537 bp, Homo sapiens
gatggaaaagatcatacagtgatatcactgggatttagatactgttagagcacatggtaaaacacaacaagatgacagaacagtgtggaacagtagacctggaaaagccctgaagcctgaactttattcataacacatgatacagtaagagcaatcaattcccacccaactccacttctacctctgtgcccagatgtttgctgtcagtcctgtactgtcttcaggcattgatggctgcgcttatcattttttaatgacatttccattcaatttttagttggctgtattagagttaggtgactttttaaagaagggatcttgtaacacagatattccatgaatgatttttgatacacattcgacartatttgccagttgcttttacacttgaataaaaatttggctgtaaataatattgcacaattacaccttctttctctcaacacctgcaaacactactctactattttcaaacaatagatattgttttttagaagtgtaagaccagcttaacatttagcacctataaattactgg

SEQ ID NO: 250122 - DNA, 580 bp, Homo sapiens
tttttaatgacatttccattcaatttttagttggctgtattagagttaggtgactttttaaagaagggatcttgtaacacagatattccatgaatgatttttgatacacattcgacaatatttgccagttgcttttacacttgaataaaaatttggctgtaaataatattgcacaattacaccttctttctctcaacacctgcaaacactactctactattttcaaacaatagatattgttttttagaagtgtaagaccagcttaacatttagcacctataaattactggcttctttccctagagtgggtgaagaatttagtttactttatcttcaaagatcaaacatgtaactaagtataattaatttctataagttgtcctctttcagtttttttctaaaaaaagtgtatcattttcacttgyagttgtagttcttcattctatgaatattttatggcattaaatcttgaataattgtctggtttatttgttaacctgtttactttagaaacactaattattgttattttgcatcgcttggcctttcttttttaaatctcttatattatcattaatta

SEQ ID NO: 250123 - DNA, 580 bp, Homo sapiens
tttttaatgacatttccattcaatttttagttggctgtattagagttaggtgactttttaaagaagggatcttgtaacacagatattccatgaatgatttttgatacacattcgacaatatttgccagttgcttttacacttgaataaaaatttggctgtaaataatattgcacaattacaccttctttctctcaacacctgcaaacactactctactattttcaaacaatagatattgttttttagaagtgtaagaccagcttaacatttagcacctataaattactggcttctttccctagagtgggtgaagaatttagtttactttatcttcaaagatcaaacatgtaactaagtataattaatttctataagttgtcctctttcagtttttttctaaaaaaagtgtatcattttcacttgtagttgtagttcttcattctatgaatattttatggcattaaatcttgaataattgtctggtttatttgttaacctgtttactttagaaacactaattattgttattttrcatcgcttggcctttcttttttaaatctcttatattatcattaatta

SEQ ID NO: 250124 - DNA, 441 bp, Homo sapiens
catgaatgttctcaattccatacctaaataccaacatacaccttacatattacttatgtttgtacataagttaaataataataacaagatataacatttactattttctgagacaaagatggttctaagccgaatcctctcaggcactgctttatcctcactcttagggagatttagtaatgcagtacgtstaaatgcataaaataacttcctttgttaaatccaagtcatttatcttctagttttgatatcacatgcaagacataaaaactcaagttaatggtagagtttccattgaataaaaggacttgccttaggcaatgggttgtgacagatctgcagttctgtgcatactagcttaattcctggaatacactgatgttatcagtaggtcataaaatattgctgagtccatagcaacaatttgtcctataacagccc

SEQ ID NO: 250125 - DNA, 516 bp, Homo sapiens
cagcctcctctctgtgcttcacttcccatttctgggtatatagtacactgtgtgggttagagtgctggggaccctgctgcactcccgggggtccagttggtattgcatagcagcagccctctgagtggacatggggagatgtcagtgtttccagggatgtagagatgcaggagctgttgggycctcaggcagaatgcaggctgggaggctgggcactcaaatggcgccatgctctaactgcttgggtctcaggggtgtgtgggatccagcatgagatctctctccctggaacaatgccattgctcccaatactagtctcagggctcacagaaatgaggggctcttctgtggctagggttccaggaatccatagtgggactgtagattgctgaatatctctcacttgtctttttcctctgcactgggaagcttctccaggctcccagatgatcccaactgaaccagctacctcactgtccacttcttccatttctcaggtttttttttttatttctc

SEQ ID NO: 250126 - DNA, 516 bp, Homo sapiens
cagcctcctctctgtgcttcacttcccatttctgggtatatagtacactgtgtgggttagagtgctggggaccctgctgcactcccgggggtccagttggtattgcatagcagcagccctctgagtggacatggggagatgtcagtgtttccagggatgtagagatgcaggagctgttgggccctcaggcagaatgcaggctgggaggctgggcactcaaatggcsccatgctctaactgcttgggtctcaggggtgtgtgggatccagcatgagatctctctccctggaacaatgccattgctcccaatactagtctcagggctcacagaaatgaggggctcttctgtggctagggttccaggaatccatagtgggactgtagattgctgaatatctctcacttgtctttttcctctgcactgggaagcttctccaggctcccagatgatcccaactgaaccagctacctcactgtccacttcttccatttctcaggtttttttttttatttctc

SEQ ID NO: 250127 - DNA, 488 bp, Homo sapiens
tttcaaatctccaagatctgcagctcggtgtgaactgccctccgcctgtctcagccagaacatcaagtggaaaggggcctgaggaactgcctcctccagccccaccagtgtggagatgcagctcagtcttgccatctgtgaaatgggattgataatacctacatggttgtcttgagtttagctcataaccctttctccgccagaatatcaactccgtaaaggcaggattttgtttgttccccatagtatccccagtgcctcacacatggtaagcatttaataaaaacaaagccatcaatggrgatgacgaaacccagagagcagcagtgccttgaccggggtcacacagcaagttagagcagagccctgattgaaaccaagggctcctgggccttaaactaggcgctccttgcattagcctgtggcaggagatgtaggtttgctgtcaatccttccaccagttactactgcctgtgcagccttgtgca

SEQ ID NO: 250128 - DNA, 458 bp, Homo sapiens
agggccaaacatgggaatgttcccgatagtcccatatttgctcctagatcaatgagcacctcagggaacttatggaagcagagtgtacctgatgagactgggtttagggtttattggtcagggcagcattttcaacctaaagatatgggagagtgacaagagacagacaggcatagagaagcagtagccgtgttgtcacatagtcctgagcccaaggggcaggcctttggcaagtcatttcaccttgtaaatgctagtttctttatctgcaaaaggagaatcctgatgtatagaaatgtttgtgctttggtctttacccatctttgcatctttgcctgtccctttaattctataatgctctcccaccccaccccttgctgccttgtctaatagttaaaattccaccgacattccaagacctcrctcagcaatttccatattcaggaagccttctccaa

SEQ ID NO: 250129 - DNA, 543 bp, Homo sapiens
tgagggtgccgtgggctccacaacccgatgagtagtcggtgcgggctgaggaaggaggttggggctgcrgctcctcctgtcccccgacccagtgggagcaaacacaggaggatgagtgcatggctctgacgctaggaactcctccacaggtgactctgctgagtttgttcccctgcagggacccacccacaggtgagtgagggtcttgtcctgtcgtcccctctctcttccctgcagctcctgctcccattgctggttcacgtccccatttatcttgttcatcagcacttgctcttcctcctgctgtctgcctccatcagggtgtaactgtttcgtgtgggtgtttggaggggcatccgtcttctggtgtgatgtttctcctcactctttcttctcgttctcttcctttgacccacctctctctctttccttggtgtcctactccccttttcccgtccccctccctctgtctgggttggagactgggctctaggtccctggggtggaggatggtccacagcaggaagacaaggacagatgtgt

SEQ ID NO: 250130 - DNA, 549 bp, Homo sapiens
caagaataaattctgttgtgtttcataatacaattttttttttctgagacaggatcttgccgtctgtgtcctgagaggcacaagtggctggtgcctctgaacatggtggtaaggctgggagaccgttcttctgctggggcatctggtgtattttgctggttgatatggctgagagggtgcttggtcgctgtgggaacagatttgctcctgtagaaaccccctccaaatcacacaatgtcatagctctatcattcaggctggagtgcagtggtgtgatcgtagctcactgcagcctcaaattcctaggctcaagtgatctgcytcagtcttccaagtaactggaactacaggtgcacaccaccacgcccaggtaatgttttattttatttttattttggagacaaagctcgctctgtcacccaggctggagtgcagtggcgtgaacatagatcactgccagcttgaactttcaggctcaaacgatccttccacctcagccacctgagtagctgggactacagatgtgtgccacaatagcctggctaattt

SEQ ID NO: 250131 - DNA, 509 bp, Homo sapiens
ccggacatgatcctctccgcctctcgaggtacggactaaggtagatttcaggacccgagattgcagggctgggggattccgcgtgtcgtgtagggaattccgcgtgtggtgtggcaggccggtggcgcgcgagttggcggggactgacagacttctctgccccattgtgaattggggcgtgcggacccgagcctaggcctcaacccgggcgaaccacattgcagatgagaacctacgtgtacatcagctsgcagctgctaggagggttggagagttggaaacttttaaaatatcttttgccttctccttcgtagtgtggccgggggcctacgggccgggcggggcggtgatgaccccaacatgccatctgagtgtcggtgctgaaatccagaggctgtttctgagctgccgcccggcccaaggctcgtggggaggcaggtggactccagaggacctcgtggctcaagtgtcggcctactttttctgcccctggttctccccgtccctat

SEQ ID NO: 250132 - DNA, 509 bp, Homo sapiens
ccggacatgatcctctccgcctctcgaggtacggactaaggtagatttcaggacccgagattgcagggctgggggattccgcgtgtcgtgtagggaattccgcgtgtggtgtggcaggccggtggcgcgcgagttggcggggactgacagacttctctgccccattgtgaattggggcgtgcggacccgagcctaggcctcaacccgggcgaaccacattgcagatgagaacctacgtgtacatcagctcgcagctgctaggagggttggagagttggaaacttttmaaatatcttttgccttctccttcgtagtgtggccgggggcctacgggccgggcggggcggtgatgaccccaacatgccatctgagtgtcggtgctgaaatccagaggctgtttctgagctgccgcccggcccaaggctcgtggggaggcaggtggactccagaggacctcgtggctcaagtgtcggcctactttttctgcccctggttctccccgtccctat

SEQ ID NO: 250133 - DNA, 486 bp, Homo sapiens
  misc_feature (1)...(486): n = A,T,C or G
tacgcttttgctttccattcccaaccacccgcacctgtgaactcaatccagttttacttgctgtggacaagctcggcacagagctcatccactggacagcggcacgctgccaaatggaaccccgcatctcgagtatgtgtggggcccattactccttttgtaacccataggggacaaaagtgacaaaactaccacaaactggcagcggtgggattcgaacccacgcccccgaagagactggagccttaatccannnnnnnnnnnnnnnnnnnnncgctacctctttgccgctgggtatttacatattttccttcagytatgaagcgtgcgaaggggctctgggccaacagggagttggggcgaatccacagggcaggaccatggcaggatccgctccgccaaagccactggctgggaaacggctccaccagtgccctgacacaggattctcaatgcccaggcctcaggatctgctttaggaaggcc

SEQ ID NO: 250134 - DNA, 541 bp, Homo sapiens
ccagcaaaacgctgccatgtcctgagtgtccagacagcggcctccatcctttctcgtatgttcactggggcctgctgggggactggggcacagccctttacaacccaggaactgggcattagtgccctgtggcagaggtgctaggattaccgaggacgcctggctggtaggtggtggaagcctcctcgagacaggagcagcggtcccctccgtctcatctggagcatgtggacacctgctccctctttttaaggctgtggacccagtgaaatgccatgtaaagcactcagtacagtagacrtggaccactgagaagggaaaggagggacgcatcaggacatgagccacgagggctcgggcacctgcggcacctcctcccagcatggaggagcctgcgccccaaagccatcatcctccactggcaggtgcagccttttccctccctgctccttgtgggcctgggatgggaacaggaagggggtttacgtcctctgggcaccagccctttggcctcgccaccaccctcacacatcccaggcgg

SEQ ID NO: 250135 - DNA, 541 bp, Homo sapiens
ccagcaaaacgctgccatgtcctgagtgtccagacagcggcctccatcctttctcgtatgttcactggggcctgctgggggactggggcacagccctttacaacccaggaactgggcattagtgccctgtggcagaggtgctaggattaccgaggacgcctggctggtaggtggtggaagcctcctcgagacaggagcagcggtcccctccgtctcatctggagcatgtggacacctgctccctctttttaaggctgtggacccagtgaaatgccatgtaaagcactcagtacagtagacgyggaccactgagaagggaaaggagggacgcatcaggacatgagccacgagggctcgggcacctgcggcacctcctcccagcatggaggagcctgcgccccaaagccatcatcctccactggcaggtgcagccttttccctccctgctccttgtgggcctgggatgggaacaggaagggggtttacgtcctctgggcaccagccctttggcctcgccaccaccctcacacatcccaggcgg

SEQ ID NO: 250136 - DNA, 564 bp, Homo sapiens
gcaggggtcacaacaggaaaatctcagtgaactggaattggtaaaaggcagraaaatctcaagtgttctctcgtcctggttaatcatcactggccactacattttgaaaaatgataataactataccagatgacacttcaaataaaaacataaccagggcataaaacactgctcttagccaacaacctcagacactgggaaataaacctcaggacttggaggccctgagaatgctcatgaactcatctacaggagtctgcagcctgtgccaggcactggggtgcaaccaagatcacacaagtccccgccctcacagagcacgctctcatggggaggaagacaaacacctaaagagatctagaatgtgaggtcaggtgctgacaagagccctggagggaacagagctgggaaaggtcagaaagggaagacccagggtctctagaggaggtgtcaggggaggggtctcccaaaaacaccctgatgtgagcaggatctgagggcagtggggagggagccgtgcagacccctggggaagaagattccaccagggaaatgccaaggtcc

SEQ ID NO: 250137 - DNA, 564 bp, Homo sapiens
gcaggggtcacaacaggaaaatctcagtgaactggaattggtaaaaggcaggaaaatctcaagtgttctcycgtcctggttaatcatcactggccactacattttgaaaaatgataataactataccagatgacacttcaaataaaaacataaccagggcataaaacactgctcttagccaacaacctcagacactgggaaataaacctcaggacttggaggccctgagaatgctcatgaactcatctacaggagtctgcagcctgtgccaggcactggggtgcaaccaagatcacacaagtccccgccctcacagagcacgctctcatggggaggaagacaaacacctaaagagatctagaatgtgaggtcaggtgctgacaagagccctggagggaacagagctgggaaaggtcagaaagggaagacccagggtctctagaggaggtgtcaggggaggggtctcccaaaaacaccctgatgtgagcaggatctgagggcagtggggagggagccgtgcagacccctggggaagaagattccaccagggaaatgccaaggtcc

SEQ ID NO: 250138 - DNA, 564 bp, Homo sapiens
tgttagggtggactctaatccaatctgactagtgtccttataagaagaggggattgatggtggctcatgcctgtaatcccagcactttgggaggccaaggtgggtggtcaggagatccagaccatcctggctaacatggtgaaaccctgtatctactaaaaatacaaaaaattacctgggcatggtggcgggcacctgtagtcccagctacttgggaggctgaggcaggagaatggygtgaacccgggaggcggagcttgcagtgagccgagattgcgccactgcactccagcctgagcgacagagcgagactctgtctcaaaacaaacaaacaaacaaacaaacaaacaaacaaacaaagaagaggggattgaaacatacaaagagacactagacactctgtgcacagaggaaaggccatgtgaggacccagagagaaggcagcgatttgccaaggagagaggcctccgaagaaaccaaatctgttgacaccttgttcttgaactcctagcctccaaaattgtgaaaaaataaatctctcttgtttaaagtcacccagtttgt

SEQ ID NO: 250139 - DNA, 589 bp, Homo sapiens
caattttgacagttgtcaaatctggaaaaaacaaacaaacaaacaaaaaaacccctgggaatctgttgcctcacagagacacaaagtagacatcaaaattgtatatctcagttccagttccaaaatggtggcatagaagcaagctggctttactccttcacacagaaaaccaaaaacaaatatacagcaccaaaattattaccagatatattccagaactcaaatatgaaaatgaaacagttttcagagccacagagaagtgaaaaaaactccmgacagatgacaaaagaatcagatttccccatctgtaatgtccctccctgccccattctgcctggtaccaggtgtgtggaaaattttaccccaactcatggtttctacactgggaaatgtaagatcaatgcgggcaaccagtttctgcacaatcctgggttccctgtccctgccttaacccacaagaagcattgtgagtgcccgaagggagaaatttccctgaggacagtcaaagagtggggaggcaggactaccatctccttccctggaaactctgctgtgtaactcagccaagggagacatgaaatcagactgg

SEQ ID NO: 250140 - DNA, 589 bp, Homo sapiens
caattttgacagttgtcaaatctggaaaaaacaaacaaacaaacaaaaaaacccctgggaatctgttgcctcacagagacacaaagtagacatcaaaattgtatatctcagttccagttccaaaatggtggcatagaagcaagctggctttactccttcacacagaaaaccaaaaacaaatatacagcaccaaaattattaccagatatattccagaactcaaatatgaaaatgaaacagttttcagagccacagagaagtgaaaaaaactcccgacagatgacaaaagaatcagatttccccatctgtaatgtccctccctgccccattctgcctggtaccaggtgtgtggaaaattttaccccaactcatggtttctacactgggaaatgtaagatcaatgcgggcaaccagtttctgcacaatcytgggttccctgtccctgccttaacccacaagaagcattgtgagtgcccgaagggagaaatttccctgaggacagtcaaagagtggggaggcaggactaccatctccttccctggaaactctgctgtgtaactcagccaagggagacatgaaatcagactgg

SEQ ID NO: 250141 - DNA, 498 bp, Homo sapiens
aacagtaagcaggtaaccatgatctccccacatggacaaagtgaggaacaagtgactgatcctgatgagatggtgatgtgtgagctctctaatcaagaattcaaaactgcagttttaaggaaactcaatgatcttcaagaaaacatggaaaagcagttcagaaatttatcagagaaatttaacgaagggattgaaataatttaaagaaaacaaacaggaatcttggaattgagaaatatatttgctgaacaggaaaatttattagagtctctcaacagcagaatggatcagaggaaagaatcaacccaaataagactcccccaaggcataaaataatcgaattctcaaaagtcaagggcaaagagaagattttaaaacagaaagagaaaagaagcaaatggcataaagaagctccaattctgtggcaasagattttcagtggaaatcatacagaccaggagggagtgacatgacattctcaaaatgctgaaaaaatat

SEQ ID NO: 250142 - DNA, 611 bp, Homo sapiens
ctggtgttgctgactcagatggggtcggagccactgaccctgtggacaatcagtggaggtgctcaactgaaagtgggctgagggcacgtcttctcctccatccctgggtccttaaggtawctgtggaccccagaccaactgacacaggagctagaaagaaattatttaggaagttagtgagggtaagagcgtccttggcaaggtttcccctttaacaaaaagcagcccaagataattccttttctaacaaagagcagcctgaaaaattgagctacagatgtagatgagcaagatggaagcttgcacaggtgaattccagtaggtgtgccaatagaaaagggctgcctggaagccaggtatgttcaacatggagactccatcctcccttttctccattaccacatgtacagtaaaaaaccaggcaacatggcaccggccaggtagacaatccatctgcatgacaaaagatcagagtggggcagccagcaaatggcacagctggtctaaacaatctttcaccccctgtataaatcagacactgcctcctgaagctcatctataaaaccttctgcatttcactatggaagtggcaacccattttccccaggacc

SEQ ID NO: 250143 - DNA, 520 bp, Homo sapiens
agatggacagagagagagggcgtgcaaccacgtggaggaggtgtggcgcctctcaacatctattccaytctcctagcgcaccttcctgcgactgcagcggctggagggctcaaaactacgtttcccagaatgccttgtggctgcgcatgtggccggaggttaggttccaccaatcaggtgcctccgcgggaagcttgaatttcttaccgaagtaagctgggcgagaggcagcccgaaggccagtgcagatcccggcgagaggctgcggcggtggagccggctggcggcttcctgatcgcgcaggaggagcagcggttcctggacggccctttctgagcgctggatttgagaatgccctggaggctcagcctagattctgtttcttctgagaggctctgtgtcccttaataagtcctttttgcttacactgtcccaagtgaattctgttcgcgcctctgagcaacgatgggtacacagacagggagaaatagatgcagacacggacagagacagggaaagt

SEQ ID NO: 250144 - DNA, 520 bp, Homo sapiens
agatggacagagagagagggcgtgcaaccacgtggaggaggtgtggcgcctctcaacatctattccactctcctagcgcaccttcctgcgactgcagcggctggagggctcaaaactacgtttcccagaatgccttgtggctgcgcatgtggccggaggttaggttccaccaatcaggtgcctccgcgggaagcttgaatttcttaccgaagtaagctgggcgagaggcagcccgaaggccagtgcagatcccggcgagaggctgcggcggtggagccggctggcggcttcctgatcgcgcaggaggagcagcggttcctggacggccctttctgagcgctggatttgagaatgccctgraggctcagcctagattctgtttcttctgagaggctctgtgtcccttaataagtcctttttgcttacactgtcccaagtgaattctgttcgcgcctctgagcaacgatgggtacacagacagggagaaatagatgcagacacggacagagacagggaaagt

SEQ ID NO: 250145 - DNA, 520 bp, Homo sapiens
agatggacagagagagagggcgtgcaaccacgtggaggaggtgtggcgcctctcaacatctattccactctcctagcgcaccttcctgcgactgcagcggctggagggctcaaaactacgtttcccagaatgccttgtggctgcgcatgtggccggaggttaggttccaccaatcaggtgcctccgcgggaagcttgaatttcttaccgaagtaagctgggcgagaggcagcccgaaggccagtgcagatcccggcgagaggctgcggcggtggagccggctggcggcttcctgatcgcgcaggaggagcagcggttcctggacggccctttctgagcgctggatttgagaatgccctggargctcagcctagattctgtttcttctgagaggctctgtgtcccttaataagtcctttttgcttacactgtcccaagtgaattctgttcgcgcctctgagcaacgatgggtacacagacagggagaaatagatgcagacacggacagagacagggaaagt

SEQ ID NO: 250146 - DNA, 520 bp, Homo sapiens
agatggacagagagagagggcgtgcaaccacgtggaggaggtgtggcgcctctcaacatctattccactctcctagcgcaccttcctgcgactgcagcggctggagggctcaaaactacgtttcccagaatgccttgtggctgcgcatgtggccggaggttaggttccaccaatcaggtgcctccgcgggaagcttgaatttcttaccgaagtaagctgggcgagaggcagcccgaaggccagtgcagatcccggcgagaggctgcggcggtggagccggctggcggcttcctgatcgcgcaggaggagcagcggttcctggacggccctttctgagcgctggatttgagaatgccctggaggctcagcctagattctgtttcttctgagaggytctgtgtcccttaataagtcctttttgcttacactgtcccaagtgaattctgttcgcgcctctgagcaacgatgggtacacagacagggagaaatagatgcagacacggacagagacagggaaagt

SEQ ID NO: 250147 - DNA, 613 bp, Homo sapiens
aaacccccttcttatcggcggttccttgacttgaacgttggaggttgaaaaacacaggaggaaaaaaaaatgtcctttagtcaactatcacgatttggggggtcggaygggaggtggtcgagagatatgcttctcgctgggggaaaggacccatcggtgatttggggatgggggcaggtaccgggtgcaatgggctgaacaaggggaagaacaaccagggggcattgaaaggtgtcagctcaccccacggctctccatccacaggtgagcctgcgaagacacggtgccctccagtgatacggtgctctccagagtcctactccgctcctgacggatgggtactgaggtcagggaaggaatgaacaggcgtggtccacgatgacaccgtggttctgcaggaggctgaagatggagaaggctggtcttaagtcgacatcccatcttgaagttcttgagtaggcacttctcagccagccttgttcagtatctcctaagggctggcttgggacagcaccgtggaatcctggaggttcaaaaatccaagaactccacaaggaacagagaagtcgaaggggcagggctccagtcaccagcaggccccacgaggacaaaa

SEQ ID NO: 250148 - DNA, 564 bp, Homo sapiens
tccagcactctttattgaatagggagtcctttccctgttgcttattttgtcaattttgttagagattaaatggttgtaggtgtgcagctttattttttggctgttatattccattgttctatgtgtctgtttttgtaccagtaccaagctgttttgattattgtagcctyatagtatagtttgaagtcaggtaacgtaatgcttatggctttattctttttgctcagaattgccttggatatttgggctcttttttggttctatatgactattagtatagtttttttttcaaattctggggaaaatatcattagtagtttgataggaatagcgttaaatctgtagattgcttcggacatgatatggtttgactgtgtccccacccaaatctcatcttatattcccacatgttgtgggagggacctggtgggaggtaattgactcatggggtcaagtctttcccatgctgtgctcatgatagtgagtaagtctcgtgagatctgatgtttttaaaaagaggagttctgcacaggtctctttatctttgcctgctgccattcatgt

SEQ ID NO: 250149 - DNA, 598 bp, Homo sapiens
ttgttatggatttctattccttgttggttttgatttataaagtttcatgaatttttattagacatacagatatttgtaatggaaaagctttactttgtcttacttttatcattataaagtttcctttttccactttaatgttatttgctctcacttttcaaatttattgtctgttttgaatgctatccctgcctttttatattaaatatttctagaatgtctttgcatatatttttatttttgtgtttctgagttactttctttgagatgagyaacttatgtgtgtgcatttgtgtgtatacatatctgtatattttatgtgtgtatatatgtgtgtgtgtgtgtgtgtgtgtgtctgtgtgtgtgtttcaaccaacatttcttttcatagagccatttaggtcatttatactgaattggtataaaaagcaggcttgatctgtcaacatattgtattatattcctccctctttattgtattcaaaaacggtctattgctatgtgactttcatcatatatggtttctttgaatatctttgttctttaaaggtcaaacttagaatcaatattttctaataattctttgtttttgttattt

SEQ ID NO: 250150 - DNA, 598 bp, Homo sapiens
ttgttatggatttctattccttgttggttttgatttataaagtttcatgaatttttattagacatacagatatttgtaatggaaaagctttactttgtcttacttttatcattataaagtttcctttttccactttaatgttatttgctctcacttttcaaatttattgtctgttttgaatgctatccctgcctttttatattaaatatttctagaatgtctttgcatatatttttatttttgtgtttctgagttactttctttgagatgagcaacttatgtgtgtgcatttgtgtgtatacatatctgtatattttatgtgtgtatatatgtgtgtgtgtgtgtgtgtgtgtgtctgtgtgtgtgtttcaaccaacatttcttttcatagagccatttaggtcatttatactgaattggtataaaaagcaggcttgatctgtcaacatattgtattatattcctccctctttattgtattcaaaaacggtctattgctatgtgactttcatcatatatggtttctttgaatatstttgttctttaaaggtcaaacttagaatcaatattttctaataattctttgtttttgttattt

SEQ ID NO: 250151 - DNA, 561 bp, Homo sapiens
ttattgctataaacttgttttaatactgcttttgctgttccctgttggttttggtatgttgtgtctctgtttttatttgttaaaaggaatttttaacatttcctccttagtttctttcttgacccatagattattcaggagaattttgtttaatttccatgtatttgtacaatttcaaatgttcctcttagtattaaattccagttttattccattgagtcatgaaagatacttgatataatttcaatttgttaaaatttttgagacttgttttcttacttaaaatatagtcaatcctggagaatgctccatgtgctaatgataagaatgtgtatctataggttttggttgaaatgttctgtaaatgttaggtccatttggtctatggtacagttctaatttgatgtctgttgattttctgtctaagtaatctgttcaatgctgagagtgggatgtcaaagtcaccaattattattacactggagtctatrtctttctttggatctaataatatttgctctatgtatctggacgctccacagttgggtgcataaattttta

SEQ ID NO: 250152 - DNA, 622 bp, Homo sapiens
aatttcttgtaggcagcatatagttgagtttcttaaaaatccatttgtccagtctgtattttttaactgggaaatttcatctgtttacattcaaagttattattgataggtgaggacttactgtttttattttattaattgttttctggctgttttgcatgtcatttgttctttttttcttctcttattttttatctttgcagtttggtgattttttkgtagagataagattttgtttttttctgttcctgctttgtgtatgtgttctactaatgagtcataattttgtgagttttcaggatggtagttatctttgtttccagatgtaaaactcccataagcatttcttgtagtgctgctgtaatggtgatgaatttcctcagtttttgctcatctgggaaacaatttatttctcctttttttctgaagggtagctttaccaggtatagcatttttcatagaagtatttttctttcagcactttgaatatatcatctcattctttcctggcctgtaagatttctgctaagaaatctgttagtctaatatggatttccttatatatgacttgatacacttttcatgctgtttttaaaattctgtgtttttgacttttgacaat

SEQ ID NO: 250153 - DNA, 559 bp, Homo sapiens
actcatcacttcagagattccaggaattgtaggagctatgtgccaggaactggaacagagattctctctctgtttcctattatatcgcaatatcacagggcctattcagataatccaggaaaatctccccatctcaagatccttaaccacatatatgaagtccctttgccatataaggtaacatattcacaggtttcacggattacaacgtgggcatatttagtggtcattgttctgcctaccacactaagtattattttagttgcttataaagagctaagagcaagatgacccctgccctsaattaattttcattctaatatttttacttttaaacagttacctcttgaggtcactcaggcaaaaagagtgccaagagtgggtgaggatgagcctgggagaaaaagtaaggaagtcaaacaaaccccagaagcatgcaaaggaggcaaaggcagactggtgtgaggatctgcgtcagtaatcaggaccctaaaatagcaaggagcctaaggcacgagcaggaaaaggagacagaagttcaggcacaagataccaggaa

SEQ ID NO: 250154 - DNA, 559 bp, Homo sapiens
actcatcacttcagagattccaggaattgtaggagctatgtgccaggaactggaacagagattctctctctgtttcctattatatcgcaatatcacagggcctattcagataatccaggaaaatctccccatctcaagatccttaaccacatatatgaagtccctttgccatataaggtaacatattcacaggtttcacggattacaacgtgggcatatttagtggtcattgttctgcctaccacactaagtattattttagttgcttataaagagctaagagcaagatgacccctgccctcaattaatwttcattctaatatttttacttttaaacagttacctcttgaggtcactcaggcaaaaagagtgccaagagtgggtgaggatgagcctgggagaaaaagtaaggaagtcaaacaaaccccagaagcatgcaaaggaggcaaaggcagactggtgtgaggatctgcgtcagtaatcaggaccctaaaatagcaaggagcctaaggcacgagcaggaaaaggagacagaagttcaggcacaagataccaggaa

SEQ ID NO: 250155 - DNA, 599 bp, Homo sapiens
aaggctgccccttccatcacaggcccagagttttcagagggcagagtggtttcaggtgacaggcccagggcactctccacaggcttgctgcccagatctctcatgggtctgtagtctctgcatcccagcacagtgctctttggccatactagctgtggctcaagcaaccacaactgtggctcaagctgcaactctgaaaaatgcaagaggcaaatcttagggccattcatrtggtattaaggtctgcaggcagacagaatgtaaaagctgtaggggcattgctttccctacctgaatgtcaaagggtatagaaggcagcctggtaacccaggcagagactgattacaggggcagagccacctcagagattccccaatagtgcaatgctgaatgaaactggggaagcaggactgccatcaagaccccaggactgtaaagctaccactgtagctctactgagagaggtgaagcatggtctgagcttagcaaagccatggggacggggctgccagagcccgtagtggtccaacccctgcaccagtgagcttaggacagggagccaaggagattattctccagctttaagacaatattatttt

SEQ ID NO: 250156 - DNA, 560 bp, Homo sapiens
catccattccctggcccaccaaactatctttgaaaaaccctaccctcataatttttggagagattgatttgggtaataactcggtctcccatgtggcgtggccagcctcgtatcaattaaactgtttctttattgcaatgccatggtcttagtgaattggttttgtctgtggaatggacaggaagaaccattgggtggttaccttattagcacttattgatatctaaaatatgtacttcttttttttattggtttagtgtctatcttctctcaatraaatcaaactccatcagagctggaaattaatttgttttgagcctagtacctaataagaactcaaaaaatatttgtcagtaagtaagtaaattaataaatcagaagtatttgctatcatacactataatgtatttaatccttcctttattaagagacattaaggttatatcgaatttttcaccgatataataaatatagaaattcatgtttgaatgggtactcaatattattcaccgattcacagttcagttgtgtaaggaagaaaagctaagttggacaaaagt

SEQ ID NO: 250157 - DNA, 520 bp, Homo sapiens
ccataacttggtgccacatatccaagaagttttgtttgaggccaaccaatatgtttctggatgcattgctcattctgtaccatgccagtcagtacttggtaatattttcccatataaacatcagtctcttgatatccatttcatattccttgtgctatttggccaagtatatttaraatgattcttttgttcccaacatggtggtgggtggggggacaactttactaagctggccaaaagacggagttagccaaataaacccatcctataattgggtcctgacatcacagtaatgggtcgttttgtcctttcaattgggttgttgccagttggagagcaagttaaatagtttcattgaaagaaaaatgcttcccatgtcccttttcagaaagggtattattaatgggccattgagctattttatctctggtcatatttgtaataccatcacgtaattttgagaagcagtgacatattcctgatattctatccaacctcatccttggaagggagatatcca

SEQ ID NO: 250158 - DNA, 513 bp, Homo sapiens
gaagtaataactgctcttcgccaaccagcattttcagggtactaatgtggaggtccccaagtgtctaacagacatgccacaccaccccacagagacatggctagccatactgatattttccctacagattctttagtcaatttacttatttcttggtttctcagttcctggctagcttgcaaagaattcagggtgagcaagtatatgaaagcctacctcaaaaggccaaaggagatgagatgtcaaagaaggagcctgacagatccagtttctcagacagaaaatatttagtagggaattacaaatgaagtgatatctggggtggccacaagatggtggattccttcacatgccctccagaaaagatcctttatatagcaagctttyggggtaaaacatgtgcagctggtcacatctgagactttcttgctaaaactcatgaccactagggaagttagataagcatctttatgacggattatctatgttacaagcatcgttttagggccttgc

SEQ ID NO: 250159 - DNA, 544 bp, Homo sapiens
ggaatattcagccatggcatcaaccctatttcactgaggaatattaatgtgctgctaagttctatctgtttatattttacgtattgtaacatttttacccaaatctaagacaagtttagtgtggaattctctttaatctattttttaatttaataataatattgtattttattaaaaggctttatttcataaataaatgaagcttgatttctccctcagtgatccagaaytaatagttttggagttttctgcatattaaaggttttatagaatttacctggaaaccatgtgaattagcttccactagatcagcagttctcacactttggtatacctcaacatcactcaaaaggcttggtaaatggagtttctttttcaggaaattgaaggtagcacccaagaatttgcagttttaacaagctgatgctattagtcttaggaccacatattaagaactattgccctagaatttgttgcagtaacaacacaaaagtaccaaaaacagagttttatttcttcatcacaattcatactggctatgtgt

SEQ ID NO: 250160 - DNA, 622 bp, Homo sapiens
taatattgtattttattaaaaggctttatttcataaataaatgaagcttgatttctccctcagtgatccagaattaatagttttggagttttctgcatattaaaggttttatagaatttacctggaaaccatgtgaattagcttccactagatcagcagttctcacactttggtatacctcaacatcactcaaaaggcttggtaaatggagtttctttttcaggaaattgaaggtagcacccaagaatttgcagttttaacaagctgatgctattagtcttaggaccacatattaagaactattgccctagaatttgttgcagtaacaacacaaaagtaccaaaaacagagttttatttcttcatcacaattcatactggctatgtgtcagccaacaatccctggaagtcttctatgggtcttctcatccttggatccagactgccaaattttcatattatgggaaaagaagaagggcaatattacgctatagctcttaaagttttgaccaaaaaatggtgtatttcacttctgttttgattttatggactcargcaagtcacattgtcaacccttatgtcaatgggattggagaaggagagatagaattgaggacaataat

SEQ ID NO: 250161 - DNA, 584 bp, Homo sapiens
gaaaataggtgagactgaaatttaacattgcttcctagacagcacattagaacttaatgtttgccactaaatagctatgtggttataaggcatgtatcagtcagacagtttattccttcctaggtactacttgctttgcaaatcaggaattgagactgaaagctccttgaggacagggactggaccatgctgacttcaattctcagtgcttacccattataaatgcaaacaatccatactgaaattaaatgagtaaatgaaatagttaagataatttcagatccaaataatggaaagtaaaaatatcatacttactaaatacatacctggacattagagaactaagattgagatgtaacataccatttagtaactagggwtgttatgcaagtcctttgaattctctaagtctgaatgtccttctttctagaatggaggtaataagccaatctatggcaacatggaattgtgcaatttatccaattgtacttaatggttccaaacttagtgaattgcctcaccattcttctagttgccttggtcaggaacctaggtgccatgattgcctgctttttctttgttca

SEQ ID NO: 250162 - DNA, 651 bp, Homo sapiens
tactctaaataaagtaagttcccttaggatcaagtttaaataccctaggatgatcatgaacccctttattacctggccttgtgtagcttctacttttgctactgttctttcctgcctcacaccctcttgtccattcataactaacttcttataagcttttcaacatgtaatgctcttcttaaagactttgcatatactgtttttcttatttgaaacaacataccttctctttctacctctcccaactttttctctatctggcaaactcctcttcttcattcacttatttactaatgatttcccttaagaaactctttctgaatttcacctcactcccagactcagtgacgcasccctgtcttctgttcctgtcataccatgtgctttccttattgtgaattttattagtctattttttagttagttgattaatacaacagtcggaactgactgttaattccattgatacaataatcatgtctatcttctgcatttatcatagcacctgcctgacacatagtttgaaattccatgaagagtatgaatttcagttactatatatgaaacataggcactaaaggacagcaagagtaaaatatataaagatctttacaattataatgagaaggtttatattaaaccttacttctt

SEQ ID NO: 250163 - DNA, 651 bp, Homo sapiens
tactctaaataaagtaagttcccttaggatcaagtttaaataccctaggatgatcatgaacccctttattacctggccttgtgtagcttctacttttgctactgttctttcctgcctcacaccctcttgtccattcataactaacttcttataagcttttcaacatgtaatgctcttcttaaagactttgcatatactgtttttcttatttgaaacaacataccttctctttctacctctcccaactttttctctatctggcaaactcctcttcttcattcacttatttactaatgatttcccttaagaaactctttctgaatttcacctcactcccagactcagtgacgcacccctgtcttctgttcctgtcataccatgtgctttccttattgtgaattttattagtctattttttagttagttgattaatacaacagtcggaactgactgttaattccattgatacaataatcatgtctatcttctgcatttatcatagcacctgcctgacacatagtttgaaattccatgaaragtatgaatttcagttactatatatgaaacataggcactaaaggacagcaagagtaaaatatataaagatctttacaattataatgagaaggtttatattaaaccttacttctt

SEQ ID NO: 250164 - DNA, 651 bp, Homo sapiens
tactctaaataaagtaagttcccttaggatcaagtttaaataccctaggatgatcatgaacccctttattacctggccttgtgtagcttctacttttgctactgttctttcctgcctcacaccctcttgtccattcataactaacttcttataagcttttcaacatgtaatgctcttcttaaagactttgcatatactgtttttcttatttgaaacaacataccttctctttctacctctcccaactttttctctatctggcaaactcctcttcttcattcacttatttactaatgatttcccttaagaaactctttctgaatttcacctcactcccagactcagtgacgcacccctgtcttctgttcctgtcataccatgtgctttccttattgtgaattttattagtctattttttagttagttgattaatacaacagtcggaactgactgttaattccattgatacaataatcatgtctatcttctgcatttatcatagcacctgcctgacacatagtttgaaattccatgaagagtatgaatttcagttactatatatgaaacayaggcactaaaggacagcaagagtaaaatatataaagatctttacaattataatgagaaggtttatattaaaccttacttctt

SEQ ID NO: 250165 - DNA, 550 bp, Homo sapiens
gatgtgtttctaaatttggaaaactattccttctgtggaaaatctatagagagctatccactcagtgctgtctatatctagttcaattactaatgcattttcttcctatattgttttatggggttataggtgattcctactttccttagagattgatttactgattacattttgtttctcaatatcttataattgagattggcttcagagggaagggtgactgaattacagataactttaccagttatcttagactggaagccctgaatattcttttcctaactgggaactactacactgagagtaaaaatggaggattcatgtttccctgacagtgggcatattattcacatatagatagatagatagatagatagatagatagatagatagatagakagatagacagatcatatagtaaattttaaaaagggatgtggcatgtttgagtttgaagacaaatcttggtctaatttggcaacaaaatagcaaatagttcaacaaggagaataaacttttcttcatgcaaggaatttcagtacagttgaaa

SEQ ID NO: 250166 - DNA, 587 bp, Homo sapiens
tgtgttattaagacactgaagcttaatctcacagggaagctttgggaaatggtgtaaaacatatgcctcagaattcttccagacaaggggataggaaggtgggatgtggatactcccgcacccacaatttgttggttagagctatccacagtggaacttggattctcaggcacccccaatttattgtgcttgtgtgcaaaggggattccagtagactgagagcagccctccaaaaatgtttcaggtccatcattggaagtctgatggcttacagagaaatggtcaggggatctgcagggaaatgaagcaacaccaacattgtctgttccagctatttagctgaaatctaatatgaatacactgttcttggtatattgtatttgtttttacagttttcttctatttcttgcaattggtactggttttcgctttcatttttgtttctttataaaataaatttatttaaggaaaattaattgatctaaagaaaaatgtcacacagttaatgttccagatggtatgaaaaggtggcaagartcatgaaggagtagaattcaaatggctgaagtttgagaaatgcaggcata

SEQ ID NO: 250167 - DNA, 627 bp, Homo sapiens
ttagtatataggtagccagccatcttctccactgtgttcctaccccactggtccaggtaggtggtgaaaaaaatgtttttattggaacaactgtgtcaagaaataataacatttccaatacctgaagtgcttagtccctacctctaccctgcaaaggtaattaccatatatcagttctgaatttcatatacattgaatcatacattctatattgtttagtgtctggcctctttcattcatcattatatctttgagatttatccatttcattgcttgcaaaagtgattaattcattttcatggctaactattccattggatgaatgcaacacagttttaaagttcattttaatagtggacctttgaattgttttgatttttacactcttacamtgagtgctatacaagtttttttgctttttatttttcttgcatatgtgtacccatttctactgtacattgagttagtagcaggtttgcttagatcacaggctatgtgtatattcagctttgcaagatactctcagttttccagcaacagtataagagatctaaattctccccatcctggcaaatgctggtattgatatctttttttttatgaagattttgttcaagtcttttgttc

SEQ ID NO: 250168 - DNA, 574 bp, Homo sapiens
atgacattaaccagctgttgtaataaggtggattccagctttcctgtgccccaatcattgcagggtagatatttcctactctgcttcttcacaaaggcagctgtgtacctagtggcccatctcccctactttgggatgtggctacagaaattattcctcttctctataggataagcctctgaagrctgagcctgaaaatgcccaaaggttcttgtcattactgatttcagaggtctggaattgggagcaggtcaaatcaaaatttgcatttcagctaaattaactctttacaactagtattttgaatcttacagaattatgctgttgacagcagtggttctcaaacattagtatatctaaaaatcacatggaaaactgtagattcaggcactgccacattcaaagcatttttgaatcataaatgccccagtgattctgatgaaaatgattcctggagagcagttcaggagacactggaaggatggagtgcaatctgtccaggtgagcatacccttctgaaatcctctttaatgatttttctgtatctgtttaaatgcctcattggctgagacac

SEQ ID NO: 250169 - DNA, 574 bp, Homo sapiens
atgacattaaccagctgttgtaataaggtggattccagctttcctgtgccccaatcattgcagggtagatatttcctactctgcttcttcacaaaggcagctgtgtacctagtggcccatctcccctactttgggatgtggctacagaaattattcctcttctctataggataagcctctgaagactgagcctgaaaatgcccaaaggttcttgtcattactgatttcagaggtctggaattgggagcaggtcaaatcaaaatttgcatttcakctaaattaactctttacaactagtattttgaatcttacagaattatgctgttgacagcagtggttctcaaacattagtatatctaaaaatcacatggaaaactgtagattcaggcactgccacattcaaagcatttttgaatcataaatgccccagtgattctgatgaaaatgattcctggagagcagttcaggagacactggaaggatggagtgcaatctgtccaggtgagcatacccttctgaaatcctctttaatgatttttctgtatctgtttaaatgcctcattggctgagacac

SEQ ID NO: 250170 - DNA, 529 bp, Homo sapiens
ttcttggaaatgaaatgccaaataatagtgctagtcaattagacctcagaggtggtctctctttaagaaaacccattttccaaaagtggaactgagtcaacagctacagagatagatttcttttctttacaagatcattttttctttatatgtgcacagtctagcgtctctggtttgtgttgaaaacattttttttttttttacacacacttgttaaggaatacactcaccaggcacagaaatgtcttcctttggggtaaaacacatgacatgttttcaatattcggctgatcatttcctcaaaattattcctgtgattatgagaaattcagcacagggaaaaaatgtggaccacatatgccctctccactttggtaaatcatttaccctaagcataagcactcaaggaaaagtggactttcccatactctgatagtaacctgctctccattcctttgcaacagatggcctctgtcactaggcccaattgccagtggatasagctctccatattttgccaggatcttgg

SEQ ID NO: 250171 - DNA, 545 bp, Homo sapiens
ctactatgtgctaggtactgtaaaacagtaccaaaaaggtgctggaaaatacttcagtgaatataacagcccaagttcttgctttcagtgattttacattcaagttattctagtgtgtgtgggagcrtaaaaggtaacagctgtgaaaatcaataatgcaagtcaagagaatagagagtgaggggaggttcttttttaaataagtcctctctgcagagatgaatctgagcagacacctgaatgaagtgaagggtgagcttctctggtcacttgaatggagagatccagatggtggtagcatcaggtgagaggtggatggtggaggtggatgcatgattggcaccatctgggaacagtgtggaagtcaggaagtctccttagcgggagcagcctgggaaagagagagtggtgagagttgagatgatggaagcagccagtggccagctttgtaaatttacataggtcatggtgagggttctgggtttactcctagtgagatgacaagccatcttaagggcagtgagtatggaagtgatatgttccaa

SEQ ID NO: 250172 - DNA, 545 bp, Homo sapiens
ctactatgtgctaggtactgtaaaacagtaccaaaaaggtgctggaaaatacttcagtgaatataacagcccaagttcttgctttcagtgattttacattcaagttattctagtgtgtgtgggagcgtaaaaggtaacagctgtgaaaatcaataatgcaagtcaagagaatagagagtgaggggagrttcttttttaaataagtcctctctgcagagatgaatctgagcagacacctgaatgaagtgaagggtgagcttctctggtcacttgaatggagagatccagatggtggtagcatcaggtgagaggtggatggtggaggtggatgcatgattggcaccatctgggaacagtgtggaagtcaggaagtctccttagcgggagcagcctgggaaagagagagtggtgagagttgagatgatggaagcagccagtggccagctttgtaaatttacataggtcatggtgagggttctgggtttactcctagtgagatgacaagccatcttaagggcagtgagtatggaagtgatatgttccaa

SEQ ID NO: 250173 - DNA, 451 bp, Homo sapiens
tgtaatattttctgtactttttggaacatttcagaattagaaattgttttaaaaattgttaaagaggttggtcaacaatgcaagtgttgcagagattaaatgagaccagtgctgagaaaagtctatcggtcytgcaaccacagagctgactgatggttcagcaggggagactcagctggttggtggcagagcaggattagatctcaatcttacgagccttggtgttttcatttcttccacttgatcataccgcttccctatgtggttaaaattccttcagaggtccccaaatccagctacaaatctagtagcagggtgaggaaaactgagggcagtcagttatccccatgctgaggcaggcacagccaggagaggaagtacgagggtgcaagaggctgtgccagaggcaactgtgatatctgctgaaagatgctaagttactaactctcac

SEQ ID NO: 250174 - DNA, 431 bp, Homo sapiens
ttgtgagaattccctcactatcacaagaacagcataggggaaaccacttccaggatcgcatcacctcccatcaggtccctccctcgacatgtgggggttacaattagagatgagatttgggtggggatagagccaaaccatatcaaggaggaaagtgaagttgagtacttgccttgagatctaattgactgaattaactgatgtgtagacagggcgaagttgggggtaaaatctatccatggctacctctctaaaaatctagaataatagtgaatgagatagcaactratgatttgactatgagatggtccaacttctctcacccactcctttactctctgctgccctaatcctcttaaacctcataggatgcatgcctgaaattccatcacagattttctttttcttttatctggggctgcactctgatg

SEQ ID NO: 250175 - DNA, 427 bp, Homo sapiens
ttagtcactgttgtgtccctgaagcttagcatggtgtctagcacattattgttggcatgcagtaaagattggctgaatgaataaataaaaggaagaaagaaaatcatagatctagacgatattttatatctgtatatatacatacacatacatctatatatatatagtattattaggattggtgaataagctttttaattaacaaagaaccataawtttgtaagctgttttaaacattctcctatggcaaagaaagggcagcaggtataattgagcacttgaaatagtaacattcctttactttgtaaaatgatatttttagtgcattcatttctcctctaattgttgctgcatttatttcagttcccatgggaacctagagaaggactttccctatattccccacctctttgggcttcagcaaaag

SEQ ID NO: 250176 - DNA, 619 bp, Homo sapiens
ttttaaaaattgcctttcttgttggcgtttttattgattctttccaccaactacccaaaataattaaatgcataataaggagcaaaatgtatggaatcatccaaatgcttgctcttgattattttctaccgcattaaaaacttgcttttgcataactaaatctgcagggggagagtttacaacaaatgctcataataatgaggtgcctgccactgagcctggtggtttgcatgcatcatctcacttaagccttgcaacattcctgtgaatgaggtaactgtttccacttcacaggaaagtggagrttgggagaggttgggctccaggtcacacggtaagtgggggagccagtgtccaagcccaggtatggcagaactaaagtctgagctcttaatctctgcattacactcatgaaatacattgattcaaaggtgcagtcatcctcatttccacagactaggtgtcatagatgaacacaatgagaaggaacagttttcactgttgtgttcagcctcgaaaaggatttagttttggtgaactattgcaaggctgtgaggaagttttttggaaagcaggtctggggtagatcaacctaaagtaccacctgtgacagttttaa

SEQ ID NO: 250177 - DNA, 619 bp, Homo sapiens
ttttaaaaattgcctttcttgttggcgtttttattgattctttccaccaactacccaaaataattaaatgcataataaggagcaaaatgtatggaatcatccaaatgcttgctcttgattattttctaccgcattaaaaacttgcttttgcataactaaatctgcagggggagagtttacaacaaatgctcataataatgaggtgcctgccactgagcctggtggtttgcatgcatcatctcacttaagccttgcaacattcctgtgaatgaggtaactgtttccacttcacaggaaagtggaggttgggagaggttgggctccaggtcacacggtaagtgggggagccagtgtccaagcccaggtatggcagaaytaaagtctgagctcttaatctctgcattacactcatgaaatacattgattcaaaggtgcagtcatcctcatttccacagactaggtgtcatagatgaacacaatgagaaggaacagttttcactgttgtgttcagcctcgaaaaggatttagttttggtgaactattgcaaggctgtgaggaagttttttggaaagcaggtctggggtagatcaacctaaagtaccacctgtgacagttttaa

SEQ ID NO: 250178 - DNA, 552 bp, Homo sapiens
gaattggggcacagaaaacaataacagaagtcatttcagataacagtaaatgctgtaaagaaaatgaaaaatgtttgttggctgtggtacaytaactgggggttaaatttaatctgaggcctgaatgacaagaagtctgtcactgaagaatcattccaggaagaaggcacctcaaatacagaggccctgggggtggaagagatgagtttcaggggggccgttagtctctaagaaggacagggaagagaaccaccatcacctcctttgttagtgctttaactcaactaacatgacctaagatcaaatgaatttttggtggccacatcagcctattaaggtcttttttctaagtgtacagttttcctcattgaattaaatcttccctatctgatatttgtactgttgatagttagaacttaagtgtagaagggtgatttaaataagcatatctggaatttcttttcatctgaacttcagtcataaacaatctatcaatctgcctataaaaatacttctcagctgaatggagggactttctcattctccaactgc

SEQ ID NO: 250179 - DNA, 552 bp, Homo sapiens
gaattggggcacagaaaacaataacagaagtcatttcagataacagtaaatgctgtaaagaaaatgaaaaatgtttgttggctgtggtacactaactgggggttaaatttaatctgaggcctgaatgacaagaagtctgtcactgaagaatcattccaggaagaaggcacctcaaatacagaggccctgggggtggaagagatgagtttcaggggggccgttagtctctaagaaggacagggaagagaaccaccatcacctcctttgttagtgctttaactcaactaacatgacctaagatcaaatgaatttttggtgrccacatcagcctattaaggtcttttttctaagtgtacagttttcctcattgaattaaatcttccctatctgatatttgtactgttgatagttagaacttaagtgtagaagggtgatttaaataagcatatctggaatttcttttcatctgaacttcagtcataaacaatctatcaatctgcctataaaaatacttctcagctgaatggagggactttctcattctccaactgc

SEQ ID NO: 250180 - DNA, 425 bp, Homo sapiens
ttatgcagtaggtatctagagcattaagtactcatcaggtcgtatgttaaaaaatgtgctcccttttcattttctgttttagttattgttgtttatgttgactaaaaggattcaaataggtgctagtttttctatgaaaaccctcctgttatttcctaatctctctttttaaaagatgaataggtctcaagctcacaaktttttttttttttttttttttttttttttttttgctggaaacactattgtcttagttgggaccccaagaagcagatctcatgataaggactaaatgcacattgttaatttggcaggtgccagtacactgataggggaataataatataaaaaatggaataagacacagtcaataagatgtgtgttattaagacactgaagcttaatctcacagggaagctttggga

SEQ ID NO: 250181 - DNA, 610 bp, Homo sapiens
catggttagttcagcagtaatttgttgtcttaaaacaagcattcttcaaaagaatgataattgtttggagaaaaaagaaaagccatgctgtcatttgatctaccaagccacctctaaagataatcaggaacaaatgaaaacacttattagaaagaatgtttacagaaacattttttatcatactgaaaaactggaagcaacataaaactccatcagtagaagagtatgcagctattgaaattaaagagctataattggtaatattaaagataacatttattaagctaaaaaacaggttatagaacagcatataaaactgcatacatatatcagtatgcaaaattcagaaatatctttggaagtattatccctgagtactgggattttgtgggatttttamacttcctctggaaaaaaaaattcagaaaaatcacaatgatcttgtatcatttttataaaagatcacacttgtatcatttttataaaagatcacacaatctacagcaaatatgctcagtaactatatagtgccccataattgtgtggtttaacctttctgaaaggcagacactatcacaactgcaaatgtacattcactttgatttagcaa

SEQ ID NO: 250182 - DNA, 393 bp, Homo sapiens
atcccagcactttgggaggtctaggctgtcagactgcttgagctcaggagttcaagaccagtctgggcaacatagcaaaactccatttctacaaaaaatacaaaaattaggcaggcatggtgatgcacacctgtagtcccagctactcaggagggtgaggtgagaggatggcttgagtctgggaagcggaggttgcagtgagctgagattgcgccactgcactccagcctgagtgacagagccagaccctgtctaaaaacaaaacaaaacaacaacaaaaaaaamcccaataaaacaaagttatggaatcctattatgtactatgttagatactggatgaatatgacataatctctacttttgaggaattgatggtctgtaggagaaatgtag

SEQ ID NO: 250183 - DNA, 560 bp, Homo sapiens
ataaacaataatgcctacagttgtttgttttgataaaatcaccagcttgggtccctcagttacamtcgcatacaggccccactcatggttcctggggtaacataaagttgctatgccctgaatgagaggccaaggtgggcagattccttgagctcaggagttcaagaccagcttggacaacatgacgagaccccgtctctacaaaaaatacaaaattagctgggcgtggtggtgtgcacctgtagtcccagcaacttgagaggctgaggtgggagcctgggaggtggaggttgcagtggcccgtgaccacaccactgcagtccagcctgtgtgatacagccagaccctgtttaaaaaaaaaaaaaaaaaaaggaagaaaagaaaagaaaagaaaatgtcagttgtgttggaaaagaaaatgttttgagcagtaccctagttctgtggctagagagaggagaaagagcaatgtaatttccagaaaccttttctggaggactagattaatggaagtgtggattcacccaagctgttgttggctcttaagttggttttgtttt

SEQ ID NO: 250184 - DNA, 603 bp, Homo sapiens
aagattccctctgaatcaaaatcagacacctaactatgttctaggcttcaagtaccaggtcgtctttacctttgcccccgtgtctgccataattcattaaagattttctctctctctctcttttaattgatatataaatagctgtacaaaatttggggggtacatatgatattttgatatatctataaaatgtgtaatgattaaatcagggtaattgggatattcatcaccacaaacattcatcatttatttgtattgagaatattatagttcttttcttctagctattttgataaatgcaataaattattgttaactgtagtcttttctttctctctttggtcatgtcagccttcttatgactttgtccaagatagctttacatagaagcggtatccaagtgtgcatgatttaaatgccactcccaaaattcctccaaagagtcttccatgtgctggacattttrcctagattaagtcttagggatccctttcatattaagatccattttatattaagaaattgactaccaaagtgatatctggttggctttttcttattgatgacacttaactattcttagagaaaacttagcttgaaaaa

SEQ ID NO: 250185 - DNA, 577 bp, Homo sapiens
gtcccctacaaataatagaaaaaaacaattttcttgatttaaacctgtagtttgagtaggtagctgaaagcaacatttctaattagatttggaaactgcttaaatgcaggttcctgttacttgctaataaaagcatttctaattattcacctcagagtgaaaatgactcagaactcactctatctgaagagaaatagaagtgtgttaaactaactaaagaagtgatttccccagaacaattcttgctcatgacagaaaggaaggcaactgtgaaggagtatagatgttggagtaaacagttgtgagagcaggttcattggcaaaggagaagagagaagagcaaytgtctttctttttttccacaagttaattcgttgagcttttttttttttttttttttgagacagagtctcactgtatcgcctaggctggagtgcagtggccggatctaggctcactgcgacccctgctgcccaggttcaagcaattctcctgcctcagtctcctgagtagctgggattacaagcacctgccaccacgcctgactaatttttgtattttcagtagagatggggtt

SEQ ID NO: 250186 - DNA, 580 bp, Homo sapiens
ttttgcagggtcctttgctgggcagacagatgactcagtgaaatctagtctatttattcgttaccggagaggaagtgattaagctttccaggctggaacaacatccaccatcaggaactgggattgggccttaggaatgagctgttgcaaatgagagggccaagggaagttatttctgttactagtggtgttaccttctatgcagtgaagtggttttgacaaccaatgcattaggatctgcaaaattgaaggatgagggactgaagcggaaaacatccctgacttgtgctggaaagcgttaaccccagcaaacagcttgttgaattcaaggcagaacttaagttagtcaggaaagaaaggagcagagtagactagtgatactcttactcccttctccacccaacccaaggggaacagtataactaaactcatacagcctattcccaaatgaggcaaaattatctgggagttgctaagccccagraaagagctaaattaaacggattacaccctctgccctccaaaatcaaatgaacacaaagttgatccaccatttttaagtgtaaggagcaacaaaact

SEQ ID NO: 250187 - DNA, 613 bp, Homo sapiens
gccaggctacaccttggaagggagctcaaccgaaacactgagaatggaagagcaaaaagatggaaagaacctgggtttgtttttttaccttttcttttttttttaattacaagttgagcatctctaatatgaaaatccaaaatccaaaacacttctggtcccaagcattttggataagggatattcaacttgtattgtggtaaaatatatataacataaaatctatcattttagccatatttaagtgtacaattcagtggtattaagtacatttcgcaatgttgtgtgtcatcaccattacccatttccagaacgttttcaacaaccccaaacagaaactctgtacccattaaacaatagctccatattcctccctgccctcagcccctggtaacctctattctttctgtctctgtgaatttaccttatataartggaatcctataatatttgtccttttgtatctggcttattttacttagcataatgttttcaaggttcacccatgttatggtatgtatcagaatttcattcctttttagaactgaataatatttcagtatatgactgggattttaatgacacatttgagcccctgtaccttggcggacct

SEQ ID NO: 250188 - DNA, 590 bp, Homo sapiens
actaatatgaagagatttaagccccaggggacgtctgaacaccactccacgaagtccctaactaccacactatcaaatgggctgtgaatcggtggtgggaaatgcctccaaatatgcagatttcagcagaaaatacatttgactgggttcttttaaaaagttccaccattctcacatctatttctgattttatatgcatcaacgcttaacatgctaaatgttctattctggcaattcatatttctgggtgatagtacccgaatgcttattgcaacatccatgagaggtgcctcaggaggaagtgtgatcagatctcctggggccattttttttctgtgtcctttgagatcaaaattcagagaataaaagtgttgtcacatttttaaaaatgtctgtcatacaagtttttgttcaaggttcaatacaaggaatatggattgagaattcctttttcatatccatgaactaggaaaattgtgaaagaaaagtccttgaaactctgacaatgtcaagtttactgaaacatcaaaaagtaccacaattttatagrctgtcctgcagaaatttatctttcttgtgctccataggtt

SEQ ID NO: 250189 - DNA, 558 bp, Homo sapiens
aatgtgagccacagactatattccagagcatttctacttgttctttatgggcaaaggccatacctcaagaagaaattataacattcataacaacataagtaacatggctacatatgcctacataattcaggtttagaagaaactgttcaacaaaagtggtgaaaactgtcatgggaacaaaaaccaaggaaaaaaacatagagaatttcattcaatgtatgtgagtaaaaatgtttgcagctgcctctgactagtgaggaaactgctgaccactccgtcattcactctgtctgtactttaggttctcgctccacggtatattgtgctagttaccaagaggtattctaaggcataataactctaaaatgtgacatatatccatccaaaataataaaaccaaattaatttggactctcttcattgattaggattcactgctgacttttgttactgcatygtaaaaaaaaagggttttgctatgcaaagttgcagaaagaagtttcccctgaatgagaaaacaatagttaaaccatccagaggcatctatttactgtcaat

SEQ ID NO: 250190 - DNA, 565 bp, Homo sapiens
gactggtgtagaacactcagcaactagtgggttttcctttgagcaaaacccacacaatggcactttgcagcaagaacccagaatctcaccaagcgtaattcttacatacacaggttactaacgagtctttgtagatgcctgcctatcttggaaaggattttaacttcaaacataaagccgaaaggcagatcagatgtgataactgactccatttgcatacggatgcccagcaatccatttttgagtggtgagcatttttgagtgagagcatttttgagtggtgaactgtggctggtcctatatataggtagtagcagctacttacataatattttgacaactctcccaagcactttcaagtctctaatttccctgccacccatcaatcaaagcctgtgtggtagggtattatagaaaaaacatattttgggagacgaagcaggaagatggtttgagtctaggagttcaaaaccagcataggcaacatagggagatcscacctctaccaaaataaaagattagctgggtgtggtggtgcatgcctgtggtcccagctactcaggag

SEQ ID NO: 250191 - DNA, 550 bp, Homo sapiens
ccagaaaaaaacgaaaggatgagtattgattgccaaatatttgtttgcatggccagagagtcaatatttcagatcatgcaggccatactgtctctgtggtaactagtcaattctgccactatagttcaaaaaaagccatagacaacaagcaactgaataatcatgactatattcaaaactttatttacaaaaacaggtgactacctccaaagccacagtttatcaacacttaacatagaatgaaaattttaacatatgtatgttatgtcttggagacataggtctccaaatagaccayaaggagagtaatggggtacagacagtaaatgaaaaaaaaaattaccaagagttttttaaaactgatgaatgacaccaattcaaaaaattcaggagttcaataaatccctaatatgataaatataaagaaacccataccttggtttgcaagaaaagcaaagagaaagggaaaatcataagctagagaaaaagaacactttcaaagttgtgacagagtggcaactaacttctcagtatcaaaaaacaaagactg

SEQ ID NO: 250192 - DNA, 487 bp, Homo sapiens
tgggcatcactagtccaatccaagttgcacggtggcaggatcagtgctctctcttttcagtcacacctctagtgagaggtgagtcctctgctgattgggagtccaaacaaccttaaagtccagcctgacagaatcccttgttatacaacattcagacttatgagccacttgtccacaggacagtttataaggcatggttccccctcratgataggagccccatggtgttagaggactaagcaattttagcaaatatacaagcaactaaatatacaaataaataaaccaaataaacctctgacctaactctcaactctgttaggaaaggaaagcaaatatcagctctatcagctcagaagtaagactctttctgtctgcgacacttgggtgtgaacagccatatgcaaagtgtatcagacaagcaagtttatgctattggcatggaagtgatgcaaatcccaggccaatgaaaaaatccagctttgta

SEQ ID NO: 250193 - DNA, 601 bp, Homo sapiens
gtgtagtaggctgtaccatctaggtttgcgtaagtacactctatgatgttcatacaaggacaaaatctccgttgttaatcaacacatgactgcacatgtaacaatatgttaacaatgattaacacgattgtacatgtaacaaaatgttaacaacaaaatgttaacaatgggcttatacttactctttcatgttgtttttctgaattttctcatgtttctatggttaagcatgaattcttggtgtaattttaagaaaaaagagttaacaagaggaaaagaaaaaaactggcctaaaatacatttcaaggaatttgggaggcttgggaaacacagaaaaagtcttacagcagaaagacctatatttcgattccactgaggcaactgaaagggtgaggtggagcctaaaggtaccaagtcacctggtagttggctagtatttgtccagtgtcacgtggttaaggaaaatgccaataatcccgatctccagcttccccagacaatgccacaccagcctccagccagcctcacttagaaacctgtcagcatcagagccttttccctcctatttgaggtctggygatctgcacaaagcaaagtgacc

SEQ ID NO: 250194 - DNA, 597 bp, Homo sapiens
gaaccacactactggcatgaatgtctactgttagcaatgcaacaatgggacaccactctctcaagaggccacatacaggtggcatcatccaatggccaagcgcaagtcacctgtctcccccaggctattctaggcaggaagaggcctcagctaggcccttgggcttcctcccaggaccatcacacagagtacaaaagaaaattagggtgctataaaccaggatgattcattggataacccttaagcatcaaacatttatagctgtcccttacgactccactactttttttttttttcttaaatagagttcaggctggtctcaaactcctgggctcaaatgatcctcccagctcagcctcccaaagtgctgggattacaggcttgagccacctcaccaggacttctattactcttaatagctgtttattctgtgctggatctggaaacatgaccaytgtcaaatacacctaagaaacaaatctctagttaatgtcaatttgtgtgtgtgtgtgttgggtggcggggtgggatatacccatccataagatcacaggacaaaaaaacccatttattttatttaattattgttggcattga

SEQ ID NO: 250195 - DNA, 614 bp, Homo sapiens
caatgacattcatttttgtaaaatattttaaaaaaccgtttatactaagtatatagtccctttttaaaagaaagcaatttactttcaaacaatatgttaatgtatagatataatgcatttattatttttaccccttcaccaaataattatagttctttaagcgcaggatgttatctaaaacatataagcctaacagttatttgtgatattatccctttctcaagcagtttataattaaatgatcaaaatttaataacaaatgatatcatcacaaatactataaaagcgtaagtattcttataaatactagaaacttcatttttgaggagaaaatgtgaatgctggtatgcacatgtaattcttggaggtacaaagtttatgattctgtgaggggatgaggggcttgggaaagagatgaaagaacattgcactacagaggaggaaaaaaaagatttgcacmcagagtggttcatgtctgctgagaatctctgttcagtggtgtcctcaatttcttactagagcccagtggccaaaaatatcatttgtgcagatttgtgtaaccagtcctcctcaggattaaaaatacatttttaaaagttatagctactgaattt

SEQ ID NO: 250196 - DNA, 509 bp, Homo sapiens
ggttcatgtctgctgagaatctctgttcagtggtgtcctcaatttcttactagagcccagtggccaaaaatatcatttgtgcagatttgtgtaaccagtcctcctcaggattaaaaatacatttttaaaagttatagctactgaattttctaatgaaacaaatcagracaaaagatgttatgtcctagtctgtgcaaacagcagatgtcttagcccattagggctgccataacaaaaacatcatagactagagggcttaaacaaaagaaatgtatttctcagagttctggaggctgggaagtccaagatcaaggtgccactatatctggtatctggttagggcccacttccttgtttttagatgtgtcttctcactgtgtcctcacatggcagaaggggtgagggagctctctagggtcttttttatcagggcactaatcccattcatgagggctccacctcatgacccactcatctctcaaaggtcccacctccaaataccaccacat

SEQ ID NO: 250197 - DNA, 526 bp, Homo sapiens
tttacattcccaccaactgtgtgtgagggtttacttttcttcatatccttgccaacacttgtatcttttgtctttttgataatagccattctaactatagtgaagtggtatctcattgtggttttgatttgcatttccctgatgattagtgatgttgagcatttttttcatatgcatattggccctttgcatgccttcttttgagaaatgtctattcaggtcttttgctcatttttaattggattatttgggacttttgggggtgggtttgttgctactgagttccttatatatcctgactattgacyccttttcagatgtatagtttgcagatattttctcctattctgtaggttctcttcactctgctgattgtttcctttgctgtgcagaaacttttcagtgtgatatactcccatttgtctaattttttgctgttgcttttggtcttatccaaaaaaaagtaattgcccagtctagtgtcatgaagcatttcccatgtgttttcttccaggagttttatagt

SEQ ID NO: 250198 - DNA, 526 bp, Homo sapiens
tttacattcccaccaactgtgtgtgagggtttacttttcttcatatccttgccaacacttgtatcttttgtctttttgataatagccattctaactatagtgaagtggtatctcattgtggttttgatttgcatttccctgatgattagtgatgttgagcatttttttcatatgcatattggccctttgcatgccttcttttgagaaatgtctattcaggtcttttgctcatttttaattggattatttgggacttttgggggtgggtttgttgctactgagttccttatatatcctgactattgactccttttcagatgtatagtttgcagatattttctcctattctgtaggttctcttcactctgctgattgtttcctttgctgtgcagaaacttttcagtktgatatactcccatttgtctaattttttgctgttgcttttggtcttatccaaaaaaaagtaattgcccagtctagtgtcatgaagcatttcccatgtgttttcttccaggagttttatagt

SEQ ID NO: 250199 - DNA, 622 bp, Homo sapiens
ctttgctgtgcagaaacttttcagtgtgatatactcccatttgtctaattttttgctgttgcttttggtcttatccaaaaaaaagtaattgcccagtctagtgtcatgaagcatttcccatgtgttttcttccaggagttttatagttttgggtcttacatttgtctttaayccattttgagttgaattttctatatggtgaaagacaggggtccagattcattcttctgcatgtggatatccaattttctgagcatcatttattgaagagactgtcctttctccattgcgtgttcttgacatctttgttgaaaatcagtagattttcttggctgtagatgcatggatttatttctggactttctattctgtaatcctctttctttggactaacttgaatattctcttgtggccaatttcccatcagagatttttaaagagcagcatctacacagtgttctgaaacctgcttctccaccaacattgaaaacactggtcttctggtagcctctcagctgggtttatattcaggagattcatttacaaagaaatagtcttgttcgtcaatgtctaggttgcaatttaatcacattttcataaaaatagagttagtattagaaca

SEQ ID NO: 250200 - DNA, 593 bp, Homo sapiens
aaattgccttccataatataggtgggcctcattcagtcagttgaaggcctgaatagaacaaaaagaccaacttgcccctgagtaggagagaattttccagtagacctgcccttgaacttcatctgtaccattgactctcctgggtcttgagcctgctaacctgcactgcaggtgtagacttcccagcctctacaatcctgtgagccaattccttatcataaattatatatataattatggaattatgcatatatatcacacacgagatctatatctatttacctatctatctaatttgatctctttctttggagaactaacagaatrcaactgctttctcagtctcctttgttaactctgtctcaattttccaatctctactcatgcctttacctctgtctcttatcttatatcctaccactctcccaccatggcctttctgctattcctggaaaatccaagcctagaaaattcaggctagttctcacctcaagcccttcacatttgctctatcctctgcctgaagcagtatgtccccaaatcttcacaatggctttctcctttatagcattcatgtctcagcttaaatgtca

SEQ ID NO: 250201 - DNA, 563 bp, Homo sapiens
ctgtgtggccttgttctgaaagctaaggaaatcaagactgcagaaagggaactgacttctacaaggtcaccctgctggtaaatgacagctctggacccagagcccagtgagtctgccgcctgggattccaggatgccttccaccatgccctgccatctctaaactcctcgagaaggaggcagtgtcctgttgaggagcagctgtcaggttaagggscttctccgaatcagtctcctcattatttggccctggatatttctgtggctctgggtttccctgctgtaaaagggggcttatcatttctccctgtctgacccccacttcccccagggggctgtgaggaagaatgagatcattgcagctcgtaaacggtcatcaaggtcatccaggaagccctcaaattcggcaaaagtgcaagttgccactctctagaaaagggtaatcagggctgtgaatgggaaggtggcgacagtctgcctagtcagagctaagccgagtagaaaatgggttttacttggaacaggacagaatttggtgagttgttagaaagactgtgctaacca

SEQ ID NO: 250202 - DNA, 178 bp, Homo sapiens
gtacccgagtaaattttttattttaaaggtgcctcctggcccgacccaaatttcggcttaacattagcagttacttctctttggctgagcagatgaaytgcaaaaactcccagagtgaaagagggaaggagggtggggttgggtgaggtggcagggatgggttccggaagatgggagg

SEQ ID NO: 250203 - DNA, 534 bp, Homo sapiens
cttctagccttgaaggggcattggacagaacttgtttggctagctgcctggttcagatctcctccctacttatgctaccaaataattcaaaggtatagatcctaagcaaaatgctgatggatgaactgtgctttcatctcccttccacaacaggctggctcagccttgggcccaaaacaaactgatccagctgacttctggagttatcaaaatgaacctgtctccctatggttctcccatgaactggagcaggaagggaaattttcaagtgctttgtgggaatattctcatgaatcaaatacttaccgggctggsggaagaactttcttggatacctgaaaagaataaaaaagatctcattcaatgagaaaataccatccctagcttctccaactgtgttctggcagatatttcctgtaactttcattgttccctttctcctcaatgcctctgattctttctctctcatatatataccgttacttctgatagaggggatctaggtcaatgataaggtgaaaagaaaacataaat

SEQ ID NO: 250204 - DNA, 542 bp, Homo sapiens
cttgaccatgcccaatcattggctgggtgtagtccaggcaaagcttgtccttgactggcaacatgtttttcctcctaacttgctggccaatccctcttggttccttttgctggtttatctcttactttcagatctccaagtattggatttcccaggttatctctttttttctgtatatacttacctcctaattttcctactactgtggtagctttcaatgttatgtatatatttgtgacctacaagtttatatctcttgtccagactttgcctctgagctctttarccacttctgctcatcagttcagatatctaactgcctatttggatgtctagtgggcacttcaaatttaacaagtctaaaatagagccagaacacgagtcaaatttgtatattgtccttatttgtgtttttaattgtctttcttctctatatgcatgtaagctcctataaagacataaaggtagatttttgtctgtcttttttcatgcttctaatttctaagaatagcacatagtattactatagtatataataaaga

SEQ ID NO: 250205 - DNA, 556 bp, Homo sapiens
catgtccatgacagaaccagaagacttttgtccactgagcctttatgaatttataaatgtccaaaatgaatcatattacagaaaagctttggaggtagaaaagtgagacactcttctggtcctttagacctgtggcagtatttgtctagtggggtctcagtttcctgaattgacctagcccatcaggtcaccagcattatctcatgaagataaaaacaataccaagcactaggcttcagaaagctcttatctgtcctcaccrcgaggctgaatataatttactccccagtgtagactgatacataatcatgtctttgaaaaatgttccctggaatgaattataatgcaatgactatggccacaatcattgctttccaacatagagggtgggggagagaaagggaagttgaatagcatttaccaagatgaagcacctactcccttgccaaagatggttcaaggatctttgcttccatacttttatttagtcctcacagcgactctgtgagatgattgatatgatcattttatggataataattcagatgggttaagc

SEQ ID NO: 250206 - DNA, 635 bp, Homo sapiens
ctcatgttaggttttattcgataactattttacccacgctgtcttttggtggctggaacatgtgtaactgtgggaccagcccaaactggatctactctgttgataacaaaatatcaggttgccttttagccataacagagccaaaaactgcaagttgtatagcctgggcatgtgcaatagaaaaagctttgacctctaacaatacccagaastcacaattcttcccctctgccttcagaatcaagaagattgagacttgaccagaacctgaacatcagaactctttaagaagtaaggactccattggccaggaagatccaaggctaaaatctgcctcaacatactttactgtaaatgctcaaatctgaagccctccaatcagaccctgccaaaccaacgttcctaaatcctttcccttgctctctgatcccttaaaacttgccccagatcccaaatcagagagacagatttgagcctgcttctgtctctttgctgaaagaaagctttcttttctcaaaagttggtgccatagttattggcttctgtgtgcatcaggcagcgagcccatttgcttgacaacacacaccatactctttctaatttcctggccattgcacacgttgtttccatggcct

SEQ ID NO: 250207 - DNA, 603 bp, Homo sapiens
taaatttttttctcattggcttcaaatagggctgcattacctttggtttatttggtttgttttcagtagcttttttcctaccttttttcttttaacttttaattcttaactcctctcctcccacaaaagagtgcttaaaacctactttcaatcctcttagaatctccctgaccctagttgtcctcagaattgaacacagagaccctaaaacaaatattttcaatctatagaaaaggtcttcaatttttttcattttgcctgaaaatattatttgatcttgtttatgtagataaaatggattctaataatggtactctagagaattggatcttctggtccaaattagctgtccctcaacctgttaagtccactttgaccaaaaaggaacaagtttytctgggtgataagaaagcaaggaaatcaaaaaaaaaaaaaaaaaaaaaaaaagaaagaaagaaagaaagaaagaaaggaaatcataggcagaaaggaagtaccaatagaattaagtgactagaaagcttatgcttggctctggaatcctctcatttcaacaaacatcagaatgcctcatatatacaaaatactgtctaggaaaggttt

SEQ ID NO: 250208 - DNA, 518 bp, Homo sapiens
gtaagatcccacacagaaggattttgtgagccagcagggaagcacctcatagtaatctgttccccatttggaatcttatcacatagtcacacctaacagcaagggagaatgaaaaatgtctgcttgtgtattcagaaaggaaaaacaaaacaaaacaggaaagaaatctgtgctacaagctttaaggtgaaacaaactgtcatttgaatcctggctccataatcttcctttgtaagatgaggatataataatatctccatatggttggctgtgaggatacatgatataataataacaaacttccaacatttacagttattcttaagtgccaggtaacaatccagctttttccacattatctcacacagcagcggtccccaacttttttggcaccatgaactggttttctggatcacaatttttccacgaactgggttgttgggaaggggatggttttggtatgattcaagtgcattacattyatggtgtagtttatttctaattattattacactgta

SEQ ID NO: 250209 - DNA, 594 bp, Homo sapiens
atattaattctgacattggcactgcttgctgcatcaaaccaagtgtctttgctgccaacttgaataggtaaatattgtattttcatccaattcaactgtaaatctcataaactaagccttgagaaaaggtgtatttaacctcacatggattgcagacaattgtaatgcagtaatgcaggccactgtaagccaagaagcttggtcacttgtagtcagctggcagacatgtcaactctacagctcatgctcaccttgttatgatccttttggtttgcagacaaaaataaacgttttaagcaaaaatagaaatttactgggtcacttaactgaaaactccagtagtaaatctgtgcctggattcaggatttcaaatcatgtcattctcaactctgctcattcacacacttcctttgcaggctcctcatggtggcgagatggacagycattctccaagcctccatgccagtaggtgtaagtctaagcaaacatttctttaagtttcattggctcatgtgaggccatatgttcatttctaaaataatcagattattctgaaaaatgtctaaggcaatataatctcttaacgtagataga

SEQ ID NO: 250210 - DNA, 533 bp, Homo sapiens
tatgttattgtacagacataccatattttatttatccactccttacttgatggatgagagggaaaataatatggcagaatagaactctccagggattgcctcctacagaaacatcaactygaacaatatctacatgcaaaaaatctttcacaggagctaagaaaataaggtgagagatcacactacatggttatagcacaatagtaaaaaaaaaaaaaagatgcagtttgttaaattgtacaaaaatagatagaaggaataagttcaaacagtagtagtatagtaggataattctagttaacagcaatttattatatatttcaaaatagctggaagaattgtaatgttctcactacaaataaaatagtaatgtttgagttgatagatatcccaattaacttgatttgatcattatgtattgtaaaagggtatcaaaatattacatgtacccctaaaacatgtaaaattatatccatgccagtctcagaggccataaaattctgtccagcattatgcttgttgcagcgttcctg

SEQ ID NO: 250211 - DNA, 592 bp, Homo sapiens
cagcttttgacactagccagaagtaaacaacaattacctctcacttgtcaaaacagtctcttttaggggagagaaagtaatgaaatggacaagattttttagtctgtgtcagaacagtcaaggccagagacacagcataacaactcaaggggggaatcaagaggtgtccttcccccacttcctcaatatacacaagatcagacaatgcacacgggctgcatgtattgtattattgccatggaggcatgcaacaaatgactagcatccatatagtgagatagatcaaagagccctctcaggggttgaatatatatatatatagactttcaaacaacagcagaattaaagcccaaggcttcacttttctttcaaagaatttacttccaattaaaaaacaaaaccaaaatgaaagaacttttgaactataccaggacctggagaggactttgaaaaagctaagactttctacatatttgctctctcctcttcccattttttctccactcaagatggagtattagcggcctacttacatggcayggttctagttcaggatgtctgtgcttctccttgggcaattatgactattaca

SEQ ID NO: 250212 - DNA, 480 bp, Homo sapiens
taaaccatgaagttgtaataacagattcataattgtggcccattgaaaaatcctggtctgattgttctcatgccgtcttaacaacccaagaaaaatgagaaagactgagttagttgtctgtttagtgtttgctcatgtgttctcatttctttggaattagagaaagactttagaactagtttaaatgctttgacaaattcagtatgattgcctttggttagcacagagcggtaattaagtctgcaattatatgttcagattttcatatttttcttgtatgtgcattttgacagtaattgaacaaggcagtatttgcaatatccattctgaaactgtttcacaatatttcattatatgccaaattaattygttaaactcaagtagcaaatgaaaacttcagcattgatccaattaatccaactgtgggaccttactgctaatatgccctagcagggaaaacggagggagatgttgggtaaa

SEQ ID NO: 250213 - DNA, 601 bp, Homo sapiens
taccatagcactgcttgttgatttgcagacatataattgaatgtgctgttaaagaatggtgaaagtaggaatgtgtttgctctaaatttccctgtgaacttccttgtctgcaccagctggcttggtttgatcctttccccagactctgatgcttctgtaaagacasagcacatgcacatgctcatgtcctctggcccaggtaaggcttatccacagagaagggagcattgtgcccccagtgcccgggaggtggtatattccacaaagaggtgagtggagtgggggccttgttgtcattgaatctcatgtagtggagggccttggggaggtgacacaggaaaatgtgctactctgtattgtcttgggaagggttgaatttgattctgttgtttctgaggatgtgagaataaatcttgatggctttcctctttctgcctctaagcatccttgtgtgtattgctggttttacctgatcattttcaccatcttccccatggttttagtggtcatttttcatttcttctcttgtaaataatcagttcatgttttctagcaccaattctaagcctagattagtaataagaaaagttccctcttttta

SEQ ID NO: 250214 - DNA, 601 bp, Homo sapiens
taccatagcactgcttgttgatttgcagacatataattgaatgtgctgttaaagaatggtgaaagtaggaatgtgtttgctctaaatttccctgtgaacttccttgtctgcaccagctggcttggtttgatcctttccccagactctgatgcttctgtaaagacagagcacatgcacatgctcatgtcctctggcccaggtaaggcttatccacagagaagggagcattgtgcccccagtgcccgggaggtggtatattccacaaagaggtgagtggagtgggggmcttgttgtcattgaatctcatgtagtggagggccttggggaggtgacacaggaaaatgtgctactctgtattgtcttgggaagggttgaatttgattctgttgtttctgaggatgtgagaataaatcttgatggctttcctctttctgcctctaagcatccttgtgtgtattgctggttttacctgatcattttcaccatcttccccatggttttagtggtcatttttcatttcttctcttgtaaataatcagttcatgttttctagcaccaattctaagcctagattagtaataagaaaagttccctcttttta

SEQ ID NO: 250215 - DNA, 601 bp, Homo sapiens
taccatagcactgcttgttgatttgcagacatataattgaatgtgctgttaaagaatggtgaaagtaggaatgtgtttgctctaaatttccctgtgaacttccttgtctgcaccagctggcttggtttgatcctttccccagactctgatgcttctgtaaagacagagcacatgcacatgctcatgtcctctggcccaggtaaggcttatccacagagaagggagcattgtgcccccagtgcccgggaggtggtatattccacaaagaggtgagtggagtgggggccttgttgtcattgaatctcatgtagtggagggccttggggaggtgacacaggaaaatgtgctactctgtattgtcttgggaagggttgaatttgattctgttgtttctgaggatgtgagaataaatcttgatggctttcctctttctgcctctaagcatccttgtgtgtattgctggttttacctgatcattttcaccatcttccccatggttttagtggtcatttttcatttcttctcttgwaaataatcagttcatgttttctagcaccaattctaagcctagattagtaataagaaaagttccctcttttta

SEQ ID NO: 250216 - DNA, 601 bp, Homo sapiens
taccatagcactgcttgttgatttgcagacatataattgaatgtgctgttaaagaatggtgaaagtaggaatgtgtttgctctaaatttccctgtgaacttccttgtctgcaccagctggcttggtttgatcctttccccagactctgatgcttctgtaaagacagagcacatgcacatgctcatgtcctctggcccaggtaaggcttatccacagagaagggagcattgtgcccccagtgcccgggaggtggtatattccacaaagaggtgagtggagtgggggccttgttgtcattgaatctcatgtagtggagggccttggggaggtgacacaggaaaatgtgctactctgtattgtcttgggaagggttgaatttgattctgttgtttctgaggatgtgagaataaatcttgatggctttcctctttctgcctctaagcatccttgtgtgtattgctggttttacctgatcattttcaccatcttccccatggttttagtggtcatttttcatttcttctcttgtaaataaycagttcatgttttctagcaccaattctaagcctagattagtaataagaaaagttccctcttttta

SEQ ID NO: 250217 - DNA, 555 bp, Homo sapiens
actgacaggacagagcttgaggatcttgaggagctactgaccctgcagaaccgctctgagaccagggggagcttttccaggtgaaacgattcatggctaggctgatttaactaatgggtttttcatcagagtaatacatattcagatatgtcccaygctcagtgatggcatcaagcaatgtcaggattagatgggaaattagaggcaatttgctccaagtgtctacttgtgtaccctccacagacgtatccatgcaatggtcttctgtcttctaggaagctcccaagttcattttttattcaaagcgaaccaggagagttctgtctacactcatttctatgcatagaacttgacgctttaaaaagacaatgctgaattctagtttccctgcccctacaccagcccaatcctctgttcttattcccatctgacggtgtcacccagggcactaacccagtagtaccaggcaccgaataggcatccagtaggtgttgaatgtcgtatgtagcggacaagggccactttggaaagtcatgtttcatcgcttcactcctc

SEQ ID NO: 250218 - DNA, 458 bp, Homo sapiens
gtggcatatctaaacaacagaatattatttagcaagaaaaaagaatgaagttactgatatcacatcatggatgctaaatgaaagaagccagtcacaaaagaccatatatcctgcattatttcatttatataaaatattcaggatagacaaatccattaaaacagaaccatcattctcagcaaactaacacaggaacagaaaaccaracaccacatgttctcactgataagtgggagttgaacaatgagaacatatgggcacagggaggggaacatcacacactgggttgagggcaaggggagggatggcattaggaaaaatacctaatgtagatgatgggttgatggatgcagaaatcaccatggcacatgtatacctacgtaacaaacctgcatgttctgcacatgtatcccggaacttgaagtataataaaaaaaattttttttaaaacagaaaac

SEQ ID NO: 250219 - DNA, 505 bp, Homo sapiens
tagttttgcctggcaatttttctttttaaagttctaaggatggtcccaaagtaccatttaggatctcttcggatcttctaatatacaattataaagaaagagggagagaaataaatgcaagaggtgcatggaaggaagttaatmaggtatgagagagttccctttccatttaaagagagaggcacaggcatagctgtagtatataagacaagtaattaagaaaggatcttcaagcaaccaaaaatagcttccacacaagagaaaaggacacttcagctgaaaagggaggctcagtaggttgggaatttgaggtagtctgagtcagccaaattctccaacttagctcattctaaatatttagatactgctctttcttgatcaacatcctggcttcctcataagagactatatataagtccatgaattaaaccaataaaatttggcaaccctgaggatcaaacactgtgtctggcctacagttgcttcagttcttcagctgcaagag

SEQ ID NO: 250220 - DNA, 606 bp, Homo sapiens
tgactcttcattcattcatttgataactctgtattacattttctactatatatcatttgttttataatctgccaatgttagaaatcactttcgtctttagtcacaattagatggacacttcagactctaagagccggaaacaggtataccatccctttatatcctctccgacacaatgccaaaaaaatactcaaatgtttgcttgccctctgctataggtaggaytgcttactgccagagttctctgggtccccaacctagaagagctcaactggttataaaaacaatgagagagatttgcttaaaatcttagtcaagccatgtggtcacaaccaggtaaagggcttcagggacacaaggcattttggcaatgttaatttttgttaggttaggttaggttaatgttatgtctccttgggcagacatgatgagtctatgttctaatcctattacaacatttagtaaaagtttaatggttatatcctatcacaaatttgttacctaatttgaggcactaatggatagggctcttttattttcttatttttcaatagatcaaagtcaagccagtacaacatacaaaaaaaaatgctaggattcagcaag

SEQ ID NO: 250221 - DNA, 640 bp, Homo sapiens
gtttaataagttacaataataggcaaattaaaaataataaacaacagtcacagtctgttaattatacctgcttcagggaaaacagtagaattatttcatgagtgactaaaaatctttaagctcttatgaaggatttgacaaaagattctcataaccagggtaatcataatttatcatcacaaccagggggctgtgggagtgaagggagtttgtgctgggaacactggcataaactaggactattctgatcaaaccaggacataatcactttactgkgcattaaaacaaataactggggttacgatagaggccctgccctcacaaaattcaaaggcataggtcattagatgtcaccatggtgcaatatggtaagtaataagataaaggaattgtagagaaggggctaaggacccaaaaaccctgtgttgggggtcaggggtaataaaagaaaaccatgtgtcatccaatagttccagaaccctgtttattatcagaatcacttagggaacttattggagaatacagattcctgcctgcccccatcccctgccagagtctcatttaatgggggaatggtatcccagggagaggaaatagcatatacagagagtctgagggaaatgaacacctatccaattct

SEQ ID NO: 250222 - DNA, 503 bp, Homo sapiens
ctgagaacacagaaatagtgtatrtattctttggttattgtgaaagcccagcctcacactaaaccacaatcacattgtcaggaaaaggcttttatcattcctctgactcacaaaaaaaaaaaaagcgtgcaaaggggaaaaggaagtcttctttctactgcagtatagaaaaccaattatagaaagttgtgtaattagagcttctacagagtcaacttgtttggccaacaatcacatagatcctaagcagtggatggtgatgaaaatttggccaaggggaaatatcttaaccatgtacacaactaactgattagtagtagaatgaaggtcttcagacaaattctccatttcactttttaaccacatcacaataaaacaatcttaaaataaaatgaataacttcttaatatttcatcatgcttactccatacaaatgtacaagcctacatggtacatattgtcaataaagaggatacagagttggccgggtgtggtggctcatg

SEQ ID NO: 250223 - DNA, 555 bp, Homo sapiens
ccctctccttttgaaatccttaataaaacttgctggctttaaggctcaggtgggcatcacggtcctaccgatatgtgatgtcacccctgaaggcccagctgtaaaattcctctctttgtactctttctctttatttctcagccggctaacccttatggaaaatagaaagaacctatgttgaaatattgggggcaggttcccccgataggtacctcatttggaaatgcagaaatcacccgtcttctgcatcaatctcactgggagctgtagtctagagctattcctattcagccttcttggaagcgacatcccctgaagaatgatcataatattcttacatgtaggactttctgcccaaaacctgcttattagacaggaagcaatgttttttttgttgtttttttttttttttttttttttggcctaraatctcactctgtctcccaggctggaatgcagtggtgcaatctctgctcactgcaacctccacctcccaggctcaagtgattctcctacctcagcctccctagtagcagggattacaggcacccacca

SEQ ID NO: 250224 - DNA, 490 bp, Homo sapiens
ggggttggggggtatctgcttatacgacactctagccacactgtaacagaggtaggaggttagagatactcaagctcccctttgtcccttttctgcgcctcaaaggggtgacataaatacaagggttgagggaaatgggaccttagagacaaggagaagtctagcagagatgactgtggtgatgctgcttacaggaaacccaggccctgcttgaagaaaagccaaagtcataggtgagaaaacagtggcaaggagaagacacaaaacatgcagacattcactgaagactaagattaagccatgattttaatacgtcctctccaaaattcatggtgaaactttattctcattgtgcacgcatttagggagtgattcagacacgatgactacaccatcataaatggcttagtgctttataaaarggctgggggaaactagctttggccctttggcccttccacattctgccatgtaaagacacaatgttcat

SEQ ID NO: 250225 - DNA, 573 bp, Homo sapiens
atatgagggattctggttactcaacaagtggaatgtggctttctgtttttcatttatgattggamcccatttaattcatcttgtctgtttattcttggaacttcccttcagatctccaagaaatataaaaatcagatgacaggccaggcatggtggctcacgcctataatcccagcattttgagaggctgaggtgggcggatcccttaaggtcaggagttcgagaccagcctgggcaacatggcaaaaccctgtgtctactaaaaatacgaaaaattagctgggtctattggcacacacctataatcccagctacttgggatgctgaggcatgagaatcacttgtacatgggaggtggaggttgcagtgaactgagattgtgccattgcatgccagcctgggcgacagagggaggctgtctcaaaaaaaaaaaaaaaattaatgatacttaggtttccattagagaatgatatatttaccattgtcacaaagccacacaacctttcatgtgttgtctctgttcagtgttcccttaatgcatgatacacaaattatttaacaatagttgaatat

SEQ ID NO: 250226 - DNA, 609 bp, Homo sapiens
ccgtgcttgggattggaggtcttgaagtgatacctaatttcggaggactgtgacaaaatttatcactaattacctgcccctcaaatgggaatcaaagccatcagcaacatacgatggtgataataatggttatcatttatcgagtgattagtattctaagcactttgcaggtattccctcgctttaattttactccattgctagcttagagttgagcagaaccacttgtccagggtcactcatagttggcttgtgggtgggtggcagagctgaagctgaacccaggaagcctgactccagaggatatgctcttaccaccccctgtaagctctcccctcccmttcaggcttgtgcccttattctgttaaatggtgagtagttatcaacaccggagatgcattagaatcaaatcctctgggggcttcttcctggacctgcttccatatacacttattcattttgtcttcaccggacatgttaaacttccagagtgactctaatgtgcagacatggtgaacatcattcgcttagctgcatgtcagcgctcactcaatgtctgtgaacagtgaaagctacttattctacttataagttcattaagtctgtgta

SEQ ID NO: 250227 - DNA, 534 bp, Homo sapiens
aaatgggaagctgttactacttgtaagcctgaaaaggcaagaagcagtagtgttactataatgcagagaaggctgtagccaggaacaggggcttcccaatgggatctgcagctgcaggtagtaaattgcagctactgccaaaacaagaggagakgggaggaatacatatcctgtccttcctccttttctaccttccagtcatctgccactcactgcctcccattgggtaaacccagtaattcaaattcacataaagaaataaaaagcactggtcaaaataactatataggtaaatatagaagacagtatagatagggttttttttaaaacttattttttctcctagctgatttaaaagcaaactgcataattaaataatcataaatctattgatgggcacacaatgtgtaaggatgtaatttatatgtcaataactaacgagaaaggggaggaagaaagggacagagctatataagagcaaagttgccatatactataacctgaatcagaattttttaattaagatgttaattt

SEQ ID NO: 250228 - DNA, 595 bp, Homo sapiens
agccataagtgtcaaagtcaccatctgtcgggctccaaagtctattctccttcgcagttctacattgcctccctgtattcacttccttttaaataagagttcctggcagatatcagggaagggctgtagagagggcagcgtgatccactagccctccaccacagcctacagagaggagggagatgggaagactggaggctgggtgaaacatgcctgaatcaggcctgaatcttgaggagttcggttttgatgagggcagtgtgctggtgctgagaggcagacatggaagaggaactgtcctgttgagactgggagtcaggtgagggacacagccagggctggaggcagactggggaagagtcatcattctggagagaaaaatgaacttaagaaaggatgggtaagctctgcactacagaatgcttagggagcaaagagaactgaagtttagggcaaacttgagcgtgcatcagaatcacctgaaagactgtgaaaacacagatgctggccyctatccacaatttctgatccaggaggcccggggtggagcctcacaagttgcatgtctacccagcttccagtgatgccagtgttg

SEQ ID NO: 250229 - DNA, 544 bp, Homo sapiens
tccatgaggcaggcttgcaggagcaagggagtgatagaaagccatgtgaggggacgagagggaggacaccctcccctgcagaagtcaggaaggtctttgagcttgttctgagaggaaaacccattctctgggtagaggaatgaagactcagaggagactggggttcgctttgtgtgatactgatatggttactgaaaggctagcccagtcccaggctacgtgaacagacttaaaaaaaaaaaaaaaaaaactctgattttttttttcccataaaactcagtgttatcaagaagactaagtgaaacaggacgtgtgaaaagaaggcaggacacacccagaagctgagcaagggtgatattgcaacstggcccagagcggttaggtgactgggcagggtccctccaccggaaggtggcagtgccaaggctaaatcccagatgcctggctccaagcccagtgctcatctcattccgcctggtggtaggagtagagaaaaggtgtatccagtctaaagagaggcccgtgttccaggaagggcccagag

SEQ ID NO: 250230 - DNA, 518 bp, Homo sapiens
tgatggttgttttaggaaagacacctatgccattatttgagttgtgagctgaactagcagctttttttcccccaaggaatatcattcttacttaaaaraacaatactaataaacaaacatactgattattcagacttgcatatttggtggacattttatcaatgatgtgaccctgtcatttccaggataacaactgaaagtatttgttgctaatagtaaaatttgagctttcaaccaaaatttagaagtgtgaaaaactccatgaacttgatggcttcccaataattaaagacttttttttaaaaatgagatttatgatgatggtaaccgatgtgactttttgatgttatataaaatctgccaacatttggaaaatctacataactcagaaaaactaatattctcccaaacgataaatgcactgtgttcaaaatcacgcacgaataaaagatcctttcagagtgtgagatagatggacttcaatgtaatagtataaacattcagttatatggtttcaa

SEQ ID NO: 250231 - DNA, 563 bp, Homo sapiens
ttaggcaggaaaatgatgtttatgttttaagaaagtactctaataacaaaagagagagaatcaggggaagctgttagaaatctcttgaggaggaccaattaggtagacacagtgatggcctgagaaaaagcagtgaccttgggattgtgggggtgagagtacattaaggtgggcaagtgagtgggaagagagagatgtgtgctctattatgcatttttctagcatagagatcaaaggcctttggtaaatccaagtggcaatgttcagtgcattttccattctttcaaagcagtgcatgtttcactctttttaattttgaaatactcagtattttaataactgtgtaccatataatgtagagtttacatgtaaatgtcttcatttgcatttacacatggcttctttccacaaagttgtcatttctttagttttctgcagcataatttaattgcttatctaccagtcctgagtaaactcactcacttagggttttctcagcatttcatagatcatagatcacctctkccaattataggggtcattctttcccactttcctttcca

SEQ ID NO: 250232 - DNA, 577 bp, Homo sapiens
gtcatttggactacttgttcataaaagacttcccatgggattagagaacaccataaaggaatgttttcttttagtcacattttaaatttctctatagtaaagcaaaccacagatagaagagtcacctgttttaaggtttcattattgcaaaatctcttgccatttgcctttctttactttctagagctgaaaaggaattgaggcataactaaatcctcctttgtgatttttcatagaagaaaactgaggtccagtgggggaagygaattgtacaaaattacacacaagttagatgggaccaggtctctcaactcccagtctggagttcaattttttttttttgagacggagtcttgctctgttacctaggctggagtgcagtggcacaatctcagttcactgcaagctctgcctcccgggttcaagcaattctcgtgcctcagccacacaagaagctcggattacaggcatgtgccaccatgcccagctaatttttgtatttttagtacagatgggtttttgccatcttggctaggctggtcttgaactcccggcctccagcaatctacccaacttg

SEQ ID NO: 250233 - DNA, 561 bp, Homo sapiens
acatcataaaaatctgtattccagggtctcagaacagactgcttcagtattggtgtcagaattgggggattaattagggtggtcataagtgagatcatttaattaatagaacagcttccagaagaggtgggagtgtagtataattgtggagagaaaggaattcagaatgagatacacctggattcacatttgagggctgccactcatcagcggagtgccattaaggaaagatatttaaagcatcccagaatagtggctgttgctcacactgtagatagcattggattgccttatttaatcctggcatgaccacttatgcatgcatgattttagacgaactaattygcctcactaagatgaatcttttgatttgttcctacttcgcagggtcactgttgtgaggtttaagagagataatttaatgtaaaatttagcataatgcctacacacaaaaagcttgtcaagcatttaataataataccgaccattattattactaatgtcgtgctaaatgtggcaggacctgaaaaattactaaatctgatttcaagcctgagtttc

SEQ ID NO: 250234 - DNA, 589 bp, Homo sapiens
tatgagtctctttcttaccagcctaacacaggtggcgtatttctagagcttcataaactagagcaagaaacacctaaatattcccagtcatggaatcggcagatcctcatcttagggacatggaactttttcctatgaatagtgtctttctcaacaggaggaaagcatcatttcaaacttgtaaaaaacaagatgccttacctatttccctaaagtggctagagactgagatctatgatttatctgaatagtcttattaatagttataaagatgacttgattttaaagaatccattrcataataggctcttctatcctctctcttcctcccatgtcttaaagtaagtgatccatcctcgtcacactaactcaagtacctgagctcacaggtccgtctcattctgccttacctgggaccagccccaccaaggactcctcttctgttttgcatttgccattcttccctccctggttaattctttccttcagtttgcaaacattatcaagttttcccattgtctaaaattttaaaaggatgctccttcttttctctgagttagtttcttcactgccgacatccttcttataa

SEQ ID NO: 250235 - DNA, 578 bp, Homo sapiens
atccccctccctattcctgctacccaactacaagtatttcctcccttctctgaatagacatagccctttgcctcaacctctcatcacattcaaccctttctagagtgcagtctcgttatctgccaaccaatatcatctcccaggccacaccataagctcccctactacagaacaaagtcttccctggctctccgtttttgagtgttttgcacatagtaggtgctaaaagaataaatgaaaacatccttaactcccacaactagaatgaacaaagtgcatgaatgttttggtagacatttcactttgattcaaagttcttttatcctcattcacaccaaacaactgcgcaccaagtacttagccccacactgcaaatattgctgttactgcttctattaatacaaatactcytactattaataataacagtagatattcagtacttactgtgtgtaaaggcactgtgataagcatttgtggtgattattgcatttaatcttaatcaccaacttctgagataagtaatattatcctctatttcagaaatacgaaaactgaagacagaggaacacccagta

SEQ ID NO: 250236 - DNA, 628 bp, Homo sapiens
cctgcccttactcagtcagggaagactgtctgatggtttcctgattagcatcaaggcaaaagcagcatgtttttcataggctatcgctattacctaaattataggcctgttgctctcagcattttccccccacagacaggttaatatacacatyccactggtattattgctttgcgaagtcacccagtcatttttatgacatagaggggagaaggcctggaattccccggaagaggcttcagatccagatgagagactcttacacaaccagaaacgccgttttctaaccatcccattcaaaacttaacaacacttcccacgttcaatgccatgtgccgtgcatattttaaaccatgggtaatttcaagcagaaacattcagaaaaagaaaatgaaaaggctggtattttggatatcaggaatatgtgattgcccacacgattcgcacattactcaagttgtccccaagtcatcttgaactggctacttaaacaatgtaagtgaccagaatttttgtgcatcatatcaaggtaattcaaaattctagtgagaggagggattatttaaaggacttcagtgaatttgcattttccaaagcttggaaaataactttcttaaagaacccctga

SEQ ID NO: 250237 - DNA, 565 bp, Homo sapiens
tgtagttctggagaaatgtgagtccagcatgtggggtggatttttttctgtgctggggaataaaggcctggacttcgttgggatggtaagagcaatggtggccagcctaggactctgttggtgtcagttctagttttcccagcattgctaatgggaaatgttatttctgcccccacagttcttaactcctatgtttgcttggtttgttagcactgactggcttccctctgtatgctcttccttctcctgtagtcttaaatgttcttacactgacctggctatttaaaagcatgaatttcctgakttgaggctatttgtatttaacctggaatttttcttccctaagtccaacttatattaaaaaaaaaaacagtcttcattaacacaagagcctactcaccaaaatactgactaagtctggctgtagaatttcacttcatgaccttttagggttgtgaatgtcaaagactgagcccggggcagtgtgaaataataaacaactgggccataagatccagcttgacgggcatcatctgaaatcaccttcctgaatttattagagtta

SEQ ID NO: 250238 - DNA, 608 bp, Homo sapiens
ctgcttgttagttaaaagcactaccagggagcacactttggttaaatttggctgtgttaaaaacatatgtaaaaaaatctttgttttcttttctccattcttgttctctgtatttctccaaggatgctttccctgtttccaggactcaaggcctggcaacaccaagggcactgagggtggacatgagtgtggcttcagacgaaactaaaatgaaagattaaagcaattctgaaagatttcaagataggccactgccaactcagcttcagaagaagaaaaagggaaggaaaactagtttcttgagtygcttgtaatctggatcatagccattttggtggtggcctcaatggatgtaaagtagatagtgctttcaaacccttcatgccaaggctcaaaagcctttgcagaatcatttattaaatatttaagcgcttcctctttctgcctctcactcagcgacagagagagcctgagagcagcattttctaagcccagtgtggtgctggtgtgcggcactttccttaggtttactggccagggtcagctttgttttggctgatgctcaagcaagcacccctcactcacagctgcaggaccctcaccactac

SEQ ID NO: 250239 - DNA, 618 bp, Homo sapiens
gctctatttaaggctcatgcgatgcttcccatgcctgcgacttctccagactacaagcttcagagcacagggaggctgtgttgtcttggctcaagtggctcagcagagacaggcacactgtagagctaatgaggaacttactacgtcagttaaagttatcggtccaaagtcagagtgaaacactttctgagcaggggatcttgcctccatggccagcatctcagagccctcagggacagaacaggacaaggggacagaaggttccaggcgacagaacataaagagcctttccaatactcagagctgcctgaggcagtggtgagcctctcaacactgaaggcatgctagttagccagacagccacctgagggggccytgcactgggcactgacaggtacatggggcaaccagtgaacacaagcatatttgtcagccaaacctttgtgaagggaggcagcagggatcaatatatcagtgaagggctagagcacctattgctcgcataacaacaattaaagaaaaaaacttaaaagtgggaaggaagggagaatggagaaggtagaaatttaagtcgtttaaagaatcttccagacttttcacaatggttcttcaataagt

SEQ ID NO: 250240 - DNA, 415 bp, Homo sapiens
ggtttttttttagtaatctgttcagtttcatctgctttatgtcactgaaaccagttggaaaggtgattttagaatcctaactctgtggcttagtagagaagctctctgtccattcactcatccattcaacaattacttattgagcatcgactccgtgckaggcaccagtctgggtgctgaggaattatcagcaaataaaacagacaaaaatccttcatggagcttatagtctaggggtgaaagcagaggaggatggtggggaacacaatatttcaggtaatcaaaaagtctatgcacaaaaggccccaagcataaggagctattttagccaagacctgaaagaggtgagggaactagccatgaagacatctgaaggaagaacattctttgcagagagaacagtaagggcagaggc

SEQ ID NO: 250241 - DNA, 560 bp, Homo sapiens
ttcactggtgaattctaccaaatgtttaaaaaggaattgacaccagttctacaacatctcttccaggaaattggaaggggatcattttccaattattttatgaagctacttattaccctcatgactaaacaagacaaagatagtacaagaaaagaaagagcaaaagaaagaaagaaaagaaagctaaagaccaatattcccttggtatatagatgcaaaaaatccttacgatagcaaataaaaaatcagtaatatataaacacaattacacaccatgaacaaaagagatttattctgaggatgcaagactcagaattcaatattttaaaggcaatraatgtaattcattgtattaaaaggctaaaaaaattctagtcacagtatctcccctgagaattcaaagagataatgatgtctgctctcaccagtcttgttcaacatggtgctggaacttctagatggtgcaacaacacaagaaaggaaagtaagaagcatatagatcagaaagaaatacataaaactttccctgtttacagatgacatgattgcatctgcagaaa

SEQ ID NO: 250242 - DNA, 594 bp, Homo sapiens
gtttctatgaagaaatccacttttgctctgatgggsgtttctttataggtgaagaaaggcttttctcttactgttttagatttctctttgtctttgacattagagtttgactgtaatgtgccatgaagaagatctttttgctttgtatgtatttaatgatctctgagcctgctgtatctggatgtctaaatgtcttgctaaacttgggaagtttacttctactatttcattaaataggttttccaaccctttcattctctctttacaactgagacatcagtaatttgtacacttagttgttttatggtgtcccatatgtcacaaaatctttgctcattcttttttattttttttctttatttctgtctgactgggttatttataaagacctgtcttcaagttctgagattctttctttttcttctttattttattttattttttgactgagtcttgctctgtcacccaggctaaagtacaatggcattatttcggctaactgcaacctctgcctcctggcttcaagtgattctcatgcctcagcttcccaggtagctggggactacaggtgtgcatcaccacgcatagctaatt

SEQ ID NO: 250243 - DNA, 594 bp, Homo sapiens
gtttctatgaagaaatccacttttgctctgatgggcgtttctttataggtgaagaaaggcttttctcttactgttttagatttctctttgtctttgacattagagtttgactgtaatgtgccatgaagaagatctttttgctttgtatgtatttaatgatctctgagcctgctgtatctggatgtctaaatgtcttgctaaacttgggaagtttacttctactatttcattaaataggttttccaaccctttcattctctctttacaactgagacatcagtaatttgtacacttagttgttttatggtgtcccatatgtcacaaaatctttgctcattcttttttattttttttctttatttctgtctgactgggttatttataaagacstgtcttcaagttctgagattctttctttttcttctttattttattttattttttgactgagtcttgctctgtcacccaggctaaagtacaatggcattatttcggctaactgcaacctctgcctcctggcttcaagtgattctcatgcctcagcttcccaggtagctggggactacaggtgtgcatcaccacgcatagctaatt

SEQ ID NO: 250244 - DNA, 573 bp, Homo sapiens
aaaccaaccctgctgacaccataatcttggacmtctagcttctggaactgcaaggaaatacattcctactgtttttaagccacttgctttgtggtacattgttatggtcatcctagagaactaatatctgcaggtattccagaggaaagattgtcatggataaagaaataggggtggcaaagcagttacattgagaagcagtcatacactggaaaccatacaaggtagagaggaaacagcataaagtatgctcaaattgatataaaaaatggaagggggatatgtcattttcaccacatttttaaatgtttcattctctgttccatcatatataatctctttgcccatgatggaggacaagccacaatgcttagtttttaaacatcatgactcaagtcttcaaatttctatttgttttgaaatgtatcagagacctgcttgtgccaaatataatcaacctttcctgtatgtgtatgaaatcatcctcattcacaagagccccacagttgtgatgggcagagtctgataaaagtcagacattttcaagttgacctcttcaagtagcctggcttc

SEQ ID NO: 250245 - DNA, 573 bp, Homo sapiens
aaaccaaccctgctgacaccataatcttggacctctagcttctggaactgcaaggaaatacattcctactgtttttaagccacttgctttgtggtacattgttatggtcatcctagagaactaatatctgcaggtattccagaggaaagattgtcatggataaagaaataggggtggcaaagcagttacattgagaagcagtcatacactggaaaccatacaaggtagagaggaaacagcataaagtatgctcaaattgatataaaaaatggaagggggatatgtcattttcaycacatttttaaatgtttcattctctgttccatcatatataatctctttgcccatgatggaggacaagccacaatgcttagtttttaaacatcatgactcaagtcttcaaatttctatttgttttgaaatgtatcagagacctgcttgtgccaaatataatcaacctttcctgtatgtgtatgaaatcatcctcattcacaagagccccacagttgtgatgggcagagtctgataaaagtcagacattttcaagttgacctcttcaagtagcctggcttc

SEQ ID NO: 250246 - DNA, 658 bp, Homo sapiens
tttaaatcttagaataataaaaaatacatataaacccaaatcaaatttacaaagactggcacaagtattaaacaaaaaagaactcttacagcaaaaatccgtcaaatttcatcgtaaaagggaaaataagccactggtgctattttaaaatctacaacatttctgaagtgaaattccaagttgcctttcagtttttgtttacagtatttttagagytccctctgcatgctatgttttcttttagacatactgccaactttttgtatctgtcatctggttttgaaaatgaggtttctcaccatttttttaagcatttcaccatttcagttgtcacactgatgcttggtacatctggaagttcctgtgatacgatggatttagagcctacatttagaagcgtatcaaataattaccaacatttaatttcatgttccttcagaaaaaaaatccattagaggttctacagctcttcttccatgccatcccctaaattaaatttcatattaaaaaagctagattcaaggatttctcaggcttcacattttcaaatttaaattcaaaaaagcagaaaggaacaatgtagaaagaaatgatttatcccaggggtttgttctttttaactagaagataaactgaaattcaggaggggaggagaaga

SEQ ID NO: 250247 - DNA, 528 bp, Homo sapiens
aatttcatcgtaaaagggaaaataagccactggtgctattttaaaatctacaacatttctgaagtgaaattccaagttgcctttcagtttttgtttacagtatttttagagctccctctgcatgctatgttttcttttagacatactgccaactttttgtatctgtcatctggttttgaaaatgaggtttctcaccatttttttaagcatttcaccatttcagttgtcacactgatgcttkgtacatctggaagttcctgtgatacgatggatttagagcctacatttagaagcgtatcaaataattaccaacatttaatttcatgttccttcagaaaaaaaatccattagaggttctacagctcttcttccatgccatcccctaaattaaatttcatattaaaaaagctagattcaaggatttctcaggcttcacattttcaaatttaaattcaaaaaagcagaaaggaacaatgtagaaagaaatgatttatcccaggggtttgttctttttaactagaagataaa

SEQ ID NO: 250248 - DNA, 575 bp, Homo sapiens
aaaaaacaaaagaaatccaggtacatagttggaaatcttaacacaattctctcaacaataaatagaagatagaagagttaaaaacatttatatatttattcatgaacaacatgaataatggacttaagaaactcatatgtaatgataattgaatttaagtaacatatataacactamactctcagcctaaaaaacacatatttctttcaagtttacatgcaacagatatctgaaaagaccataaactgggccattataatgatattgggaaaaaagcttctaagtttggaaattatgcaatatactgcaaaataatgccaaagaaaattacgatgaatatttaaaaatagttcatatttaatgatgattaaaatataatatgttaaatttgtggaatgcagctaaaggtgtgctcagtagaaatgtgaagctctaaatacatttgaaaggaaaaaaaattacataaaaagtcagaaccaaatttatcagaactctggaaaatggtcaaagttgagtaacagccaagcaaatgctgaatggagcaaaagacagcataaaaggtagaaattagtaag

SEQ ID NO: 250249 - DNA, 591 bp, Homo sapiens
gatcctatgctgtagtctaataacatttctttcacactggagacaacacagaaagaaaggygtgaggagacgattttcttcagtcggttcatttcctgagtgtaaaccagggtttctcaattttggcactattggcattttgagctggataaatctttgttgtagggctgtcctgcacactataggatgctaagcagcatccctggcctctactcactaaatgccagtagcatctctccagttgtgacaatcaaaaatgtcatcagacattgccaagatgttccgggggagcaaaaattccccagttgagagcaattggtataaactacagtatcttctccttcacgtatatcacgttttaaaatcaggttaattatccaaataacttgtagctgtagaagaacaggtttagtttctccaagtgggaagatggatatgtaggaaagaactaataagaaacttatggaaaggttaggtcaaaaactttgtcctttaactctgagaatggtagaaggcgtgtcatcattttacatgacctctgcctctattaccatctactgtattttatttgcacgtattcagccaacagct

SEQ ID NO: 250250 - DNA, 604 bp, Homo sapiens
ttctagtctttacctcctctgtttatagcaacttcattgacctcactgttcaattcagaaactggagatctgtcttcacttctctctcttactcttcatttaagactaagtcctgtgtactctttcactaaactggcactccaatgacatcatctgagtcaaagataagaccacttctcccttgaatatgttgtatcctgccaattacttttctcatctccacttttgccttcatcatccattctttacataaaagagcaatcttttaaaagagtaaacgggaattctcctttttaaaacactttagtggcttcccattgctcttaaaatgaaacttaaacaacagcatataaggtaaccattactaatatacccagattacaggtgagggaaccaagcttttaacacttaattttatcaaaaacatatgattggcaaatggctgagcccagccaatctcaatctaagtaagtaatctgctacacatttgctgccccctggagtgctgggtttacggtatyactggatagacatgacaagatacataaagctaattataggacaatcatgccaagagctgtcagatataaatattaataatgat

SEQ ID NO: 250251 - DNA, 522 bp, Homo sapiens
agaaatggtattcagaacctggggctctagtggtgagatgacatatggatgtgactctggtgacttcaaaactttctttttggacaaatttataatttctgcagaactggaagaacatcacttacaatgatacttggccatttatatattgtgcagtttaagcaagtgaatcagttgcttcttcaattgctagcaagcaaaaargtagtggagaagtcatttattaaatgtgcttcagctagcaataaaggtttggaattggatgctattttgaaagcattgtctgttgacagatgagggcctaagaagcatggggttaaggatatcaaaagcattgaatttttttttttataaaagaggaaatatatcccagatgtttagtatttggaaactatttctacctctatgtctttgatgtgagaaccagagccatttcccagattacaaaggccataagttcatgccgtcataggaatttagaggcctttagaatggcatatgccaagttcatgtgtgtgtgtg

SEQ ID NO: 250252 - DNA, 411 bp, Homo sapiens
acaagatggcaggaagctcaaccatggctatacaatcagaattaccatggaccttctaaaaataggtttatcaaagttttaccctagaacaattaaatcagagtatctgggtggggggttaattttataaatatacacacacaaatatatgtgtatatatatgtatacatatatgcatagaatattcaatacatatttaaaaatgctaattatatataattaaatgttatacatataaaacacacacacacacacacacacacacacacacatttaaagctaccctggtgagtckaatatgtaagctgagttgaaaaccaccagaatggaataatcagtgaatccttcttggagaagacaggactcactctgaacttgaaagctgggtcatccctagaaagatgaatatag

SEQ ID NO: 250253 - DNA, 582 bp, Homo sapiens
attccagttacctgctactacataacaaaacacactaaaatttagcagcttaaaataacaacttattatctctcatggttctgtaaattgggtgagatcatttgggtggttctagcttgggttttgttttttcagtcaaatggagtttgggttgagtatatttcactggtccctatgtctaaggtagttcatcgggtgactggcaattggtgctggttgtcttttttttgtgtgtgtgagatggagtctcactctgtcacccaggctgaagtgcagtggcatgatctctgctcactgcaacccctgcctcccaggttcaagcgattctcctgcctcagcctcccgagtagctgggaataccggcatttaccaccatgcccagctattttttttgtatttttagtagacacagagtttcgccatgttggccaggctggtctcgaactcctgacctcaggtgatcctcctgcctcagcctcccaaagtgctgggattataggcatgagccaccaygcctggcctggtgctggttgtcttctggttgtgtgttgattggaatgactacagatgttttctccatgt

SEQ ID NO: 250254 - DNA, 548 bp, Homo sapiens
catccaaatacaagaagcacaaagaacacctgggaaattcatcacaaaaagatcattgcctaggcacatagtcatcaggttatccaaagttaagatgaaggaaagaatcttaagagctgtgaggcaaaagcaccaggtaacctataaaggaaaacgtatcagaataacagcagatttctcagcagaaaccctacaagctagaagggattggggccctatcttcagcctcctcaaacaaaacaattatcagccaagaattttgtatccagtgaaaataagcatcatatatgaaggaaagaaacagtcattttcagacaaatgctgacagaattcaccactaccaagccactactacaagaactgctaaaaggagctctaaatcttgaaacaaatcctgaaaacacatcaaaacagaatgtcttyaaagcataaatcacacagaacccgtaaaacaaaaatacaagttaaaaaagcaaaaaccaaaaacaaaaaccaaaaataaattacacagataacaaatagcacgatgaatgcaacagtacctcaca

SEQ ID NO: 250255 - DNA, 572 bp, Homo sapiens
ccattttattcagcaatcccactactgggtatctacccagaggaaaagaaatcattatactaaaaagatgcttgcacacatatgtttatagcagcacaattcacaattgcaaaatcatggaaccaacccaaatgcccatcaatcagtgagtggataaagaaactgccaaaaaaayagacatatgtatgtatatatacatatacgtatatatacatatatacacatatataatatatacatatatacacatatataatatatacacatatacatgtatatactatatatacatatatacacacatatatacatatatatacatatatatacatatatatgatggaatactactgagccataaaaaggaatgaattaacagcatttgcagcgacctgtatgagactggagacaattattcaaagtgaagtaactgaggaatagaaaactaaacatggtatgttctcagtgatatgtgggtgctcagctatgagaatgcaaaggcataagaatgatacagtggacttgggggacctgggggaaatagtgggaggggggccgagagataaaagact

SEQ ID NO: 250256 - DNA, 615 bp, Homo sapiens
atcctcttgtgttattcttatggtcataatgagtcaaagaccagactgacctggtgcatttgcgcacggatgtttgatttcttgggaactggcttgctttgcaagtacatatttctgtaaacacatttactataaaggtctctccacatctaggaggaggtgaaaaagagyaggaaggagggacagaacaatgtcctctccattctagtaatcccgggaggcttcctggagggatgtggctggaaagaatgggtggagatgagtagatgcaattttgctgtcatgaatttcttttgttgctctataacctctacttgttcactcaagtaggtttattaagctcctcctatcaaacaacatagcatagtgacttgggaactaaattcctgggtttaaacccccaattctgccatttacaagttgcataatcttgggcaagtttcttttaatctctctgtacctcaatttccttatctgtaaaatagaaataataagaatacctgtctcacagggccactgtggagattaagtaaattaattatctgtatctatatctacatctagctttaaacagtggtgggtccattgtaagagtttaaaaaattttagctgtta

SEQ ID NO: 250257 - DNA, 517 bp, Homo sapiens
aagtagcgtgtgaatcttggcagtggcactgtatacctgctggtggttgcacccaaccagaggggccaaccagcagctctgcacatctgcaagccaagttgatggctttgcccaatcatgagcagaatcagtgatcttgtcaaaccatgaagcacagcctatagcagagcccagcaatgaccctatccaactgtggattatggtctggtccctgtatgatttcaaagtccagcttgtggccctgtatgaatgcagagtccaattaatggcacctcaaaacaaggattacagtctgtggcctcatctgatcaggggcaattgtggagcctgcagccccaattaattacagagtccagctagtggcactgcctggcctgggagaacagctgtgaccctatccgaccagaggttattatggagttcatgcagcagccccacctgaacaaagagtccaracagtagatccgacccaccacaaagcttagccagcagctccacctgatctcagagttaagca

SEQ ID NO: 250258 - DNA, 589 bp, Homo sapiens
caattttcttaaatttattgaggctcattttgtggcctatcttatggtctatcttgcagaaagttccatgcattgttgaatagaatgtgtattctctggttgttggatgaaatagagttgatttccagttttattccactgtggtctgagagagtgcttgatataatttcaattttmttaaatttattgaggctcgttttgtggcctataatgtggtctgccttgcagaagttccatgcgctgttgaatagaatgtgtattctctggttgttggatgaaatgtcctgtatacatctgttaagtccatttgttccaatgtatagcttaaatccattgtttctttgttgactttccatcttgatgatcggtttagcagtatcagtggagtactgaagtccctcactattattgtgttgctgtctatctcatttcttaggtcattagtaactgttttataaatttgggagctccagtgttaggtgcatgtatgtttagaattgtgatattttcctgttggacaaggtcttttaccattatatggtgaccctttttgtcgcttttaactgttgctgcattaaagtttgttttg

SEQ ID NO: 250259 - DNA, 532 bp, Homo sapiens
tatgctttaaagagattctgttttgatgtgtttccaggatttgtttcaagatttagagcttcttttaggagttgttgtagtggtggcttggtaggggtgaattctctcagcacttgtttggcagaaaaggactgcatctttccttcatatatgatgcttagtttcactggatacagaaacctttttttttttttttttttttttttttgagatggagtctcgctctgtcatccaggctggagtgcaggggcacaatctctgctcactgcaacctctgcctcctgggatcaagttattctcctgcctcagcctccacatagctgggattataggtgcccaccaccatgcccagctaagttttatatttttggtacagatggggtttcactgtgttggccaggctggtctcaaacttttgacctcgtgatctgcctgtctcagccttccaaagtgctaggattacaagtgtgagccaccgcrcccagcctggatacaaaatcattgactgataattggtttgtttgaggaggct

SEQ ID NO: 250260 - DNA, 554 bp, Homo sapiens
caaacaaacaaaaaatcaagaaagcgttggtgtctgaattcaaaccatagcagcctgacaccacartctgtgcttttgatcacttctctccacaatttgggaagagaaaagtcattaaatatttcacaaagatcattacacattctacagagaaatttaacataggttcataagatagttaaagtcttcgtagctatttcgggtgatcagagatagcatcgctgagggggtgatatttaggctatgatatatatgtttttttcattgtactcacatatgagtataataaaaagtgctagaagactttccactaaatgacttggaaaagagcactccaggtacatgggagagctagtgctaggagatacatggatttaagctttgtataattgggaattggaaaatgtgttgagaagtctaatgtgtctggagaagtaaagagtgaggatgaaaaacagtggaactccagatctcagtcagttcacatagttatatagtccccagatcaggcgcaaatttgtgagcctgtggagtttgaatggtgtattaagtgc

SEQ ID NO: 250261 - DNA, 484 bp, Homo sapiens
gggccaatcaaaggtgaccaactgttcaaaccatgttcaaataaggcagatgctgagctgtaaccaatccggctgtttctgaacctcacttccctttttctgtaggtcactttcctttttctgtccataaatcttctaccacatgactgtgctggagtctatctgagccgactctggctgaagaggckgcccaattcatgaatcattgtttgctcaattaaatattgttaaatttaattcggtgggggcttttctttgaacacagtctttgatgggggcttaaagtcactctcaaagttgtaacttcctcagcagggatactaactctttactgtattctgtcaatgacctctttggatgcttctccctattctcccattcctctcagtggcccttcctgttcccagtaactggtcatctggggccaagcattagactcctttgactttgagaattatcaattttagaaaacgcttgctgtccc

SEQ ID NO: 250262 - DNA, 484 bp, Homo sapiens
gggccaatcaaaggtgaccaactgttcaaaccatgttcaaataaggcagatgctgagctgtaaccaatccggctgtttctgaacctcacttccctttttctgtaggtcactttcctttttctgtccataaatcttctaccacatgactgtgctggagtctatctgagccgactctggctgaagaggctgcccaattcatgaatcattgtttgctcaattaaatattgttaaatttaattcrgtgggggcttttctttgaacacagtctttgatgggggcttaaagtcactctcaaagttgtaacttcctcagcagggatactaactctttactgtattctgtcaatgacctctttggatgcttctccctattctcccattcctctcagtggcccttcctgttcccagtaactggtcatctggggccaagcattagactcctttgactttgagaattatcaattttagaaaacgcttgctgtccc

SEQ ID NO: 250263 - DNA, 545 bp, Homo sapiens
aatggctttattttaagtttgtatcatgaatattttcaaatttctatccaaactgtatgagaaatatgatttctatatcatctgtgttactcaagaagggctttcaaaatgtcttataaagaaaaaagccatgtttttatgacaatytgcatcagtcactttcctattttttatttttgcttaacttattaccaatacatatattgggaatctttctacttaacaaaaccaaaaaagagggaaagaacctctttttaaaatttgcatggattctcttttattccttcaagtcatgaaggtctggacatatggtcaaaatgttcagaggtaaattcttagaattctgaatggtatttgtaataacaaagtatcccaacaatttttttatggattcagctaattactacagatttggttgcaattcaagtaactttagtaccttaggaaaagtaagatgcttcaggcaagactatcagcataagaataagtgagttagcaagcattaataaacctggagaacaacactgttaaatgttttatgcctt

SEQ ID NO: 250264 - DNA, 545 bp, Homo sapiens
aatggctttattttaagtttgtatcatgaatattttcaaatttctatccaaactgtatgagaaatatgatttctatatcatctgtgttactcaagaagggctttcaaaatgtcttataaagaaaaaagccatgtttttatgacaatctgcatcagtcactttcctattttttatttttgcttaacttattaccaatacatatattggraatctttctacttaacaaaaccaaaaaagagggaaagaacctctttttaaaatttgcatggattctcttttattccttcaagtcatgaaggtctggacatatggtcaaaatgttcagaggtaaattcttagaattctgaatggtatttgtaataacaaagtatcccaacaatttttttatggattcagctaattactacagatttggttgcaattcaagtaactttagtaccttaggaaaagtaagatgcttcaggcaagactatcagcataagaataagtgagttagcaagcattaataaacctggagaacaacactgttaaatgttttatgcctt

SEQ ID NO: 250265 - DNA, 631 bp, Homo sapiens
agaaacaggagaccgaatgggtgagattagatagggacaaacgaatcataaaggtgaacattgtggagcacggcttcagaagaaggagacaaggaaaacacctatatagaaaaactttatgtagaaaatgtccaattatttatgcccaagcaaggcaaaaccacaaaaaagtagcaatagacaatataatgtcgtttgaagtatttcctagtctggccytcgtccttatcaatggaagagaagctttttaaaagttccatccaagagaagttagtagacaagtgagtgagcaattgataaattgcttgtgtttcatcatcatgttctatgtaatcagatttgtagtgtttttgtagaatactcacaagctcctgttatttttttctctccaaaatattctattcctttgctgttttaggagaagcattttaaaggaagatttgttcctagtttcatttaactgaatttaagcttatttgaaattctcatgatttagtgttctgcagagagttttgttgtatttttttctccctttaattttaacttgaacagcttgatgagagtttaatagaatttgttttaaagttattgctgaccttgaattaaatgggagccaatatatccccatgca

SEQ ID NO: 250266 - DNA, 631 bp, Homo sapiens
agaaacaggagaccgaatgggtgagattagatagggacaaacgaatcataaaggtgaacattgtggagcacggcttcagaagaaggagacaaggaaaacacctatatagaaaaactttatgtagaaaatgtccaattatttatgcccaagcaaggcaaaaccacaaaaaagtagcaatagacaatataatgtcgtttgaagtatttcctagtctggccctcgtccttatcaatggaagagaagctttttaaaagttccatccaagagaagttagtagacaagtgagtgagcaattgataaattgyttgtgtttcatcatcatgttctatgtaatcagatttgtagtgtttttgtagaatactcacaagctcctgttatttttttctctccaaaatattctattcctttgctgttttaggagaagcattttaaaggaagatttgttcctagtttcatttaactgaatttaagcttatttgaaattctcatgatttagtgttctgcagagagttttgttgtatttttttctccctttaattttaacttgaacagcttgatgagagtttaatagaatttgttttaaagttattgctgaccttgaattaaatgggagccaatatatccccatgca

SEQ ID NO: 250267 - DNA, 621 bp, Homo sapiens
tttttcaaaaattaaaagaataaagttaattttaacaatacatttaacaccatattctaaagtgttatactaaacatgtaatcaatataaaatattgctgagattttgttttccttttttgggtatctggtggattttttacacttgcagcacatttctaatggactagccacatttcaagggctcaaaagactcatgcagcttgtagcttccatacagaatagcacagccctagaaaatgagaaagggtttacttgcagagacatgtgttggggggggtagactatggagggggggtccaggagagggaaggaagaagagctcgttggtggaggaaggcccaaggtgggaaaagcagtgtgccctggaggagtgggcrgtaggcaggtggagggagggtggctaggtgagaggcacacaatgggtatggggagggagcacaggaccagacatgctcccaggtagtttatcctgagagcaaggaaagtcatagggaaaatactctgtgaataaacatgatccaactggggcttttcaaacatctttgaggacaaatgagaaaatatttcaatgagacagagaagagtggagggttgtgagtgtcagccatggtagggaaga

SEQ ID NO: 250268 - DNA, 517 bp, Homo sapiens
aggcaggcaaacctggttttgaattccagcctagccactatatagctgtggaattacagagacattctttaacctctctgaaactgagtttcttcatctgkgtaatgggcactaagaaatcctgcctcccagggctttagcaaagtaccaacacagtccctgctacatagcagaggctccatcgattcagttccttttcatgtctcatggtcaaggtggccttgcctgaaactaagacatggctcattgtactgctcaagtcagaacaaagccaagtgtgctttgggcaactaatgtgcctaagcctgggtcatgagagtcctaaaaaggaacagggtgtggctctggagctcagggaaacaaagagtcaaatgtgggggagacatagatttgaaaaaaaaaaaaaagagcccaggcttggggtctggagtctgggttatcttcctggctttgccacaaatttgctgtgtccttgattaagtcacagcagttctctgaatctcagtttcctcttctg

SEQ ID NO: 250269 - DNA, 517 bp, Homo sapiens
aggcaggcaaacctggttttgaattccagcctagccactatatagctgtggaattacagagacattctttaacctctctgaaactgagtttcttcatctgtgtaatgggcactaagaaatcctgcctcccagggctttagcaaagtrccaacacagtccctgctacatagcagaggctccatcgattcagttccttttcatgtctcatggtcaaggtggccttgcctgaaactaagacatggctcattgtactgctcaagtcagaacaaagccaagtgtgctttgggcaactaatgtgcctaagcctgggtcatgagagtcctaaaaaggaacagggtgtggctctggagctcagggaaacaaagagtcaaatgtgggggagacatagatttgaaaaaaaaaaaaaagagcccaggcttggggtctggagtctgggttatcttcctggctttgccacaaatttgctgtgtccttgattaagtcacagcagttctctgaatctcagtttcctcttctg

SEQ ID NO: 250270 - DNA, 517 bp, Homo sapiens
aggcaggcaaacctggttttgaattccagcctagccactatatagctgtggaattacagagacattctttaacctctctgaaactgagtttcttcatctgtgtaatgggcactaagaaatcctgcctcccagggctttagcaaagtaccaacacagtccctgctacatagcagaggctccatcgattcagttccttttcatgtctcatggtcaaggtggccttgcctgaaactaagacatggctcattgtactgctcaagtcagaacaaagccaagtgtsctttgggcaactaatgtgcctaagcctgggtcatgagagtcctaaaaaggaacagggtgtggctctggagctcagggaaacaaagagtcaaatgtgggggagacatagatttgaaaaaaaaaaaaaagagcccaggcttggggtctggagtctgggttatcttcctggctttgccacaaatttgctgtgtccttgattaagtcacagcagttctctgaatctcagtttcctcttctg

SEQ ID NO: 250271 - DNA, 599 bp, Homo sapiens
cagcttgtttggtttctgttgaggtccagataagagtaaataggttaaattaaattcgaccatgtaaagctagatcatcagaggcagagtgtcggatctcaggctatcagtccctcaaagaactgcctttattgaaggtggatgagggaacrgtcaggttgaggagcattttatgcttttgtgaaactgatgaaggcaaggtctaccctgcctctctgagttcttttataagtacccatgataaatttccaccagtgtatagttccagaggaggaaataatgtagttcctacagaaagctgtgtatgccttccatgtcaaaagataaaacctctgtacatgggtatctttgtttttcttagctgttagagaattcagagacagatccttgggtatttacatctgctcatttatggtgcctgaaaggtgctatttctggttcttgtagcagatgaactcatttcaggccattgataatattaatatgtcttgtttttcagcctgccattcatctcacatcttttgggaagtgagtaggctcaaatctcatatactcaagatgaaatggaataaaaaggaaaattattgattagaaagaaa

SEQ ID NO: 250272 - DNA, 604 bp, Homo sapiens
gtgctatttctggttcttgtagcagatgaactcatttcaggccattgataatattaatatgtcttgtttttcagcctgccattcatctcacatcttttgggaagtgagtaggctcaaatctcatatactcaagatgaaatggaataaaaaggaaaattattgattagaaagaaacatgaggttctaagataggttttcaaggtggattggaggatttctatcacttaaaatgaccaataatggagggccagccatttgactcaatattcttggccatcattagtcacctgtacttgtgtgstaatattcgggtctctatattgttgtcccctcctcccacaatccatggttttactttccatggtttgttacttgcagttaattgtggtccaaaaatattaaatggaaaatccacagataaataattcataagttttaaattgtgttctgttctgagtcatgtgatgaaatcctactctctttgcctaggatgtgaatcatccctttgtccagtatattcacactgtacaggtatgcatgcataggaaaaaatcatagtatatatagggttcagtataggctatgaactgaatatatatactag

SEQ ID NO: 250273 - DNA, 522 bp, Homo sapiens
ctgttaggccctgtgtgagctacttcacatggttcctctcatttgatctactctaaggaagacacaaaaccaagggcagtcccaggaggtccttggcagattccagcagccacagtgcagcaggccccatgctgagccactgggtgagtcatgggggagggcgggcaagtcaggtgaccgggtgagaatcagagctatgctgaggtggcctggttaccttgacattcctgtgattctgccaaggtaaaaagtaayccaaggagtttgccttatatgggcatgatgacagatttcaacaagacagcatgttaactgaccccataccaaatcggttcccggactgcacaggcaacgcccgataaagctgctctggaaatataggaaataacaatttatgatgggctatcaccggtgactcacaaaggtgcagcccaactgccattgtgtgtcttttagagaagggggggaaaagttggtggcctgtgggccaaatggctgtctcattctccctcccaccaatgg

SEQ ID NO: 250274 - DNA, 522 bp, Homo sapiens
ctgttaggccctgtgtgagctacttcacatggttcctctcatttgatctactctaaggaagacacaaaaccaagggcagtcccaggaggtccttggcagattccagcagccacagtgcagcaggccccatgctgagccactgggtgagtcatgggggagggcgggcaagtcaggtgaccgggtgagaatcagagctatgctgaggtggcctggttaccttgacattcctgtgattctgccaaggtaaaaagtaatccaaggagtttgccttatatgggcatgatgacagatttcaacaagacagcatgttaactgaccccataycaaatcggttcccggactgcacaggcaacgcccgataaagctgctctggaaatataggaaataacaatttatgatgggctatcaccggtgactcacaaaggtgcagcccaactgccattgtgtgtcttttagagaagggggggaaaagttggtggcctgtgggccaaatggctgtctcattctccctcccaccaatgg

SEQ ID NO: 250275 - DNA, 564 bp, Homo sapiens
acacaatagaaaaacatacagaaattttagtttaatttcattctgctaatgaatacttagaatttataatgaaattttactgtgtgatgggtttgttgtgtgtaatatgataggtgtcattttacatgttacttttaataaccatatagagctttttggttacatagtattttttttcaacttgttttcctttaaaactcctttaatatggtgctttatagggtttagaagaatgtttccttcttatagagtgttacgcagttatgtccagtcctgataggaggtttacagctttatggagtctggtgtcactttcataatcrgcctgaggcaggataatgtttctgatcagttcagcttaatgatcagccaggatatatcagcaggttaaaatatcagactactataattgcataccagttggttaatagtaactgcaataaatggtaacattaagattatgaattctagtatacatggtttatctcagaaaccatatttattttagcttactacacattttttctggccctgggacaacattgcaaggctgaggcacttgct

SEQ ID NO: 250276 - DNA, 510 bp, Homo sapiens
catgcaagcacatccacaaagggtaataaaatagcacacgttcagatcagacacaccaacaccaggttccccacgttgccccacatggggccaagacctatgtgcattactcactgtgggttttttgcttattttctgctctgtggtataaatatattattgaaagtgtcaaaaaggcctgcatcatacccatagggtagtgcaaatattccaaaatccaaaattctaaatactgctggtcccaagcatttcaaataaagaatattaaacttgtacttcaaaagacagtattctttctcttcatccctaatggaatatactctaacaaaaagaactaccaaaataaacatcrttagtagtttcattgttaatagtaatactggcattgttaacagtaatattgtaagtatattagatgataaagaaataggtaattcagttactgtatcaagaaacaaatgtttagcttaaaaaaagacatacaggtaggtggagaaccaaagttaagca

SEQ ID NO: 250277 - DNA, 566 bp, Homo sapiens
tgatgtaggacaagggttcagtcctaactttatagcctcataggctataaagcttatagggtaaattaacattcctaattttcttatctgtaaacttgggtttataatatctctgcatctacctgtatacctatgggattgttaatgtgaggactgaagttaatatatgtaaatatctcaacacagtacccggtacattatgggaactcagagtggcagagggaaaataatatagctatatcactaaatatcaccacctcagaatttatacytgggtattaagttggttgtattagggaatgtaaagtcttaaaactcagagaaaataaagccctgttcttccttccagattctcttaggaaccatgtcccttgcagggtggtttctggaaaatacgatttttctactcttttatttaagatcaaaggtttggagaaggtatagtgtccttttgctcttagaaaataataataacaataataatggagcactttctctatacctaggattcatgtaaacactttacatggattatataattcaatcttcaccattctgtgaggttg

SEQ ID NO: 250278 - DNA, 385 bp, Homo sapiens
accgctgaaaattaaagctaactatgtattttttttctatagaaaccaaagttcagttctaaaagtcacatttggcatgtttataatgaaaattccaacagacagaagctggaacatgtaaaagtcaataaaggaagcaaagcgagtttatttataaataaagaagatgtatatgaatattaccaaaaagatcccaaaaacacaaaatttggtaaatccaagcataaacaatcaactcttraccagatatactctacaggactcagaaagggcaatctccataacgtcaaagatcccaacacaaacgtaccaaaaggtataggaagaagaaaaacacaacataaaaggacccaagtagatgatgtagactgtaatccaagaaaga

SEQ ID NO: 250279 - DNA, 565 bp, Homo sapiens
ttgttcagtttccaaagagaaacacatccagaacctggatttatcagatagtcaagaagttcaatgcttggaattagaatctgttgaccaaactgaagctgtttctttcccagggcttttattacataaagaaatcaagttaccagttgttactacagataagcagcctcacactctccaggaacaacaccatgtactttataaatctcatgaaaacagtaacttggtcccaaaagatgagagatttaacaaatgggaaaattctttcctatcctttgtaaaggaaaattctgataatgatgatgatgatgattgctctacctctgagaaggctataacatctaaaaaggtgttgtgttctacaggtggcaaaaaacactataattttaaggagaatttaacaaataaaaaagaaatgggtttycaacagtttttactttctgaagatcatctttcacaggaaaatgagttaaaagcagtcagcctaaccacacttccagaacaggaagctgttaatttttcttattcagataatgcagttatttctgaacatgttgcaaattat

SEQ ID NO: 250280 - DNA, 571 bp, Homo sapiens
cttgggtacagaaaataataccccaaaatacgacrctatggcaagctgcgtactctgaattaaagaaaattgaaaggcctgagaaataagcttcagaaccaaggtctccatctgagctttcccctcaccccccaccccatttctctgatctttttttcttgaagcacctgaagggactctctccagaatttccttatctgactgagaaagcttcttgaaaaaataaaataaaatggtcttaaaatcccctccctaggaatctcattaaacaaccaggaaagattaaccatcagagaaaagactaaaagtctctaaggccaggtgacaggacactatgtccagacaaattctttatctattcttctgacagcagctccaagagactacccaagactttatctgcctaagacaacctttgttcagagtgaagttctgtctctcatcttcccatcaattccccaaaacttagaggaacttgtcccaggccattgttttttgggcatattcatttcccctgaaaatcatttactgctatatcctccatctcctcttcccctatgaagaatggtat

SEQ ID NO: 250281 - DNA, 522 bp, Homo sapiens
ttattcctagttttttcctcttcattaatatgtgatgattctgaacagccattcttgtccagttctaagttttaatatttcccctaaggaccagaaattatatgacctctgtgttacagtgttaaatactaaactgggcagggcacagtgggtcacacctgtaatcctggcactttgggaggtcaacataggcagatagcttgagcccaggagttggagaccagcctaggaaacatggcaaaacccagtttctacaaaaacaaaaacaacaacaacaacaacaacaaattagccaggcatggttgcccatgcctatagttccaactacctaggaggctgaggtgggaggatcacctgaacccagggaggtcaaggctgcagtgagctgtgatkgcaccactgcaccccagcctgggtgacagagaccccaactcaaaactgattctgcctaattcttaatacatatcagaaaatctgaagttgttgtgtccctttcgaaaaagataaaatacactgataaca

SEQ ID NO: 250282 - DNA, 663 bp, Homo sapiens
atggtaccatctgtgtactgcttcagtattcttaaatgttgacatccactcaytaggatctaaacacaatttaaatacacagtgatttaaccactgaatgagaattgtctttactctagctaagttaggtgctaaagccccattttcatcctacttcttcccagaaatattcctaagtcattgcaacttctgaacagagacagcaattttaggaagcaagttaggatgaattaaagagccaggaaaagtataccattggcagtagtgatcagctcagtagcatcaggggtacctaactttagaaaaatcacattgtatttgagtagcccagcaatttattactcagtgaggcagctagtaagagagaatgctacctgcccacgggggctttaaaagaccatgcagtgcataatctctccatgagctctggccttgccagccctgatccttcttccattacacacacatcaaacaagcctgtggttatttatttccccttcaaggttctctttaatgctcattttaactgattctctctctgaatcttgataaagatagaagatggaggctgcaaaagggaaaaggaaagtgagattcaagttgtattcacaactctcagataaatagtcctgaggcagaagaagcggcctactggtaataatt

SEQ ID NO: 250283 - DNA, 663 bp, Homo sapiens
atggtaccatctgtgtactgcttcagtattcttaaatgttgacatccactcactaggatctaaacacaatttaaatacacagtgatttaaccactgaatgagaattgtctttactctagctaagttaggtgctaaagccccattttcatcctacttcttcccagaaatattcctaagtcattgcaacttctgaacagagacagcaattttaggaagcaagttaggatgaattaaagagccaggaaaagtataccattggcagtagtgatcagctcagtagcatcaggggtacctaactttagaaaaatcacattgtatttgagtagcccagcaatttattactcagtgaggcagctagtaagagagaatgctacctgcccacgggggctttaaaagaccatgcagtgcataatctctccatgagctctggccttgccagccctgatccttcttccattacacacacatcaaacaagcctgtggttatttatttccccttcaaggttctctttaatgctcattttaactgattctctctctgaatctkgataaagatagaagatggaggctgcaaaagggaaaaggaaagtgagattcaagttgtattcacaactctcagataaatagtcctgaggcagaagaagcggcctactggtaataatt

SEQ ID NO: 250284 - DNA, 561 bp, Homo sapiens
aagttgtattcacaactctcagataaatagtcctgaggcagaagaagcggcctactggtaataattgtacaattcaattaatctttactccctgtcaacaagtatcttctagatgaccaaaaactgactatgagaccagtgatgcccactgtattagtcaggatcctccagagaaacagaaccaatgggatgtgtacatatgtagaaagagatttattataaggaattggctcccacaattatggaaactggcaagtgcaaatatgcagtgtgacctgtcgggctcgagacacagccagccaatggtatagttccagtctaaaggtcaacaggcagagaaccagaacaggcaatagtacagatggagtttaaaggccagcaggaaatcatccgggagagctaatggtgctgataaaatctaaagasagtctgctgtagaattctctcttgcggggagaggcaggtctttttgttctattcaggtcttcaactgattagatgaggcctacccacatgatggagggcagtctgctttactcaggtccactgactttaatgtta

SEQ ID NO: 250285 - DNA, 540 bp, Homo sapiens
tctgcggctcatgcaatcctcccacctgagcctcccaaggagctagaatcacaggtacatagcaccatgcttggcaaatgtatttcttgtagagacaaggccttcccatgttgcccaggctggtcttgaactgctgggtttaagtgatccttctgctttggcctcccaaagcattgggattacaggtgtgagccattgcatctggctggattttccttttttaaagcagcagaatccttttttctcccaaagaaatcttgtatgggccctcaatatgtaagacgcagggatgctctagttgactttccctccactcctgccactgttccsctaagacacctcccttaaacactatgaaaattaggttaatgctgtttacgaaaactaaaaatactgaagtttgactaacgacggagtgaaattagcttacctgactaccacagatgttttcatactcttccacaagatcaaaaactgtactcgaagagtgcttcagaaaagactgcaggaaatcagaaaacatactcatggatgctagaa

SEQ ID NO: 250286 - DNA, 540 bp, Homo sapiens
tctgcggctcatgcaatcctcccacctgagcctcccaaggagctagaatcacaggtacatagcaccatgcttggcaaatgtatttcttgtagagacaaggccttcccatgttgcccaggctggtcttgaactgctgggtttaagtgatccttctgctttggcctcccaaagcattgggattacaggtgtgagccattgcatctggctggattttccttttttaaagcagcagaatccttttttctcccaaagaaatcttgtatgggccctcaatatgtaagacgcagggatgctctagttgactttccctccactcctgccactgttccgctaagacacctcccttaaacactatgaaaattaggttaatgctgtttaygaaaactaaaaatactgaagtttgactaacgacggagtgaaattagcttacctgactaccacagatgttttcatactcttccacaagatcaaaaactgtactcgaagagtgcttcagaaaagactgcaggaaatcagaaaacatactcatggatgctagaa

SEQ ID NO: 250287 - DNA, 564 bp, Homo sapiens
tataccttaaggcatttagtttttatctgtcgtgtttactatatcaacttgtaggtattttttataaatataaagaaaagctattgatttttggcatgcttatcttatatccagccaagttcccgaatacttctaatagatttttttgagctttcaaggtattcacttataatacaagcaaaagtaattttattttccagtgtctatatttaacatttcattcttttgatataatgcattcattagctctattaggagacycagcccctatttcatagcattgctgagggttgaacaacacatgtaaagtgcttagagcaatggtggcacatcttagggtgtccaagaaataactagtattatttcccaactatcagagcttatcagatctttaatctagaaatgtcactttcaagcagtatcaagccaaataactgaataagtaagctatcatttgctggtttttcttattctttcatcattcctcattttaaatgaatttgaggcgcctacctgacagctttcttaaacttctatttgtgattcataggacggcagaaaaga

SEQ ID NO: 250288 - DNA, 573 bp, Homo sapiens
accaaacaagctttgtgtgaacaacaaggctgtttatttcacctgggtgcaggcgggctgagtccgaaaagagagtcagcgaagggagatagaggtgaggctgttttataagatttgagtaggtaaaggaaaattacagtcaaasgggggtgttctctggcgggcagcagtggggtggcgggggggcggtcacaaggtgctcagtgggggagctttttgagccaggatgagccaggagaaggaatttcacaaggtaatgtcatcagttaaggcaaggaccggccattttcacttcttctgtggcggcatgtcatcagttaaggcaggaacaggccacttaaatatcacttctttcgtgattcttcagttatgtcaggccatccggaggtcacaggggatatgatggcttagcttgggctcagaggcctgacacaggcctccatggattcccagctgccctggaatctcctgtttcagggggagttcacaggaagccatgttagggcatttccatgtcgtcctgggcccagacttccagccccgagcaaggacttcaagtcttggtcaactgcc

SEQ ID NO: 250289 - DNA, 622 bp, Homo sapiens
acttccactgatgcaacgagcctgctgattttgattaagtaattctgttgttagggtaaactgcggatgaygtagaaggtaatgctgtgtttatgagattatagaatgaacttcactcctccctctccaaaaagtaaagtaccaaccctctatttcatattctaagtaatccatgtctccaattctctgaggtcaataaatatgaatatccaaagcaggaagccctgttgactttcttcttctacagtgggatagcaagctcagactaaagaactggctgatattttacggattcactaaggaaaagcagaagtagaagaacatagaggttagaaagttgaggctggggtctggtatgagggggtgttaataaaatgacccctatagaccagacatcttacaggtgttctctcattaatatccacaactgccctgtaaagtattattctcatttcacagataagaaaactgaatctcagagagtaaagtgcttgcttgaaatcacacagctggtgagcagtgatgtggggcctgaatgactcaaaagcctgtttcagtggatttacgtgaaagtgcctgtgctctcattagctccatgggaaggtgtgattggggtctaagg

SEQ ID NO: 250290 - DNA, 622 bp, Homo sapiens
acttccactgatgcaacgagcctgctgattttgattaagtaattctgttgttagggtaaactgcggatgatgtagaaggtaatgctgtgtttatgagattatagaatgaacttcactcctccctctccaaaaagtaaagtaccaaccctctatttcatattctaagtratccatgtctccaattctctgaggtcaataaatatgaatatccaaagcaggaagccctgttgactttcttcttctacagtgggatagcaagctcagactaaagaactggctgatattttacggattcactaaggaaaagcagaagtagaagaacatagaggttagaaagttgaggctggggtctggtatgagggggtgttaataaaatgacccctatagaccagacatcttacaggtgttctctcattaatatccacaactgccctgtaaagtattattctcatttcacagataagaaaactgaatctcagagagtaaagtgcttgcttgaaatcacacagctggtgagcagtgatgtggggcctgaatgactcaaaagcctgtttcagtggatttacgtgaaagtgcctgtgctctcattagctccatgggaaggtgtgattggggtctaagg

SEQ ID NO: 250291 - DNA, 390 bp, Homo sapiens
tcaccttttcttatctactggaatttgaaggctgaattcagacacaggtagagtccttacaacatgaatgctactgctcaccatcatcacttaatagtttcaccagagtagtcatgaccctgaataaacatttctgtttttcaggattctggagaaatactgattaggtctaaattcacattcagaattatgaaaaaatgttatatatcttatttcytctgccttctcattcttaatgactgaatcaccatgccttggtaaggcatttccaaccctctttaatctatcccctacctacttgtccactattcattgctctactctatagtaacccttaacctagccaagctacctttattcctacacacttaagtttagagagacctccta

SEQ ID NO: 250292 - DNA, 496 bp, Homo sapiens
cacgacagctcattcttgagtgcatcytagaccatatccacaatcccagttacatgaatactgcatatggagccacaggagaggttttccacaaacagtcttacttctcaggactttttcttgtctgctcatacacgaactgcatgaatggagtgagaacaattgctctatctcttatttcccttttttatgccaaagtttgcttagcttttgagctaactatcctaagagatgcctttcatttcatgcagactggaaagatgaaatgcaacctgcttaggggctgatttgcaaactcttgtcccattctttgattcatcaccttgacaatagagtattgaacattatgacatgacagaacggggttgaaccattaaattcctgtgggcaaggcatcctaaacagagactaaggtactataaagaaaatgtttactattttaaaataagtggcttcttgatggccacagggtttttgctagcttttgacaggtcac

SEQ ID NO: 250293 - DNA, 496 bp, Homo sapiens
cacgacagctcattcttgagtgcatcctagaccatatccacaatcccagttacatgaatactgcatatggagccacaggagaggttttccacaaacagtcttacttctcaggactttttcttgtctgctcatacacgaactgcatgaatggagtgagaacaattgctctatctcttatttcccttttttatgccaaagtttgcttagcttttgagctaactatcytaagagatgcctttcatttcatgcagactggaaagatgaaatgcaacctgcttaggggctgatttgcaaactcttgtcccattctttgattcatcaccttgacaatagagtattgaacattatgacatgacagaacggggttgaaccattaaattcctgtgggcaaggcatcctaaacagagactaaggtactataaagaaaatgtttactattttaaaataagtggcttcttgatggccacagggtttttgctagcttttgacaggtcac

SEQ ID NO: 250294 - DNA, 569 bp, Homo sapiens
tttttttttttttttttttgagatggagtctcgctctgtcatccagcctggagtgcagyggcgcgatctcggctaactgcaagctccgcctctcgggttcaccccattctcctgcctcagtctcctgagtagctgggactacaggcacctgccaccacccccggctaattttttgtatttttagtagagacggggtttcaccgtgttagccaggatggtctcgatctcctaacctcgtgatctgcccacttcggtctcccaaagtgctggtattacaggcgtgagccaccgcacccggcctcatccctttttttatggctcatcaaaaattttcaggtaggagtgtggtgtggcaagaaagtaggattttgagacagacacacatgagtccacttccaccacttactgagagtcatttctctgcaggtaagcaaatgaagcttgtttccatttcctcatctataaaatgacataatagcactgaattcatatagctgtgcaaaagaaattagatcaactataaaaataacatactagcagatagcctgaaaaaatactgttttcaagag

SEQ ID NO: 250295 - DNA, 605 bp, Homo sapiens
gttagcccaatgttatgaaatgaaacaaaggcttagcaaggttaaatatcttatccaaaaaactctgactaataagtggtagagtcacaatttggacccaagtatgtctgactctaaaaagtaagcctttaaccatacactctaggctgcatctattctaaatcctaatttgcactatagttatttgagagcaaatgtaaattgcctactaaactgtatacttctcggaacaaaggctagattctgcatttctgtatcccccacagttctgagaaaaacgtttctggaagtgtagcaagtaaaacaaagaattccaatgtaaaatgtcaattttgtgatttctgggctacagatactctgggaggaccccacttccctccccatactcacctccaagcaccacttctgttaaagtgtgcattattttggaccatggttaggttaacacagcagcagatgattgcagaaagagctagagtgtggtgggtccccttctgtgcagctctgctggaaataacccaaggtgraaatggctcacaattcctcacgttgcaatgagtactgtagaaagtgctgtggtttgtggaacatattagaaccaacca

SEQ ID NO: 250296 - DNA, 573 bp, Homo sapiens
catcagctgatctctgtgatgcagcatccttactcataacatcattgccctgtacacctcaagagtgctcactgactgtccttaggataaagaccacaattcttaccatagcccaaaaagccctgtagtgtctgaatctcaatgccatcttgtgtccccatgttagtccattcttacattgctataaagagatagctgagactgggtaatttataaagaaaaaaggtttaattggcccatggttctgcaggcttcataggaagcatggcagcatttgcttctggggaggcctcagggaatttacagtcatggcagaaggtgaagggggagccagcacttcacgtggccaaagcaggatgaagagagaggagggggaagtactacacacttttaaacaaccagatgtcatgagaactcactattgcaacaaccgctccaagggggatgatgttaaaccrtgagaaacagcctccatgatccaatcacctcccaccagacctgacctccaagattggggattacagttgaacatgagatttggatggggacacagatccaaaccacatcagcccc

SEQ ID NO: 250297 - DNA, 573 bp, Homo sapiens
catcagctgatctctgtgatgcagcatccttactcataacatcattgccctgtacacctcaagagtgctcactgactgtccttaggataaagaccacaattcttaccatagcccaaaaagccctgtagtgtctgaatctcaatgccatcttgtgtccccatgttagtccattcttacattgctataaagagatagctgagactgggtaatttataaagaaaaaaggtttaattggcccatggttctgcaggcttcataggaagcatggcagcatttgcttctggggaggcctcagggaatttacagtcatggcagaaggtgaagggggagccagcacttcacgtggccaaagcaggatgaagagagaggagggggaagtactacacacttttaaacaaccagatgtcatgagaactcactattgcaacaaccgctccaagggggatgatgttaaaccatgagaaacagcctccatgatccmatcacctcccaccagacctgacctccaagattggggattacagttgaacatgagatttggatggggacacagatccaaaccacatcagcccc

SEQ ID NO: 250298 - DNA, 504 bp, Homo sapiens
agcaacacaaaatggactaagacaataacataccaatattaatacattaattagtattgactgtatgaattatattgtctggtgagatataaaatgcacatagaataaaatatgtgacaacaataacatattagttgggaacttggtaaaggtgttatacatagggaaaaagtatataattttctatggtttgtgttatttatccaataatagtaataataatattttattaccatatggtgaaatgcttatcattttctacaaaaagacacttgctaagaagtacatctttttatrgacaagactaacatgacctctgtctgtacactagaatgtcagtacatggcccctagataattaaggagttcttggacttaaaaatccaaacaatgtgtcttgctttaacatcttttcatacttaaaaataataagcttaaaaacaaaacattgcaaaaagagcttccccttcaaaaaaaataaaataaaattaagcctctttcagtt

SEQ ID NO: 250299 - DNA, 610 bp, Homo sapiens
tcaaatatagtccagtgctaagatagccattgccaatatgataaatccttaaattctgatactcaagatcacccagcccaaagccctcactttacaaataacgaaactaaggcccacaagtttaagtttcccaaaccaccatccagtgagtaacagaaaaatctcctttctctcagaccaatgtttatcccatgatacctccccagagctccagggctaaatgcatttgcatagatcttcctttccttgccaaataaggtcatgtgctgttcaagccactcattctgatgcctttcctaaattaccctgcctaccttactatcctaacagcaagtttatctaagatggcacctttcgtaatctttagtctgtgtcacaaaatatgagttgtgtatatcttatattatctcyatattactataagagagctataaccatatttttagtaggtataattaataacagagtccctactaaactttgttctagacataacagattacccaccagttccataaatttctatggaatcatcccttcaatgttccatgcccctgcatatgctgttccttctgcctgggcagccctccctttgttccagaccccaact

SEQ ID NO: 250300 - DNA, 544 bp, Homo sapiens
gggaattaaatgaggaacacttgacacaggacatagcattcagtaaggatagctatgattattgctaacatcacagaatgtaaatatataccatagcatacctgtacattatttctatctggagtcaggaggatttcagtagcaagttaagaccgcaattatttgactacattgtatctggttgtttggaagaaaacttgttttytcataaaaagaagcgaattaccaaggcaaattacagacagtaaaaaatataaaaatatagctatgataaaaagaaagtgttccggctgtgtttttacagaatagggctggtatgagggattatttgcgaacacacccaaaatagatttttttgtttaccattaattctttatgtcagaatagaaagcaccattttaaccagatattttaccacagtttctgagccctttggaggaaaaaaaaaaaaaaaaaaaaacacattatattgatccaataaaaataatataccaaccttgggttttatttacaatatagaaaataattccaaactactaggtac

SEQ ID NO: 250301 - DNA, 571 bp, Homo sapiens
aatgttacctattattaatgatatcttcaaatacatgacactctaaatgaaaatttgaaagttaaaccctagaatagcagtctatactgatttgtatgtctcatatgaaattcacttagcaactgactttgctttctagttaacacataaagtttatttttatattaacgaatagatagactgaacacatgctcaggctcagcaaagcaggaaccctcaaaaatgacatatcatttattcaataaatgtattcagaattttgcagtcggaatgtttagaactaagatcttaatttcaacataaaataaagctctgttttacagtttattattgtttycatgtgtgtttctttatggcagataataattgcagagtttagaggctctaaggatcttgggctggccataggtggaggttctaaggatcttaggctggccagagggtggaagggtctaggggtgaaccccaggggtaatacgaagtcgttgaaaatgtatacaaatcttggatttttgaaaatggttttgggaaaaggtctacagattctcaaaggagtccatggcaataaagc

SEQ ID NO: 250302 - DNA, 543 bp, Homo sapiens
acacctaggttggttttatatgttggctattgtgaatagtgctacaataaacatgggaaygcagatatctcttccacttactgatttcacgtcctttggatatatattaagcagaagtgagattgttgggtcacatagtagttctatttttaattctttaaggaacctccatattcttttccataatagccgtactaacttaattttcatgaatagtgtgcaagggtttccttttccccacatcctcaccaacacttatcttgtctttttgataatagccattctcacagatacgatgtgatattgcattgtggttttaattggcatttccctgatgactagtgatgtcatatgtccttgctttaaaacagtggctggctccttattacctacagaatcaagttcaaatctgttagcaccttcacaatatgatcaagacacattcgtagaaagaataaaaaagggaaagatgaggcagagacagagaacaaacgacaaagatcaaaggtcttctccataaaacattttgaagggaagtaatac

SEQ ID NO: 250303 - DNA, 543 bp, Homo sapiens
acacctaggttggttttatatgttggctattgtgaatagtgctacaataaacatgggaatgcagatatctcttccacttactgatttcacgtcctttggatatatattaagcagaagtgagattgttgggtcacatagtagttctatttttaattctttaaggaacctccatattcttttccataatagccgtactaacttaattttcatgaatagtgtgcaagggtttccttttccccacatcctcaccaacacttatcttgtctttttgataatagccattctcacagatacgatgtgatattgcattgtggttttaattggcatttccctgatgactagtgatgtcatatgtycttgctttaaaacagtggctggctccttattacctacagaatcaagttcaaatctgttagcaccttcacaatatgatcaagacacattcgtagaaagaataaaaaagggaaagatgaggcagagacagagaacaaacgacaaagatcaaaggtcttctccataaaacattttgaagggaagtaatac

SEQ ID NO: 250304 - DNA, 528 bp, Homo sapiens
tttgtgatttcctgtagtaaaatccaagcgtccaataaaatgctttcaytgattgcagtgtcacttttagatgctgcaagggctccaaacaagagtcatcttttagcactctgctgtgggtttactttttatggtgttgggatctagtgggtaaatacagcttctgcattaacactaacctgaagagacaaacctctcaggaggaccatctcctctttatgcttttccaaccctggggtcataaatcctatcagcctgcagagatgaagcatcctaatgattacagtggcacagaggtgttctttgagtgaaccaagcaaataaaaattaaagttcaaagtcactgggtaatctaagacattcattacacctgtgctgagccagtcaggcctgatcagccaaataggcatcaggccagtgagtgtgcaggagaaagtaaacacctctaagattcaccttgtttcctcccaagggtgtcaacattgtgggatgcaaacaatatttcaaataagtttgccttgaaaagca

SEQ ID NO: 250305 - DNA, 528 bp, Homo sapiens
tttgtgatttcctgtagtaaaatccaagcgtccaataaaatgctttcattgattgcagtgtcacttttagatgctgcaagggctccaaacaagagtcatcttttagcactctgctgtgggtttactttttatggtgttgggatctagtgggtaaatacagcttctgcattaacactaacctgaagagacaaacctctcaggaggaccatctcctctttatgcttttccaaccctggggycataaatcctatcagcctgcagagatgaagcatcctaatgattacagtggcacagaggtgttctttgagtgaaccaagcaaataaaaattaaagttcaaagtcactgggtaatctaagacattcattacacctgtgctgagccagtcaggcctgatcagccaaataggcatcaggccagtgagtgtgcaggagaaagtaaacacctctaagattcaccttgtttcctcccaagggtgtcaacattgtgggatgcaaacaatatttcaaataagtttgccttgaaaagca

SEQ ID NO: 250306 - DNA, 655 bp, Homo sapiens
gggtatataaccagtaatgggattgctggatcaaatggtatttctggttctaggtctttgaggtatgccacactgccttccacaatggttgaactaatttactttccaatcaacagtataaaagcattcctatttctccacagcctcaccagcatctgttggttcttgactttttaataatctccattctgatgggtgtgagatggtatctcacagacaaagatagtttctgaaaaactaaagccttcttggtgaattctctaaaagtccatttgactggttactgctggtaaatagaattatcagattgcttcaaaggtagaaattaaacatgcacattgactctcaggctgctcagaaaatactggctggagtctggggtactatttagttacatcatggtaaatgtaggagatggaaggaggcagttgagagagaagatagtgtgtttcctgtgaccttttttccctaaacttcccacatttcaagcaatgggaagagattgaatttggaagcaaatgaaaaacaaaaggcacacagaatttgcttgtcactaatgccaggaagcaacttagagccataaccaagtatcttaaatctccaaatgctactgctttcatttcaatagtagtsagtccttgtagtcacagtacat

SEQ ID NO: 250307 - DNA, 517 bp, Homo sapiens
atttgtatcatgatctaatgttctcccagcctttcctggcttcctaccaattgtctctcatgggcatgtgtccctaatgaaacttgcacatttattctgttttggcatctgtttcttggagaacccagacttacatggtattcaataaacacatctatagccaaaaaggctgatagaaaagaaaaatatctcaaggctttttagcgccccagttggtccactgtctcagttggtaaaagtatagtattgaggttatggatgctaatccattgatttttcaatctatttcacactatcagtctcagtggctctggaacagtcttagtttgcayttgcagttctatcataatagcacttcctttttctgttagtttcattcagtgaaatgatgtctggaaaagacttcaaaataatactgggaggagttgatgaggtgtgaatgaagaagaattgaccaatggatcaatgggcccataggagttcattatatcattctatttcctttgtgtcagtttaa

SEQ ID NO: 250308 - DNA, 614 bp, Homo sapiens
gccgagatgggtggatcacttgaagtcaggagttcaagaccagcctgaccaacatagtgaaaacccatctctactaaaaatacaaaattacccaagtgtggtggcatgtgcctgtaatcccagctacttaggaggctgaggcaggagaatcacttgaacccagaaggtggaggttgcagtaagccgagatcacgccattgcactccagcctggacaacaagagtgaaactccgtctcaaaaagaattgrcatttacattacatatgaaatgcccataatccccattatctacttatggtctgaaccatctattccctaaagctagtatggaaaaagtgaaaaaaaaaaaacaaataaaaagaaaaataaccattttcagcttttaagactgtcactaagctctgaaattattctaaaccataacactcatgtcctatcacaggtagcaaatgagttgcaccaaagaaatcacaaatgtttattattattaaaactttcctttaaacagtgtcactttcaaacttgtattcctactttaacctccctctaaacattaaatcacaagttttatatgccagtttaattatttttaataaaataaatatgtagcaatt

SEQ ID NO: 250309 - DNA, 555 bp, Homo sapiens
ggcaaatatgatgaaaccccatctctactaaaaatacaaaaattagctgggcgttgtggcgtgcacctgtaggcacagctacttgggaggctgagacaggagaatcacttgaactcatgaggtgcaggttgcagtgagccgagatcacaccattgcactccagcccagtgacagagtgagactccgtatcaaaaaaaaaaaaaaaaaaargggatgctggccagggccaggtgcagtggatcacacctgtaatcccagcattttgggaggcctagatggacagatcacctgaggtcaggaatttgagaccagcctgactaacacagcgaaaccccttctccactaaaaatacaaaaattaggtggacatggtggcaggcacctataatcccagctactcaggaggctgaggccggagaatcacttgaacccgggaggtggaggttgcagtgagtggagagatcgcgccactgcactccaccctaggcaataaaagtgaaactccgtctcaaaaaaaaaaaaaaaaaaagacaaaaaacaaaaatgggaagatggg

SEQ ID NO: 250310 - DNA, 530 bp, Homo sapiens
tgacagcttttcttaagaatcaaacaagttttcttcaccttgtcacttccccttacagaatgttgccattgtatttttacagggagtttcaacaccattccaaataccatgagaagtgcgagggaaagggataaaaaggaacccttcacacccttttccagtggaggttcctctagcactttgccaacgatacattattttacatttttctttgtggcagacaccttctcatttgaagaagagcaaaatcaagaaagaatttcctcttctccttttttatgtgctcattctaaaaaattagactgcaagtggcattcagttttgagaccacatscttgtagtgaacaaactgaatttatatacttaactactttacttcagttaaattcttcatttattttaagttaatttaaaatagacttggcttccttccacaagtacaggcagctccagaatttctatataggaggggcttagggacagccatcagattagaagggaggtagggagcttatcttgaagctgcattg

SEQ ID NO: 250311 - DNA, 596 bp, Homo sapiens
tactgattctgtctaacctttcacctcttctcactgctaattggtttgtttcagaaaaaaggcagcgtgaaatgtgatgagaaatgtgatagttcatcacagcagaygtaggtgagcattaggatccaattagcttgtgttagatcccaaccacaccacttaacaatctgtgtggttttggctctgttgcctgctcagctctcagtcttctcttctataaaaaggggctatgaaagctatctcaaagcccacgtgtgaggaatgagaccccatgctcaacactgactaggtgctcaatataatactcttccctattaaaaaaaaaagtgggagggagggagaagccatcacactttgtcctcttttgctttcactattattttattaaaagggttttgcacccaccctaccccaccccaccccacaatctgaggatggaggcaggtttatctatctttgagtctaactaggtttgcccattaagtttagtgggcctcagcaatgcagacagacaaacagatatatagatatcaataccaacatatagacatatgtctccacaaatgataggtcaaggcactgtcagtcaaaccagc

SEQ ID NO: 250312 - DNA, 563 bp, Homo sapiens
gtagatcgccctagcattttgccactggacggtgcaagtcattattctgcctcatccccaatcatgtctccattactttcctttgaactcacttcttccatataatgtttttactcacagacagaaaggaaactgctttataccctcaatgaaaaaatgcaacctgtctgtgaagcgtaattaagccaaatactttccttctcttctccaggctgatcaattcaaattcttttaggctttcctccgaagaaacaatttcccattcccttaasctctaggtgcttcccagattcttcatatcccttttaagggccactgaccacatctggactcccctggaatgagagtcagactaaagctaagtgcagcagaaagatgacttattgctgctatgtcacatgtgcttcatgctgcacttcaggatcacactgtcctttcctttccccacagcactattacccacactggctcatcgcagtcaacttggatttaactatgacaccctggtctttttttattctatctaaaataagtgaatttttatcctcacatgatttacttgt

SEQ ID NO: 250313 - DNA, 565 bp, Homo sapiens
ataacatgcggaaaaccagtttctccatcttctcttccaagattgctccttctcctggatttcctctttcagtcactttatctgtgacaacccctgtgtctctcttgactttccccaaaggctgagtccatttggcttctaccatgcctcttatcctcataactctccatcatctgccaggccctggctcaggtcatactgctccccaccccccagtaccatgacatgaacagtgtacacttggcagttccacctcaatgtgcctcacggccattcagaaaccttccttggctctgtgatgtctgtagagaaaggccgcycaccttccttacctggcagccagggccctcaggggatgtttgctgggtcagtgaatgggcttccttcccaaacttgcctctctacattcccctaccacttcccttcaggaatcgtatattccaggcaaaccaaatcaccgattgctccccaaacttgcccatgcctattctgccctgcctccatgccctctgctcctgcttcccctaaatgccatccctcacacaggaagccgagttgagagggt

SEQ ID NO: 250314 - DNA, 565 bp, Homo sapiens
ataacatgcggaaaaccagtttctccatcttctcttccaagattgctccttctcctggatttcctctttcagtcactttatctgtgacaacccctgtgtctctcttgactttccccaaaggctgagtccatttggcttctaccatgcctcttatcctcataactctccatcatctgccaggccctggctcaggtcatactgctccccaccccccagtaccatgacatgaacagtgtacacttggcagttccacctcaatgtgcctcacggccattcagaaaccttccttggctctgtgatgtctgtagagaaaggccgcccaccttccttacctggcagccagggccctcaggggatgtttgctgggtcagtgaatgggcttccttcccaaacttgcctctctacattcccctaccacttcccttcaggaatcgtatattccaggcaaaccaaatcaccgattgctccccaaacwtgcccatgcctattctgccctgcctccatgccctctgctcctgcttcccctaaatgccatccctcacacaggaagccgagttgagagggt

SEQ ID NO: 250315 - DNA, 565 bp, Homo sapiens
ataacatgcggaaaaccagtttctccatcttctcttccaagattgctccttctcctggatttcctctttcagtcactttatctgtgacaacccctgtgtctctcttgactttccccaaaggctgagtccatttggcttctaccatgcctcttatcctcataactctccatcatctgccaggccctggctcaggtcatactgctccccaccccccagtaccatgacatgaacagtgtacacttggcagttccacctcaatgtgcctcacggccattcagaaaccttccttggctctgtgatgtctgtagagaaaggccgcccaccttccttacctggcagccagggccctcaggggatgtttgctgggtcagtgaatgggcttccttcccaaacttgcctctctacattcccctaccacttcccttcaggaatcgtatattccaggcaaaccaaatcaccgattgctccccaaacttgcccatgcctattctkccctgcctccatgccctctgctcctgcttcccctaaatgccatccctcacacaggaagccgagttgagagggt

SEQ ID NO: 250316 - DNA, 389 bp, Homo sapiens
atacattttttttcaatctttgcttttcatctgtcttttcttctcctagtacaatacaacttctatgaaagcagggatttttttctatttgtttactttctgtctgtctagtacctaaagcagtgtcttgtacctacctggcattccataaatgtctgttgaataaattactatgtcacaagaccatgaggcccyacagacccagtctggcttgaagagatatatcactaagctagaacccttaatgttatgggaacacaggctatcaaagcttaaaagcacctcaggatcatctaattctcccaataagaccaatggagaatcactaaaggaagatacagagattttttttttttacaataacttcaaaaatataacagagctatgtg

SEQ ID NO: 250317 - DNA, 500 bp, Homo sapiens
tcttggttgctgggagctgtttcagagaagaattcctaggggacacctgttcctaattgatagtggtcacagaaagacacctgagactaatatataaggcatgctaccaggctcatggtagggtataaagctaccaacctcagatatgtatgttttgttgctattctaaaactgagttgtacttagttgctgtgtaggtgcaggacctgataaataaagacataaattattgtttaaaagtttgttaatactcagagtttgcttggttaaatacctttgtctggttttgtggttaaatattctgcttgtgaatgctgtgggcagtattcacataatggkgaggattgctacaaactttgtaggagaaaactttttttttattttctagattttttttcccattttattctatgtgttaggatagtgtttcttgatgtgtggactaaagaacagttacattagaataacctagcatgtttgttaaaaacagatttctggag

SEQ ID NO: 250318 - DNA, 485 bp, Homo sapiens
ctgtgctggttttgtccaattgtgttgctttaaagcccagttggcagaagaatgtgctgaataaagctgaataaacgtaattgttatccaccaactctgtctgccactaaaactcagtggaatatggttgcagttcctctctcttcttgctaaatagggatgaaaatgctgagcatttgtcagtcacttggaaaatgccctgaaagaggcagagaccgtcattgacctcttgtcctctccagtagactgttgtcaaagtcttcattattgtttgttcctgctrtgtttttgcttcccagcaatattgtcctttaaggcaagttgagctgtggatttggaactgtgggacatgcaaagtgagcagttagtcactctacaatgctgtgttgcctaagctgactttgcagtcttcacagcagacccagctatagagccctaacaggaatttcctatttgaaatccttttatttctgccacagcacaac

SEQ ID NO: 250319 - DNA, 560 bp, Homo sapiens
atatatgttcaaatctaaaggagaggattttgcatattcccaacacaaagaaatgatacttgtttgaggtgatgcgtatgctaatttcctgatttgatcattacacattgcatacatgtatcaaaatatcactcggtaccacatgcatatgtacaattattatgtgacaactaaaaataaaagggggaaaaaagccatgcctggatctctatgccagaggaaaagctgatgggaggggagacaaatgagaagggaaggaaacaggagggaaaagaactcttggctttgtgttgcatttcatgtctgttttcagaggagggagcatgcttccatgcttctcaaaaacacaaatgctactgagacttataagctgatcataggctcttattttgttctttgttatattatggaaagttctgtagcttttggaggccaaaccagaatccaaagttctggaatatgtgtcattcttgaatgaaaataaaaagtccaactcaagctagcttgttgmgttattggctaatataatccaaagcagggaaagtggtcatgaacaatac

SEQ ID NO: 250320 - DNA, 612 bp, Homo sapiens
gtttccctgtcagtgcaacgggtgaaagagggagtggggagagagggagtggggcataggggtgggggttggttggaagaatttcttttccataaagactggcctttttcactctgaccatctgttttctcatggtgaaaagccccattgctggtatcctggcatagctttgcatgtctttgtgcttgagggacattcaatcttgcatctgatacacgctgatctgtgacacttcctaacaaatgagcctttgttcaaacaaagagactccctgataggaactgtaaacttggagcttgatatcctgtagaaaaggcaggctatggctgagctggcacaggaaatgctctctgtaatgcaacagagctgaaggaggtcacaccccgtggacacatatgctctttcagatcttcccagscctcgtctcatctctgtctcctcttcagatagggcagctccaagaacacagctgcatttggacctgggagaatgcaacccatctccattacaggctgaagcttactcttcataatcatgcatctacttgtgtagcttcttcattttacaaagcattcttgaaatcattaatccctttgatacaataacttcata

SEQ ID NO: 250321 - DNA, 612 bp, Homo sapiens
gtttccctgtcagtgcaacgggtgaaagagggagtggggagagagggagtggggcataggggtgggggttggttggaagaatttcttttccataaagactggcctttttcactctgaccatctgttttctcatggtgaaaagccccattgctggtatcctggcatagctttgcatgtctttgtgcttgagggacattcaatcttgcatctgatacacgctgatctgtgacacttcctaacaaatgagcctttgttcaaacaaagagactccctgataggaactgtaaacttggagcttgatatcctgtagaaaaggcaggctatggctgagctggcacaggaaatgctctctgtaatgcaacagagctgaaggaggtcacaccccgtggacacatatgctctttcagatcttcccagccctcgtctcatctctgtctcctcttcagayagggcagctccaagaacacagctgcatttggacctgggagaatgcaacccatctccattacaggctgaagcttactcttcataatcatgcatctacttgtgtagcttcttcattttacaaagcattcttgaaatcattaatccctttgatacaataacttcata

SEQ ID NO: 250322 - DNA, 579 bp, Homo sapiens
aattaatggggagatgttggccaaagtgtacaaactttcagttatgagataaataatttctggagtcctaatgtacagcatggtgactatgattaataataaagtattatatacttgaaatttgctaagaaagtagatcttaagtatgctcaccctgccccccacacacaaaggtaactatgtgaagtaatggatgtgttaattagcttgatcatggtaatcatttcacaaaatatacatatatcacaaaatcatgttgcataccctaaacatatataatttttatttgtctattataccaggataaagctgggaaaaaaaaaagagatacattcactgttgtctgccytgtatgtctctgtgacatgcctggcagcttggtgggtcttgttaggcagaggattctgcacccacattcagtgcactggataccttgcaggccaggcacaggagaagtttgtccaagagacctgcaagggtcttcttgattttgcccaaaggatatcaaacatccaatataaaggagaggcatgatggaaagaaaggttttacacagtttccttaattatagtaacagga

SEQ ID NO: 250323 - DNA, 579 bp, Homo sapiens
aattaatggggagatgttggccaaagtgtacaaactttcagttatgagataaataatttctggagtcctaatgtacagcatggtgactatgattaataataaagtattatatacttgaaatttgctaagaaagtagatcttaagtatgctcaccctgccccccacacacaaaggtaactatgtgaagtaatggatgtgttaattagcttgatcatggtaatcatttcacaaaatatacatatatcacaaaatcatgttgcataccctaaacatatataatttttatttgtctattataccaggataaagctgggaaaaaaaaaagagatacattcactgttgtctgccttgtatgtctctgtgacmtgcctggcagcttggtgggtcttgttaggcagaggattctgcacccacattcagtgcactggataccttgcaggccaggcacaggagaagtttgtccaagagacctgcaagggtcttcttgattttgcccaaaggatatcaaacatccaatataaaggagaggcatgatggaaagaaaggttttacacagtttccttaattatagtaacagga

SEQ ID NO: 250324 - DNA, 536 bp, Homo sapiens
ccattttctacaggagatcctttccacagccatagctcctgctcggcccatggacatgcccaggccaggaatatactggctgttaatgcaccagtggggctggtgtgtgtccatccttctgatgaacaattatgggacacattctccatgcttcttcaaagtctggctgaattaagtttccatcgtactaacagttttttttttttttttttttcagttggagtattgctctgtcgccaggctggagtgcagtggcacaatcttggctcactgcaacctccgcctcccaggttcaagcgattcccctgcctytgcctcccgagttgctgggactacaggcgtgccaccatgccaggctaatttttttttttcatattttagtagagatggggtttcaccatgttggctgggatgatctcgatctcctgacctcatgatccacctgcctcagcctcccaaagtgctgggtaacacatttttatgttgatttttgcccccttccctgttgtaatctgcttgttccattattcctgttt

SEQ ID NO: 250325 - DNA, 545 bp, Homo sapiens
ttatgtgtacaacaggacttgctttcaattctaacctgccctgtgccagacccatccctaagtgtcactgactcactggcagcattttagctaggctgtgagtattcacagggtcatgaactggagcgtgataccagaagccagacaaaacagcatgcacctcaaatgtcgtgtgtaaggctgagataaacagtgaaactatggaacaattgaaaaggtctttcctcctctaaccagagaaataaatcttaaaatatgaagatcaaggactgctaaagacaacaaacaccaaagaactgaaaccgcttaccagcaggtggtatcactgggggtttgtcttwtgaaaaatgtgtcagatccttttaggacaatataaaacacttctggttcctatggtgatactgataatacattgtcagtcattgtggtatctagatctacattatgtagttttaaaagcaccttgaaatatttgaaggttaaatttgtttctcctctaaattgcttggtgtcaattgtagttgtggcaattggaggagatatag

SEQ ID NO: 250326 - DNA, 571 bp, Homo sapiens
tttcacattcatcttcaatttaatgactctaagccctatgtccagtgcccatgaaaatttctaaatatgaattttatgatccccaaagtagtctactttgtgatcctctttgcactcttaggaacattattaggtaagagtaatataggaatgaaagcatcctttcccttattatggattctccctcattaaagtctttatctctttttccttttatgtctaattccatagaagctagctgacaggtgcacttctaacttatgaatcaattagtataattttcataattaattttaagatatgcttaaacaataaatgtgttaaagactgtgctgtccaatatggtatctgctagccatatgcaggtatttaaatttaatctaaagttgattaaaattgtaaaaaatttaaaattcagtttttcaatcatacgagacactttgcgagtgctcaggggccacacgtggttagggkcaactgagctggacagtgcagctctgggacatatccatcattgtgggaagttcttttggacactgttgtctgtagacaataatattttcataccgaa

SEQ ID NO: 250327 - DNA, 604 bp, Homo sapiens
atttttgccccagaaatatcctttattcattccattaatacatattgagtgtctgctatgtgtaacrtactatgctaactgccataacaaaagagttaccccttctcctttaccaccttctttatggaaagtggtggtgggagggagaatgtggcatgtccaggacccagctttctaactattcttttttcctttttcttgcctcttccttccccttcattttaatggtgggtcagttttaggcagatacaactagaagttggttagctacagagaggttaaacaaatacataaacatattatgaataaaaagagtcaggtttcttattaatgaagaatagttttacaaggggaaaggagaaagaggcctaaggtggtgaattggaatgtgaactcatgatagacagatagatggtagacagatagatagatagatagatagatagtgtatttgaatacatacacaaattttttagctcttccaatagatagagaaagcctccaataatgcaactaattataatgagcacacctagcactcagaaaatggtttctaaatctcatacttcattaaaagaaaccaggactctctgaaaaaacagct

SEQ ID NO: 250328 - DNA, 569 bp, Homo sapiens
tattgtttgttttcattgtgctgatttttggtgatcaagcctcagtccccttcatagtgccctctcctttttaaaaattatgtgtgcacagaaaggccatctttttcaggacattgcattttcaggcttgtggtgataaataagattgaccaatgcaagtgttcataatgactttccaattggccctgatgttctarcatgtgattgcttcatgcctggactgtgactttcagtgggagatggaagtttttcagagaaatgaactgtggaaaaatgtcctttccttaacttgaagctacttttaaaatttgagagtctggaccaaaagaagaagaatatcaggttgaagtcaagatgacagataaggtgagagtaatgactactccaaagatggcttcactgaagaaaaggcattttaagattttttttaagtcttgtcacaagatcccagaaaagtactaattttcattatcaattaataaagctatacatgcagaaatgaatacaacagaacactgctgttttttatttgtactttttggcctgggatatgggttttaaatggagac

SEQ ID NO: 250329 - DNA, 584 bp, Homo sapiens
atctcctcaaaatattcttatgaattcataagtacaacatacttgttaattaaattttcactggagagccttcataaacctcatcttcaccaagttaatcagagttaacagcaccattaatgggagagttgacatatgtgatgtgattcactgaggagagcatggcatcacttctggggcattcctgccaaaaatttataaatcatgaggaatcatcagacaaatctaaatagacattctacaaagtaattgatctatgctcttcaaaaatgygaagattttaaaagttaataaaagactgagaaactatttcttattgaaagaggccaaggacatgacaactaaatacaatgcatgatcttgaattggatcctgagatcaaaaagaacattattggaacaactaaacaaattttaaaatagtctatagatttcatggtaatattgtaatttcttgattttgattattttgctgtgattgtgaaagtacattatcattataattaagaaataaacactattcaaaaattaagaaataagacaggaatccaaggagagtaaaacttgagggaccagtgaaattcc

SEQ ID NO: 250330 - DNA, 602 bp, Homo sapiens
atatacattcaatcaacaactgacatatattagtgcatcctcaacagctagaatacataaatccagaaaccaaggtgtagaagcgtggtaggtcttcatgccatcactcagaatgaaccagttgcacaaggtgtgcttctcatccctgaaaccttaggttctgccagataaggggtcctgatttccaaaaagagaatttkgcattgagaataattccactgtaagagttccatcaacttgaaggcgcaactaccacctgtttatttgttactacctgtgccagtggaaaaatagaaaaagaatatagttcctatttatcaacattgatagatttaaattactatgaagaagtagagttcctgcaacacagtgagagtgagcaagagtacttgtggaatcctgtggattcactgaggtggtatttgatgcttaggtacccagtgataattacaacttggaaattataacactgtggcttaatgaggggaagacaaatgaggactcagatgccttgcagatgaaggtctgtgttttttcactaggcagacatctttgttatctgttgttataacagaatacctgagactgggtagtttataaag

SEQ ID NO: 250331 - DNA, 602 bp, Homo sapiens
atatacattcaatcaacaactgacatatattagtgcatcctcaacagctagaatacataaatccagaaaccaaggtgtagaagcgtggtaggtcttcatgccatcactcagaatgaaccagttgcacaaggtgtgcttctcatccctgaaaccttaggttctgccagataaggggtcctgatttccaaaaagagaattttgcattgagaataattccactgtaagagttccatcaacttgaaggcgcaactaccacctgtttatttgttactacctgtgccagtggaaaaatagaaaaagaatatagttcctatttatcaacattgatagatttaaattactatgaagaastagagttcctgcaacacagtgagagtgagcaagagtacttgtggaatcctgtggattcactgaggtggtatttgatgcttaggtacccagtgataattacaacttggaaattataacactgtggcttaatgaggggaagacaaatgaggactcagatgccttgcagatgaaggtctgtgttttttcactaggcagacatctttgttatctgttgttataacagaatacctgagactgggtagtttataaag

SEQ ID NO: 250332 - DNA, 594 bp, Homo sapiens
ccttccatttcttgtccctggcagaagaagaagccaaggaacaaggagaaaatcatgtgatatagtccatatgatcctcagagcatccgttgaggatcaagcctagttgaccacggcattgataaactaacaactacaccattttgaattggcttttttttccctgtttcattattccctgtcctacatgcctacttccccagatcatctccccaaataagcttccttcatataagccctcatctcctgctctgctttctgatgacttaagctgatatcctacctttcttcttattcccctcctatcctgttacttatagattatttttgtctgttctgtgcattactatccagagtattgcttggcaaatacttcgaaatgaagcttaatgtagtgtgtgatctgtaatgattaccccatgaacttaacccccatattttccagtaactcatcaaatgtgacayagttctttatttgggatgaccaattttgttaaatttaatacaaagtgttcttcgttcaagctgagcaacttaagtagaagttttcctttaaagcatgtttttggattacagattttcaaattgctacaa

SEQ ID NO: 250333 - DNA, 561 bp, Homo sapiens
gttctcatgggaattgacaacgagattataaaatttaaatggaaatgcaaatggccatgaatgccatgggaattgaagaacaaagttggatagcaagatttactgtaaaagctacaataattaaaacactgtggtattggcactagactagacaaattgacagtagaacaagatagagaatacaggaacaaacccatgcatcagaatcacttgaattaggacaaagcatagccttttcaatacatggtgctgrgacaactggaaattcatttgaaaaaaattgagttggactccatatacacaaaagtcaattccagttatgttatagttctaagttgaaaggtgaaataaagtttctataagaaaacataggagaatatcttcatgagcttgaagtagtcaaagatttttaaacaggacacaggaaacattaaggtgccataaaagaaaagaaaagattgattggccaggcgtggtggctcacaccagcactttgggaggctgaggtaggtggatcacaaggtcaggagatcgagaccatcctggccaacatggtaaaac

SEQ ID NO: 250334 - DNA, 572 bp, Homo sapiens
acaggctttcaccttttcagtgaatggctccaagttttggtacaacctaagcatgtctctctcaatattgacacaatattccttgcacattcaaaattattcttatgcactgtatgtctctgtacttttctgattcagtccttgcattatattgtatgcaaagtaaatatacaggccaggcacrttggctcacgcctgtattaccagcaatttgggaggccgaggtggacagatcacttgaggtcaggagttcgagaccagcctggccaacatgttgaaacccagtctctactaaaaatacaaaaagtatccaggtgtggtggcaggtgcctgtaatcccagctactcagaaggttgagacatgagaattgcttgaacatgggaggcagtggttgcaatgagtcaagatcatgccactgcactccggcctggacgacaaagtgagactccacctcagtaaataaataaatatacagataattgtatttaaaattaaattacaattaaaattatacacatgtacaattttgtatattgtacatttcacaatttgtatttgtacactgtacata

SEQ ID NO: 250335 - DNA, 572 bp, Homo sapiens
acaggctttcaccttttcagtgaatggctccaagttttggtacaacctaagcatgtctctctcaatattgacacaatattccttgcacattcaaaattattcttatgcactgtatgtctctgtacttttctgattcagtccttgcattatattgtatgcaaagtaaatatacaggccaggcacgttggctcacgcctgtattaccagcaatttgggaggccgaggtggrcagatcacttgaggtcaggagttcgagaccagcctggccaacatgttgaaacccagtctctactaaaaatacaaaaagtatccaggtgtggtggcaggtgcctgtaatcccagctactcagaaggttgagacatgagaattgcttgaacatgggaggcagtggttgcaatgagtcaagatcatgccactgcactccggcctggacgacaaagtgagactccacctcagtaaataaataaatatacagataattgtatttaaaattaaattacaattaaaattatacacatgtacaattttgtatattgtacatttcacaatttgtatttgtacactgtacata

SEQ ID NO: 250336 - DNA, 572 bp, Homo sapiens
acaggctttcaccttttcagtgaatggctccaagttttggtacaacctaagcatgtctctctcaatattgacacaatattccttgcacattcaaaattattcttatgcactgtatgtctctgtacttttctgattcagtccttgcattatattgtatgcaaagtaaatatacaggccaggcacgttggctcacgcctgtattaccagcaatttgggaggccgaggtggacagatcacttgaggtcaggagttcgagaccagcctggccaacatgttgaaacccagtctctactaaaaatacaaaaagtatccaggtgtggtggcaggtgcctgtaatcccagctactcagaaggttgagacatgagaattgcttgaacatgggaggcagtggttgcaatgagtcaagatcatgccactgcactccggyctggacgacaaagtgagactccacctcagtaaataaataaatatacagataattgtatttaaaattaaattacaattaaaattatacacatgtacaattttgtatattgtacatttcacaatttgtatttgtacactgtacata

SEQ ID NO: 250337 - DNA, 559 bp, Homo sapiens
tagacccctcacccagggcctgtctccctgtatgcaacacttagagaatatattcatgcttagtttcatctggccacataatattccttcccctccttaaatattatgrattgactaataatcaatgaaagaaaattactgtatccaattagagttttcacaaaatatatgcctttctcttctttaaaactgtagtgattctggcagtttaaaaaaaaaaaaaacaaaaaaaacaatgaatcgaaatatttaatccaacattccaggcaaatatgatttctgagggataaggaggtacatgtcttcatttattctacccacacaaattaacaacttactattcttatctgatattttgttgtcatgtatagcagttaaatttttttatgttgcaaatgactgacatttactgaatttaattcagcttcatttatattgaaaaacataatttatgacattaagtaactgaatagtttaggcttatgctggtcttaagcatggcttgatccaaggctgaaatgatggtgctagtatacatctttcatctttgtgtcttatg

SEQ ID NO: 250338 - DNA, 548 bp, Homo sapiens
aatcttctaggccaggcctataggaatttattgcttaaagaactaaaaatatacataattttactgtggagattataaggattggcaatgtaaaatattaggctttaattttatatattctcatgggcttattaatatggtaattactaacgtaatagtagatagaacttgtttctaataacatttttgctattgacaaaaaatgggcctatcttcaattttaagtatattttcggtctctttggggaataatcagctgctctcgtgtgtgtgtgtgtgtgtgtgtgtgtgtgtgygtgtgtgtgtgtataaattcataagaaggaagaactgacagaagaaaattggagcgaaagtatctgaatatgttatagtagtgacagcctctatcaaagtaggatttaagagcagtaaaacagctcctaggttgtcctactattatcaatactactcaaacgtataatcaacgacattttgcaacagggtatatgcctttggcattgctagtttgctgtttgcattaatatttttaaagggtcttggatgat

SEQ ID NO: 250339 - DNA, 524 bp, Homo sapiens
taaacagcagaaaattggttaaatatgttatggtatattcatattataaggcaatattatgtagctattgaaaataggtaaatacagattaaaccaaaagagtagattaaaatctaaatatacagaataacctaagaaccaccaccaaaagaagccagaaaaaacttttattcatacacaaacaaaataccataagagtattcaccaaaatgtaagtagtgtttagtcctagatgttgaggtcgtgtatcarttgcttttaattttatttttttcttacactatgcctttcctatgttttaaagttaaaacaatagggctctggtaataaagcaataagattattctaattttgaaagaggaataaagaggactgatacatacaattcctaactctccttttatcaatatgtataggatcacaaaagatcataaaggactgtttccaaagcttaattccctcaggttctcctaaaactcacaatactacatagaaaattgagacctcagcacatagataaatat

SEQ ID NO: 250340 - DNA, 574 bp, Homo sapiens
ataaacccagtctctgcttgatattgcctttcgtggataaataagtgaaacttggggccagaaatcccagttggatataaaagcaaggcgtaggtagaaaaaacacatagaagtttaatattatagatcttccatcctcctaccgtgctggtcatttctaactccaggcaggcaggattctagtcactggaaacaggaaatcgtcactgactaggcagcagggagctggcagcyaacttgcgccctctaaaggagagggagcttcaccacacatttgtgggctgcagagaaaaccgtctcttctttatacatctgtggataatgtcactatatttgatttggcacaaacacactgagaaacaagtatctttggttgaatttagatgtgagtctcagtttcatatctacctggcaataataaattctgatatttaccttgtaatggtgtagcacgtgattatatacattaaaccttaaaattatccatcagaaagaaatactgtaaaatctgaagaggctatatgtaggttttaatcttatacggtctattaaagcagtcagaattttcaaagca

SEQ ID NO: 250341 - DNA, 574 bp, Homo sapiens
ataaacccagtctctgcttgatattgcctttcgtggataaataagtgaaacttggggccagaaatcccagttggatataaaagcaaggcgtaggtagaaaaaacacatagaagtttaatattatagatcttccatcctcctaccgtgctggtcatttctaactccaggcaggcaggattctagtcactggaaacaggaaatcgtcactgactaggcagcagggagctggcagccaacttgcgccctctaaaggagagggagcttcaccacacatttgtgggctgcagagaaaaccgtctcttctttatacatctgtggataatgtcactatatttgatttggcacaaacacactgagaaacaagtatctttggttgaatttagatgtgagtctcagtttcatatctacctggcaataataaattctgatatttaccttgtaatggtgtagcacgtgattatatacattaaaccttaaaattatccatcagaaagaaatactgtaaaatctgaagaggctatatgtaggttttaatcttatacrgtctattaaagcagtcagaattttcaaagca

SEQ ID NO: 250342 - DNA, 594 bp, Homo sapiens
tgaaattgagactgaaaactggttccttatttcagatgcatagggcaacatacctcaagaaatatggctctgcctagttacacggagacgtgtgctttaggaaacaaagtgctcagcctcgtgttgctatagctacacttgtgtacctgtaagaattctgcaaaaatgaatcccattatattgaagaacaaaacaccagagacatttcrcttgacagaaaatttaaatatatctccttacagaatatgcatcacttttagtcactttgcaggggagtgacctgctactgtagtagttccattcattatatatgcataaattttaagactattgctatttgcacagtacaaaagaaatatttgcatgctgggacataatgagaatccatcacaatgaaaagtttcatagtttatgggaaaatgtttagttttaatatgcttggttcttcaatttgggaatatgccaaattcttttgtaaaatcctgtaaattagaaagatcttccccactccctcatcaaatgcttctggaccataggcttcacctctgttgcttgtcatgataaaaaaaaaaaaaagttgatagaataaaaggg

SEQ ID NO: 250343 - DNA, 576 bp, Homo sapiens
tttcaaaatgcaaagtgcctgtaaaatatattgctttgctaactgcataactagctgtgatagttagcatgatgctaatacatcaagctaatacaccaacwttacctgatagcagaaatacaaccccgtaaataaacaattatcaggtggaggaaagagttataatttattaatttacttatcttggcaacataattacacacagagctcctccgttattataagcagaagctgaattcaaatgccctaaaggcaagaagtttctctcgttacagcatccaaaacgtatagaagtaaaaaagtgatgatactcaaccaagaggtataaacaagtgaaacttccaagctagagcagtaatagagattgatgtttgccatggatgctgtagaagggtgtcttctgaagacattcaccatgacttgttagagaaacaaagactataccaggaatacagtaattaatcacccctctatgttttcactgtctgaatcaatgcttagggaaaggcaagccgagaaataacacaacgaaggagtcatttttgggtacataataaagcacaaagtattctctac

SEQ ID NO: 250344 - DNA, 584 bp, Homo sapiens
acctttcttgacatggtcaatacttctgggtaagttcatctccttttgtgagaatgtgtgtgtgtgtgtgtgtgtgtgtgtgtgtgwgacataggagttattgggtgtgcaaggtaacttatttttcgttatttggaggttgaaggaaagagtgagtggtatttaatcggacaatcagacagtgacaaatggataggcaaaggtcaaagatatggggcaacctcacagcctagaatatttccagggtgctcactttgcccaaattagagaaagactttgaaggaggcaggaaataattctggaaggcctagatcagtatgctgctttaagatgatccaactttttaaacagaagaaatgtggatcgttttaaaaaggcaggctggtatatttctgttttggataatcaagttagcaacgtggcggatggctacactgaatgaagcaagctggttaagagacctttacattaacccacaattgaaatggggaaagtcttaactgacacaatggccatgagaatgtaaagagagaggctcccaacttatttggaaagcataattgatagatagttttaaccatctg

SEQ ID NO: 250345 - DNA, 584 bp, Homo sapiens
acctttcttgacatggtcaatacttctgggtaagttcatctccttttgtgagaatgtgtgtgtgtgtgtgtgtgtgtgtgtgtgtgagwcataggagttattgggtgtgcaaggtaacttatttttcgttatttggaggttgaaggaaagagtgagtggtatttaatcggacaatcagacagtgacaaatggataggcaaaggtcaaagatatggggcaacctcacagcctagaatatttccagggtgctcactttgcccaaattagagaaagactttgaaggaggcaggaaataattctggaaggcctagatcagtatgctgctttaagatgatccaactttttaaacagaagaaatgtggatcgttttaaaaaggcaggctggtatatttctgttttggataatcaagttagcaacgtggcggatggctacactgaatgaagcaagctggttaagagacctttacattaacccacaattgaaatggggaaagtcttaactgacacaatggccatgagaatgtaaagagagaggctcccaacttatttggaaagcataattgatagatagttttaaccatctg

SEQ ID NO: 250346 - DNA, 560 bp, Homo sapiens
atttcccaaccaaaagataatccctgaggtgctattagttgttggaataaaaaaaagtctgtggttaaatatatttggaaaatattttgtatttttataaaagtttttattaaaagatttcaccagtacttttaaatactaatgttcattatgaatcacttagagaaacctgaatgtgcagaattcccaagattattgaactacagcccttcgaggtttcttttttccgactagtttttttccagcratagtatttcatgaaacaacatttttgatgaatgctgacttcaggaactatcttcacacttctttgcaaatgaatggctttccttgtatttgccttagcactgccatcttgtcaccacaaatccttcagaggcaacagcaaaccttgtataaaattactagggaacatttttgaaaagattcataaattcaatacaaggtttgagttgagttggcacaacctaaatgtagttagacattgtacagtaaagtaaaaaataaagctcagtgtttttgatttttcttgtgtgtgggtagggtggaggggtttgcca

SEQ ID NO: 250347 - DNA, 592 bp, Homo sapiens
caccacgcccggccaacatactcatctttgcatcctcagtacccagcacagtgcccaatctatcataggcattcaataattacatgtttaacaaaagtcaatattataaagaaaaatagaattgcttttttcctggtcttatgcttcaataaataaactgttatgttgcctaggtagtaatatgtttttactagcttaattactgactctaactttgaattcctaaacagtttcaaatgataactgtttgaataggaaaatcataactaattttttttttctttgagacagggtctcactctgtcacccaggctgcagtgaagtgctgggrtttcagctcattgtattcttgacctccccaggctcacttaatcctcccacctcagcctcctgagtggctgggactacaggtgtgtgccaccatgcctggataatttttgtgctttagtagagacagggtcttgccatgtttgcccaggctggtcttgaactcctgggctcaagagatctggccacctgtgcctaccaaactgctaggattacaggtgtgagacaccatacctagctaaacgtagtgactagttgaattaaa

SEQ ID NO: 250348 - DNA, 592 bp, Homo sapiens
caccacgcccggccaacatactcatctttgcatcctcagtacccagcacagtgcccaatctatcataggcattcaataattacatgtttaacaaaagtcaatattataaagaaaaatagaattgcttttttcctggtcttatgcttcaataaataaactgttatgttgcctaggtagtaatatgtttttactagcttaattactgactctaactttgaattcctaaacagtttcaaatgataactgtttgaataggaaaatcataactaattttttttttctttgagacagggtctcactctgtcacccaggctgcagtgaagtgctgggatttcagctcattgtattcttgacctccccaggctcacttaatcctcccacctcagcctcctgagtggctgggactacaggtgtgtgccaccatgccyggataatttttgtgctttagtagagacagggtcttgccatgtttgcccaggctggtcttgaactcctgggctcaagagatctggccacctgtgcctaccaaactgctaggattacaggtgtgagacaccatacctagctaaacgtagtgactagttgaattaaa

SEQ ID NO: 250349 - DNA, 592 bp, Homo sapiens
caccacgcccggccaacatactcatctttgcatcctcagtacccagcacagtgcccaatctatcataggcattcaataattacatgtttaacaaaagtcaatattataaagaaaaatagaattgcttttttcctggtcttatgcttcaataaataaactgttatgttgcctaggtagtaatatgtttttactagcttaattactgactctaactttgaattcctaaacagtttcaaatgataactgtttgaataggaaaatcataactaattttttttttctttgagacagggtctcactctgtcacccaggctgcagtgaagtgctgggatttcagctcattgtattcttgacctccccaggctcacttaatcctcccacctcagcctcctgagtggctgggactacaggtgtgtgccaccatgcctggataatttttgtgctttagtagagacagggtcttgccatgtttgcccaggctggtcttgaactcctgggctcaagagatctggccacctgtgcctaccaaactgctaggattacaggtgtgagacaccatrcctagctaaacgtagtgactagttgaattaaa

SEQ ID NO: 250350 - DNA, 627 bp, Homo sapiens
  misc_feature (1)...(627): n = A,T,C or G
agacctggatgtgtatggcagggactgcattgcacataactgtatacaaaagttgtgatccctcttcacattgggtgaagaagatatatgtaagtgagaaggtaactaaaattctaaggtatctataggaacaaacacgagtgatacagataataaatgatataaggttgcttataatatagaggtggatgctttaatgaagtctaaaacaacaatagtttaaaaaagaaagaatttatttctcttatgtaagttcctatggcaatcccattctgcaaagtaatcagatgtctagacatctcttattcttgctctggcattctcatggtagagcattagaatgatgctctgtttttctttcatccacatggtccaaaatggtatgccccttcactaaagcatgtgactcagaaggtaaacacatcatttttattcataccttgctggtcacacccacctgcaaggggggttggaaaattcagtctttcgcctgagtgtttatgtgccatctaaaaactgaaattctatngtgttaaaggaaaaactttaracaaattaaacatagcttatttggacagagaacaattcttaaattgggaagcacccaaaaagtctgttaaattaaat

SEQ ID NO: 250351 - DNA, 583 bp, Homo sapiens
  misc_feature (1)...(583): n = A,T,C or G
gtatgccccttcactaaagcatgtgactcagaaggtaaacacatcatttttattcataccttgctggtcacacccacctgcaaggggggttggaaaattcagtctttcgcctgagtgtttatgtgccatctaaaaactgaaattctatngtgttaaaggaaaaactttaaacaaattaaacatagcttatttggacagagaacaattcttaaattgggaagcacccaaaaagtctgttaaattaaatagccaggaagccattggcttgatgagtttgaaatgggagagttccctgaccccctcccaggatatgcaacaggggtatggcttgtctgtttggccacyctgcactcaaaccccttacgggagggggagcatgcagatggacaggtgcaggagccagggcgagtgcccctggactccggccccatggcagtgtccagaggtgggagactgtgactcccaaagcccaagtgggcatgtgttacagtgcactcttttagccttgccatccacagacaatttaagtgttaaatagctcagtgggccctctgcctttttgcatgggcagatggccagtgtg

SEQ ID NO: 250352 - DNA, 591 bp, Homo sapiens
atggctccactactccatttttctggattaaagccattaaactggtgttcaaatttccctatcaaaaccacacaaactcaaaaaaatcataccttctcttttattggaagagaggccgatactaaacataaatttaagaaagaataaattatacaccaacttccatctaacgtccaccattgcaataaactgacttcttcactttgacttacaggcatgtttgtttttcttaggcatctttaagggacaggtagttggctcaaattcaactcagtcaygctgcttgccaaagaagaacagtctctagtgggtcatctcatgttttgatgcatatcttctgttgaataccttataaagtttacagtcatcaagtcctggaataatgcccacccctggctccactgtccagttacccttcacctctaaaagatccctgctttgccaattaaatcagttaatttgtaagccaattaaattatatctgtcagttttcttaattaaattggttgtttggtatcttgtaggaccaacatagaacagggtaaatgcaaaatcttatgcccattgctaggaagtagctgaagaaatgaa

SEQ ID NO: 250353 - DNA, 549 bp, Homo sapiens
gcatcctgtgttttggaaaatgaacctgcgcctcaagtcccaggtactacagtagttttgcaagatcctgagcccaggaatctagctccacagcytctctaggcacctgtgccctgacttttcatggtgccatggctgcctgtggattgtgtcaaacatgattccttcagctaaacacaatagagagattccctctgctaaacacaataattctccagtaagtgatgcccaaaaaatgaaaatttacaaatttacaaattgagtgtagatcaaacagaagaaagaatctgtgaactagaagataactcttttaaagcaattcaatcacagggtaaaagaataaaaagaatgaagatagcctatgggatttatggggcaccattaacaaattttcatattacagcagttttaaaagaggaaaagacagagaaagaggcagaaagtttctttaacaaaataattgctgaaaacttctcaagtcttgaaagaaatatgggcaaccagatccatgaggatcaaaagtccaaaaacagatacaactaaagaggt

SEQ ID NO: 250354 - DNA, 549 bp, Homo sapiens
gcatcctgtgttttggaaaatgaacctgcgcctcaagtcccaggtactacagtagttttgcaagatcctgagcccaggaatctagctccacagcctctctaggcacctgtgccctgacttttcatggtgccatggctgcctgtggattgtgtcaaacatgattccttcagctaaacacaatagagagattccctctgctaaacacaataattctccagtaagtgatgcccaaaaaatgaaaatttacaaatttacaaattgmgtgtagatcaaacagaagaaagaatctgtgaactagaagataactcttttaaagcaattcaatcacagggtaaaagaataaaaagaatgaagatagcctatgggatttatggggcaccattaacaaattttcatattacagcagttttaaaagaggaaaagacagagaaagaggcagaaagtttctttaacaaaataattgctgaaaacttctcaagtcttgaaagaaatatgggcaaccagatccatgaggatcaaaagtccaaaaacagatacaactaaagaggt

SEQ ID NO: 250355 - DNA, 648 bp, Homo sapiens
tttatggggcaccattaacaaattttcatattacagcagttttaaaagaggaaaagacagagaaagaggcagaaagtttctttaacaaaataattgctgaaaacttctcaagtcttgaaagaaatatgggcaaccagatccatgaggatcaaaagtccaaaaacagatacaactaaagaggttctctctgaggcatattataataaaactgtcaaaatcaaaagacaaagagataatttaaaaggaaaaagaaaagcatcaagtcacatgtaacggaatcacagtaatattatcattgaatttytcaggggaaatcttataggccagaaaaaatgggatggtatattcaaagttatgaaagaaaataattgtcagccaagaatactatatccagcaggactgtccttcagaaatggaggagaataaagtctttcccaaataagcaaaagctaaagaaatttgttaccattagaccggtcctataagaaatgcttcaaggagctcttcaaaggaaactaaaggatgataattactatcatgaatacatatgaaagtataaaagtcactggtacatacagagagtttatatttaactcagaaataaagtcaaatccagaatattcagtactgaaataatggtatataaat

SEQ ID NO: 250356 - DNA, 648 bp, Homo sapiens
tttatggggcaccattaacaaattttcatattacagcagttttaaaagaggaaaagacagagaaagaggcagaaagtttctttaacaaaataattgctgaaaacttctcaagtcttgaaagaaatatgggcaaccagatccatgaggatcaaaagtccaaaaacagatacaactaaagaggttctctctgaggcatattataataaaactgtcaaaatcaaaagacaaagagataatttaaaaggaaaaagaaaagcatcaagtcacatgtaacggaatcacagtaatattatcattgaatttctcagsggaaatcttataggccagaaaaaatgggatggtatattcaaagttatgaaagaaaataattgtcagccaagaatactatatccagcaggactgtccttcagaaatggaggagaataaagtctttcccaaataagcaaaagctaaagaaatttgttaccattagaccggtcctataagaaatgcttcaaggagctcttcaaaggaaactaaaggatgataattactatcatgaatacatatgaaagtataaaagtcactggtacatacagagagtttatatttaactcagaaataaagtcaaatccagaatattcagtactgaaataatggtatataaat

SEQ ID NO: 250357 - DNA, 648 bp, Homo sapiens
tttatggggcaccattaacaaattttcatattacagcagttttaaaagaggaaaagacagagaaagaggcagaaagtttctttaacaaaataattgctgaaaacttctcaagtcttgaaagaaatatgggcaaccagatccatgaggatcaaaagtccaaaaacagatacaactaaagaggttctctctgaggcatattataataaaactgtcaaaatcaaaagacaaagagataatttaaaaggaaaaagaaaagcatcaagtcacatgtaacggaatcacagtaatattatcattgaatttctcaggggaaatcttataggccagaaaaaatgggatggtatattcaaagttatgaaagaaaataattgkcagccaagaatactatatccagcaggactgtccttcagaaatggaggagaataaagtctttcccaaataagcaaaagctaaagaaatttgttaccattagaccggtcctataagaaatgcttcaaggagctcttcaaaggaaactaaaggatgataattactatcatgaatacatatgaaagtataaaagtcactggtacatacagagagtttatatttaactcagaaataaagtcaaatccagaatattcagtactgaaataatggtatataaat

SEQ ID NO: 250358 - DNA, 573 bp, Homo sapiens
gctaactatgcttataaatgagaaaacagacttcaagtcacaaagtgttaaaagagacaaagaaggtcattatttcaatgagtgaatccaagagaatataaccactgtaaatatctatggcacaacatcagagcatctaaatacacaaagcaaatattaatggatatgaagggagaaataaactgcaatgcgacagtagggaacttcaatattccattcaacaatggacagatcaactagagagaaggtccataagtaaatactgaaattttttttttttctttttgagaaggagtctcactctgtcacccaggctggagtgcagtggcgcgatctcggctcactgcaagctcagcctccctgcaagctcagcctcccrggttcatgccattctcctgcctcagcctcccaagtcgctcgaacgacaggtgcctgccaccacacctggctaattttttgtatttttagaagagacaggtttcactgtgttagccaggatggtctcgatctcctgacctcgtgatccgcctgcctcagcctcccaaagtgctggcattacaggcatgagccacc

SEQ ID NO: 250359 - DNA, 573 bp, Homo sapiens
gctaactatgcttataaatgagaaaacagacttcaagtcacaaagtgttaaaagagacaaagaaggtcattatttcaatgagtgaatccaagagaatataaccactgtaaatatctatggcacaacatcagagcatctaaatacacaaagcaaatattaatggatatgaagggagaaataaactgcaatgcgacagtagggaacttcaatattccattcaacaatggacagatcaactagagagaaggtccataagtaaatactgaaattttttttttttctttttgagaaggagtctcactctgtcacccaggctggagtgcagtggcgcgatctcggctcactgcaagctcagcctccctgcaagctcagcctcccaggttcatgccattctcctgcctcrgcctcccaagtcgctcgaacgacaggtgcctgccaccacacctggctaattttttgtatttttagaagagacaggtttcactgtgttagccaggatggtctcgatctcctgacctcgtgatccgcctgcctcagcctcccaaagtgctggcattacaggcatgagccacc

SEQ ID NO: 250360 - DNA, 524 bp, Homo sapiens
tgcctcagcctcccgagtagctgggactacrgggacacgctgccatgcctggccaattttttgtatttttagtagagatggggtttcaccatgttagccaggatggtctcaatctcctgacctcgtgatctgcccgccttggcctcccaaagtgctaggattaaaggagtgaaccaccacacccagccaataaaaactgttaacagtttaggtaaacaaagaaatttcttcaacataataaaggccatttatgaaaactctacaactaacattataatcaatggggaaaaactaaaagcttttccacgaagacctggtacaaggcaaggatgtctactcttgccacttgtgttcaacatactactggaagtcccagaaagagcaatcacattagaaaaaatagacaaaagggcattcaaatcaaaaagaaggaattaaaactatctgtatttgtagatgacatgattctttatgtataaaactgcaaggatttcacacaaaaaaactgctagaactagtaagcg

SEQ ID NO: 250361 - DNA, 524 bp, Homo sapiens
tgcctcagcctcccgagtagctgggactacggggacacgctgccatgcctggccaattttttgtatttttagtagwgatggggtttcaccatgttagccaggatggtctcaatctcctgacctcgtgatctgcccgccttggcctcccaaagtgctaggattaaaggagtgaaccaccacacccagccaataaaaactgttaacagtttaggtaaacaaagaaatttcttcaacataataaaggccatttatgaaaactctacaactaacattataatcaatggggaaaaactaaaagcttttccacgaagacctggtacaaggcaaggatgtctactcttgccacttgtgttcaacatactactggaagtcccagaaagagcaatcacattagaaaaaatagacaaaagggcattcaaatcaaaaagaaggaattaaaactatctgtatttgtagatgacatgattctttatgtataaaactgcaaggatttcacacaaaaaaactgctagaactagtaagcg

SEQ ID NO: 250362 - DNA, 402 bp, Homo sapiens
gcatttctctaaaatgctttttccagtgatcattataattgttttgtggttgggaattgagggagcaagggaatttcagggggaaaataatctaagcaaaactttcagcatgtatttcttgagttccttccraatacaatgtattgatttgaaggaattaattcacagttgtgcaatcataatatgacaaactatgttcataaacaacatagtacatataatggttaaaagccacaggtttgggatcagacttgcatctgaagccagtactgcaatagccagctgtgtgatcttcagccacttgctcgagcttatagaaataggcagtgcagctgggatttgaacccatgcgtatattatcccagaggcctggatccctaagtcaaacagttttggaatgga

SEQ ID NO: 250363 - DNA, 604 bp, Homo sapiens
ttactgaagtcaggtcagcgaaaacagcagctgctgaaagayagccgatcctgtgcccaaatctctggcagtccttgagcagcttggagagaacatcaccatcatggaaccctggcccactatgtccaaaaactgtttgatctggcctcaagaaacaggagttcataaggcaggagatcagagccctgcgtagacggttttaatgcaaatccctgcttgtttcttgagttgccagtttcacgcttaagaatttgtagtcaagagctcgcacagttgggtagaatcacgcatgagtgttaggggagatttgctttctttgggggccacttttcgttttccagtcagtagttttatttccattttaattttccgagcatctggcccccagcaacagcctgtggtttggaattcatggctctgttgtgtgtttacgcactacacttgcttgtaattgacaaatttaaattctggtcatatttcatttattacccagacccagggaaaaatcctaggcgaaaacctaattacagcaaaagtgccacaaggtaattgctgtgaaagaactcctgcagcagcagggctgaatatttcatccacccataaa

SEQ ID NO: 250364 - DNA, 450 bp, Homo sapiens
aaggtaacctggataattaatgcttactgatcaactatgttccacgtgcttcctaaaatcatttcaaatgagtcagtatatataaaatcacttagaaagccacataatgctttggaaatawaagatgctattatctattatgctatatccttttccagaagtatagcaataaactataaacaaagaaataattattaaatttcttccaaacttaaccaaaaaaaatgtgcacttacaaataactaaacttggggaaatgaaatatgtacattcttagacttaattaagagtacaaggaacaaccttattaagagtcttagaaggtacatgtttccaaagtaaaacaagaatatgtgtgttgtactctgtgtgaagctgtaaaaataaattaattttttgatgtttagaaaaatgttttggtcttcatgttataagagccatattttcagt

SEQ ID NO: 250365 - DNA, 620 bp, Homo sapiens
ggttggcagcttttaataacttagaaatggctgggggtgggggggaggaagtactgaatcatttactcattcagcaaataaccagggaatacctactctacactggtcactgatggagatayagacttgggcaaaagccgcgtcatctggttgtgttcaagctgaacattcccttgacccagtcactgatggagatatagacaggcaaaagccacgtcatctggctgtgttcaagctgaacagtcccttgacccagggcccatgacagggcagagggcatattattatccccattttacaaaggaaagagctgtcagacacagtgtcacacaggaaggtagacgataatgtcaatatccctcatcttagtataaagttgtccttaaaaactctccattatttattaatttattgactcacttattcatgttttctgcacagtgatacttatcctgcacgagactctcacaccagtgctttgggtgtaagaacaccccaaggattgtgttcccttttctcgaagagtctgtggtctaaggggattcaatggggtccactttccaaaccaagacagcaaaggaacactaggagagaagtattctgtgcagagattcagttat

SEQ ID NO: 250366 - DNA, 537 bp, Homo sapiens
ggattaacaggcatgcaccaccgcacctggctaakttttgtatttttagtagagatggtgtttcaccatgttggccagaatggtcatgatctcttgaccttgggttctacccacctcagcctcccaaagtgctgagattacaggtgtgagccgctgcacccgggcaactggtttccttttactgccactttcactaaccgtggtatttctccatgggcagcattcttggcatttgggtgtgtaggactgtccctcacatagtgacctcttactcatgaattgccagtgtcacattcagattcttatggcaaccagaagctcccctgctcccagcatttctggactcagcctgggctggggaggttagctcagaccaaatatctcctttctgccagttgctctgctaggcccaggtcatgctgagcagagcaagatgtagctgaaaaccaaataagtcacgtgttccagcttgctggggttttgtgaagaaagcagccacccctccagtcatatagtttgcaggttgggatttgcatt

SEQ ID NO: 250367 - DNA, 537 bp, Homo sapiens
ggattaacaggcatgcaccaccgcacctggctaatttttgtatttttagtagagatggtgtttcaccatgttggccagratggtcatgatctcttgaccttgggttctacccacctcagcctcccaaagtgctgagattacaggtgtgagccgctgcacccgggcaactggtttccttttactgccactttcactaaccgtggtatttctccatgggcagcattcttggcatttgggtgtgtaggactgtccctcacatagtgacctcttactcatgaattgccagtgtcacattcagattcttatggcaaccagaagctcccctgctcccagcatttctggactcagcctgggctggggaggttagctcagaccaaatatctcctttctgccagttgctctgctaggcccaggtcatgctgagcagagcaagatgtagctgaaaaccaaataagtcacgtgttccagcttgctggggttttgtgaagaaagcagccacccctccagtcatatagtttgcaggttgggatttgcatt

SEQ ID NO: 250368 - DNA, 537 bp, Homo sapiens
ggattaacaggcatgcaccaccgcacctggctaatttttgtatttttagtagagatggtgtttcaccatgttggccagaatggtcatgatctcttgaccttgggttctacccacctcagcctcccaaagtgctgagattacaggtgtgagccgctgcacccgggcaactggtttccttttactgccactttcactaaccgtggtatttctccatgggcagcattcttggcatttgggtgtgtaggactgtccctcacatagtgacctcttactcatgaattgccagtgtcacattcagattcttatggcaaccagaagctcccctgctcccagcatttctggactcagcctgggctggggaggttagctcagaccaaatatctcctttctgccagttgctctgctaggcccaggtcatgctgagcagagcaagatgtagytgaaaaccaaataagtcacgtgttccagcttgctggggttttgtgaagaaagcagccacccctccagtcatatagtttgcaggttgggatttgcatt

SEQ ID NO: 250369 - DNA, 607 bp, Homo sapiens
tgtctccacttagtaattttccattcaatgacccctcactctgctcattggctacaaatccctctgtctttgctgtatttaagtcttcctcaccacgttaatgtgtcagaataattttcttctctaacacagctcaccaggactctgacccatctctaaggaatcctaggctaccagcaacactgtgcgaaatctctgggtgcttcctgctctgagaatccaagggttttggtagggagccagggatgagatgacttcatggcacttagaacttctgtacacacttagaggtacattgctatctttttctctcaggaattccacctgtggagttggaagcattattattattatttatttatttatttatttatttatttatttatttatttattttgagacagagtctctctctgtcgccaggccagagtgcagtagtgtgatcttggctcatgtaacctctgcctcctgggttcaagtgactctcctgccttagcttccggagtagctgggactacaggcacatgccaccatgcccagctaatttttgtgttttyagtagagacggggtttcaccatgttgaaagcactatttttgttgttgctg

SEQ ID NO: 250370 - DNA, 562 bp, Homo sapiens
cctccctggcttcctgcagagagcaccttttatgagactgtcatttcgagtttcctcttcctcttgtttggttcacacattcccacarcctccctcagagaacagattgaacccctattttcctcattaaagatcacatcagtgcaaggacatcctgtctggatgggtaggaagtgccccaggagatgtctatcgtgcgtctgggccccacaggagcaagcttctggctgccatctcttaggatctcacagcctttggaccttgcaacagcacctctccccagtgttaagcagacccagggctgattgccagtcacttccagaaggatggagttcaaagggacatctggagcaaacagacttcgggtggcaggtgagccgctgggtgcagcatgagcagggtctcccagcagaacaggacaggcatccattggaggggttaagactttgaacactggggtataaaagttcaggggcccaaacttagctccaccacaaaccagttgtaagactttgggcaagttatttaatcttttacaacctcagttcccaaactacaaaat

SEQ ID NO: 250371 - DNA, 573 bp, Homo sapiens
ttgaccctctctcttcctcaccaccctcaccttattatctctcactcagtcctattggcactatctcctaattattgttcaaatccatcccctccattctccctccctctcctctcctacctcggttcaggccgccgtgtctcacctctggatcagcttctcagacaatgtctgcctccaaccccgcctctcaagtccagggtggttttcccaaaacacaaatctgatcactccctaccttgggtgttttctgagagcatcctccactcctgaaagcgttgaaatgttgcaaagcccagttaaactctaagcccagrcagagctggggataagcctcactccaggctcttagctccctgatcatgagttgccctgtctgtctcttctactgcatggcacaccctgtgcaggcagggatgtcttggtccctggaccctcagtgtgcagcatgggatgcacacagccagcactcagcaagcactcactgggtggacagatgaataaatggatagatggatggagagtggtgcaggcctgtgcagtgctctaagctagggaggacatcctgagccc

SEQ ID NO: 250372 - DNA, 580 bp, Homo sapiens
aaggcagaacaaagatcacatgtttttgaggaaagaggacaagggcaaaatcagaactactgatacgggtctatgttcagctgtgcacgtattgtcttgataaacatcttaaacaaaagaaaacagggttctagagcagagaaccggtctgaccacaaatttaccagggtggagtttcccaatcctagtaagcctgagggtactgcaggagatcagggtgtatttcagttcttatctcaactacataagacagacactcccagagcagccatttatagacctctccccaggagtgcattccttgcccagggtattaattattaatattccttgctaggaaaagaatttagtgatatcttccctacttgcgcgtccatttatatgtgctctgcaagaagaaaaatatggctctattttgccctacccygcaggcagtcagaccttacggttatcttcccttgttccctgaaaatcgctgttattctgttctttttcaaggtgcactgatttcatattgttcaaacacacgttttacaatcaatttgtacagttaacacaaatatcatagtggttctgaggt

SEQ ID NO: 250373 - DNA, 612 bp, Homo sapiens
aattgtctttatgctctgtgtttctcatagtgctgggcatagagcagatcccaataggcattgactccaccaagtaattaaagagtagctatccaactcagatccttgatgcatcaacttctaccattcaagcatattctttgtaatacacaaaattcaaatgcccacaatccctgcaactcaaatttatacttttctaagaacaaacattagagggtgtgtagggagaggatatgggtcatttaggagaatggagaaattgacactaaaagggcargaagaagagaagctcatcttcacgtcttccccaaggactggcccccagttaggcttagtgttctccacccgctccttctgcttctcttcccaatgttttacagccagaaaaccgaattgtgtctattcctaactcttgacgcttttgtgttaggattgtattacctgggaagttaggagatctgggcccctgttgtgtgaccttggccaaggccaagctcttctctctgaccttctgtttccctgttggtgaaatgagggggccaaggatcaagatgctgtttacagggccctctgctctgacatactgactcccctacagtttctttggattgt

SEQ ID NO: 250374 - DNA, 612 bp, Homo sapiens
aattgtctttatgctctgtgtttctcatagtgctgggcatagagcagatcccaataggcattgactccaccaagtaattaaagagtagctatccaactcagatccttgatgcatcaacttctaccattcaagcatattctttgtaatacacaaaattcaaatgcccacaatccctgcaactcaaatttatacttttctaagaacaaacattagagggtgtgtagggagaggatatgggtcatttaggagaatggagaaattgacactaaaagggcaggaagaagagaagctcatcttcacgtcttccccaaggactggcccccagttaggcttagtgttctccacccsctccttctgcttctcttcccaatgttttacagccagaaaaccgaattgtgtctattcctaactcttgacgcttttgtgttaggattgtattacctgggaagttaggagatctgggcccctgttgtgtgaccttggccaaggccaagctcttctctctgaccttctgtttccctgttggtgaaatgagggggccaaggatcaagatgctgtttacagggccctctgctctgacatactgactcccctacagtttctttggattgt

SEQ ID NO: 250375 - DNA, 612 bp, Homo sapiens
aattgtctttatgctctgtgtttctcatagtgctgggcatagagcagatcccaataggcattgactccaccaagtaattaaagagtagctatccaactcagatccttgatgcatcaacttctaccattcaagcatattctttgtaatacacaaaattcaaatgcccacaatccctgcaactcaaatttatacttttctaagaacaaacattagagggtgtgtagggagaggatatgggtcatttaggagaatggagaaattgacactaaaagggcaggaagaagagaagctcatcttcacgtcttccccaaggactggcccccagttaggcttagtgttctccacccgctccttctgcttctcttcccaatgttttacagccagaaaaccgaattgtgtctattcctaactcttgacgcttttgtgttaggattgtattacctgggaagttaggagatctgggcccctgttgtgtgaccttggccaaggccaagctcttctctctgaccttctgtttccctgttggtgaaatgagggggscaaggatcaagatgctgtttacagggccctctgctctgacatactgactcccctacagtttctttggattgt

SEQ ID NO: 250376 - DNA, 588 bp, Homo sapiens
attagccccttgaggaaatagtggtttcgcagaaagtgtgaattctcagtgttactgaaatgaccttgtttaatttcctcataaaaaaaagtcaatctaataatagctacatcttctaatattaacaaagctgcaaaagttacacaaagttagaataattttcctttgcttggacagcaaaatccttcagtgtccttgtctttcttttcccaatgtgccaccccctttctagtctatatttgctctttaatatttgattccacattttccagtcaccctgatgcaaagcagcagtgtgaagttgaacgattcaaaasggaaagaggagatggctgccaccccaccatgagcaaatccactgaactgtaaatctaccctgcatttaattacccaactagacggtgcgatgataaggtctccagagtgttgtactatcatgagtgattgagtatgcttgcagtaataagcttttctacagctaagccaaaaggttaaaagtatacgtagaacttcaaggcaagcattgtttttaaatagctgcaaagccaaaagaacaacagaaacttcttttgaatgaatgtcttggtt

SEQ ID NO: 250377 - DNA, 556 bp, Homo sapiens
atcagtgatgggaggggaatttatgttgggagccaaatttccaaagtaaggcataacagacttgccagcaaaactgttcacacccccacagagaccacaaaaccctgcagctgtaatttcagaaacacacatgtgtataaatcaagtaattgcacacctaactatccacttgagcctgtgtgctgggtttttttccaggtgcctgaggcacttgtgctatttggctttgaaaacaaggtttagtttaattgacaggatattatcaaattcaagctgacttgtatggacaaatctcaaaatatgagggtggcatacagaaatcaagaggaacatatgaatgttccatatgtgtgttatgcaaggtccttgcagtgactgtgaattctaaacaacaggaagggacaaaattaaaatgtcaatttagttytaattcatgaatgtatttttttcagagcatcagtgaagcagcatcatttgaaacatcattgttatttacaaagagagagagaggattgagcaagtattatttcattttttataatagtgttttaaaaaa

SEQ ID NO: 250378 - DNA, 478 bp, Homo sapiens
tgggtctattggccagaagagcaagcagatccatgttttcatgttccagctggcacaagccccagcagacagccatagagcagactgcaggctgcccaggaaagcggcacttactgcaacatggaatcaccctgtaggctacacttgtgatttaattcctccaggagagattcaggtttgtaggacttattattagtcctatacatatgctttgcagattctagtaaagtaagattaatgtgaaagcagtttttccaaaattttttttttgcaattcaacacactcatttcyacaacgttcgctttcaaggggggaaaaaaaaagcaaaaaacatggcattaatttcacaaagatatttaaattgccaacctctcaactacctccatctccaagaactctatagatttagaggtttttttaagtatccacatacatacatatgcacacgcatgcatacacacacacacacacaaaaac

SEQ ID NO: 250379 - DNA, 478 bp, Homo sapiens
tgggtctattggccagaagagcaagcagatccatgttttcatgttccagctggcacaagccccagcagacagccatagagcagactgcaggctgcccaggaaagcggcacttactgcaacatggaatcaccctgtaggctacacttgtgatttaattcctccaggagagattcaggtttgtaggacttattattagtcctatacatatgctttgcagattctagtaaagtaagattaatgtgaaagcagtttttccaaaattttttttttgcaattcaacacactcatttccacaacgttcgctttcaaggggrgaaaaaaaaagcaaaaaacatggcattaatttcacaaagatatttaaattgccaacctctcaactacctccatctccaagaactctatagatttagaggtttttttaagtatccacatacatacatatgcacacgcatgcatacacacacacacacacaaaaac

SEQ ID NO: 250380 - DNA, 478 bp, Homo sapiens
tgggtctattggccagaagagcaagcagatccatgttttcatgttccagctggcacaagccccagcagacagccatagagcagactgcaggctgcccaggaaagcggcacttactgcaacatggaatcaccctgtaggctacacttgtgatttaattcctccaggagagattcaggtttgtaggacttattattagtcctatacatatgctttgcagattctagtaaagtaagattaatgtgaaagcagtttttccaaaattttttttttgcaattcaacacactcatttccacaacgttcgctttcaagggggraaaaaaaaagcaaaaaacatggcattaatttcacaaagatatttaaattgccaacctctcaactacctccatctccaagaactctatagatttagaggtttttttaagtatccacatacatacatatgcacacgcatgcatacacacacacacacacaaaaac

SEQ ID NO: 250381 - DNA, 592 bp, Homo sapiens
atagttaatgtttagaacacatgcaatgtacytagaacatggtaggtgcataacaaagtagccaatggaaactgtttgccatactgatttctaagcagaattacacttaaggctaagtcaacatttctcaagcccgacaccttaacactttgggccagagagttccttgctgtgaggactcccccgtgcattataggctgtttagcagcatacctggactctatccagtagcaccctacccccagcttgcgttaaccaaaaacgtctccagacactgtctctaatgtccttggaggaagggggagggggagaaataattccctgttgagaacctcttggctgttttcaggatccaggctataacctcttaactgtcagcccctgaatgcaaggattatagttatccaaggatgtgttgtattgctctagaccaggggttccaaaacttaactgattaatgaagccacttgggtgctttgcataaaacaaaccaaaaaaagcaccagtgcctcagcctcagaaagacaaataccacatgatctcacttatctatggaatctagtaaagttgaactcatggaagtagagagtag

SEQ ID NO: 250382 - DNA, 596 bp, Homo sapiens
aaactaaggactcttggccctggccaaatgcatacaggcacaaaattctgcaacaattctatgagttctgacactgaaactggttcctgagaccagactgaggttgaggaagagagactggccagggctcctgaggcccagcccagcccagcccagcccaccacttctcctcagtcagtatccaagattccctcctggcttctatcccaggaagcactggagacgaagcatagaaaccagaaaagcctccctgggcttgattcttcacgccttccagaactaatacccaccaggtcctaacgatgccaattctatgatcacctcacacagcatttcagtttagtcttcagaaaggtagccaaacctctgcagcctataataaaggtaacccaagctaatctgcatgaaccttggactagacggaaataaatgtgagaaatatgaggscccctggctagcatacaaaatcacatgctgctgaaatgggggacccttcagccttggtctgagggcttctgagggggtagggggacccttcagccttggtctgagggcttgtgacaggtaggagactaatgtagaggcagagtatctct

SEQ ID NO: 250383 - DNA, 588 bp, Homo sapiens
tcataatctgtctattgaggggaatgagatgattaaattttttagaaagaagaggataagacaaaatatgatgtattatcagggaggtaaaataaatccggaaagccaagattaaagccgagagagatcatttccaattgagcatttaagaaaagactgcatacaagggtggtgtttgaagcaggacttgaagaacatacagaatttcagtgagcacaaggtagtgagaccagcatgtgcagggactcggaggcaggaaaatgtggtgtgttgttaaaaaatgctaaacatctaatgctactgtagcataatgtgtgagcaggggagcaataataaagaatggcagaaaggtaagttggaggttatattttccaggctcttaagttgtaacagttagggttatatttaatttgggatttctacttccaagtaaaatgtaataggttgaagcagtcgttgtcacygaaagaagtgagtgaattataaaagtcacgcttttataaagcattgtaaagctgtggaaccagcctttctcttggcttatagatggctctcttctctctatgtcacatgatcctccctctgtaa

SEQ ID NO: 250384 - DNA, 580 bp, Homo sapiens
ggtcttatgagaaaaatgtttttagaaggtcaccatccttcaggtatatcaagatttcctttggtagagatcaatgtgaaaatagtttcacaaagtttatctcatttaacttatatgctttctcttaatacatcatgtttcctttaaacatgattgtcaagatactcataaatgttaatccgttattgtctcagctktctatcattcttttgtatgctttttcccccgctccctgcccctgtgcatatcttctattttctctgttttaatggttttcttagctcttaatattttaatataaagtataaagcctcttatcctcttgaaataaatatgaagtaatttgctattgaaaaagtcattgattatctactcattgtcaatatagtggaaatattacacattccttgctgctctttcctctttctataggtttttttatttttatttttattttttgacagtctcactctgttgcccaggctggagtgcagtgacgcgatctcggctcactgcagtctatgcctccaggttcaagcaattgtcctgcttcagctcccgagtagctgcaactacaggt

SEQ ID NO: 250385 - DNA, 602 bp, Homo sapiens
atggcttctgctttagattgctgcattctgggactccaactgacagaggctccaccatctggaaggttgctggttatgatggtagggagaattgaggatttgagcaccaataattaaaaacttaaatagagataagaaacacgcatcacttttggtcacatatcattggccaaagcaactctcacggtcatgattccaaaggataaccatttaggagagccaggtaattgtaaacggaataatgcctaccacaatttccttatgaggtagagtactcaacatgtatttcctgattgtagtggaatcctttattttattgactaacagtcccgttacatccttctttattgcacccaattattggtgggggataatttcctctcactcattttgtatgatcttataggatrgatcctaaagtattactattacttcagcacagcaagtagccaggcacagaacctaagctgagtccatcagaggatctccacaggactcaaggtttgaggcttgacataaaagcagatgtaaagatggaggatcattcattctgacgatgctaactgacccaatcattgttgctaggaagatcattgccctgg

SEQ ID NO: 250386 - DNA, 599 bp, Homo sapiens
ggaaattgccctcatgattcaattatctccacctggtgccacccttgacacataacaattattacaattcaaggtgacatttgggagggggaggagacacagagccaaaccatatcacaccatatgatttaaatactctgataccaagtatgctgttccattctattctaataagctttgaagtatctgataaatcttaatatgctggtttttagtatttgaaatcttctgaacaaaggtgaaataycttaatttttgcctcagaatgagtggtcaaatagctgtttattttttcccagcatctttttattcttagccgtgaaagatgatcacagtaattaaaagccttgacaataatttgttttagctctttctcctgcaacgttttatgaactctaataaaagtaacattttaaaacagcttttaacattatttcttatcacttcagtttctttttattttacataaactggagatattatcaaataataaaaatggcacatagacaacgccagggtgaagaaaggaaatgagaattttagatgatttattgactgaaaatgagaacaatcataatgaattgatctttataaacata

SEQ ID NO: 250387 - DNA, 515 bp, Homo sapiens
  misc_feature (1)...(515): n = A,T,C or G
gctgttccattctattctaataagctttgaagtatctgataaatcttaatatgctggtttttagtatttgaaatcttctgaacaaaggtgaaataccttaatttttgcctcagaatgagtggtcaaatagctgtttattttttcccagcatctttttattcttagccgtgaaagatgatcacagtaattaaaagccttgacaataatttgttttagctctttctcctgcaaygttttatgaactctaataaaagtaacattttaaaacagcttttaacattatttcttatcacttcagtttctttttattttacataaactggagatattatcaaataataaaaatggcacatagacaacgccagggtgaagaaaggaaatgagaattttagatgatttattgactgaaaatgagaacaatcataatgaattgatctttataaacatagggaaatagggtntctttctttgtttgagacggagtctcactctgtcgcccaggttggagtgcagtg

SEQ ID NO: 250388 - DNA, 609 bp, Homo sapiens
atctttgactcctttatttgttttatcccttatatccagtcacttaaaaaaatcctgacaattactgtcacctttaccaccactcttgtggtgcttgcttacgttacggcgatagcctttaaatgatcccctgcttttacctatgaccgctactacatagtctcttctaaaagccagaatgatacttctaaaatagatgaatagatgttgtcaccccatactaagaagctttgaatagcttcatgtctgccttacagtaaaagccaaaatccttgcaaaggcccttcgcactctgccctcctttatcagcatgaattctttcttttctatctttcacattctatctttcacaacactcactctgatccaaccactttgcccactactgttgtgaacaaacgaggaaagcttcagcctcargatctttgcaccgtactgttcctactgcctataaatctttctccttcatatttacacatgcctcagtccctcagcttatgcaagtattagcttaaatatgatcttctcagtgagaccttccctaaccacgagtggtggttatgcacaaggagatgacggctttgtataattccttctcttgattgtggg

SEQ ID NO: 250389 - DNA, 508 bp, Homo sapiens
tctatcttttaggtctctttattgctgtttcgtgctttgtrtctctttgtctctgtgggcagtgatctggggattcttcatttactaactacgtgatttcaagcaacataccctctatatatcagcttaatttgtaaaatgttggcaacaatagtgcttattttattgggttgctagaagattaagtgagtcatttgtgaagcacttagaaaagaacctggcatacagtaagcatacttaaaagtttgtaaatcaaattcctcaaagatatacttcattatttctttccttgtctccaaactagagtttacctcatccatggtaattttctttatcatttcaatactatgtcttcattgccaatatttctaattggttctttttaaccccctattcttgttttatttctgcctctgttttttattccacacatttttggtcttttaaactggatattatcctttaatttgctttttatagctttgttcataagattctatgaaattca

SEQ ID NO: 250390 - DNA, 479 bp, Homo sapiens
cagtagaactaatatatctaacttaggatggaatttatcttgtacccagacgtccctataagaaggagtacattattgagttcacatagcacacttaaacatatgtaaagcatcaaccacagcaggtaagtctacaaattatgagcagatgtatacttgtactccatggatgtcaaatgctgtgcaaatttcaatgatatgggccayaatgtttggtgacaatgcagaaatttggattttataaaataagaccttcatctggcaaaatacagggattttatttccaggttgacatcataaagccaaaagaaaataaatattttctgtctgtgaacaagtataaacatatgtcttcttactttaaacacatatgaaaatctcttttcgtctctgtatgacttcacagtgctagcattgccccattgtctgtccctgtccccgtccagactcatgggtatgctgaaccactagagattcat

SEQ ID NO: 250391 - DNA, 479 bp, Homo sapiens
cagtagaactaatatatctaacttaggatggaatttatcttgtacccagacgtccctataagaaggagtacattattgagttcacatagcacacttaaacatatgtaaagcatcaaccacagcaggtaagtctacaaattatgagcagatgtatacttgtactccatggatgtcaaatgctgtgcaaatttcaatgatatgggccacaatgtttggtgacaatgcagaaatttggattttataaaataagaccttcatctggcaaaatacrgggattttatttccaggttgacatcataaagccaaaagaaaataaatattttctgtctgtgaacaagtataaacatatgtcttcttactttaaacacatatgaaaatctcttttcgtctctgtatgacttcacagtgctagcattgccccattgtctgtccctgtccccgtccagactcatgggtatgctgaaccactagagattcat

SEQ ID NO: 250392 - DNA, 585 bp, Homo sapiens
aacaaacatttaatcaaaaccatcttggtggcagagacagagctagattctttacaggaccttaatcacctcatgcagtccttaccrtgcctctgaaacacaggaagcagcacctctgtttggcaaatcagacttcaggtccagaagatgacatgcttttaaggtggcaaacagagtaaggattatctgactccaaagattttacatctttctttaaaagtcacatgttataattattctaattaagattgtgaaacttagaattggatttggggttttctatgtcaaaaaggaaaaatggacatttggtcatgatcatttcaatatacacatttgagcacctactacagtgctaggtgccatgctaggcactggggacactgtagaacaaaacaggcctcacctcttctctcttggttcttgtaaaatggctggtacctgttcagtgcagtgtcagagctaatgctctcaaattttggtgttgggtctatttgaacactcggtgcattagttaaagtaggctaatatgcagcagtaaatagacctcgtattagtcacggtgggctaactgcattagaaataacc

SEQ ID NO: 250393 - DNA, 585 bp, Homo sapiens
aacaaacatttaatcaaaaccatcttggtggcagagacagagctagattctttacaggaccttaatcacctcatgcagtccttaccgtgcctctgaaacacaggaagcagcamctctgtttggcaaatcagacttcaggtccagaagatgacatgcttttaaggtggcaaacagagtaaggattatctgactccaaagattttacatctttctttaaaagtcacatgttataattattctaattaagattgtgaaacttagaattggatttggggttttctatgtcaaaaaggaaaaatggacatttggtcatgatcatttcaatatacacatttgagcacctactacagtgctaggtgccatgctaggcactggggacactgtagaacaaaacaggcctcacctcttctctcttggttcttgtaaaatggctggtacctgttcagtgcagtgtcagagctaatgctctcaaattttggtgttgggtctatttgaacactcggtgcattagttaaagtaggctaatatgcagcagtaaatagacctcgtattagtcacggtgggctaactgcattagaaataacc

SEQ ID NO: 250394 - DNA, 585 bp, Homo sapiens
aacaaacatttaatcaaaaccatcttggtggcagagacagagctagattctttacaggaccttaatcacctcatgcagtccttaccgtgcctctgaaacacaggaagcagcacctctgtttggcaaatcagacttcaggtccagaagatgacatgcttttaaggtggcaaacagagtaaggattatctgactccaaagattttacatctttctttaaaagtcacrtgttataattattctaattaagattgtgaaacttagaattggatttggggttttctatgtcaaaaaggaaaaatggacatttggtcatgatcatttcaatatacacatttgagcacctactacagtgctaggtgccatgctaggcactggggacactgtagaacaaaacaggcctcacctcttctctcttggttcttgtaaaatggctggtacctgttcagtgcagtgtcagagctaatgctctcaaattttggtgttgggtctatttgaacactcggtgcattagttaaagtaggctaatatgcagcagtaaatagacctcgtattagtcacggtgggctaactgcattagaaataacc

SEQ ID NO: 250395 - DNA, 585 bp, Homo sapiens
aacaaacatttaatcaaaaccatcttggtggcagagacagagctagattctttacaggaccttaatcacctcatgcagtccttaccgtgcctctgaaacacaggaagcagcacctctgtttggcaaatcagacttcaggtccagaagatgacatgcttttaaggtggcaaacagagtaaggattatctgactccaaagattttacatctttctttaaaagtcacatgttataattattctaattaagattgtgaaacttagaattggatttggggttttctatgtcaaaaaggaaaaatggacatttggtcatgatcatttcaatatacacatttgagcacctactacagtgctaggtgccatgctaggcactggggacactgtagaacaaaacaggcctcacctcttctctcttggttcttrtaaaatggctggtacctgttcagtgcagtgtcagagctaatgctctcaaattttggtgttgggtctatttgaacactcggtgcattagttaaagtaggctaatatgcagcagtaaatagacctcgtattagtcacggtgggctaactgcattagaaataacc

SEQ ID NO: 250396 - DNA, 567 bp, Homo sapiens
aaaataaaggaaagaggggataaaaagatataaatttggggaaaaaatcattatttgcaaaaaaaaattactttgttcacagtaaatacaaaaggacctaaagaaaaactattatccttaataagtgaattttggaaggtcattggataagaaggtcmattgtatgtaaaactcaatcgtatttccatataaatgcaaaaaactgacaaactttaaaagaatattgtttatattagcataaaacaaacattagtgaaataaatggagatctaaataaatcaaggaacataccatattcatggattagaagactcaatactgtaaagatatcaatttaactcaaagttaaatatagattcaatgcaattcaaaccaacatcctgaaaggttttttttgtggaacttaatgagtcaactattaaattcatactgaaataggacataaatgccaaagcaattctgaagagaaagaacaaagctgggagtcttcaaccatcaaataacaagacctattgcaaacgcggtatgttaatagctaaaggatataaaaatagatccatgaaatac

SEQ ID NO: 250397 - DNA, 546 bp, Homo sapiens
ttaaacattcacacccatcagtatttcttggttggataaagtattgctatgatggtggccaaatggtaatttcccatttccatcattccttctacatttattagttgacatcctactgtaagtaaaagctttctcttgtctgcatgtgtgcatgtatatgtgtacataagtatgtatgcatgtatttattttgagacagaatctcgttctgtcgcccaggctggagtgcaatggtgcattctcggctcattgcaacctctgcctcmtgggttcaagtgattcttgtgcctcagccttctgagtagctgggaccacaggcacgtgccaccaacatctggctaatttttgtatttttttggtagaaacggggtttcaccacgttggccaggctggccctgaactcctgacctcaggtgatccacccacctcagcctcccaaagtgttgggattacaggcatgagccactgcacccagccttctgtgtatttattcacctatttgtttctgtctgtatggacctatggattcctattttatccagtggg

SEQ ID NO: 250398 - DNA, 588 bp, Homo sapiens
gttcccaggtcattcaaaagatgctggggcccccaagtagccagtgataaatcccatttctgcttaaactcaatacaagtggtttctgttgtttgcaaccaagcctgcctgaggccttctactggcgctgcacctttgcaagggagacatttggtgtgatatataacagcaactttgggacgaattccactctaccagacacagctgggagcagaacaatcccagatacctcttcrggtaaatggacccctaactagggaaatgcattttttaatgtgctttttaaatcacttggaatgccctgacctccccacctcctcctctgtcccactcgggtccaccctccacatcacggccagtgtgatctttctccacaatgatctggtggtgctactccccatgtgacacctgcgctgggtgtctctgtccccaccccatcttcctcctccctgctgtgcccacccagccatgccatggggacaatcactcttgctctctggcttcaagtggggtttggccaatgggagcatgggcaggccctcacagggcaggaagaatggacttggacatctgttacccccggtcctt

SEQ ID NO: 250399 - DNA, 462 bp, Homo sapiens
tgctgagggcccctggtggcagcagggtggaggggagaaattcagggagccagtggttctcaaagggtggtccctggaccagcagatcagcatcccctgggagcttgtcagaaatgcaaattattgggctgttccccagatgtactgaatcagaatctttgacagtgaggaccaaccatctattcataacaagccccctaagggattgtgatgatgagttgaaaacgatttatctgggtcatggtggcagctacttatgctcagtgtaacaagtacctatgtggacctctaaggcctcttagaaatgctcactgtgacttcattcactgcgggctccagctgagaggtcctccattcaagccagrcctgctgagaagctgggactcaaattgatagaccattaggagctgccgccaactctggataagggaagtgatgtgattgaggtcttattgcagaaag

SEQ ID NO: 250400 - DNA, 625 bp, Homo sapiens
ccttgcatcttcagcaccacaatacagccaagtttgatccaattgaacagaagtcccttagcactggtgagtctccatggatcaggagttgaacctctagttctctgcagcagaccacctaatgatgagaaaatgaaggctccagggagaaattgtcatctcagcattatgatggaatcaaaagggtcacaaatgggaggctgacaccatgggatctagtaccaattcttctgctgtcattctgtttatctttgactgtgtcatttaattttgtatctcagtcttttttttttctttttttkttttgttttgtttttttaatctctaaaagagataatagttcttgccctgcccactttgcaggctaaagagggataatgtatattaatagaattatgaagtcctattaagtatccaagttgacaatttaagttttatgacatattactatatcctaacagtaaatggtatggagaagaaattcctctaggcatgtgaataataatctgttatttctaaagagtttttccatgtgttatcttaataggtccttgtaataaatgatgagatggattgacaactggaattatccctattatgggttgaatgatgcactcccaaaagc

SEQ ID NO: 250401 - DNA, 564 bp, Homo sapiens
tattcaataataattaaaactgattactcttcagaatatatagaggcctgaaagcattgagatgacacattccaagtgctaaaagagaaagactgccaaccaagattttacaaccagaaaattattcttcagaaacaaaggagaaattaagacattctcagataaacaaaacctgagagattttgtcactagcagactgccctacaagaaatattaaagaaagtcattcaggctgaaatttaaaaacattaaacagtaacttgaattcacacacacacaaaatataaagaacaccagtaacgataactacatagctaccacttaccttggtaaatataaaagagagtataaatgtattttttgttgtaactcttttttcctatttgacttaaaacacaagtgcataaagtgatcattgtcgatggacttttaatatataaatatgtaattgatatgatgatagcagcatgaaggggaaaaatgaagctttattagagaaaagttttcttacattattgaaaataagttgatattartctgaactaaattattttaagtttagat

SEQ ID NO: 250402 - DNA, 641 bp, Homo sapiens
ttacttgttactgttgatattaaaacaaatctcaaatcaccagcttaaactgccactttacaatgctggaaaaagaagattacactacatgcaaagctagsagaaggaagaaaataatgcagatgagagtggaaattattaggaaaaaagggattagaaaaagaaaagagcaaaccaatgaaatcaaaatttgattctttgaaaagatcaatgaaactgacaaacttttagctaaatagagcaagaaaaaagagagaagactcaaattgctaaacttaggaaagaaaatgggaacatcactactgaacttaacaaaattaaatgtgtcataaaggaatactacaaacaattgtctatcaacaaattagatgacatagatgaaatggacaaacttttagaaatagacaatctgagtagacttacaataactaaatggagtgaattagtattaatagtatcttcccacaaggaaaggcccaggcccagttggattcactctttaattctaccatatgtctaaaaataattaatatcaaccttttgcaaactcccaaaatttagaggagggagcacattctaacacattctgtaaagccactattactttgataccaaaaccaggcagaagtatcaccagaaaa

SEQ ID NO: 250403 - DNA, 374 bp, Homo sapiens
  misc_feature (1)...(374): n = A,T,C or G
nnnnnnnnnnnnatgcagctatccttcstacaactggaagtgcactaatccttaatctgaatagtgttacataaagttaacaactcttaaatgctgatataaagtcgataaatcttatgtcccatgatacaggaaaaataaaggaaataaaatgaaaatattttcttagtacaagtgtatacatgcacagatgttcttaacaaaataaggaaatactcatgacaatttcagtcctcgtttttgcaactggtcacgtggttgtagctggtattgataactgccttcttctactacacattctgtatttcctttcccttcagcaagcacctcagtgggtcatggttttttacctggtggagtgacccaaaccttca

SEQ ID NO: 250404 - DNA, 591 bp, Homo sapiens
attcacctgtgggggcctgtaaaaggctccaaacagcatccctatctgccactgacacctcaagcaccattggatctgctgggtcatayggcccaaggggcagagcaggttgcacagaagcccggacctgtttcagagccctctcgttttctggaccccactcaaaactggcagccttttgggtcactcaacaaatgggctggaataacacacccaaatgaggaatgtgttgcctccaaaatccaaataggcccactaggcattgagcctctttcttggttgtaggaggggccaaatgcagcaacttatccttctccttagaaggcatatctcggcatgccccacaccattggaccactagaaatttgactgaggtagaaggtccctgaattttagttggatttatctcccatcccctggcacacaaatgtctcaccaataagtccaatctgtttgctacttgttgatcactggatccaatcaagttgacactcaatattaaccatcacaaacataaaacaactcaggctcagagatcattttaatcaagagtaattttcattatgagagtgacatattcatagattaatt

SEQ ID NO: 250405 - DNA, 585 bp, Homo sapiens
tataatcattcacttaatgtttgtttctcccattagaccatacagtttcrccaaggcagggacttcatgtatttaattgccattacttaacccaatgcctgtgcctcacagaataggcacttaataatatttacacaataaataaatgaataaatggattaatgaatggatggttgaatgaataaacttgatactcatcctactgccaccactaggatagatccagaaataccagtatatttagtgcagtgaaaggattaacttacttcaaaactagttccccatgttaggagaaagagaaataaatatctatttaacaagagagagtgtggtttcacatgcagatgtgtaatatttgtaaataaaaagtagactgtttgtgtataggagtagaagagagagactcagtaggctggagctaagttaaagtaaactatttattgcactaactaagccatagtggggctgctgccaactggtcacaactgcatttttttggttttgtttttttcttaaaggcctcagtctctgtaagatgcacgttgagtagttggaaaagaaagggtcctaatgctcggaattttc

SEQ ID NO: 250406 - DNA, 531 bp, Homo sapiens
gaaacactgcaaacattcacgtgttcagacttcttttcactgttcttgttgatcctttacttatctactgattttcaaaaatacrtatatttaaaagtatatatatatatatatatatgaatgagttgtgttacaaacatatatagatatatgtttgtagatatgtgtatctgtagacatatgttttacaaacatatagatgtaggtttgtaaaacaactccccaaatgtagaaatacagagaggaagaaagtgaagatctcctttcaggtcttctggtcatcagattactcattctcttctctagagatgattgttgctattgcctggtgcttccacactctcttctatgcatttgtacacatacagatgcacatctgcctacatgaactcaaaaaattaagaggatcatcctttacgtattgttttgcagcattttattacctcacagtatactttagaaagttttccatgggaggagctgtagttggatcctagtcttttttttttcccttcaacttttattttaagt

SEQ ID NO: 250407 - DNA, 642 bp, Homo sapiens
ttgctattgcctggtgcttccacactctcttctatgcatttgtacacatacagatgcacatctgcctacatgaactcaaaaaattaagaggatcatcctttacgtattgttttgcagcattttattacctcacagtatactttagaaagttttccatgggaggagctgtagttggatcctagtcttttttttttcccttcaacttttattttaagttctgggatacatgtgtaggatgtgcaggtttgtwatataggtaaatgtgtgccatggtggtttgctgcacagatcaacccatcacctaggtattaagcccagcatcccttagctgttcttcctaatgctctccttccccttaccccaccctcaataggccccaatgtgttgttcccacccatgttcctgtccatgtgttctcatcatttagcccctgcttataagtgagaacatgcggtgtttggttagtttgctgaggataacggctttcagctccatccatgtccctgcaaaggacatgatctcattcctttttatggctgcatagtattccatggtgtatatatgccatattttctttatccaatctatcattgatggacatttgggttgatcccatgtctttgctattgtgaatagtgctgt

SEQ ID NO: 250408 - DNA, 540 bp, Homo sapiens
tttcaaaattggagtcaattctctcaaatgctgccactgcgttatcaactaagttcatgtaatattctaaatcatttgttgtcatttcaacaatgctcacagcatcttcaccaggagtagattccatctcaaaaaaccactttgctcatccataagaaacaactctcatttgttcaagtttcatcatgagattgcagcaattcagtcacatcttcaggctgcacttctagttctcttgctatttccaccacgtttgcagttacttcytccactgaagtcttgaacccctcaaagtcatcatgagtgttggaataaatttcttctaaattcctgttaatgttaatattttgacctcctttcatgaattatgaatgttcttaatggcatctagaatggtgaatccttttcagaggttttcaattgattttgtccagattcatcagaggaatcactatctatggcatttttagccctacaaattgtatttctttcttttttttttttctgagatggagtctcactctgttgcccaggctggag

SEQ ID NO: 250409 - DNA, 550 bp, Homo sapiens
aaatcatactggtaaacagatgtactttcatccaggctttattgttccatttctagggctcagacagagtaaatttagcatcattcttaagggccttargattttcagaaaggcaaatgagcattggcttcaacttacggttaccacctgcattaggccctgacaaaagagtatcccgtccattgaagttttgaagccaggcattgacttttactttctggctatgaaagtcctggatggcatcttattccaataaaaggctgtttcagctattaatacattgacaatctgttgtgtagtatagccaccttcatcaattatcttctcttcctttccttcaattatcagttgtccctttcactttaacacttagaggcaattgtagggttattaattggccttaatttcaattttattgtttctcggggaataggaaggcccaaggagaggaagagagatgggagaacagccagttggctgggcagagagtacacacatttatcaattaagtttgctgtcttatataggtgtagtttgcagcatctcgaaa

SEQ ID NO: 250410 - DNA, 557 bp, Homo sapiens
gggagaacagccagttggctgggcagagagtacacacatttatcaattaagtttgctgtcttatataggtgtagtttgcagcatctcgaaacaattgcaatagtaacattaaagatcactgatcaccataacagataacaataaaaagtttgaaatcataaaaagtttgaaatactgtgagaattaccaaaacgtaacatagaaacctgaatatgttgttggaaaaaatggctctgatagacttgcttgatggaggtttgccacaaaccttcaatttgtaaaaaaaaaaaaaaaaaaaaaaaaaaaaaaaagcaatgtctgtgaaggtcaataaagcaaagtgcaataaaatgaggtatgtctgtataaaatgtaaagccaaaagaatggaagttccattctaactgcaagtagttctttttaaaaaacactgttcaaggcaagcacagatagactcagcccatagatacccaagctgcaacytctggcttatagtcattctgtttttaatttgtcagttagtttcaattattaggactaaaacttgcagtaatgtt

SEQ ID NO: 250411 - DNA, 627 bp, Homo sapiens
ttagtttatcctgggtaatttttataaaatgtacattcatgtgatttatttgtctataaaagataaaaattcaaccaaaactggcttaagtatgggaaggaatttattgtctcttgtaaatcaagcaatttaggagcataacagcatcagatatggcttgrtacagagcccaagagaacaaatgatgtcaccagaactcaatttttttctgtacatttctcagctatgttgcttctatgtttctctattctctgtgatttatttcttatggttgaaagactactgtcatgagctcttggaactgcatgattctaggttaaaatccagttgaaaagtgagcatctttattctagtatttccaaagaaaatgccactcttattggagtaggttagtccatgtgcttagctttggtttgattactgatgccataaaaaatcaggactttgattggccagatctggttcatccaccccactcttgagttagggttagagtcaactccattggaagcacatgagttgaaagtggggaaattagggtatcactaccagaaaaaaggttacaagattccagacagcaaaataatagatgttcacagcatgattgtgttttaaatagatttggaa

SEQ ID NO: 250412 - DNA, 528 bp, Homo sapiens
gaagcacatgagttgaaagtggggaaattagggtatcactaccagaaaaaaggttacaagattccagacagcaaaataatagatgttcacagcatgattgtgttttaaatagatttggaagactttgggcatatgtgggggctctagcacatatcacagattttttctgttttactatgtgtccaaatccacaaattggatgtgaattatgtctggcattatataaagacaacactaatgcaattgagatagtgggtctcytaaaggaagcaagaagacatatgttaacatatacaattgtgagaatatgaaggatttttacattttagttctcattaactctactctccttcattccagcccctttcctccacctggcaaaaggggaattatggatagagtcagccactttgggtggagtgagtcactgtacagcattaaaagctccatttcctctccttctgggtggtacactggcctggtcctgttgcactgggagaaggtccaggcatctctttttggatgttt

SEQ ID NO: 250413 - DNA, 588 bp, Homo sapiens
aatgatgcaacagctccaaatgtcatgggaagggtgagcatgtgcaatgaagaaaagtgagatgatccctcttagggagtcaatcttcatacaatcccccaagagatccccctyaggtcatatcaatgggaattggggcacacaccaacactccaggtggggagaggtgttgaaagtgagcacttggcgtttgtagtctcctatatgaagggcagtcactaccagcttaccagcttcctgcacttgccaagcccttctccaatctgagcctcgatttcttatctatttttttgtttgtttgtttttgagacagggtctcactttgttgcctaggctggagtgcagttgtgccatcagaggtcactgcagtgtcaaactcctgggctcaagtgatcctcctgcctcagcctccaccacacctggagtttttttttttttttttttagagatgggatcttgctatattgctcaggctggtctcgaactcctggcttcaaggaattcttccatctcagcttcccaaagtgctgggattacagatgtgagccacctcacccaagcttctcttttattaaataggactggtaa

SEQ ID NO: 250414 - DNA, 351 bp, Homo sapiens
tagggactggcctgttggttttctctctttacgcaatgctgacagattggtagtggcttcccagattgttgtgttgaaaagaattttgagatccttaatggcttactagaaaagtggtccataaaaattggtcatgtatgccatgggagtggagggttccaggggcatatttactcttctggctctatttgtccattggccagaagtccaakaagtgagctgggaagacaatggggatgatgtccaagccctctgctatccaccttcatcctttaacagcagaagggtcaacaactcattcagaaaacaattagccatgagcctcaggtttgaatatacctgaccccatct

SEQ ID NO: 250415 - DNA, 593 bp, Homo sapiens
gcaccctgggacctgcaagccatgacttggccagcccttacactctgaggtgcctcaaggcatccaaaactgcagagtactctcgaaatccaatcccaagcaaccaactgctgcataatagcactgccctgtctgacagctcgctgtcctcctctccctgtctctcttgctcccgttctcttctcccatytgtcccccagcctggcccctccctcttctcacattcctccaggactttctcaaaacctcccccattcaaaccgtagcctgtcttacctatgagccatccatcccaactcctactccccagcccaaactccccttccctggacactctgccccaagccgcaaccccgtgccgccaccaccaaactcttgggctgtccctaggggtagcctcaccactgtccaccctccccacatcttggcaccagcagcccttttactcttccctctgtggagcctctcacaccgacctttcccctctgcccaacctcatgcttgttctctcccacctgaccctcttcagaaggctacatgcctctagatcaaaggccaccagtacattggggccagtatttgcttccaaaatg

SEQ ID NO: 250416 - DNA, 593 bp, Homo sapiens
gcaccctgggacctgcaagccatgacttggccagcccttacactctgaggtgcctcaaggcatccaaaactgcagagtactctcgaaatccaatcccaagcaaccaactgctgcataatagcactgccctgtctgacagctcgctgtcctcctctccctgtctctcttgctcccgttctcttctcccatctgtcccccagcctggcccctccctcttctcacattcctccaggactttctcaaaacctcccccattcaaaccgtagcctgtcttacctatgagccatccatcccaactcctactccccagcccaaactccccttccctggacactctgccccaagccgcaacccmgtgccgccaccaccaaactcttgggctgtccctaggggtagcctcaccactgtccaccctccccacatcttggcaccagcagcccttttactcttccctctgtggagcctctcacaccgacctttcccctctgcccaacctcatgcttgttctctcccacctgaccctcttcagaaggctacatgcctctagatcaaaggccaccagtacattggggccagtatttgcttccaaaatg

SEQ ID NO: 250417 - DNA, 425 bp, Homo sapiens
gccactgggcacccatcccaaggagacgcctgcaaatgacaggctggcattggccaagatcccctgcagcctctcttggcctgatccaagcccctctccaggcagggtctcccactagcctcagcccttggaatgaccttgggctcggcagcctcttttcaacaccagctaaggtaggtcctataatgatagtggaaccctggctcagccaactgccagggctgagtgcagagtcaagcacttcctgggtctcagctctcctgagcaactctgtccccctcctcactctccctgtggcagctggagggagttgcaaaarcacaatccttcctccctcctcataatcctctaaccatctcccctagattagaatccagtctccccagcatggcctgaaaaggtcctgcaggagctggttctgctgc

SEQ ID NO: 250418 - DNA, 535 bp, Homo sapiens
gatccatgacagcatttgtaggtgagtaatgaattgctttagatgagagacaaacccgagacaatatgtttccagtagggctcagctgcttacaagataaatactcctctgtcacttcatccgatgattaacggtcctggccctgctgtgtccaggcaaactgcctgtctgatccacgcagataagtaccagattccacgataccacaaacacaatctccttttcctggtgtgaccactcccttttccttttttatactgctagaagaatttacacagaacttattccacacagacctaycactgcatacattggttatagtaaccattttccacaaagaagcagaaatacttttcccaagtacatgaataaaaagaatgaaaaagaaaagaaaagttaaagaagcgggaaacacttggggataaaatcccatctttccccctgtattgccaccgctacttcctcagggttccctttgaagagaatgtacagggtgctgtgctactggtttgaccccacatggcaggtttttggt

SEQ ID NO: 250419 - DNA, 605 bp, Homo sapiens
aatgtattaaggattccattcaggtttgcataacaaaacaaaaatcattctgttcatttgactaaatttttgccacagttctagaaacattattaagtcaatagaattcaaattgaaaaggaaaacaaatgccattactttaaagagaagaatctgatccccaagtgtggtttttattacatgtcagagccaactttttttcttttgtggtaacatctctgaaattatactagaagtcaaggataaaatagttcaaaatgtgggtttataccccaattttcaggaatatatctaataaataaaataaacttaagctaaggaaggacttaacttatatttcaagttgaatggtctctctctttcagaagctcatacgttacaaagtgatcacttctaaagcaaaaaaaaaagagaaaaagaaaaaagaaaagaattctctataacagattaaaagtatctaataaataattcaagtgcttgccaaatacagacrggggttctatatacaaataaagatttaagcccaaggttccaagtagtttaggtcagtgtatcgttacgctgggaatctgaaatatacatgaaggacaactatctgcttagaa

SEQ ID NO: 250420 - DNA, 580 bp, Homo sapiens
cacgcccctcccttgtcatatttctctaacctactcttctgctttccccttccacttataaggactcatatgattccacttggcccacccagataagccaggaaaatctcccttatctcaaggtccttaactttaaactcttttaccaagtcccttctgcatgtaaggtaacatattcagaggttctggggattatggtgtggacattgttgaagatccattatttcattcactacagacctgaatgacagragggagtgagtcctgagtctacctgggatgggaggaggttggtccaggcagatggaagagtgaatagtcacagaatctaatttaactttcagcattaccattgtgtgccaagagttatccagagagagaacagttagagggaaggtctgagtggcagtgggaagaggtgagtgaaagtagaaccaacaggataagctgatgactgcatgtggaaaaatgtaaaaatacataaaaatgttatgtaaaagtacataaaaataaaagggagaaagtgagagaatgaaatgcaatggtgaggtttttggtctgagcaactggaaggatggtg

SEQ ID NO: 250421 - DNA, 580 bp, Homo sapiens
cacgcccctcccttgtcatatttctctaacctactcttctgctttccccttccacttataaggactcatatgattccacttggcccacccagataagccaggaaaatctcccttatctcaaggtccttaactttaaactcttttaccaagtcccttctgcatgtaaggtaacatattcagaggttctggggattatggtgtggacattgttgaagatccattatttcattcactacagacctgaatgacaggagggagtgagtcctgagtctacctgggatgggaggaggttggtccaggcagatggaagagtgaatagtcacagaatctaatttaactttcagcattaccattgtgtgccaagagttatccagagagagaacagttagagggaaggtctgagtggcagtgggaagaggtgagtgaaagtagaaccaacaggataagcygatgactgcatgtggaaaaatgtaaaaatacataaaaatgttatgtaaaagtacataaaaataaaagggagaaagtgagagaatgaaatgcaatggtgaggtttttggtctgagcaactggaaggatggtg

SEQ ID NO: 250422 - DNA, 404 bp, Homo sapiens
ggggatcttaaaggtagctacctggcaagcagccttatcaccagcatgtcatgaatcctgtccccttcagaacattaactgatacctttagaaacaaaatcatactgcaatggatgacctgaagagaaaaaggatcatggtcagcaaaacaagttatcagtttcttacgtttctgctttccacacaggatctgaaacctttaacatgtctggaaatcccagaatcttcccaacagtctgytcctgaaagcatgtgatataaacagttaccaatctgctgctctgtacccagcaccttcctgggctctggccctggtcacagctcccgttcctcaaggagcgtccagtgcgactgaggaggacagaaaggttaaccacagagagctattaaggagtgaaggagca

SEQ ID NO: 250423 - DNA, 497 bp, Homo sapiens
gcaaaaacttgaaataaacattatatatcctttaatggctataaagcattgtcttagtttaaaatttctactrcccaaaacaaactaacctggactatatggtttacctgcatggaaggtataattataaacatataaaactgtccaggcgcagtggctcacacctgtaatcccagcactttgggaggccaatgcgggcagatcacgtgagatcaggagttcgagatcagcctggccaacatggtgaaactccatctctactaaaaatacaaaaattagccaggcgtggtggcaggtgcctgtaatcccagctacctgggaagctgaggcaggagagttgcttgaacctgggaggcggaggttgcagtgtgctgagattgtgccactgcactccagcctgggtgacagattgagactctgtctcaaaaaaaactataaaaaaggtgaaaagtcaatgtgataagtcggtgtgggagaagatatttgtaacacatata

SEQ ID NO: 250424 - DNA, 570 bp, Homo sapiens
cataatgtatggtttctcatgctgcargtggactggggagagagtttgcaatctgtggaaacatttcagacttttgcaagttataaaaggagagagggttgccaggagcataatgtccagtaaatagccctgagcctggccaaataacctcagacaagccaatccctggggctcagtttgtttattaaaaaatctggaggggatacacaagcagttgttaatagtggttatctctagggggtgagagtaagggttgggagtagggagaaatttttatttttcattgtacccttttggctgcatctttcaccatgtgcctttattacttttataattgcaaatcaaattatagggtttttggcattttaaaaatgccgtgaaggagttggattagatcattggttttcaaacttgttttttaaagcagtggaacacttttcacataatcttatttgaaagcctaattaatgtatcacaaagaagaaattggggcccctcttgccgggctccccctccgcctcccagttgctgcatctccagagatccattgaatgtagtttgaaaataata

SEQ ID NO: 250425 - DNA, 647 bp, Homo sapiens
gggaggggattataggaggatgaaggtcattggaagtcattcttagaattctgcctaccacagatggtttcattcacagtgaattagaaattgaagtggttcttcattacagatagtttaaaaacactagtttagagtccagtaagagggaataacatgtatataaatggctatagtttaagactttaagtggtaacttccaaraagagagaggcagacagagtgcagtgagaggtcagtggaagggagattattttgtaagcggagcggggatagaagtggggcctcttgaagatgtggtgtttgaactgaacctcagaagataggtgttgtttggatcttaaaaaatgaggtgggaggacaagatacaaacagttctgtttctattttggcaccttagcttgcaaacacagaacggaactgaatcctctctaaggtcatttgattcctccttaccataaacaatgctgtataacaaattactccaaagctcagtgacctcaaacaacaaccatatgttgttgctcaaaggactacacatcagtcgggtggtttctctggccttggctgtgctgactcatgtatctctggtcaactggggctgggctgggcagctctgctaaacttggctggggtctctcatatcc

SEQ ID NO: 250426 - DNA, 647 bp, Homo sapiens
gggaggggattataggaggatgaaggtcattggaagtcattcttagaattctgcctaccacagatggtttcattcacagtgaattagaaattgaagtggttcttcattacagatagtttaaaaacactagtttagagtccagtaagagggaataacatgtatataaatggctatagtttaagactttaagtggtaacttccaaaaagagagaggcagasagagtgcagtgagaggtcagtggaagggagattattttgtaagcggagcggggatagaagtggggcctcttgaagatgtggtgtttgaactgaacctcagaagataggtgttgtttggatcttaaaaaatgaggtgggaggacaagatacaaacagttctgtttctattttggcaccttagcttgcaaacacagaacggaactgaatcctctctaaggtcatttgattcctccttaccataaacaatgctgtataacaaattactccaaagctcagtgacctcaaacaacaaccatatgttgttgctcaaaggactacacatcagtcgggtggtttctctggccttggctgtgctgactcatgtatctctggtcaactggggctgggctgggcagctctgctaaacttggctggggtctctcatatcc

SEQ ID NO: 250427 - DNA, 647 bp, Homo sapiens
gggaggggattataggaggatgaaggtcattggaagtcattcttagaattctgcctaccacagatggtttcattcacagtgaattagaaattgaagtggttcttcattacagatagtttaaaaacactagtttagagtccagtaagagggaataacatgtatataaatggctatagtttaagactttaagtggtaacttccaaaaagagagaggcagacagagtgcagtgagaggtcagtggaagggagattattttgtaagcggagcggggatagaagtggggcctcttgaagatgtggtgtttgaactgaacctcagaagataggtgttgtttggatcttaaaaaatgaggtgggaggacaagatwcaaacagttctgtttctattttggcaccttagcttgcaaacacagaacggaactgaatcctctctaaggtcatttgattcctccttaccataaacaatgctgtataacaaattactccaaagctcagtgacctcaaacaacaaccatatgttgttgctcaaaggactacacatcagtcgggtggtttctctggccttggctgtgctgactcatgtatctctggtcaactggggctgggctgggcagctctgctaaacttggctggggtctctcatatcc

SEQ ID NO: 250428 - DNA, 626 bp, Homo sapiens
caaggcttttggagaaatctgcatgtaataaaccatttggaaaaggtacagtgaccyataaaccagagttatcagaagccaggcttataaaatagtctacagtcttctttgtgagtgaaagacaaaagaggagtatttcagggcaactttattacctttactcatgtggtactcattatcaacacccagccccggtgctcctctgcaaaactgttcccagaaccattcttctggcttctgagaatttgtggttcttctcccaggtcccagtagcagtttttgaaatgaaaggatctccaatctgtcctgtatcatagacataaatcattgtcttttatgatattccctggagtacctaacctaaggccaaaaaaatagtaattgcacaataaacatgttttaggtgaatggatagatggatgaatggatgaatgagtggaccagatgggtgacggatgcttcagaaattgactgaaaccttcctttggaaaatgttaacataaactttatttccctccttccaagttagtatgtcagtttgaaatcttggtgtagttgtttcatgtctgtgagcttttttaaaacaaaacaaaactggattgcacactgccaaggggaagaatcat

SEQ ID NO: 250429 - DNA, 533 bp, Homo sapiens
ttcatgtctgtgagcttttttaaaacaaaacaaaactggattgcacactgccaaggggaagaatcatgttgtattctccctcatcaacccaatcttataagcatcaaaaaagtctgtgagcttcctagggtattaatcattgtctagtgggtgggggtagatgagtggttgttggagttggggacttctagtcaaataaacttgtgaaatgctggattaaacaaagttagacagctttcttttctgtgtgacttcaaagagcctttaatatgctaatatacwttatgaatcaccagaagggtattagaatatgtaagagttgaaaatgagaagaattggcttttttagaggggaggagaagggaggtatttttttattgtgctaaatgaatataatagttgtcattttaaccattcataagtgtacaattgtgtggcattaaatatgttcacaatgctatgtaaccattaccactatctatacccaattttttaatgattcccaacaataactccctgtaaacaacaatcccc

SEQ ID NO: 250430 - DNA, 606 bp, Homo sapiens
gaaaagaagatttgaaagcacaaactgaaagagcccaggacataacttaagaatgtcagctcaggacaaccaacactaaggcattaatgtactgaaaaagaggaaggaaggaatgaaggagaaaaggagggaacatccttttagatatctagaaaaaaagagcaagggacttataaaggaaaaaaaaatagattatcaccagatagtgtaatggtagtaaacatcttaatgccagaagaaactagaacaacaagatacgcaaggaaagaaaaagtgaacaacaaattttatatccagcaaaaccractttcaagtataaagggcaaaactgttatcaatatctaagtactcagaaaatattgttcccactagtgctccgtaaggaatctactagaggtagagcttcaggcaagcaaactgattggagaaacatcaacatacaaactgatggtgaatattaactatatactcacctatatactcacctgtagaactaagtggaagttaagagggagacagtggtataacatagatacaggacaactatagaaacaatgggggaaatgggagagcatatgcaaaaaatactgtttagtgttttccata

SEQ ID NO: 250431 - DNA, 611 bp, Homo sapiens
gggctttctgcttggcagtgtctaggggtctggggcaaaaagatgtgtagctaaataccaaaaccattttccatatggatgcccttcacagccgtgagattggcaaagatagagctaggatttggcaggaattcctccatggtcctaamctggttctttgtgtcccaggtagcagagagtttgggatcttgcaagtgaggaagcatgagttaagtgtggcaccaatatactgaactggcaagaggcaggacattgtcgccccctttgggcctcaattttttctctgctaaatgggaggatttggttttggtgagctctgaggaccattctttcagccccattgaatctcttgatttcagagaggtgcttgactgtgaaattatttgggatttttggtcaaaagaagttgagcgttttgagaggagagaagaaattgcatttaagttgtggggtttttttttgtttttaaatccaggctattcattgtgtgtgaaaaagaataccatctccatcactgtaatgcatccgcacgcttgtgagaatctgtctaccaaagagtctgaggtgaggatgcaagtcctgactcggctatctctgtgagaccttggaca

SEQ ID NO: 250432 - DNA, 611 bp, Homo sapiens
gggctttctgcttggcagtgtctaggggtctggggcaaaaagatgtgtagctaaataccaaaaccattttccatatggatgcccttcacagccgtgagattggcaaagatagagctaggatttggcaggaattcctccatggtcctaaactggttctttgtgtcccaggtagcagagagtttgggatcttgcaagtgaggaagcatgagttaagtgtggcaccaatatactgaactggcaasaggcaggacattgtcgccccctttgggcctcaattttttctctgctaaatgggaggatttggttttggtgagctctgaggaccattctttcagccccattgaatctcttgatttcagagaggtgcttgactgtgaaattatttgggatttttggtcaaaagaagttgagcgttttgagaggagagaagaaattgcatttaagttgtggggtttttttttgtttttaaatccaggctattcattgtgtgtgaaaaagaataccatctccatcactgtaatgcatccgcacgcttgtgagaatctgtctaccaaagagtctgaggtgaggatgcaagtcctgactcggctatctctgtgagaccttggaca

SEQ ID NO: 250433 - DNA, 611 bp, Homo sapiens
gggctttctgcttggcagtgtctaggggtctggggcaaaaagatgtgtagctaaataccaaaaccattttccatatggatgcccttcacagccgtgagattggcaaagatagagctaggatttggcaggaattcctccatggtcctaaactggttctttgtgtcccaggtagcagagagtttgggatcttgcaagtgaggaagcatgagttaagtgtggcaccaatatactgaactggcaagaggcaggacattgtcgccccctttgggcctcaattttttctctgctaaatgggaggatttggttttggtgagctctgaggaccattctttcagccccattgaatctcttgatttcagagaggtgcttgactgtgaaattatttgggatttttggtcaaaagaagttgagcgttttgagaggagagaagaaattgcatttaagttgtggggtttttttttgtttttaaatccaggctattyattgtgtgtgaaaaagaataccatctccatcactgtaatgcatccgcacgcttgtgagaatctgtctaccaaagagtctgaggtgaggatgcaagtcctgactcggctatctctgtgagaccttggaca

SEQ ID NO: 250434 - DNA, 503 bp, Homo sapiens
ttatttttcctctaagagcaaacatagcactggtaggacagaataagtagaagaatggatgccctgttaaactgcctgctcttccaaggcagaagccatatctgtctctgctgctgtgtctcaggacctagcccagtacattgctctgagtaggctgtcagtgaatactcaaccaactgattaccgacttgcaagagagtcaaccactgtggtgtcttattttatcttggcttcattttgcattagtacatacagtaccagagaatacaartaatattttccttattgtgataaaatacaaatgacataaaatttatcgttttaacagtttttacttatttacttatttgctgtaacacatgcttccgctttcctttttataaaacgataatgtccaaatggtactttcccatttattcccatgcttttattacattcacaactgttgtacaatgattgccactatgcagtttcagtagttcatcatcaccccaaatagaaat

SEQ ID NO: 250435 - DNA, 555 bp, Homo sapiens
atgatgtgatatgtgggattgtatttaggatacattgggtaggcatttacctctgtgtttggttagttcatgaagaggattatgaacaaagtcagaaattcatataatttaaaaaaacatataatttctgtttttcctggcattttaactatgtttcttgaaacactaattatggggggaaaaatgaagctaaaacttcttagctggtgacagcaktgggtttttcttagaattggcagaaaagtttagtaaatatatttaaaacatctatagtaattcagttttattgagattttaatgttatagaatgtcagagtagatcctgttgtttctgtaggttgatatttggcaggaaaaacccccaccacatttcaccaaatgatataataaaattagacactttttggtttgatttgtttgttttctacttttgtggcatatcagtgttagagataacattgtattcatctcgaaaagtgctatttaaaaggcaggtgaaattccattactgccaatttatagaagcatgaatttcataatggcaaaagcaaggcc

SEQ ID NO: 250436 - DNA, 591 bp, Homo sapiens
gagagaggaccagataggccacagatgctttagtaggtgaccaacagtatracactgtcaaatcctggggacttagacacaaccaaggaaagagagagtgagaaaggaagaacaccaagccaacagattaaattttctgcctttttagcaaaatggagcttgaaataaaagctaggctgaattatagaaaagtaatattacattgctatagaaaagtaatattacatggcacacctgctgtgtgggctgagacttgtatttgatataatggagacctttctgaaattgctgggattccttatgtagcacgtttctgaattagcattactgacatactctagaattagggccaggtcattggcagggcaatagccatggtcctgtgcagagacaaagtatgtgctcagaaggcttctgtgatttcagtaaaaccagtgggttgtaatgtggccaagttgaaaagagctctacaaaaatgccttaaggttttcaggcaacctgaggagggtggacagaaggaggagaggacaaatgtaacctgaataaagtctatggttggatttgagttctatgcacgctaggaaagtagtt

SEQ ID NO: 250437 - DNA, 558 bp, Homo sapiens
ccccgattctccctatagactgagatagacaccctgctgcaccccacttctcccatactacctgtccctgaaacaagcaaatgatgcttttcattttctttccgacaattttcactactgataactgtacaaagcttaacaaatatcatcctaacaaaattccagtttcaagaatgctcacagagttaccatgctccttagattccagggaaatgtgaagtaagcaagggctgtagtttccatgcccacttcctggactcccttcttagccagcatgtgggatgtggctgcaccctagttgatggtgagactgaktgctggacctgcctcctggttcacactcatgtggacacacagtcaagttgttaagtccattagatctggtaggtttggcaggacagctctcagcacgttggactggccctgtgctgatccctcctttctcacttctatttctcaagaatagcgatagggtgtgctgagaatgtagacatcctgaaatagggagatactggccagcacattctgggctctgttccagtcccccagaaacaggat

SEQ ID NO: 250438 - DNA, 567 bp, Homo sapiens
ccaaaaacacagattgtaaaacagtaggaaatggggaagttcattaagatgacacgtgggagccaacaggttacataagagtacaactgttatgcactccccataaaggaaaggattaattttaggtcctgctgaaccatgtaaaaggtgtaaattaaagaaaattatctctctgaccctaggcataaaggaaaaaaaaataagagaacttgtaaatakaaagtagaaaaagaaatctgccatattgaaagtatataagggcattgagttaaaataagtagtcctaacatttaaatatgtaagacattttaagatctttgaagtttctcagtggcaaatcctaggatctccttataatgctgaaaaagtctcactaactgacttactctttggaaaatgatggtaaaaattgtagatgattgtaacactgtgaaacctaggctgataaatccatttcaattcgatttattgaatcattgataatagatttttcctaacataattttttaaaaaatgaaatacctagcaattcccttatcattaacactgatataaatgacaacctgg

SEQ ID NO: 250439 - DNA, 567 bp, Homo sapiens
ccaaaaacacagattgtaaaacagtaggaaatggggaagttcattaagatgacacgtgggagccaacaggttacataagagtacaactgttatgcactccccataaaggaaaggattaattttaggtcctgctgaaccatgtaaaaggtgtaaattaaagaaaattatctctctgaccctaggcataaaggaaaaaaaaataagagaacttgtaaatagaaagtagaaaaagaaatctgccatattgaaagtatataagggcattgagttaaaataagtagtcctaacatttaaatatgtaagacattttaagatctttgaagtttctcagtggcaaatcctaggatctccttataatgctgaaaaagtctcactaactgacttactctttggaaaatgatggtaaaaattgtagatgattgtaacactgtgaaacctaggctgayaaatccatttcaattcgatttattgaatcattgataatagatttttcctaacataattttttaaaaaatgaaatacctagcaattcccttatcattaacactgatataaatgacaacctgg

SEQ ID NO: 250440 - DNA, 567 bp, Homo sapiens
ccaaaaacacagattgtaaaacagtaggaaatggggaagttcattaagatgacacgtgggagccaacaggttacataagagtacaactgttatgcactccccataaaggaaaggattaattttaggtcctgctgaaccatgtaaaaggtgtaaattaaagaaaattatctctctgaccctaggcataaaggaaaaaaaaataagagaacttgtaaatagaaagtagaaaaagaaatctgccatattgaaagtatataagggcattgagttaaaataagtagtcctaacatttaaatatgtaagacattttaagatctttgaagtttctcagtggcaaatcctaggatctccttataatgctgaaaaagtctcactaactgacttactctttggaaaatgatggtaaaaattgtagatgattgtaacactgtgaaacctaggctgataaatccatttcaattcgatttattgaatcattgataatagatttttcctaacataattttttaaaaaatgaaatacstagcaattcccttatcattaacactgatataaatgacaacctgg

SEQ ID NO: 250441 - DNA, 491 bp, Homo sapiens
cagttgacattagaacagaggctaagtttctatcctttcactcatttttattgtcactcatttctctaatatttctgtattgtttctatattggttcttatttaatatacatmcttctttactgaacatgtcagccgcttctttgctgatttgaggatttttataaaagagcaacaataaatcatcaagagttttaaatggggaaatggcatgactcaacctacgttttgcaaaaatgtgtccactgtatgaagaatggcataaaaggaagaaagaacagatgccaggagacacacaagtttgagatgacatagctaggagtagagtagggctctatagatggagagaagtagaaagatttaacatgtatttgaaggtacagtccacaagacttaaggataagtttgatgtgtgataagaaagaaaaagtaactcttggttttagcattttaccatctacggataattttattttgggtctttttttcttt

SEQ ID NO: 250442 - DNA, 547 bp, Homo sapiens
aaaattcttaacaattttggttgaaaatactttatttctgcaaacgacctgctttaatgtgtgtgtttgtgtgtgcgtgcgagcatggaaactgtttttatatgtgtatttctaaatgaacaacttctatagagcccctttcaagactttgaaagggacctgtgcaagcttatgctccattaacctcaaggtgaatctgactctgtctagcactctataattctatcaactaatccctaattttgaggatgagaggagttgggatgggagccttctcaaagcctctaacattacacracacaaagagctttctctatttcttgtttaatcttaaattttcttttttgaatttttaacttatattttaggttcaagtgtacatgtggaggttacacaggtaaactcatgtcacaagggtttattgtgcagcttgtcaccaagatactaagcctattgtccaattttttactttttcagatcttctccctcctcttaccctccacagtgaagtaggctccaatgactgttgttcccctctatgtgttca

SEQ ID NO: 250443 - DNA, 579 bp, Homo sapiens
gagtccagaaataaacccttaaatttacattcaattggttttcaacaaatacaccaagataattcaagagagaaagaagttttcaacaaatggtgctggggcaacaaacatccacatgtaaaagaatgaagttggacccctgtcacacatcacatataaaaattaactcaaaaataaatcaaagacctaaatgtaagagctaaacctataaatatatcagaacaaaatgccagtacacatcttttggggacttcaaattaggcaatggtttcttaggtgcaactctttagtgtcaaagcccaagaaaggaaacaaaaataaagtggactttatcaaaattaaaaaaggttgtgcttcaaaagacaccccaaggaagtgaaatgccaacmcacaaaatgagagaaggtattttcaaattatatatcttataaggaacttatatgcagaataaagaattcttacaattcaacaatacaaagacagtcaaattataaaatgggcaaaagattttaacagacatttctccaaagaagatgtatgaatgacaaataaggacatgaaggtcaacataattagtca

SEQ ID NO: 250444 - DNA, 620 bp, Homo sapiens
aacttaagtccacacaaacacttgtacctgaatagcagcattatttataacaaccagaaagtgcaaacaacccaaatgtccatcaacctatgaaagaatgaacagaatgtggtgtatccatacaataccatttgtcaacaaaaaagaatgaattactgacacacacaacacgtatggaccttgaaaacatcatgctaagtgaaagaagccaaactcaaaaggccacgtattatatgatcccgttaatgtataatatccagaatatggaaatctatacagatggaaagtagatttgtggtttccagggaygggggaaacaaggttgagaagaaggagtgactgctaattggtaaggctgatgatgtgttgtaaacttagattctgatgatagtcgcacacctttgtaaaaacactaaaaaccattgagctttatgtatgctgtaaattaatgagctttatggtgtgtaaattatatatcaatacagtgtttttagaaggatgttcatagcaatagtgtttgtaacaaaagaaaattgaaaataacctaaatatccatcaatagaacagataaataaacttgcatatttatactctgaaatatccacgtcaaagaaaatgaa

SEQ ID NO: 250445 - DNA, 530 bp, Homo sapiens
gctgtgttctgggggttagagaatgaccctgggcgcatctgggttctgctctgaactctgcccctttttcacaagtgggcgcaactttctttttctttctaagcctcaatttcctcaccgatagaataataaaaataatagcaattctgccataagattgttgtaaaattcaaatgagattatccaagtgaagtaaataacactacagggtatggagtaattcttgataaaaggcagtcattttaataatactgatgatagtataaacartcactatttccatggttttttctagctttaacagataggacaagttatgcactattcctgagcctgtttcctctgctgtaaagttatgcctgctttcagagggtgactgtaagaatgtttataaaccatgtggaaggaatctagcagagtatctagaacatagtaggtacacagcaccccccacccccaacactttgcacctctgtatttatttcgctgggaaaagccacctcggagtatttattctgtgaggagagtca

SEQ ID NO: 250446 - DNA, 566 bp, Homo sapiens
attcagctcaactctttcaatcatcggaactatggatgggggaatgaactgccccaggaagtttgagttcctcaagactggaggtatgtaagcagagcctggtggaccaacaccctgcagggatgccataggctgggtgattccaaaggcaaatggggggtcttgacttagatggcttatggtcccttttaggcctgggagaagctgattctagaaaatcgagtctgtccaacctaccaacacaattccagctttggtttgctctgcccttcttctttgtgccaagaagccctgaccacagctggggggtaacagtgagctactgggtcagacaatctgctgtgggagacaagtgggctgtgctcaatgcctggttgctttgggccagaagtcaaattcgaggctcagaaatgggagcctggtagggccagggcagccagcagctgcctggggcccaagcttccttcatcaagtgatagcacatttttcttccaggaaagaaaacagcatttttgctttttcctaaaytgcaaggcacggtccataggtggggtcatgaaattgat
